United States Patent Application Publication US 2014/0004565 A1 - sequence listing, part 31

SEQ ID NO: 673642 - RNA, 19 nt, Artificial Sequence
  Description of Artificial Sequence: Synthetic oligonucleotide
agagcgggagcacguaaag

SEQ ID NO: 673643 - RNA, 19 nt, Artificial Sequence
  Description of Artificial Sequence: Synthetic oligonucleotide
agagccuagggccuccucu

SEQ ID NO: 673644 - RNA, 19 nt, Artificial Sequence
  Description of Artificial Sequence: Synthetic oligonucleotide
agaguagagcgggagcacg

SEQ ID NO: 673645 - RNA, 19 nt, Artificial Sequence
  Description of Artificial Sequence: Synthetic oligonucleotide
cuuuccgaggugcuugcag

SEQ ID NO: 673646 - RNA, 19 nt, Artificial Sequence
  Description of Artificial Sequence: Synthetic oligonucleotide
ucgguagaacacacuggcc

SEQ ID NO: 673647 - RNA, 19 nt, Artificial Sequence
  Description of Artificial Sequence: Synthetic oligonucleotide
uggacauaguccgucccag

SEQ ID NO: 673648 - RNA, 19 nt, Artificial Sequence
  Description of Artificial Sequence: Synthetic oligonucleotide
ugguucugaauugagccaa

SEQ ID NO: 673649 - RNA, 19 nt, Artificial Sequence
  Description of Artificial Sequence: Synthetic oligonucleotide
uccuaguaacagccuagga

SEQ ID NO: 673650 - RNA, 19 nt, Artificial Sequence
  Description of Artificial Sequence: Synthetic oligonucleotide
ggacacgccugucacacgg

SEQ ID NO: 673651 - RNA, 19 nt, Artificial Sequence
  Description of Artificial Sequence: Synthetic oligonucleotide
uaaccuucucgauguugag

SEQ ID NO: 673652 - RNA, 19 nt, Artificial Sequence
  Description of Artificial Sequence: Synthetic oligonucleotide
uuccgaggugcuugcagag

SEQ ID NO: 673653 - RNA, 19 nt, Artificial Sequence
  Description of Artificial Sequence: Synthetic oligonucleotide
agcacguaaaggggcaggg

SEQ ID NO: 673654 - RNA, 19 nt, Artificial Sequence
  Description of Artificial Sequence: Synthetic oligonucleotide
cuuucauguacauuuuggu

SEQ ID NO: 673655 - RNA, 19 nt, Artificial Sequence
  Description of Artificial Sequence: Synthetic oligonucleotide
gaugccuggggagacccag

SEQ ID NO: 673656 - RNA, 19 nt, Artificial Sequence
  Description of Artificial Sequence: Synthetic oligonucleotide
cuggaggaggucugaagac

SEQ ID NO: 673657 - RNA, 19 nt, Artificial Sequence
  Description of Artificial Sequence: Synthetic oligonucleotide
ucagugugcauagccuuug

SEQ ID NO: 673658 - RNA, 19 nt, Artificial Sequence
  Description of Artificial Sequence: Synthetic oligonucleotide
auggucagggacguuucgg

SEQ ID NO: 673659 - RNA, 19 nt, Artificial Sequence
  Description of Artificial Sequence: Synthetic oligonucleotide
uuugggagccacucacagu

SEQ ID NO: 673660 - RNA, 19 nt, Artificial Sequence
  Description of Artificial Sequence: Synthetic oligonucleotide
acucgguagaacacacugg

SEQ ID NO: 673661 - RNA, 19 nt, Artificial Sequence
  Description of Artificial Sequence: Synthetic oligonucleotide
agcuccgcuucacuggcag

SEQ ID NO: 673662 - RNA, 19 nt, Artificial Sequence
  Description of Artificial Sequence: Synthetic oligonucleotide
ucagggacguuucggccac

SEQ ID NO: 673663 - RNA, 19 nt, Artificial Sequence
  Description of Artificial Sequence: Synthetic oligonucleotide
uucuuuccgaggugcuugc

SEQ ID NO: 673664 - RNA, 19 nt, Artificial Sequence
  Description of Artificial Sequence: Synthetic oligonucleotide
cagccuacucgguagaaca

SEQ ID NO: 673665 - RNA, 19 nt, Artificial Sequence
  Description of Artificial Sequence: Synthetic oligonucleotide
uuccucaaaggagcucacg

SEQ ID NO: 673666 - RNA, 19 nt, Artificial Sequence
  Description of Artificial Sequence: Synthetic oligonucleotide
acggaaggaggacacgccu

SEQ ID NO: 673667 - RNA, 19 nt, Artificial Sequence
  Description of Artificial Sequence: Synthetic oligonucleotide
cauaguccgucccagugca

SEQ ID NO: 673668 - RNA, 19 nt, Artificial Sequence
  Description of Artificial Sequence: Synthetic oligonucleotide
ccaagcuucagagaugccc

SEQ ID NO: 673669 - RNA, 19 nt, Artificial Sequence
  Description of Artificial Sequence: Synthetic oligonucleotide
auaggcucuccguccuggg

SEQ ID NO: 673670 - RNA, 19 nt, Artificial Sequence
  Description of Artificial Sequence: Synthetic oligonucleotide
ugcucaccuucauuugucu

SEQ ID NO: 673671 - RNA, 19 nt, Artificial Sequence
  Description of Artificial Sequence: Synthetic oligonucleotide
uaucgcaguccauuagcau

SEQ ID NO: 673672 - RNA, 19 nt, Artificial Sequence
  Description of Artificial Sequence: Synthetic oligonucleotide
gcaucgaacuggcaauagg

SEQ ID NO: 673673 - RNA, 19 nt, Artificial Sequence
  Description of Artificial Sequence: Synthetic oligonucleotide
acacgccugucacacgguc

SEQ ID NO: 673674 - RNA, 19 nt, Artificial Sequence
  Description of Artificial Sequence: Synthetic oligonucleotide
guagaacacacuggcccgg

SEQ ID NO: 673675 - RNA, 19 nt, Artificial Sequence
  Description of Artificial Sequence: Synthetic oligonucleotide
cacgccugucacacggucg

SEQ ID NO: 673676 - RNA, 19 nt, Artificial Sequence
  Description of Artificial Sequence: Synthetic oligonucleotide
gcaacgagggccuccacug

SEQ ID NO: 673677 - RNA, 19 nt, Artificial Sequence
  Description of Artificial Sequence: Synthetic oligonucleotide
ucgauguugagggcuuuca

SEQ ID NO: 673678 - RNA, 19 nt, Artificial Sequence
  Description of Artificial Sequence: Synthetic oligonucleotide
cacugcauugacugcggug

SEQ ID NO: 673679 - RNA, 19 nt, Artificial Sequence
  Description of Artificial Sequence: Synthetic oligonucleotide
agaaaccgugcaaaguacu

SEQ ID NO: 673680 - RNA, 19 nt, Artificial Sequence
  Description of Artificial Sequence: Synthetic oligonucleotide
cuuucaauaggcucuccgu

SEQ ID NO: 673681 - RNA, 19 nt, Artificial Sequence
  Description of Artificial Sequence: Synthetic oligonucleotide
gauguugagggcuuucauu

SEQ ID NO: 673682 - RNA, 19 nt, Artificial Sequence
  Description of Artificial Sequence: Synthetic oligonucleotide
acgggagucugccuucuca

SEQ ID NO: 673683 - RNA, 19 nt, Artificial Sequence
  Description of Artificial Sequence: Synthetic oligonucleotide
gagcgggagcacguaaagg

SEQ ID NO: 673684 - RNA, 19 nt, Artificial Sequence
  Description of Artificial Sequence: Synthetic oligonucleotide
cgguagaacacacuggccc

SEQ ID NO: 673685 - RNA, 19 nt, Artificial Sequence
  Description of Artificial Sequence: Synthetic oligonucleotide
acgaccugcccgcugguca

SEQ ID NO: 673686 - RNA, 19 nt, Artificial Sequence
  Description of Artificial Sequence: Synthetic oligonucleotide
gcagaaaccgugcaaagua

SEQ ID NO: 673687 - RNA, 19 nt, Artificial Sequence
  Description of Artificial Sequence: Synthetic oligonucleotide
acgguggagacaccuuuca

SEQ ID NO: 673688 - RNA, 19 nt, Artificial Sequence
  Description of Artificial Sequence: Synthetic oligonucleotide
gcucuguccggccugcacg

SEQ ID NO: 673689 - RNA, 19 nt, Artificial Sequence
  Description of Artificial Sequence: Synthetic oligonucleotide
ggagccagcugacuguagc

SEQ ID NO: 673690 - RNA, 19 nt, Artificial Sequence
  Description of Artificial Sequence: Synthetic oligonucleotide
gucacacggucguaauagc

SEQ ID NO: 673691 - RNA, 19 nt, Artificial Sequence
  Description of Artificial Sequence: Synthetic oligonucleotide
auacagccuauagcagugg

SEQ ID NO: 673692 - RNA, 19 nt, Artificial Sequence
  Description of Artificial Sequence: Synthetic oligonucleotide
agugugguuccuaguaaca

SEQ ID NO: 673693 - RNA, 19 nt, Artificial Sequence
  Description of Artificial Sequence: Synthetic oligonucleotide
uggccuuguaucgcagucc

SEQ ID NO: 673694 - RNA, 19 nt, Artificial Sequence
  Description of Artificial Sequence: Synthetic oligonucleotide
ugcgguggucagcuggcca

SEQ ID NO: 673695 - RNA, 19 nt, Artificial Sequence
  Description of Artificial Sequence: Synthetic oligonucleotide
agccagcaaguaucugggg

SEQ ID NO: 673696 - RNA, 19 nt, Artificial Sequence
  Description of Artificial Sequence: Synthetic oligonucleotide
acacggucguaauagcguu

SEQ ID NO: 673697 - RNA, 19 nt, Artificial Sequence
  Description of Artificial Sequence: Synthetic oligonucleotide
cuggggcuagacagcaggc

SEQ ID NO: 673698 - RNA, 19 nt, Artificial Sequence
  Description of Artificial Sequence: Synthetic oligonucleotide
gacacggaaggaggacacg

SEQ ID NO: 673699 - RNA, 19 nt, Artificial Sequence
  Description of Artificial Sequence: Synthetic oligonucleotide
uugguggccacgacgcaua

SEQ ID NO: 673700 - RNA, 19 nt, Artificial Sequence
  Description of Artificial Sequence: Synthetic oligonucleotide
gcaaagaguagagcgggag

SEQ ID NO: 673701 - RNA, 19 nt, Artificial Sequence
  Description of Artificial Sequence: Synthetic oligonucleotide
ggaaugggaaguugauaac

SEQ ID NO: 673702 - RNA, 19 nt, Artificial Sequence
  Description of Artificial Sequence: Synthetic oligonucleotide
cuuguaucgcaguccauua

SEQ ID NO: 673703 - RNA, 19 nt, Artificial Sequence
  Description of Artificial Sequence: Synthetic oligonucleotide
gcagccggaguacucacag

SEQ ID NO: 673704 - RNA, 19 nt, Artificial Sequence
  Description of Artificial Sequence: Synthetic oligonucleotide
agacccaggugacacggaa

SEQ ID NO: 673705 - RNA, 19 nt, Artificial Sequence
  Description of Artificial Sequence: Synthetic oligonucleotide
gccacaagggcuuucaaua

SEQ ID NO: 673706 - RNA, 19 nt, Artificial Sequence
  Description of Artificial Sequence: Synthetic oligonucleotide
cuauuuccugguagaccac

SEQ ID NO: 673707 - RNA, 19 nt, Artificial Sequence
  Description of Artificial Sequence: Synthetic oligonucleotide
ggcaaugguauaggguagg

SEQ ID NO: 673708 - RNA, 19 nt, Artificial Sequence
  Description of Artificial Sequence: Synthetic oligonucleotide
cgacgcauagccuuguccc

SEQ ID NO: 673709 - RNA, 19 nt, Artificial Sequence
  Description of Artificial Sequence: Synthetic oligonucleotide
uaguccgucccagugcagu

SEQ ID NO: 673710 - RNA, 19 nt, Artificial Sequence
  Description of Artificial Sequence: Synthetic oligonucleotide
guaucgcaguccauuagca

SEQ ID NO: 673711 - RNA, 19 nt, Artificial Sequence
  Description of Artificial Sequence: Synthetic oligonucleotide
cccaguagcaccaugaggu

SEQ ID NO: 673712 - RNA, 19 nt, Artificial Sequence
  Description of Artificial Sequence: Synthetic oligonucleotide
agccuacucgguagaacac

SEQ ID NO: 673713 - RNA, 19 nt, Artificial Sequence
  Description of Artificial Sequence: Synthetic oligonucleotide
cuggugcacagaguaacug

SEQ ID NO: 673714 - RNA, 19 nt, Artificial Sequence
  Description of Artificial Sequence: Synthetic oligonucleotide
guacucacaggcucccaca

SEQ ID NO: 673715 - RNA, 19 nt, Artificial Sequence
  Description of Artificial Sequence: Synthetic oligonucleotide
ggucaaugccuucaggaaa

SEQ ID NO: 673716 - RNA, 19 nt, Artificial Sequence
  Description of Artificial Sequence: Synthetic oligonucleotide
uagcauggccuuguaucgc

SEQ ID NO: 673717 - RNA, 19 nt, Artificial Sequence
  Description of Artificial Sequence: Synthetic oligonucleotide
ggucagcagucaguuaugg

SEQ ID NO: 673718 - RNA, 19 nt, Artificial Sequence
  Description of Artificial Sequence: Synthetic oligonucleotide
gagacaccuuucauguaca

SEQ ID NO: 673719 - RNA, 19 nt, Artificial Sequence
  Description of Artificial Sequence: Synthetic oligonucleotide
cgucggaucucuagcaugg

SEQ ID NO: 673720 - RNA, 19 nt, Artificial Sequence
  Description of Artificial Sequence: Synthetic oligonucleotide
uggggcuagacagcaggca

SEQ ID NO: 673721 - RNA, 19 nt, Artificial Sequence
  Description of Artificial Sequence: Synthetic oligonucleotide
aggggcgcaucgaacuggc

SEQ ID NO: 673722 - RNA, 19 nt, Artificial Sequence
  Description of Artificial Sequence: Synthetic oligonucleotide
agcggcaacgagggccucc

SEQ ID NO: 673723 - RNA, 19 nt, Artificial Sequence
  Description of Artificial Sequence: Synthetic oligonucleotide
cagggcacacugcauugac

SEQ ID NO: 673724 - RNA, 19 nt, Artificial Sequence
  Description of Artificial Sequence: Synthetic oligonucleotide
ggcucgacggcccuucagc

SEQ ID NO: 673725 - RNA, 19 nt, Artificial Sequence
  Description of Artificial Sequence: Synthetic oligonucleotide
ccuacucgguagaacacac

SEQ ID NO: 673726 - RNA, 19 nt, Artificial Sequence
  Description of Artificial Sequence: Synthetic oligonucleotide
acccguccugacucuggac

SEQ ID NO: 673727 - RNA, 19 nt, Artificial Sequence
  Description of Artificial Sequence: Synthetic oligonucleotide
gccuauagcaguggccugg

SEQ ID NO: 673728 - RNA, 19 nt, Artificial Sequence
  Description of Artificial Sequence: Synthetic oligonucleotide
ccacaagggcuuucaauag

SEQ ID NO: 673729 - RNA, 19 nt, Artificial Sequence
  Description of Artificial Sequence: Synthetic oligonucleotide
ggcaauaggagggcagcag

SEQ ID NO: 673730 - RNA, 19 nt, Artificial Sequence
  Description of Artificial Sequence: Synthetic oligonucleotide
agcagggcaucacgggagu

SEQ ID NO: 673731 - RNA, 19 nt, Artificial Sequence
  Description of Artificial Sequence: Synthetic oligonucleotide
cacgguggagacaccuuuc

SEQ ID NO: 673732 - RNA, 19 nt, Artificial Sequence
  Description of Artificial Sequence: Synthetic oligonucleotide
ggcccaagucuucagcaug

SEQ ID NO: 673733 - RNA, 19 nt, Artificial Sequence
  Description of Artificial Sequence: Synthetic oligonucleotide
acgucagugugcauagccu

SEQ ID NO: 673734 - RNA, 19 nt, Artificial Sequence
  Description of Artificial Sequence: Synthetic oligonucleotide
agacaccuuucauguacau

SEQ ID NO: 673735 - RNA, 19 nt, Artificial Sequence
  Description of Artificial Sequence: Synthetic oligonucleotide
ugcagcuagcagggcauca

SEQ ID NO: 673736 - RNA, 19 nt, Artificial Sequence
  Description of Artificial Sequence: Synthetic oligonucleotide
cuguccggccugcacgacc

SEQ ID NO: 673737 - RNA, 19 nt, Artificial Sequence
  Description of Artificial Sequence: Synthetic oligonucleotide
agccuauagcaguggccug

SEQ ID NO: 673738 - RNA, 19 nt, Artificial Sequence
  Description of Artificial Sequence: Synthetic oligonucleotide
ggugcacagaguaacuguc

SEQ ID NO: 673739 - RNA, 19 nt, Artificial Sequence
  Description of Artificial Sequence: Synthetic oligonucleotide
cacacggucguaauagcgu

SEQ ID NO: 673740 - RNA, 19 nt, Artificial Sequence
  Description of Artificial Sequence: Synthetic oligonucleotide
caggggcgcaucgaacugg

SEQ ID NO: 673741 - RNA, 19 nt, Artificial Sequence
  Description of Artificial Sequence: Synthetic oligonucleotide
caaugguauaggguaggca

SEQ ID NO: 673742 - RNA, 19 nt, Artificial Sequence
  Description of Artificial Sequence: Synthetic oligonucleotide
  modified_base (19)..(19): a, c, u, g, unknown or other
guucugaauugagccaagn

SEQ ID NO: 673743 - RNA, 19 nt, Artificial Sequence
  Description of Artificial Sequence: Synthetic oligonucleotide
ugcaguaauggggcagcuc

SEQ ID NO: 673744 - RNA, 19 nt, Artificial Sequence
  Description of Artificial Sequence: Synthetic oligonucleotide
gguuccuaguaacagccua

SEQ ID NO: 673745 - RNA, 19 nt, Artificial Sequence
  Description of Artificial Sequence: Synthetic oligonucleotide
uucagccagcaaguaucug

SEQ ID NO: 673746 - RNA, 19 nt, Artificial Sequence
  Description of Artificial Sequence: Synthetic oligonucleotide
uagcggggugccacgggga

SEQ ID NO: 673747 - RNA, 19 nt, Artificial Sequence
  Description of Artificial Sequence: Synthetic oligonucleotide
cagugcuagcaucuuggca

SEQ ID NO: 673748 - RNA, 19 nt, Artificial Sequence
  Description of Artificial Sequence: Synthetic oligonucleotide
cacacuggcccgguggcac

SEQ ID NO: 673749 - RNA, 19 nt, Artificial Sequence
  Description of Artificial Sequence: Synthetic oligonucleotide
cagccggaguacucacagg

SEQ ID NO: 673750 - RNA, 19 nt, Artificial Sequence
  Description of Artificial Sequence: Synthetic oligonucleotide
ggauuuccacgguggagac

SEQ ID NO: 673751 - RNA, 19 nt, Artificial Sequence
  Description of Artificial Sequence: Synthetic oligonucleotide
ugcauugacugcggugguc

SEQ ID NO: 673752 - RNA, 19 nt, Artificial Sequence
  Description of Artificial Sequence: Synthetic oligonucleotide
guauaggguaggcagccau

SEQ ID NO: 673753 - RNA, 19 nt, Artificial Sequence
  Description of Artificial Sequence: Synthetic oligonucleotide
acacugcauugacugcggu

SEQ ID NO: 673754 - RNA, 19 nt, Artificial Sequence
  Description of Artificial Sequence: Synthetic oligonucleotide
ggccuuguaucgcagucca

SEQ ID NO: 673755 - RNA, 19 nt, Artificial Sequence
  Description of Artificial Sequence: Synthetic oligonucleotide
ggaggaaauugcucaaagu

SEQ ID NO: 673756 - RNA, 19 nt, Artificial Sequence
  Description of Artificial Sequence: Synthetic oligonucleotide
acggucguaauagcguuuu

SEQ ID NO: 673757 - RNA, 19 nt, Artificial Sequence
  Description of Artificial Sequence: Synthetic oligonucleotide
guagagcgggagcacguaa

SEQ ID NO: 673758 - RNA, 19 nt, Artificial Sequence
  Description of Artificial Sequence: Synthetic oligonucleotide
cucgacggcccuucagcuc

SEQ ID NO: 673759 - RNA, 19 nt, Artificial Sequence
  Description of Artificial Sequence: Synthetic oligonucleotide
uggagacaccuuucaugua

SEQ ID NO: 673760 - RNA, 19 nt, Artificial Sequence
  Description of Artificial Sequence: Synthetic oligonucleotide
caauaggcucuccguccug

SEQ ID NO: 673761 - RNA, 19 nt, Artificial Sequence
  Description of Artificial Sequence: Synthetic oligonucleotide
cagccuauagcaguggccu

SEQ ID NO: 673762 - RNA, 19 nt, Artificial Sequence
  Description of Artificial Sequence: Synthetic oligonucleotide
gcgucggaucucuagcaug

SEQ ID NO: 673763 - RNA, 19 nt, Artificial Sequence
  Description of Artificial Sequence: Synthetic oligonucleotide
gcgggagcacguaaagggg

SEQ ID NO: 673764 - RNA, 19 nt, Artificial Sequence
  Description of Artificial Sequence: Synthetic oligonucleotide
gcaaugguauaggguaggc

SEQ ID NO: 673765 - RNA, 19 nt, Artificial Sequence
  Description of Artificial Sequence: Synthetic oligonucleotide
cucuguccggccugcacga

SEQ ID NO: 673766 - RNA, 19 nt, Artificial Sequence
  Description of Artificial Sequence: Synthetic oligonucleotide
gauuuccacgguggagaca

SEQ ID NO: 673767 - RNA, 19 nt, Artificial Sequence
  Description of Artificial Sequence: Synthetic oligonucleotide
ucuuuccgaggugcuugca

SEQ ID NO: 673768 - RNA, 19 nt, Artificial Sequence
  Description of Artificial Sequence: Synthetic oligonucleotide
cgucccagugcaguaaugg

SEQ ID NO: 673769 - RNA, 19 nt, Artificial Sequence
  Description of Artificial Sequence: Synthetic oligonucleotide
gaaaccgugcaaaguacuu

SEQ ID NO: 673770 - RNA, 19 nt, Artificial Sequence
  Description of Artificial Sequence: Synthetic oligonucleotide
ugggagccacucacaguau

SEQ ID NO: 673771 - RNA, 19 nt, Artificial Sequence
  Description of Artificial Sequence: Synthetic oligonucleotide
gggccagcaaagaguagag

SEQ ID NO: 673772 - RNA, 19 nt, Artificial Sequence
  Description of Artificial Sequence: Synthetic oligonucleotide
ggugacacggaaggaggac

SEQ ID NO: 673773 - RNA, 19 nt, Artificial Sequence
  Description of Artificial Sequence: Synthetic oligonucleotide
acgggcucgacggcccuuc

SEQ ID NO: 673774 - RNA, 19 nt, Artificial Sequence
  Description of Artificial Sequence: Synthetic oligonucleotide
cacucacaguauucagcca

SEQ ID NO: 673775 - RNA, 19 nt, Artificial Sequence
  Description of Artificial Sequence: Synthetic oligonucleotide
gggcgcaucgaacuggcaa

SEQ ID NO: 673776 - RNA, 19 nt, Artificial Sequence
  Description of Artificial Sequence: Synthetic oligonucleotide
ucccuguccucaucgccuu

SEQ ID NO: 673777 - RNA, 19 nt, Artificial Sequence
  Description of Artificial Sequence: Synthetic oligonucleotide
cuggucugcgagugaucuc

SEQ ID NO: 673778 - RNA, 19 nt, Artificial Sequence
  Description of Artificial Sequence: Synthetic oligonucleotide
ucacgggagucugccuucu

SEQ ID NO: 673779 - RNA, 19 nt, Artificial Sequence
  Description of Artificial Sequence: Synthetic oligonucleotide
guugcagccuggcccaagu

SEQ ID NO: 673780 - RNA, 19 nt, Artificial Sequence
  Description of Artificial Sequence: Synthetic oligonucleotide
cacuggucugcgagugauc

SEQ ID NO: 673781 - RNA, 19 nt, Artificial Sequence
  Description of Artificial Sequence: Synthetic oligonucleotide
ugacuguagcugggugugu

SEQ ID NO: 673782 - RNA, 19 nt, Artificial Sequence
  Description of Artificial Sequence: Synthetic oligonucleotide
cugcccgcuggucagcaga

SEQ ID NO: 673783 - RNA, 19 nt, Artificial Sequence
  Description of Artificial Sequence: Synthetic oligonucleotide
agcggggugccacggggaa

SEQ ID NO: 673784 - RNA, 19 nt, Artificial Sequence
  Description of Artificial Sequence: Synthetic oligonucleotide
guccauuagcauggcaaaa

SEQ ID NO: 673785 - RNA, 19 nt, Artificial Sequence
  Description of Artificial Sequence: Synthetic oligonucleotide
gcgguggucagcuggccac

SEQ ID NO: 673786 - RNA, 19 nt, Artificial Sequence
  Description of Artificial Sequence: Synthetic oligonucleotide
gccagcaaguaucuggggu

SEQ ID NO: 673787 - RNA, 19 nt, Artificial Sequence
  Description of Artificial Sequence: Synthetic oligonucleotide
aguagagcgggagcacgua

SEQ ID NO: 673788 - RNA, 19 nt, Artificial Sequence
  Description of Artificial Sequence: Synthetic oligonucleotide
cauuugggccacacgggcu

SEQ ID NO: 673789 - RNA, 19 nt, Artificial Sequence
  Description of Artificial Sequence: Synthetic oligonucleotide
cgggagcacguaaaggggc

SEQ ID NO: 673790 - RNA, 19 nt, Artificial Sequence
  Description of Artificial Sequence: Synthetic oligonucleotide
acuggcccgguggcacagc

SEQ ID NO: 673791 - RNA, 19 nt, Artificial Sequence
  Description of Artificial Sequence: Synthetic oligonucleotide
cugagggagguguggggaa

SEQ ID NO: 673792 - RNA, 19 nt, Artificial Sequence
  Description of Artificial Sequence: Synthetic oligonucleotide
gcacccaguagcaccauga

SEQ ID NO: 673793 - RNA, 19 nt, Artificial Sequence
  Description of Artificial Sequence: Synthetic oligonucleotide
gucggaucucuagcauggc

SEQ ID NO: 673794 - RNA, 19 nt, Artificial Sequence
  Description of Artificial Sequence: Synthetic oligonucleotide
caagggcuuucaauaggcu

SEQ ID NO: 673795 - RNA, 19 nt, Artificial Sequence
  Description of Artificial Sequence: Synthetic oligonucleotide
ggggccagcucuucucaac

SEQ ID NO: 673796 - RNA, 19 nt, Artificial Sequence
  Description of Artificial Sequence: Synthetic oligonucleotide
caacgucagugugcauagc

SEQ ID NO: 673797 - RNA, 19 nt, Artificial Sequence
  Description of Artificial Sequence: Synthetic oligonucleotide
ugacugcgguggucagcug

SEQ ID NO: 673798 - RNA, 19 nt, Artificial Sequence
  Description of Artificial Sequence: Synthetic oligonucleotide
ccacuggauuuccacggug

SEQ ID NO: 673799 - RNA, 19 nt, Artificial Sequence
  Description of Artificial Sequence: Synthetic oligonucleotide
cccguccugacucuggaca

SEQ ID NO: 673800 - RNA, 19 nt, Artificial Sequence
  Description of Artificial Sequence: Synthetic oligonucleotide
ccucaaaggagcucacgaa

SEQ ID NO: 673801 - RNA, 19 nt, Artificial Sequence
  Description of Artificial Sequence: Synthetic oligonucleotide
gggccacacgggcucgacg

SEQ ID NO: 673802 - RNA, 19 nt, Artificial Sequence
  Description of Artificial Sequence: Synthetic oligonucleotide
cacgacgcauagccuuguc

SEQ ID NO: 673803 - RNA, 19 nt, Artificial Sequence
  Description of Artificial Sequence: Synthetic oligonucleotide
gcagcuagcagggcaucac

SEQ ID NO: 673804 - RNA, 19 nt, Artificial Sequence
  Description of Artificial Sequence: Synthetic oligonucleotide
cugucacacggucguaaua

SEQ ID NO: 673805 - RNA, 19 nt, Artificial Sequence
  Description of Artificial Sequence: Synthetic oligonucleotide
caacgagggccuccacuga

SEQ ID NO: 673806 - RNA, 19 nt, Artificial Sequence
  Description of Artificial Sequence: Synthetic oligonucleotide
gggagcacguaaaggggca

SEQ ID NO: 673807 - RNA, 19 nt, Artificial Sequence
  Description of Artificial Sequence: Synthetic oligonucleotide
gccuacucgguagaacaca

SEQ ID NO: 673808 - RNA, 19 nt, Artificial Sequence
  Description of Artificial Sequence: Synthetic oligonucleotide
ccgcuucacuggcagcugg

SEQ ID NO: 673809 - RNA, 19 nt, Artificial Sequence
  Description of Artificial Sequence: Synthetic oligonucleotide
gagccuagggccuccucuu

SEQ ID NO: 673810 - RNA, 19 nt, Artificial Sequence
  Description of Artificial Sequence: Synthetic oligonucleotide
agcagccggaguacucaca

SEQ ID NO: 673811 - RNA, 19 nt, Artificial Sequence
  Description of Artificial Sequence: Synthetic oligonucleotide
cuacucgguagaacacacu

SEQ ID NO: 673812 - RNA, 19 nt, Artificial Sequence
  Description of Artificial Sequence: Synthetic oligonucleotide
cauggccuuguaucgcagu

SEQ ID NO: 673813 - RNA, 19 nt, Artificial Sequence
  Description of Artificial Sequence: Synthetic oligonucleotide
aagcuccgcuucacuggca

SEQ ID NO: 673814 - RNA, 19 nt, Artificial Sequence
  Description of Artificial Sequence: Synthetic oligonucleotide
gccacggaggcgucggauc

SEQ ID NO: 673815 - RNA, 19 nt, Artificial Sequence
  Description of Artificial Sequence: Synthetic oligonucleotide
agggacguuucggccacau

SEQ ID NO: 673816 - RNA, 19 nt, Artificial Sequence
  Description of Artificial Sequence: Synthetic oligonucleotide
gggaguggccagccuacuc

SEQ ID NO: 673817 - RNA, 19 nt, Artificial Sequence
  Description of Artificial Sequence: Synthetic oligonucleotide
ggcgcaucgaacuggcaau

SEQ ID NO: 673818 - RNA, 19 nt, Artificial Sequence
  Description of Artificial Sequence: Synthetic oligonucleotide
agcaaguaucugggguuuu

SEQ ID NO: 673819 - RNA, 19 nt, Artificial Sequence
  Description of Artificial Sequence: Synthetic oligonucleotide
ucuguccggccugcacgac

SEQ ID NO: 673820 - RNA, 19 nt, Artificial Sequence
  Description of Artificial Sequence: Synthetic oligonucleotide
gccacgacgcauagccuug

SEQ ID NO: 673821 - RNA, 19 nt, Artificial Sequence
  Description of Artificial Sequence: Synthetic oligonucleotide
ggcaacgagggccuccacu

SEQ ID NO: 673822 - RNA, 19 nt, Artificial Sequence
  Description of Artificial Sequence: Synthetic oligonucleotide
gcaguccauuagcauggca

SEQ ID NO: 673823 - RNA, 19 nt, Artificial Sequence
  Description of Artificial Sequence: Synthetic oligonucleotide
cacagcacccguccugacu

SEQ ID NO: 673824 - RNA, 19 nt, Artificial Sequence
  Description of Artificial Sequence: Synthetic oligonucleotide
gccacggggaagguggaca

SEQ ID NO: 673825 - RNA, 19 nt, Artificial Sequence
  Description of Artificial Sequence: Synthetic oligonucleotide
cugcgguggucagcuggcc

SEQ ID NO: 673826 - RNA, 19 nt, Artificial Sequence
  Description of Artificial Sequence: Synthetic oligonucleotide
agggaguggccagccuacu

SEQ ID NO: 673827 - RNA, 19 nt, Artificial Sequence
  Description of Artificial Sequence: Synthetic oligonucleotide
ccagccuacucgguagaac

SEQ ID NO: 673828 - RNA, 19 nt, Artificial Sequence
  Description of Artificial Sequence: Synthetic oligonucleotide
gcacccguccugacucugg

SEQ ID NO: 673829 - RNA, 19 nt, Artificial Sequence
  Description of Artificial Sequence: Synthetic oligonucleotide
gggcucgacggcccuucag

SEQ ID NO: 673830 - RNA, 19 nt, Artificial Sequence
  Description of Artificial Sequence: Synthetic oligonucleotide
cagagccuagggccuccuc

SEQ ID NO: 673831 - RNA, 19 nt, Artificial Sequence
  Description of Artificial Sequence: Synthetic oligonucleotide
gacggcccuucagcucugc

SEQ ID NO: 673832 - RNA, 19 nt, Artificial Sequence
  Description of Artificial Sequence: Synthetic oligonucleotide
accugcccgcuggucagca

SEQ ID NO: 673833 - RNA, 19 nt, Artificial Sequence
  Description of Artificial Sequence: Synthetic oligonucleotide
gguugcagccuggcccaag

SEQ ID NO: 673834 - RNA, 19 nt, Artificial Sequence
  Description of Artificial Sequence: Synthetic oligonucleotide
accgugcaaaguacuugua

SEQ ID NO: 673835 - RNA, 19 nt, Artificial Sequence
  Description of Artificial Sequence: Synthetic oligonucleotide
gcuccgcuucacuggcagc

SEQ ID NO: 673836 - RNA, 19 nt, Artificial Sequence
  Description of Artificial Sequence: Synthetic oligonucleotide
ggcuagacagcaggcagcu

SEQ ID NO: 673837 - RNA, 19 nt, Artificial Sequence
  Description of Artificial Sequence: Synthetic oligonucleotide
cacgggagucugccuucuc

SEQ ID NO: 673838 - RNA, 19 nt, Artificial Sequence
  Description of Artificial Sequence: Synthetic oligonucleotide
ccacacgggcucgacggcc

SEQ ID NO: 673839 - RNA, 19 nt, Artificial Sequence
  Description of Artificial Sequence: Synthetic oligonucleotide
ggcuuucaauaggcucucc

SEQ ID NO: 673840 - RNA, 19 nt, Artificial Sequence
  Description of Artificial Sequence: Synthetic oligonucleotide
ggccacgacgcauagccuu

SEQ ID NO: 673841 - RNA, 19 nt, Artificial Sequence
  Description of Artificial Sequence: Synthetic oligonucleotide
caggaaagucaaccuggau

SEQ ID NO: 673842 - RNA, 19 nt, Artificial Sequence
  Description of Artificial Sequence: Synthetic oligonucleotide
ggggaggaaauugcucaaa

SEQ ID NO: 673843 - RNA, 19 nt, Artificial Sequence
  Description of Artificial Sequence: Synthetic oligonucleotide
cacggaggcgucggaucuc

SEQ ID NO: 673844 - RNA, 19 nt, Artificial Sequence
  Description of Artificial Sequence: Synthetic oligonucleotide
cacgaccugcccgcugguc

SEQ ID NO: 673845 - RNA, 19 nt, Artificial Sequence
  Description of Artificial Sequence: Synthetic oligonucleotide
gggauggucagggacguuu

SEQ ID NO: 673846 - RNA, 19 nt, Artificial Sequence
  Description of Artificial Sequence: Synthetic oligonucleotide
gcacguaaaggggcaggga

SEQ ID NO: 673847 - RNA, 19 nt, Artificial Sequence
  Description of Artificial Sequence: Synthetic oligonucleotide
cgggccagcaaagaguaga

SEQ ID NO: 673848 - RNA, 19 nt, Artificial Sequence
  Description of Artificial Sequence: Synthetic oligonucleotide
ccacauugguggccacgac

SEQ ID NO: 673849 - RNA, 19 nt, Artificial Sequence
  Description of Artificial Sequence: Synthetic oligonucleotide
gcucgacggcccuucagcu

SEQ ID NO: 673850 - RNA, 19 nt, Artificial Sequence
  Description of Artificial Sequence: Synthetic oligonucleotide
cgcaucgaacuggcaauag

SEQ ID NO: 673851 - RNA, 19 nt, Artificial Sequence
  Description of Artificial Sequence: Synthetic oligonucleotide
cagggauggucagggacgu

SEQ ID NO: 673852 - RNA, 19 nt, Artificial Sequence
  Description of Artificial Sequence: Synthetic oligonucleotide
gacacgccugucacacggu

SEQ ID NO: 673853 - RNA, 19 nt, Artificial Sequence
  Description of Artificial Sequence: Synthetic oligonucleotide
gccugucacacggucguaa

SEQ ID NO: 673854 - RNA, 19 nt, Artificial Sequence
  Description of Artificial Sequence: Synthetic oligonucleotide
cugcauugacugcgguggu

SEQ ID NO: 673855 - RNA, 19 nt, Artificial Sequence
  Description of Artificial Sequence: Synthetic oligonucleotide
cacggucguaauagcguuu

SEQ ID NO: 673856 - RNA, 19 nt, Artificial Sequence
  Description of Artificial Sequence: Synthetic oligonucleotide
gcuggugcacagaguaacu

SEQ ID NO: 673857 - RNA, 19 nt, Artificial Sequence
  Description of Artificial Sequence: Synthetic oligonucleotide
ggcgucggaucucuagcau

SEQ ID NO: 673858 - RNA, 19 nt, Artificial Sequence
  Description of Artificial Sequence: Synthetic oligonucleotide
gcggcaacgagggccucca

SEQ ID NO: 673859 - RNA, 19 nt, Artificial Sequence
  Description of Artificial Sequence: Synthetic oligonucleotide
gggagccacucacaguauu

SEQ ID NO: 673860 - RNA, 19 nt, Artificial Sequence
  Description of Artificial Sequence: Synthetic oligonucleotide
gcggggugccacggggaag

SEQ ID NO: 673861 - RNA, 19 nt, Artificial Sequence
  Description of Artificial Sequence: Synthetic oligonucleotide
ccucagcggcaacgagggc

SEQ ID NO: 673862 - RNA, 19 nt, Artificial Sequence
  Description of Artificial Sequence: Synthetic oligonucleotide
ccuagggccuccucuucgu

SEQ ID NO: 673863 - RNA, 19 nt, Artificial Sequence
  Description of Artificial Sequence: Synthetic oligonucleotide
gcuagacagcaggcagcuc

SEQ ID NO: 673864 - RNA, 19 nt, Artificial Sequence
  Description of Artificial Sequence: Synthetic oligonucleotide
ccacggaggcgucggaucu

SEQ ID NO: 673865 - RNA, 19 nt, Artificial Sequence
  Description of Artificial Sequence: Synthetic oligonucleotide
ccugucacacggucguaau

SEQ ID NO: 673866 - RNA, 19 nt, Artificial Sequence
  Description of Artificial Sequence: Synthetic oligonucleotide
gcgcaucgaacuggcaaua

SEQ ID NO: 673867 - RNA, 19 nt, Artificial Sequence
  Description of Artificial Sequence: Synthetic oligonucleotide
cgucagugugcauagccuu

SEQ ID NO: 673868 - RNA, 19 nt, Artificial Sequence
  Description of Artificial Sequence: Synthetic oligonucleotide
cacggggaagguggacaua

SEQ ID NO: 673869 - RNA, 19 nt, Artificial Sequence
  Description of Artificial Sequence: Synthetic oligonucleotide
gccagccuacucgguagaa

SEQ ID NO: 673870 - RNA, 19 nt, Artificial Sequence
  Description of Artificial Sequence: Synthetic oligonucleotide
ccuccacuggucugcgagu

SEQ ID NO: 673871 - RNA, 19 nt, Artificial Sequence
  Description of Artificial Sequence: Synthetic oligonucleotide
ccacuggucugcgagugau

SEQ ID NO: 673872 - RNA, 19 nt, Artificial Sequence
  Description of Artificial Sequence: Synthetic oligonucleotide
cagggacguuucggccaca

SEQ ID NO: 673873 - RNA, 19 nt, Artificial Sequence
  Description of Artificial Sequence: Synthetic oligonucleotide
ggggcgcaucgaacuggca

SEQ ID NO: 673874 - RNA, 19 nt, Artificial Sequence
  Description of Artificial Sequence: Synthetic oligonucleotide
gggacguuucggccacauu

SEQ ID NO: 673875 - RNA, 19 nt, Artificial Sequence
  Description of Artificial Sequence: Synthetic oligonucleotide
ggccacggaggcgucggau

SEQ ID NO: 673876 - RNA, 19 nt, Artificial Sequence
  Description of Artificial Sequence: Synthetic oligonucleotide
cgacggcccuucagcucug

SEQ ID NO: 673877 - RNA, 19 nt, Artificial Sequence
  Description of Artificial Sequence: Synthetic oligonucleotide
gcacgaccugcccgcuggu

SEQ ID NO: 673878 - RNA, 19 nt, Artificial Sequence
  Description of Artificial Sequence: Synthetic oligonucleotide
ccacgacgcauagccuugu

SEQ ID NO: 673879 - RNA, 19 nt, Artificial Sequence
  Description of Artificial Sequence: Synthetic oligonucleotide
ccguccuggguugcagccu

SEQ ID NO: 673880 - RNA, 19 nt, Artificial Sequence
  Description of Artificial Sequence: Synthetic oligonucleotide
ggggugccacggggaaggu

SEQ ID NO: 673881 - RNA, 19 nt, Artificial Sequence
  Description of Artificial Sequence: Synthetic oligonucleotide
cacgggcucgacggcccuu

SEQ ID NO: 673882 - RNA, 19 nt, Artificial Sequence
  Description of Artificial Sequence: Synthetic oligonucleotide
cgggcucgacggcccuuca

SEQ ID NO: 673883 - RNA, 19 nt, Artificial Sequence
  Description of Artificial Sequence: Synthetic oligonucleotide
cgccugucacacggucgua

SEQ ID NO: 673884 - RNA, 19 nt, Artificial Sequence
  Description of Artificial Sequence: Synthetic oligonucleotide
auuaguuccaccuugggcc

SEQ ID NO: 673885 - RNA, 19 nt, Artificial Sequence
  Description of Artificial Sequence: Synthetic oligonucleotide
aauacgaagccuuccaugc

SEQ ID NO: 673886 - RNA, 19 nt, Artificial Sequence
  Description of Artificial Sequence: Synthetic oligonucleotide
uuuaauaucuuuuaaacua

SEQ ID NO: 673887 - RNA, 19 nt, Artificial Sequence
  Description of Artificial Sequence: Synthetic oligonucleotide
uaucuuuuaaacuacgucu

SEQ ID NO: 673888 - RNA, 19 nt, Artificial Sequence
  Description of Artificial Sequence: Synthetic oligonucleotide
uugaacuuagccuugaaca

SEQ ID NO: 673889 - RNA, 19 nt, Artificial Sequence
  Description of Artificial Sequence: Synthetic oligonucleotide
auaucuuuuaaacuacguc

SEQ ID NO: 673890 - RNA, 19 nt, Artificial Sequence
  Description of Artificial Sequence: Synthetic oligonucleotide
agaugaauacaucagacca

SEQ ID NO: 673891 - RNA, 19 nt, Artificial Sequence
  Description of Artificial Sequence: Synthetic oligonucleotide
aacaccugagccucggugc

SEQ ID NO: 673892 - RNA, 19 nt, Artificial Sequence
  Description of Artificial Sequence: Synthetic oligonucleotide
aaacgaugcacugaaaauc

SEQ ID NO: 673893 - RNA, 19 nt, Artificial Sequence
  Description of Artificial Sequence: Synthetic oligonucleotide
agucgagugaacuuccugc

SEQ ID NO: 673894 - RNA, 19 nt, Artificial Sequence
  Description of Artificial Sequence: Synthetic oligonucleotide
uuaauaucuuuuaaacuac

SEQ ID NO: 673895 - RNA, 19 nt, Artificial Sequence
  Description of Artificial Sequence: Synthetic oligonucleotide
uaauaucuuuuaaacuacg

SEQ ID NO: 673896 - RNA, 19 nt, Artificial Sequence
  Description of Artificial Sequence: Synthetic oligonucleotide
uuuaaacuacgucugcugc

SEQ ID NO: 673897 - RNA, 19 nt, Artificial Sequence
  Description of Artificial Sequence: Synthetic oligonucleotide
ugcaucaucaucauagggu

SEQ ID NO: 673898 - RNA, 19 nt, Artificial Sequence
  Description of Artificial Sequence: Synthetic oligonucleotide
gaauacaucagaccagcag

SEQ ID NO: 673899 - RNA, 19 nt, Artificial Sequence
  Description of Artificial Sequence: Synthetic oligonucleotide
ugucauacguacuaccucc

SEQ ID NO: 673900 - RNA, 19 nt, Artificial Sequence
  Description of Artificial Sequence: Synthetic oligonucleotide
uuugcuguaggaagcauca

SEQ ID NO: 673901 - RNA, 19 nt, Artificial Sequence
  Description of Artificial Sequence: Synthetic oligonucleotide
uuuuaaacuacgucugcug

SEQ ID NO: 673902 - RNA, 19 nt, Artificial Sequence
  Description of Artificial Sequence: Synthetic oligonucleotide
auagauaacugcuuaggcu

SEQ ID NO: 673903 - RNA, 19 nt, Artificial Sequence
  Description of Artificial Sequence: Synthetic oligonucleotide
auuggaacaccugaagagc

SEQ ID NO: 673904 - RNA, 19 nt, Artificial Sequence
  Description of Artificial Sequence: Synthetic oligonucleotide
ucauagauaacugcuuagg

SEQ ID NO: 673905 - RNA, 19 nt, Artificial Sequence
  Description of Artificial Sequence: Synthetic oligonucleotide
agugucacgcuuuacuuuc

SEQ ID NO: 673906 - RNA, 19 nt, Artificial Sequence
  Description of Artificial Sequence: Synthetic oligonucleotide
augaauacaucagaccagc

SEQ ID NO: 673907 - RNA, 19 nt, Artificial Sequence
  Description of Artificial Sequence: Synthetic oligonucleotide
aacuacgucugcugcacac

SEQ ID NO: 673908 - RNA, 19 nt, Artificial Sequence
  Description of Artificial Sequence: Synthetic oligonucleotide
ucuacugucaacacaucgu

SEQ ID NO: 673909 - RNA, 19 nt, Artificial Sequence
  Description of Artificial Sequence: Synthetic oligonucleotide
aaguaaacgaugcacugaa

SEQ ID NO: 673910 - RNA, 19 nt, Artificial Sequence
  Description of Artificial Sequence: Synthetic oligonucleotide
uugaucuggaugcaccggg

SEQ ID NO: 673911 - RNA, 19 nt, Artificial Sequence
  Description of Artificial Sequence: Synthetic oligonucleotide
uuugagugcagcagcacgc

SEQ ID NO: 673912 - RNA, 19 nt, Artificial Sequence
  Description of Artificial Sequence: Synthetic oligonucleotide
aacaugaugucaucaucug

SEQ ID NO: 673913 - RNA, 19 nt, Artificial Sequence
  Description of Artificial Sequence: Synthetic oligonucleotide
uuaggcuggggcuuggcgg

SEQ ID NO: 673914 - RNA, 19 nt, Artificial Sequence
  Description of Artificial Sequence: Synthetic oligonucleotide
uuuagagcgugugugcugg

SEQ ID NO: 673915 - RNA, 19 nt, Artificial Sequence
  Description of Artificial Sequence: Synthetic oligonucleotide
ucugauagaggcucggcug

SEQ ID NO: 673916 - RNA, 19 nt, Artificial Sequence
  Description of Artificial Sequence: Synthetic oligonucleotide
cauagauaacugcuuaggc

SEQ ID NO: 673917 - RNA, 19 nt, Artificial Sequence
  Description of Artificial Sequence: Synthetic oligonucleotide
auacguacuaccuccagcu

SEQ ID NO: 673918 - RNA, 19 nt, Artificial Sequence
  Description of Artificial Sequence: Synthetic oligonucleotide
ugaagaguacccuggcccg

SEQ ID NO: 673919 - RNA, 19 nt, Artificial Sequence
  Description of Artificial Sequence: Synthetic oligonucleotide
ugugucauacguacuaccu

SEQ ID NO: 673920 - RNA, 19 nt, Artificial Sequence
  Description of Artificial Sequence: Synthetic oligonucleotide
ucaucauaggguuucugug

SEQ ID NO: 673921 - RNA, 19 nt, Artificial Sequence
  Description of Artificial Sequence: Synthetic oligonucleotide
ugaacuuagccuugaacac

SEQ ID NO: 673922 - RNA, 19 nt, Artificial Sequence
  Description of Artificial Sequence: Synthetic oligonucleotide
aagcccgcuguucauugcc

SEQ ID NO: 673923 - RNA, 19 nt, Artificial Sequence
  Description of Artificial Sequence: Synthetic oligonucleotide
uggauguauaccuggcagg

SEQ ID NO: 673924 - RNA, 19 nt, Artificial Sequence
  Description of Artificial Sequence: Synthetic oligonucleotide
acuugacuugucugggucc

SEQ ID NO: 673925 - RNA, 19 nt, Artificial Sequence
  Description of Artificial Sequence: Synthetic oligonucleotide
ucuuuuaaacuacgucugc

SEQ ID NO: 673926 - RNA, 19 nt, Artificial Sequence
  Description of Artificial Sequence: Synthetic oligonucleotide
agaaguaaacgaugcacug

SEQ ID NO: 673927 - RNA, 19 nt, Artificial Sequence
  Description of Artificial Sequence: Synthetic oligonucleotide
ugcaccaaugccuacccag

SEQ ID NO: 673928 - RNA, 19 nt, Artificial Sequence
  Description of Artificial Sequence: Synthetic oligonucleotide
ucucaggucauagauaacu

SEQ ID NO: 673929 - RNA, 19 nt, Artificial Sequence
  Description of Artificial Sequence: Synthetic oligonucleotide
uuggaacaccugaagagcc

SEQ ID NO: 673930 - RNA, 19 nt, Artificial Sequence
  Description of Artificial Sequence: Synthetic oligonucleotide
agucucaggucauagauaa

SEQ ID NO: 673931 - RNA, 19 nt, Artificial Sequence
  Description of Artificial Sequence: Synthetic oligonucleotide
acaggcacccaguaccugc

SEQ ID NO: 673932 - RNA, 19 nt, Artificial Sequence
  Description of Artificial Sequence: Synthetic oligonucleotide
aggauguacacacaucgug

SEQ ID NO: 673933 - RNA, 19 nt, Artificial Sequence
  Description of Artificial Sequence: Synthetic oligonucleotide
gacauagcaguccugugug

SEQ ID NO: 673934 - RNA, 19 nt, Artificial Sequence
  Description of Artificial Sequence: Synthetic oligonucleotide
aauaucuuuuaaacuacgu

SEQ ID NO: 673935 - RNA, 19 nt, Artificial Sequence
  Description of Artificial Sequence: Synthetic oligonucleotide
aaugccuacccagaagaag

SEQ ID NO: 673936 - RNA, 19 nt, Artificial Sequence
  Description of Artificial Sequence: Synthetic oligonucleotide
guuugagugcagcagcacg

SEQ ID NO: 673937 - RNA, 19 nt, Artificial Sequence
  Description of Artificial Sequence: Synthetic oligonucleotide
gauguacacacaucgugug

SEQ ID NO: 673938 - RNA, 19 nt, Artificial Sequence
  Description of Artificial Sequence: Synthetic oligonucleotide
cagaugaauacaucagacc

SEQ ID NO: 673939 - RNA, 19 nt, Artificial Sequence
  Description of Artificial Sequence: Synthetic oligonucleotide
guuucugugcaccaaugcc

SEQ ID NO: 673940 - RNA, 19 nt, Artificial Sequence
  Description of Artificial Sequence: Synthetic oligonucleotide
gucuacugucaacacaucg

SEQ ID NO: 673941 - RNA, 19 nt, Artificial Sequence
  Description of Artificial Sequence: Synthetic oligonucleotide
uaaacgaugcacugaaaau

SEQ ID NO: 673942 - RNA, 19 nt, Artificial Sequence
  Description of Artificial Sequence: Synthetic oligonucleotide
cauguuagaggccucccgg

SEQ ID NO: 673943 - RNA, 19 nt, Artificial Sequence
  Description of Artificial Sequence: Synthetic oligonucleotide
ucugcugcacacaugugga

SEQ ID NO: 673944 - RNA, 19 nt, Artificial Sequence
  Description of Artificial Sequence: Synthetic oligonucleotide
acaucguguguccagcagg

SEQ ID NO: 673945 - RNA, 19 nt, Artificial Sequence
  Description of Artificial Sequence: Synthetic oligonucleotide
uccugaccuaguuugagug

SEQ ID NO: 673946 - RNA, 19 nt, Artificial Sequence
  Description of Artificial Sequence: Synthetic oligonucleotide
uggggaagcuccaaguagc

SEQ ID NO: 673947 - RNA, 19 nt, Artificial Sequence
  Description of Artificial Sequence: Synthetic oligonucleotide
uccaauacgaagccuucca

SEQ ID NO: 673948 - RNA, 19 nt, Artificial Sequence
  Description of Artificial Sequence: Synthetic oligonucleotide
aacacaucgucccaauuuu

SEQ ID NO: 673949 - RNA, 19 nt, Artificial Sequence
  Description of Artificial Sequence: Synthetic oligonucleotide
uuaguuccaccuugggccg

SEQ ID NO: 673950 - RNA, 19 nt, Artificial Sequence
  Description of Artificial Sequence: Synthetic oligonucleotide
ugcauuucgaguguagucu

SEQ ID NO: 673951 - RNA, 19 nt, Artificial Sequence
  Description of Artificial Sequence: Synthetic oligonucleotide
gaagagugcagugagguca

SEQ ID NO: 673952 - RNA, 19 nt, Artificial Sequence
  Description of Artificial Sequence: Synthetic oligonucleotide
aacgaugcacugaaaaucu

SEQ ID NO: 673953 - RNA, 19 nt, Artificial Sequence
  Description of Artificial Sequence: Synthetic oligonucleotide
accuuguacagcuugggcu

SEQ ID NO: 673954 - RNA, 19 nt, Artificial Sequence
  Description of Artificial Sequence: Synthetic oligonucleotide
gugcggaucugauagaggc

SEQ ID NO: 673955 - RNA, 19 nt, Artificial Sequence
  Description of Artificial Sequence: Synthetic oligonucleotide
auguuagaggccucccggc

SEQ ID NO: 673956 - RNA, 19 nt, Artificial Sequence
  Description of Artificial Sequence: Synthetic oligonucleotide
aaagcccgcuguucauugc

SEQ ID NO: 673957 - RNA, 19 nt, Artificial Sequence
  Description of Artificial Sequence: Synthetic oligonucleotide
cuggccauugucuagcaac

SEQ ID NO: 673958 - RNA, 19 nt, Artificial Sequence
  Description of Artificial Sequence: Synthetic oligonucleotide
auagauguccaguccucgg

SEQ ID NO: 673959 - RNA, 19 nt, Artificial Sequence
  Description of Artificial Sequence: Synthetic oligonucleotide
uguucuuuagagcgugugu

SEQ ID NO: 673960 - RNA, 19 nt, Artificial Sequence
  Description of Artificial Sequence: Synthetic oligonucleotide
ucgaguguagucuacuguc

SEQ ID NO: 673961 - RNA, 19 nt, Artificial Sequence
  Description of Artificial Sequence: Synthetic oligonucleotide
guaaacgaugcacugaaaa

SEQ ID NO: 673962 - RNA, 19 nt, Artificial Sequence
  Description of Artificial Sequence: Synthetic oligonucleotide
aacugcuuaggcuggggcu

SEQ ID NO: 673963 - RNA, 19 nt, Artificial Sequence
  Description of Artificial Sequence: Synthetic oligonucleotide
auacgaagccuuccaugcc

SEQ ID NO: 673964 - RNA, 19 nt, Artificial Sequence
  Description of Artificial Sequence: Synthetic oligonucleotide
uucuuuagagcgugugugc

SEQ ID NO: 673965 - RNA, 19 nt, Artificial Sequence
  Description of Artificial Sequence: Synthetic oligonucleotide
agacauagcaguccugugu

SEQ ID NO: 673966 - RNA, 19 nt, Artificial Sequence
  Description of Artificial Sequence: Synthetic oligonucleotide
agaccagcaguccaggaug

SEQ ID NO: 673967 - RNA, 19 nt, Artificial Sequence
  Description of Artificial Sequence: Synthetic oligonucleotide
cucagaguugagaaggcug

SEQ ID NO: 673968 - RNA, 19 nt, Artificial Sequence
  Description of Artificial Sequence: Synthetic oligonucleotide
ugcaccacgagugugauuu

SEQ ID NO: 673969 - RNA, 19 nt, Artificial Sequence
  Description of Artificial Sequence: Synthetic oligonucleotide
gucauagauaacugcuuag

SEQ ID NO: 673970 - RNA, 19 nt, Artificial Sequence
  Description of Artificial Sequence: Synthetic oligonucleotide
ucaguuugaucuccacuug

SEQ ID NO: 673971 - RNA, 19 nt, Artificial Sequence
  Description of Artificial Sequence: Synthetic oligonucleotide
uucgaguguagucuacugu

SEQ ID NO: 673972 - RNA, 19 nt, Artificial Sequence
  Description of Artificial Sequence: Synthetic oligonucleotide
cauacguacuaccuccagc

SEQ ID NO: 673973 - RNA, 19 nt, Artificial Sequence
  Description of Artificial Sequence: Synthetic oligonucleotide
cacacauagauguccaguc

SEQ ID NO: 673974 - RNA, 19 nt, Artificial Sequence
  Description of Artificial Sequence: Synthetic oligonucleotide
aauaggcucucaaacuucu

SEQ ID NO: 673975 - RNA, 19 nt, Artificial Sequence
  Description of Artificial Sequence: Synthetic oligonucleotide
caauacgaagccuuccaug

SEQ ID NO: 673976 - RNA, 19 nt, Artificial Sequence
  Description of Artificial Sequence: Synthetic oligonucleotide
cagagcauuucucagucac

SEQ ID NO: 673977 - RNA, 19 nt, Artificial Sequence
  Description of Artificial Sequence: Synthetic oligonucleotide
uguuagaggccucccggcc

SEQ ID NO: 673978 - RNA, 19 nt, Artificial Sequence
  Description of Artificial Sequence: Synthetic oligonucleotide
aacccacauguagacuucc

SEQ ID NO: 673979 - RNA, 19 nt, Artificial Sequence
  Description of Artificial Sequence: Synthetic oligonucleotide
cuuccugcccuccaauacg

SEQ ID NO: 673980 - RNA, 19 nt, Artificial Sequence
  Description of Artificial Sequence: Synthetic oligonucleotide
uguaguugaucuggggaag

SEQ ID NO: 673981 - RNA, 19 nt, Artificial Sequence
  Description of Artificial Sequence: Synthetic oligonucleotide
uuucgaguguagucuacug

SEQ ID NO: 673982 - RNA, 19 nt, Artificial Sequence
  Description of Artificial Sequence: Synthetic oligonucleotide
gugaaggugagccagccca

SEQ ID NO: 673983 - RNA, 19 nt, Artificial Sequence
  Description of Artificial Sequence: Synthetic oligonucleotide
uccucaccuucauugauga

SEQ ID NO: 673984 - RNA, 19 nt, Artificial Sequence
  Description of Artificial Sequence: Synthetic oligonucleotide
uccucacuuucaaagggga

SEQ ID NO: 673985 - RNA, 19 nt, Artificial Sequence
  Description of Artificial Sequence: Synthetic oligonucleotide
gaagcaucaaacaugcugu

SEQ ID NO: 673986 - RNA, 19 nt, Artificial Sequence
  Description of Artificial Sequence: Synthetic oligonucleotide
ucauguucuuuagagcgug

SEQ ID NO: 673987 - RNA, 19 nt, Artificial Sequence
  Description of Artificial Sequence: Synthetic oligonucleotide
uaaacuacgucugcugcac

SEQ ID NO: 673988 - RNA, 19 nt, Artificial Sequence
  Description of Artificial Sequence: Synthetic oligonucleotide
acguacuaccuccagcuug

SEQ ID NO: 673989 - RNA, 19 nt, Artificial Sequence
  Description of Artificial Sequence: Synthetic oligonucleotide
ucauacguacuaccuccag

SEQ ID NO: 673990 - RNA, 19 nt, Artificial Sequence
  Description of Artificial Sequence: Synthetic oligonucleotide
cuugucugggucccaaccc

SEQ ID NO: 673991 - RNA, 19 nt, Artificial Sequence
  Description of Artificial Sequence: Synthetic oligonucleotide
uaguuugagugcagcagca

SEQ ID NO: 673992 - RNA, 19 nt, Artificial Sequence
  Description of Artificial Sequence: Synthetic oligonucleotide
auagcaguccuguguguag

SEQ ID NO: 673993 - RNA, 19 nt, Artificial Sequence
  Description of Artificial Sequence: Synthetic oligonucleotide
cuagucuuggggacuugcg

SEQ ID NO: 673994 - RNA, 19 nt, Artificial Sequence
  Description of Artificial Sequence: Synthetic oligonucleotide
cuacugucaacacaucguc

SEQ ID NO: 673995 - RNA, 19 nt, Artificial Sequence
  Description of Artificial Sequence: Synthetic oligonucleotide
uggccaaacucuuccuccg

SEQ ID NO: 673996 - RNA, 19 nt, Artificial Sequence
  Description of Artificial Sequence: Synthetic oligonucleotide
ugcugugucauacguacua

SEQ ID NO: 673997 - RNA, 19 nt, Artificial Sequence
  Description of Artificial Sequence: Synthetic oligonucleotide
uagauguccaguccucggu

SEQ ID NO: 673998 - RNA, 19 nt, Artificial Sequence
  Description of Artificial Sequence: Synthetic oligonucleotide
caucguguguccagcaggc

SEQ ID NO: 673999 - RNA, 19 nt, Artificial Sequence
  Description of Artificial Sequence: Synthetic oligonucleotide
ucugaugcccggcccaccc

SEQ ID NO: 674000 - RNA, 19 nt, Artificial Sequence
  Description of Artificial Sequence: Synthetic oligonucleotide
auacaucagaccagcaguc

SEQ ID NO: 674001 - RNA, 19 nt, Artificial Sequence
  Description of Artificial Sequence: Synthetic oligonucleotide
cacccaggcauacacaaug

SEQ ID NO: 674002 - RNA, 19 nt, Artificial Sequence
  Description of Artificial Sequence: Synthetic oligonucleotide
cucagcguagccugggccc

SEQ ID NO: 674003 - RNA, 19 nt, Artificial Sequence
  Description of Artificial Sequence: Synthetic oligonucleotide
cuugaucucagagggcucc

SEQ ID NO: 674004 - RNA, 19 nt, Artificial Sequence
  Description of Artificial Sequence: Synthetic oligonucleotide
cugugucauacguacuacc

SEQ ID NO: 674005 - RNA, 19 nt, Artificial Sequence
  Description of Artificial Sequence: Synthetic oligonucleotide
agcaacaugaugucaucau

SEQ ID NO: 674006 - RNA, 19 nt, Artificial Sequence
  Description of Artificial Sequence: Synthetic oligonucleotide
ugaauacaucagaccagca

SEQ ID NO: 674007 - RNA, 19 nt, Artificial Sequence
  Description of Artificial Sequence: Synthetic oligonucleotide
auagaggcucggcugaaga

SEQ ID NO: 674008 - RNA, 19 nt, Artificial Sequence
  Description of Artificial Sequence: Synthetic oligonucleotide
acaucagaccagcagucca

SEQ ID NO: 674009 - RNA, 19 nt, Artificial Sequence
  Description of Artificial Sequence: Synthetic oligonucleotide
cagcuccugaccuaguuug

SEQ ID NO: 674010 - RNA, 19 nt, Artificial Sequence
  Description of Artificial Sequence: Synthetic oligonucleotide
acgcuuuacuuucccagag

SEQ ID NO: 674011 - RNA, 19 nt, Artificial Sequence
  Description of Artificial Sequence: Synthetic oligonucleotide
ucagugucacgcuuuacuu

SEQ ID NO: 674012 - RNA, 19 nt, Artificial Sequence
  Description of Artificial Sequence: Synthetic oligonucleotide
caucagaccagcaguccag

SEQ ID NO: 674013 - RNA, 19 nt, Artificial Sequence
  Description of Artificial Sequence: Synthetic oligonucleotide
ucgagugaacuuccugccc

SEQ ID NO: 674014 - RNA, 19 nt, Artificial Sequence
  Description of Artificial Sequence: Synthetic oligonucleotide
gaucuggggaagcuccaag

SEQ ID NO: 674015 - RNA, 19 nt, Artificial Sequence
  Description of Artificial Sequence: Synthetic oligonucleotide
cauagauguccaguccucg

SEQ ID NO: 674016 - RNA, 19 nt, Artificial Sequence
  Description of Artificial Sequence: Synthetic oligonucleotide
uguguguagaaguggccaa

SEQ ID NO: 674017 - RNA, 19 nt, Artificial Sequence
  Description of Artificial Sequence: Synthetic oligonucleotide
ugccuuugcggaccaggcg

SEQ ID NO: 674018 - RNA, 19 nt, Artificial Sequence
  Description of Artificial Sequence: Synthetic oligonucleotide
gaaguaaacgaugcacuga

SEQ ID NO: 674019 - RNA, 19 nt, Artificial Sequence
  Description of Artificial Sequence: Synthetic oligonucleotide
cuugguuguccucacuuuc

SEQ ID NO: 674020 - RNA, 19 nt, Artificial Sequence
  Description of Artificial Sequence: Synthetic oligonucleotide
ucuuuagagcgugugugcu

SEQ ID NO: 674021 - RNA, 19 nt, Artificial Sequence
  Description of Artificial Sequence: Synthetic oligonucleotide
ugucacgcuuuacuuuccc

SEQ ID NO: 674022 - RNA, 19 nt, Artificial Sequence
  Description of Artificial Sequence: Synthetic oligonucleotide
uuccacugacagcuuguag

SEQ ID NO: 674023 - RNA, 19 nt, Artificial Sequence
  Description of Artificial Sequence: Synthetic oligonucleotide
aaaucuuccucuggcugcu

SEQ ID NO: 674024 - RNA, 19 nt, Artificial Sequence
  Description of Artificial Sequence: Synthetic oligonucleotide
cugccagaaguaaacgaug

SEQ ID NO: 674025 - RNA, 19 nt, Artificial Sequence
  Description of Artificial Sequence: Synthetic oligonucleotide
gauaacugcuuaggcuggg

SEQ ID NO: 674026 - RNA, 19 nt, Artificial Sequence
  Description of Artificial Sequence: Synthetic oligonucleotide
augcaccgggugcagaggg

SEQ ID NO: 674027 - RNA, 19 nt, Artificial Sequence
  Description of Artificial Sequence: Synthetic oligonucleotide
acgcacuagucuuggggac

SEQ ID NO: 674028 - RNA, 19 nt, Artificial Sequence
  Description of Artificial Sequence: Synthetic oligonucleotide
agacugaaggugaagguga

SEQ ID NO: 674029 - RNA, 19 nt, Artificial Sequence
  Description of Artificial Sequence: Synthetic oligonucleotide
auuucucagucacugcgaa

SEQ ID NO: 674030 - RNA, 19 nt, Artificial Sequence
  Description of Artificial Sequence: Synthetic oligonucleotide
acacacaucguguguccag

SEQ ID NO: 674031 - RNA, 19 nt, Artificial Sequence
  Description of Artificial Sequence: Synthetic oligonucleotide
aguugaucuggggaagcuc

SEQ ID NO: 674032 - RNA, 19 nt, Artificial Sequence
  Description of Artificial Sequence: Synthetic oligonucleotide
cuuuagagcgugugugcug

SEQ ID NO: 674033 - RNA, 19 nt, Artificial Sequence
  Description of Artificial Sequence: Synthetic oligonucleotide
ugaugcccggcccacccag

SEQ ID NO: 674034 - RNA, 19 nt, Artificial Sequence
  Description of Artificial Sequence: Synthetic oligonucleotide
guuagaggccucccggccc

SEQ ID NO: 674035 - RNA, 19 nt, Artificial Sequence
  Description of Artificial Sequence: Synthetic oligonucleotide
agaguugagaaggcuggag

SEQ ID NO: 674036 - RNA, 19 nt, Artificial Sequence
  Description of Artificial Sequence: Synthetic oligonucleotide
uggaacaccugaagagccu

SEQ ID NO: 674037 - RNA, 19 nt, Artificial Sequence
  Description of Artificial Sequence: Synthetic oligonucleotide
aucuggggaagcuccaagu

SEQ ID NO: 674038 - RNA, 19 nt, Artificial Sequence
  Description of Artificial Sequence: Synthetic oligonucleotide
guacacacaucgugugucc

SEQ ID NO: 674039 - RNA, 19 nt, Artificial Sequence
  Description of Artificial Sequence: Synthetic oligonucleotide
uacaucagaccagcagucc

SEQ ID NO: 674040 - RNA, 19 nt, Artificial Sequence
  Description of Artificial Sequence: Synthetic oligonucleotide
accuaguuugagugcagca

SEQ ID NO: 674041 - RNA, 19 nt, Artificial Sequence
  Description of Artificial Sequence: Synthetic oligonucleotide
gucacugcgaaguagcccu

SEQ ID NO: 674042 - RNA, 19 nt, Artificial Sequence
  Description of Artificial Sequence: Synthetic oligonucleotide
uuccgcucauucuuguuaa

SEQ ID NO: 674043 - RNA, 19 nt, Artificial Sequence
  Description of Artificial Sequence: Synthetic oligonucleotide
agcagcacgcacuagucuu

SEQ ID NO: 674044 - RNA, 19 nt, Artificial Sequence
  Description of Artificial Sequence: Synthetic oligonucleotide
cuucccuuuccgcucauuc

SEQ ID NO: 674045 - RNA, 19 nt, Artificial Sequence
  Description of Artificial Sequence: Synthetic oligonucleotide
gaagacauagcaguccugu

SEQ ID NO: 674046 - RNA, 19 nt, Artificial Sequence
  Description of Artificial Sequence: Synthetic oligonucleotide
cuccucaccuucauugaug

SEQ ID NO: 674047 - RNA, 19 nt, Artificial Sequence
  Description of Artificial Sequence: Synthetic oligonucleotide
acauagauguccaguccuc

SEQ ID NO: 674048 - RNA, 19 nt, Artificial Sequence
  Description of Artificial Sequence: Synthetic oligonucleotide
uuagaggccucccggcccu

SEQ ID NO: 674049 - RNA, 19 nt, Artificial Sequence
  Description of Artificial Sequence: Synthetic oligonucleotide
ggguagcugaaacaugugc

SEQ ID NO: 674050 - RNA, 19 nt, Artificial Sequence
  Description of Artificial Sequence: Synthetic oligonucleotide
ugguggguagcugaaacau

SEQ ID NO: 674051 - RNA, 19 nt, Artificial Sequence
  Description of Artificial Sequence: Synthetic oligonucleotide
cugaccacugcauggcgug

SEQ ID NO: 674052 - RNA, 19 nt, Artificial Sequence
  Description of Artificial Sequence: Synthetic oligonucleotide
gugccuuccaggcugcggc

SEQ ID NO: 674053 - RNA, 19 nt, Artificial Sequence
  Description of Artificial Sequence: Synthetic oligonucleotide
guagaaguggccaaacucu

SEQ ID NO: 674054 - RNA, 19 nt, Artificial Sequence
  Description of Artificial Sequence: Synthetic oligonucleotide
auaacugcuuaggcugggg

SEQ ID NO: 674055 - RNA, 19 nt, Artificial Sequence
  Description of Artificial Sequence: Synthetic oligonucleotide
uggguagcugaaacaugug

SEQ ID NO: 674056 - RNA, 19 nt, Artificial Sequence
  Description of Artificial Sequence: Synthetic oligonucleotide
gauguauaccuggcaggcc

SEQ ID NO: 674057 - RNA, 19 nt, Artificial Sequence
  Description of Artificial Sequence: Synthetic oligonucleotide
ugcggcugaccacugcaug

SEQ ID NO: 674058 - RNA, 19 nt, Artificial Sequence
  Description of Artificial Sequence: Synthetic oligonucleotide
gcacgcacuagucuugggg

SEQ ID NO: 674059 - RNA, 19 nt, Artificial Sequence
  Description of Artificial Sequence: Synthetic oligonucleotide
auaccuggcaggccuucag

SEQ ID NO: 674060 - RNA, 19 nt, Artificial Sequence
  Description of Artificial Sequence: Synthetic oligonucleotide
aaggggaccuugaggauga

SEQ ID NO: 674061 - RNA, 19 nt, Artificial Sequence
  Description of Artificial Sequence: Synthetic oligonucleotide
ugcggaucugauagaggcu

SEQ ID NO: 674062 - RNA, 19 nt, Artificial Sequence
  Description of Artificial Sequence: Synthetic oligonucleotide
cuugaacaccugagccucg

SEQ ID NO: 674063 - RNA, 19 nt, Artificial Sequence
  Description of Artificial Sequence: Synthetic oligonucleotide
auuucgaguguagucuacu

SEQ ID NO: 674064 - RNA, 19 nt, Artificial Sequence
  Description of Artificial Sequence: Synthetic oligonucleotide
aaacuacgucugcugcaca

SEQ ID NO: 674065 - RNA, 19 nt, Artificial Sequence
  Description of Artificial Sequence: Synthetic oligonucleotide
caucagggucugaugcccg

SEQ ID NO: 674066 - RNA, 19 nt, Artificial Sequence
  Description of Artificial Sequence: Synthetic oligonucleotide
ccagaaguaaacgaugcac

SEQ ID NO: 674067 - RNA, 19 nt, Artificial Sequence
  Description of Artificial Sequence: Synthetic oligonucleotide
accuugaggaugaagcaga

SEQ ID NO: 674068 - RNA, 19 nt, Artificial Sequence
  Description of Artificial Sequence: Synthetic oligonucleotide
ugguuguccucacuuucaa

SEQ ID NO: 674069 - RNA, 19 nt, Artificial Sequence
  Description of Artificial Sequence: Synthetic oligonucleotide
cagaaguaaacgaugcacu

SEQ ID NO: 674070 - RNA, 19 nt, Artificial Sequence
  Description of Artificial Sequence: Synthetic oligonucleotide
cauuucgaguguagucuac

SEQ ID NO: 674071 - RNA, 19 nt, Artificial Sequence
  Description of Artificial Sequence: Synthetic oligonucleotide
gaguugagaaggcuggagu

SEQ ID NO: 674072 - RNA, 19 nt, Artificial Sequence
  Description of Artificial Sequence: Synthetic oligonucleotide
uacuaccuccagcuugcca

SEQ ID NO: 674073 - RNA, 19 nt, Artificial Sequence
  Description of Artificial Sequence: Synthetic oligonucleotide
guagacuuccuggccauug

SEQ ID NO: 674074 - RNA, 19 nt, Artificial Sequence
  Description of Artificial Sequence: Synthetic oligonucleotide
ugguggggcuugcaggaug

SEQ ID NO: 674075 - RNA, 19 nt, Artificial Sequence
  Description of Artificial Sequence: Synthetic oligonucleotide
ccuugugugcuucauguac

SEQ ID NO: 674076 - RNA, 19 nt, Artificial Sequence
  Description of Artificial Sequence: Synthetic oligonucleotide
gaguguagucuacugucaa

SEQ ID NO: 674077 - RNA, 19 nt, Artificial Sequence
  Description of Artificial Sequence: Synthetic oligonucleotide
cauuucucagucacugcga

SEQ ID NO: 674078 - RNA, 19 nt, Artificial Sequence
  Description of Artificial Sequence: Synthetic oligonucleotide
cacgcacuagucuugggga

SEQ ID NO: 674079 - RNA, 19 nt, Artificial Sequence
  Description of Artificial Sequence: Synthetic oligonucleotide
guuugcuguaggaagcauc

SEQ ID NO: 674080 - RNA, 19 nt, Artificial Sequence
  Description of Artificial Sequence: Synthetic oligonucleotide
ggacuugcggccaagccag

SEQ ID NO: 674081 - RNA, 19 nt, Artificial Sequence
  Description of Artificial Sequence: Synthetic oligonucleotide
cuugcggccaagccagaug

SEQ ID NO: 674082 - RNA, 19 nt, Artificial Sequence
  Description of Artificial Sequence: Synthetic oligonucleotide
cacacaucguguguccagc

SEQ ID NO: 674083 - RNA, 19 nt, Artificial Sequence
  Description of Artificial Sequence: Synthetic oligonucleotide
cuacccagaagaaguucuc

SEQ ID NO: 674084 - RNA, 19 nt, Artificial Sequence
  Description of Artificial Sequence: Synthetic oligonucleotide
guccuguguguagaagugg

SEQ ID NO: 674085 - RNA, 19 nt, Artificial Sequence
  Description of Artificial Sequence: Synthetic oligonucleotide
cagucacugcgaaguagcc

SEQ ID NO: 674086 - RNA, 19 nt, Artificial Sequence
  Description of Artificial Sequence: Synthetic oligonucleotide
uacccagaagaaguucucu

SEQ ID NO: 674087 - RNA, 19 nt, Artificial Sequence
  Description of Artificial Sequence: Synthetic oligonucleotide
acugcgaaguagcccuucu

SEQ ID NO: 674088 - RNA, 19 nt, Artificial Sequence
  Description of Artificial Sequence: Synthetic oligonucleotide
uucucagugucacgcuuua

SEQ ID NO: 674089 - RNA, 19 nt, Artificial Sequence
  Description of Artificial Sequence: Synthetic oligonucleotide
ucaacacaucgucccaauu

SEQ ID NO: 674090 - RNA, 19 nt, Artificial Sequence
  Description of Artificial Sequence: Synthetic oligonucleotide
gcacccaguaccugcagag

SEQ ID NO: 674091 - RNA, 19 nt, Artificial Sequence
  Description of Artificial Sequence: Synthetic oligonucleotide
ugucaacacaucgucccaa

SEQ ID NO: 674092 - RNA, 19 nt, Artificial Sequence
  Description of Artificial Sequence: Synthetic oligonucleotide
ucugugcccuggaccgagg

SEQ ID NO: 674093 - RNA, 19 nt, Artificial Sequence
  Description of Artificial Sequence: Synthetic oligonucleotide
ccuaguuugagugcagcag

SEQ ID NO: 674094 - RNA, 19 nt, Artificial Sequence
  Description of Artificial Sequence: Synthetic oligonucleotide
cugauagaggcucggcuga

SEQ ID NO: 674095 - RNA, 19 nt, Artificial Sequence
  Description of Artificial Sequence: Synthetic oligonucleotide
ggccaagccagaugaauac

SEQ ID NO: 674096 - RNA, 19 nt, Artificial Sequence
  Description of Artificial Sequence: Synthetic oligonucleotide
agcggguaaaagcccgcug

SEQ ID NO: 674097 - RNA, 19 nt, Artificial Sequence
  Description of Artificial Sequence: Synthetic oligonucleotide
uacacacaucgugugucca

SEQ ID NO: 674098 - RNA, 19 nt, Artificial Sequence
  Description of Artificial Sequence: Synthetic oligonucleotide
cugaccuaguuugagugca

SEQ ID NO: 674099 - RNA, 19 nt, Artificial Sequence
  Description of Artificial Sequence: Synthetic oligonucleotide
aucaguugcucugccucag

SEQ ID NO: 674100 - RNA, 19 nt, Artificial Sequence
  Description of Artificial Sequence: Synthetic oligonucleotide
uugccccgguggaugauga

SEQ ID NO: 674101 - RNA, 19 nt, Artificial Sequence
  Description of Artificial Sequence: Synthetic oligonucleotide
cucagugucacgcuuuacu

SEQ ID NO: 674102 - RNA, 19 nt, Artificial Sequence
  Description of Artificial Sequence: Synthetic oligonucleotide
gcggcugaccacugcaugg

SEQ ID NO: 674103 - RNA, 19 nt, Artificial Sequence
  Description of Artificial Sequence: Synthetic oligonucleotide
gaagaguacccuggcccgc

SEQ ID NO: 674104 - RNA, 19 nt, Artificial Sequence
  Description of Artificial Sequence: Synthetic oligonucleotide
ugaccacugcauggcgugg

SEQ ID NO: 674105 - RNA, 19 nt, Artificial Sequence
  Description of Artificial Sequence: Synthetic oligonucleotide
cacgcuuuacuuucccaga

SEQ ID NO: 674106 - RNA, 19 nt, Artificial Sequence
  Description of Artificial Sequence: Synthetic oligonucleotide
cguacuaccuccagcuugc

SEQ ID NO: 674107 - RNA, 19 nt, Artificial Sequence
  Description of Artificial Sequence: Synthetic oligonucleotide
ggcacugccauuggugcgg

SEQ ID NO: 674108 - RNA, 19 nt, Artificial Sequence
  Description of Artificial Sequence: Synthetic oligonucleotide
acacaucguguguccagca

SEQ ID NO: 674109 - RNA, 19 nt, Artificial Sequence
  Description of Artificial Sequence: Synthetic oligonucleotide
cuuuuaaacuacgucugcu

SEQ ID NO: 674110 - RNA, 19 nt, Artificial Sequence
  Description of Artificial Sequence: Synthetic oligonucleotide
uugaucucagagggcuccc

SEQ ID NO: 674111 - RNA, 19 nt, Artificial Sequence
  Description of Artificial Sequence: Synthetic oligonucleotide
acuacgucugcugcacaca

SEQ ID NO: 674112 - RNA, 19 nt, Artificial Sequence
  Description of Artificial Sequence: Synthetic oligonucleotide
guaccugcagaggaagaca

SEQ ID NO: 674113 - RNA, 19 nt, Artificial Sequence
  Description of Artificial Sequence: Synthetic oligonucleotide
gucccaacccacauguaga

SEQ ID NO: 674114 - RNA, 19 nt, Artificial Sequence
  Description of Artificial Sequence: Synthetic oligonucleotide
cuugcaggaugugggcaag

SEQ ID NO: 674115 - RNA, 19 nt, Artificial Sequence
  Description of Artificial Sequence: Synthetic oligonucleotide
ggaucugauagaggcucgg

SEQ ID NO: 674116 - RNA, 19 nt, Artificial Sequence
  Description of Artificial Sequence: Synthetic oligonucleotide
gacuugucugggucccaac

SEQ ID NO: 674117 - RNA, 19 nt, Artificial Sequence
  Description of Artificial Sequence: Synthetic oligonucleotide
ccauguuagaggccucccg

SEQ ID NO: 674118 - RNA, 19 nt, Artificial Sequence
  Description of Artificial Sequence: Synthetic oligonucleotide
uggccggugcagcauccca

SEQ ID NO: 674119 - RNA, 19 nt, Artificial Sequence
  Description of Artificial Sequence: Synthetic oligonucleotide
gucacgcuuuacuuuccca

SEQ ID NO: 674120 - RNA, 19 nt, Artificial Sequence
  Description of Artificial Sequence: Synthetic oligonucleotide
ccacgagugugauuucugc

SEQ ID NO: 674121 - RNA, 19 nt, Artificial Sequence
  Description of Artificial Sequence: Synthetic oligonucleotide
ccugaccuaguuugagugc

SEQ ID NO: 674122 - RNA, 19 nt, Artificial Sequence
  Description of Artificial Sequence: Synthetic oligonucleotide
uacguacuaccuccagcuu

SEQ ID NO: 674123 - RNA, 19 nt, Artificial Sequence
  Description of Artificial Sequence: Synthetic oligonucleotide
agagcauuucucagucacu

SEQ ID NO: 674124 - RNA, 19 nt, Artificial Sequence
  Description of Artificial Sequence: Synthetic oligonucleotide
gaccacugcauggcguggc

SEQ ID NO: 674125 - RNA, 19 nt, Artificial Sequence
  Description of Artificial Sequence: Synthetic oligonucleotide
accacgagugugauuucug

SEQ ID NO: 674126 - RNA, 19 nt, Artificial Sequence
  Description of Artificial Sequence: Synthetic oligonucleotide
cugugcccuggaccgaggc

SEQ ID NO: 674127 - RNA, 19 nt, Artificial Sequence
  Description of Artificial Sequence: Synthetic oligonucleotide
ugaucuggggaagcuccaa

SEQ ID NO: 674128 - RNA, 19 nt, Artificial Sequence
  Description of Artificial Sequence: Synthetic oligonucleotide
cugcugcacacauguggac

SEQ ID NO: 674129 - RNA, 19 nt, Artificial Sequence
  Description of Artificial Sequence: Synthetic oligonucleotide
uuccuccggcagucgagug

SEQ ID NO: 674130 - RNA, 19 nt, Artificial Sequence
  Description of Artificial Sequence: Synthetic oligonucleotide
gaccgaggccuuccccucc

SEQ ID NO: 674131 - RNA, 19 nt, Artificial Sequence
  Description of Artificial Sequence: Synthetic oligonucleotide
ggccaaacucuuccuccgg

SEQ ID NO: 674132 - RNA, 19 nt, Artificial Sequence
  Description of Artificial Sequence: Synthetic oligonucleotide
ggcugaagaguacccuggc

SEQ ID NO: 674133 - RNA, 19 nt, Artificial Sequence
  Description of Artificial Sequence: Synthetic oligonucleotide
ggugcggaucugauagagg

SEQ ID NO: 674134 - RNA, 19 nt, Artificial Sequence
  Description of Artificial Sequence: Synthetic oligonucleotide
uuagagcgugugugcugga

SEQ ID NO: 674135 - RNA, 19 nt, Artificial Sequence
  Description of Artificial Sequence: Synthetic oligonucleotide
gguggccaaaagucaucag

SEQ ID NO: 674136 - RNA, 19 nt, Artificial Sequence
  Description of Artificial Sequence: Synthetic oligonucleotide
acauguggacacgcuggug

SEQ ID NO: 674137 - RNA, 19 nt, Artificial Sequence
  Description of Artificial Sequence: Synthetic oligonucleotide
ggccaaaagucaucaggca

SEQ ID NO: 674138 - RNA, 19 nt, Artificial Sequence
  Description of Artificial Sequence: Synthetic oligonucleotide
gccuuggugguguugcuca

SEQ ID NO: 674139 - RNA, 19 nt, Artificial Sequence
  Description of Artificial Sequence: Synthetic oligonucleotide
ugauagaggcucggcugaa

SEQ ID NO: 674140 - RNA, 19 nt, Artificial Sequence
  Description of Artificial Sequence: Synthetic oligonucleotide
agagugcagugaggucagc

SEQ ID NO: 674141 - RNA, 19 nt, Artificial Sequence
  Description of Artificial Sequence: Synthetic oligonucleotide
gagucucaggucauagaua

SEQ ID NO: 674142 - RNA, 19 nt, Artificial Sequence
  Description of Artificial Sequence: Synthetic oligonucleotide
ggauguacacacaucgugu

SEQ ID NO: 674143 - RNA, 19 nt, Artificial Sequence
  Description of Artificial Sequence: Synthetic oligonucleotide
gcggaucugauagaggcuc

SEQ ID NO: 674144 - RNA, 19 nt, Artificial Sequence
  Description of Artificial Sequence: Synthetic oligonucleotide
uuccuggcauuaguuccac

SEQ ID NO: 674145 - RNA, 19 nt, Artificial Sequence
  Description of Artificial Sequence: Synthetic oligonucleotide
gaugcccggcccacccagg

SEQ ID NO: 674146 - RNA, 19 nt, Artificial Sequence
  Description of Artificial Sequence: Synthetic oligonucleotide
cauagcaguccugugugua

SEQ ID NO: 674147 - RNA, 19 nt, Artificial Sequence
  Description of Artificial Sequence: Synthetic oligonucleotide
gcugccguggcaggaagag

SEQ ID NO: 674148 - RNA, 19 nt, Artificial Sequence
  Description of Artificial Sequence: Synthetic oligonucleotide
gcagaacucagaguugaga

SEQ ID NO: 674149 - RNA, 19 nt, Artificial Sequence
  Description of Artificial Sequence: Synthetic oligonucleotide
uggggacuugcggccaagc

SEQ ID NO: 674150 - RNA, 19 nt, Artificial Sequence
  Description of Artificial Sequence: Synthetic oligonucleotide
gucauacguacuaccucca

SEQ ID NO: 674151 - RNA, 19 nt, Artificial Sequence
  Description of Artificial Sequence: Synthetic oligonucleotide
ggcucggcugaagaguacc

SEQ ID NO: 674152 - RNA, 19 nt, Artificial Sequence
  Description of Artificial Sequence: Synthetic oligonucleotide
cugagccucggugccuucc

SEQ ID NO: 674153 - RNA, 19 nt, Artificial Sequence
  Description of Artificial Sequence: Synthetic oligonucleotide
aguaaacgaugcacugaaa

SEQ ID NO: 674154 - RNA, 19 nt, Artificial Sequence
  Description of Artificial Sequence: Synthetic oligonucleotide
uagagcgugugugcuggau

SEQ ID NO: 674155 - RNA, 19 nt, Artificial Sequence
  Description of Artificial Sequence: Synthetic oligonucleotide
ggcccacccaggcauacac

SEQ ID NO: 674156 - RNA, 19 nt, Artificial Sequence
  Description of Artificial Sequence: Synthetic oligonucleotide
aggcacccaguaccugcag

SEQ ID NO: 674157 - RNA, 19 nt, Artificial Sequence
  Description of Artificial Sequence: Synthetic oligonucleotide
gacacgcugguggggcuug

SEQ ID NO: 674158 - RNA, 19 nt, Artificial Sequence
  Description of Artificial Sequence: Synthetic oligonucleotide
cacagccucugcauuucga

SEQ ID NO: 674159 - RNA, 19 nt, Artificial Sequence
  Description of Artificial Sequence: Synthetic oligonucleotide
ccucacuuucaaaggggac

SEQ ID NO: 674160 - RNA, 19 nt, Artificial Sequence
  Description of Artificial Sequence: Synthetic oligonucleotide
gccagaaguaaacgaugca

SEQ ID NO: 674161 - RNA, 19 nt, Artificial Sequence
  Description of Artificial Sequence: Synthetic oligonucleotide
ggugagccagcccauguua

SEQ ID NO: 674162 - RNA, 19 nt, Artificial Sequence
  Description of Artificial Sequence: Synthetic oligonucleotide
caguaccugcagaggaaga

SEQ ID NO: 674163 - RNA, 19 nt, Artificial Sequence
  Description of Artificial Sequence: Synthetic oligonucleotide
guaaaagcccgcuguucau

SEQ ID NO: 674164 - RNA, 19 nt, Artificial Sequence
  Description of Artificial Sequence: Synthetic oligonucleotide
uccugcccuccaauacgaa

SEQ ID NO: 674165 - RNA, 19 nt, Artificial Sequence
  Description of Artificial Sequence: Synthetic oligonucleotide
caaacaugcuguugaggau

SEQ ID NO: 674166 - RNA, 19 nt, Artificial Sequence
  Description of Artificial Sequence: Synthetic oligonucleotide
gugucacgcuuuacuuucc

SEQ ID NO: 674167 - RNA, 19 nt, Artificial Sequence
  Description of Artificial Sequence: Synthetic oligonucleotide
ucgguccaggaggaacaca

SEQ ID NO: 674168 - RNA, 19 nt, Artificial Sequence
  Description of Artificial Sequence: Synthetic oligonucleotide
gcccaccuuguacagcuug

SEQ ID NO: 674169 - RNA, 19 nt, Artificial Sequence
  Description of Artificial Sequence: Synthetic oligonucleotide
caggcacccaguaccugca

SEQ ID NO: 674170 - RNA, 19 nt, Artificial Sequence
  Description of Artificial Sequence: Synthetic oligonucleotide
gcuccugaccuaguuugag

SEQ ID NO: 674171 - RNA, 19 nt, Artificial Sequence
  Description of Artificial Sequence: Synthetic oligonucleotide
gcugcggcugaccacugca

SEQ ID NO: 674172 - RNA, 19 nt, Artificial Sequence
  Description of Artificial Sequence: Synthetic oligonucleotide
aggcauggaagcagcgggu

SEQ ID NO: 674173 - RNA, 19 nt, Artificial Sequence
  Description of Artificial Sequence: Synthetic oligonucleotide
ugcggccaagccagaugaa

SEQ ID NO: 674174 - RNA, 19 nt, Artificial Sequence
  Description of Artificial Sequence: Synthetic oligonucleotide
uggaugcaccgggugcaga

SEQ ID NO: 674175 - RNA, 19 nt, Artificial Sequence
  Description of Artificial Sequence: Synthetic oligonucleotide
ggaagacauagcaguccug

SEQ ID NO: 674176 - RNA, 19 nt, Artificial Sequence
  Description of Artificial Sequence: Synthetic oligonucleotide
ccuccaauacgaagccuuc

SEQ ID NO: 674177 - RNA, 19 nt, Artificial Sequence
  Description of Artificial Sequence: Synthetic oligonucleotide
cuuugcggaccaggcgcag

SEQ ID NO: 674178 - RNA, 19 nt, Artificial Sequence
  Description of Artificial Sequence: Synthetic oligonucleotide
ucacugcgaaguagcccuu

SEQ ID NO: 674179 - RNA, 19 nt, Artificial Sequence
  Description of Artificial Sequence: Synthetic oligonucleotide
cauugucuagcaacaugau

SEQ ID NO: 674180 - RNA, 19 nt, Artificial Sequence
  Description of Artificial Sequence: Synthetic oligonucleotide
caggauguacacacaucgu

SEQ ID NO: 674181 - RNA, 19 nt, Artificial Sequence
  Description of Artificial Sequence: Synthetic oligonucleotide
gcauuucgaguguagucua

SEQ ID NO: 674182 - RNA, 19 nt, Artificial Sequence
  Description of Artificial Sequence: Synthetic oligonucleotide
cuggaugcaccgggugcag

SEQ ID NO: 674183 - RNA, 19 nt, Artificial Sequence
  Description of Artificial Sequence: Synthetic oligonucleotide
ggguggccaaaagucauca

SEQ ID NO: 674184 - RNA, 19 nt, Artificial Sequence
  Description of Artificial Sequence: Synthetic oligonucleotide
ggguaaaagcccgcuguuc

SEQ ID NO: 674185 - RNA, 19 nt, Artificial Sequence
  Description of Artificial Sequence: Synthetic oligonucleotide
gucaacacaucgucccaau

SEQ ID NO: 674186 - RNA, 19 nt, Artificial Sequence
  Description of Artificial Sequence: Synthetic oligonucleotide
acuugcggccaagccagau

SEQ ID NO: 674187 - RNA, 19 nt, Artificial Sequence
  Description of Artificial Sequence: Synthetic oligonucleotide
ccgccacacauagaugucc

SEQ ID NO: 674188 - RNA, 19 nt, Artificial Sequence
  Description of Artificial Sequence: Synthetic oligonucleotide
agcuccugaccuaguuuga

SEQ ID NO: 674189 - RNA, 19 nt, Artificial Sequence
  Description of Artificial Sequence: Synthetic oligonucleotide
caccgggugcagagggcac

SEQ ID NO: 674190 - RNA, 19 nt, Artificial Sequence
  Description of Artificial Sequence: Synthetic oligonucleotide
cuucucagugucacgcuuu

SEQ ID NO: 674191 - RNA, 19 nt, Artificial Sequence
  Description of Artificial Sequence: Synthetic oligonucleotide
gucucaggucauagauaac

SEQ ID NO: 674192 - RNA, 19 nt, Artificial Sequence
  Description of Artificial Sequence: Synthetic oligonucleotide
cccuuuccgcucauucuug

SEQ ID NO: 674193 - RNA, 19 nt, Artificial Sequence
  Description of Artificial Sequence: Synthetic oligonucleotide
gcagcacgcacuagucuug

SEQ ID NO: 674194 - RNA, 19 nt, Artificial Sequence
  Description of Artificial Sequence: Synthetic oligonucleotide
cccugccagaaguaaacga

SEQ ID NO: 674195 - RNA, 19 nt, Artificial Sequence
  Description of Artificial Sequence: Synthetic oligonucleotide
ggcacccaguaccugcaga

SEQ ID NO: 674196 - RNA, 19 nt, Artificial Sequence
  Description of Artificial Sequence: Synthetic oligonucleotide
uaguuccaccuugggccgu

SEQ ID NO: 674197 - RNA, 19 nt, Artificial Sequence
  Description of Artificial Sequence: Synthetic oligonucleotide
gggucugaugcccggccca

SEQ ID NO: 674198 - RNA, 19 nt, Artificial Sequence
  Description of Artificial Sequence: Synthetic oligonucleotide
cuacgucugcugcacacau

SEQ ID NO: 674199 - RNA, 19 nt, Artificial Sequence
  Description of Artificial Sequence: Synthetic oligonucleotide
guacuaccuccagcuugcc

SEQ ID NO: 674200 - RNA, 19 nt, Artificial Sequence
  Description of Artificial Sequence: Synthetic oligonucleotide
ccucacuggagucucaggu

SEQ ID NO: 674201 - RNA, 19 nt, Artificial Sequence
  Description of Artificial Sequence: Synthetic oligonucleotide
cuguguugaucuggaugca

SEQ ID NO: 674202 - RNA, 19 nt, Artificial Sequence
  Description of Artificial Sequence: Synthetic oligonucleotide
cagugucacgcuuuacuuu

SEQ ID NO: 674203 - RNA, 19 nt, Artificial Sequence
  Description of Artificial Sequence: Synthetic oligonucleotide
gcaccaaugccuacccaga

SEQ ID NO: 674204 - RNA, 19 nt, Artificial Sequence
  Description of Artificial Sequence: Synthetic oligonucleotide
agcccgcuguucauugccu

SEQ ID NO: 674205 - RNA, 19 nt, Artificial Sequence
  Description of Artificial Sequence: Synthetic oligonucleotide
aggaagcaucaaacaugcu

SEQ ID NO: 674206 - RNA, 19 nt, Artificial Sequence
  Description of Artificial Sequence: Synthetic oligonucleotide
cuuccaggcugcggcugac

SEQ ID NO: 674207 - RNA, 19 nt, Artificial Sequence
  Description of Artificial Sequence: Synthetic oligonucleotide
ugccccgguggaugaugaa

SEQ ID NO: 674208 - RNA, 19 nt, Artificial Sequence
  Description of Artificial Sequence: Synthetic oligonucleotide
cgaguguagucuacuguca

SEQ ID NO: 674209 - RNA, 19 nt, Artificial Sequence
  Description of Artificial Sequence: Synthetic oligonucleotide
gccauuggugcggaucuga

SEQ ID NO: 674210 - RNA, 19 nt, Artificial Sequence
  Description of Artificial Sequence: Synthetic oligonucleotide
gccccgguggaugaugaac

SEQ ID NO: 674211 - RNA, 19 nt, Artificial Sequence
  Description of Artificial Sequence: Synthetic oligonucleotide
gcauggaagcagcggguaa

SEQ ID NO: 674212 - RNA, 19 nt, Artificial Sequence
  Description of Artificial Sequence: Synthetic oligonucleotide
gccaagccagaugaauaca

SEQ ID NO: 674213 - RNA, 19 nt, Artificial Sequence
  Description of Artificial Sequence: Synthetic oligonucleotide
ccaagccagaugaauacau

SEQ ID NO: 674214 - RNA, 19 nt, Artificial Sequence
  Description of Artificial Sequence: Synthetic oligonucleotide
ggaccgaggccuuccccuc

SEQ ID NO: 674215 - RNA, 19 nt, Artificial Sequence
  Description of Artificial Sequence: Synthetic oligonucleotide
gccggugcagcaucccaca

SEQ ID NO: 674216 - RNA, 19 nt, Artificial Sequence
  Description of Artificial Sequence: Synthetic oligonucleotide
aguuccaccuugggccguu

SEQ ID NO: 674217 - RNA, 19 nt, Artificial Sequence
  Description of Artificial Sequence: Synthetic oligonucleotide
guggccggugcagcauccc

SEQ ID NO: 674218 - RNA, 19 nt, Artificial Sequence
  Description of Artificial Sequence: Synthetic oligonucleotide
ccgcuguucauugccuuug

SEQ ID NO: 674219 - RNA, 19 nt, Artificial Sequence
  Description of Artificial Sequence: Synthetic oligonucleotide
gcagcggguaaaagcccgc

SEQ ID NO: 674220 - RNA, 19 nt, Artificial Sequence
  Description of Artificial Sequence: Synthetic oligonucleotide
ccuggaccgaggccuuccc

SEQ ID NO: 674221 - RNA, 19 nt, Artificial Sequence
  Description of Artificial Sequence: Synthetic oligonucleotide
ccucagccagugccauugg

SEQ ID NO: 674222 - RNA, 19 nt, Artificial Sequence
  Description of Artificial Sequence: Synthetic oligonucleotide
gcaagagugguggguagcu

SEQ ID NO: 674223 - RNA, 19 nt, Artificial Sequence
  Description of Artificial Sequence: Synthetic oligonucleotide
cccgccacacauagauguc

SEQ ID NO: 674224 - RNA, 19 nt, Artificial Sequence
  Description of Artificial Sequence: Synthetic oligonucleotide
ccuuugcggaccaggcgca

SEQ ID NO: 674225 - RNA, 19 nt, Artificial Sequence
  Description of Artificial Sequence: Synthetic oligonucleotide
gcaccgggugcagagggca

SEQ ID NO: 674226 - RNA, 19 nt, Artificial Sequence
  Description of Artificial Sequence: Synthetic oligonucleotide
gccuugguuguccucacuu

SEQ ID NO: 674227 - RNA, 19 nt, Artificial Sequence
  Description of Artificial Sequence: Synthetic oligonucleotide
cugcugugucauacguacu

SEQ ID NO: 674228 - RNA, 19 nt, Artificial Sequence
  Description of Artificial Sequence: Synthetic oligonucleotide
caccacgagugugauuucu

SEQ ID NO: 674229 - RNA, 19 nt, Artificial Sequence
  Description of Artificial Sequence: Synthetic oligonucleotide
accugcagaggaagacaua

SEQ ID NO: 674230 - RNA, 19 nt, Artificial Sequence
  Description of Artificial Sequence: Synthetic oligonucleotide
agcgugugugcuggaugua

SEQ ID NO: 674231 - RNA, 19 nt, Artificial Sequence
  Description of Artificial Sequence: Synthetic oligonucleotide
cgagugaacuuccugcccu

SEQ ID NO: 674232 - RNA, 19 nt, Artificial Sequence
  Description of Artificial Sequence: Synthetic oligonucleotide
ggaacaccugaagagccuu

SEQ ID NO: 674233 - RNA, 19 nt, Artificial Sequence
  Description of Artificial Sequence: Synthetic oligonucleotide
cggcugaccacugcauggc

SEQ ID NO: 674234 - RNA, 19 nt, Artificial Sequence
  Description of Artificial Sequence: Synthetic oligonucleotide
gacuugcggccaagccaga

SEQ ID NO: 674235 - RNA, 19 nt, Artificial Sequence
  Description of Artificial Sequence: Synthetic oligonucleotide
ccccuccuugacuuccguc

SEQ ID NO: 674236 - RNA, 19 nt, Artificial Sequence
  Description of Artificial Sequence: Synthetic oligonucleotide
ggcaaaagucagagcauuu

SEQ ID NO: 674237 - RNA, 19 nt, Artificial Sequence
  Description of Artificial Sequence: Synthetic oligonucleotide
ccaauacgaagccuuccau

SEQ ID NO: 674238 - RNA, 19 nt, Artificial Sequence
  Description of Artificial Sequence: Synthetic oligonucleotide
ccggugcagcaucccacac

SEQ ID NO: 674239 - RNA, 19 nt, Artificial Sequence
  Description of Artificial Sequence: Synthetic oligonucleotide
gcaccacgagugugauuuc

SEQ ID NO: 674240 - RNA, 19 nt, Artificial Sequence
  Description of Artificial Sequence: Synthetic oligonucleotide
cugcggcugaccacugcau

SEQ ID NO: 674241 - RNA, 19 nt, Artificial Sequence
  Description of Artificial Sequence: Synthetic oligonucleotide
ccuccggcagucgagugaa

SEQ ID NO: 674242 - RNA, 19 nt, Artificial Sequence
  Description of Artificial Sequence: Synthetic oligonucleotide
cacgcugguggggcuugca

SEQ ID NO: 674243 - RNA, 19 nt, Artificial Sequence
  Description of Artificial Sequence: Synthetic oligonucleotide
ggcuuggcggaaggugcuc

SEQ ID NO: 674244 - RNA, 19 nt, Artificial Sequence
  Description of Artificial Sequence: Synthetic oligonucleotide
cgucugcugcacacaugug

SEQ ID NO: 674245 - RNA, 19 nt, Artificial Sequence
  Description of Artificial Sequence: Synthetic oligonucleotide
ccuuuccgcucauucuugu

SEQ ID NO: 674246 - RNA, 19 nt, Artificial Sequence
  Description of Artificial Sequence: Synthetic oligonucleotide
cagcggguaaaagcccgcu

SEQ ID NO: 674247 - RNA, 19 nt, Artificial Sequence
  Description of Artificial Sequence: Synthetic oligonucleotide
cggaaggugcuccaggcau

SEQ ID NO: 674248 - RNA, 19 nt, Artificial Sequence
  Description of Artificial Sequence: Synthetic oligonucleotide
gcggccaagccagaugaau

SEQ ID NO: 674249 - RNA, 19 nt, Artificial Sequence
  Description of Artificial Sequence: Synthetic oligonucleotide
gcgugugugcuggauguau

SEQ ID NO: 674250 - RNA, 19 nt, Artificial Sequence
  Description of Artificial Sequence: Synthetic oligonucleotide
ccguggcaggaagagugca

SEQ ID NO: 674251 - RNA, 19 nt, Artificial Sequence
  Description of Artificial Sequence: Synthetic oligonucleotide
gcccggcccacccaggcau

SEQ ID NO: 674252 - RNA, 19 nt, Artificial Sequence
  Description of Artificial Sequence: Synthetic oligonucleotide
gggcuuggcggaaggugcu

SEQ ID NO: 674253 - RNA, 19 nt, Artificial Sequence
  Description of Artificial Sequence: Synthetic oligonucleotide
ccggcagucgagugaacuu

SEQ ID NO: 674254 - RNA, 19 nt, Artificial Sequence
  Description of Artificial Sequence: Synthetic oligonucleotide
ccggcccacccaggcauac

SEQ ID NO: 674255 - RNA, 19 nt, Artificial Sequence
  Description of Artificial Sequence: Synthetic oligonucleotide
cgagugugauuucugccuu

SEQ ID NO: 674256 - RNA, 19 nt, Artificial Sequence
  Description of Artificial Sequence: Synthetic oligonucleotide
ccaggucaucuuggcaaaa

SEQ ID NO: 674257 - RNA, 19 nt, Artificial Sequence
  Description of Artificial Sequence: Synthetic oligonucleotide
ccgcucauucuuguuaauu

SEQ ID NO: 674258 - RNA, 19 nt, Artificial Sequence
  Description of Artificial Sequence: Synthetic oligonucleotide
cugcaccacgagugugauu

SEQ ID NO: 674259 - RNA, 19 nt, Artificial Sequence
  Description of Artificial Sequence: Synthetic oligonucleotide
gcguggccgcucauguucu

SEQ ID NO: 674260 - RNA, 19 nt, Artificial Sequence
  Description of Artificial Sequence: Synthetic oligonucleotide
gcccgcuguucauugccuu

SEQ ID NO: 674261 - RNA, 19 nt, Artificial Sequence
  Description of Artificial Sequence: Synthetic oligonucleotide
gcccuccaauacgaagccu

SEQ ID NO: 674262 - RNA, 19 nt, Artificial Sequence
  Description of Artificial Sequence: Synthetic oligonucleotide
ggacacgcugguggggcuu

SEQ ID NO: 674263 - RNA, 19 nt, Artificial Sequence
  Description of Artificial Sequence: Synthetic oligonucleotide
ggcguggccggugcagcau

SEQ ID NO: 674264 - RNA, 19 nt, Artificial Sequence
  Description of Artificial Sequence: Synthetic oligonucleotide
cacugccauuggugcggau

SEQ ID NO: 674265 - RNA, 19 nt, Artificial Sequence
  Description of Artificial Sequence: Synthetic oligonucleotide
cggguaaaagcccgcuguu

SEQ ID NO: 674266 - RNA, 19 nt, Artificial Sequence
  Description of Artificial Sequence: Synthetic oligonucleotide
cggugccuuccaggcugcg

SEQ ID NO: 674267 - RNA, 19 nt, Artificial Sequence
  Description of Artificial Sequence: Synthetic oligonucleotide
cccggcccacccaggcaua

SEQ ID NO: 674268 - RNA, 19 nt, Artificial Sequence
  Description of Artificial Sequence: Synthetic oligonucleotide
cggcccacccaggcauaca

SEQ ID NO: 674269 - RNA, 19 nt, Artificial Sequence
  Description of Artificial Sequence: Synthetic oligonucleotide
cguggccgcucauguucuu

SEQ ID NO: 674270 - RNA, 19 nt, Artificial Sequence
  Description of Artificial Sequence: Synthetic oligonucleotide
  modified_base (10)..(10): a, c, u, g, unknown or other
  modified_base (14)..(14): a, c, u, g, unknown or other
  modified_base (18)..(18): a, c, u, g, unknown or other
uauaauaaanaaanaaana

SEQ ID NO: 674271 - RNA, 19 nt, Artificial Sequence
  Description of Artificial Sequence: Synthetic oligonucleotide
ucuuuaaugacgcaaaggg

SEQ ID NO: 674272 - RNA, 19 nt, Artificial Sequence
  Description of Artificial Sequence: Synthetic oligonucleotide
  modified_base (8)..(8): a, c, u, g, unknown or other
  modified_base (12)..(12): a, c, u, g, unknown or other
  modified_base (16)..(16): a, c, u, g, unknown or other
uaauaaanaaanaaanaaa

SEQ ID NO: 674273 - RNA, 19 nt, Artificial Sequence
  Description of Artificial Sequence: Synthetic oligonucleotide
aauaugaagccauauagug

SEQ ID NO: 674274 - RNA, 19 nt, Artificial Sequence
  Description of Artificial Sequence: Synthetic oligonucleotide
  modified_base (7)..(7): a, c, u, g, unknown or other
  modified_base (11)..(11): a, c, u, g, unknown or other
  modified_base (15)..(15): a, c, u, g, unknown or other
aauaaanaaanaaanaaaa

SEQ ID NO: 674275 - RNA, 19 nt, Artificial Sequence
  Description of Artificial Sequence: Synthetic oligonucleotide
uuuaaauguauucagucag

SEQ ID NO: 674276 - RNA, 19 nt, Artificial Sequence
  Description of Artificial Sequence: Synthetic oligonucleotide
agauccaaaaccuaugacc

SEQ ID NO: 674277 - RNA, 19 nt, Artificial Sequence
  Description of Artificial Sequence: Synthetic oligonucleotide
ugaguaaaggaacagaaag

SEQ ID NO: 674278 - RNA, 19 nt, Artificial Sequence
  Description of Artificial Sequence: Synthetic oligonucleotide
acuaguugaaaacaaacac

SEQ ID NO: 674279 - RNA, 19 nt, Artificial Sequence
  Description of Artificial Sequence: Synthetic oligonucleotide
ucuacauuaacaguuaagg

SEQ ID NO: 674280 - RNA, 19 nt, Artificial Sequence
  Description of Artificial Sequence: Synthetic oligonucleotide
uuuaacuuggcccaaaaga

SEQ ID NO: 674281 - RNA, 19 nt, Artificial Sequence
  Description of Artificial Sequence: Synthetic oligonucleotide
agaauaugaagccauauag

SEQ ID NO: 674282 - RNA, 19 nt, Artificial Sequence
  Description of Artificial Sequence: Synthetic oligonucleotide
  modified_base (18)..(18): a, c, u, g, unknown or other
uauauauauauaauaaana

SEQ ID NO: 674283 - RNA, 19 nt, Artificial Sequence
  Description of Artificial Sequence: Synthetic oligonucleotide
uuuaaugacgcaaaggggu

SEQ ID NO: 674284 - RNA, 19 nt, Artificial Sequence
  Description of Artificial Sequence: Synthetic oligonucleotide
aaaagcuugaauacugucc

SEQ ID NO: 674285 - RNA, 19 nt, Artificial Sequence
  Description of Artificial Sequence: Synthetic oligonucleotide
aaaguauauauauauaaua

SEQ ID NO: 674286 - RNA, 19 nt, Artificial Sequence
  Description of Artificial Sequence: Synthetic oligonucleotide
auaagaacuauacaugcuc

SEQ ID NO: 674287 - RNA, 19 nt, Artificial Sequence
  Description of Artificial Sequence: Synthetic oligonucleotide
auuagcaagauacuuauca

SEQ ID NO: 674288 - RNA, 19 nt, Artificial Sequence
  Description of Artificial Sequence: Synthetic oligonucleotide
agugaagucagcuacguag

SEQ ID NO: 674289 - RNA, 19 nt, Artificial Sequence
  Description of Artificial Sequence: Synthetic oligonucleotide
aagauacuuaucaugaaac

SEQ ID NO: 674290 - RNA, 19 nt, Artificial Sequence
  Description of Artificial Sequence: Synthetic oligonucleotide
ugcaguaaaauauaaaauc

SEQ ID NO: 674291 - RNA, 19 nt, Artificial Sequence
  Description of Artificial Sequence: Synthetic oligonucleotide
aaagauagacccuaguuaa

SEQ ID NO: 674292 - RNA, 19 nt, Artificial Sequence
  Description of Artificial Sequence: Synthetic oligonucleotide
uauucggggaugaauaagg

SEQ ID NO: 674293 - RNA, 19 nt, Artificial Sequence
  Description of Artificial Sequence: Synthetic oligonucleotide
agagguauguuccaauggc

SEQ ID NO: 674294 - RNA, 19 nt, Artificial Sequence
  Description of Artificial Sequence: Synthetic oligonucleotide
  modified_base (9)..(9): a, c, u, g, unknown or other
  modified_base (13)..(13): a, c, u, g, unknown or other
  modified_base (17)..(17): a, c, u, g, unknown or other
auaauaaanaaanaaanaa

SEQ ID NO: 674295 - RNA, 19 nt, Artificial Sequence
  Description of Artificial Sequence: Synthetic oligonucleotide
cuacaauuuucacagaucc

SEQ ID NO: 674296 - RNA, 19 nt, Artificial Sequence
  Description of Artificial Sequence: Synthetic oligonucleotide
aaaaccauaccaggcaagc

SEQ ID NO: 674297 - RNA, 19 nt, Artificial Sequence
  Description of Artificial Sequence: Synthetic oligonucleotide
agacauaagaacuauacau

SEQ ID NO: 674298 - RNA, 19 nt, Artificial Sequence
  Description of Artificial Sequence: Synthetic oligonucleotide
aaauuagcaagauacuuau

SEQ ID NO: 674299 - RNA, 19 nt, Artificial Sequence
  Description of Artificial Sequence: Synthetic oligonucleotide
acaaaguauauauauauaa

SEQ ID NO: 674300 - RNA, 19 nt, Artificial Sequence
  Description of Artificial Sequence: Synthetic oligonucleotide
aggccugagauccaaaacc

SEQ ID NO: 674301 - RNA, 19 nt, Artificial Sequence
  Description of Artificial Sequence: Synthetic oligonucleotide
ugagauucuaaauucagaa

SEQ ID NO: 674302 - RNA, 19 nt, Artificial Sequence
  Description of Artificial Sequence: Synthetic oligonucleotide
aguaggacaaaguauauau

SEQ ID NO: 674303 - RNA, 19 nt, Artificial Sequence
  Description of Artificial Sequence: Synthetic oligonucleotide
aauuuucucugguagagau

SEQ ID NO: 674304 - RNA, 19 nt, Artificial Sequence
  Description of Artificial Sequence: Synthetic oligonucleotide
agccauauagugcuggccc

SEQ ID NO: 674305 - RNA, 19 nt, Artificial Sequence
  Description of Artificial Sequence: Synthetic oligonucleotide
aauuugaugugugcauucc

SEQ ID NO: 674306 - RNA, 19 nt, Artificial Sequence
  Description of Artificial Sequence: Synthetic oligonucleotide
aauaucuacauguuuucau

SEQ ID NO: 674307 - RNA, 19 nt, Artificial Sequence
  Description of Artificial Sequence: Synthetic oligonucleotide
uuaacuuggcccaaaagau

SEQ ID NO: 674308 - RNA, 19 nt, Artificial Sequence
  Description of Artificial Sequence: Synthetic oligonucleotide
uaaagauagacccuaguua

SEQ ID NO: 674309 - RNA, 19 nt, Artificial Sequence
  Description of Artificial Sequence: Synthetic oligonucleotide
ugccaaaauaccaccacgg

SEQ ID NO: 674310 - RNA, 19 nt, Artificial Sequence
  Description of Artificial Sequence: Synthetic oligonucleotide
aaguauauauauauaauaa

SEQ ID NO: 674311 - RNA, 19 nt, Artificial Sequence
  Description of Artificial Sequence: Synthetic oligonucleotide
uuucauaccuauaaaacuu

SEQ ID NO: 674312 - RNA, 19 nt, Artificial Sequence
  Description of Artificial Sequence: Synthetic oligonucleotide
ucuaguagagccaccacug

SEQ ID NO: 674313 - RNA, 19 nt, Artificial Sequence
  Description of Artificial Sequence: Synthetic oligonucleotide
acuuauuuaacuuggccca

SEQ ID NO: 674314 - RNA, 19 nt, Artificial Sequence
  Description of Artificial Sequence: Synthetic oligonucleotide
aaugguucauuuacugugc

SEQ ID NO: 674315 - RNA, 19 nt, Artificial Sequence
  Description of Artificial Sequence: Synthetic oligonucleotide
ucuacauguuuucauaccu

SEQ ID NO: 674316 - RNA, 19 nt, Artificial Sequence
  Description of Artificial Sequence: Synthetic oligonucleotide
  modified_base (11)..(11): a, c, u, g, unknown or other
  modified_base (15)..(15): a, c, u, g, unknown or other
  modified_base (19)..(19): a, c, u, g, unknown or other
auauaauaaanaaanaaan

SEQ ID NO: 674317 - RNA, 19 nt, Artificial Sequence
  Description of Artificial Sequence: Synthetic oligonucleotide
ugugaguaaaggaacagaa

SEQ ID NO: 674318 - RNA, 19 nt, Artificial Sequence
  Description of Artificial Sequence: Synthetic oligonucleotide
aguaacuuauuuaacuugg

SEQ ID NO: 674319 - RNA, 19 nt, Artificial Sequence
  Description of Artificial Sequence: Synthetic oligonucleotide
aguauauauauauaauaaa

SEQ ID NO: 674320 - RNA, 19 nt, Artificial Sequence
  Description of Artificial Sequence: Synthetic oligonucleotide
aaaugucuaguagagccac

SEQ ID NO: 674321 - RNA, 19 nt, Artificial Sequence
  Description of Artificial Sequence: Synthetic oligonucleotide
gaugaguaagacuguagag

SEQ ID NO: 674322 - RNA, 19 nt, Artificial Sequence
  Description of Artificial Sequence: Synthetic oligonucleotide
aaccauaccaggcaagcug

SEQ ID NO: 674323 - RNA, 19 nt, Artificial Sequence
  Description of Artificial Sequence: Synthetic oligonucleotide
uuaaagauagacccuaguu

SEQ ID NO: 674324 - RNA, 19 nt, Artificial Sequence
  Description of Artificial Sequence: Synthetic oligonucleotide
gauacuuaucaugaaacug

SEQ ID NO: 674325 - RNA, 19 nt, Artificial Sequence
  Description of Artificial Sequence: Synthetic oligonucleotide
gaagcaaaugucuaguaga

SEQ ID NO: 674326 - RNA, 19 nt, Artificial Sequence
  Description of Artificial Sequence: Synthetic oligonucleotide
aucuacauguuuucauacc

SEQ ID NO: 674327 - RNA, 19 nt, Artificial Sequence
  Description of Artificial Sequence: Synthetic oligonucleotide
gaaaucaugccaaaauacc

SEQ ID NO: 674328 - RNA, 19 nt, Artificial Sequence
  Description of Artificial Sequence: Synthetic oligonucleotide
accuucauuauuuauaaau

SEQ ID NO: 674329 - RNA, 19 nt, Artificial Sequence
  Description of Artificial Sequence: Synthetic oligonucleotide
aagacauaagaacuauaca

SEQ ID NO: 674330 - RNA, 19 nt, Artificial Sequence
  Description of Artificial Sequence: Synthetic oligonucleotide
uuuuauucccuagugaacu

SEQ ID NO: 674331 - RNA, 19 nt, Artificial Sequence
  Description of Artificial Sequence: Synthetic oligonucleotide
agcaccaugaaguauccag

SEQ ID NO: 674332 - RNA, 19 nt, Artificial Sequence
  Description of Artificial Sequence: Synthetic oligonucleotide
agugcuagguuauaguuca

SEQ ID NO: 674333 - RNA, 19 nt, Artificial Sequence
  Description of Artificial Sequence: Synthetic oligonucleotide
acauuaacaguuaaggcag

SEQ ID NO: 674334 - RNA, 19 nt, Artificial Sequence
  Description of Artificial Sequence: Synthetic oligonucleotide
cuuaucaugaaacugagcu

SEQ ID NO: 674335 - RNA, 19 nt, Artificial Sequence
  Description of Artificial Sequence: Synthetic oligonucleotide
  modified_base (19)..(19): a, c, u, g, unknown or other
guauauauauauaauaaan

SEQ ID NO: 674336 - RNA, 19 nt, Artificial Sequence
  Description of Artificial Sequence: Synthetic oligonucleotide
agaauucaauucugggccc

SEQ ID NO: 674337 - RNA, 19 nt, Artificial Sequence
  Description of Artificial Sequence: Synthetic oligonucleotide
uuugaugugugcauuccca

SEQ ID NO: 674338 - RNA, 19 nt, Artificial Sequence
  Description of Artificial Sequence: Synthetic oligonucleotide
gucuccauaauuugcagag

SEQ ID NO: 674339 - RNA, 19 nt, Artificial Sequence
  Description of Artificial Sequence: Synthetic oligonucleotide
gacauaagaacuauacaug

SEQ ID NO: 674340 - RNA, 19 nt, Artificial Sequence
  Description of Artificial Sequence: Synthetic oligonucleotide
uuuguuaaagauagacccu

SEQ ID NO: 674341 - RNA, 19 nt, Artificial Sequence
  Description of Artificial Sequence: Synthetic oligonucleotide
agaaugugaguaaaggaac

SEQ ID NO: 674342 - RNA, 19 nt, Artificial Sequence
  Description of Artificial Sequence: Synthetic oligonucleotide
aacucguucaguucaacau

SEQ ID NO: 674343 - RNA, 19 nt, Artificial Sequence
  Description of Artificial Sequence: Synthetic oligonucleotide
uguuaugauccccugggca

SEQ ID NO: 674344 - RNA, 19 nt, Artificial Sequence
  Description of Artificial Sequence: Synthetic oligonucleotide
ugugccaaggagaaagggc

SEQ ID NO: 674345 - RNA, 19 nt, Artificial Sequence
  Description of Artificial Sequence: Synthetic oligonucleotide
uucuuuaaugacgcaaagg

SEQ ID NO: 674346 - RNA, 19 nt, Artificial Sequence
  Description of Artificial Sequence: Synthetic oligonucleotide
aacuauacaugcuccaaau

SEQ ID NO: 674347 - RNA, 19 nt, Artificial Sequence
  Description of Artificial Sequence: Synthetic oligonucleotide
uguagagucuuuuccaacu

SEQ ID NO: 674348 - RNA, 19 nt, Artificial Sequence
  Description of Artificial Sequence: Synthetic oligonucleotide
augcagaugaguaagacug

SEQ ID NO: 674349 - RNA, 19 nt, Artificial Sequence
  Description of Artificial Sequence: Synthetic oligonucleotide
ugccccacacaucagagag

SEQ ID NO: 674350 - RNA, 19 nt, Artificial Sequence
  Description of Artificial Sequence: Synthetic oligonucleotide
uacuuaucaugaaacugag

SEQ ID NO: 674351 - RNA, 19 nt, Artificial Sequence
  Description of Artificial Sequence: Synthetic oligonucleotide
gauacagacuaguugaaaa

SEQ ID NO: 674352 - RNA, 19 nt, Artificial Sequence
  Description of Artificial Sequence: Synthetic oligonucleotide
auaauuugcagagagguau

SEQ ID NO: 674353 - RNA, 19 nt, Artificial Sequence
  Description of Artificial Sequence: Synthetic oligonucleotide
ucuaauuuucucugguaga

SEQ ID NO: 674354 - RNA, 19 nt, Artificial Sequence
  Description of Artificial Sequence: Synthetic oligonucleotide
aaggggucugcuuguuucc

SEQ ID NO: 674355 - RNA, 19 nt, Artificial Sequence
  Description of Artificial Sequence: Synthetic oligonucleotide
uucccuagugaacucauca

SEQ ID NO: 674356 - RNA, 19 nt, Artificial Sequence
  Description of Artificial Sequence: Synthetic oligonucleotide
ucucugguagagauucugg

SEQ ID NO: 674357 - RNA, 19 nt, Artificial Sequence
  Description of Artificial Sequence: Synthetic oligonucleotide
ucugacuccgcauuccgag

SEQ ID NO: 674358 - RNA, 19 nt, Artificial Sequence
  Description of Artificial Sequence: Synthetic oligonucleotide
aggaaaacagaaguaggac

SEQ ID NO: 674359 - RNA, 19 nt, Artificial Sequence
  Description of Artificial Sequence: Synthetic oligonucleotide
uagcaagauacuuaucaug

SEQ ID NO: 674360 - RNA, 19 nt, Artificial Sequence
  Description of Artificial Sequence: Synthetic oligonucleotide
uguuacaucuguucauggc

SEQ ID NO: 674361 - RNA, 19 nt, Artificial Sequence
  Description of Artificial Sequence: Synthetic oligonucleotide
aucagugggauagggaagc

SEQ ID NO: 674362 - RNA, 19 nt, Artificial Sequence
  Description of Artificial Sequence: Synthetic oligonucleotide
uagagauucuggaacugcc

SEQ ID NO: 674363 - RNA, 19 nt, Artificial Sequence
  Description of Artificial Sequence: Synthetic oligonucleotide
auacuuaucaugaaacuga

SEQ ID NO: 674364 - RNA, 19 nt, Artificial Sequence
  Description of Artificial Sequence: Synthetic oligonucleotide
uccaagaaaucugagcgcc

SEQ ID NO: 674365 - RNA, 19 nt, Artificial Sequence
  Description of Artificial Sequence: Synthetic oligonucleotide
uguuaaagauagacccuag

SEQ ID NO: 674366 - RNA, 19 nt, Artificial Sequence
  Description of Artificial Sequence: Synthetic oligonucleotide
uauagugcuggcccuagac

SEQ ID NO: 674367 - RNA, 19 nt, Artificial Sequence
  Description of Artificial Sequence: Synthetic oligonucleotide
ugggcugcuaaccagacua

SEQ ID NO: 674368 - RNA, 19 nt, Artificial Sequence
  Description of Artificial Sequence: Synthetic oligonucleotide
uacaagauuuacacaguac

SEQ ID NO: 674369 - RNA, 19 nt, Artificial Sequence
  Description of Artificial Sequence: Synthetic oligonucleotide
augccaaaauaccaccacg

SEQ ID NO: 674370 - RNA, 19 nt, Artificial Sequence
  Description of Artificial Sequence: Synthetic oligonucleotide
aaaacggcgggccugggau

SEQ ID NO: 674371 - RNA, 19 nt, Artificial Sequence
  Description of Artificial Sequence: Synthetic oligonucleotide
guuacaucuguucauggca

SEQ ID NO: 674372 - RNA, 19 nt, Artificial Sequence
  Description of Artificial Sequence: Synthetic oligonucleotide
auuuaacuuggcccaaaag

SEQ ID NO: 674373 - RNA, 19 nt, Artificial Sequence
  Description of Artificial Sequence: Synthetic oligonucleotide
uccaaaaccuaugaccugc

SEQ ID NO: 674374 - RNA, 19 nt, Artificial Sequence
  Description of Artificial Sequence: Synthetic oligonucleotide
agauacuuaucaugaaacu

SEQ ID NO: 674375 - RNA, 19 nt, Artificial Sequence
  Description of Artificial Sequence: Synthetic oligonucleotide
aaaucugagcgccccagga

SEQ ID NO: 674376 - RNA, 19 nt, Artificial Sequence
  Description of Artificial Sequence: Synthetic oligonucleotide
gaugcugcuagcauugccc

SEQ ID NO: 674377 - RNA, 19 nt, Artificial Sequence
  Description of Artificial Sequence: Synthetic oligonucleotide
aaagugaacugagaagacu

SEQ ID NO: 674378 - RNA, 19 nt, Artificial Sequence
  Description of Artificial Sequence: Synthetic oligonucleotide
uaacuuggcccaaaagaug

SEQ ID NO: 674379 - RNA, 19 nt, Artificial Sequence
  Description of Artificial Sequence: Synthetic oligonucleotide
uagaauaugaagccauaua

SEQ ID NO: 674380 - RNA, 19 nt, Artificial Sequence
  Description of Artificial Sequence: Synthetic oligonucleotide
aagccauauagugcuggcc

SEQ ID NO: 674381 - RNA, 19 nt, Artificial Sequence
  Description of Artificial Sequence: Synthetic oligonucleotide
uuugcuaaggaagacuguc

SEQ ID NO: 674382 - RNA, 19 nt, Artificial Sequence
  Description of Artificial Sequence: Synthetic oligonucleotide
augaguaagacuguagagu

SEQ ID NO: 674383 - RNA, 19 nt, Artificial Sequence
  Description of Artificial Sequence: Synthetic oligonucleotide
agcaagauacuuaucauga

SEQ ID NO: 674384 - RNA, 19 nt, Artificial Sequence
  Description of Artificial Sequence: Synthetic oligonucleotide
uuagugcuagguuauaguu

SEQ ID NO: 674385 - RNA, 19 nt, Artificial Sequence
  Description of Artificial Sequence: Synthetic oligonucleotide
auggacagaauuccuacca

SEQ ID NO: 674386 - RNA, 19 nt, Artificial Sequence
  Description of Artificial Sequence: Synthetic oligonucleotide
ugagauccaaaaccauacc

SEQ ID NO: 674387 - RNA, 19 nt, Artificial Sequence
  Description of Artificial Sequence: Synthetic oligonucleotide
uagugcuggcccuagacca

SEQ ID NO: 674388 - RNA, 19 nt, Artificial Sequence
  Description of Artificial Sequence: Synthetic oligonucleotide
uuaaugacgcaaagggguc

SEQ ID NO: 674389 - RNA, 19 nt, Artificial Sequence
  Description of Artificial Sequence: Synthetic oligonucleotide
uccgcauuccgagagauga

SEQ ID NO: 674390 - RNA, 19 nt, Artificial Sequence
  Description of Artificial Sequence: Synthetic oligonucleotide
agacuagcugcaaaggugg

SEQ ID NO: 674391 - RNA, 19 nt, Artificial Sequence
  Description of Artificial Sequence: Synthetic oligonucleotide
agagagguauguuccaaug

SEQ ID NO: 674392 - RNA, 19 nt, Artificial Sequence
  Description of Artificial Sequence: Synthetic oligonucleotide
ucccaugagauucuaaauu

SEQ ID NO: 674393 - RNA, 19 nt, Artificial Sequence
  Description of Artificial Sequence: Synthetic oligonucleotide
uccuguuaugauccccugg

SEQ ID NO: 674394 - RNA, 19 nt, Artificial Sequence
  Description of Artificial Sequence: Synthetic oligonucleotide
auuccuaccauagcuauga

SEQ ID NO: 674395 - RNA, 19 nt, Artificial Sequence
  Description of Artificial Sequence: Synthetic oligonucleotide
caaaauaccaccacgggcu

SEQ ID NO: 674396 - RNA, 19 nt, Artificial Sequence
  Description of Artificial Sequence: Synthetic oligonucleotide
uucaauucugggcccaacu

SEQ ID NO: 674397 - RNA, 19 nt, Artificial Sequence
  Description of Artificial Sequence: Synthetic oligonucleotide
agaaguaggacaaaguaua

SEQ ID NO: 674398 - RNA, 19 nt, Artificial Sequence
  Description of Artificial Sequence: Synthetic oligonucleotide
uuagcaagauacuuaucau

SEQ ID NO: 674399 - RNA, 19 nt, Artificial Sequence
  Description of Artificial Sequence: Synthetic oligonucleotide
auguauucagucaguacac

SEQ ID NO: 674400 - RNA, 19 nt, Artificial Sequence
  Description of Artificial Sequence: Synthetic oligonucleotide
aagcaguacuucuuucaug

SEQ ID NO: 674401 - RNA, 19 nt, Artificial Sequence
  Description of Artificial Sequence: Synthetic oligonucleotide
aauacaagauuuacacagu

SEQ ID NO: 674402 - RNA, 19 nt, Artificial Sequence
  Description of Artificial Sequence: Synthetic oligonucleotide
uacauguuuucauaccuau

SEQ ID NO: 674403 - RNA, 19 nt, Artificial Sequence
  Description of Artificial Sequence: Synthetic oligonucleotide
aaaaugaagcaaaugucua

SEQ ID NO: 674404 - RNA, 19 nt, Artificial Sequence
  Description of Artificial Sequence: Synthetic oligonucleotide
ucguauuccuguuaugauc

SEQ ID NO: 674405 - RNA, 19 nt, Artificial Sequence
  Description of Artificial Sequence: Synthetic oligonucleotide
cagacuagcugcaaaggug

SEQ ID NO: 674406 - RNA, 19 nt, Artificial Sequence
  Description of Artificial Sequence: Synthetic oligonucleotide
auguuacaucuguucaugg

SEQ ID NO: 674407 - RNA, 19 nt, Artificial Sequence
  Description of Artificial Sequence: Synthetic oligonucleotide
auaucuacauguuuucaua

SEQ ID NO: 674408 - RNA, 19 nt, Artificial Sequence
  Description of Artificial Sequence: Synthetic oligonucleotide
gacuaguugaaaacaaaca

SEQ ID NO: 674409 - RNA, 19 nt, Artificial Sequence
  Description of Artificial Sequence: Synthetic oligonucleotide
ugacuccgcauuccgagag

SEQ ID NO: 674410 - RNA, 19 nt, Artificial Sequence
  Description of Artificial Sequence: Synthetic oligonucleotide
uaagcaguacuucuuucau

SEQ ID NO: 674411 - RNA, 19 nt, Artificial Sequence
  Description of Artificial Sequence: Synthetic oligonucleotide
uuccaagaaaucugagcgc

SEQ ID NO: 674412 - RNA, 19 nt, Artificial Sequence
  Description of Artificial Sequence: Synthetic oligonucleotide
agagucuuuuccaacuuuc

SEQ ID NO: 674413 - RNA, 19 nt, Artificial Sequence
  Description of Artificial Sequence: Synthetic oligonucleotide
auccauaagcaguacuucu

SEQ ID NO: 674414 - RNA, 19 nt, Artificial Sequence
  Description of Artificial Sequence: Synthetic oligonucleotide
ugaaaguaucauugaaaau

SEQ ID NO: 674415 - RNA, 19 nt, Artificial Sequence
  Description of Artificial Sequence: Synthetic oligonucleotide
aaugucuaguagagccacc

SEQ ID NO: 674416 - RNA, 19 nt, Artificial Sequence
  Description of Artificial Sequence: Synthetic oligonucleotide
uaagaagcuuaaccuaaaa

SEQ ID NO: 674417 - RNA, 19 nt, Artificial Sequence
  Description of Artificial Sequence: Synthetic oligonucleotide
auagacccuaguuaauggu

SEQ ID NO: 674418 - RNA, 19 nt, Artificial Sequence
  Description of Artificial Sequence: Synthetic oligonucleotide
guucagugcacugauuucc

SEQ ID NO: 674419 - RNA, 19 nt, Artificial Sequence
  Description of Artificial Sequence: Synthetic oligonucleotide
agcuaugaaugcuacaauu

SEQ ID NO: 674420 - RNA, 19 nt, Artificial Sequence
  Description of Artificial Sequence: Synthetic oligonucleotide
cuaugaguggagcacucag

SEQ ID NO: 674421 - RNA, 19 nt, Artificial Sequence
  Description of Artificial Sequence: Synthetic oligonucleotide
uuggcccaaaagaugcugc

SEQ ID NO: 674422 - RNA, 19 nt, Artificial Sequence
  Description of Artificial Sequence: Synthetic oligonucleotide
gaggaaaacagaaguagga

SEQ ID NO: 674423 - RNA, 19 nt, Artificial Sequence
  Description of Artificial Sequence: Synthetic oligonucleotide
uuuuacgguauucggggau

SEQ ID NO: 674424 - RNA, 19 nt, Artificial Sequence
  Description of Artificial Sequence: Synthetic oligonucleotide
ugaccugccugagauagag

SEQ ID NO: 674425 - RNA, 19 nt, Artificial Sequence
  Description of Artificial Sequence: Synthetic oligonucleotide
aacagaaguaggacaaagu

SEQ ID NO: 674426 - RNA, 19 nt, Artificial Sequence
  Description of Artificial Sequence: Synthetic oligonucleotide
uaaagaagacugugccaag

SEQ ID NO: 674427 - RNA, 19 nt, Artificial Sequence
  Description of Artificial Sequence: Synthetic oligonucleotide
cuuucaaaggagugcuuug

SEQ ID NO: 674428 - RNA, 19 nt, Artificial Sequence
  Description of Artificial Sequence: Synthetic oligonucleotide
gauagggaagcagguaaag

SEQ ID NO: 674429 - RNA, 19 nt, Artificial Sequence
  Description of Artificial Sequence: Synthetic oligonucleotide
ucaaaggagugcuuuguua

SEQ ID NO: 674430 - RNA, 19 nt, Artificial Sequence
  Description of Artificial Sequence: Synthetic oligonucleotide
uggcuaccaacacaacaag

SEQ ID NO: 674431 - RNA, 19 nt, Artificial Sequence
  Description of Artificial Sequence: Synthetic oligonucleotide
agcauugccccuccagcac

SEQ ID NO: 674432 - RNA, 19 nt, Artificial Sequence
  Description of Artificial Sequence: Synthetic oligonucleotide
uuguuaaagauagacccua

SEQ ID NO: 674433 - RNA, 19 nt, Artificial Sequence
  Description of Artificial Sequence: Synthetic oligonucleotide
ugaugugugcauucccaug

SEQ ID NO: 674434 - RNA, 19 nt, Artificial Sequence
  Description of Artificial Sequence: Synthetic oligonucleotide
gaagacugugccaaggaga

SEQ ID NO: 674435 - RNA, 19 nt, Artificial Sequence
  Description of Artificial Sequence: Synthetic oligonucleotide
aaaggagugcuuuguuaaa

SEQ ID NO: 674436 - RNA, 19 nt, Artificial Sequence
  Description of Artificial Sequence: Synthetic oligonucleotide
uggaaacccaagccaagga

SEQ ID NO: 674437 - RNA, 19 nt, Artificial Sequence
  Description of Artificial Sequence: Synthetic oligonucleotide
gaagccauauagugcuggc

SEQ ID NO: 674438 - RNA, 19 nt, Artificial Sequence
  Description of Artificial Sequence: Synthetic oligonucleotide
auacaagauuuacacagua

SEQ ID NO: 674439 - RNA, 19 nt, Artificial Sequence
  Description of Artificial Sequence: Synthetic oligonucleotide
cauuccgagagaugagggc

SEQ ID NO: 674440 - RNA, 19 nt, Artificial Sequence
  Description of Artificial Sequence: Synthetic oligonucleotide
cuuuagugcuagguuauag

SEQ ID NO: 674441 - RNA, 19 nt, Artificial Sequence
  Description of Artificial Sequence: Synthetic oligonucleotide
uuucaaaggagugcuuugu

SEQ ID NO: 674442 - RNA, 19 nt, Artificial Sequence
  Description of Artificial Sequence: Synthetic oligonucleotide
aauucugggcccaacucgu

SEQ ID NO: 674443 - RNA, 19 nt, Artificial Sequence
  Description of Artificial Sequence: Synthetic oligonucleotide
gaggcaugagaaaaguaac

SEQ ID NO: 674444 - RNA, 19 nt, Artificial Sequence
  Description of Artificial Sequence: Synthetic oligonucleotide
agaacaggcuucaaaauau

SEQ ID NO: 674445 - RNA, 19 nt, Artificial Sequence
  Description of Artificial Sequence: Synthetic oligonucleotide
ugguucauuuacugugcag

SEQ ID NO: 674446 - RNA, 19 nt, Artificial Sequence
  Description of Artificial Sequence: Synthetic oligonucleotide
uuuacgguauucggggaug

SEQ ID NO: 674447 - RNA, 19 nt, Artificial Sequence
  Description of Artificial Sequence: Synthetic oligonucleotide
ucaauuugcuaaggaagac

SEQ ID NO: 674448 - RNA, 19 nt, Artificial Sequence
  Description of Artificial Sequence: Synthetic oligonucleotide
uaccaccacgggcugaucc

SEQ ID NO: 674449 - RNA, 19 nt, Artificial Sequence
  Description of Artificial Sequence: Synthetic oligonucleotide
uuaauuugaugugugcauu

SEQ ID NO: 674450 - RNA, 19 nt, Artificial Sequence
  Description of Artificial Sequence: Synthetic oligonucleotide
caaaggagugcuuuguuaa

SEQ ID NO: 674451 - RNA, 19 nt, Artificial Sequence
  Description of Artificial Sequence: Synthetic oligonucleotide
gggaauguaaugcuggaca

SEQ ID NO: 674452 - RNA, 19 nt, Artificial Sequence
  Description of Artificial Sequence: Synthetic oligonucleotide
uccuuuagugcuagguuau

SEQ ID NO: 674453 - RNA, 19 nt, Artificial Sequence
  Description of Artificial Sequence: Synthetic oligonucleotide
ccuguuaugauccccuggg

SEQ ID NO: 674454 - RNA, 19 nt, Artificial Sequence
  Description of Artificial Sequence: Synthetic oligonucleotide
acuuaucaugaaacugagc

SEQ ID NO: 674455 - RNA, 19 nt, Artificial Sequence
  Description of Artificial Sequence: Synthetic oligonucleotide
aaugacgcaaaggggucug

SEQ ID NO: 674456 - RNA, 19 nt, Artificial Sequence
  Description of Artificial Sequence: Synthetic oligonucleotide
caagauacuuaucaugaaa

SEQ ID NO: 674457 - RNA, 19 nt, Artificial Sequence
  Description of Artificial Sequence: Synthetic oligonucleotide
gaaugugaguaaaggaaca

SEQ ID NO: 674458 - RNA, 19 nt, Artificial Sequence
  Description of Artificial Sequence: Synthetic oligonucleotide
guuaugauccccugggcaa

SEQ ID NO: 674459 - RNA, 19 nt, Artificial Sequence
  Description of Artificial Sequence: Synthetic oligonucleotide
aggucuaauuuucucuggu

SEQ ID NO: 674460 - RNA, 19 nt, Artificial Sequence
  Description of Artificial Sequence: Synthetic oligonucleotide
gcuagguuauaguucagug

SEQ ID NO: 674461 - RNA, 19 nt, Artificial Sequence
  Description of Artificial Sequence: Synthetic oligonucleotide
uuuauucccuagugaacuc

SEQ ID NO: 674462 - RNA, 19 nt, Artificial Sequence
  Description of Artificial Sequence: Synthetic oligonucleotide
uucacagauccaaaaccua

SEQ ID NO: 674463 - RNA, 19 nt, Artificial Sequence
  Description of Artificial Sequence: Synthetic oligonucleotide
aggagugcuuuguuaaaga

SEQ ID NO: 674464 - RNA, 19 nt, Artificial Sequence
  Description of Artificial Sequence: Synthetic oligonucleotide
agacccuaguuaaugguuc

SEQ ID NO: 674465 - RNA, 19 nt, Artificial Sequence
  Description of Artificial Sequence: Synthetic oligonucleotide
gaacuauacaugcuccaaa

SEQ ID NO: 674466 - RNA, 19 nt, Artificial Sequence
  Description of Artificial Sequence: Synthetic oligonucleotide
uagacccuaguuaaugguu

SEQ ID NO: 674467 - RNA, 19 nt, Artificial Sequence
  Description of Artificial Sequence: Synthetic oligonucleotide
ucuugagugaagucagcua

SEQ ID NO: 674468 - RNA, 19 nt, Artificial Sequence
  Description of Artificial Sequence: Synthetic oligonucleotide
cauaagcaguacuucuuuc

SEQ ID NO: 674469 - RNA, 19 nt, Artificial Sequence
  Description of Artificial Sequence: Synthetic oligonucleotide
ccaaaauaccaccacgggc

SEQ ID NO: 674470 - RNA, 19 nt, Artificial Sequence
  Description of Artificial Sequence: Synthetic oligonucleotide
accaugaaguauccaggug

SEQ ID NO: 674471 - RNA, 19 nt, Artificial Sequence
  Description of Artificial Sequence: Synthetic oligonucleotide
guaacuuauuuaacuuggc

SEQ ID NO: 674472 - RNA, 19 nt, Artificial Sequence
  Description of Artificial Sequence: Synthetic oligonucleotide
guagagauucuggaacugc

SEQ ID NO: 674473 - RNA, 19 nt, Artificial Sequence
  Description of Artificial Sequence: Synthetic oligonucleotide
uaccauagcuaugaaugcu

SEQ ID NO: 674474 - RNA, 19 nt, Artificial Sequence
  Description of Artificial Sequence: Synthetic oligonucleotide
gaugcagaugaguaagacu

SEQ ID NO: 674475 - RNA, 19 nt, Artificial Sequence
  Description of Artificial Sequence: Synthetic oligonucleotide
guuccaauggcugggcugc

SEQ ID NO: 674476 - RNA, 19 nt, Artificial Sequence
  Description of Artificial Sequence: Synthetic oligonucleotide
cuggaaacccaagccaagg

SEQ ID NO: 674477 - RNA, 19 nt, Artificial Sequence
  Description of Artificial Sequence: Synthetic oligonucleotide
uugaucugacuccgcauuc

SEQ ID NO: 674478 - RNA, 19 nt, Artificial Sequence
  Description of Artificial Sequence: Synthetic oligonucleotide
uucccaugagauucuaaau

SEQ ID NO: 674479 - RNA, 19 nt, Artificial Sequence
  Description of Artificial Sequence: Synthetic oligonucleotide
aauaccaccacgggcugau

SEQ ID NO: 674480 - RNA, 19 nt, Artificial Sequence
  Description of Artificial Sequence: Synthetic oligonucleotide
aacuuucuuuaaugacgca

SEQ ID NO: 674481 - RNA, 19 nt, Artificial Sequence
  Description of Artificial Sequence: Synthetic oligonucleotide
aaccccuuguugaucugac

SEQ ID NO: 674482 - RNA, 19 nt, Artificial Sequence
  Description of Artificial Sequence: Synthetic oligonucleotide
uaauuuucucugguagaga

SEQ ID NO: 674483 - RNA, 19 nt, Artificial Sequence
  Description of Artificial Sequence: Synthetic oligonucleotide
uguauucagucaguacaca

SEQ ID NO: 674484 - RNA, 19 nt, Artificial Sequence
  Description of Artificial Sequence: Synthetic oligonucleotide
caaaguauauauauauaau

SEQ ID NO: 674485 - RNA, 19 nt, Artificial Sequence
  Description of Artificial Sequence: Synthetic oligonucleotide
aauuccuaccauagcuaug

SEQ ID NO: 674486 - RNA, 19 nt, Artificial Sequence
  Description of Artificial Sequence: Synthetic oligonucleotide
ucugagcgccccaggaagc

SEQ ID NO: 674487 - RNA, 19 nt, Artificial Sequence
  Description of Artificial Sequence: Synthetic oligonucleotide
guauucagucaguacacaa

SEQ ID NO: 674488 - RNA, 19 nt, Artificial Sequence
  Description of Artificial Sequence: Synthetic oligonucleotide
caggcuucaaaauauauuu

SEQ ID NO: 674489 - RNA, 19 nt, Artificial Sequence
  Description of Artificial Sequence: Synthetic oligonucleotide
ugaucugacuccgcauucc

SEQ ID NO: 674490 - RNA, 19 nt, Artificial Sequence
  Description of Artificial Sequence: Synthetic oligonucleotide
agagccaccacuguggcua

SEQ ID NO: 674491 - RNA, 19 nt, Artificial Sequence
  Description of Artificial Sequence: Synthetic oligonucleotide
gcccaaaagaugcugcuag

SEQ ID NO: 674492 - RNA, 19 nt, Artificial Sequence
  Description of Artificial Sequence: Synthetic oligonucleotide
guauucggggaugaauaag

SEQ ID NO: 674493 - RNA, 19 nt, Artificial Sequence
  Description of Artificial Sequence: Synthetic oligonucleotide
aguuaaugguucauuuacu

SEQ ID NO: 674494 - RNA, 19 nt, Artificial Sequence
  Description of Artificial Sequence: Synthetic oligonucleotide
auuaacaguuaaggcagga

SEQ ID NO: 674495 - RNA, 19 nt, Artificial Sequence
  Description of Artificial Sequence: Synthetic oligonucleotide
uucauuuacugugcaguaa

SEQ ID NO: 674496 - RNA, 19 nt, Artificial Sequence
  Description of Artificial Sequence: Synthetic oligonucleotide
aaguaggacaaaguauaua

SEQ ID NO: 674497 - RNA, 19 nt, Artificial Sequence
  Description of Artificial Sequence: Synthetic oligonucleotide
acuauacaugcuccaaaua

SEQ ID NO: 674498 - RNA, 19 nt, Artificial Sequence
  Description of Artificial Sequence: Synthetic oligonucleotide
uccuaccauagcuaugaau

SEQ ID NO: 674499 - RNA, 19 nt, Artificial Sequence
  Description of Artificial Sequence: Synthetic oligonucleotide
cagauccaaaaccuaugac

SEQ ID NO: 674500 - RNA, 19 nt, Artificial Sequence
  Description of Artificial Sequence: Synthetic oligonucleotide
gacaaaguauauauauaua

SEQ ID NO: 674501 - RNA, 19 nt, Artificial Sequence
  Description of Artificial Sequence: Synthetic oligonucleotide
acugagcuucacuaacccu

SEQ ID NO: 674502 - RNA, 19 nt, Artificial Sequence
  Description of Artificial Sequence: Synthetic oligonucleotide
caucauugccccguucagg

SEQ ID NO: 674503 - RNA, 19 nt, Artificial Sequence
  Description of Artificial Sequence: Synthetic oligonucleotide
uauguuccaauggcugggc

SEQ ID NO: 674504 - RNA, 19 nt, Artificial Sequence
  Description of Artificial Sequence: Synthetic oligonucleotide
agcuccuaugaguggagca

SEQ ID NO: 674505 - RNA, 19 nt, Artificial Sequence
  Description of Artificial Sequence: Synthetic oligonucleotide
ugcuagguuauaguucagu

SEQ ID NO: 674506 - RNA, 19 nt, Artificial Sequence
  Description of Artificial Sequence: Synthetic oligonucleotide
ugucuaguagagccaccac

SEQ ID NO: 674507 - RNA, 19 nt, Artificial Sequence
  Description of Artificial Sequence: Synthetic oligonucleotide
cccaugagauucuaaauuc

SEQ ID NO: 674508 - RNA, 19 nt, Artificial Sequence
  Description of Artificial Sequence: Synthetic oligonucleotide
augucuaguagagccacca

SEQ ID NO: 674509 - RNA, 19 nt, Artificial Sequence
  Description of Artificial Sequence: Synthetic oligonucleotide
uacaucuguucauggcaga

SEQ ID NO: 674510 - RNA, 19 nt, Artificial Sequence
  Description of Artificial Sequence: Synthetic oligonucleotide
auagggaagcagguaaaga

SEQ ID NO: 674511 - RNA, 19 nt, Artificial Sequence
  Description of Artificial Sequence: Synthetic oligonucleotide
ucccuagugaacucaucaa

SEQ ID NO: 674512 - RNA, 19 nt, Artificial Sequence
  Description of Artificial Sequence: Synthetic oligonucleotide
cuaguuaaugguucauuua

SEQ ID NO: 674513 - RNA, 19 nt, Artificial Sequence
  Description of Artificial Sequence: Synthetic oligonucleotide
agaacuauacaugcuccaa

SEQ ID NO: 674514 - RNA, 19 nt, Artificial Sequence
  Description of Artificial Sequence: Synthetic oligonucleotide
cugucuugcaguaauggcu

SEQ ID NO: 674515 - RNA, 19 nt, Artificial Sequence
  Description of Artificial Sequence: Synthetic oligonucleotide
ucauggcagaacaggcuuc

SEQ ID NO: 674516 - RNA, 19 nt, Artificial Sequence
  Description of Artificial Sequence: Synthetic oligonucleotide
gguaaagaagacugugcca

SEQ ID NO: 674517 - RNA, 19 nt, Artificial Sequence
  Description of Artificial Sequence: Synthetic oligonucleotide
aggcugucuccauaauuug

SEQ ID NO: 674518 - RNA, 19 nt, Artificial Sequence
  Description of Artificial Sequence: Synthetic oligonucleotide
augguucauuuacugugca

SEQ ID NO: 674519 - RNA, 19 nt, Artificial Sequence
  Description of Artificial Sequence: Synthetic oligonucleotide
gaauuccuaccauagcuau

SEQ ID NO: 674520 - RNA, 19 nt, Artificial Sequence
  Description of Artificial Sequence: Synthetic oligonucleotide
cuguuaugauccccugggc

SEQ ID NO: 674521 - RNA, 19 nt, Artificial Sequence
  Description of Artificial Sequence: Synthetic oligonucleotide
uaaugacgcaaaggggucu

SEQ ID NO: 674522 - RNA, 19 nt, Artificial Sequence
  Description of Artificial Sequence: Synthetic oligonucleotide
cugggcaaccccuuguuga

SEQ ID NO: 674523 - RNA, 19 nt, Artificial Sequence
  Description of Artificial Sequence: Synthetic oligonucleotide
cauccauaagcaguacuuc

SEQ ID NO: 674524 - RNA, 19 nt, Artificial Sequence
  Description of Artificial Sequence: Synthetic oligonucleotide
ccuagaccauugcagagcc

SEQ ID NO: 674525 - RNA, 19 nt, Artificial Sequence
  Description of Artificial Sequence: Synthetic oligonucleotide
gacccuaguuaaugguuca

SEQ ID NO: 674526 - RNA, 19 nt, Artificial Sequence
  Description of Artificial Sequence: Synthetic oligonucleotide
aaacggcgggccugggaug

SEQ ID NO: 674527 - RNA, 19 nt, Artificial Sequence
  Description of Artificial Sequence: Synthetic oligonucleotide
uucugggcccaacucguuc

SEQ ID NO: 674528 - RNA, 19 nt, Artificial Sequence
  Description of Artificial Sequence: Synthetic oligonucleotide
guuaaagauagacccuagu

SEQ ID NO: 674529 - RNA, 19 nt, Artificial Sequence
  Description of Artificial Sequence: Synthetic oligonucleotide
uccuaugaguggagcacuc

SEQ ID NO: 674530 - RNA, 19 nt, Artificial Sequence
  Description of Artificial Sequence: Synthetic oligonucleotide
agaauuccuaccauagcua

SEQ ID NO: 674531 - RNA, 19 nt, Artificial Sequence
  Description of Artificial Sequence: Synthetic oligonucleotide
cugggaugaaagcucccug

SEQ ID NO: 674532 - RNA, 19 nt, Artificial Sequence
  Description of Artificial Sequence: Synthetic oligonucleotide
ucuccauaauuugcagaga

SEQ ID NO: 674533 - RNA, 19 nt, Artificial Sequence
  Description of Artificial Sequence: Synthetic oligonucleotide
ucguucaguucaacaugga

SEQ ID NO: 674534 - RNA, 19 nt, Artificial Sequence
  Description of Artificial Sequence: Synthetic oligonucleotide
caacucguucaguucaaca

SEQ ID NO: 674535 - RNA, 19 nt, Artificial Sequence
  Description of Artificial Sequence: Synthetic oligonucleotide
gaauucaauucugggccca

SEQ ID NO: 674536 - RNA, 19 nt, Artificial Sequence
  Description of Artificial Sequence: Synthetic oligonucleotide
cacgggcugauccucauca

SEQ ID NO: 674537 - RNA, 19 nt, Artificial Sequence
  Description of Artificial Sequence: Synthetic oligonucleotide
guauuccuguuaugauccc

SEQ ID NO: 674538 - RNA, 19 nt, Artificial Sequence
  Description of Artificial Sequence: Synthetic oligonucleotide
aaccuaugaccugccugag

SEQ ID NO: 674539 - RNA, 19 nt, Artificial Sequence
  Description of Artificial Sequence: Synthetic oligonucleotide
gucuaguagagccaccacu

SEQ ID NO: 674540 - RNA, 19 nt, Artificial Sequence
  Description of Artificial Sequence: Synthetic oligonucleotide
guaucauugaaaauuuauu

SEQ ID NO: 674541 - RNA, 19 nt, Artificial Sequence
  Description of Artificial Sequence: Synthetic oligonucleotide
gggauagggaagcagguaa

SEQ ID NO: 674542 - RNA, 19 nt, Artificial Sequence
  Description of Artificial Sequence: Synthetic oligonucleotide
aagauagacccuaguuaau

SEQ ID NO: 674543 - RNA, 19 nt, Artificial Sequence
  Description of Artificial Sequence: Synthetic oligonucleotide
gcuucacuaacccucaugu

SEQ ID NO: 674544 - RNA, 19 nt, Artificial Sequence
  Description of Artificial Sequence: Synthetic oligonucleotide
uuacgguauucggggauga

SEQ ID NO: 674545 - RNA, 19 nt, Artificial Sequence
  Description of Artificial Sequence: Synthetic oligonucleotide
cacaacaaggcugucucca

SEQ ID NO: 674546 - RNA, 19 nt, Artificial Sequence
  Description of Artificial Sequence: Synthetic oligonucleotide
ugggcaaccccuuguugau

SEQ ID NO: 674547 - RNA, 19 nt, Artificial Sequence
  Description of Artificial Sequence: Synthetic oligonucleotide
acugagauacagacuaguu

SEQ ID NO: 674548 - RNA, 19 nt, Artificial Sequence
  Description of Artificial Sequence: Synthetic oligonucleotide
cuacauguuuucauaccua

SEQ ID NO: 674549 - RNA, 19 nt, Artificial Sequence
  Description of Artificial Sequence: Synthetic oligonucleotide
ggagcacucagaaaagaga

SEQ ID NO: 674550 - RNA, 19 nt, Artificial Sequence
  Description of Artificial Sequence: Synthetic oligonucleotide
augacgcaaaggggucugc

SEQ ID NO: 674551 - RNA, 19 nt, Artificial Sequence
  Description of Artificial Sequence: Synthetic oligonucleotide
gcauuccgagagaugaggg

SEQ ID NO: 674552 - RNA, 19 nt, Artificial Sequence
  Description of Artificial Sequence: Synthetic oligonucleotide
gagcgccccaggaagcagg

SEQ ID NO: 674553 - RNA, 19 nt, Artificial Sequence
  Description of Artificial Sequence: Synthetic oligonucleotide
accauagcuaugaaugcua

SEQ ID NO: 674554 - RNA, 19 nt, Artificial Sequence
  Description of Artificial Sequence: Synthetic oligonucleotide
cauuuacugugcaguaaaa

SEQ ID NO: 674555 - RNA, 19 nt, Artificial Sequence
  Description of Artificial Sequence: Synthetic oligonucleotide
auauagugcuggcccuaga

SEQ ID NO: 674556 - RNA, 19 nt, Artificial Sequence
  Description of Artificial Sequence: Synthetic oligonucleotide
auucccuagugaacucauc

SEQ ID NO: 674557 - RNA, 19 nt, Artificial Sequence
  Description of Artificial Sequence: Synthetic oligonucleotide
augagaaaaguaacuuauu

SEQ ID NO: 674558 - RNA, 19 nt, Artificial Sequence
  Description of Artificial Sequence: Synthetic oligonucleotide
ugacgcaaaggggucugcu

SEQ ID NO: 674559 - RNA, 19 nt, Artificial Sequence
  Description of Artificial Sequence: Synthetic oligonucleotide
acgguauucggggaugaau

SEQ ID NO: 674560 - RNA, 19 nt, Artificial Sequence
  Description of Artificial Sequence: Synthetic oligonucleotide
accuaugaccugccugaga

SEQ ID NO: 674561 - RNA, 19 nt, Artificial Sequence
  Description of Artificial Sequence: Synthetic oligonucleotide
gacccauccauaagcagua

SEQ ID NO: 674562 - RNA, 19 nt, Artificial Sequence
  Description of Artificial Sequence: Synthetic oligonucleotide
gacugagauacagacuagu

SEQ ID NO: 674563 - RNA, 19 nt, Artificial Sequence
  Description of Artificial Sequence: Synthetic oligonucleotide
gagauacagacuaguugaa

SEQ ID NO: 674564 - RNA, 19 nt, Artificial Sequence
  Description of Artificial Sequence: Synthetic oligonucleotide
ccauagcuaugaaugcuac

SEQ ID NO: 674565 - RNA, 19 nt, Artificial Sequence
  Description of Artificial Sequence: Synthetic oligonucleotide
acgggcugauccucaucag

SEQ ID NO: 674566 - RNA, 19 nt, Artificial Sequence
  Description of Artificial Sequence: Synthetic oligonucleotide
gagguauguuccaauggcu

SEQ ID NO: 674567 - RNA, 19 nt, Artificial Sequence
  Description of Artificial Sequence: Synthetic oligonucleotide
gacuagcugcaaagguggc

SEQ ID NO: 674568 - RNA, 19 nt, Artificial Sequence
  Description of Artificial Sequence: Synthetic oligonucleotide
caaaagaugcugcuagcau

SEQ ID NO: 674569 - RNA, 19 nt, Artificial Sequence
  Description of Artificial Sequence: Synthetic oligonucleotide
gguauucggggaugaauaa

SEQ ID NO: 674570 - RNA, 19 nt, Artificial Sequence
  Description of Artificial Sequence: Synthetic oligonucleotide
caauuugcuaaggaagacu

SEQ ID NO: 674571 - RNA, 19 nt, Artificial Sequence
  Description of Artificial Sequence: Synthetic oligonucleotide
ggcaggaguauggugagga

SEQ ID NO: 674572 - RNA, 19 nt, Artificial Sequence
  Description of Artificial Sequence: Synthetic oligonucleotide
gagcuccuaugaguggagc

SEQ ID NO: 674573 - RNA, 19 nt, Artificial Sequence
  Description of Artificial Sequence: Synthetic oligonucleotide
ccaaaaccuaugaccugcc

SEQ ID NO: 674574 - RNA, 19 nt, Artificial Sequence
  Description of Artificial Sequence: Synthetic oligonucleotide
uuccuaccauagcuaugaa

SEQ ID NO: 674575 - RNA, 19 nt, Artificial Sequence
  Description of Artificial Sequence: Synthetic oligonucleotide
caaaggagagcucccagau

SEQ ID NO: 674576 - RNA, 19 nt, Artificial Sequence
  Description of Artificial Sequence: Synthetic oligonucleotide
ccaugagauucuaaauuca

SEQ ID NO: 674577 - RNA, 19 nt, Artificial Sequence
  Description of Artificial Sequence: Synthetic oligonucleotide
cccaaaagaugcugcuagc

SEQ ID NO: 674578 - RNA, 19 nt, Artificial Sequence
  Description of Artificial Sequence: Synthetic oligonucleotide
gcccaacucguucaguuca

SEQ ID NO: 674579 - RNA, 19 nt, Artificial Sequence
  Description of Artificial Sequence: Synthetic oligonucleotide
cauugcagagcccucguau

SEQ ID NO: 674580 - RNA, 19 nt, Artificial Sequence
  Description of Artificial Sequence: Synthetic oligonucleotide
uuccugccccacacaucag

SEQ ID NO: 674581 - RNA, 19 nt, Artificial Sequence
  Description of Artificial Sequence: Synthetic oligonucleotide
gugcuuggacugccacugg

SEQ ID NO: 674582 - RNA, 19 nt, Artificial Sequence
  Description of Artificial Sequence: Synthetic oligonucleotide
cacaauggacagaauuccu

SEQ ID NO: 674583 - RNA, 19 nt, Artificial Sequence
  Description of Artificial Sequence: Synthetic oligonucleotide
caccaugaaguauccaggu

SEQ ID NO: 674584 - RNA, 19 nt, Artificial Sequence
  Description of Artificial Sequence: Synthetic oligonucleotide
ggaauguaaugcuggacau

SEQ ID NO: 674585 - RNA, 19 nt, Artificial Sequence
  Description of Artificial Sequence: Synthetic oligonucleotide
accccuuguugaucugacu

SEQ ID NO: 674586 - RNA, 19 nt, Artificial Sequence
  Description of Artificial Sequence: Synthetic oligonucleotide
acccauccauaagcaguac

SEQ ID NO: 674587 - RNA, 19 nt, Artificial Sequence
  Description of Artificial Sequence: Synthetic oligonucleotide
ggucuaauuuucucuggua

SEQ ID NO: 674588 - RNA, 19 nt, Artificial Sequence
  Description of Artificial Sequence: Synthetic oligonucleotide
ggacagaauuccuaccaua

SEQ ID NO: 674589 - RNA, 19 nt, Artificial Sequence
  Description of Artificial Sequence: Synthetic oligonucleotide
caggaguauggugaggaaa

SEQ ID NO: 674590 - RNA, 19 nt, Artificial Sequence
  Description of Artificial Sequence: Synthetic oligonucleotide
gcccuagaccauugcagag

SEQ ID NO: 674591 - RNA, 19 nt, Artificial Sequence
  Description of Artificial Sequence: Synthetic oligonucleotide
ggggaugaauaaggcaacc

SEQ ID NO: 674592 - RNA, 19 nt, Artificial Sequence
  Description of Artificial Sequence: Synthetic oligonucleotide
cucccuguaggggaucauc

SEQ ID NO: 674593 - RNA, 19 nt, Artificial Sequence
  Description of Artificial Sequence: Synthetic oligonucleotide
ccucguauuccuguuauga

SEQ ID NO: 674594 - RNA, 19 nt, Artificial Sequence
  Description of Artificial Sequence: Synthetic oligonucleotide
gcaagauacuuaucaugaa

SEQ ID NO: 674595 - RNA, 19 nt, Artificial Sequence
  Description of Artificial Sequence: Synthetic oligonucleotide
gaguaagacuguagagucu

SEQ ID NO: 674596 - RNA, 19 nt, Artificial Sequence
  Description of Artificial Sequence: Synthetic oligonucleotide
cccuagaccauugcagagc

SEQ ID NO: 674597 - RNA, 19 nt, Artificial Sequence
  Description of Artificial Sequence: Synthetic oligonucleotide
cuccgcauuccgagagaug

SEQ ID NO: 674598 - RNA, 19 nt, Artificial Sequence
  Description of Artificial Sequence: Synthetic oligonucleotide
cauucccaugagauucuaa

SEQ ID NO: 674599 - RNA, 19 nt, Artificial Sequence
  Description of Artificial Sequence: Synthetic oligonucleotide
cugacuccgcauuccgaga

SEQ ID NO: 674600 - RNA, 19 nt, Artificial Sequence
  Description of Artificial Sequence: Synthetic oligonucleotide
cacuggugcugcuguuaug

SEQ ID NO: 674601 - RNA, 19 nt, Artificial Sequence
  Description of Artificial Sequence: Synthetic oligonucleotide
ggaguauggugaggaaaac

SEQ ID NO: 674602 - RNA, 19 nt, Artificial Sequence
  Description of Artificial Sequence: Synthetic oligonucleotide
uacgguauucggggaugaa

SEQ ID NO: 674603 - RNA, 19 nt, Artificial Sequence
  Description of Artificial Sequence: Synthetic oligonucleotide
gcugcuagcauugccccuc

SEQ ID NO: 674604 - RNA, 19 nt, Artificial Sequence
  Description of Artificial Sequence: Synthetic oligonucleotide
ccuaugaccugccugagau

SEQ ID NO: 674605 - RNA, 19 nt, Artificial Sequence
  Description of Artificial Sequence: Synthetic oligonucleotide
aggggucugcuuguuucca

SEQ ID NO: 674606 - RNA, 19 nt, Artificial Sequence
  Description of Artificial Sequence: Synthetic oligonucleotide
ggcugcuaaccagacuagc

SEQ ID NO: 674607 - RNA, 19 nt, Artificial Sequence
  Description of Artificial Sequence: Synthetic oligonucleotide
agcccucguauuccuguua

SEQ ID NO: 674608 - RNA, 19 nt, Artificial Sequence
  Description of Artificial Sequence: Synthetic oligonucleotide
caacacaacaaggcugucu

SEQ ID NO: 674609 - RNA, 19 nt, Artificial Sequence
  Description of Artificial Sequence: Synthetic oligonucleotide
gagccaccacuguggcuac

SEQ ID NO: 674610 - RNA, 19 nt, Artificial Sequence
  Description of Artificial Sequence: Synthetic oligonucleotide
caacaaggcugucuccaua

SEQ ID NO: 674611 - RNA, 19 nt, Artificial Sequence
  Description of Artificial Sequence: Synthetic oligonucleotide
auaguucagugcacugauu

SEQ ID NO: 674612 - RNA, 19 nt, Artificial Sequence
  Description of Artificial Sequence: Synthetic oligonucleotide
ccuaguuaaugguucauuu

SEQ ID NO: 674613 - RNA, 19 nt, Artificial Sequence
  Description of Artificial Sequence: Synthetic oligonucleotide
gcuaaccagacuagcugca

SEQ ID NO: 674614 - RNA, 19 nt, Artificial Sequence
  Description of Artificial Sequence: Synthetic oligonucleotide
ggauagggaagcagguaaa

SEQ ID NO: 674615 - RNA, 19 nt, Artificial Sequence
  Description of Artificial Sequence: Synthetic oligonucleotide
caaaaccuaugaccugccu

SEQ ID NO: 674616 - RNA, 19 nt, Artificial Sequence
  Description of Artificial Sequence: Synthetic oligonucleotide
cguaggcaaauauuacaga

SEQ ID NO: 674617 - RNA, 19 nt, Artificial Sequence
  Description of Artificial Sequence: Synthetic oligonucleotide
auaccaccacgggcugauc

SEQ ID NO: 674618 - RNA, 19 nt, Artificial Sequence
  Description of Artificial Sequence: Synthetic oligonucleotide
ggugcugcuguuauguuuu

SEQ ID NO: 674619 - RNA, 19 nt, Artificial Sequence
  Description of Artificial Sequence: Synthetic oligonucleotide
gcugcuaaccagacuagcu

SEQ ID NO: 674620 - RNA, 19 nt, Artificial Sequence
  Description of Artificial Sequence: Synthetic oligonucleotide
ggcgggccugggaugaaag

SEQ ID NO: 674621 - RNA, 19 nt, Artificial Sequence
  Description of Artificial Sequence: Synthetic oligonucleotide
cuugcaguaauggcucaau

SEQ ID NO: 674622 - RNA, 19 nt, Artificial Sequence
  Description of Artificial Sequence: Synthetic oligonucleotide
gggagguaugagagaaaca

SEQ ID NO: 674623 - RNA, 19 nt, Artificial Sequence
  Description of Artificial Sequence: Synthetic oligonucleotide
gcgggccugggaugaaagc

SEQ ID NO: 674624 - RNA, 19 nt, Artificial Sequence
  Description of Artificial Sequence: Synthetic oligonucleotide
ccgcauuccgagagaugag

SEQ ID NO: 674625 - RNA, 19 nt, Artificial Sequence
  Description of Artificial Sequence: Synthetic oligonucleotide
cugagcgccccaggaagca

SEQ ID NO: 674626 - RNA, 19 nt, Artificial Sequence
  Description of Artificial Sequence: Synthetic oligonucleotide
augaccugccugagauaga

SEQ ID NO: 674627 - RNA, 19 nt, Artificial Sequence
  Description of Artificial Sequence: Synthetic oligonucleotide
cuccuaugaguggagcacu

SEQ ID NO: 674628 - RNA, 19 nt, Artificial Sequence
  Description of Artificial Sequence: Synthetic oligonucleotide
ccagacuagcugcaaaggu

SEQ ID NO: 674629 - RNA, 19 nt, Artificial Sequence
  Description of Artificial Sequence: Synthetic oligonucleotide
gccauauagugcuggcccu

SEQ ID NO: 674630 - RNA, 19 nt, Artificial Sequence
  Description of Artificial Sequence: Synthetic oligonucleotide
ccaggcaagcuggagcauc

SEQ ID NO: 674631 - RNA, 19 nt, Artificial Sequence
  Description of Artificial Sequence: Synthetic oligonucleotide
cuggaacugccaccaaaau

SEQ ID NO: 674632 - RNA, 19 nt, Artificial Sequence
  Description of Artificial Sequence: Synthetic oligonucleotide
ggcacugacugcugggaau

SEQ ID NO: 674633 - RNA, 19 nt, Artificial Sequence
  Description of Artificial Sequence: Synthetic oligonucleotide
agcgccccaggaagcaggu

SEQ ID NO: 674634 - RNA, 19 nt, Artificial Sequence
  Description of Artificial Sequence: Synthetic oligonucleotide
cagcuucagggagguauga

SEQ ID NO: 674635 - RNA, 19 nt, Artificial Sequence
  Description of Artificial Sequence: Synthetic oligonucleotide
auucugggcccaacucguu

SEQ ID NO: 674636 - RNA, 19 nt, Artificial Sequence
  Description of Artificial Sequence: Synthetic oligonucleotide
ccuaugaguggagcacuca

SEQ ID NO: 674637 - RNA, 19 nt, Artificial Sequence
  Description of Artificial Sequence: Synthetic oligonucleotide
gugcacugauuuccaggau

SEQ ID NO: 674638 - RNA, 19 nt, Artificial Sequence
  Description of Artificial Sequence: Synthetic oligonucleotide
caaaggggucugcuuguuu

SEQ ID NO: 674639 - RNA, 19 nt, Artificial Sequence
  Description of Artificial Sequence: Synthetic oligonucleotide
cauggcucucagagauggu

SEQ ID NO: 674640 - RNA, 19 nt, Artificial Sequence
  Description of Artificial Sequence: Synthetic oligonucleotide
ggcccaaaagaugcugcua

SEQ ID NO: 674641 - RNA, 19 nt, Artificial Sequence
  Description of Artificial Sequence: Synthetic oligonucleotide
auugccccuccagcaccau

SEQ ID NO: 674642 - RNA, 19 nt, Artificial Sequence
  Description of Artificial Sequence: Synthetic oligonucleotide
cugggcugcuaaccagacu

SEQ ID NO: 674643 - RNA, 19 nt, Artificial Sequence
  Description of Artificial Sequence: Synthetic oligonucleotide
ccgagagaugagggcacug

SEQ ID NO: 674644 - RNA, 19 nt, Artificial Sequence
  Description of Artificial Sequence: Synthetic oligonucleotide
cccauccauaagcaguacu

SEQ ID NO: 674645 - RNA, 19 nt, Artificial Sequence
  Description of Artificial Sequence: Synthetic oligonucleotide
gccugggaugaaagcuccc

SEQ ID NO: 674646 - RNA, 19 nt, Artificial Sequence
  Description of Artificial Sequence: Synthetic oligonucleotide
ccauaccaggcaagcugga

SEQ ID NO: 674647 - RNA, 19 nt, Artificial Sequence
  Description of Artificial Sequence: Synthetic oligonucleotide
cccaacucguucaguucaa

SEQ ID NO: 674648 - RNA, 19 nt, Artificial Sequence
  Description of Artificial Sequence: Synthetic oligonucleotide
gccccacacaucagagaga

SEQ ID NO: 674649 - RNA, 19 nt, Artificial Sequence
  Description of Artificial Sequence: Synthetic oligonucleotide
ccauauagugcuggcccua

SEQ ID NO: 674650 - RNA, 19 nt, Artificial Sequence
  Description of Artificial Sequence: Synthetic oligonucleotide
gccugagauccaaaaccau

SEQ ID NO: 674651 - RNA, 19 nt, Artificial Sequence
  Description of Artificial Sequence: Synthetic oligonucleotide
ccuuuagugcuagguuaua

SEQ ID NO: 674652 - RNA, 19 nt, Artificial Sequence
  Description of Artificial Sequence: Synthetic oligonucleotide
cccuaguuaaugguucauu

SEQ ID NO: 674653 - RNA, 19 nt, Artificial Sequence
  Description of Artificial Sequence: Synthetic oligonucleotide
acggcgggccugggaugaa

SEQ ID NO: 674654 - RNA, 19 nt, Artificial Sequence
  Description of Artificial Sequence: Synthetic oligonucleotide
gcucccuguaggggaucau

SEQ ID NO: 674655 - RNA, 19 nt, Artificial Sequence
  Description of Artificial Sequence: Synthetic oligonucleotide
aaucauagaguuucgaggc

SEQ ID NO: 674656 - RNA, 19 nt, Artificial Sequence
  Description of Artificial Sequence: Synthetic oligonucleotide
aauauuaaguaaaugaagg

SEQ ID NO: 674657 - RNA, 19 nt, Artificial Sequence
  Description of Artificial Sequence: Synthetic oligonucleotide
aaccccaagaaucaugugc

SEQ ID NO: 674658 - RNA, 19 nt, Artificial Sequence
  Description of Artificial Sequence: Synthetic oligonucleotide
uuuauaaacccaaaagcgc

SEQ ID NO: 674659 - RNA, 19 nt, Artificial Sequence
  Description of Artificial Sequence: Synthetic oligonucleotide
aauguaguauaaucucugc

SEQ ID NO: 674660 - RNA, 19 nt, Artificial Sequence
  Description of Artificial Sequence: Synthetic oligonucleotide
uuauaaacccaaaagcgcc

SEQ ID NO: 674661 - RNA, 19 nt, Artificial Sequence
  Description of Artificial Sequence: Synthetic oligonucleotide
uguaagagggguauuaacc

SEQ ID NO: 674662 - RNA, 19 nt, Artificial Sequence
  Description of Artificial Sequence: Synthetic oligonucleotide
aaauucugcguccacauug

SEQ ID NO: 674663 - RNA, 19 nt, Artificial Sequence
  Description of Artificial Sequence: Synthetic oligonucleotide
aaugauauguccaagggca

SEQ ID NO: 674664 - RNA, 19 nt, Artificial Sequence
  Description of Artificial Sequence: Synthetic oligonucleotide
aaacauuaaaguaaagcuc

SEQ ID NO: 674665 - RNA, 19 nt, Artificial Sequence
  Description of Artificial Sequence: Synthetic oligonucleotide
ucaaugaaguaguugagag

SEQ ID NO: 674666 - RNA, 19 nt, Artificial Sequence
  Description of Artificial Sequence: Synthetic oligonucleotide
aauaagcggaggcagccgc

SEQ ID NO: 674667 - RNA, 19 nt, Artificial Sequence
  Description of Artificial Sequence: Synthetic oligonucleotide
augauguuggaacucaugg

SEQ ID NO: 674668 - RNA, 19 nt, Artificial Sequence
  Description of Artificial Sequence: Synthetic oligonucleotide
uagaaauuccugaaugagg

SEQ ID NO: 674669 - RNA, 19 nt, Artificial Sequence
  Description of Artificial Sequence: Synthetic oligonucleotide
uugaugauaaucauaucca

SEQ ID NO: 674670 - RNA, 19 nt, Artificial Sequence
  Description of Artificial Sequence: Synthetic oligonucleotide
cauuauuccaggaauuucc

SEQ ID NO: 674671 - RNA, 19 nt, Artificial Sequence
  Description of Artificial Sequence: Synthetic oligonucleotide
ucagagaucaaguuaugcc

SEQ ID NO: 674672 - RNA, 19 nt, Artificial Sequence
  Description of Artificial Sequence: Synthetic oligonucleotide
gaagcauccaaaauucugg

SEQ ID NO: 674673 - RNA, 19 nt, Artificial Sequence
  Description of Artificial Sequence: Synthetic oligonucleotide
aguaaaugaaggaaauggc

SEQ ID NO: 674674 - RNA, 19 nt, Artificial Sequence
  Description of Artificial Sequence: Synthetic oligonucleotide
cuagaauuucugauuaccg

SEQ ID NO: 674675 - RNA, 19 nt, Artificial Sequence
  Description of Artificial Sequence: Synthetic oligonucleotide
cuucauaagaagcaacggg

SEQ ID NO: 674676 - RNA, 19 nt, Artificial Sequence
  Description of Artificial Sequence: Synthetic oligonucleotide
ucuucagagaucaaguuau

SEQ ID NO: 674677 - RNA, 19 nt, Artificial Sequence
  Description of Artificial Sequence: Synthetic oligonucleotide
aaguuaugccauucucucc

SEQ ID NO: 674678 - RNA, 19 nt, Artificial Sequence
  Description of Artificial Sequence: Synthetic oligonucleotide
agugaaucugcacaucaac

SEQ ID NO: 674679 - RNA, 19 nt, Artificial Sequence
  Description of Artificial Sequence: Synthetic oligonucleotide
ugcauugucaagaauguuc

SEQ ID NO: 674680 - RNA, 19 nt, Artificial Sequence
  Description of Artificial Sequence: Synthetic oligonucleotide
augggauggucccaaaacc

SEQ ID NO: 674681 - RNA, 19 nt, Artificial Sequence
  Description of Artificial Sequence: Synthetic oligonucleotide
uuuucuacacccuggaggu

SEQ ID NO: 674682 - RNA, 19 nt, Artificial Sequence
  Description of Artificial Sequence: Synthetic oligonucleotide
ucaagaauguuccucacau

SEQ ID NO: 674683 - RNA, 19 nt, Artificial Sequence
  Description of Artificial Sequence: Synthetic oligonucleotide
ucaaguuaugccauucucu

SEQ ID NO: 674684 - RNA, 19 nt, Artificial Sequence
  Description of Artificial Sequence: Synthetic oligonucleotide
ucuuaagccacucaaugau

SEQ ID NO: 674685 - RNA, 19 nt, Artificial Sequence
  Description of Artificial Sequence: Synthetic oligonucleotide
uagauggucucuuagcuca

SEQ ID NO: 674686 - RNA, 19 nt, Artificial Sequence
  Description of Artificial Sequence: Synthetic oligonucleotide
aaacccacugaauaaucug

SEQ ID NO: 674687 - RNA, 19 nt, Artificial Sequence
  Description of Artificial Sequence: Synthetic oligonucleotide
guugagaaaaguaauuccc

SEQ ID NO: 674688 - RNA, 19 nt, Artificial Sequence
  Description of Artificial Sequence: Synthetic oligonucleotide
gauguuggaacucauggga

SEQ ID NO: 674689 - RNA, 19 nt, Artificial Sequence
  Description of Artificial Sequence: Synthetic oligonucleotide
ugggauggucccaaaaccg

SEQ ID NO: 674690 - RNA, 19 nt, Artificial Sequence
  Description of Artificial Sequence: Synthetic oligonucleotide
auaaucucugcucugacau

SEQ ID NO: 674691 - RNA, 19 nt, Artificial Sequence
  Description of Artificial Sequence: Synthetic oligonucleotide
gacuguaagggacugggag

SEQ ID NO: 674692 - RNA, 19 nt, Artificial Sequence
  Description of Artificial Sequence: Synthetic oligonucleotide
aaaccggcagaccuucugg

SEQ ID NO: 674693 - RNA, 19 nt, Artificial Sequence
  Description of Artificial Sequence: Synthetic oligonucleotide
auacuugacguacucgagg

SEQ ID NO: 674694 - RNA, 19 nt, Artificial Sequence
  Description of Artificial Sequence: Synthetic oligonucleotide
uuugucacgugugagccgg

SEQ ID NO: 674695 - RNA, 19 nt, Artificial Sequence
  Description of Artificial Sequence: Synthetic oligonucleotide
uccaguaugagggaccccg

SEQ ID NO: 674696 - RNA, 19 nt, Artificial Sequence
  Description of Artificial Sequence: Synthetic oligonucleotide
cugauuaccgcucuguuuc

SEQ ID NO: 674697 - RNA, 19 nt, Artificial Sequence
  Description of Artificial Sequence: Synthetic oligonucleotide
uuaaaucuuaagccacuca

SEQ ID NO: 674698 - RNA, 19 nt, Artificial Sequence
  Description of Artificial Sequence: Synthetic oligonucleotide
ugucagaguuucaaugaag

SEQ ID NO: 674699 - RNA, 19 nt, Artificial Sequence
  Description of Artificial Sequence: Synthetic oligonucleotide
uuaaaguaaagcucucauc

SEQ ID NO: 674700 - RNA, 19 nt, Artificial Sequence
  Description of Artificial Sequence: Synthetic oligonucleotide
uuaagccacucaaugauau

SEQ ID NO: 674701 - RNA, 19 nt, Artificial Sequence
  Description of Artificial Sequence: Synthetic oligonucleotide
uuugucacgugugaguuug

SEQ ID NO: 674702 - RNA, 19 nt, Artificial Sequence
  Description of Artificial Sequence: Synthetic oligonucleotide
agguugagaaaaguaauuc

SEQ ID NO: 674703 - RNA, 19 nt, Artificial Sequence
  Description of Artificial Sequence: Synthetic oligonucleotide
caauguaguauaaucucug

SEQ ID NO: 674704 - RNA, 19 nt, Artificial Sequence
  Description of Artificial Sequence: Synthetic oligonucleotide
uauaaacccaaaagcgcca

SEQ ID NO: 674705 - RNA, 19 nt, Artificial Sequence
  Description of Artificial Sequence: Synthetic oligonucleotide
auaagaagcaacgggagcu

SEQ ID NO: 674706 - RNA, 19 nt, Artificial Sequence
  Description of Artificial Sequence: Synthetic oligonucleotide
agauucagcaguuuugaaa

SEQ ID NO: 674707 - RNA, 19 nt, Artificial Sequence
  Description of Artificial Sequence: Synthetic oligonucleotide
uccaguucaauguaguaua

SEQ ID NO: 674708 - RNA, 19 nt, Artificial Sequence
  Description of Artificial Sequence: Synthetic oligonucleotide
ucuauagaccuuuccagaa

SEQ ID NO: 674709 - RNA, 19 nt, Artificial Sequence
  Description of Artificial Sequence: Synthetic oligonucleotide
gaaauguaguccagagucg

SEQ ID NO: 674710 - RNA, 19 nt, Artificial Sequence
  Description of Artificial Sequence: Synthetic oligonucleotide
aagccacucaaugauaugu

SEQ ID NO: 674711 - RNA, 19 nt, Artificial Sequence
  Description of Artificial Sequence: Synthetic oligonucleotide
augaagguaaaacacugaa

SEQ ID NO: 674712 - RNA, 19 nt, Artificial Sequence
  Description of Artificial Sequence: Synthetic oligonucleotide
uguaagugaggcuucguau

SEQ ID NO: 674713 - RNA, 19 nt, Artificial Sequence
  Description of Artificial Sequence: Synthetic oligonucleotide
aauucccuuugucacgugu

SEQ ID NO: 674714 - RNA, 19 nt, Artificial Sequence
  Description of Artificial Sequence: Synthetic oligonucleotide
ucaaggguugcucuauaga

SEQ ID NO: 674715 - RNA, 19 nt, Artificial Sequence
  Description of Artificial Sequence: Synthetic oligonucleotide
aaaaccggcagaccuucug

SEQ ID NO: 674716 - RNA, 19 nt, Artificial Sequence
  Description of Artificial Sequence: Synthetic oligonucleotide
caugcaccaaaugagauuc

SEQ ID NO: 674717 - RNA, 19 nt, Artificial Sequence
  Description of Artificial Sequence: Synthetic oligonucleotide
gguugagaaaaguaauucc

SEQ ID NO: 674718 - RNA, 19 nt, Artificial Sequence
  Description of Artificial Sequence: Synthetic oligonucleotide
agugaaggucuuucuguac

SEQ ID NO: 674719 - RNA, 19 nt, Artificial Sequence
  Description of Artificial Sequence: Synthetic oligonucleotide
uguuagaagcauccaaaau

SEQ ID NO: 674720 - RNA, 19 nt, Artificial Sequence
  Description of Artificial Sequence: Synthetic oligonucleotide
ucacauacaucguggaccu

SEQ ID NO: 674721 - RNA, 19 nt, Artificial Sequence
  Description of Artificial Sequence: Synthetic oligonucleotide
ugaugauaaucauauccaa

SEQ ID NO: 674722 - RNA, 19 nt, Artificial Sequence
  Description of Artificial Sequence: Synthetic oligonucleotide
ucucuuagcucagacacca

SEQ ID NO: 674723 - RNA, 19 nt, Artificial Sequence
  Description of Artificial Sequence: Synthetic oligonucleotide
caucucaagacacucuuug

SEQ ID NO: 674724 - RNA, 19 nt, Artificial Sequence
  Description of Artificial Sequence: Synthetic oligonucleotide
ugaagguaaaacacugaau

SEQ ID NO: 674725 - RNA, 19 nt, Artificial Sequence
  Description of Artificial Sequence: Synthetic oligonucleotide
ugucuuuuggaagauggcu

SEQ ID NO: 674726 - RNA, 19 nt, Artificial Sequence
  Description of Artificial Sequence: Synthetic oligonucleotide
uauccaagguugagaaaag

SEQ ID NO: 674727 - RNA, 19 nt, Artificial Sequence
  Description of Artificial Sequence: Synthetic oligonucleotide
agaguuucaaugaaguagu

SEQ ID NO: 674728 - RNA, 19 nt, Artificial Sequence
  Description of Artificial Sequence: Synthetic oligonucleotide
aaaacgcacagagaaggcu

SEQ ID NO: 674729 - RNA, 19 nt, Artificial Sequence
  Description of Artificial Sequence: Synthetic oligonucleotide
aggguugcucuauagaccu

SEQ ID NO: 674730 - RNA, 19 nt, Artificial Sequence
  Description of Artificial Sequence: Synthetic oligonucleotide
uacuugacguacucgaggu

SEQ ID NO: 674731 - RNA, 19 nt, Artificial Sequence
  Description of Artificial Sequence: Synthetic oligonucleotide
gaacucaugggaugguccc

SEQ ID NO: 674732 - RNA, 19 nt, Artificial Sequence
  Description of Artificial Sequence: Synthetic oligonucleotide
cagagaucaaguuaugcca

SEQ ID NO: 674733 - RNA, 19 nt, Artificial Sequence
  Description of Artificial Sequence: Synthetic oligonucleotide
aacagcaccccauuaucaa

SEQ ID NO: 674734 - RNA, 19 nt, Artificial Sequence
  Description of Artificial Sequence: Synthetic oligonucleotide
ucugcguccacauugucuu

SEQ ID NO: 674735 - RNA, 19 nt, Artificial Sequence
  Description of Artificial Sequence: Synthetic oligonucleotide
cuucguauacuugacguac

SEQ ID NO: 674736 - RNA, 19 nt, Artificial Sequence
  Description of Artificial Sequence: Synthetic oligonucleotide
agagugcacagugcaaugc

SEQ ID NO: 674737 - RNA, 19 nt, Artificial Sequence
  Description of Artificial Sequence: Synthetic oligonucleotide
acaagcauuauuccaggaa

SEQ ID NO: 674738 - RNA, 19 nt, Artificial Sequence
  Description of Artificial Sequence: Synthetic oligonucleotide
gaagcaauuagaaauuccu

SEQ ID NO: 674739 - RNA, 19 nt, Artificial Sequence
  Description of Artificial Sequence: Synthetic oligonucleotide
gaggucaaaugaauggcag

SEQ ID NO: 674740 - RNA, 19 nt, Artificial Sequence
  Description of Artificial Sequence: Synthetic oligonucleotide
aacccacggaugcacacug

SEQ ID NO: 674741 - RNA, 19 nt, Artificial Sequence
  Description of Artificial Sequence: Synthetic oligonucleotide
aguuucaaugaaguaguug

SEQ ID NO: 674742 - RNA, 19 nt, Artificial Sequence
  Description of Artificial Sequence: Synthetic oligonucleotide
agaccuuuccagaagagca

SEQ ID NO: 674743 - RNA, 19 nt, Artificial Sequence
  Description of Artificial Sequence: Synthetic oligonucleotide
cuugacguacucgagguug

SEQ ID NO: 674744 - RNA, 19 nt, Artificial Sequence
  Description of Artificial Sequence: Synthetic oligonucleotide
auugugaccgcugucucag

SEQ ID NO: 674745 - RNA, 19 nt, Artificial Sequence
  Description of Artificial Sequence: Synthetic oligonucleotide
ugcugaauauuaaguaaau

SEQ ID NO: 674746 - RNA, 19 nt, Artificial Sequence
  Description of Artificial Sequence: Synthetic oligonucleotide
aagguauccaagguugaga

SEQ ID NO: 674747 - RNA, 19 nt, Artificial Sequence
  Description of Artificial Sequence: Synthetic oligonucleotide
cuauagaccuuuccagaag

SEQ ID NO: 674748 - RNA, 19 nt, Artificial Sequence
  Description of Artificial Sequence: Synthetic oligonucleotide
aguauaaucucugcucuga

SEQ ID NO: 674749 - RNA, 19 nt, Artificial Sequence
  Description of Artificial Sequence: Synthetic oligonucleotide
agguauccaagguugagaa

SEQ ID NO: 674750 - RNA, 19 nt, Artificial Sequence
  Description of Artificial Sequence: Synthetic oligonucleotide
cacacgagagugcacagug

SEQ ID NO: 674751 - RNA, 19 nt, Artificial Sequence
  Description of Artificial Sequence: Synthetic oligonucleotide
uuucuguacccuuuaugaa

SEQ ID NO: 674752 - RNA, 19 nt, Artificial Sequence
  Description of Artificial Sequence: Synthetic oligonucleotide
cgugaaaugauguuggaac

SEQ ID NO: 674753 - RNA, 19 nt, Artificial Sequence
  Description of Artificial Sequence: Synthetic oligonucleotide
guugggaaugaugacuugc

SEQ ID NO: 674754 - RNA, 19 nt, Artificial Sequence
  Description of Artificial Sequence: Synthetic oligonucleotide
ugcaccaaaugagauucag

SEQ ID NO: 674755 - RNA, 19 nt, Artificial Sequence
  Description of Artificial Sequence: Synthetic oligonucleotide
guaggaagaagcaauuaga

SEQ ID NO: 674756 - RNA, 19 nt, Artificial Sequence
  Description of Artificial Sequence: Synthetic oligonucleotide
ugugaccgcugucucagug

SEQ ID NO: 674757 - RNA, 19 nt, Artificial Sequence
  Description of Artificial Sequence: Synthetic oligonucleotide
gaaucaugugcagggagug

SEQ ID NO: 674758 - RNA, 19 nt, Artificial Sequence
  Description of Artificial Sequence: Synthetic oligonucleotide
gaggagugugguaagagca

SEQ ID NO: 674759 - RNA, 19 nt, Artificial Sequence
  Description of Artificial Sequence: Synthetic oligonucleotide
gauaguguaagugaggcuu

SEQ ID NO: 674760 - RNA, 19 nt, Artificial Sequence
  Description of Artificial Sequence: Synthetic oligonucleotide
uuuggaagauggcuagaau

SEQ ID NO: 674761 - RNA, 19 nt, Artificial Sequence
  Description of Artificial Sequence: Synthetic oligonucleotide
gaugauaaucauauccaaa

SEQ ID NO: 674762 - RNA, 19 nt, Artificial Sequence
  Description of Artificial Sequence: Synthetic oligonucleotide
guaguugagaggcagaaau

SEQ ID NO: 674763 - RNA, 19 nt, Artificial Sequence
  Description of Artificial Sequence: Synthetic oligonucleotide
uaguauaaucucugcucug

SEQ ID NO: 674764 - RNA, 19 nt, Artificial Sequence
  Description of Artificial Sequence: Synthetic oligonucleotide
uacaucguggaccuucuuu

SEQ ID NO: 674765 - RNA, 19 nt, Artificial Sequence
  Description of Artificial Sequence: Synthetic oligonucleotide
ccagagucaaacuuugggc

SEQ ID NO: 674766 - RNA, 19 nt, Artificial Sequence
  Description of Artificial Sequence: Synthetic oligonucleotide
uccccagagucaaacuuug

SEQ ID NO: 674767 - RNA, 19 nt, Artificial Sequence
  Description of Artificial Sequence: Synthetic oligonucleotide
ugcucugacauaucccacu

SEQ ID NO: 674768 - RNA, 19 nt, Artificial Sequence
  Description of Artificial Sequence: Synthetic oligonucleotide
aaacugccugugugguugg

SEQ ID NO: 674769 - RNA, 19 nt, Artificial Sequence
  Description of Artificial Sequence: Synthetic oligonucleotide
accggcagaccuucuggcc

SEQ ID NO: 674770 - RNA, 19 nt, Artificial Sequence
  Description of Artificial Sequence: Synthetic oligonucleotide
guaaagcucucaucuggcc

SEQ ID NO: 674771 - RNA, 19 nt, Artificial Sequence
  Description of Artificial Sequence: Synthetic oligonucleotide
ucacgugugagccggcacu

SEQ ID NO: 674772 - RNA, 19 nt, Artificial Sequence
  Description of Artificial Sequence: Synthetic oligonucleotide
ugguuccgugaaaugaugu

SEQ ID NO: 674773 - RNA, 19 nt, Artificial Sequence
  Description of Artificial Sequence: Synthetic oligonucleotide
uucguauacuugacguacu

SEQ ID NO: 674774 - RNA, 19 nt, Artificial Sequence
  Description of Artificial Sequence: Synthetic oligonucleotide
ugggcggcguuccauagga

SEQ ID NO: 674775 - RNA, 19 nt, Artificial Sequence
  Description of Artificial Sequence: Synthetic oligonucleotide
ugccaaucauagaguuucg

SEQ ID NO: 674776 - RNA, 19 nt, Artificial Sequence
  Description of Artificial Sequence: Synthetic oligonucleotide
guaguauaaucucugcucu

SEQ ID NO: 674777 - RNA, 19 nt, Artificial Sequence
  Description of Artificial Sequence: Synthetic oligonucleotide
uacgacuggucaaggguug

SEQ ID NO: 674778 - RNA, 19 nt, Artificial Sequence
  Description of Artificial Sequence: Synthetic oligonucleotide
aauucugcguccacauugu

SEQ ID NO: 674779 - RNA, 19 nt, Artificial Sequence
  Description of Artificial Sequence: Synthetic oligonucleotide
acaucguggaccuucuuuu

SEQ ID NO: 674780 - RNA, 19 nt, Artificial Sequence
  Description of Artificial Sequence: Synthetic oligonucleotide
gccacgguuauugaggugg

SEQ ID NO: 674781 - RNA, 19 nt, Artificial Sequence
  Description of Artificial Sequence: Synthetic oligonucleotide
agcauugugaccgcugucu

SEQ ID NO: 674782 - RNA, 19 nt, Artificial Sequence
  Description of Artificial Sequence: Synthetic oligonucleotide
caaaauccgcugcacugcc

SEQ ID NO: 674783 - RNA, 19 nt, Artificial Sequence
  Description of Artificial Sequence: Synthetic oligonucleotide
agauggcuagaauuucuga

SEQ ID NO: 674784 - RNA, 19 nt, Artificial Sequence
  Description of Artificial Sequence: Synthetic oligonucleotide
agacagugaaccccaagaa

SEQ ID NO: 674785 - RNA, 19 nt, Artificial Sequence
  Description of Artificial Sequence: Synthetic oligonucleotide
guaagagggguauuaaccu

SEQ ID NO: 674786 - RNA, 19 nt, Artificial Sequence
  Description of Artificial Sequence: Synthetic oligonucleotide
ugugagccggcacucccag

SEQ ID NO: 674787 - RNA, 19 nt, Artificial Sequence
  Description of Artificial Sequence: Synthetic oligonucleotide
aaaagcgccaugguguguu

SEQ ID NO: 674788 - RNA, 19 nt, Artificial Sequence
  Description of Artificial Sequence: Synthetic oligonucleotide
acaaacccacugaauaauc

SEQ ID NO: 674789 - RNA, 19 nt, Artificial Sequence
  Description of Artificial Sequence: Synthetic oligonucleotide
ucguauacuugacguacuc

SEQ ID NO: 674790 - RNA, 19 nt, Artificial Sequence
  Description of Artificial Sequence: Synthetic oligonucleotide
agguacgacuggucaaggg

SEQ ID NO: 674791 - RNA, 19 nt, Artificial Sequence
  Description of Artificial Sequence: Synthetic oligonucleotide
gauggcuagaauuucugau

SEQ ID NO: 674792 - RNA, 19 nt, Artificial Sequence
  Description of Artificial Sequence: Synthetic oligonucleotide
gagagugcacagugcaaug

SEQ ID NO: 674793 - RNA, 19 nt, Artificial Sequence
  Description of Artificial Sequence: Synthetic oligonucleotide
aguaaacagccacaaggua

SEQ ID NO: 674794 - RNA, 19 nt, Artificial Sequence
  Description of Artificial Sequence: Synthetic oligonucleotide
ucugaauuguccagaucuu

SEQ ID NO: 674795 - RNA, 19 nt, Artificial Sequence
  Description of Artificial Sequence: Synthetic oligonucleotide
accuucuggccaauaagcg

SEQ ID NO: 674796 - RNA, 19 nt, Artificial Sequence
  Description of Artificial Sequence: Synthetic oligonucleotide
uaaacccaaaagcgccaug

SEQ ID NO: 674797 - RNA, 19 nt, Artificial Sequence
  Description of Artificial Sequence: Synthetic oligonucleotide
uggucucuuagcucagaca

SEQ ID NO: 674798 - RNA, 19 nt, Artificial Sequence
  Description of Artificial Sequence: Synthetic oligonucleotide
auaguguaagugaggcuuc

SEQ ID NO: 674799 - RNA, 19 nt, Artificial Sequence
  Description of Artificial Sequence: Synthetic oligonucleotide
acgucaaccagcucuggau

SEQ ID NO: 674800 - RNA, 19 nt, Artificial Sequence
  Description of Artificial Sequence: Synthetic oligonucleotide
auuauuccaggaauuuccu

SEQ ID NO: 674801 - RNA, 19 nt, Artificial Sequence
  Description of Artificial Sequence: Synthetic oligonucleotide
uaagagggguauuaaccuu

SEQ ID NO: 674802 - RNA, 19 nt, Artificial Sequence
  Description of Artificial Sequence: Synthetic oligonucleotide
ggugcugaauauuaaguaa

SEQ ID NO: 674803 - RNA, 19 nt, Artificial Sequence
  Description of Artificial Sequence: Synthetic oligonucleotide
agaaucaugugcagggagu

SEQ ID NO: 674804 - RNA, 19 nt, Artificial Sequence
  Description of Artificial Sequence: Synthetic oligonucleotide
cccagagucaaacuuuggg

SEQ ID NO: 674805 - RNA, 19 nt, Artificial Sequence
  Description of Artificial Sequence: Synthetic oligonucleotide
ucguuccaagucagcacag

SEQ ID NO: 674806 - RNA, 19 nt, Artificial Sequence
  Description of Artificial Sequence: Synthetic oligonucleotide
agucgucuguucaauuuuc

SEQ ID NO: 674807 - RNA, 19 nt, Artificial Sequence
  Description of Artificial Sequence: Synthetic oligonucleotide
agccggcacucccaggagc

SEQ ID NO: 674808 - RNA, 19 nt, Artificial Sequence
  Description of Artificial Sequence: Synthetic oligonucleotide
guacccuuuaugaagguaa

SEQ ID NO: 674809 - RNA, 19 nt, Artificial Sequence
  Description of Artificial Sequence: Synthetic oligonucleotide
gagugcacagugcaaugca

SEQ ID NO: 674810 - RNA, 19 nt, Artificial Sequence
  Description of Artificial Sequence: Synthetic oligonucleotide
ccauuaucaauguagugca

SEQ ID NO: 674811 - RNA, 19 nt, Artificial Sequence
  Description of Artificial Sequence: Synthetic oligonucleotide
gggacuguaagggacuggg

SEQ ID NO: 674812 - RNA, 19 nt, Artificial Sequence
  Description of Artificial Sequence: Synthetic oligonucleotide
ggaggugucucacuagaug

SEQ ID NO: 674813 - RNA, 19 nt, Artificial Sequence
  Description of Artificial Sequence: Synthetic oligonucleotide
uaguugagaggcagaaauu

SEQ ID NO: 674814 - RNA, 19 nt, Artificial Sequence
  Description of Artificial Sequence: Synthetic oligonucleotide
uacucgagguuggaguuca

SEQ ID NO: 674815 - RNA, 19 nt, Artificial Sequence
  Description of Artificial Sequence: Synthetic oligonucleotide
accccaagaaucaugugca

SEQ ID NO: 674816 - RNA, 19 nt, Artificial Sequence
  Description of Artificial Sequence: Synthetic oligonucleotide
cucguuccaagucagcaca

SEQ ID NO: 674817 - RNA, 19 nt, Artificial Sequence
  Description of Artificial Sequence: Synthetic oligonucleotide
auaagcauugugaccgcug

SEQ ID NO: 674818 - RNA, 19 nt, Artificial Sequence
  Description of Artificial Sequence: Synthetic oligonucleotide
agcagguuguacaaaggga

SEQ ID NO: 674819 - RNA, 19 nt, Artificial Sequence
  Description of Artificial Sequence: Synthetic oligonucleotide
ucuggucaugaggugaaaa

SEQ ID NO: 674820 - RNA, 19 nt, Artificial Sequence
  Description of Artificial Sequence: Synthetic oligonucleotide
cuucagagaucaaguuaug

SEQ ID NO: 674821 - RNA, 19 nt, Artificial Sequence
  Description of Artificial Sequence: Synthetic oligonucleotide
caagguauccaagguugag

SEQ ID NO: 674822 - RNA, 19 nt, Artificial Sequence
  Description of Artificial Sequence: Synthetic oligonucleotide
caacacuguugugauagug

SEQ ID NO: 674823 - RNA, 19 nt, Artificial Sequence
  Description of Artificial Sequence: Synthetic oligonucleotide
cagugaaccccaagaauca

SEQ ID NO: 674824 - RNA, 19 nt, Artificial Sequence
  Description of Artificial Sequence: Synthetic oligonucleotide
agagaucaaguuaugccau

SEQ ID NO: 674825 - RNA, 19 nt, Artificial Sequence
  Description of Artificial Sequence: Synthetic oligonucleotide
agagggguauuaaccuugg

SEQ ID NO: 674826 - RNA, 19 nt, Artificial Sequence
  Description of Artificial Sequence: Synthetic oligonucleotide
cacgagagugcacagugca

SEQ ID NO: 674827 - RNA, 19 nt, Artificial Sequence
  Description of Artificial Sequence: Synthetic oligonucleotide
auucugcguccacauuguc

SEQ ID NO: 674828 - RNA, 19 nt, Artificial Sequence
  Description of Artificial Sequence: Synthetic oligonucleotide
uccgugaaaugauguugga

SEQ ID NO: 674829 - RNA, 19 nt, Artificial Sequence
  Description of Artificial Sequence: Synthetic oligonucleotide
caauaagcggaggcagccg

SEQ ID NO: 674830 - RNA, 19 nt, Artificial Sequence
  Description of Artificial Sequence: Synthetic oligonucleotide
agagcuuggugggaggacu

SEQ ID NO: 674831 - RNA, 19 nt, Artificial Sequence
  Description of Artificial Sequence: Synthetic oligonucleotide
acacgagagugcacagugc

SEQ ID NO: 674832 - RNA, 19 nt, Artificial Sequence
  Description of Artificial Sequence: Synthetic oligonucleotide
cucuucagagaucaaguua

SEQ ID NO: 674833 - RNA, 19 nt, Artificial Sequence
  Description of Artificial Sequence: Synthetic oligonucleotide
aggaaccacagcagguacg

SEQ ID NO: 674834 - RNA, 19 nt, Artificial Sequence
  Description of Artificial Sequence: Synthetic oligonucleotide
agcaccccauuaucaaugu

SEQ ID NO: 674835 - RNA, 19 nt, Artificial Sequence
  Description of Artificial Sequence: Synthetic oligonucleotide
auucccuuugucacgugug

SEQ ID NO: 674836 - RNA, 19 nt, Artificial Sequence
  Description of Artificial Sequence: Synthetic oligonucleotide
caacagcaccccauuauca

SEQ ID NO: 674837 - RNA, 19 nt, Artificial Sequence
  Description of Artificial Sequence: Synthetic oligonucleotide
gucagaguuucaaugaagu

SEQ ID NO: 674838 - RNA, 19 nt, Artificial Sequence
  Description of Artificial Sequence: Synthetic oligonucleotide
cuggauacacacuccagua

SEQ ID NO: 674839 - RNA, 19 nt, Artificial Sequence
  Description of Artificial Sequence: Synthetic oligonucleotide
gaagcaacgggagcucuuc

SEQ ID NO: 674840 - RNA, 19 nt, Artificial Sequence
  Description of Artificial Sequence: Synthetic oligonucleotide
caaaugaauggcagccaga

SEQ ID NO: 674841 - RNA, 19 nt, Artificial Sequence
  Description of Artificial Sequence: Synthetic oligonucleotide
uguacccuuuaugaaggua

SEQ ID NO: 674842 - RNA, 19 nt, Artificial Sequence
  Description of Artificial Sequence: Synthetic oligonucleotide
caguaugagggaccccggc

SEQ ID NO: 674843 - RNA, 19 nt, Artificial Sequence
  Description of Artificial Sequence: Synthetic oligonucleotide
cguuccauaggaaccacag

SEQ ID NO: 674844 - RNA, 19 nt, Artificial Sequence
  Description of Artificial Sequence: Synthetic oligonucleotide
aggaaauggccagggaagu

SEQ ID NO: 674845 - RNA, 19 nt, Artificial Sequence
  Description of Artificial Sequence: Synthetic oligonucleotide
uggucccaaaaccggcaga

SEQ ID NO: 674846 - RNA, 19 nt, Artificial Sequence
  Description of Artificial Sequence: Synthetic oligonucleotide
ggaacucaugggauggucc

SEQ ID NO: 674847 - RNA, 19 nt, Artificial Sequence
  Description of Artificial Sequence: Synthetic oligonucleotide
gggauggucccaaaaccgg

SEQ ID NO: 674848 - RNA, 19 nt, Artificial Sequence
  Description of Artificial Sequence: Synthetic oligonucleotide
gggaaugaugacuugccaa

SEQ ID NO: 674849 - RNA, 19 nt, Artificial Sequence
  Description of Artificial Sequence: Synthetic oligonucleotide
uauuaaccuuggcuccaau

SEQ ID NO: 674850 - RNA, 19 nt, Artificial Sequence
  Description of Artificial Sequence: Synthetic oligonucleotide
aacucaugggaugguccca

SEQ ID NO: 674851 - RNA, 19 nt, Artificial Sequence
  Description of Artificial Sequence: Synthetic oligonucleotide
accccauuaucaauguagu

SEQ ID NO: 674852 - RNA, 19 nt, Artificial Sequence
  Description of Artificial Sequence: Synthetic oligonucleotide
agaccuucauaagaagcaa

SEQ ID NO: 674853 - RNA, 19 nt, Artificial Sequence
  Description of Artificial Sequence: Synthetic oligonucleotide
acgugugaguuugucacgu

SEQ ID NO: 674854 - RNA, 19 nt, Artificial Sequence
  Description of Artificial Sequence: Synthetic oligonucleotide
aaggcugguugcauaacuu

SEQ ID NO: 674855 - RNA, 19 nt, Artificial Sequence
  Description of Artificial Sequence: Synthetic oligonucleotide
uggaggugucucacuagau

SEQ ID NO: 674856 - RNA, 19 nt, Artificial Sequence
  Description of Artificial Sequence: Synthetic oligonucleotide
agugcaaugcagccaucuu

SEQ ID NO: 674857 - RNA, 19 nt, Artificial Sequence
  Description of Artificial Sequence: Synthetic oligonucleotide
aggcugguugcauaacuuu

SEQ ID NO: 674858 - RNA, 19 nt, Artificial Sequence
  Description of Artificial Sequence: Synthetic oligonucleotide
cagccagagacauguucac

SEQ ID NO: 674859 - RNA, 19 nt, Artificial Sequence
  Description of Artificial Sequence: Synthetic oligonucleotide
auaaacccaaaagcgccau

SEQ ID NO: 674860 - RNA, 19 nt, Artificial Sequence
  Description of Artificial Sequence: Synthetic oligonucleotide
guguaagugaggcuucgua

SEQ ID NO: 674861 - RNA, 19 nt, Artificial Sequence
  Description of Artificial Sequence: Synthetic oligonucleotide
ugguugcauaacuuuucuu

SEQ ID NO: 674862 - RNA, 19 nt, Artificial Sequence
  Description of Artificial Sequence: Synthetic oligonucleotide
ugcugaauuuuagcuuuuc

SEQ ID NO: 674863 - RNA, 19 nt, Artificial Sequence
  Description of Artificial Sequence: Synthetic oligonucleotide
uguagugcagcagguugua

SEQ ID NO: 674864 - RNA, 19 nt, Artificial Sequence
  Description of Artificial Sequence: Synthetic oligonucleotide
aaaauccgcugcacugcca

SEQ ID NO: 674865 - RNA, 19 nt, Artificial Sequence
  Description of Artificial Sequence: Synthetic oligonucleotide
guggcagaucaagucuggg

SEQ ID NO: 674866 - RNA, 19 nt, Artificial Sequence
  Description of Artificial Sequence: Synthetic oligonucleotide
ggaaugaugacuugccaau

SEQ ID NO: 674867 - RNA, 19 nt, Artificial Sequence
  Description of Artificial Sequence: Synthetic oligonucleotide
caaccagcucuggauacac

SEQ ID NO: 674868 - RNA, 19 nt, Artificial Sequence
  Description of Artificial Sequence: Synthetic oligonucleotide
ugucacgugugaguuuguc

SEQ ID NO: 674869 - RNA, 19 nt, Artificial Sequence
  Description of Artificial Sequence: Synthetic oligonucleotide
uggagaacccacggaugca

SEQ ID NO: 674870 - RNA, 19 nt, Artificial Sequence
  Description of Artificial Sequence: Synthetic oligonucleotide
ggcuucguauacuugacgu

SEQ ID NO: 674871 - RNA, 19 nt, Artificial Sequence
  Description of Artificial Sequence: Synthetic oligonucleotide
aggccaaugagcagccucu

SEQ ID NO: 674872 - RNA, 19 nt, Artificial Sequence
  Description of Artificial Sequence: Synthetic oligonucleotide
ggcggcguuccauaggaac

SEQ ID NO: 674873 - RNA, 19 nt, Artificial Sequence
  Description of Artificial Sequence: Synthetic oligonucleotide
cugucagaguuucaaugaa

SEQ ID NO: 674874 - RNA, 19 nt, Artificial Sequence
  Description of Artificial Sequence: Synthetic oligonucleotide
auguuggaacucaugggau

SEQ ID NO: 674875 - RNA, 19 nt, Artificial Sequence
  Description of Artificial Sequence: Synthetic oligonucleotide
uaagcggaggcagccgcac

SEQ ID NO: 674876 - RNA, 19 nt, Artificial Sequence
  Description of Artificial Sequence: Synthetic oligonucleotide
ccggcagggacuguaaggg

SEQ ID NO: 674877 - RNA, 19 nt, Artificial Sequence
  Description of Artificial Sequence: Synthetic oligonucleotide
gugggcggcguuccauagg

SEQ ID NO: 674878 - RNA, 19 nt, Artificial Sequence
  Description of Artificial Sequence: Synthetic oligonucleotide
acagaggagugugguaaga

SEQ ID NO: 674879 - RNA, 19 nt, Artificial Sequence
  Description of Artificial Sequence: Synthetic oligonucleotide
cugccugugugguugguaa

SEQ ID NO: 674880 - RNA, 19 nt, Artificial Sequence
  Description of Artificial Sequence: Synthetic oligonucleotide
cagaaauucuguugggaau

SEQ ID NO: 674881 - RNA, 19 nt, Artificial Sequence
  Description of Artificial Sequence: Synthetic oligonucleotide
gugugaguuugucacgugu

SEQ ID NO: 674882 - RNA, 19 nt, Artificial Sequence
  Description of Artificial Sequence: Synthetic oligonucleotide
agggaaacacagauuguua

SEQ ID NO: 674883 - RNA, 19 nt, Artificial Sequence
  Description of Artificial Sequence: Synthetic oligonucleotide
ccaaaagcgccauggugug

SEQ ID NO: 674884 - RNA, 19 nt, Artificial Sequence
  Description of Artificial Sequence: Synthetic oligonucleotide
ugaccacacgagagugcac

SEQ ID NO: 674885 - RNA, 19 nt, Artificial Sequence
  Description of Artificial Sequence: Synthetic oligonucleotide
gauuaccgcucuguuucca

SEQ ID NO: 674886 - RNA, 19 nt, Artificial Sequence
  Description of Artificial Sequence: Synthetic oligonucleotide
ugucacgugugagccggca

SEQ ID NO: 674887 - RNA, 19 nt, Artificial Sequence
  Description of Artificial Sequence: Synthetic oligonucleotide
acggaugcacacuguguuu

SEQ ID NO: 674888 - RNA, 19 nt, Artificial Sequence
  Description of Artificial Sequence: Synthetic oligonucleotide
uuggaacucaugggauggu

SEQ ID NO: 674889 - RNA, 19 nt, Artificial Sequence
  Description of Artificial Sequence: Synthetic oligonucleotide
ggaagauggcuagaauuuc

SEQ ID NO: 674890 - RNA, 19 nt, Artificial Sequence
  Description of Artificial Sequence: Synthetic oligonucleotide
gguauuaaccuuggcucca

SEQ ID NO: 674891 - RNA, 19 nt, Artificial Sequence
  Description of Artificial Sequence: Synthetic oligonucleotide
caagaaucaugugcaggga

SEQ ID NO: 674892 - RNA, 19 nt, Artificial Sequence
  Description of Artificial Sequence: Synthetic oligonucleotide
cguauacuugacguacucg

SEQ ID NO: 674893 - RNA, 19 nt, Artificial Sequence
  Description of Artificial Sequence: Synthetic oligonucleotide
augcaucucaagacacucu

SEQ ID NO: 674894 - RNA, 19 nt, Artificial Sequence
  Description of Artificial Sequence: Synthetic oligonucleotide
ggagaacccacggaugcac

SEQ ID NO: 674895 - RNA, 19 nt, Artificial Sequence
  Description of Artificial Sequence: Synthetic oligonucleotide
cccggcagggacuguaagg

SEQ ID NO: 674896 - RNA, 19 nt, Artificial Sequence
  Description of Artificial Sequence: Synthetic oligonucleotide
aggugucucacuagauggu

SEQ ID NO: 674897 - RNA, 19 nt, Artificial Sequence
  Description of Artificial Sequence: Synthetic oligonucleotide
augaaguaguugagaggca

SEQ ID NO: 674898 - RNA, 19 nt, Artificial Sequence
  Description of Artificial Sequence: Synthetic oligonucleotide
cacuguugugauaguguaa

SEQ ID NO: 674899 - RNA, 19 nt, Artificial Sequence
  Description of Artificial Sequence: Synthetic oligonucleotide
aggagugugguaagagcau

SEQ ID NO: 674900 - RNA, 19 nt, Artificial Sequence
  Description of Artificial Sequence: Synthetic oligonucleotide
uugucacgugugaguuugu

SEQ ID NO: 674901 - RNA, 19 nt, Artificial Sequence
  Description of Artificial Sequence: Synthetic oligonucleotide
agccagagacauguucaca

SEQ ID NO: 674902 - RNA, 19 nt, Artificial Sequence
  Description of Artificial Sequence: Synthetic oligonucleotide
ggugucucacuagaugguc

SEQ ID NO: 674903 - RNA, 19 nt, Artificial Sequence
  Description of Artificial Sequence: Synthetic oligonucleotide
uugucacgugugagccggc

SEQ ID NO: 674904 - RNA, 19 nt, Artificial Sequence
  Description of Artificial Sequence: Synthetic oligonucleotide
gcggcguuccauaggaacc

SEQ ID NO: 674905 - RNA, 19 nt, Artificial Sequence
  Description of Artificial Sequence: Synthetic oligonucleotide
cacgucaaccagcucugga

SEQ ID NO: 674906 - RNA, 19 nt, Artificial Sequence
  Description of Artificial Sequence: Synthetic oligonucleotide
ccugaccacacgagagugc

SEQ ID NO: 674907 - RNA, 19 nt, Artificial Sequence
  Description of Artificial Sequence: Synthetic oligonucleotide
gagaacccacggaugcaca

SEQ ID NO: 674908 - RNA, 19 nt, Artificial Sequence
  Description of Artificial Sequence: Synthetic oligonucleotide
ggugggcggcguuccauag

SEQ ID NO: 674909 - RNA, 19 nt, Artificial Sequence
  Description of Artificial Sequence: Synthetic oligonucleotide
auaagcggaggcagccgca

SEQ ID NO: 674910 - RNA, 19 nt, Artificial Sequence
  Description of Artificial Sequence: Synthetic oligonucleotide
ccaguaugagggaccccgg

SEQ ID NO: 674911 - RNA, 19 nt, Artificial Sequence
  Description of Artificial Sequence: Synthetic oligonucleotide
cacgguuauugagguggag

SEQ ID NO: 674912 - RNA, 19 nt, Artificial Sequence
  Description of Artificial Sequence: Synthetic oligonucleotide
guacccugucaagcuguag

SEQ ID NO: 674913 - RNA, 19 nt, Artificial Sequence
  Description of Artificial Sequence: Synthetic oligonucleotide
gugagccggcacucccagg

SEQ ID NO: 674914 - RNA, 19 nt, Artificial Sequence
  Description of Artificial Sequence: Synthetic oligonucleotide
gagaucaaguuaugccauu

SEQ ID NO: 674915 - RNA, 19 nt, Artificial Sequence
  Description of Artificial Sequence: Synthetic oligonucleotide
cacaaugaugcugaauuuu

SEQ ID NO: 674916 - RNA, 19 nt, Artificial Sequence
  Description of Artificial Sequence: Synthetic oligonucleotide
cagagcuuggugggaggac

SEQ ID NO: 674917 - RNA, 19 nt, Artificial Sequence
  Description of Artificial Sequence: Synthetic oligonucleotide
guacucgagguuggaguuc

SEQ ID NO: 674918 - RNA, 19 nt, Artificial Sequence
  Description of Artificial Sequence: Synthetic oligonucleotide
caguacccugucaagcugu

SEQ ID NO: 674919 - RNA, 19 nt, Artificial Sequence
  Description of Artificial Sequence: Synthetic oligonucleotide
gcuucguauacuugacgua

SEQ ID NO: 674920 - RNA, 19 nt, Artificial Sequence
  Description of Artificial Sequence: Synthetic oligonucleotide
cacgugugagccggcacuc

SEQ ID NO: 674921 - RNA, 19 nt, Artificial Sequence
  Description of Artificial Sequence: Synthetic oligonucleotide
uugugaccgcugucucagu

SEQ ID NO: 674922 - RNA, 19 nt, Artificial Sequence
  Description of Artificial Sequence: Synthetic oligonucleotide
ccaaaaccggcagaccuuc

SEQ ID NO: 674923 - RNA, 19 nt, Artificial Sequence
  Description of Artificial Sequence: Synthetic oligonucleotide
gguuggaguucagcuuugc

SEQ ID NO: 674924 - RNA, 19 nt, Artificial Sequence
  Description of Artificial Sequence: Synthetic oligonucleotide
auacaucguggaccuucuu

SEQ ID NO: 674925 - RNA, 19 nt, Artificial Sequence
  Description of Artificial Sequence: Synthetic oligonucleotide
gaacccacggaugcacacu

SEQ ID NO: 674926 - RNA, 19 nt, Artificial Sequence
  Description of Artificial Sequence: Synthetic oligonucleotide
gccacaagguauccaaggu

SEQ ID NO: 674927 - RNA, 19 nt, Artificial Sequence
  Description of Artificial Sequence: Synthetic oligonucleotide
acgagagugcacagugcaa

SEQ ID NO: 674928 - RNA, 19 nt, Artificial Sequence
  Description of Artificial Sequence: Synthetic oligonucleotide
aggcagccgcacaaugaug

SEQ ID NO: 674929 - RNA, 19 nt, Artificial Sequence
  Description of Artificial Sequence: Synthetic oligonucleotide
auagaguuucgaggcucuu

SEQ ID NO: 674930 - RNA, 19 nt, Artificial Sequence
  Description of Artificial Sequence: Synthetic oligonucleotide
gucaagcuguagaccuuca

SEQ ID NO: 674931 - RNA, 19 nt, Artificial Sequence
  Description of Artificial Sequence: Synthetic oligonucleotide
cccugucaagcuguagacc

SEQ ID NO: 674932 - RNA, 19 nt, Artificial Sequence
  Description of Artificial Sequence: Synthetic oligonucleotide
augcaccaaaugagauuca

SEQ ID NO: 674933 - RNA, 19 nt, Artificial Sequence
  Description of Artificial Sequence: Synthetic oligonucleotide
cagugcaaugcagccaucu

SEQ ID NO: 674934 - RNA, 19 nt, Artificial Sequence
  Description of Artificial Sequence: Synthetic oligonucleotide
gugugagccggcacuccca

SEQ ID NO: 674935 - RNA, 19 nt, Artificial Sequence
  Description of Artificial Sequence: Synthetic oligonucleotide
ccguuuucucuucagagau

SEQ ID NO: 674936 - RNA, 19 nt, Artificial Sequence
  Description of Artificial Sequence: Synthetic oligonucleotide
cauaagcauugugaccgcu

SEQ ID NO: 674937 - RNA, 19 nt, Artificial Sequence
  Description of Artificial Sequence: Synthetic oligonucleotide
guccaguaugagggacccc

SEQ ID NO: 674938 - RNA, 19 nt, Artificial Sequence
  Description of Artificial Sequence: Synthetic oligonucleotide
ccggcagaccuucuggcca

SEQ ID NO: 674939 - RNA, 19 nt, Artificial Sequence
  Description of Artificial Sequence: Synthetic oligonucleotide
gaguuucaaugaaguaguu

SEQ ID NO: 674940 - RNA, 19 nt, Artificial Sequence
  Description of Artificial Sequence: Synthetic oligonucleotide
ggaaauggccagggaagua

SEQ ID NO: 674941 - RNA, 19 nt, Artificial Sequence
  Description of Artificial Sequence: Synthetic oligonucleotide
ccacagcagguacgacugg

SEQ ID NO: 674942 - RNA, 19 nt, Artificial Sequence
  Description of Artificial Sequence: Synthetic oligonucleotide
ggaugcaucucaagacacu

SEQ ID NO: 674943 - RNA, 19 nt, Artificial Sequence
  Description of Artificial Sequence: Synthetic oligonucleotide
cuguacccuuuaugaaggu

SEQ ID NO: 674944 - RNA, 19 nt, Artificial Sequence
  Description of Artificial Sequence: Synthetic oligonucleotide
acucgagguuggaguucag

SEQ ID NO: 674945 - RNA, 19 nt, Artificial Sequence
  Description of Artificial Sequence: Synthetic oligonucleotide
caaauucugcguccacauu

SEQ ID NO: 674946 - RNA, 19 nt, Artificial Sequence
  Description of Artificial Sequence: Synthetic oligonucleotide
gggaccccggcagggacug

SEQ ID NO: 674947 - RNA, 19 nt, Artificial Sequence
  Description of Artificial Sequence: Synthetic oligonucleotide
gaccccggcagggacugua

SEQ ID NO: 674948 - RNA, 19 nt, Artificial Sequence
  Description of Artificial Sequence: Synthetic oligonucleotide
gucucacuagauggucucu

SEQ ID NO: 674949 - RNA, 19 nt, Artificial Sequence
  Description of Artificial Sequence: Synthetic oligonucleotide
caaaaccggcagaccuucu

SEQ ID NO: 674950 - RNA, 19 nt, Artificial Sequence
  Description of Artificial Sequence: Synthetic oligonucleotide
gcgccaugguguguuucag

SEQ ID NO: 674951 - RNA, 19 nt, Artificial Sequence
  Description of Artificial Sequence: Synthetic oligonucleotide
cgugugaguuugucacgug

SEQ ID NO: 674952 - RNA, 19 nt, Artificial Sequence
  Description of Artificial Sequence: Synthetic oligonucleotide
ggcguuccauaggaaccac

SEQ ID NO: 674953 - RNA, 19 nt, Artificial Sequence
  Description of Artificial Sequence: Synthetic oligonucleotide
ccgugaaaugauguuggaa

SEQ ID NO: 674954 - RNA, 19 nt, Artificial Sequence
  Description of Artificial Sequence: Synthetic oligonucleotide
acccacggaugcacacugu

SEQ ID NO: 674955 - RNA, 19 nt, Artificial Sequence
  Description of Artificial Sequence: Synthetic oligonucleotide
gcuguagcacacacacaaa

SEQ ID NO: 674956 - RNA, 19 nt, Artificial Sequence
  Description of Artificial Sequence: Synthetic oligonucleotide
cagagucgucuguucaauu

SEQ ID NO: 674957 - RNA, 19 nt, Artificial Sequence
  Description of Artificial Sequence: Synthetic oligonucleotide
ggcugguugcauaacuuuu

SEQ ID NO: 674958 - RNA, 19 nt, Artificial Sequence
  Description of Artificial Sequence: Synthetic oligonucleotide
gcguuccauaggaaccaca

SEQ ID NO: 674959 - RNA, 19 nt, Artificial Sequence
  Description of Artificial Sequence: Synthetic oligonucleotide
ccacgguuauugaggugga

SEQ ID NO: 674960 - RNA, 19 nt, Artificial Sequence
  Description of Artificial Sequence: Synthetic oligonucleotide
ccacgucaaccagcucugg

SEQ ID NO: 674961 - RNA, 19 nt, Artificial Sequence
  Description of Artificial Sequence: Synthetic oligonucleotide
ccccggcagggacuguaag

SEQ ID NO: 674962 - RNA, 19 nt, Artificial Sequence
  Description of Artificial Sequence: Synthetic oligonucleotide
caaaagcgccauggugugu

SEQ ID NO: 674963 - RNA, 19 nt, Artificial Sequence
  Description of Artificial Sequence: Synthetic oligonucleotide
accccggcagggacuguaa

SEQ ID NO: 674964 - RNA, 19 nt, Artificial Sequence
  Description of Artificial Sequence: Synthetic oligonucleotide
cguacucgagguuggaguu

SEQ ID NO: 674965 - RNA, 19 nt, Artificial Sequence
  Description of Artificial Sequence: Synthetic oligonucleotide
cucuuguaagagggguauu

SEQ ID NO: 674966 - RNA, 19 nt, Artificial Sequence
  Description of Artificial Sequence: Synthetic oligonucleotide
cggcguuccauaggaacca

SEQ ID NO: 674967 - RNA, 19 nt, Artificial Sequence
  Description of Artificial Sequence: Synthetic oligonucleotide
cguuccaagucagcacaga

SEQ ID NO: 674968 - RNA, 19 nt, Artificial Sequence
  Description of Artificial Sequence: Synthetic oligonucleotide
ccagagucgucuguucaau

SEQ ID NO: 674969 - RNA, 19 nt, Artificial Sequence
  Description of Artificial Sequence: Synthetic oligonucleotide
gcagaccuucuggccaaua

SEQ ID NO: 674970 - RNA, 19 nt, Artificial Sequence
  Description of Artificial Sequence: Synthetic oligonucleotide
ccacacgagagugcacagu

SEQ ID NO: 674971 - RNA, 19 nt, Artificial Sequence
  Description of Artificial Sequence: Synthetic oligonucleotide
ccaggugggcggcguucca

SEQ ID NO: 674972 - RNA, 19 nt, Artificial Sequence
  Description of Artificial Sequence: Synthetic oligonucleotide
gggcggcguuccauaggaa

SEQ ID NO: 674973 - RNA, 19 nt, Artificial Sequence
  Description of Artificial Sequence: Synthetic oligonucleotide
cacauacaucguggaccuu

SEQ ID NO: 674974 - RNA, 19 nt, Artificial Sequence
  Description of Artificial Sequence: Synthetic oligonucleotide
ccgcugucucagugagcaa

SEQ ID NO: 674975 - RNA, 19 nt, Artificial Sequence
  Description of Artificial Sequence: Synthetic oligonucleotide
gcggaggcagccgcacaau

SEQ ID NO: 674976 - RNA, 19 nt, Artificial Sequence
  Description of Artificial Sequence: Synthetic oligonucleotide
ggguugcucuauagaccuu

SEQ ID NO: 674977 - RNA, 19 nt, Artificial Sequence
  Description of Artificial Sequence: Synthetic oligonucleotide
ggaccccggcagggacugu

SEQ ID NO: 674978 - RNA, 19 nt, Artificial Sequence
  Description of Artificial Sequence: Synthetic oligonucleotide
uuuaauaccagcauuuagg

SEQ ID NO: 674979 - RNA, 19 nt, Artificial Sequence
  Description of Artificial Sequence: Synthetic oligonucleotide
uuaacuuaguacuaaaucc

SEQ ID NO: 674980 - RNA, 19 nt, Artificial Sequence
  Description of Artificial Sequence: Synthetic oligonucleotide
aauuaacuuccccaguucc

SEQ ID NO: 674981 - RNA, 19 nt, Artificial Sequence
  Description of Artificial Sequence: Synthetic oligonucleotide
aagauaauaaauacuacac

SEQ ID NO: 674982 - RNA, 19 nt, Artificial Sequence
  Description of Artificial Sequence: Synthetic oligonucleotide
acuguaagauaauaaauac

SEQ ID NO: 674983 - RNA, 19 nt, Artificial Sequence
  Description of Artificial Sequence: Synthetic oligonucleotide
auaaguaggguuuucuggc

SEQ ID NO: 674984 - RNA, 19 nt, Artificial Sequence
  Description of Artificial Sequence: Synthetic oligonucleotide
aacgguaacuaucugcccc

SEQ ID NO: 674985 - RNA, 19 nt, Artificial Sequence
  Description of Artificial Sequence: Synthetic oligonucleotide
uuuaaaggcaaugagacug

SEQ ID NO: 674986 - RNA, 19 nt, Artificial Sequence
  Description of Artificial Sequence: Synthetic oligonucleotide
aagucauaugguuagacug

SEQ ID NO: 674987 - RNA, 19 nt, Artificial Sequence
  Description of Artificial Sequence: Synthetic oligonucleotide
cauacuauuucaauaacag

SEQ ID NO: 674988 - RNA, 19 nt, Artificial Sequence
  Description of Artificial Sequence: Synthetic oligonucleotide
uuaacgguaacuaucugcc

SEQ ID NO: 674989 - RNA, 19 nt, Artificial Sequence
  Description of Artificial Sequence: Synthetic oligonucleotide
aaaacgcuugucuacauug

SEQ ID NO: 674990 - RNA, 19 nt, Artificial Sequence
  Description of Artificial Sequence: Synthetic oligonucleotide
uuagacaugaguuguaccc

SEQ ID NO: 674991 - RNA, 19 nt, Artificial Sequence
  Description of Artificial Sequence: Synthetic oligonucleotide
gaaaccaugaauaacugag

SEQ ID NO: 674992 - RNA, 19 nt, Artificial Sequence
  Description of Artificial Sequence: Synthetic oligonucleotide
agauuacugugucagaggc

SEQ ID NO: 674993 - RNA, 19 nt, Artificial Sequence
  Description of Artificial Sequence: Synthetic oligonucleotide
cuuacucucauuuagccag

SEQ ID NO: 674994 - RNA, 19 nt, Artificial Sequence
  Description of Artificial Sequence: Synthetic oligonucleotide
aauaacagucauguuggcc

SEQ ID NO: 674995 - RNA, 19 nt, Artificial Sequence
  Description of Artificial Sequence: Synthetic oligonucleotide
acuacuagauaugaaaugg

SEQ ID NO: 674996 - RNA, 19 nt, Artificial Sequence
  Description of Artificial Sequence: Synthetic oligonucleotide
uaaaacuucauuucaccag

SEQ ID NO: 674997 - RNA, 19 nt, Artificial Sequence
  Description of Artificial Sequence: Synthetic oligonucleotide
aagagaauaguugaaacca

SEQ ID NO: 674998 - RNA, 19 nt, Artificial Sequence
  Description of Artificial Sequence: Synthetic oligonucleotide
gcuaguauggucuacauag

SEQ ID NO: 674999 - RNA, 19 nt, Artificial Sequence
  Description of Artificial Sequence: Synthetic oligonucleotide
uuaggaagagaauaguuga

SEQ ID NO: 675000 - RNA, 19 nt, Artificial Sequence
  Description of Artificial Sequence: Synthetic oligonucleotide
ugaaccucaagacuguaag

SEQ ID NO: 675001 - RNA, 19 nt, Artificial Sequence
  Description of Artificial Sequence: Synthetic oligonucleotide
uguccuaacuacuagauau

SEQ ID NO: 675002 - RNA, 19 nt, Artificial Sequence
  Description of Artificial Sequence: Synthetic oligonucleotide
uuugauaucuauacgucac

SEQ ID NO: 675003 - RNA, 19 nt, Artificial Sequence
  Description of Artificial Sequence: Synthetic oligonucleotide
cuagauaugaaauggaaga

SEQ ID NO: 675004 - RNA, 19 nt, Artificial Sequence
  Description of Artificial Sequence: Synthetic oligonucleotide
ucuaaugcucagcugaagc

SEQ ID NO: 675005 - RNA, 19 nt, Artificial Sequence
  Description of Artificial Sequence: Synthetic oligonucleotide
aaagguaaaagaauaauuu

SEQ ID NO: 675006 - RNA, 19 nt, Artificial Sequence
  Description of Artificial Sequence: Synthetic oligonucleotide
auugaaaacacgcuucuca

SEQ ID NO: 675007 - RNA, 19 nt, Artificial Sequence
  Description of Artificial Sequence: Synthetic oligonucleotide
cuuaacgguaacuaucugc

SEQ ID NO: 675008 - RNA, 19 nt, Artificial Sequence
  Description of Artificial Sequence: Synthetic oligonucleotide
gguuauugaacccaguggg

SEQ ID NO: 675009 - RNA, 19 nt, Artificial Sequence
  Description of Artificial Sequence: Synthetic oligonucleotide
uacuaaauccuucauuucu

SEQ ID NO: 675010 - RNA, 19 nt, Artificial Sequence
  Description of Artificial Sequence: Synthetic oligonucleotide
uaucaauuuccaaguaagg

SEQ ID NO: 675011 - RNA, 19 nt, Artificial Sequence
  Description of Artificial Sequence: Synthetic oligonucleotide
acaagaacugcacugcagg

SEQ ID NO: 675012 - RNA, 19 nt, Artificial Sequence
  Description of Artificial Sequence: Synthetic oligonucleotide
uauuugacaccucaauagc

SEQ ID NO: 675013 - RNA, 19 nt, Artificial Sequence
  Description of Artificial Sequence: Synthetic oligonucleotide
agacguaaaccauuuguac

SEQ ID NO: 675014 - RNA, 19 nt, Artificial Sequence
  Description of Artificial Sequence: Synthetic oligonucleotide
auuagacaugaguuguacc

SEQ ID NO: 675015 - RNA, 19 nt, Artificial Sequence
  Description of Artificial Sequence: Synthetic oligonucleotide
uugaguacagagcacgaag

SEQ ID NO: 675016 - RNA, 19 nt, Artificial Sequence
  Description of Artificial Sequence: Synthetic oligonucleotide
auagcagaaauccucgcuc

SEQ ID NO: 675017 - RNA, 19 nt, Artificial Sequence
  Description of Artificial Sequence: Synthetic oligonucleotide
aaagucauaugguuagacu

SEQ ID NO: 675018 - RNA, 19 nt, Artificial Sequence
  Description of Artificial Sequence: Synthetic oligonucleotide
aguuguacccuucuaauca

SEQ ID NO: 675019 - RNA, 19 nt, Artificial Sequence
  Description of Artificial Sequence: Synthetic oligonucleotide
ugugguaauaaugguacgg

SEQ ID NO: 675020 - RNA, 19 nt, Artificial Sequence
  Description of Artificial Sequence: Synthetic oligonucleotide
auaucuauacgucacucug

SEQ ID NO: 675021 - RNA, 19 nt, Artificial Sequence
  Description of Artificial Sequence: Synthetic oligonucleotide
agguacauugaguacagag

SEQ ID NO: 675022 - RNA, 19 nt, Artificial Sequence
  Description of Artificial Sequence: Synthetic oligonucleotide
uuuugauaucuauacguca

SEQ ID NO: 675023 - RNA, 19 nt, Artificial Sequence
  Description of Artificial Sequence: Synthetic oligonucleotide
aaggucucacgacagagug

SEQ ID NO: 675024 - RNA, 19 nt, Artificial Sequence
  Description of Artificial Sequence: Synthetic oligonucleotide
guaacuaucugccccacag

SEQ ID NO: 675025 - RNA, 19 nt, Artificial Sequence
  Description of Artificial Sequence: Synthetic oligonucleotide
agugaagaauguuuucggg

SEQ ID NO: 675026 - RNA, 19 nt, Artificial Sequence
  Description of Artificial Sequence: Synthetic oligonucleotide
agaacuuuaaauacuaggu

SEQ ID NO: 675027 - RNA, 19 nt, Artificial Sequence
  Description of Artificial Sequence: Synthetic oligonucleotide
uacacaauccuugagauua

SEQ ID NO: 675028 - RNA, 19 nt, Artificial Sequence
  Description of Artificial Sequence: Synthetic oligonucleotide
aauuuaacuuaguacuaaa

SEQ ID NO: 675029 - RNA, 19 nt, Artificial Sequence
  Description of Artificial Sequence: Synthetic oligonucleotide
aauaaugguacggaagagu

SEQ ID NO: 675030 - RNA, 19 nt, Artificial Sequence
  Description of Artificial Sequence: Synthetic oligonucleotide
agaguaauuuauucaaacu

SEQ ID NO: 675031 - RNA, 19 nt, Artificial Sequence
  Description of Artificial Sequence: Synthetic oligonucleotide
uucuugugcaaguuugccg

SEQ ID NO: 675032 - RNA, 19 nt, Artificial Sequence
  Description of Artificial Sequence: Synthetic oligonucleotide
uacagaguauuacacaauc

SEQ ID NO: 675033 - RNA, 19 nt, Artificial Sequence
  Description of Artificial Sequence: Synthetic oligonucleotide
augguuagacugaacaugc

SEQ ID NO: 675034 - RNA, 19 nt, Artificial Sequence
  Description of Artificial Sequence: Synthetic oligonucleotide
aaccaugaauaacugagaa

SEQ ID NO: 675035 - RNA, 19 nt, Artificial Sequence
  Description of Artificial Sequence: Synthetic oligonucleotide
auuacacaauccuugagau

SEQ ID NO: 675036 - RNA, 19 nt, Artificial Sequence
  Description of Artificial Sequence: Synthetic oligonucleotide
uuuguugcuagacguaaac

SEQ ID NO: 675037 - RNA, 19 nt, Artificial Sequence
  Description of Artificial Sequence: Synthetic oligonucleotide
ucgaguaguagauuucuug

SEQ ID NO: 675038 - RNA, 19 nt, Artificial Sequence
  Description of Artificial Sequence: Synthetic oligonucleotide
cuuaugauacaagaacugc

SEQ ID NO: 675039 - RNA, 19 nt, Artificial Sequence
  Description of Artificial Sequence: Synthetic oligonucleotide
cuaacuacuagauaugaaa

SEQ ID NO: 675040 - RNA, 19 nt, Artificial Sequence
  Description of Artificial Sequence: Synthetic oligonucleotide
cauaugguuagacugaaca

SEQ ID NO: 675041 - RNA, 19 nt, Artificial Sequence
  Description of Artificial Sequence: Synthetic oligonucleotide
aucuauacgucacucuguc

SEQ ID NO: 675042 - RNA, 19 nt, Artificial Sequence
  Description of Artificial Sequence: Synthetic oligonucleotide
uuugccgaccgccagaggu

SEQ ID NO: 675043 - RNA, 19 nt, Artificial Sequence
  Description of Artificial Sequence: Synthetic oligonucleotide
gagauuacugugucagagg

SEQ ID NO: 675044 - RNA, 19 nt, Artificial Sequence
  Description of Artificial Sequence: Synthetic oligonucleotide
auuuugauaucuauacguc

SEQ ID NO: 675045 - RNA, 19 nt, Artificial Sequence
  Description of Artificial Sequence: Synthetic oligonucleotide
gaagcguagagagaaacug

SEQ ID NO: 675046 - RNA, 19 nt, Artificial Sequence
  Description of Artificial Sequence: Synthetic oligonucleotide
ccaagugugguaauaaugg

SEQ ID NO: 675047 - RNA, 19 nt, Artificial Sequence
  Description of Artificial Sequence: Synthetic oligonucleotide
cuauacgucacucugucuc

SEQ ID NO: 675048 - RNA, 19 nt, Artificial Sequence
  Description of Artificial Sequence: Synthetic oligonucleotide
cuucaaugguguaaguagc

SEQ ID NO: 675049 - RNA, 19 nt, Artificial Sequence
  Description of Artificial Sequence: Synthetic oligonucleotide
aguugaaaccaugaauaac

SEQ ID NO: 675050 - RNA, 19 nt, Artificial Sequence
  Description of Artificial Sequence: Synthetic oligonucleotide
uauugaacccaguggguag

SEQ ID NO: 675051 - RNA, 19 nt, Artificial Sequence
  Description of Artificial Sequence: Synthetic oligonucleotide
aagccgaugaugcaucugu

SEQ ID NO: 675052 - RNA, 19 nt, Artificial Sequence
  Description of Artificial Sequence: Synthetic oligonucleotide
aauguuuucggguccuuau

SEQ ID NO: 675053 - RNA, 19 nt, Artificial Sequence
  Description of Artificial Sequence: Synthetic oligonucleotide
uguaacccugaccaaauuc

SEQ ID NO: 675054 - RNA, 19 nt, Artificial Sequence
  Description of Artificial Sequence: Synthetic oligonucleotide
cagcuuaugauacaagaac

SEQ ID NO: 675055 - RNA, 19 nt, Artificial Sequence
  Description of Artificial Sequence: Synthetic oligonucleotide
uuacucuggacuguaaccc

SEQ ID NO: 675056 - RNA, 19 nt, Artificial Sequence
  Description of Artificial Sequence: Synthetic oligonucleotide
uuagacugaacaugccaag

SEQ ID NO: 675057 - RNA, 19 nt, Artificial Sequence
  Description of Artificial Sequence: Synthetic oligonucleotide
ucauuuagccagccgacca

SEQ ID NO: 675058 - RNA, 19 nt, Artificial Sequence
  Description of Artificial Sequence: Synthetic oligonucleotide
uggacaaguggauuuguug

SEQ ID NO: 675059 - RNA, 19 nt, Artificial Sequence
  Description of Artificial Sequence: Synthetic oligonucleotide
gacguaaaccauuuguaca

SEQ ID NO: 675060 - RNA, 19 nt, Artificial Sequence
  Description of Artificial Sequence: Synthetic oligonucleotide
acuaggucugaggagaagg

SEQ ID NO: 675061 - RNA, 19 nt, Artificial Sequence
  Description of Artificial Sequence: Synthetic oligonucleotide
acuagauaugaaauggaag

SEQ ID NO: 675062 - RNA, 19 nt, Artificial Sequence
  Description of Artificial Sequence: Synthetic oligonucleotide
uugaaaacacgcuucucac

SEQ ID NO: 675063 - RNA, 19 nt, Artificial Sequence
  Description of Artificial Sequence: Synthetic oligonucleotide
augaauaacugagaagcag

SEQ ID NO: 675064 - RNA, 19 nt, Artificial Sequence
  Description of Artificial Sequence: Synthetic oligonucleotide
gguaguagaauuuugauau

SEQ ID NO: 675065 - RNA, 19 nt, Artificial Sequence
  Description of Artificial Sequence: Synthetic oligonucleotide
cuuaguacuaaauccuuca

SEQ ID NO: 675066 - RNA, 19 nt, Artificial Sequence
  Description of Artificial Sequence: Synthetic oligonucleotide
ugugguguaaucaguacuu

SEQ ID NO: 675067 - RNA, 19 nt, Artificial Sequence
  Description of Artificial Sequence: Synthetic oligonucleotide
uucauacuauuucaauaac

SEQ ID NO: 675068 - RNA, 19 nt, Artificial Sequence
  Description of Artificial Sequence: Synthetic oligonucleotide
uccgaagguacauugagua

SEQ ID NO: 675069 - RNA, 19 nt, Artificial Sequence
  Description of Artificial Sequence: Synthetic oligonucleotide
aaguccauugccucuggcu

SEQ ID NO: 675070 - RNA, 19 nt, Artificial Sequence
  Description of Artificial Sequence: Synthetic oligonucleotide
uguuacucuggacuguaac

SEQ ID NO: 675071 - RNA, 19 nt, Artificial Sequence
  Description of Artificial Sequence: Synthetic oligonucleotide
aucaauuuccaaguaagga

SEQ ID NO: 675072 - RNA, 19 nt, Artificial Sequence
  Description of Artificial Sequence: Synthetic oligonucleotide
acagaguauuacacaaucc

SEQ ID NO: 675073 - RNA, 19 nt, Artificial Sequence
  Description of Artificial Sequence: Synthetic oligonucleotide
aauagcugucucuccauaa

SEQ ID NO: 675074 - RNA, 19 nt, Artificial Sequence
  Description of Artificial Sequence: Synthetic oligonucleotide
ucuacauuguucuuccaua

SEQ ID NO: 675075 - RNA, 19 nt, Artificial Sequence
  Description of Artificial Sequence: Synthetic oligonucleotide
aguaguagauuucuugaaa

SEQ ID NO: 675076 - RNA, 19 nt, Artificial Sequence
  Description of Artificial Sequence: Synthetic oligonucleotide
cacgaagcugagaugaagc

SEQ ID NO: 675077 - RNA, 19 nt, Artificial Sequence
  Description of Artificial Sequence: Synthetic oligonucleotide
ucuuacucucauuuagcca

SEQ ID NO: 675078 - RNA, 19 nt, Artificial Sequence
  Description of Artificial Sequence: Synthetic oligonucleotide
aaccucaagacuguaagau

SEQ ID NO: 675079 - RNA, 19 nt, Artificial Sequence
  Description of Artificial Sequence: Synthetic oligonucleotide
uagacguaaaccauuugua

SEQ ID NO: 675080 - RNA, 19 nt, Artificial Sequence
  Description of Artificial Sequence: Synthetic oligonucleotide
acauagcagaaauccucgc

SEQ ID NO: 675081 - RNA, 19 nt, Artificial Sequence
  Description of Artificial Sequence: Synthetic oligonucleotide
acuauuucaauaacaguca

SEQ ID NO: 675082 - RNA, 19 nt, Artificial Sequence
  Description of Artificial Sequence: Synthetic oligonucleotide
acguaaaccauuuguacaa

SEQ ID NO: 675083 - RNA, 19 nt, Artificial Sequence
  Description of Artificial Sequence: Synthetic oligonucleotide
uguacccuucuaaucagac

SEQ ID NO: 675084 - RNA, 19 nt, Artificial Sequence
  Description of Artificial Sequence: Synthetic oligonucleotide
acgguuauugaacccagug

SEQ ID NO: 675085 - RNA, 19 nt, Artificial Sequence
  Description of Artificial Sequence: Synthetic oligonucleotide
ucgcucaguggcuuaacgg

SEQ ID NO: 675086 - RNA, 19 nt, Artificial Sequence
  Description of Artificial Sequence: Synthetic oligonucleotide
auagcugucucuccauaag

SEQ ID NO: 675087 - RNA, 19 nt, Artificial Sequence
  Description of Artificial Sequence: Synthetic oligonucleotide
guugaaaccaugaauaacu

SEQ ID NO: 675088 - RNA, 19 nt, Artificial Sequence
  Description of Artificial Sequence: Synthetic oligonucleotide
uaauuaacuuccccaguuc

SEQ ID NO: 675089 - RNA, 19 nt, Artificial Sequence
  Description of Artificial Sequence: Synthetic oligonucleotide
cuguaugaugaguucaaug

SEQ ID NO: 675090 - RNA, 19 nt, Artificial Sequence
  Description of Artificial Sequence: Synthetic oligonucleotide
uaucuauacgucacucugu

SEQ ID NO: 675091 - RNA, 19 nt, Artificial Sequence
  Description of Artificial Sequence: Synthetic oligonucleotide
aaacacgcuucucacugcu

SEQ ID NO: 675092 - RNA, 19 nt, Artificial Sequence
  Description of Artificial Sequence: Synthetic oligonucleotide
uuuuccgaagguacauuga

SEQ ID NO: 675093 - RNA, 19 nt, Artificial Sequence
  Description of Artificial Sequence: Synthetic oligonucleotide
uagauaugaaauggaagac

SEQ ID NO: 675094 - RNA, 19 nt, Artificial Sequence
  Description of Artificial Sequence: Synthetic oligonucleotide
uauuagacaugaguuguac

SEQ ID NO: 675095 - RNA, 19 nt, Artificial Sequence
  Description of Artificial Sequence: Synthetic oligonucleotide
aguaauuaacuuccccagu

SEQ ID NO: 675096 - RNA, 19 nt, Artificial Sequence
  Description of Artificial Sequence: Synthetic oligonucleotide
gguaauaaugguacggaag

SEQ ID NO: 675097 - RNA, 19 nt, Artificial Sequence
  Description of Artificial Sequence: Synthetic oligonucleotide
guaugaugaguucaaugac

SEQ ID NO: 675098 - RNA, 19 nt, Artificial Sequence
  Description of Artificial Sequence: Synthetic oligonucleotide
ucucauuuagccagccgac

SEQ ID NO: 675099 - RNA, 19 nt, Artificial Sequence
  Description of Artificial Sequence: Synthetic oligonucleotide
uggcuugaccuacugcagg

SEQ ID NO: 675100 - RNA, 19 nt, Artificial Sequence
  Description of Artificial Sequence: Synthetic oligonucleotide
guaguagauuucuugaaaa

SEQ ID NO: 675101 - RNA, 19 nt, Artificial Sequence
  Description of Artificial Sequence: Synthetic oligonucleotide
accgaggagaacuuuaaau

SEQ ID NO: 675102 - RNA, 19 nt, Artificial Sequence
  Description of Artificial Sequence: Synthetic oligonucleotide
uaaugguacggaagaguug

SEQ ID NO: 675103 - RNA, 19 nt, Artificial Sequence
  Description of Artificial Sequence: Synthetic oligonucleotide
ugaguuguacccuucuaau

SEQ ID NO: 675104 - RNA, 19 nt, Artificial Sequence
  Description of Artificial Sequence: Synthetic oligonucleotide
uggcuuaacgguaacuauc

SEQ ID NO: 675105 - RNA, 19 nt, Artificial Sequence
  Description of Artificial Sequence: Synthetic oligonucleotide
ugaugugguguaaucagua

SEQ ID NO: 675106 - RNA, 19 nt, Artificial Sequence
  Description of Artificial Sequence: Synthetic oligonucleotide
augugguguaaucaguacu

SEQ ID NO: 675107 - RNA, 19 nt, Artificial Sequence
  Description of Artificial Sequence: Synthetic oligonucleotide
acuguacaagaugucuacc

SEQ ID NO: 675108 - RNA, 19 nt, Artificial Sequence
  Description of Artificial Sequence: Synthetic oligonucleotide
gagaauaguugaaaccaug

SEQ ID NO: 675109 - RNA, 19 nt, Artificial Sequence
  Description of Artificial Sequence: Synthetic oligonucleotide
acagucuaaccauggcagg

SEQ ID NO: 675110 - RNA, 19 nt, Artificial Sequence
  Description of Artificial Sequence: Synthetic oligonucleotide
cauuugcagagaugaaccc

SEQ ID NO: 675111 - RNA, 19 nt, Artificial Sequence
  Description of Artificial Sequence: Synthetic oligonucleotide
auaauacuuccauucuggu

SEQ ID NO: 675112 - RNA, 19 nt, Artificial Sequence
  Description of Artificial Sequence: Synthetic oligonucleotide
gaagguacauugaguacag

SEQ ID NO: 675113 - RNA, 19 nt, Artificial Sequence
  Description of Artificial Sequence: Synthetic oligonucleotide
aacauugcugacauuacuu

SEQ ID NO: 675114 - RNA, 19 nt, Artificial Sequence
  Description of Artificial Sequence: Synthetic oligonucleotide
guuggaaggcaacuguaug

SEQ ID NO: 675115 - RNA, 19 nt, Artificial Sequence
  Description of Artificial Sequence: Synthetic oligonucleotide
uuaguacuaaauccuucau

SEQ ID NO: 675116 - RNA, 19 nt, Artificial Sequence
  Description of Artificial Sequence: Synthetic oligonucleotide
uguuuucggguccuuauuu

SEQ ID NO: 675117 - RNA, 19 nt, Artificial Sequence
  Description of Artificial Sequence: Synthetic oligonucleotide
accucaauagcugucucuc

SEQ ID NO: 675118 - RNA, 19 nt, Artificial Sequence
  Description of Artificial Sequence: Synthetic oligonucleotide
augaguuguacccuucuaa

SEQ ID NO: 675119 - RNA, 19 nt, Artificial Sequence
  Description of Artificial Sequence: Synthetic oligonucleotide
ugaaaacacgcuucucacu

SEQ ID NO: 675120 - RNA, 19 nt, Artificial Sequence
  Description of Artificial Sequence: Synthetic oligonucleotide
ggucagaucauccaagaca

SEQ ID NO: 675121 - RNA, 19 nt, Artificial Sequence
  Description of Artificial Sequence: Synthetic oligonucleotide
guuguacccuucuaaucag

SEQ ID NO: 675122 - RNA, 19 nt, Artificial Sequence
  Description of Artificial Sequence: Synthetic oligonucleotide
caaguaaggagguauccca

SEQ ID NO: 675123 - RNA, 19 nt, Artificial Sequence
  Description of Artificial Sequence: Synthetic oligonucleotide
acuuaguacuaaauccuuc

SEQ ID NO: 675124 - RNA, 19 nt, Artificial Sequence
  Description of Artificial Sequence: Synthetic oligonucleotide
uucauuucaccaggacugg

SEQ ID NO: 675125 - RNA, 19 nt, Artificial Sequence
  Description of Artificial Sequence: Synthetic oligonucleotide
auaaugcuaagccuuccau

SEQ ID NO: 675126 - RNA, 19 nt, Artificial Sequence
  Description of Artificial Sequence: Synthetic oligonucleotide
uuucggguccuuauuugac

SEQ ID NO: 675127 - RNA, 19 nt, Artificial Sequence
  Description of Artificial Sequence: Synthetic oligonucleotide
gagggcacuguacaagaug

SEQ ID NO: 675128 - RNA, 19 nt, Artificial Sequence
  Description of Artificial Sequence: Synthetic oligonucleotide
uauacgucacucugucucu

SEQ ID NO: 675129 - RNA, 19 nt, Artificial Sequence
  Description of Artificial Sequence: Synthetic oligonucleotide
gacuucugcucauugacaa

SEQ ID NO: 675130 - RNA, 19 nt, Artificial Sequence
  Description of Artificial Sequence: Synthetic oligonucleotide
accccgauucucuucccgc

SEQ ID NO: 675131 - RNA, 19 nt, Artificial Sequence
  Description of Artificial Sequence: Synthetic oligonucleotide
uaacuaucugccccacagc

SEQ ID NO: 675132 - RNA, 19 nt, Artificial Sequence
  Description of Artificial Sequence: Synthetic oligonucleotide
gaguucaaugacuaugucu

SEQ ID NO: 675133 - RNA, 19 nt, Artificial Sequence
  Description of Artificial Sequence: Synthetic oligonucleotide
aaaccaugaauaacugaga

SEQ ID NO: 675134 - RNA, 19 nt, Artificial Sequence
  Description of Artificial Sequence: Synthetic oligonucleotide
aaggaguccagaagcguag

SEQ ID NO: 675135 - RNA, 19 nt, Artificial Sequence
  Description of Artificial Sequence: Synthetic oligonucleotide
gagauccaggcuaguaugg

SEQ ID NO: 675136 - RNA, 19 nt, Artificial Sequence
  Description of Artificial Sequence: Synthetic oligonucleotide
agaguggacaaguggauuu

SEQ ID NO: 675137 - RNA, 19 nt, Artificial Sequence
  Description of Artificial Sequence: Synthetic oligonucleotide
uccacgguuauugaaccca

SEQ ID NO: 675138 - RNA, 19 nt, Artificial Sequence
  Description of Artificial Sequence: Synthetic oligonucleotide
ugauaucuauacgucacuc

SEQ ID NO: 675139 - RNA, 19 nt, Artificial Sequence
  Description of Artificial Sequence: Synthetic oligonucleotide
uugaccuacugcagggaca

SEQ ID NO: 675140 - RNA, 19 nt, Artificial Sequence
  Description of Artificial Sequence: Synthetic oligonucleotide
guuuucggguccuuauuug

SEQ ID NO: 675141 - RNA, 19 nt, Artificial Sequence
  Description of Artificial Sequence: Synthetic oligonucleotide
uuauugaacccagugggua

SEQ ID NO: 675142 - RNA, 19 nt, Artificial Sequence
  Description of Artificial Sequence: Synthetic oligonucleotide
ugguaauaaugguacggaa

SEQ ID NO: 675143 - RNA, 19 nt, Artificial Sequence
  Description of Artificial Sequence: Synthetic oligonucleotide
caguuguuacucuggacug

SEQ ID NO: 675144 - RNA, 19 nt, Artificial Sequence
  Description of Artificial Sequence: Synthetic oligonucleotide
uucggguccuuauuugaca

SEQ ID NO: 675145 - RNA, 19 nt, Artificial Sequence
  Description of Artificial Sequence: Synthetic oligonucleotide
agaugucuaccaggaaggc

SEQ ID NO: 675146 - RNA, 19 nt, Artificial Sequence
  Description of Artificial Sequence: Synthetic oligonucleotide
gaguuguacccuucuaauc

SEQ ID NO: 675147 - RNA, 19 nt, Artificial Sequence
  Description of Artificial Sequence: Synthetic oligonucleotide
uuccgaagguacauugagu

SEQ ID NO: 675148 - RNA, 19 nt, Artificial Sequence
  Description of Artificial Sequence: Synthetic oligonucleotide
ugaccaaauucauacuauu

SEQ ID NO: 675149 - RNA, 19 nt, Artificial Sequence
  Description of Artificial Sequence: Synthetic oligonucleotide
aaguaggguuuucuggcau

SEQ ID NO: 675150 - RNA, 19 nt, Artificial Sequence
  Description of Artificial Sequence: Synthetic oligonucleotide
cacugucacagcaucggag

SEQ ID NO: 675151 - RNA, 19 nt, Artificial Sequence
  Description of Artificial Sequence: Synthetic oligonucleotide
uccauaaguaggguuuucu

SEQ ID NO: 675152 - RNA, 19 nt, Artificial Sequence
  Description of Artificial Sequence: Synthetic oligonucleotide
uaaugcucagcugaagcuc

SEQ ID NO: 675153 - RNA, 19 nt, Artificial Sequence
  Description of Artificial Sequence: Synthetic oligonucleotide
auaaugguacggaagaguu

SEQ ID NO: 675154 - RNA, 19 nt, Artificial Sequence
  Description of Artificial Sequence: Synthetic oligonucleotide
gauaucuauacgucacucu

SEQ ID NO: 675155 - RNA, 19 nt, Artificial Sequence
  Description of Artificial Sequence: Synthetic oligonucleotide
acgaagcugagaugaagca

SEQ ID NO: 675156 - RNA, 19 nt, Artificial Sequence
  Description of Artificial Sequence: Synthetic oligonucleotide
auacaagaacugcacugca

SEQ ID NO: 675157 - RNA, 19 nt, Artificial Sequence
  Description of Artificial Sequence: Synthetic oligonucleotide
auuugacaccucaauagcu

SEQ ID NO: 675158 - RNA, 19 nt, Artificial Sequence
  Description of Artificial Sequence: Synthetic oligonucleotide
uuacucucauuuagccagc

SEQ ID NO: 675159 - RNA, 19 nt, Artificial Sequence
  Description of Artificial Sequence: Synthetic oligonucleotide
ucggguccuuauuugacac

SEQ ID NO: 675160 - RNA, 19 nt, Artificial Sequence
  Description of Artificial Sequence: Synthetic oligonucleotide
cuagacguaaaccauuugu

SEQ ID NO: 675161 - RNA, 19 nt, Artificial Sequence
  Description of Artificial Sequence: Synthetic oligonucleotide
cauuuagccagccgaccag

SEQ ID NO: 675162 - RNA, 19 nt, Artificial Sequence
  Description of Artificial Sequence: Synthetic oligonucleotide
ugcuagacguaaaccauuu

SEQ ID NO: 675163 - RNA, 19 nt, Artificial Sequence
  Description of Artificial Sequence: Synthetic oligonucleotide
acaaagguaagagaauguu

SEQ ID NO: 675164 - RNA, 19 nt, Artificial Sequence
  Description of Artificial Sequence: Synthetic oligonucleotide
aaguuugccgaccgccaga

SEQ ID NO: 675165 - RNA, 19 nt, Artificial Sequence
  Description of Artificial Sequence: Synthetic oligonucleotide
uggcauaagucugaacaga

SEQ ID NO: 675166 - RNA, 19 nt, Artificial Sequence
  Description of Artificial Sequence: Synthetic oligonucleotide
guagagagaaacugcaggu

SEQ ID NO: 675167 - RNA, 19 nt, Artificial Sequence
  Description of Artificial Sequence: Synthetic oligonucleotide
cuacuagauaugaaaugga

SEQ ID NO: 675168 - RNA, 19 nt, Artificial Sequence
  Description of Artificial Sequence: Synthetic oligonucleotide
gauuuguugcuagacguaa

SEQ ID NO: 675169 - RNA, 19 nt, Artificial Sequence
  Description of Artificial Sequence: Synthetic oligonucleotide
cagaguauuacacaauccu

SEQ ID NO: 675170 - RNA, 19 nt, Artificial Sequence
  Description of Artificial Sequence: Synthetic oligonucleotide
agucauaugguuagacuga

SEQ ID NO: 675171 - RNA, 19 nt, Artificial Sequence
  Description of Artificial Sequence: Synthetic oligonucleotide
cuugaccuacugcagggac

SEQ ID NO: 675172 - RNA, 19 nt, Artificial Sequence
  Description of Artificial Sequence: Synthetic oligonucleotide
aaaggucucacgacagagu

SEQ ID NO: 675173 - RNA, 19 nt, Artificial Sequence
  Description of Artificial Sequence: Synthetic oligonucleotide
uaacgguaacuaucugccc

SEQ ID NO: 675174 - RNA, 19 nt, Artificial Sequence
  Description of Artificial Sequence: Synthetic oligonucleotide
aguugcgccacugcugcac

SEQ ID NO: 675175 - RNA, 19 nt, Artificial Sequence
  Description of Artificial Sequence: Synthetic oligonucleotide
uacauuguucuuccauaau

SEQ ID NO: 675176 - RNA, 19 nt, Artificial Sequence
  Description of Artificial Sequence: Synthetic oligonucleotide
uagacaugaguuguacccu

SEQ ID NO: 675177 - RNA, 19 nt, Artificial Sequence
  Description of Artificial Sequence: Synthetic oligonucleotide
ugcugacauuacuugcuug

SEQ ID NO: 675178 - RNA, 19 nt, Artificial Sequence
  Description of Artificial Sequence: Synthetic oligonucleotide
cguagagagaaacugcagg

SEQ ID NO: 675179 - RNA, 19 nt, Artificial Sequence
  Description of Artificial Sequence: Synthetic oligonucleotide
ugguuagacugaacaugcc

SEQ ID NO: 675180 - RNA, 19 nt, Artificial Sequence
  Description of Artificial Sequence: Synthetic oligonucleotide
guuagacugaacaugccaa

SEQ ID NO: 675181 - RNA, 19 nt, Artificial Sequence
  Description of Artificial Sequence: Synthetic oligonucleotide
agacugugauccaaauuuc

SEQ ID NO: 675182 - RNA, 19 nt, Artificial Sequence
  Description of Artificial Sequence: Synthetic oligonucleotide
ucaccgaggagaacuuuaa

SEQ ID NO: 675183 - RNA, 19 nt, Artificial Sequence
  Description of Artificial Sequence: Synthetic oligonucleotide
cagaugauagaguaauuua

SEQ ID NO: 675184 - RNA, 19 nt, Artificial Sequence
  Description of Artificial Sequence: Synthetic oligonucleotide
ugaguucaaugacuauguc

SEQ ID NO: 675185 - RNA, 19 nt, Artificial Sequence
  Description of Artificial Sequence: Synthetic oligonucleotide
acaugaguuguacccuucu

SEQ ID NO: 675186 - RNA, 19 nt, Artificial Sequence
  Description of Artificial Sequence: Synthetic oligonucleotide
uugagauuacugugucaga

SEQ ID NO: 675187 - RNA, 19 nt, Artificial Sequence
  Description of Artificial Sequence: Synthetic oligonucleotide
gauccaggcuaguaugguc

SEQ ID NO: 675188 - RNA, 19 nt, Artificial Sequence
  Description of Artificial Sequence: Synthetic oligonucleotide
gguuagacugaacaugcca

SEQ ID NO: 675189 - RNA, 19 nt, Artificial Sequence
  Description of Artificial Sequence: Synthetic oligonucleotide
aacuuaguacuaaauccuu

SEQ ID NO: 675190 - RNA, 19 nt, Artificial Sequence
  Description of Artificial Sequence: Synthetic oligonucleotide
aguggcuuaacgguaacua

SEQ ID NO: 675191 - RNA, 19 nt, Artificial Sequence
  Description of Artificial Sequence: Synthetic oligonucleotide
cucgcucaguggcuuaacg

SEQ ID NO: 675192 - RNA, 19 nt, Artificial Sequence
  Description of Artificial Sequence: Synthetic oligonucleotide
acgguaacuaucugcccca

SEQ ID NO: 675193 - RNA, 19 nt, Artificial Sequence
  Description of Artificial Sequence: Synthetic oligonucleotide
cuguaagauaauaaauacu

SEQ ID NO: 675194 - RNA, 19 nt, Artificial Sequence
  Description of Artificial Sequence: Synthetic oligonucleotide
ucuauacgucacucugucu

SEQ ID NO: 675195 - RNA, 19 nt, Artificial Sequence
  Description of Artificial Sequence: Synthetic oligonucleotide
uugcuagacguaaaccauu

SEQ ID NO: 675196 - RNA, 19 nt, Artificial Sequence
  Description of Artificial Sequence: Synthetic oligonucleotide
ugaccuacugcagggacaa

SEQ ID NO: 675197 - RNA, 19 nt, Artificial Sequence
  Description of Artificial Sequence: Synthetic oligonucleotide
gguuaagaagagguaguag

SEQ ID NO: 675198 - RNA, 19 nt, Artificial Sequence
  Description of Artificial Sequence: Synthetic oligonucleotide
aaacgcuugucuacauugu

SEQ ID NO: 675199 - RNA, 19 nt, Artificial Sequence
  Description of Artificial Sequence: Synthetic oligonucleotide
cagucuaaccauggcaggc

SEQ ID NO: 675200 - RNA, 19 nt, Artificial Sequence
  Description of Artificial Sequence: Synthetic oligonucleotide
gcuuaugauacaagaacug

SEQ ID NO: 675201 - RNA, 19 nt, Artificial Sequence
  Description of Artificial Sequence: Synthetic oligonucleotide
guaauuaacuuccccaguu

SEQ ID NO: 675202 - RNA, 19 nt, Artificial Sequence
  Description of Artificial Sequence: Synthetic oligonucleotide
gugguaauaaugguacgga

SEQ ID NO: 675203 - RNA, 19 nt, Artificial Sequence
  Description of Artificial Sequence: Synthetic oligonucleotide
uuccacgguuauugaaccc

SEQ ID NO: 675204 - RNA, 19 nt, Artificial Sequence
  Description of Artificial Sequence: Synthetic oligonucleotide
accuacugcagggacaacu

SEQ ID NO: 675205 - RNA, 19 nt, Artificial Sequence
  Description of Artificial Sequence: Synthetic oligonucleotide
aguuugccgaccgccagag

SEQ ID NO: 675206 - RNA, 19 nt, Artificial Sequence
  Description of Artificial Sequence: Synthetic oligonucleotide
cucauuuagccagccgacc

SEQ ID NO: 675207 - RNA, 19 nt, Artificial Sequence
  Description of Artificial Sequence: Synthetic oligonucleotide
agaguauuacacaauccuu

SEQ ID NO: 675208 - RNA, 19 nt, Artificial Sequence
  Description of Artificial Sequence: Synthetic oligonucleotide
gaacauugcugacauuacu

SEQ ID NO: 675209 - RNA, 19 nt, Artificial Sequence
  Description of Artificial Sequence: Synthetic oligonucleotide
guaaggagguaucccagaa

SEQ ID NO: 675210 - RNA, 19 nt, Artificial Sequence
  Description of Artificial Sequence: Synthetic oligonucleotide
cuguaauccacacacaguu

SEQ ID NO: 675211 - RNA, 19 nt, Artificial Sequence
  Description of Artificial Sequence: Synthetic oligonucleotide
cuuuuagguguccuaacua

SEQ ID NO: 675212 - RNA, 19 nt, Artificial Sequence
  Description of Artificial Sequence: Synthetic oligonucleotide
gacaaguggauuuguugcu

SEQ ID NO: 675213 - RNA, 19 nt, Artificial Sequence
  Description of Artificial Sequence: Synthetic oligonucleotide
aaauccucgcucaguggcu

SEQ ID NO: 675214 - RNA, 19 nt, Artificial Sequence
  Description of Artificial Sequence: Synthetic oligonucleotide
uuacacaauccuugagauu

SEQ ID NO: 675215 - RNA, 19 nt, Artificial Sequence
  Description of Artificial Sequence: Synthetic oligonucleotide
gaguggacaaguggauuug

SEQ ID NO: 675216 - RNA, 19 nt, Artificial Sequence
  Description of Artificial Sequence: Synthetic oligonucleotide
guaguuggaaggcaacugu

SEQ ID NO: 675217 - RNA, 19 nt, Artificial Sequence
  Description of Artificial Sequence: Synthetic oligonucleotide
augguguaaguagccauca

SEQ ID NO: 675218 - RNA, 19 nt, Artificial Sequence
  Description of Artificial Sequence: Synthetic oligonucleotide
agaagcguagagagaaacu

SEQ ID NO: 675219 - RNA, 19 nt, Artificial Sequence
  Description of Artificial Sequence: Synthetic oligonucleotide
caauauugaaaacacgcuu

SEQ ID NO: 675220 - RNA, 19 nt, Artificial Sequence
  Description of Artificial Sequence: Synthetic oligonucleotide
ugguguaaguagccaucac

SEQ ID NO: 675221 - RNA, 19 nt, Artificial Sequence
  Description of Artificial Sequence: Synthetic oligonucleotide
agucuaaccauggcaggca

SEQ ID NO: 675222 - RNA, 19 nt, Artificial Sequence
  Description of Artificial Sequence: Synthetic oligonucleotide
cucacgacagaguggacaa

SEQ ID NO: 675223 - RNA, 19 nt, Artificial Sequence
  Description of Artificial Sequence: Synthetic oligonucleotide
cuaggucugaggagaagga

SEQ ID NO: 675224 - RNA, 19 nt, Artificial Sequence
  Description of Artificial Sequence: Synthetic oligonucleotide
cuaaugcucagcugaagcu

SEQ ID NO: 675225 - RNA, 19 nt, Artificial Sequence
  Description of Artificial Sequence: Synthetic oligonucleotide
accucaagacuguaagaua

SEQ ID NO: 675226 - RNA, 19 nt, Artificial Sequence
  Description of Artificial Sequence: Synthetic oligonucleotide
caacuguaugaugaguuca

SEQ ID NO: 675227 - RNA, 19 nt, Artificial Sequence
  Description of Artificial Sequence: Synthetic oligonucleotide
ucacucugucucugaaccu

SEQ ID NO: 675228 - RNA, 19 nt, Artificial Sequence
  Description of Artificial Sequence: Synthetic oligonucleotide
agacaugaguuguacccuu

SEQ ID NO: 675229 - RNA, 19 nt, Artificial Sequence
  Description of Artificial Sequence: Synthetic oligonucleotide
ucuggacuguaacccugac

SEQ ID NO: 675230 - RNA, 19 nt, Artificial Sequence
  Description of Artificial Sequence: Synthetic oligonucleotide
gacaagccgaugaugcauc

SEQ ID NO: 675231 - RNA, 19 nt, Artificial Sequence
  Description of Artificial Sequence: Synthetic oligonucleotide
guacccuucuaaucagaca

SEQ ID NO: 675232 - RNA, 19 nt, Artificial Sequence
  Description of Artificial Sequence: Synthetic oligonucleotide
agagaauaguugaaaccau

SEQ ID NO: 675233 - RNA, 19 nt, Artificial Sequence
  Description of Artificial Sequence: Synthetic oligonucleotide
uggccaguuggugggaagc

SEQ ID NO: 675234 - RNA, 19 nt, Artificial Sequence
  Description of Artificial Sequence: Synthetic oligonucleotide
cauugaguacagagcacga

SEQ ID NO: 675235 - RNA, 19 nt, Artificial Sequence
  Description of Artificial Sequence: Synthetic oligonucleotide
auugaguacagagcacgaa

SEQ ID NO: 675236 - RNA, 19 nt, Artificial Sequence
  Description of Artificial Sequence: Synthetic oligonucleotide
gccaagugugguaauaaug

SEQ ID NO: 675237 - RNA, 19 nt, Artificial Sequence
  Description of Artificial Sequence: Synthetic oligonucleotide
ucaucaccgaggagaacuu

SEQ ID NO: 675238 - RNA, 19 nt, Artificial Sequence
  Description of Artificial Sequence: Synthetic oligonucleotide
guuccaccacagucuaacc

SEQ ID NO: 675239 - RNA, 19 nt, Artificial Sequence
  Description of Artificial Sequence: Synthetic oligonucleotide
gaagcagaucauacaaucu

SEQ ID NO: 675240 - RNA, 19 nt, Artificial Sequence
  Description of Artificial Sequence: Synthetic oligonucleotide
ccucaagacuguaagauaa

SEQ ID NO: 675241 - RNA, 19 nt, Artificial Sequence
  Description of Artificial Sequence: Synthetic oligonucleotide
gguguaaguagccaucacu

SEQ ID NO: 675242 - RNA, 19 nt, Artificial Sequence
  Description of Artificial Sequence: Synthetic oligonucleotide
acaagccgaugaugcaucu

SEQ ID NO: 675243 - RNA, 19 nt, Artificial Sequence
  Description of Artificial Sequence: Synthetic oligonucleotide
gguguaaucaguacuucaa

SEQ ID NO: 675244 - RNA, 19 nt, Artificial Sequence
  Description of Artificial Sequence: Synthetic oligonucleotide
ggucucacgacagagugga

SEQ ID NO: 675245 - RNA, 19 nt, Artificial Sequence
  Description of Artificial Sequence: Synthetic oligonucleotide
caucggagggcacuguaca

SEQ ID NO: 675246 - RNA, 19 nt, Artificial Sequence
  Description of Artificial Sequence: Synthetic oligonucleotide
uuguuacucuggacuguaa

SEQ ID NO: 675247 - RNA, 19 nt, Artificial Sequence
  Description of Artificial Sequence: Synthetic oligonucleotide
gagaugaacccaccuuuua

SEQ ID NO: 675248 - RNA, 19 nt, Artificial Sequence
  Description of Artificial Sequence: Synthetic oligonucleotide
aagcugagaugaagcagcu

SEQ ID NO: 675249 - RNA, 19 nt, Artificial Sequence
  Description of Artificial Sequence: Synthetic oligonucleotide
cgguuauugaacccagugg

SEQ ID NO: 675250 - RNA, 19 nt, Artificial Sequence
  Description of Artificial Sequence: Synthetic oligonucleotide
cagagcacgaagcugagau

SEQ ID NO: 675251 - RNA, 19 nt, Artificial Sequence
  Description of Artificial Sequence: Synthetic oligonucleotide
aguggguaguuggaaggca

SEQ ID NO: 675252 - RNA, 19 nt, Artificial Sequence
  Description of Artificial Sequence: Synthetic oligonucleotide
ucauuucaccaggacuggu

SEQ ID NO: 675253 - RNA, 19 nt, Artificial Sequence
  Description of Artificial Sequence: Synthetic oligonucleotide
cagaucauacaaucuucaa

SEQ ID NO: 675254 - RNA, 19 nt, Artificial Sequence
  Description of Artificial Sequence: Synthetic oligonucleotide
uguuuuccgaagguacauu

SEQ ID NO: 675255 - RNA, 19 nt, Artificial Sequence
  Description of Artificial Sequence: Synthetic oligonucleotide
caccccgauucucuucccg

SEQ ID NO: 675256 - RNA, 19 nt, Artificial Sequence
  Description of Artificial Sequence: Synthetic oligonucleotide
aggucucacgacagagugg

SEQ ID NO: 675257 - RNA, 19 nt, Artificial Sequence
  Description of Artificial Sequence: Synthetic oligonucleotide
ggaguccagaagcguagag

SEQ ID NO: 675258 - RNA, 19 nt, Artificial Sequence
  Description of Artificial Sequence: Synthetic oligonucleotide
cucuccauaaguaggguuu

SEQ ID NO: 675259 - RNA, 19 nt, Artificial Sequence
  Description of Artificial Sequence: Synthetic oligonucleotide
cucaguggcuuaacgguaa

SEQ ID NO: 675260 - RNA, 19 nt, Artificial Sequence
  Description of Artificial Sequence: Synthetic oligonucleotide
aauccucgcucaguggcuu

SEQ ID NO: 675261 - RNA, 19 nt, Artificial Sequence
  Description of Artificial Sequence: Synthetic oligonucleotide
gacaugaguuguacccuuc

SEQ ID NO: 675262 - RNA, 19 nt, Artificial Sequence
  Description of Artificial Sequence: Synthetic oligonucleotide
gcugacauuacuugcuugu

SEQ ID NO: 675263 - RNA, 19 nt, Artificial Sequence
  Description of Artificial Sequence: Synthetic oligonucleotide
cugaaccucaagacuguaa

SEQ ID NO: 675264 - RNA, 19 nt, Artificial Sequence
  Description of Artificial Sequence: Synthetic oligonucleotide
gcaaugagacuguagccaa

SEQ ID NO: 675265 - RNA, 19 nt, Artificial Sequence
  Description of Artificial Sequence: Synthetic oligonucleotide
acuguaugaugaguucaau

SEQ ID NO: 675266 - RNA, 19 nt, Artificial Sequence
  Description of Artificial Sequence: Synthetic oligonucleotide
aucggagggcacuguacaa

SEQ ID NO: 675267 - RNA, 19 nt, Artificial Sequence
  Description of Artificial Sequence: Synthetic oligonucleotide
aagguacauugaguacaga

SEQ ID NO: 675268 - RNA, 19 nt, Artificial Sequence
  Description of Artificial Sequence: Synthetic oligonucleotide
ugcgccacugcugcacagc

SEQ ID NO: 675269 - RNA, 19 nt, Artificial Sequence
  Description of Artificial Sequence: Synthetic oligonucleotide
ccgaggagaacuuuaaaua

SEQ ID NO: 675270 - RNA, 19 nt, Artificial Sequence
  Description of Artificial Sequence: Synthetic oligonucleotide
auuuguugcuagacguaaa

SEQ ID NO: 675271 - RNA, 19 nt, Artificial Sequence
  Description of Artificial Sequence: Synthetic oligonucleotide
ucacgacagaguggacaag

SEQ ID NO: 675272 - RNA, 19 nt, Artificial Sequence
  Description of Artificial Sequence: Synthetic oligonucleotide
auacgucacucugucucug

SEQ ID NO: 675273 - RNA, 19 nt, Artificial Sequence
  Description of Artificial Sequence: Synthetic oligonucleotide
augcuaagccuuccauaau

SEQ ID NO: 675274 - RNA, 19 nt, Artificial Sequence
  Description of Artificial Sequence: Synthetic oligonucleotide
gaauguuuucggguccuua

SEQ ID NO: 675275 - RNA, 19 nt, Artificial Sequence
  Description of Artificial Sequence: Synthetic oligonucleotide
guugcuagacguaaaccau

SEQ ID NO: 675276 - RNA, 19 nt, Artificial Sequence
  Description of Artificial Sequence: Synthetic oligonucleotide
guuauugaacccagugggu

SEQ ID NO: 675277 - RNA, 19 nt, Artificial Sequence
  Description of Artificial Sequence: Synthetic oligonucleotide
cucuggacuguaacccuga

SEQ ID NO: 675278 - RNA, 19 nt, Artificial Sequence
  Description of Artificial Sequence: Synthetic oligonucleotide
gcuagacguaaaccauuug

SEQ ID NO: 675279 - RNA, 19 nt, Artificial Sequence
  Description of Artificial Sequence: Synthetic oligonucleotide
guaggguuuucuggcauaa

SEQ ID NO: 675280 - RNA, 19 nt, Artificial Sequence
  Description of Artificial Sequence: Synthetic oligonucleotide
cuaguauggucuacauagu

SEQ ID NO: 675281 - RNA, 19 nt, Artificial Sequence
  Description of Artificial Sequence: Synthetic oligonucleotide
guguccuaacuacuagaua

SEQ ID NO: 675282 - RNA, 19 nt, Artificial Sequence
  Description of Artificial Sequence: Synthetic oligonucleotide
guuugccgaccgccagagg

SEQ ID NO: 675283 - RNA, 19 nt, Artificial Sequence
  Description of Artificial Sequence: Synthetic oligonucleotide
cacuucucgaguaguagau

SEQ ID NO: 675284 - RNA, 19 nt, Artificial Sequence
  Description of Artificial Sequence: Synthetic oligonucleotide
gcuuaacgguaacuaucug

SEQ ID NO: 675285 - RNA, 19 nt, Artificial Sequence
  Description of Artificial Sequence: Synthetic oligonucleotide
ccugaccaaauucauacua

SEQ ID NO: 675286 - RNA, 19 nt, Artificial Sequence
  Description of Artificial Sequence: Synthetic oligonucleotide
ugccgaccgccagaggucu

SEQ ID NO: 675287 - RNA, 19 nt, Artificial Sequence
  Description of Artificial Sequence: Synthetic oligonucleotide
ccacgguuauugaacccag

SEQ ID NO: 675288 - RNA, 19 nt, Artificial Sequence
  Description of Artificial Sequence: Synthetic oligonucleotide
ggcuuaacgguaacuaucu

SEQ ID NO: 675289 - RNA, 19 nt, Artificial Sequence
  Description of Artificial Sequence: Synthetic oligonucleotide
guugcgccacugcugcaca

SEQ ID NO: 675290 - RNA, 19 nt, Artificial Sequence
  Description of Artificial Sequence: Synthetic oligonucleotide
gcuuuccacgguuauugaa

SEQ ID NO: 675291 - RNA, 19 nt, Artificial Sequence
  Description of Artificial Sequence: Synthetic oligonucleotide
agacauuugcagagaugaa

SEQ ID NO: 675292 - RNA, 19 nt, Artificial Sequence
  Description of Artificial Sequence: Synthetic oligonucleotide
gccgaccagcuuaugauac

SEQ ID NO: 675293 - RNA, 19 nt, Artificial Sequence
  Description of Artificial Sequence: Synthetic oligonucleotide
cuccauaaguaggguuuuc

SEQ ID NO: 675294 - RNA, 19 nt, Artificial Sequence
  Description of Artificial Sequence: Synthetic oligonucleotide
gaccagcccggaacuacac

SEQ ID NO: 675295 - RNA, 19 nt, Artificial Sequence
  Description of Artificial Sequence: Synthetic oligonucleotide
gcguagagagaaacugcag

SEQ ID NO: 675296 - RNA, 19 nt, Artificial Sequence
  Description of Artificial Sequence: Synthetic oligonucleotide
ccuaacuacuagauaugaa

SEQ ID NO: 675297 - RNA, 19 nt, Artificial Sequence
  Description of Artificial Sequence: Synthetic oligonucleotide
cacgacagaguggacaagu

SEQ ID NO: 675298 - RNA, 19 nt, Artificial Sequence
  Description of Artificial Sequence: Synthetic oligonucleotide
gguaacuaucugccccaca

SEQ ID NO: 675299 - RNA, 19 nt, Artificial Sequence
  Description of Artificial Sequence: Synthetic oligonucleotide
gccgaugaugcaucuguaa

SEQ ID NO: 675300 - RNA, 19 nt, Artificial Sequence
  Description of Artificial Sequence: Synthetic oligonucleotide
cagccgaccagcuuaugau

SEQ ID NO: 675301 - RNA, 19 nt, Artificial Sequence
  Description of Artificial Sequence: Synthetic oligonucleotide
uugaacccaguggguaguu

SEQ ID NO: 675302 - RNA, 19 nt, Artificial Sequence
  Description of Artificial Sequence: Synthetic oligonucleotide
gguguccuaacuacuagau

SEQ ID NO: 675303 - RNA, 19 nt, Artificial Sequence
  Description of Artificial Sequence: Synthetic oligonucleotide
gcaaguuugccgaccgcca

SEQ ID NO: 675304 - RNA, 19 nt, Artificial Sequence
  Description of Artificial Sequence: Synthetic oligonucleotide
cguaaaccauuuguacaag

SEQ ID NO: 675305 - RNA, 19 nt, Artificial Sequence
  Description of Artificial Sequence: Synthetic oligonucleotide
guuccagaccagcccggaa

SEQ ID NO: 675306 - RNA, 19 nt, Artificial Sequence
  Description of Artificial Sequence: Synthetic oligonucleotide
ggauuuguugcuagacgua

SEQ ID NO: 675307 - RNA, 19 nt, Artificial Sequence
  Description of Artificial Sequence: Synthetic oligonucleotide
cagcauccaguugcgccac

SEQ ID NO: 675308 - RNA, 19 nt, Artificial Sequence
  Description of Artificial Sequence: Synthetic oligonucleotide
ggcauaagucugaacagau

SEQ ID NO: 675309 - RNA, 19 nt, Artificial Sequence
  Description of Artificial Sequence: Synthetic oligonucleotide
caccgaggagaacuuuaaa

SEQ ID NO: 675310 - RNA, 19 nt, Artificial Sequence
  Description of Artificial Sequence: Synthetic oligonucleotide
ccuugagauuacuguguca

SEQ ID NO: 675311 - RNA, 19 nt, Artificial Sequence
  Description of Artificial Sequence: Synthetic oligonucleotide
caguuccugauguggugua

SEQ ID NO: 675312 - RNA, 19 nt, Artificial Sequence
  Description of Artificial Sequence: Synthetic oligonucleotide
ccagccgaccagcuuauga

SEQ ID NO: 675313 - RNA, 19 nt, Artificial Sequence
  Description of Artificial Sequence: Synthetic oligonucleotide
ccacaccucauacucugga

SEQ ID NO: 675314 - RNA, 19 nt, Artificial Sequence
  Description of Artificial Sequence: Synthetic oligonucleotide
acccuucuaaucagacauu

SEQ ID NO: 675315 - RNA, 19 nt, Artificial Sequence
  Description of Artificial Sequence: Synthetic oligonucleotide
cucgaguaguagauuucuu

SEQ ID NO: 675316 - RNA, 19 nt, Artificial Sequence
  Description of Artificial Sequence: Synthetic oligonucleotide
ggacuguaacccugaccaa

SEQ ID NO: 675317 - RNA, 19 nt, Artificial Sequence
  Description of Artificial Sequence: Synthetic oligonucleotide
agccgaugaugcaucugua

SEQ ID NO: 675318 - RNA, 19 nt, Artificial Sequence
  Description of Artificial Sequence: Synthetic oligonucleotide
cacgguuauugaacccagu

SEQ ID NO: 675319 - RNA, 19 nt, Artificial Sequence
  Description of Artificial Sequence: Synthetic oligonucleotide
cacaauccuugagauuacu

SEQ ID NO: 675320 - RNA, 19 nt, Artificial Sequence
  Description of Artificial Sequence: Synthetic oligonucleotide
ccgaccgccagaggucugg

SEQ ID NO: 675321 - RNA, 19 nt, Artificial Sequence
  Description of Artificial Sequence: Synthetic oligonucleotide
cugcagggacaacuuacau

SEQ ID NO: 675322 - RNA, 19 nt, Artificial Sequence
  Description of Artificial Sequence: Synthetic oligonucleotide
ccgaugaugcaucuguaau

SEQ ID NO: 675323 - RNA, 19 nt, Artificial Sequence
  Description of Artificial Sequence: Synthetic oligonucleotide
gaccuacugcagggacaac

SEQ ID NO: 675324 - RNA, 19 nt, Artificial Sequence
  Description of Artificial Sequence: Synthetic oligonucleotide
caguugcgccacugcugca

SEQ ID NO: 675325 - RNA, 19 nt, Artificial Sequence
  Description of Artificial Sequence: Synthetic oligonucleotide
ccagaagcguagagagaaa

SEQ ID NO: 675326 - RNA, 19 nt, Artificial Sequence
  Description of Artificial Sequence: Synthetic oligonucleotide
ccaccccgauucucuuccc

SEQ ID NO: 675327 - RNA, 19 nt, Artificial Sequence
  Description of Artificial Sequence: Synthetic oligonucleotide
cccugaccaaauucauacu

SEQ ID NO: 675328 - RNA, 19 nt, Artificial Sequence
  Description of Artificial Sequence: Synthetic oligonucleotide
caucaccgaggagaacuuu

SEQ ID NO: 675329 - RNA, 19 nt, Artificial Sequence
  Description of Artificial Sequence: Synthetic oligonucleotide
cgguaacuaucugccccac

SEQ ID NO: 675330 - RNA, 19 nt, Artificial Sequence
  Description of Artificial Sequence: Synthetic oligonucleotide
ccgauucucuucccgcuuu

SEQ ID NO: 675331 - RNA, 19 nt, Artificial Sequence
  Description of Artificial Sequence: Synthetic oligonucleotide
cgaccgccagaggucuggc

SEQ ID NO: 675332 - RNA, 19 nt, Artificial Sequence
  Description of Artificial Sequence: Synthetic oligonucleotide
cccgcuuuccacgguuauu

SEQ ID NO: 675333 - RNA, 19 nt, Artificial Sequence
  Description of Artificial Sequence: Synthetic oligonucleotide
aaugguuacagucacaaac

SEQ ID NO: 675334 - RNA, 19 nt, Artificial Sequence
  Description of Artificial Sequence: Synthetic oligonucleotide
uuuugcuuaacgaagaacg

SEQ ID NO: 675335 - RNA, 19 nt, Artificial Sequence
  Description of Artificial Sequence: Synthetic oligonucleotide
aaauaagacaagcagguag

SEQ ID NO: 675336 - RNA, 19 nt, Artificial Sequence
  Description of Artificial Sequence: Synthetic oligonucleotide
uuaaccaaaauauugcuag

SEQ ID NO: 675337 - RNA, 19 nt, Artificial Sequence
  Description of Artificial Sequence: Synthetic oligonucleotide
aauaaucucaaacugacuu

SEQ ID NO: 675338 - RNA, 19 nt, Artificial Sequence
  Description of Artificial Sequence: Synthetic oligonucleotide
gauagaauuagcuacuaac

SEQ ID NO: 675339 - RNA, 19 nt, Artificial Sequence
  Description of Artificial Sequence: Synthetic oligonucleotide
aaacaaugcacuguguggc

SEQ ID NO: 675340 - RNA, 19 nt, Artificial Sequence
  Description of Artificial Sequence: Synthetic oligonucleotide
agaauuagcuacuaacuuc

SEQ ID NO: 675341 - RNA, 19 nt, Artificial Sequence
  Description of Artificial Sequence: Synthetic oligonucleotide
uagaagaggacguugaagc

SEQ ID NO: 675342 - RNA, 19 nt, Artificial Sequence
  Description of Artificial Sequence: Synthetic oligonucleotide
acuacaaucgacuugggga

SEQ ID NO: 675343 - RNA, 19 nt, Artificial Sequence
  Description of Artificial Sequence: Synthetic oligonucleotide
uauagguucaggauguggc

SEQ ID NO: 675344 - RNA, 19 nt, Artificial Sequence
  Description of Artificial Sequence: Synthetic oligonucleotide
aaacugacuugcugaaugc

SEQ ID NO: 675345 - RNA, 19 nt, Artificial Sequence
  Description of Artificial Sequence: Synthetic oligonucleotide
uuaacgaagaacgcaaagg

SEQ ID NO: 675346 - RNA, 19 nt, Artificial Sequence
  Description of Artificial Sequence: Synthetic oligonucleotide
acaacuacaaucgacuugg

SEQ ID NO: 675347 - RNA, 19 nt, Artificial Sequence
  Description of Artificial Sequence: Synthetic oligonucleotide
gauucaugcacguccagcg

SEQ ID NO: 675348 - RNA, 19 nt, Artificial Sequence
  Description of Artificial Sequence: Synthetic oligonucleotide
ucucgcaucucaauggacg

SEQ ID NO: 675349 - RNA, 19 nt, Artificial Sequence
  Description of Artificial Sequence: Synthetic oligonucleotide
auagguaugggucauagaa

SEQ ID NO: 675350 - RNA, 19 nt, Artificial Sequence
  Description of Artificial Sequence: Synthetic oligonucleotide
uuuguugacagcuaagcaa

SEQ ID NO: 675351 - RNA, 19 nt, Artificial Sequence
  Description of Artificial Sequence: Synthetic oligonucleotide
ucgugauagaauuagcuac

SEQ ID NO: 675352 - RNA, 19 nt, Artificial Sequence
  Description of Artificial Sequence: Synthetic oligonucleotide
uacugcgaugccuagaucc

SEQ ID NO: 675353 - RNA, 19 nt, Artificial Sequence
  Description of Artificial Sequence: Synthetic oligonucleotide
aaacgggaaggauucauug

SEQ ID NO: 675354 - RNA, 19 nt, Artificial Sequence
  Description of Artificial Sequence: Synthetic oligonucleotide
aagaacgcaaaggacacag

SEQ ID NO: 675355 - RNA, 19 nt, Artificial Sequence
  Description of Artificial Sequence: Synthetic oligonucleotide
uguauggucucuauccgcc

SEQ ID NO: 675356 - RNA, 19 nt, Artificial Sequence
  Description of Artificial Sequence: Synthetic oligonucleotide
aguaccuucucauggaucu

SEQ ID NO: 675357 - RNA, 19 nt, Artificial Sequence
  Description of Artificial Sequence: Synthetic oligonucleotide
gacgggacaacuacaaucg

SEQ ID NO: 675358 - RNA, 19 nt, Artificial Sequence
  Description of Artificial Sequence: Synthetic oligonucleotide
uuuucaagcuaucugggau

SEQ ID NO: 675359 - RNA, 19 nt, Artificial Sequence
  Description of Artificial Sequence: Synthetic oligonucleotide
ugggauagggacauggcgc

SEQ ID NO: 675360 - RNA, 19 nt, Artificial Sequence
  Description of Artificial Sequence: Synthetic oligonucleotide
uuuuguugacagcuaagca

SEQ ID NO: 675361 - RNA, 19 nt, Artificial Sequence
  Description of Artificial Sequence: Synthetic oligonucleotide
uuugcuuaacgaagaacgc

SEQ ID NO: 675362 - RNA, 19 nt, Artificial Sequence
  Description of Artificial Sequence: Synthetic oligonucleotide
uccaacguagaaaaggaaa

SEQ ID NO: 675363 - RNA, 19 nt, Artificial Sequence
  Description of Artificial Sequence: Synthetic oligonucleotide
gaugccaucagauagguau

SEQ ID NO: 675364 - RNA, 19 nt, Artificial Sequence
  Description of Artificial Sequence: Synthetic oligonucleotide
agcuacuaacuucuuuugc

SEQ ID NO: 675365 - RNA, 19 nt, Artificial Sequence
  Description of Artificial Sequence: Synthetic oligonucleotide
auaaucucaaacugacuug

SEQ ID NO: 675366 - RNA, 19 nt, Artificial Sequence
  Description of Artificial Sequence: Synthetic oligonucleotide
gaugcagccaggugguucg

SEQ ID NO: 675367 - RNA, 19 nt, Artificial Sequence
  Description of Artificial Sequence: Synthetic oligonucleotide
aaauauugcuagccuacca

SEQ ID NO: 675368 - RNA, 19 nt, Artificial Sequence
  Description of Artificial Sequence: Synthetic oligonucleotide
uucucguccaccaagccac

SEQ ID NO: 675369 - RNA, 19 nt, Artificial Sequence
  Description of Artificial Sequence: Synthetic oligonucleotide
uugacagcuaagcaaacaa

SEQ ID NO: 675370 - RNA, 19 nt, Artificial Sequence
  Description of Artificial Sequence: Synthetic oligonucleotide
agggcucugauucaugcac

SEQ ID NO: 675371 - RNA, 19 nt, Artificial Sequence
  Description of Artificial Sequence: Synthetic oligonucleotide
uaaucucaaacugacuugc

SEQ ID NO: 675372 - RNA, 19 nt, Artificial Sequence
  Description of Artificial Sequence: Synthetic oligonucleotide
uccgccucaggcuugacag

SEQ ID NO: 675373 - RNA, 19 nt, Artificial Sequence
  Description of Artificial Sequence: Synthetic oligonucleotide
uagguaugggucauagaag

SEQ ID NO: 675374 - RNA, 19 nt, Artificial Sequence
  Description of Artificial Sequence: Synthetic oligonucleotide
uacacucuggacccgagug

SEQ ID NO: 675375 - RNA, 19 nt, Artificial Sequence
  Description of Artificial Sequence: Synthetic oligonucleotide
agguaugggucauagaaga

SEQ ID NO: 675376 - RNA, 19 nt, Artificial Sequence
  Description of Artificial Sequence: Synthetic oligonucleotide
ugcuuaacgaagaacgcaa

SEQ ID NO: 675377 - RNA, 19 nt, Artificial Sequence
  Description of Artificial Sequence: Synthetic oligonucleotide
aggacagugagccagccca

SEQ ID NO: 675378 - RNA, 19 nt, Artificial Sequence
  Description of Artificial Sequence: Synthetic oligonucleotide
auuuggaacaaagggguuc

SEQ ID NO: 675379 - RNA, 19 nt, Artificial Sequence
  Description of Artificial Sequence: Synthetic oligonucleotide
uagaauuagcuacuaacuu

SEQ ID NO: 675380 - RNA, 19 nt, Artificial Sequence
  Description of Artificial Sequence: Synthetic oligonucleotide
guaugggucauagaagagg

SEQ ID NO: 675381 - RNA, 19 nt, Artificial Sequence
  Description of Artificial Sequence: Synthetic oligonucleotide
cuacaaucgacuuggggac

SEQ ID NO: 675382 - RNA, 19 nt, Artificial Sequence
  Description of Artificial Sequence: Synthetic oligonucleotide
uugcuagccuaccacauca

SEQ ID NO: 675383 - RNA, 19 nt, Artificial Sequence
  Description of Artificial Sequence: Synthetic oligonucleotide
acauugcauacugcgaugc

SEQ ID NO: 675384 - RNA, 19 nt, Artificial Sequence
  Description of Artificial Sequence: Synthetic oligonucleotide
cuuaacgaagaacgcaaag

SEQ ID NO: 675385 - RNA, 19 nt, Artificial Sequence
  Description of Artificial Sequence: Synthetic oligonucleotide
gacaacuacaaucgacuug

SEQ ID NO: 675386 - RNA, 19 nt, Artificial Sequence
  Description of Artificial Sequence: Synthetic oligonucleotide
uccaaugaugcccaagguc

SEQ ID NO: 675387 - RNA, 19 nt, Artificial Sequence
  Description of Artificial Sequence: Synthetic oligonucleotide
agcgccaaggcccauacug

SEQ ID NO: 675388 - RNA, 19 nt, Artificial Sequence
  Description of Artificial Sequence: Synthetic oligonucleotide
acauucgugauagaauuag

SEQ ID NO: 675389 - RNA, 19 nt, Artificial Sequence
  Description of Artificial Sequence: Synthetic oligonucleotide
aauucggacgaugauucug

SEQ ID NO: 675390 - RNA, 19 nt, Artificial Sequence
  Description of Artificial Sequence: Synthetic oligonucleotide
aggacguugaagccaaaag

SEQ ID NO: 675391 - RNA, 19 nt, Artificial Sequence
  Description of Artificial Sequence: Synthetic oligonucleotide
guaccaugcggcaugaggg

SEQ ID NO: 675392 - RNA, 19 nt, Artificial Sequence
  Description of Artificial Sequence: Synthetic oligonucleotide
aauaccuuccacagcagcu

SEQ ID NO: 675393 - RNA, 19 nt, Artificial Sequence
  Description of Artificial Sequence: Synthetic oligonucleotide
gaugagguugggugcaucc

SEQ ID NO: 675394 - RNA, 19 nt, Artificial Sequence
  Description of Artificial Sequence: Synthetic oligonucleotide
auucaugcacguccagcgc

SEQ ID NO: 675395 - RNA, 19 nt, Artificial Sequence
  Description of Artificial Sequence: Synthetic oligonucleotide
cagacaagaacauucguga

SEQ ID NO: 675396 - RNA, 19 nt, Artificial Sequence
  Description of Artificial Sequence: Synthetic oligonucleotide
accaaaauauugcuagccu

SEQ ID NO: 675397 - RNA, 19 nt, Artificial Sequence
  Description of Artificial Sequence: Synthetic oligonucleotide
gaacgcaaaggacacagga

SEQ ID NO: 675398 - RNA, 19 nt, Artificial Sequence
  Description of Artificial Sequence: Synthetic oligonucleotide
aaggauucauuguccugag

SEQ ID NO: 675399 - RNA, 19 nt, Artificial Sequence
  Description of Artificial Sequence: Synthetic oligonucleotide
gaacaaagggguucaugcc

SEQ ID NO: 675400 - RNA, 19 nt, Artificial Sequence
  Description of Artificial Sequence: Synthetic oligonucleotide
aacgggaaggauucauugu

SEQ ID NO: 675401 - RNA, 19 nt, Artificial Sequence
  Description of Artificial Sequence: Synthetic oligonucleotide
acaacuggucacuuguaug

SEQ ID NO: 675402 - RNA, 19 nt, Artificial Sequence
  Description of Artificial Sequence: Synthetic oligonucleotide
gaggguaccuacuguaggc

SEQ ID NO: 675403 - RNA, 19 nt, Artificial Sequence
  Description of Artificial Sequence: Synthetic oligonucleotide
uucgugauagaauuagcua

SEQ ID NO: 675404 - RNA, 19 nt, Artificial Sequence
  Description of Artificial Sequence: Synthetic oligonucleotide
aaucgacuuggggacgugc

SEQ ID NO: 675405 - RNA, 19 nt, Artificial Sequence
  Description of Artificial Sequence: Synthetic oligonucleotide
cuggcuaaagcugaagggc

SEQ ID NO: 675406 - RNA, 19 nt, Artificial Sequence
  Description of Artificial Sequence: Synthetic oligonucleotide
auauugcuagccuaccaca

SEQ ID NO: 675407 - RNA, 19 nt, Artificial Sequence
  Description of Artificial Sequence: Synthetic oligonucleotide
uuuggaacaaagggguuca

SEQ ID NO: 675408 - RNA, 19 nt, Artificial Sequence
  Description of Artificial Sequence: Synthetic oligonucleotide
guugggugcauccuuuaag

SEQ ID NO: 675409 - RNA, 19 nt, Artificial Sequence
  Description of Artificial Sequence: Synthetic oligonucleotide
auugcuagccuaccacauc

SEQ ID NO: 675410 - RNA, 19 nt, Artificial Sequence
  Description of Artificial Sequence: Synthetic oligonucleotide
uuucaagcuaucugggauc

SEQ ID NO: 675411 - RNA, 19 nt, Artificial Sequence
  Description of Artificial Sequence: Synthetic oligonucleotide
agccccauugagcucaggg

SEQ ID NO: 675412 - RNA, 19 nt, Artificial Sequence
  Description of Artificial Sequence: Synthetic oligonucleotide
gauagggacauggcgcugg

SEQ ID NO: 675413 - RNA, 19 nt, Artificial Sequence
  Description of Artificial Sequence: Synthetic oligonucleotide
ggacguugaagccaaaagc

SEQ ID NO: 675414 - RNA, 19 nt, Artificial Sequence
  Description of Artificial Sequence: Synthetic oligonucleotide
acagcuaagcaaacaaauc

SEQ ID NO: 675415 - RNA, 19 nt, Artificial Sequence
  Description of Artificial Sequence: Synthetic oligonucleotide
ugcccaaggucucuccacg

SEQ ID NO: 675416 - RNA, 19 nt, Artificial Sequence
  Description of Artificial Sequence: Synthetic oligonucleotide
aaacccgcugccaauucgg

SEQ ID NO: 675417 - RNA, 19 nt, Artificial Sequence
  Description of Artificial Sequence: Synthetic oligonucleotide
aacaaugcacuguguggca

SEQ ID NO: 675418 - RNA, 19 nt, Artificial Sequence
  Description of Artificial Sequence: Synthetic oligonucleotide
auucgugauagaauuagcu

SEQ ID NO: 675419 - RNA, 19 nt, Artificial Sequence
  Description of Artificial Sequence: Synthetic oligonucleotide
cugagaagugugccgacgg

SEQ ID NO: 675420 - RNA, 19 nt, Artificial Sequence
  Description of Artificial Sequence: Synthetic oligonucleotide
ugauagaauuagcuacuaa

SEQ ID NO: 675421 - RNA, 19 nt, Artificial Sequence
  Description of Artificial Sequence: Synthetic oligonucleotide
auuguccugagaagugugc

SEQ ID NO: 675422 - RNA, 19 nt, Artificial Sequence
  Description of Artificial Sequence: Synthetic oligonucleotide
acuggucacuuguaugguc

SEQ ID NO: 675423 - RNA, 19 nt, Artificial Sequence
  Description of Artificial Sequence: Synthetic oligonucleotide
ucagcaggacggcaccacg

SEQ ID NO: 675424 - RNA, 19 nt, Artificial Sequence
  Description of Artificial Sequence: Synthetic oligonucleotide
caagcuaucugggauccgg

SEQ ID NO: 675425 - RNA, 19 nt, Artificial Sequence
  Description of Artificial Sequence: Synthetic oligonucleotide
aauggacgccugcucacug

SEQ ID NO: 675426 - RNA, 19 nt, Artificial Sequence
  Description of Artificial Sequence: Synthetic oligonucleotide
uucaagcuaucugggaucc

SEQ ID NO: 675427 - RNA, 19 nt, Artificial Sequence
  Description of Artificial Sequence: Synthetic oligonucleotide
uugcuuaacgaagaacgca

SEQ ID NO: 675428 - RNA, 19 nt, Artificial Sequence
  Description of Artificial Sequence: Synthetic oligonucleotide
cauucgugauagaauuagc

SEQ ID NO: 675429 - RNA, 19 nt, Artificial Sequence
  Description of Artificial Sequence: Synthetic oligonucleotide
ugacagcuaagcaaacaaa

SEQ ID NO: 675430 - RNA, 19 nt, Artificial Sequence
  Description of Artificial Sequence: Synthetic oligonucleotide
ugauucaugcacguccagc

SEQ ID NO: 675431 - RNA, 19 nt, Artificial Sequence
  Description of Artificial Sequence: Synthetic oligonucleotide
uauugcuagccuaccacau

SEQ ID NO: 675432 - RNA, 19 nt, Artificial Sequence
  Description of Artificial Sequence: Synthetic oligonucleotide
gaauuagcuacuaacuucu

SEQ ID NO: 675433 - RNA, 19 nt, Artificial Sequence
  Description of Artificial Sequence: Synthetic oligonucleotide
agauagguaugggucauag

SEQ ID NO: 675434 - RNA, 19 nt, Artificial Sequence
  Description of Artificial Sequence: Synthetic oligonucleotide
uaccaugcggcaugagggg

SEQ ID NO: 675435 - RNA, 19 nt, Artificial Sequence
  Description of Artificial Sequence: Synthetic oligonucleotide
uagcuacuaacuucuuuug

SEQ ID NO: 675436 - RNA, 19 nt, Artificial Sequence
  Description of Artificial Sequence: Synthetic oligonucleotide
ugagccacucgcgaugccg

SEQ ID NO: 675437 - RNA, 19 nt, Artificial Sequence
  Description of Artificial Sequence: Synthetic oligonucleotide
aaauaaucucaaacugacu

SEQ ID NO: 675438 - RNA, 19 nt, Artificial Sequence
  Description of Artificial Sequence: Synthetic oligonucleotide
cggacgaugauucugagag

SEQ ID NO: 675439 - RNA, 19 nt, Artificial Sequence
  Description of Artificial Sequence: Synthetic oligonucleotide
cauucaguaccuucucaug

SEQ ID NO: 675440 - RNA, 19 nt, Artificial Sequence
  Description of Artificial Sequence: Synthetic oligonucleotide
cuagccuaccacaucagca

SEQ ID NO: 675441 - RNA, 19 nt, Artificial Sequence
  Description of Artificial Sequence: Synthetic oligonucleotide
cucgcaucucaauggacgc

SEQ ID NO: 675442 - RNA, 19 nt, Artificial Sequence
  Description of Artificial Sequence: Synthetic oligonucleotide
ugagaagugugccgacggc

SEQ ID NO: 675443 - RNA, 19 nt, Artificial Sequence
  Description of Artificial Sequence: Synthetic oligonucleotide
acugcgaugccuagauccc

SEQ ID NO: 675444 - RNA, 19 nt, Artificial Sequence
  Description of Artificial Sequence: Synthetic oligonucleotide
gguucgucgguauagguuc

SEQ ID NO: 675445 - RNA, 19 nt, Artificial Sequence
  Description of Artificial Sequence: Synthetic oligonucleotide
agcuaagcaaacaaauccu

SEQ ID NO: 675446 - RNA, 19 nt, Artificial Sequence
  Description of Artificial Sequence: Synthetic oligonucleotide
aggcaaaggucugccaacc

SEQ ID NO: 675447 - RNA, 19 nt, Artificial Sequence
  Description of Artificial Sequence: Synthetic oligonucleotide
caugggauagggacauggc

SEQ ID NO: 675448 - RNA, 19 nt, Artificial Sequence
  Description of Artificial Sequence: Synthetic oligonucleotide
uggugugguacaucagagc

SEQ ID NO: 675449 - RNA, 19 nt, Artificial Sequence
  Description of Artificial Sequence: Synthetic oligonucleotide
cacaggacgggacaacuac

SEQ ID NO: 675450 - RNA, 19 nt, Artificial Sequence
  Description of Artificial Sequence: Synthetic oligonucleotide
uugcauacugcgaugccua

SEQ ID NO: 675451 - RNA, 19 nt, Artificial Sequence
  Description of Artificial Sequence: Synthetic oligonucleotide
gagaagugugccgacggcc

SEQ ID NO: 675452 - RNA, 19 nt, Artificial Sequence
  Description of Artificial Sequence: Synthetic oligonucleotide
cacguuccaacguagaaaa

SEQ ID NO: 675453 - RNA, 19 nt, Artificial Sequence
  Description of Artificial Sequence: Synthetic oligonucleotide
aaaauaagacaagcaggua

SEQ ID NO: 675454 - RNA, 19 nt, Artificial Sequence
  Description of Artificial Sequence: Synthetic oligonucleotide
gacggcaccacgcaggcaa

SEQ ID NO: 675455 - RNA, 19 nt, Artificial Sequence
  Description of Artificial Sequence: Synthetic oligonucleotide
ucauuguccugagaagugu

SEQ ID NO: 675456 - RNA, 19 nt, Artificial Sequence
  Description of Artificial Sequence: Synthetic oligonucleotide
aucugcucuacacucugga

SEQ ID NO: 675457 - RNA, 19 nt, Artificial Sequence
  Description of Artificial Sequence: Synthetic oligonucleotide
caaacccgcugccaauucg

SEQ ID NO: 675458 - RNA, 19 nt, Artificial Sequence
  Description of Artificial Sequence: Synthetic oligonucleotide
ucaauggacgccugcucac

SEQ ID NO: 675459 - RNA, 19 nt, Artificial Sequence
  Description of Artificial Sequence: Synthetic oligonucleotide
ugugcagucccggccaucc

SEQ ID NO: 675460 - RNA, 19 nt, Artificial Sequence
  Description of Artificial Sequence: Synthetic oligonucleotide
ucuacacucuggacccgag

SEQ ID NO: 675461 - RNA, 19 nt, Artificial Sequence
  Description of Artificial Sequence: Synthetic oligonucleotide
ucaugcacguccagcgcug

SEQ ID NO: 675462 - RNA, 19 nt, Artificial Sequence
  Description of Artificial Sequence: Synthetic oligonucleotide
aaaagccuuugcccgcagu

SEQ ID NO: 675463 - RNA, 19 nt, Artificial Sequence
  Description of Artificial Sequence: Synthetic oligonucleotide
ccaauucggacgaugauuc

SEQ ID NO: 675464 - RNA, 19 nt, Artificial Sequence
  Description of Artificial Sequence: Synthetic oligonucleotide
uuccaacguagaaaaggaa

SEQ ID NO: 675465 - RNA, 19 nt, Artificial Sequence
  Description of Artificial Sequence: Synthetic oligonucleotide
ucugcucuacacucuggac

SEQ ID NO: 675466 - RNA, 19 nt, Artificial Sequence
  Description of Artificial Sequence: Synthetic oligonucleotide
cacacgaccuaguccaaug

SEQ ID NO: 675467 - RNA, 19 nt, Artificial Sequence
  Description of Artificial Sequence: Synthetic oligonucleotide
gacgaugauucugagagcu

SEQ ID NO: 675468 - RNA, 19 nt, Artificial Sequence
  Description of Artificial Sequence: Synthetic oligonucleotide
ggacgggacaacuacaauc

SEQ ID NO: 675469 - RNA, 19 nt, Artificial Sequence
  Description of Artificial Sequence: Synthetic oligonucleotide
ugcgaugccuagaucccca

SEQ ID NO: 675470 - RNA, 19 nt, Artificial Sequence
  Description of Artificial Sequence: Synthetic oligonucleotide
uacaaucgacuuggggacg

SEQ ID NO: 675471 - RNA, 19 nt, Artificial Sequence
  Description of Artificial Sequence: Synthetic oligonucleotide
ggaggguaccuacuguagg

SEQ ID NO: 675472 - RNA, 19 nt, Artificial Sequence
  Description of Artificial Sequence: Synthetic oligonucleotide
ugacuugcugaaugcuccc

SEQ ID NO: 675473 - RNA, 19 nt, Artificial Sequence
  Description of Artificial Sequence: Synthetic oligonucleotide
uggcucuccggaucucucg

SEQ ID NO: 675474 - RNA, 19 nt, Artificial Sequence
  Description of Artificial Sequence: Synthetic oligonucleotide
ugguucgucgguauagguu

SEQ ID NO: 675475 - RNA, 19 nt, Artificial Sequence
  Description of Artificial Sequence: Synthetic oligonucleotide
auggugugguacaucagag

SEQ ID NO: 675476 - RNA, 19 nt, Artificial Sequence
  Description of Artificial Sequence: Synthetic oligonucleotide
cacauugcauacugcgaug

SEQ ID NO: 675477 - RNA, 19 nt, Artificial Sequence
  Description of Artificial Sequence: Synthetic oligonucleotide
caugugacgcccuccacca

SEQ ID NO: 675478 - RNA, 19 nt, Artificial Sequence
  Description of Artificial Sequence: Synthetic oligonucleotide
aaaacgggaaggauucauu

SEQ ID NO: 675479 - RNA, 19 nt, Artificial Sequence
  Description of Artificial Sequence: Synthetic oligonucleotide
gaugccgucuucauuugga

SEQ ID NO: 675480 - RNA, 19 nt, Artificial Sequence
  Description of Artificial Sequence: Synthetic oligonucleotide
gaccuaguccaaugaugcc

SEQ ID NO: 675481 - RNA, 19 nt, Artificial Sequence
  Description of Artificial Sequence: Synthetic oligonucleotide
ugcuagccuaccacaucag

SEQ ID NO: 675482 - RNA, 19 nt, Artificial Sequence
  Description of Artificial Sequence: Synthetic oligonucleotide
gacuuggggacgugcuucc

SEQ ID NO: 675483 - RNA, 19 nt, Artificial Sequence
  Description of Artificial Sequence: Synthetic oligonucleotide
ucuauccgccucaggcuug

SEQ ID NO: 675484 - RNA, 19 nt, Artificial Sequence
  Description of Artificial Sequence: Synthetic oligonucleotide
cauugcauacugcgaugcc

SEQ ID NO: 675485 - RNA, 19 nt, Artificial Sequence
  Description of Artificial Sequence: Synthetic oligonucleotide
gauccgcccuuccuucagg

SEQ ID NO: 675486 - RNA, 19 nt, Artificial Sequence
  Description of Artificial Sequence: Synthetic oligonucleotide
gauagguaugggucauaga

SEQ ID NO: 675487 - RNA, 19 nt, Artificial Sequence
  Description of Artificial Sequence: Synthetic oligonucleotide
auagggacauggcgcuggg

SEQ ID NO: 675488 - RNA, 19 nt, Artificial Sequence
  Description of Artificial Sequence: Synthetic oligonucleotide
auucggacgaugauucuga

SEQ ID NO: 675489 - RNA, 19 nt, Artificial Sequence
  Description of Artificial Sequence: Synthetic oligonucleotide
ggguucaugccaaaauuag

SEQ ID NO: 675490 - RNA, 19 nt, Artificial Sequence
  Description of Artificial Sequence: Synthetic oligonucleotide
gacggccacauuccggggc

SEQ ID NO: 675491 - RNA, 19 nt, Artificial Sequence
  Description of Artificial Sequence: Synthetic oligonucleotide
ucggacgaugauucugaga

SEQ ID NO: 675492 - RNA, 19 nt, Artificial Sequence
  Description of Artificial Sequence: Synthetic oligonucleotide
acgaccuaguccaaugaug

SEQ ID NO: 675493 - RNA, 19 nt, Artificial Sequence
  Description of Artificial Sequence: Synthetic oligonucleotide
cgaccuaguccaaugaugc

SEQ ID NO: 675494 - RNA, 19 nt, Artificial Sequence
  Description of Artificial Sequence: Synthetic oligonucleotide
cguuccaacguagaaaagg

SEQ ID NO: 675495 - RNA, 19 nt, Artificial Sequence
  Description of Artificial Sequence: Synthetic oligonucleotide
uucggacgaugauucugag

SEQ ID NO: 675496 - RNA, 19 nt, Artificial Sequence
  Description of Artificial Sequence: Synthetic oligonucleotide
aggugguucgucgguauag

SEQ ID NO: 675497 - RNA, 19 nt, Artificial Sequence
  Description of Artificial Sequence: Synthetic oligonucleotide
ggugcauccuuuaaggguc

SEQ ID NO: 675498 - RNA, 19 nt, Artificial Sequence
  Description of Artificial Sequence: Synthetic oligonucleotide
uaagggucccuggcuaaag

SEQ ID NO: 675499 - RNA, 19 nt, Artificial Sequence
  Description of Artificial Sequence: Synthetic oligonucleotide
gucucuggagcgccaaggc

SEQ ID NO: 675500 - RNA, 19 nt, Artificial Sequence
  Description of Artificial Sequence: Synthetic oligonucleotide
acacgaccuaguccaauga

SEQ ID NO: 675501 - RNA, 19 nt, Artificial Sequence
  Description of Artificial Sequence: Synthetic oligonucleotide
acccgcugccaauucggac

SEQ ID NO: 675502 - RNA, 19 nt, Artificial Sequence
  Description of Artificial Sequence: Synthetic oligonucleotide
ucaaacccgcugccaauuc

SEQ ID NO: 675503 - RNA, 19 nt, Artificial Sequence
  Description of Artificial Sequence: Synthetic oligonucleotide
uuugcccgcagugccacug

SEQ ID NO: 675504 - RNA, 19 nt, Artificial Sequence
  Description of Artificial Sequence: Synthetic oligonucleotide
auacugcgaugccuagauc

SEQ ID NO: 675505 - RNA, 19 nt, Artificial Sequence
  Description of Artificial Sequence: Synthetic oligonucleotide
uggugguugugcucauuga

SEQ ID NO: 675506 - RNA, 19 nt, Artificial Sequence
  Description of Artificial Sequence: Synthetic oligonucleotide
acgcaggcaaaggucugcc

SEQ ID NO: 675507 - RNA, 19 nt, Artificial Sequence
  Description of Artificial Sequence: Synthetic oligonucleotide
ucagauagguaugggucau

SEQ ID NO: 675508 - RNA, 19 nt, Artificial Sequence
  Description of Artificial Sequence: Synthetic oligonucleotide
cagugugcucacacgcugc

SEQ ID NO: 675509 - RNA, 19 nt, Artificial Sequence
  Description of Artificial Sequence: Synthetic oligonucleotide
auggcgcugggaacaauac

SEQ ID NO: 675510 - RNA, 19 nt, Artificial Sequence
  Description of Artificial Sequence: Synthetic oligonucleotide
uggguccaagggcauguga

SEQ ID NO: 675511 - RNA, 19 nt, Artificial Sequence
  Description of Artificial Sequence: Synthetic oligonucleotide
accacgggcuguguucacc

SEQ ID NO: 675512 - RNA, 19 nt, Artificial Sequence
  Description of Artificial Sequence: Synthetic oligonucleotide
ugcacguccagcgcugcgc

SEQ ID NO: 675513 - RNA, 19 nt, Artificial Sequence
  Description of Artificial Sequence: Synthetic oligonucleotide
augccuagauccccagcug

SEQ ID NO: 675514 - RNA, 19 nt, Artificial Sequence
  Description of Artificial Sequence: Synthetic oligonucleotide
ucgucgguauagguucagg

SEQ ID NO: 675515 - RNA, 19 nt, Artificial Sequence
  Description of Artificial Sequence: Synthetic oligonucleotide
uccuguguggacugugcau

SEQ ID NO: 675516 - RNA, 19 nt, Artificial Sequence
  Description of Artificial Sequence: Synthetic oligonucleotide
aacauucgugauagaauua

SEQ ID NO: 675517 - RNA, 19 nt, Artificial Sequence
  Description of Artificial Sequence: Synthetic oligonucleotide
acauuccggggcacguucc

SEQ ID NO: 675518 - RNA, 19 nt, Artificial Sequence
  Description of Artificial Sequence: Synthetic oligonucleotide
acguugaagccaaaagccu

SEQ ID NO: 675519 - RNA, 19 nt, Artificial Sequence
  Description of Artificial Sequence: Synthetic oligonucleotide
ugccgacggccacauuccg

SEQ ID NO: 675520 - RNA, 19 nt, Artificial Sequence
  Description of Artificial Sequence: Synthetic oligonucleotide
ugggauccggccugugaug

SEQ ID NO: 675521 - RNA, 19 nt, Artificial Sequence
  Description of Artificial Sequence: Synthetic oligonucleotide
agaagugugccgacggcca

SEQ ID NO: 675522 - RNA, 19 nt, Artificial Sequence
  Description of Artificial Sequence: Synthetic oligonucleotide
agaacgcaaaggacacagg

SEQ ID NO: 675523 - RNA, 19 nt, Artificial Sequence
  Description of Artificial Sequence: Synthetic oligonucleotide
cacauuccggggcacguuc

SEQ ID NO: 675524 - RNA, 19 nt, Artificial Sequence
  Description of Artificial Sequence: Synthetic oligonucleotide
ugcggcaugaggggugcag

SEQ ID NO: 675525 - RNA, 19 nt, Artificial Sequence
  Description of Artificial Sequence: Synthetic oligonucleotide
gaagugugccgacggccac

SEQ ID NO: 675526 - RNA, 19 nt, Artificial Sequence
  Description of Artificial Sequence: Synthetic oligonucleotide
gcuacaacuggucacuugu

SEQ ID NO: 675527 - RNA, 19 nt, Artificial Sequence
  Description of Artificial Sequence: Synthetic oligonucleotide
ccaugggauagggacaugg

SEQ ID NO: 675528 - RNA, 19 nt, Artificial Sequence
  Description of Artificial Sequence: Synthetic oligonucleotide
ggguaccuacuguaggcag

SEQ ID NO: 675529 - RNA, 19 nt, Artificial Sequence
  Description of Artificial Sequence: Synthetic oligonucleotide
cgaagaacgcaaaggacac

SEQ ID NO: 675530 - RNA, 19 nt, Artificial Sequence
  Description of Artificial Sequence: Synthetic oligonucleotide
augggucauagaagaggac

SEQ ID NO: 675531 - RNA, 19 nt, Artificial Sequence
  Description of Artificial Sequence: Synthetic oligonucleotide
acaaucgacuuggggacgu

SEQ ID NO: 675532 - RNA, 19 nt, Artificial Sequence
  Description of Artificial Sequence: Synthetic oligonucleotide
ucgcaucucaauggacgcc

SEQ ID NO: 675533 - RNA, 19 nt, Artificial Sequence
  Description of Artificial Sequence: Synthetic oligonucleotide
gacccgagugccuucccga

SEQ ID NO: 675534 - RNA, 19 nt, Artificial Sequence
  Description of Artificial Sequence: Synthetic oligonucleotide
caaaggucugccaaccccu

SEQ ID NO: 675535 - RNA, 19 nt, Artificial Sequence
  Description of Artificial Sequence: Synthetic oligonucleotide
cauacugcgaugccuagau

SEQ ID NO: 675536 - RNA, 19 nt, Artificial Sequence
  Description of Artificial Sequence: Synthetic oligonucleotide
cuuggggacgugcuuccuc

SEQ ID NO: 675537 - RNA, 19 nt, Artificial Sequence
  Description of Artificial Sequence: Synthetic oligonucleotide
cugauucaugcacguccag

SEQ ID NO: 675538 - RNA, 19 nt, Artificial Sequence
  Description of Artificial Sequence: Synthetic oligonucleotide
ggugguucgucgguauagg

SEQ ID NO: 675539 - RNA, 19 nt, Artificial Sequence
  Description of Artificial Sequence: Synthetic oligonucleotide
uggcccacacgaccuaguc

SEQ ID NO: 675540 - RNA, 19 nt, Artificial Sequence
  Description of Artificial Sequence: Synthetic oligonucleotide
ccgagugccuucccgaagg

SEQ ID NO: 675541 - RNA, 19 nt, Artificial Sequence
  Description of Artificial Sequence: Synthetic oligonucleotide
uucgucgguauagguucag

SEQ ID NO: 675542 - RNA, 19 nt, Artificial Sequence
  Description of Artificial Sequence: Synthetic oligonucleotide
uggacgccugcucacugua

SEQ ID NO: 675543 - RNA, 19 nt, Artificial Sequence
  Description of Artificial Sequence: Synthetic oligonucleotide
uagugcacgccugggccag

SEQ ID NO: 675544 - RNA, 19 nt, Artificial Sequence
  Description of Artificial Sequence: Synthetic oligonucleotide
acaauaccuuccacagcag

SEQ ID NO: 675545 - RNA, 19 nt, Artificial Sequence
  Description of Artificial Sequence: Synthetic oligonucleotide
augccgucuucauuuggaa

SEQ ID NO: 675546 - RNA, 19 nt, Artificial Sequence
  Description of Artificial Sequence: Synthetic oligonucleotide
guguggacugugcaucaca

SEQ ID NO: 675547 - RNA, 19 nt, Artificial Sequence
  Description of Artificial Sequence: Synthetic oligonucleotide
gguaugggucauagaagag

SEQ ID NO: 675548 - RNA, 19 nt, Artificial Sequence
  Description of Artificial Sequence: Synthetic oligonucleotide
aggguaccuacuguaggca

SEQ ID NO: 675549 - RNA, 19 nt, Artificial Sequence
  Description of Artificial Sequence: Synthetic oligonucleotide
ggcucuccggaucucucgg

SEQ ID NO: 675550 - RNA, 19 nt, Artificial Sequence
  Description of Artificial Sequence: Synthetic oligonucleotide
auggacgccugcucacugu

SEQ ID NO: 675551 - RNA, 19 nt, Artificial Sequence
  Description of Artificial Sequence: Synthetic oligonucleotide
gucgguauagguucaggau

SEQ ID NO: 675552 - RNA, 19 nt, Artificial Sequence
  Description of Artificial Sequence: Synthetic oligonucleotide
gcuagccuaccacaucagc

SEQ ID NO: 675553 - RNA, 19 nt, Artificial Sequence
  Description of Artificial Sequence: Synthetic oligonucleotide
aagugugccgacggccaca

SEQ ID NO: 675554 - RNA, 19 nt, Artificial Sequence
  Description of Artificial Sequence: Synthetic oligonucleotide
ggucacgcagucacugugg

SEQ ID NO: 675555 - RNA, 19 nt, Artificial Sequence
  Description of Artificial Sequence: Synthetic oligonucleotide
ucgacuuggggacgugcuu

SEQ ID NO: 675556 - RNA, 19 nt, Artificial Sequence
  Description of Artificial Sequence: Synthetic oligonucleotide
gggauccggccugugaugg

SEQ ID NO: 675557 - RNA, 19 nt, Artificial Sequence
  Description of Artificial Sequence: Synthetic oligonucleotide
gguaccuacuguaggcagc

SEQ ID NO: 675558 - RNA, 19 nt, Artificial Sequence
  Description of Artificial Sequence: Synthetic oligonucleotide
uccugagaagugugccgac

SEQ ID NO: 675559 - RNA, 19 nt, Artificial Sequence
  Description of Artificial Sequence: Synthetic oligonucleotide
caggacgggacaacuacaa

SEQ ID NO: 675560 - RNA, 19 nt, Artificial Sequence
  Description of Artificial Sequence: Synthetic oligonucleotide
augcacguccagcgcugcg

SEQ ID NO: 675561 - RNA, 19 nt, Artificial Sequence
  Description of Artificial Sequence: Synthetic oligonucleotide
caccaaugguccugagcac

SEQ ID NO: 675562 - RNA, 19 nt, Artificial Sequence
  Description of Artificial Sequence: Synthetic oligonucleotide
gggacgugcuuccucuugc

SEQ ID NO: 675563 - RNA, 19 nt, Artificial Sequence
  Description of Artificial Sequence: Synthetic oligonucleotide
cuggaggguaccuacugua

SEQ ID NO: 675564 - RNA, 19 nt, Artificial Sequence
  Description of Artificial Sequence: Synthetic oligonucleotide
caugcggcaugaggggugc

SEQ ID NO: 675565 - RNA, 19 nt, Artificial Sequence
  Description of Artificial Sequence: Synthetic oligonucleotide
ucccuggcuaaagcugaag

SEQ ID NO: 675566 - RNA, 19 nt, Artificial Sequence
  Description of Artificial Sequence: Synthetic oligonucleotide
gaagaacgcaaaggacaca

SEQ ID NO: 675567 - RNA, 19 nt, Artificial Sequence
  Description of Artificial Sequence: Synthetic oligonucleotide
cauggcgcugggaacaaua

SEQ ID NO: 675568 - RNA, 19 nt, Artificial Sequence
  Description of Artificial Sequence: Synthetic oligonucleotide
aucgacuuggggacgugcu

SEQ ID NO: 675569 - RNA, 19 nt, Artificial Sequence
  Description of Artificial Sequence: Synthetic oligonucleotide
cuagugcacgccugggcca

SEQ ID NO: 675570 - RNA, 19 nt, Artificial Sequence
  Description of Artificial Sequence: Synthetic oligonucleotide
ugcugcgggcacauugcau

SEQ ID NO: 675571 - RNA, 19 nt, Artificial Sequence
  Description of Artificial Sequence: Synthetic oligonucleotide
gcgggcacauugcauacug

SEQ ID NO: 675572 - RNA, 19 nt, Artificial Sequence
  Description of Artificial Sequence: Synthetic oligonucleotide
ccaaaauauugcuagccua

SEQ ID NO: 675573 - RNA, 19 nt, Artificial Sequence
  Description of Artificial Sequence: Synthetic oligonucleotide
acgggacaacuacaaucga

SEQ ID NO: 675574 - RNA, 19 nt, Artificial Sequence
  Description of Artificial Sequence: Synthetic oligonucleotide
uguguggacugugcaucac

SEQ ID NO: 675575 - RNA, 19 nt, Artificial Sequence
  Description of Artificial Sequence: Synthetic oligonucleotide
aggacgggacaacuacaau

SEQ ID NO: 675576 - RNA, 19 nt, Artificial Sequence
  Description of Artificial Sequence: Synthetic oligonucleotide
gggacaacuacaaucgacu

SEQ ID NO: 675577 - RNA, 19 nt, Artificial Sequence
  Description of Artificial Sequence: Synthetic oligonucleotide
ggacccgagugccuucccg

SEQ ID NO: 675578 - RNA, 19 nt, Artificial Sequence
  Description of Artificial Sequence: Synthetic oligonucleotide
accaagccaccacgggcug

SEQ ID NO: 675579 - RNA, 19 nt, Artificial Sequence
  Description of Artificial Sequence: Synthetic oligonucleotide
acaggacgggacaacuaca

SEQ ID NO: 675580 - RNA, 19 nt, Artificial Sequence
  Description of Artificial Sequence: Synthetic oligonucleotide
agccacucgcgaugccguc

SEQ ID NO: 675581 - RNA, 19 nt, Artificial Sequence
  Description of Artificial Sequence: Synthetic oligonucleotide
ugcauccuuuaaggguccc

SEQ ID NO: 675582 - RNA, 19 nt, Artificial Sequence
  Description of Artificial Sequence: Synthetic oligonucleotide
cuguguggacugugcauca

SEQ ID NO: 675583 - RNA, 19 nt, Artificial Sequence
  Description of Artificial Sequence: Synthetic oligonucleotide
gcaggcaaaggucugccaa

SEQ ID NO: 675584 - RNA, 19 nt, Artificial Sequence
  Description of Artificial Sequence: Synthetic oligonucleotide
ggcuacaacuggucacuug

SEQ ID NO: 675585 - RNA, 19 nt, Artificial Sequence
  Description of Artificial Sequence: Synthetic oligonucleotide
augcugcgggcacauugca

SEQ ID NO: 675586 - RNA, 19 nt, Artificial Sequence
  Description of Artificial Sequence: Synthetic oligonucleotide
cugcgaugccuagaucccc

SEQ ID NO: 675587 - RNA, 19 nt, Artificial Sequence
  Description of Artificial Sequence: Synthetic oligonucleotide
ugccccgccuagugcacgc

SEQ ID NO: 675588 - RNA, 19 nt, Artificial Sequence
  Description of Artificial Sequence: Synthetic oligonucleotide
caccaagccaccacgggcu

SEQ ID NO: 675589 - RNA, 19 nt, Artificial Sequence
  Description of Artificial Sequence: Synthetic oligonucleotide
uggacccgagugccuuccc

SEQ ID NO: 675590 - RNA, 19 nt, Artificial Sequence
  Description of Artificial Sequence: Synthetic oligonucleotide
uccggccugugauggcucu

SEQ ID NO: 675591 - RNA, 19 nt, Artificial Sequence
  Description of Artificial Sequence: Synthetic oligonucleotide
aacccgcugccaauucgga

SEQ ID NO: 675592 - RNA, 19 nt, Artificial Sequence
  Description of Artificial Sequence: Synthetic oligonucleotide
agagcagguccugcagugu

SEQ ID NO: 675593 - RNA, 19 nt, Artificial Sequence
  Description of Artificial Sequence: Synthetic oligonucleotide
accaugcggcaugaggggu

SEQ ID NO: 675594 - RNA, 19 nt, Artificial Sequence
  Description of Artificial Sequence: Synthetic oligonucleotide
ggauccgcccuuccuucag

SEQ ID NO: 675595 - RNA, 19 nt, Artificial Sequence
  Description of Artificial Sequence: Synthetic oligonucleotide
gugauagaauuagcuacua

SEQ ID NO: 675596 - RNA, 19 nt, Artificial Sequence
  Description of Artificial Sequence: Synthetic oligonucleotide
cuggacccgagugccuucc

SEQ ID NO: 675597 - RNA, 19 nt, Artificial Sequence
  Description of Artificial Sequence: Synthetic oligonucleotide
ccugagaagugugccgacg

SEQ ID NO: 675598 - RNA, 19 nt, Artificial Sequence
  Description of Artificial Sequence: Synthetic oligonucleotide
cgggacaacuacaaucgac

SEQ ID NO: 675599 - RNA, 19 nt, Artificial Sequence
  Description of Artificial Sequence: Synthetic oligonucleotide
caggauaggcaucuccacu

SEQ ID NO: 675600 - RNA, 19 nt, Artificial Sequence
  Description of Artificial Sequence: Synthetic oligonucleotide
uuggguccaagggcaugug

SEQ ID NO: 675601 - RNA, 19 nt, Artificial Sequence
  Description of Artificial Sequence: Synthetic oligonucleotide
ggcacugcaaacacuccuc

SEQ ID NO: 675602 - RNA, 19 nt, Artificial Sequence
  Description of Artificial Sequence: Synthetic oligonucleotide
gcacauugcauacugcgau

SEQ ID NO: 675603 - RNA, 19 nt, Artificial Sequence
  Description of Artificial Sequence: Synthetic oligonucleotide
gcccaaggucucuccacgg

SEQ ID NO: 675604 - RNA, 19 nt, Artificial Sequence
  Description of Artificial Sequence: Synthetic oligonucleotide
caggguggagucugccguc

SEQ ID NO: 675605 - RNA, 19 nt, Artificial Sequence
  Description of Artificial Sequence: Synthetic oligonucleotide
ucgcgaugccgucuucauu

SEQ ID NO: 675606 - RNA, 19 nt, Artificial Sequence
  Description of Artificial Sequence: Synthetic oligonucleotide
gucacuuguauggucucua

SEQ ID NO: 675607 - RNA, 19 nt, Artificial Sequence
  Description of Artificial Sequence: Synthetic oligonucleotide
ggagcgccaaggcccauac

SEQ ID NO: 675608 - RNA, 19 nt, Artificial Sequence
  Description of Artificial Sequence: Synthetic oligonucleotide
ggcacguuccaacguagaa

SEQ ID NO: 675609 - RNA, 19 nt, Artificial Sequence
  Description of Artificial Sequence: Synthetic oligonucleotide
cuacaacuggucacuugua

SEQ ID NO: 675610 - RNA, 19 nt, Artificial Sequence
  Description of Artificial Sequence: Synthetic oligonucleotide
acguuccaacguagaaaag

SEQ ID NO: 675611 - RNA, 19 nt, Artificial Sequence
  Description of Artificial Sequence: Synthetic oligonucleotide
uccucuugccccgccuagu

SEQ ID NO: 675612 - RNA, 19 nt, Artificial Sequence
  Description of Artificial Sequence: Synthetic oligonucleotide
ggcacauugcauacugcga

SEQ ID NO: 675613 - RNA, 19 nt, Artificial Sequence
  Description of Artificial Sequence: Synthetic oligonucleotide
ggcagccccauugagcuca

SEQ ID NO: 675614 - RNA, 19 nt, Artificial Sequence
  Description of Artificial Sequence: Synthetic oligonucleotide
gugcucauugaggccgcag

SEQ ID NO: 675615 - RNA, 19 nt, Artificial Sequence
  Description of Artificial Sequence: Synthetic oligonucleotide
caugcacguccagcgcugc

SEQ ID NO: 675616 - RNA, 19 nt, Artificial Sequence
  Description of Artificial Sequence: Synthetic oligonucleotide
cacgggcuguguucaccag

SEQ ID NO: 675617 - RNA, 19 nt, Artificial Sequence
  Description of Artificial Sequence: Synthetic oligonucleotide
gccuagugcacgccugggc

SEQ ID NO: 675618 - RNA, 19 nt, Artificial Sequence
  Description of Artificial Sequence: Synthetic oligonucleotide
gggugcaagggcccguuca

SEQ ID NO: 675619 - RNA, 19 nt, Artificial Sequence
  Description of Artificial Sequence: Synthetic oligonucleotide
agguugggugcauccuuua

SEQ ID NO: 675620 - RNA, 19 nt, Artificial Sequence
  Description of Artificial Sequence: Synthetic oligonucleotide
ugcgggcacauugcauacu

SEQ ID NO: 675621 - RNA, 19 nt, Artificial Sequence
  Description of Artificial Sequence: Synthetic oligonucleotide
gauccggccugugauggcu

SEQ ID NO: 675622 - RNA, 19 nt, Artificial Sequence
  Description of Artificial Sequence: Synthetic oligonucleotide
ggggacgugcuuccucuug

SEQ ID NO: 675623 - RNA, 19 nt, Artificial Sequence
  Description of Artificial Sequence: Synthetic oligonucleotide
acccgagugccuucccgaa

SEQ ID NO: 675624 - RNA, 19 nt, Artificial Sequence
  Description of Artificial Sequence: Synthetic oligonucleotide
agugugccgacggccacau

SEQ ID NO: 675625 - RNA, 19 nt, Artificial Sequence
  Description of Artificial Sequence: Synthetic oligonucleotide
acugugcagucccggccau

SEQ ID NO: 675626 - RNA, 19 nt, Artificial Sequence
  Description of Artificial Sequence: Synthetic oligonucleotide
gggauagggacauggcgcu

SEQ ID NO: 675627 - RNA, 19 nt, Artificial Sequence
  Description of Artificial Sequence: Synthetic oligonucleotide
uaccuacuguaggcagccc

SEQ ID NO: 675628 - RNA, 19 nt, Artificial Sequence
  Description of Artificial Sequence: Synthetic oligonucleotide
caagaacauucgugauaga

SEQ ID NO: 675629 - RNA, 19 nt, Artificial Sequence
  Description of Artificial Sequence: Synthetic oligonucleotide
gcacguuccaacguagaaa

SEQ ID NO: 675630 - RNA, 19 nt, Artificial Sequence
  Description of Artificial Sequence: Synthetic oligonucleotide
guauggucucuauccgccu

SEQ ID NO: 675631 - RNA, 19 nt, Artificial Sequence
  Description of Artificial Sequence: Synthetic oligonucleotide
cauuccggggcacguucca

SEQ ID NO: 675632 - RNA, 19 nt, Artificial Sequence
  Description of Artificial Sequence: Synthetic oligonucleotide
ccuaccacaucagcaggac

SEQ ID NO: 675633 - RNA, 19 nt, Artificial Sequence
  Description of Artificial Sequence: Synthetic oligonucleotide
uuggaacaaagggguucau

SEQ ID NO: 675634 - RNA, 19 nt, Artificial Sequence
  Description of Artificial Sequence: Synthetic oligonucleotide
gcacguccagcgcugcgcc

SEQ ID NO: 675635 - RNA, 19 nt, Artificial Sequence
  Description of Artificial Sequence: Synthetic oligonucleotide
gugguucgucgguauaggu

SEQ ID NO: 675636 - RNA, 19 nt, Artificial Sequence
  Description of Artificial Sequence: Synthetic oligonucleotide
auccggccugugauggcuc

SEQ ID NO: 675637 - RNA, 19 nt, Artificial Sequence
  Description of Artificial Sequence: Synthetic oligonucleotide
ccaucagauagguaugggu

SEQ ID NO: 675638 - RNA, 19 nt, Artificial Sequence
  Description of Artificial Sequence: Synthetic oligonucleotide
ggggcacguuccaacguag

SEQ ID NO: 675639 - RNA, 19 nt, Artificial Sequence
  Description of Artificial Sequence: Synthetic oligonucleotide
guucgucgguauagguuca

SEQ ID NO: 675640 - RNA, 19 nt, Artificial Sequence
  Description of Artificial Sequence: Synthetic oligonucleotide
cugagccacucgcgaugcc

SEQ ID NO: 675641 - RNA, 19 nt, Artificial Sequence
  Description of Artificial Sequence: Synthetic oligonucleotide
cauugagcucagggugcac

SEQ ID NO: 675642 - RNA, 19 nt, Artificial Sequence
  Description of Artificial Sequence: Synthetic oligonucleotide
guaccuucucauggaucuc

SEQ ID NO: 675643 - RNA, 19 nt, Artificial Sequence
  Description of Artificial Sequence: Synthetic oligonucleotide
caaucgacuuggggacgug

SEQ ID NO: 675644 - RNA, 19 nt, Artificial Sequence
  Description of Artificial Sequence: Synthetic oligonucleotide
cauuuggaacaaagggguu

SEQ ID NO: 675645 - RNA, 19 nt, Artificial Sequence
  Description of Artificial Sequence: Synthetic oligonucleotide
cucuauccgccucaggcuu

SEQ ID NO: 675646 - RNA, 19 nt, Artificial Sequence
  Description of Artificial Sequence: Synthetic oligonucleotide
cgucgguauagguucagga

SEQ ID NO: 675647 - RNA, 19 nt, Artificial Sequence
  Description of Artificial Sequence: Synthetic oligonucleotide
cgugauagaauuagcuacu

SEQ ID NO: 675648 - RNA, 19 nt, Artificial Sequence
  Description of Artificial Sequence: Synthetic oligonucleotide
gaaugcucccucagguuuu

SEQ ID NO: 675649 - RNA, 19 nt, Artificial Sequence
  Description of Artificial Sequence: Synthetic oligonucleotide
uggagcgccaaggcccaua

SEQ ID NO: 675650 - RNA, 19 nt, Artificial Sequence
  Description of Artificial Sequence: Synthetic oligonucleotide
gcgaugccgucuucauuug

SEQ ID NO: 675651 - RNA, 19 nt, Artificial Sequence
  Description of Artificial Sequence: Synthetic oligonucleotide
agccaccacgggcuguguu

SEQ ID NO: 675652 - RNA, 19 nt, Artificial Sequence
  Description of Artificial Sequence: Synthetic oligonucleotide
caauucggacgaugauucu

SEQ ID NO: 675653 - RNA, 19 nt, Artificial Sequence
  Description of Artificial Sequence: Synthetic oligonucleotide
cacgaccuaguccaaugau

SEQ ID NO: 675654 - RNA, 19 nt, Artificial Sequence
  Description of Artificial Sequence: Synthetic oligonucleotide
ggcucugauucaugcacgu

SEQ ID NO: 675655 - RNA, 19 nt, Artificial Sequence
  Description of Artificial Sequence: Synthetic oligonucleotide
ggacaacuacaaucgacuu

SEQ ID NO: 675656 - RNA, 19 nt, Artificial Sequence
  Description of Artificial Sequence: Synthetic oligonucleotide
acgaugauucugagagcuu

SEQ ID NO: 675657 - RNA, 19 nt, Artificial Sequence
  Description of Artificial Sequence: Synthetic oligonucleotide
gcuuaacgaagaacgcaaa

SEQ ID NO: 675658 - RNA, 19 nt, Artificial Sequence
  Description of Artificial Sequence: Synthetic oligonucleotide
gccuagauccccagcugac

SEQ ID NO: 675659 - RNA, 19 nt, Artificial Sequence
  Description of Artificial Sequence: Synthetic oligonucleotide
gcuaagcaaacaaauccuu

SEQ ID NO: 675660 - RNA, 19 nt, Artificial Sequence
  Description of Artificial Sequence: Synthetic oligonucleotide
ccgccuagugcacgccugg

SEQ ID NO: 675661 - RNA, 19 nt, Artificial Sequence
  Description of Artificial Sequence: Synthetic oligonucleotide
uggggacgugcuuccucuu

SEQ ID NO: 675662 - RNA, 19 nt, Artificial Sequence
  Description of Artificial Sequence: Synthetic oligonucleotide
gagccacucgcgaugccgu

SEQ ID NO: 675663 - RNA, 19 nt, Artificial Sequence
  Description of Artificial Sequence: Synthetic oligonucleotide
cuguaccaugcggcaugag

SEQ ID NO: 675664 - RNA, 19 nt, Artificial Sequence
  Description of Artificial Sequence: Synthetic oligonucleotide
ccgcagugcagggucacgc

SEQ ID NO: 675665 - RNA, 19 nt, Artificial Sequence
  Description of Artificial Sequence: Synthetic oligonucleotide
cgaugccgucuucauuugg

SEQ ID NO: 675666 - RNA, 19 nt, Artificial Sequence
  Description of Artificial Sequence: Synthetic oligonucleotide
cuacacucuggacccgagu

SEQ ID NO: 675667 - RNA, 19 nt, Artificial Sequence
  Description of Artificial Sequence: Synthetic oligonucleotide
ggauagggacauggcgcug

SEQ ID NO: 675668 - RNA, 19 nt, Artificial Sequence
  Description of Artificial Sequence: Synthetic oligonucleotide
gccuaccacaucagcagga

SEQ ID NO: 675669 - RNA, 19 nt, Artificial Sequence
  Description of Artificial Sequence: Synthetic oligonucleotide
gcacugcaaacacuccucu

SEQ ID NO: 675670 - RNA, 19 nt, Artificial Sequence
  Description of Artificial Sequence: Synthetic oligonucleotide
gccaauucggacgaugauu

SEQ ID NO: 675671 - RNA, 19 nt, Artificial Sequence
  Description of Artificial Sequence: Synthetic oligonucleotide
cucccucagguuuucuuuu

SEQ ID NO: 675672 - RNA, 19 nt, Artificial Sequence
  Description of Artificial Sequence: Synthetic oligonucleotide
cgcugggaacaauaccuuc

SEQ ID NO: 675673 - RNA, 19 nt, Artificial Sequence
  Description of Artificial Sequence: Synthetic oligonucleotide
gcauacugcgaugccuaga

SEQ ID NO: 675674 - RNA, 19 nt, Artificial Sequence
  Description of Artificial Sequence: Synthetic oligonucleotide
ccacgggcuguguucacca

SEQ ID NO: 675675 - RNA, 19 nt, Artificial Sequence
  Description of Artificial Sequence: Synthetic oligonucleotide
cgguauagguucaggaugu

SEQ ID NO: 675676 - RNA, 19 nt, Artificial Sequence
  Description of Artificial Sequence: Synthetic oligonucleotide
cccgagugccuucccgaag

SEQ ID NO: 675677 - RNA, 19 nt, Artificial Sequence
  Description of Artificial Sequence: Synthetic oligonucleotide
cccgccuagugcacgccug

SEQ ID NO: 675678 - RNA, 19 nt, Artificial Sequence
  Description of Artificial Sequence: Synthetic oligonucleotide
gcucccucagguuuucuuu

SEQ ID NO: 675679 - RNA, 19 nt, Artificial Sequence
  Description of Artificial Sequence: Synthetic oligonucleotide
ccgcagugccacugccugg

SEQ ID NO: 675680 - RNA, 19 nt, Artificial Sequence
  Description of Artificial Sequence: Synthetic oligonucleotide
cucgcgaugccgucuucau

SEQ ID NO: 675681 - RNA, 19 nt, Artificial Sequence
  Description of Artificial Sequence: Synthetic oligonucleotide
caauggacgccugcucacu

SEQ ID NO: 675682 - RNA, 19 nt, Artificial Sequence
  Description of Artificial Sequence: Synthetic oligonucleotide
caggugguucgucgguaua

SEQ ID NO: 675683 - RNA, 19 nt, Artificial Sequence
  Description of Artificial Sequence: Synthetic oligonucleotide
uauccgccucaggcuugac

SEQ ID NO: 675684 - RNA, 19 nt, Artificial Sequence
  Description of Artificial Sequence: Synthetic oligonucleotide
caccuggaggguaccuacu

SEQ ID NO: 675685 - RNA, 19 nt, Artificial Sequence
  Description of Artificial Sequence: Synthetic oligonucleotide
cacucgcgaugccgucuuc

SEQ ID NO: 675686 - RNA, 19 nt, Artificial Sequence
  Description of Artificial Sequence: Synthetic oligonucleotide
gcagcgccaccaggggccg

SEQ ID NO: 675687 - RNA, 19 nt, Artificial Sequence
  Description of Artificial Sequence: Synthetic oligonucleotide
gccgcagugcagggucacg

SEQ ID NO: 675688 - RNA, 19 nt, Artificial Sequence
  Description of Artificial Sequence: Synthetic oligonucleotide
cgcgaugccgucuucauuu

SEQ ID NO: 675689 - RNA, 19 nt, Artificial Sequence
  Description of Artificial Sequence: Synthetic oligonucleotide
cagauagguaugggucaua

SEQ ID NO: 675690 - RNA, 19 nt, Artificial Sequence
  Description of Artificial Sequence: Synthetic oligonucleotide
gugcacgccugggccaguc

SEQ ID NO: 675691 - RNA, 19 nt, Artificial Sequence
  Description of Artificial Sequence: Synthetic oligonucleotide
gcggcaugaggggugcaga

SEQ ID NO: 675692 - RNA, 19 nt, Artificial Sequence
  Description of Artificial Sequence: Synthetic oligonucleotide
caagggcaugugacgcccu

SEQ ID NO: 675693 - RNA, 19 nt, Artificial Sequence
  Description of Artificial Sequence: Synthetic oligonucleotide
gggcacguuccaacguaga

SEQ ID NO: 675694 - RNA, 19 nt, Artificial Sequence
  Description of Artificial Sequence: Synthetic oligonucleotide
gucccuggcuaaagcugaa

SEQ ID NO: 675695 - RNA, 19 nt, Artificial Sequence
  Description of Artificial Sequence: Synthetic oligonucleotide
gcgccaaggcuggagagcu

SEQ ID NO: 675696 - RNA, 19 nt, Artificial Sequence
  Description of Artificial Sequence: Synthetic oligonucleotide
agugcacgccugggccagu

SEQ ID NO: 675697 - RNA, 19 nt, Artificial Sequence
  Description of Artificial Sequence: Synthetic oligonucleotide
cggccugugauggcucucc

SEQ ID NO: 675698 - RNA, 19 nt, Artificial Sequence
  Description of Artificial Sequence: Synthetic oligonucleotide
caaugguccugagcacacu

SEQ ID NO: 675699 - RNA, 19 nt, Artificial Sequence
  Description of Artificial Sequence: Synthetic oligonucleotide
gagcgccaaggcccauacu

SEQ ID NO: 675700 - RNA, 19 nt, Artificial Sequence
  Description of Artificial Sequence: Synthetic oligonucleotide
ccaccacgggcuguguuca

SEQ ID NO: 675701 - RNA, 19 nt, Artificial Sequence
  Description of Artificial Sequence: Synthetic oligonucleotide
cgacggccacauuccgggg

SEQ ID NO: 675702 - RNA, 19 nt, Artificial Sequence
  Description of Artificial Sequence: Synthetic oligonucleotide
acggcaccacgcaggcaaa

SEQ ID NO: 675703 - RNA, 19 nt, Artificial Sequence
  Description of Artificial Sequence: Synthetic oligonucleotide
ccuggaggguaccuacugu

SEQ ID NO: 675704 - RNA, 19 nt, Artificial Sequence
  Description of Artificial Sequence: Synthetic oligonucleotide
gcauccuuuaagggucccu

SEQ ID NO: 675705 - RNA, 19 nt, Artificial Sequence
  Description of Artificial Sequence: Synthetic oligonucleotide
ggggugcaagggcccguuc

SEQ ID NO: 675706 - RNA, 19 nt, Artificial Sequence
  Description of Artificial Sequence: Synthetic oligonucleotide
gcccacaggacgggacaac

SEQ ID NO: 675707 - RNA, 19 nt, Artificial Sequence
  Description of Artificial Sequence: Synthetic oligonucleotide
cugucaggugguccuuguu

SEQ ID NO: 675708 - RNA, 19 nt, Artificial Sequence
  Description of Artificial Sequence: Synthetic oligonucleotide
cuuugcccgcagugccacu

SEQ ID NO: 675709 - RNA, 19 nt, Artificial Sequence
  Description of Artificial Sequence: Synthetic oligonucleotide
cccgcucgaugccaucaga

SEQ ID NO: 675710 - RNA, 19 nt, Artificial Sequence
  Description of Artificial Sequence: Synthetic oligonucleotide
ccgcucgaugccaucagau

SEQ ID NO: 675711 - RNA, 19 nt, Artificial Sequence
  Description of Artificial Sequence: Synthetic oligonucleotide
cgaugauucugagagcuuu

SEQ ID NO: 675712 - RNA, 19 nt, Artificial Sequence
  Description of Artificial Sequence: Synthetic oligonucleotide
cgccuagugcacgccuggg

SEQ ID NO: 675713 - RNA, 19 nt, Artificial Sequence
  Description of Artificial Sequence: Synthetic oligonucleotide
cagcgccaccaggggccgg

SEQ ID NO: 675714 - RNA, 19 nt, Artificial Sequence
  Description of Artificial Sequence: Synthetic oligonucleotide
gauccccagcugacuugau

SEQ ID NO: 675715 - RNA, 19 nt, Artificial Sequence
  Description of Artificial Sequence: Synthetic oligonucleotide
ccaggugguucgucgguau

SEQ ID NO: 675716 - RNA, 19 nt, Artificial Sequence
  Description of Artificial Sequence: Synthetic oligonucleotide
gccacucgcgaugccgucu

SEQ ID NO: 675717 - RNA, 19 nt, Artificial Sequence
  Description of Artificial Sequence: Synthetic oligonucleotide
cggggcacguuccaacgua

SEQ ID NO: 675718 - RNA, 19 nt, Artificial Sequence
  Description of Artificial Sequence: Synthetic oligonucleotide
gccccgccuagugcacgcc

SEQ ID NO: 675719 - RNA, 19 nt, Artificial Sequence
  Description of Artificial Sequence: Synthetic oligonucleotide
ccaugcuggcccagugggu

SEQ ID NO: 675720 - RNA, 19 nt, Artificial Sequence
  Description of Artificial Sequence: Synthetic oligonucleotide
cccacacgaccuaguccaa

SEQ ID NO: 675721 - RNA, 19 nt, Artificial Sequence
  Description of Artificial Sequence: Synthetic oligonucleotide
ggguccaugcuggcccagu

SEQ ID NO: 675722 - RNA, 19 nt, Artificial Sequence
  Description of Artificial Sequence: Synthetic oligonucleotide
gcgcugggaacaauaccuu

SEQ ID NO: 675723 - RNA, 19 nt, Artificial Sequence
  Description of Artificial Sequence: Synthetic oligonucleotide
ccggccugugauggcucuc

SEQ ID NO: 675724 - RNA, 19 nt, Artificial Sequence
  Description of Artificial Sequence: Synthetic oligonucleotide
cccggccauccagcagcgc

SEQ ID NO: 675725 - RNA, 19 nt, Artificial Sequence
  Description of Artificial Sequence: Synthetic oligonucleotide
ccacucgcgaugccgucuu

SEQ ID NO: 675726 - RNA, 19 nt, Artificial Sequence
  Description of Artificial Sequence: Synthetic oligonucleotide
ccccgccuagugcacgccu

SEQ ID NO: 675727 - RNA, 19 nt, Artificial Sequence
  Description of Artificial Sequence: Synthetic oligonucleotide
ccaagccaccacgggcugu

SEQ ID NO: 675728 - RNA, 19 nt, Artificial Sequence
  Description of Artificial Sequence: Synthetic oligonucleotide
cgccugcucacuguaccau

SEQ ID NO: 675729 - RNA, 19 nt, Artificial Sequence
  Description of Artificial Sequence: Synthetic oligonucleotide
gcgccacggauccgcccuu

SEQ ID NO: 675730 - RNA, 19 nt, Artificial Sequence
  Description of Artificial Sequence: Synthetic oligonucleotide
ucuaucaugaauauguagg

SEQ ID NO: 675731 - RNA, 19 nt, Artificial Sequence
  Description of Artificial Sequence: Synthetic oligonucleotide
ugaacgaagacuaaugagg

SEQ ID NO: 675732 - RNA, 19 nt, Artificial Sequence
  Description of Artificial Sequence: Synthetic oligonucleotide
uaaagagacagaaacgccg

SEQ ID NO: 675733 - RNA, 19 nt, Artificial Sequence
  Description of Artificial Sequence: Synthetic oligonucleotide
aaggagucaaaauaauugg

SEQ ID NO: 675734 - RNA, 19 nt, Artificial Sequence
  Description of Artificial Sequence: Synthetic oligonucleotide
aauaccauggucuggaggu

SEQ ID NO: 675735 - RNA, 19 nt, Artificial Sequence
  Description of Artificial Sequence: Synthetic oligonucleotide
auucauaaggagcuggggc

SEQ ID NO: 675736 - RNA, 19 nt, Artificial Sequence
  Description of Artificial Sequence: Synthetic oligonucleotide
ugaauugagccccaaauca

SEQ ID NO: 675737 - RNA, 19 nt, Artificial Sequence
  Description of Artificial Sequence: Synthetic oligonucleotide
uaaacucgggaauacaagg

SEQ ID NO: 675738 - RNA, 19 nt, Artificial Sequence
  Description of Artificial Sequence: Synthetic oligonucleotide
aagucacuaaaaugaagac

SEQ ID NO: 675739 - RNA, 19 nt, Artificial Sequence
  Description of Artificial Sequence: Synthetic oligonucleotide
aaugaaucugcauaccacu

SEQ ID NO: 675740 - RNA, 19 nt, Artificial Sequence
  Description of Artificial Sequence: Synthetic oligonucleotide
auagcuauugucauuuucc

SEQ ID NO: 675741 - RNA, 19 nt, Artificial Sequence
  Description of Artificial Sequence: Synthetic oligonucleotide
cuaaugaggccaaacaccg

SEQ ID NO: 675742 - RNA, 19 nt, Artificial Sequence
  Description of Artificial Sequence: Synthetic oligonucleotide
aacgacaggaccuacauua

SEQ ID NO: 675743 - RNA, 19 nt, Artificial Sequence
  Description of Artificial Sequence: Synthetic oligonucleotide
aaaguaauuaacugcucga

SEQ ID NO: 675744 - RNA, 19 nt, Artificial Sequence
  Description of Artificial Sequence: Synthetic oligonucleotide
ugaacgaaacgacaggacc

SEQ ID NO: 675745 - RNA, 19 nt, Artificial Sequence
  Description of Artificial Sequence: Synthetic oligonucleotide
auuacugacgaguauucuc

SEQ ID NO: 675746 - RNA, 19 nt, Artificial Sequence
  Description of Artificial Sequence: Synthetic oligonucleotide
uucucuaagacucgggcag

SEQ ID NO: 675747 - RNA, 19 nt, Artificial Sequence
  Description of Artificial Sequence: Synthetic oligonucleotide
aacucgggaauacaagggg

SEQ ID NO: 675748 - RNA, 19 nt, Artificial Sequence
  Description of Artificial Sequence: Synthetic oligonucleotide
ugaauugugagaccugcag

SEQ ID NO: 675749 - RNA, 19 nt, Artificial Sequence
  Description of Artificial Sequence: Synthetic oligonucleotide
ucauacgucucaaagaaaa

SEQ ID NO: 675750 - RNA, 19 nt, Artificial Sequence
  Description of Artificial Sequence: Synthetic oligonucleotide
ucuaugcauaauagcaugg

SEQ ID NO: 675751 - RNA, 19 nt, Artificial Sequence
  Description of Artificial Sequence: Synthetic oligonucleotide
aagauagaaaaguaauuaa

SEQ ID NO: 675752 - RNA, 19 nt, Artificial Sequence
  Description of Artificial Sequence: Synthetic oligonucleotide
acuaccauuaaauccaaca

SEQ ID NO: 675753 - RNA, 19 nt, Artificial Sequence
  Description of Artificial Sequence: Synthetic oligonucleotide
acugagauucauaaggagc

SEQ ID NO: 675754 - RNA, 19 nt, Artificial Sequence
  Description of Artificial Sequence: Synthetic oligonucleotide
aaaugaaucugcauaccac

SEQ ID NO: 675755 - RNA, 19 nt, Artificial Sequence
  Description of Artificial Sequence: Synthetic oligonucleotide
ugagacauuagugauaaac

SEQ ID NO: 675756 - RNA, 19 nt, Artificial Sequence
  Description of Artificial Sequence: Synthetic oligonucleotide
agacauuagugauaaacag

SEQ ID NO: 675757 - RNA, 19 nt, Artificial Sequence
  Description of Artificial Sequence: Synthetic oligonucleotide
uucaggacaaguuaggaaa

SEQ ID NO: 675758 - RNA, 19 nt, Artificial Sequence
  Description of Artificial Sequence: Synthetic oligonucleotide
cauaauagcauggugacac

SEQ ID NO: 675759 - RNA, 19 nt, Artificial Sequence
  Description of Artificial Sequence: Synthetic oligonucleotide
aacgaagacuaaugaggcc

SEQ ID NO: 675760 - RNA, 19 nt, Artificial Sequence
  Description of Artificial Sequence: Synthetic oligonucleotide
ugaucauacacaaucugcu

SEQ ID NO: 675761 - RNA, 19 nt, Artificial Sequence
  Description of Artificial Sequence: Synthetic oligonucleotide
aacagauuauaaaauacca

SEQ ID NO: 675762 - RNA, 19 nt, Artificial Sequence
  Description of Artificial Sequence: Synthetic oligonucleotide
uuaaagagacagaaacgcc

SEQ ID NO: 675763 - RNA, 19 nt, Artificial Sequence
  Description of Artificial Sequence: Synthetic oligonucleotide
augaucauacacaaucugc

SEQ ID NO: 675764 - RNA, 19 nt, Artificial Sequence
  Description of Artificial Sequence: Synthetic oligonucleotide
uuuaagaguuuaaugcccu

SEQ ID NO: 675765 - RNA, 19 nt, Artificial Sequence
  Description of Artificial Sequence: Synthetic oligonucleotide
ucggaaauuggauaaaguc

SEQ ID NO: 675766 - RNA, 19 nt, Artificial Sequence
  Description of Artificial Sequence: Synthetic oligonucleotide
ugugaacgaagacuaauga

SEQ ID NO: 675767 - RNA, 19 nt, Artificial Sequence
  Description of Artificial Sequence: Synthetic oligonucleotide
augaauugagccccaaauc

SEQ ID NO: 675768 - RNA, 19 nt, Artificial Sequence
  Description of Artificial Sequence: Synthetic oligonucleotide
aaaaggcguaugaucagcc

SEQ ID NO: 675769 - RNA, 19 nt, Artificial Sequence
  Description of Artificial Sequence: Synthetic oligonucleotide
uuacugacgaguauucucu

SEQ ID NO: 675770 - RNA, 19 nt, Artificial Sequence
  Description of Artificial Sequence: Synthetic oligonucleotide
aaggaaugguaucucccac

SEQ ID NO: 675771 - RNA, 19 nt, Artificial Sequence
  Description of Artificial Sequence: Synthetic oligonucleotide
aucgucagugaacugcugc

SEQ ID NO: 675772 - RNA, 19 nt, Artificial Sequence
  Description of Artificial Sequence: Synthetic oligonucleotide
uuucuagacuguuugguca

SEQ ID NO: 675773 - RNA, 19 nt, Artificial Sequence
  Description of Artificial Sequence: Synthetic oligonucleotide
uaugcauaauagcauggug

SEQ ID NO: 675774 - RNA, 19 nt, Artificial Sequence
  Description of Artificial Sequence: Synthetic oligonucleotide
aaagaacgcaugcaccaag

SEQ ID NO: 675775 - RNA, 19 nt, Artificial Sequence
  Description of Artificial Sequence: Synthetic oligonucleotide
cacaccggcauaaacaacc

SEQ ID NO: 675776 - RNA, 19 nt, Artificial Sequence
  Description of Artificial Sequence: Synthetic oligonucleotide
acuagucaucucucuaugc

SEQ ID NO: 675777 - RNA, 19 nt, Artificial Sequence
  Description of Artificial Sequence: Synthetic oligonucleotide
acgaguauucucuccauuc

SEQ ID NO: 675778 - RNA, 19 nt, Artificial Sequence
  Description of Artificial Sequence: Synthetic oligonucleotide
guuuaaugcccugaguucg

SEQ ID NO: 675779 - RNA, 19 nt, Artificial Sequence
  Description of Artificial Sequence: Synthetic oligonucleotide
acuaaaaugaagacagcuc

SEQ ID NO: 675780 - RNA, 19 nt, Artificial Sequence
  Description of Artificial Sequence: Synthetic oligonucleotide
ugguaucucccacugaacc

SEQ ID NO: 675781 - RNA, 19 nt, Artificial Sequence
  Description of Artificial Sequence: Synthetic oligonucleotide
gaccacuuaagguaguagc

SEQ ID NO: 675782 - RNA, 19 nt, Artificial Sequence
  Description of Artificial Sequence: Synthetic oligonucleotide
gucauuuuccacuggggcg

SEQ ID NO: 675783 - RNA, 19 nt, Artificial Sequence
  Description of Artificial Sequence: Synthetic oligonucleotide
aaugcccugaguucguuca

SEQ ID NO: 675784 - RNA, 19 nt, Artificial Sequence
  Description of Artificial Sequence: Synthetic oligonucleotide
cucucuaugcauaauagca

SEQ ID NO: 675785 - RNA, 19 nt, Artificial Sequence
  Description of Artificial Sequence: Synthetic oligonucleotide
ugcucgacaaacuuggggu

SEQ ID NO: 675786 - RNA, 19 nt, Artificial Sequence
  Description of Artificial Sequence: Synthetic oligonucleotide
gacuaaugaggccaaacac

SEQ ID NO: 675787 - RNA, 19 nt, Artificial Sequence
  Description of Artificial Sequence: Synthetic oligonucleotide
gaaguuacacuguagcaga

SEQ ID NO: 675788 - RNA, 19 nt, Artificial Sequence
  Description of Artificial Sequence: Synthetic oligonucleotide
uuucucgaaccucuaacug

SEQ ID NO: 675789 - RNA, 19 nt, Artificial Sequence
  Description of Artificial Sequence: Synthetic oligonucleotide
agaugaacgaaacgacagg

SEQ ID NO: 675790 - RNA, 19 nt, Artificial Sequence
  Description of Artificial Sequence: Synthetic oligonucleotide
aucuaucaugaauauguag

SEQ ID NO: 675791 - RNA, 19 nt, Artificial Sequence
  Description of Artificial Sequence: Synthetic oligonucleotide
aaacucgggaauacaaggg

SEQ ID NO: 675792 - RNA, 19 nt, Artificial Sequence
  Description of Artificial Sequence: Synthetic oligonucleotide
gaacgcaugcaccaagucc

SEQ ID NO: 675793 - RNA, 19 nt, Artificial Sequence
  Description of Artificial Sequence: Synthetic oligonucleotide
gacuagaaagaacgcaugc

SEQ ID NO: 675794 - RNA, 19 nt, Artificial Sequence
  Description of Artificial Sequence: Synthetic oligonucleotide
uacagucaucucaauaggc

SEQ ID NO: 675795 - RNA, 19 nt, Artificial Sequence
  Description of Artificial Sequence: Synthetic oligonucleotide
aagcacaccagcaugacgu

SEQ ID NO: 675796 - RNA, 19 nt, Artificial Sequence
  Description of Artificial Sequence: Synthetic oligonucleotide
uaauuggagaugaacgaaa

SEQ ID NO: 675797 - RNA, 19 nt, Artificial Sequence
  Description of Artificial Sequence: Synthetic oligonucleotide
aauuggauaaagucuucuu

SEQ ID NO: 675798 - RNA, 19 nt, Artificial Sequence
  Description of Artificial Sequence: Synthetic oligonucleotide
ugucauguuggacaaugcu

SEQ ID NO: 675799 - RNA, 19 nt, Artificial Sequence
  Description of Artificial Sequence: Synthetic oligonucleotide
auuucucgaaccucuaacu

SEQ ID NO: 675800 - RNA, 19 nt, Artificial Sequence
  Description of Artificial Sequence: Synthetic oligonucleotide
cuuagaaccucugauuaag

SEQ ID NO: 675801 - RNA, 19 nt, Artificial Sequence
  Description of Artificial Sequence: Synthetic oligonucleotide
gugaacgaagacuaaugag

SEQ ID NO: 675802 - RNA, 19 nt, Artificial Sequence
  Description of Artificial Sequence: Synthetic oligonucleotide
guuucucuaagacucgggc

SEQ ID NO: 675803 - RNA, 19 nt, Artificial Sequence
  Description of Artificial Sequence: Synthetic oligonucleotide
acuggggcgaucuuaaaga

SEQ ID NO: 675804 - RNA, 19 nt, Artificial Sequence
  Description of Artificial Sequence: Synthetic oligonucleotide
cauaauaugguucugaauu

SEQ ID NO: 675805 - RNA, 19 nt, Artificial Sequence
  Description of Artificial Sequence: Synthetic oligonucleotide
agcuauugucauuuuccac

SEQ ID NO: 675806 - RNA, 19 nt, Artificial Sequence
  Description of Artificial Sequence: Synthetic oligonucleotide
uaaggacuagaaagaacgc

SEQ ID NO: 675807 - RNA, 19 nt, Artificial Sequence
  Description of Artificial Sequence: Synthetic oligonucleotide
uuucucuaagacucgggca

SEQ ID NO: 675808 - RNA, 19 nt, Artificial Sequence
  Description of Artificial Sequence: Synthetic oligonucleotide
auuggauaaagucuucuuu

SEQ ID NO: 675809 - RNA, 19 nt, Artificial Sequence
  Description of Artificial Sequence: Synthetic oligonucleotide
caugguaaggaaguuacac

SEQ ID NO: 675810 - RNA, 19 nt, Artificial Sequence
  Description of Artificial Sequence: Synthetic oligonucleotide
uuuuguaaaccugggugag

SEQ ID NO: 675811 - RNA, 19 nt, Artificial Sequence
  Description of Artificial Sequence: Synthetic oligonucleotide
ucugcaacacaucuccccu

SEQ ID NO: 675812 - RNA, 19 nt, Artificial Sequence
  Description of Artificial Sequence: Synthetic oligonucleotide
uaaaccugggugaguuugg

SEQ ID NO: 675813 - RNA, 19 nt, Artificial Sequence
  Description of Artificial Sequence: Synthetic oligonucleotide
uuagaaccucugauuaagc

SEQ ID NO: 675814 - RNA, 19 nt, Artificial Sequence
  Description of Artificial Sequence: Synthetic oligonucleotide
cgaucuuaaagaauaaagg

SEQ ID NO: 675815 - RNA, 19 nt, Artificial Sequence
  Description of Artificial Sequence: Synthetic oligonucleotide
uaucuugcaugccaagaac

SEQ ID NO: 675816 - RNA, 19 nt, Artificial Sequence
  Description of Artificial Sequence: Synthetic oligonucleotide
caccuugaagcacauagag

SEQ ID NO: 675817 - RNA, 19 nt, Artificial Sequence
  Description of Artificial Sequence: Synthetic oligonucleotide
aaucaaauggcagcuggga

SEQ ID NO: 675818 - RNA, 19 nt, Artificial Sequence
  Description of Artificial Sequence: Synthetic oligonucleotide
uaagacucgggcaguaaac

SEQ ID NO: 675819 - RNA, 19 nt, Artificial Sequence
  Description of Artificial Sequence: Synthetic oligonucleotide
aaggacuagaaagaacgca

SEQ ID NO: 675820 - RNA, 19 nt, Artificial Sequence
  Description of Artificial Sequence: Synthetic oligonucleotide
cauaaggacuagaaagaac

SEQ ID NO: 675821 - RNA, 19 nt, Artificial Sequence
  Description of Artificial Sequence: Synthetic oligonucleotide
aauaugguucugaauuucu

SEQ ID NO: 675822 - RNA, 19 nt, Artificial Sequence
  Description of Artificial Sequence: Synthetic oligonucleotide
uauaucuugcaugccaaga

SEQ ID NO: 675823 - RNA, 19 nt, Artificial Sequence
  Description of Artificial Sequence: Synthetic oligonucleotide
agucauuguacgucuccac

SEQ ID NO: 675824 - RNA, 19 nt, Artificial Sequence
  Description of Artificial Sequence: Synthetic oligonucleotide
auaaaauaccauggucugg

SEQ ID NO: 675825 - RNA, 19 nt, Artificial Sequence
  Description of Artificial Sequence: Synthetic oligonucleotide
uucggaaauuggauaaagu

SEQ ID NO: 675826 - RNA, 19 nt, Artificial Sequence
  Description of Artificial Sequence: Synthetic oligonucleotide
gucaaaauaauuggagaug

SEQ ID NO: 675827 - RNA, 19 nt, Artificial Sequence
  Description of Artificial Sequence: Synthetic oligonucleotide
cacuuaagguaguagcagc

SEQ ID NO: 675828 - RNA, 19 nt, Artificial Sequence
  Description of Artificial Sequence: Synthetic oligonucleotide
agcuauaauucugcaacac

SEQ ID NO: 675829 - RNA, 19 nt, Artificial Sequence
  Description of Artificial Sequence: Synthetic oligonucleotide
cauuucucgaaccucuaac

SEQ ID NO: 675830 - RNA, 19 nt, Artificial Sequence
  Description of Artificial Sequence: Synthetic oligonucleotide
ucaucuuccaaaaggcgua

SEQ ID NO: 675831 - RNA, 19 nt, Artificial Sequence
  Description of Artificial Sequence: Synthetic oligonucleotide
aguuacacuguagcagacc

SEQ ID NO: 675832 - RNA, 19 nt, Artificial Sequence
  Description of Artificial Sequence: Synthetic oligonucleotide
acgaagacuaaugaggcca

SEQ ID NO: 675833 - RNA, 19 nt, Artificial Sequence
  Description of Artificial Sequence: Synthetic oligonucleotide
aaggcguaugaucagccau

SEQ ID NO: 675834 - RNA, 19 nt, Artificial Sequence
  Description of Artificial Sequence: Synthetic oligonucleotide
uggcccauggccuacuacc

SEQ ID NO: 675835 - RNA, 19 nt, Artificial Sequence
  Description of Artificial Sequence: Synthetic oligonucleotide
cugugaacgaagacuaaug

SEQ ID NO: 675836 - RNA, 19 nt, Artificial Sequence
  Description of Artificial Sequence: Synthetic oligonucleotide
uuauuucuagucugagacu

SEQ ID NO: 675837 - RNA, 19 nt, Artificial Sequence
  Description of Artificial Sequence: Synthetic oligonucleotide
augcauaauagcaugguga

SEQ ID NO: 675838 - RNA, 19 nt, Artificial Sequence
  Description of Artificial Sequence: Synthetic oligonucleotide
uuaagguaguagcagccau

SEQ ID NO: 675839 - RNA, 19 nt, Artificial Sequence
  Description of Artificial Sequence: Synthetic oligonucleotide
ugaucgucagugaacugcu

SEQ ID NO: 675840 - RNA, 19 nt, Artificial Sequence
  Description of Artificial Sequence: Synthetic oligonucleotide
uccuucggaaauuggauaa

SEQ ID NO: 675841 - RNA, 19 nt, Artificial Sequence
  Description of Artificial Sequence: Synthetic oligonucleotide
ggaaguuacacuguagcag

SEQ ID NO: 675842 - RNA, 19 nt, Artificial Sequence
  Description of Artificial Sequence: Synthetic oligonucleotide
gaugaacgaaacgacagga

SEQ ID NO: 675843 - RNA, 19 nt, Artificial Sequence
  Description of Artificial Sequence: Synthetic oligonucleotide
uccauaauaugguucugaa

SEQ ID NO: 675844 - RNA, 19 nt, Artificial Sequence
  Description of Artificial Sequence: Synthetic oligonucleotide
aacaucuaucaugaauaug

SEQ ID NO: 675845 - RNA, 19 nt, Artificial Sequence
  Description of Artificial Sequence: Synthetic oligonucleotide
agucacuaaaaugaagaca

SEQ ID NO: 675846 - RNA, 19 nt, Artificial Sequence
  Description of Artificial Sequence: Synthetic oligonucleotide
uguguccuucggaaauugg

SEQ ID NO: 675847 - RNA, 19 nt, Artificial Sequence
  Description of Artificial Sequence: Synthetic oligonucleotide
uuggguuccaaguacuuua

SEQ ID NO: 675848 - RNA, 19 nt, Artificial Sequence
  Description of Artificial Sequence: Synthetic oligonucleotide
uguccuucggaaauuggau

SEQ ID NO: 675849 - RNA, 19 nt, Artificial Sequence
  Description of Artificial Sequence: Synthetic oligonucleotide
uaauuaacugcucgacaaa

SEQ ID NO: 675850 - RNA, 19 nt, Artificial Sequence
  Description of Artificial Sequence: Synthetic oligonucleotide
aggaaguuacacuguagca

SEQ ID NO: 675851 - RNA, 19 nt, Artificial Sequence
  Description of Artificial Sequence: Synthetic oligonucleotide
aaaggcguaugaucagcca

SEQ ID NO: 675852 - RNA, 19 nt, Artificial Sequence
  Description of Artificial Sequence: Synthetic oligonucleotide
auaccugaggaucuggaau

SEQ ID NO: 675853 - RNA, 19 nt, Artificial Sequence
  Description of Artificial Sequence: Synthetic oligonucleotide
gaugaauugagccccaaau

SEQ ID NO: 675854 - RNA, 19 nt, Artificial Sequence
  Description of Artificial Sequence: Synthetic oligonucleotide
uuaagaguuuaaugcccug

SEQ ID NO: 675855 - RNA, 19 nt, Artificial Sequence
  Description of Artificial Sequence: Synthetic oligonucleotide
ugaggccaaacaccgaagu

SEQ ID NO: 675856 - RNA, 19 nt, Artificial Sequence
  Description of Artificial Sequence: Synthetic oligonucleotide
uauguaggucagcacacuc

SEQ ID NO: 675857 - RNA, 19 nt, Artificial Sequence
  Description of Artificial Sequence: Synthetic oligonucleotide
uuaagccagcuauaauucu

SEQ ID NO: 675858 - RNA, 19 nt, Artificial Sequence
  Description of Artificial Sequence: Synthetic oligonucleotide
uccacaccggcauaaacaa

SEQ ID NO: 675859 - RNA, 19 nt, Artificial Sequence
  Description of Artificial Sequence: Synthetic oligonucleotide
caaaucaggacuagucauc

SEQ ID NO: 675860 - RNA, 19 nt, Artificial Sequence
  Description of Artificial Sequence: Synthetic oligonucleotide
gagacuuugugacuuuguc

SEQ ID NO: 675861 - RNA, 19 nt, Artificial Sequence
  Description of Artificial Sequence: Synthetic oligonucleotide
uagugauaaacagaguuuu

SEQ ID NO: 675862 - RNA, 19 nt, Artificial Sequence
  Description of Artificial Sequence: Synthetic oligonucleotide
gagacagaaacgccgggac

SEQ ID NO: 675863 - RNA, 19 nt, Artificial Sequence
  Description of Artificial Sequence: Synthetic oligonucleotide
accuacauuacugacgagu

SEQ ID NO: 675864 - RNA, 19 nt, Artificial Sequence
  Description of Artificial Sequence: Synthetic oligonucleotide
uccaaguacuuuagaaguc

SEQ ID NO: 675865 - RNA, 19 nt, Artificial Sequence
  Description of Artificial Sequence: Synthetic oligonucleotide
gccuacuaccauuaaaucc

SEQ ID NO: 675866 - RNA, 19 nt, Artificial Sequence
  Description of Artificial Sequence: Synthetic oligonucleotide
uuguacgucuccacuguca

SEQ ID NO: 675867 - RNA, 19 nt, Artificial Sequence
  Description of Artificial Sequence: Synthetic oligonucleotide
ucgaaccucuaacugcuca

SEQ ID NO: 675868 - RNA, 19 nt, Artificial Sequence
  Description of Artificial Sequence: Synthetic oligonucleotide
caaauggcagcugggaacc

SEQ ID NO: 675869 - RNA, 19 nt, Artificial Sequence
  Description of Artificial Sequence: Synthetic oligonucleotide
ugaucaguauucugggaaa

SEQ ID NO: 675870 - RNA, 19 nt, Artificial Sequence
  Description of Artificial Sequence: Synthetic oligonucleotide
ccuacuaccauuaaaucca

SEQ ID NO: 675871 - RNA, 19 nt, Artificial Sequence
  Description of Artificial Sequence: Synthetic oligonucleotide
gcgaucuuaaagaauaaag

SEQ ID NO: 675872 - RNA, 19 nt, Artificial Sequence
  Description of Artificial Sequence: Synthetic oligonucleotide
agcaugacguuugaccaac

SEQ ID NO: 675873 - RNA, 19 nt, Artificial Sequence
  Description of Artificial Sequence: Synthetic oligonucleotide
gacuagucaucucucuaug

SEQ ID NO: 675874 - RNA, 19 nt, Artificial Sequence
  Description of Artificial Sequence: Synthetic oligonucleotide
ugaaguaccaaaggcacuu

SEQ ID NO: 675875 - RNA, 19 nt, Artificial Sequence
  Description of Artificial Sequence: Synthetic oligonucleotide
aggaccuacauuacugacg

SEQ ID NO: 675876 - RNA, 19 nt, Artificial Sequence
  Description of Artificial Sequence: Synthetic oligonucleotide
ugucaugguguguccuucg

SEQ ID NO: 675877 - RNA, 19 nt, Artificial Sequence
  Description of Artificial Sequence: Synthetic oligonucleotide
ucugauuaagccagcuaua

SEQ ID NO: 675878 - RNA, 19 nt, Artificial Sequence
  Description of Artificial Sequence: Synthetic oligonucleotide
ucauaaggacuagaaagaa

SEQ ID NO: 675879 - RNA, 19 nt, Artificial Sequence
  Description of Artificial Sequence: Synthetic oligonucleotide
uugaagcacauagagucga

SEQ ID NO: 675880 - RNA, 19 nt, Artificial Sequence
  Description of Artificial Sequence: Synthetic oligonucleotide
agaacgcaugcaccaaguc

SEQ ID NO: 675881 - RNA, 19 nt, Artificial Sequence
  Description of Artificial Sequence: Synthetic oligonucleotide
uccgucauauccucccugc

SEQ ID NO: 675882 - RNA, 19 nt, Artificial Sequence
  Description of Artificial Sequence: Synthetic oligonucleotide
aaacaccgaagucacuaaa

SEQ ID NO: 675883 - RNA, 19 nt, Artificial Sequence
  Description of Artificial Sequence: Synthetic oligonucleotide
agauucauaaggagcuggg

SEQ ID NO: 675884 - RNA, 19 nt, Artificial Sequence
  Description of Artificial Sequence: Synthetic oligonucleotide
acauuacugacgaguauuc

SEQ ID NO: 675885 - RNA, 19 nt, Artificial Sequence
  Description of Artificial Sequence: Synthetic oligonucleotide
uguacgucuccacugucau

SEQ ID NO: 675886 - RNA, 19 nt, Artificial Sequence
  Description of Artificial Sequence: Synthetic oligonucleotide
uuuaaugcccugaguucgu

SEQ ID NO: 675887 - RNA, 19 nt, Artificial Sequence
  Description of Artificial Sequence: Synthetic oligonucleotide
cagaugauaccugaggauc

SEQ ID NO: 675888 - RNA, 19 nt, Artificial Sequence
  Description of Artificial Sequence: Synthetic oligonucleotide
aagacucgggcaguaaacu

SEQ ID NO: 675889 - RNA, 19 nt, Artificial Sequence
  Description of Artificial Sequence: Synthetic oligonucleotide
cugcucgacaaacuugggg

SEQ ID NO: 675890 - RNA, 19 nt, Artificial Sequence
  Description of Artificial Sequence: Synthetic oligonucleotide
acuguauaucuugcaugcc

SEQ ID NO: 675891 - RNA, 19 nt, Artificial Sequence
  Description of Artificial Sequence: Synthetic oligonucleotide
guaucucccacugaaccag

SEQ ID NO: 675892 - RNA, 19 nt, Artificial Sequence
  Description of Artificial Sequence: Synthetic oligonucleotide
aaguuacacuguagcagac

SEQ ID NO: 675893 - RNA, 19 nt, Artificial Sequence
  Description of Artificial Sequence: Synthetic oligonucleotide
uguucuugccaguugucau

SEQ ID NO: 675894 - RNA, 19 nt, Artificial Sequence
  Description of Artificial Sequence: Synthetic oligonucleotide
caccgaagucacuaaaaug

SEQ ID NO: 675895 - RNA, 19 nt, Artificial Sequence
  Description of Artificial Sequence: Synthetic oligonucleotide
ucgggcaguaaacucggga

SEQ ID NO: 675896 - RNA, 19 nt, Artificial Sequence
  Description of Artificial Sequence: Synthetic oligonucleotide
auuguacgucuccacuguc

SEQ ID NO: 675897 - RNA, 19 nt, Artificial Sequence
  Description of Artificial Sequence: Synthetic oligonucleotide
augaacgaaacgacaggac

SEQ ID NO: 675898 - RNA, 19 nt, Artificial Sequence
  Description of Artificial Sequence: Synthetic oligonucleotide
cuguauaucuugcaugcca

SEQ ID NO: 675899 - RNA, 19 nt, Artificial Sequence
  Description of Artificial Sequence: Synthetic oligonucleotide
cuucggaaauuggauaaag

SEQ ID NO: 675900 - RNA, 19 nt, Artificial Sequence
  Description of Artificial Sequence: Synthetic oligonucleotide
caaaaggcguaugaucagc

SEQ ID NO: 675901 - RNA, 19 nt, Artificial Sequence
  Description of Artificial Sequence: Synthetic oligonucleotide
ugugagaccugcagagagu

SEQ ID NO: 675902 - RNA, 19 nt, Artificial Sequence
  Description of Artificial Sequence: Synthetic oligonucleotide
aguaaacucgggaauacaa

SEQ ID NO: 675903 - RNA, 19 nt, Artificial Sequence
  Description of Artificial Sequence: Synthetic oligonucleotide
cauaagccauuucaauaug

SEQ ID NO: 675904 - RNA, 19 nt, Artificial Sequence
  Description of Artificial Sequence: Synthetic oligonucleotide
augcaucuacaaaggaccc

SEQ ID NO: 675905 - RNA, 19 nt, Artificial Sequence
  Description of Artificial Sequence: Synthetic oligonucleotide
guauaucuugcaugccaag

SEQ ID NO: 675906 - RNA, 19 nt, Artificial Sequence
  Description of Artificial Sequence: Synthetic oligonucleotide
uugaccaacucugcagaag

SEQ ID NO: 675907 - RNA, 19 nt, Artificial Sequence
  Description of Artificial Sequence: Synthetic oligonucleotide
uggcuauacagguucccca

SEQ ID NO: 675908 - RNA, 19 nt, Artificial Sequence
  Description of Artificial Sequence: Synthetic oligonucleotide
aggaaugguaucucccacu

SEQ ID NO: 675909 - RNA, 19 nt, Artificial Sequence
  Description of Artificial Sequence: Synthetic oligonucleotide
ucaugguguguccuucgga

SEQ ID NO: 675910 - RNA, 19 nt, Artificial Sequence
  Description of Artificial Sequence: Synthetic oligonucleotide
ugguguguccuucggaaau

SEQ ID NO: 675911 - RNA, 19 nt, Artificial Sequence
  Description of Artificial Sequence: Synthetic oligonucleotide
uguuguuggugcaguauuu

SEQ ID NO: 675912 - RNA, 19 nt, Artificial Sequence
  Description of Artificial Sequence: Synthetic oligonucleotide
ucaguauucugggaaacuu

SEQ ID NO: 675913 - RNA, 19 nt, Artificial Sequence
  Description of Artificial Sequence: Synthetic oligonucleotide
ggaccuacauuacugacga

SEQ ID NO: 675914 - RNA, 19 nt, Artificial Sequence
  Description of Artificial Sequence: Synthetic oligonucleotide
ugccauaagccauuucaau

SEQ ID NO: 675915 - RNA, 19 nt, Artificial Sequence
  Description of Artificial Sequence: Synthetic oligonucleotide
accugaaguaccaaaggca

SEQ ID NO: 675916 - RNA, 19 nt, Artificial Sequence
  Description of Artificial Sequence: Synthetic oligonucleotide
auacaaggggauguuguug

SEQ ID NO: 675917 - RNA, 19 nt, Artificial Sequence
  Description of Artificial Sequence: Synthetic oligonucleotide
aacaccgaagucacuaaaa

SEQ ID NO: 675918 - RNA, 19 nt, Artificial Sequence
  Description of Artificial Sequence: Synthetic oligonucleotide
gcuauugucauuuuccacu

SEQ ID NO: 675919 - RNA, 19 nt, Artificial Sequence
  Description of Artificial Sequence: Synthetic oligonucleotide
uggguaguuuuguuuugca

SEQ ID NO: 675920 - RNA, 19 nt, Artificial Sequence
  Description of Artificial Sequence: Synthetic oligonucleotide
acucccuauucuuucucug

SEQ ID NO: 675921 - RNA, 19 nt, Artificial Sequence
  Description of Artificial Sequence: Synthetic oligonucleotide
aggacuagaaagaacgcau

SEQ ID NO: 675922 - RNA, 19 nt, Artificial Sequence
  Description of Artificial Sequence: Synthetic oligonucleotide
uccacuggggcgaucuuaa

SEQ ID NO: 675923 - RNA, 19 nt, Artificial Sequence
  Description of Artificial Sequence: Synthetic oligonucleotide
cuuuucuguccucuaaaga

SEQ ID NO: 675924 - RNA, 19 nt, Artificial Sequence
  Description of Artificial Sequence: Synthetic oligonucleotide
agugaucaguauucuggga

SEQ ID NO: 675925 - RNA, 19 nt, Artificial Sequence
  Description of Artificial Sequence: Synthetic oligonucleotide
ggacuaacuuaucucuucc

SEQ ID NO: 675926 - RNA, 19 nt, Artificial Sequence
  Description of Artificial Sequence: Synthetic oligonucleotide
gacaugcaucuacaaagga

SEQ ID NO: 675927 - RNA, 19 nt, Artificial Sequence
  Description of Artificial Sequence: Synthetic oligonucleotide
agcugaucgucagugaacu

SEQ ID NO: 675928 - RNA, 19 nt, Artificial Sequence
  Description of Artificial Sequence: Synthetic oligonucleotide
augcuuagaaccucugauu

SEQ ID NO: 675929 - RNA, 19 nt, Artificial Sequence
  Description of Artificial Sequence: Synthetic oligonucleotide
uuacacuguagcagaccac

SEQ ID NO: 675930 - RNA, 19 nt, Artificial Sequence
  Description of Artificial Sequence: Synthetic oligonucleotide
gaucaguauucugggaaac

SEQ ID NO: 675931 - RNA, 19 nt, Artificial Sequence
  Description of Artificial Sequence: Synthetic oligonucleotide
accacuuaagguaguagca

SEQ ID NO: 675932 - RNA, 19 nt, Artificial Sequence
  Description of Artificial Sequence: Synthetic oligonucleotide
cuaucaugaauauguaggu

SEQ ID NO: 675933 - RNA, 19 nt, Artificial Sequence
  Description of Artificial Sequence: Synthetic oligonucleotide
aagaacgcaugcaccaagu

SEQ ID NO: 675934 - RNA, 19 nt, Artificial Sequence
  Description of Artificial Sequence: Synthetic oligonucleotide
ugcaacacaucuccccuua

SEQ ID NO: 675935 - RNA, 19 nt, Artificial Sequence
  Description of Artificial Sequence: Synthetic oligonucleotide
auagcucagggacucucca

SEQ ID NO: 675936 - RNA, 19 nt, Artificial Sequence
  Description of Artificial Sequence: Synthetic oligonucleotide
uuugaccaacucugcagaa

SEQ ID NO: 675937 - RNA, 19 nt, Artificial Sequence
  Description of Artificial Sequence: Synthetic oligonucleotide
cugacucuuccacaccggc

SEQ ID NO: 675938 - RNA, 19 nt, Artificial Sequence
  Description of Artificial Sequence: Synthetic oligonucleotide
ugaucauacuggguuauuu

SEQ ID NO: 675939 - RNA, 19 nt, Artificial Sequence
  Description of Artificial Sequence: Synthetic oligonucleotide
agggucucgcuuucuuuuc

SEQ ID NO: 675940 - RNA, 19 nt, Artificial Sequence
  Description of Artificial Sequence: Synthetic oligonucleotide
ggugaguuuggguuccaag

SEQ ID NO: 675941 - RNA, 19 nt, Artificial Sequence
  Description of Artificial Sequence: Synthetic oligonucleotide
caugguguguccuucggaa

SEQ ID NO: 675942 - RNA, 19 nt, Artificial Sequence
  Description of Artificial Sequence: Synthetic oligonucleotide
cauaccacuguccauggua

SEQ ID NO: 675943 - RNA, 19 nt, Artificial Sequence
  Description of Artificial Sequence: Synthetic oligonucleotide
gaaacgacaggaccuacau

SEQ ID NO: 675944 - RNA, 19 nt, Artificial Sequence
  Description of Artificial Sequence: Synthetic oligonucleotide
augaaucugcauaccacug

SEQ ID NO: 675945 - RNA, 19 nt, Artificial Sequence
  Description of Artificial Sequence: Synthetic oligonucleotide
cugacgaguauucucucca

SEQ ID NO: 675946 - RNA, 19 nt, Artificial Sequence
  Description of Artificial Sequence: Synthetic oligonucleotide
acguuugaccaacucugca

SEQ ID NO: 675947 - RNA, 19 nt, Artificial Sequence
  Description of Artificial Sequence: Synthetic oligonucleotide
augauaccugaggaucugg

SEQ ID NO: 675948 - RNA, 19 nt, Artificial Sequence
  Description of Artificial Sequence: Synthetic oligonucleotide
gcuauaauucugcaacaca

SEQ ID NO: 675949 - RNA, 19 nt, Artificial Sequence
  Description of Artificial Sequence: Synthetic oligonucleotide
auggcccauggccuacuac

SEQ ID NO: 675950 - RNA, 19 nt, Artificial Sequence
  Description of Artificial Sequence: Synthetic oligonucleotide
aacgaaacgacaggaccua

SEQ ID NO: 675951 - RNA, 19 nt, Artificial Sequence
  Description of Artificial Sequence: Synthetic oligonucleotide
caggaccuacauuacugac

SEQ ID NO: 675952 - RNA, 19 nt, Artificial Sequence
  Description of Artificial Sequence: Synthetic oligonucleotide
cucugauuaagccagcuau

SEQ ID NO: 675953 - RNA, 19 nt, Artificial Sequence
  Description of Artificial Sequence: Synthetic oligonucleotide
aaacgacaggaccuacauu

SEQ ID NO: 675954 - RNA, 19 nt, Artificial Sequence
  Description of Artificial Sequence: Synthetic oligonucleotide
uaauagcucagggacucuc

SEQ ID NO: 675955 - RNA, 19 nt, Artificial Sequence
  Description of Artificial Sequence: Synthetic oligonucleotide
aggcguaugaucagccauc

SEQ ID NO: 675956 - RNA, 19 nt, Artificial Sequence
  Description of Artificial Sequence: Synthetic oligonucleotide
acuugccauaagccauuuc

SEQ ID NO: 675957 - RNA, 19 nt, Artificial Sequence
  Description of Artificial Sequence: Synthetic oligonucleotide
aaacgccgggacuaacuua

SEQ ID NO: 675958 - RNA, 19 nt, Artificial Sequence
  Description of Artificial Sequence: Synthetic oligonucleotide
gacagaaacgccgggacua

SEQ ID NO: 675959 - RNA, 19 nt, Artificial Sequence
  Description of Artificial Sequence: Synthetic oligonucleotide
gguuauuucuagucugaga

SEQ ID NO: 675960 - RNA, 19 nt, Artificial Sequence
  Description of Artificial Sequence: Synthetic oligonucleotide
aguuuggguuccaaguacu

SEQ ID NO: 675961 - RNA, 19 nt, Artificial Sequence
  Description of Artificial Sequence: Synthetic oligonucleotide
uuucuuggguaguuuuguu

SEQ ID NO: 675962 - RNA, 19 nt, Artificial Sequence
  Description of Artificial Sequence: Synthetic oligonucleotide
guauucugggaaacuucag

SEQ ID NO: 675963 - RNA, 19 nt, Artificial Sequence
  Description of Artificial Sequence: Synthetic oligonucleotide
agcuuccggggaucucugc

SEQ ID NO: 675964 - RNA, 19 nt, Artificial Sequence
  Description of Artificial Sequence: Synthetic oligonucleotide
cguaugaucagccaucuga

SEQ ID NO: 675965 - RNA, 19 nt, Artificial Sequence
  Description of Artificial Sequence: Synthetic oligonucleotide
aggacuagucaucucucua

SEQ ID NO: 675966 - RNA, 19 nt, Artificial Sequence
  Description of Artificial Sequence: Synthetic oligonucleotide
auugagccccaaaucagga

SEQ ID NO: 675967 - RNA, 19 nt, Artificial Sequence
  Description of Artificial Sequence: Synthetic oligonucleotide
gguaucucccacugaacca

SEQ ID NO: 675968 - RNA, 19 nt, Artificial Sequence
  Description of Artificial Sequence: Synthetic oligonucleotide
uaaugcccugaguucguuc

SEQ ID NO: 675969 - RNA, 19 nt, Artificial Sequence
  Description of Artificial Sequence: Synthetic oligonucleotide
cuaagacucgggcaguaaa

SEQ ID NO: 675970 - RNA, 19 nt, Artificial Sequence
  Description of Artificial Sequence: Synthetic oligonucleotide
uggggcgaucuuaaagaau

SEQ ID NO: 675971 - RNA, 19 nt, Artificial Sequence
  Description of Artificial Sequence: Synthetic oligonucleotide
cuuaagguaguagcagcca

SEQ ID NO: 675972 - RNA, 19 nt, Artificial Sequence
  Description of Artificial Sequence: Synthetic oligonucleotide
gggaacaucauaaggacua

SEQ ID NO: 675973 - RNA, 19 nt, Artificial Sequence
  Description of Artificial Sequence: Synthetic oligonucleotide
gugagaccugcagagaguc

SEQ ID NO: 675974 - RNA, 19 nt, Artificial Sequence
  Description of Artificial Sequence: Synthetic oligonucleotide
guguccuucggaaauugga

SEQ ID NO: 675975 - RNA, 19 nt, Artificial Sequence
  Description of Artificial Sequence: Synthetic oligonucleotide
gggacuaacuuaucucuuc

SEQ ID NO: 675976 - RNA, 19 nt, Artificial Sequence
  Description of Artificial Sequence: Synthetic oligonucleotide
ugacgaguauucucuccau

SEQ ID NO: 675977 - RNA, 19 nt, Artificial Sequence
  Description of Artificial Sequence: Synthetic oligonucleotide
gagucgacaugcaucuaca

SEQ ID NO: 675978 - RNA, 19 nt, Artificial Sequence
  Description of Artificial Sequence: Synthetic oligonucleotide
auaccacuguccaugguaa

SEQ ID NO: 675979 - RNA, 19 nt, Artificial Sequence
  Description of Artificial Sequence: Synthetic oligonucleotide
ggguagagcaaccccugag

SEQ ID NO: 675980 - RNA, 19 nt, Artificial Sequence
  Description of Artificial Sequence: Synthetic oligonucleotide
gaaccucuaacugcucauc

SEQ ID NO: 675981 - RNA, 19 nt, Artificial Sequence
  Description of Artificial Sequence: Synthetic oligonucleotide
ucuagacuguuuggucaug

SEQ ID NO: 675982 - RNA, 19 nt, Artificial Sequence
  Description of Artificial Sequence: Synthetic oligonucleotide
ggaaauuggauaaagucuu

SEQ ID NO: 675983 - RNA, 19 nt, Artificial Sequence
  Description of Artificial Sequence: Synthetic oligonucleotide
acgaaacgacaggaccuac

SEQ ID NO: 675984 - RNA, 19 nt, Artificial Sequence
  Description of Artificial Sequence: Synthetic oligonucleotide
gaaagaacgcaugcaccaa

SEQ ID NO: 675985 - RNA, 19 nt, Artificial Sequence
  Description of Artificial Sequence: Synthetic oligonucleotide
uugucaugguguguccuuc

SEQ ID NO: 675986 - RNA, 19 nt, Artificial Sequence
  Description of Artificial Sequence: Synthetic oligonucleotide
agccagcuauaauucugca

SEQ ID NO: 675987 - RNA, 19 nt, Artificial Sequence
  Description of Artificial Sequence: Synthetic oligonucleotide
agcagcugaucgucaguga

SEQ ID NO: 675988 - RNA, 19 nt, Artificial Sequence
  Description of Artificial Sequence: Synthetic oligonucleotide
ggacuagaaagaacgcaug

SEQ ID NO: 675989 - RNA, 19 nt, Artificial Sequence
  Description of Artificial Sequence: Synthetic oligonucleotide
cugagacuuugugacuuug

SEQ ID NO: 675990 - RNA, 19 nt, Artificial Sequence
  Description of Artificial Sequence: Synthetic oligonucleotide
augguguguccuucggaaa

SEQ ID NO: 675991 - RNA, 19 nt, Artificial Sequence
  Description of Artificial Sequence: Synthetic oligonucleotide
ccccaaaucaggacuaguc

SEQ ID NO: 675992 - RNA, 19 nt, Artificial Sequence
  Description of Artificial Sequence: Synthetic oligonucleotide
auggugacacaaggagguc

SEQ ID NO: 675993 - RNA, 19 nt, Artificial Sequence
  Description of Artificial Sequence: Synthetic oligonucleotide
acugaaccagggucucgcu

SEQ ID NO: 675994 - RNA, 19 nt, Artificial Sequence
  Description of Artificial Sequence: Synthetic oligonucleotide
ugcaugccaagaacugcuu

SEQ ID NO: 675995 - RNA, 19 nt, Artificial Sequence
  Description of Artificial Sequence: Synthetic oligonucleotide
ccaaaaggcguaugaucag

SEQ ID NO: 675996 - RNA, 19 nt, Artificial Sequence
  Description of Artificial Sequence: Synthetic oligonucleotide
uuagcaccugaaguaccaa

SEQ ID NO: 675997 - RNA, 19 nt, Artificial Sequence
  Description of Artificial Sequence: Synthetic oligonucleotide
agguaggucagcacuguau

SEQ ID NO: 675998 - RNA, 19 nt, Artificial Sequence
  Description of Artificial Sequence: Synthetic oligonucleotide
ggggcgaucuuaaagaaua

SEQ ID NO: 675999 - RNA, 19 nt, Artificial Sequence
  Description of Artificial Sequence: Synthetic oligonucleotide
guccuucggaaauuggaua

SEQ ID NO: 676000 - RNA, 19 nt, Artificial Sequence
  Description of Artificial Sequence: Synthetic oligonucleotide
cuagacuguuuggucauga

SEQ ID NO: 676001 - RNA, 19 nt, Artificial Sequence
  Description of Artificial Sequence: Synthetic oligonucleotide
ccacuuaagguaguagcag

SEQ ID NO: 676002 - RNA, 19 nt, Artificial Sequence
  Description of Artificial Sequence: Synthetic oligonucleotide
aacagccuuugaggaagga

SEQ ID NO: 676003 - RNA, 19 nt, Artificial Sequence
  Description of Artificial Sequence: Synthetic oligonucleotide
gaccuacauuacugacgag

SEQ ID NO: 676004 - RNA, 19 nt, Artificial Sequence
  Description of Artificial Sequence: Synthetic oligonucleotide
guguguccuucggaaauug

SEQ ID NO: 676005 - RNA, 19 nt, Artificial Sequence
  Description of Artificial Sequence: Synthetic oligonucleotide
caggacaaguuaggaaauc

SEQ ID NO: 676006 - RNA, 19 nt, Artificial Sequence
  Description of Artificial Sequence: Synthetic oligonucleotide
ugcuuguguucuugccagu

SEQ ID NO: 676007 - RNA, 19 nt, Artificial Sequence
  Description of Artificial Sequence: Synthetic oligonucleotide
gccaugaucauacuggguu

SEQ ID NO: 676008 - RNA, 19 nt, Artificial Sequence
  Description of Artificial Sequence: Synthetic oligonucleotide
guacgucuccacugucaug

SEQ ID NO: 676009 - RNA, 19 nt, Artificial Sequence
  Description of Artificial Sequence: Synthetic oligonucleotide
cauggucuggagguagguc

SEQ ID NO: 676010 - RNA, 19 nt, Artificial Sequence
  Description of Artificial Sequence: Synthetic oligonucleotide
gaccugcagagagucacca

SEQ ID NO: 676011 - RNA, 19 nt, Artificial Sequence
  Description of Artificial Sequence: Synthetic oligonucleotide
gaaacgccgggacuaacuu

SEQ ID NO: 676012 - RNA, 19 nt, Artificial Sequence
  Description of Artificial Sequence: Synthetic oligonucleotide
ggguuauuucuagucugag

SEQ ID NO: 676013 - RNA, 19 nt, Artificial Sequence
  Description of Artificial Sequence: Synthetic oligonucleotide
ggccuacuaccauuaaauc

SEQ ID NO: 676014 - RNA, 19 nt, Artificial Sequence
  Description of Artificial Sequence: Synthetic oligonucleotide
cauuguacgucuccacugu

SEQ ID NO: 676015 - RNA, 19 nt, Artificial Sequence
  Description of Artificial Sequence: Synthetic oligonucleotide
cuacuaccauuaaauccaa

SEQ ID NO: 676016 - RNA, 19 nt, Artificial Sequence
  Description of Artificial Sequence: Synthetic oligonucleotide
uugaugaauugagccccaa

SEQ ID NO: 676017 - RNA, 19 nt, Artificial Sequence
  Description of Artificial Sequence: Synthetic oligonucleotide
gccgggacuaacuuaucuc

SEQ ID NO: 676018 - RNA, 19 nt, Artificial Sequence
  Description of Artificial Sequence: Synthetic oligonucleotide
gaucgucagugaacugcug

SEQ ID NO: 676019 - RNA, 19 nt, Artificial Sequence
  Description of Artificial Sequence: Synthetic oligonucleotide
ccuacauuacugacgagua

SEQ ID NO: 676020 - RNA, 19 nt, Artificial Sequence
  Description of Artificial Sequence: Synthetic oligonucleotide
agcaaccccugagacauua

SEQ ID NO: 676021 - RNA, 19 nt, Artificial Sequence
  Description of Artificial Sequence: Synthetic oligonucleotide
cuggggcgaucuuaaagaa

SEQ ID NO: 676022 - RNA, 19 nt, Artificial Sequence
  Description of Artificial Sequence: Synthetic oligonucleotide
ggccaaacaccgaagucac

SEQ ID NO: 676023 - RNA, 19 nt, Artificial Sequence
  Description of Artificial Sequence: Synthetic oligonucleotide
ccaucugaugucuuuaacu

SEQ ID NO: 676024 - RNA, 19 nt, Artificial Sequence
  Description of Artificial Sequence: Synthetic oligonucleotide
uuaaugcccugaguucguu

SEQ ID NO: 676025 - RNA, 19 nt, Artificial Sequence
  Description of Artificial Sequence: Synthetic oligonucleotide
cggaaauuggauaaagucu

SEQ ID NO: 676026 - RNA, 19 nt, Artificial Sequence
  Description of Artificial Sequence: Synthetic oligonucleotide
ggacaagcagcugaucguc

SEQ ID NO: 676027 - RNA, 19 nt, Artificial Sequence
  Description of Artificial Sequence: Synthetic oligonucleotide
cuguuuggucaugaugcca

SEQ ID NO: 676028 - RNA, 19 nt, Artificial Sequence
  Description of Artificial Sequence: Synthetic oligonucleotide
gccaucugaugucuuuaac

SEQ ID NO: 676029 - RNA, 19 nt, Artificial Sequence
  Description of Artificial Sequence: Synthetic oligonucleotide
agcucaacagaggcugaau

SEQ ID NO: 676030 - RNA, 19 nt, Artificial Sequence
  Description of Artificial Sequence: Synthetic oligonucleotide
ggacuagucaucucucuau

SEQ ID NO: 676031 - RNA, 19 nt, Artificial Sequence
  Description of Artificial Sequence: Synthetic oligonucleotide
cucgggaauacaaggggau

SEQ ID NO: 676032 - RNA, 19 nt, Artificial Sequence
  Description of Artificial Sequence: Synthetic oligonucleotide
acagaaacgccgggacuaa

SEQ ID NO: 676033 - RNA, 19 nt, Artificial Sequence
  Description of Artificial Sequence: Synthetic oligonucleotide
gcaugccaagaacugcuuc

SEQ ID NO: 676034 - RNA, 19 nt, Artificial Sequence
  Description of Artificial Sequence: Synthetic oligonucleotide
cucgaaccucuaacugcuc

SEQ ID NO: 676035 - RNA, 19 nt, Artificial Sequence
  Description of Artificial Sequence: Synthetic oligonucleotide
guaggucagcacuguauau

SEQ ID NO: 676036 - RNA, 19 nt, Artificial Sequence
  Description of Artificial Sequence: Synthetic oligonucleotide
gccagcuauaauucugcaa

SEQ ID NO: 676037 - RNA, 19 nt, Artificial Sequence
  Description of Artificial Sequence: Synthetic oligonucleotide
gccauuucaauaugguuuu

SEQ ID NO: 676038 - RNA, 19 nt, Artificial Sequence
  Description of Artificial Sequence: Synthetic oligonucleotide
auuuuccacuggggcgauc

SEQ ID NO: 676039 - RNA, 19 nt, Artificial Sequence
  Description of Artificial Sequence: Synthetic oligonucleotide
caccuucucaaauguccaa

SEQ ID NO: 676040 - RNA, 19 nt, Artificial Sequence
  Description of Artificial Sequence: Synthetic oligonucleotide
gucauacgucucaaagaaa

SEQ ID NO: 676041 - RNA, 19 nt, Artificial Sequence
  Description of Artificial Sequence: Synthetic oligonucleotide
guugucaugguguguccuu

SEQ ID NO: 676042 - RNA, 19 nt, Artificial Sequence
  Description of Artificial Sequence: Synthetic oligonucleotide
caagcuuaggcugacucuu

SEQ ID NO: 676043 - RNA, 19 nt, Artificial Sequence
  Description of Artificial Sequence: Synthetic oligonucleotide
ccaaaucaggacuagucau

SEQ ID NO: 676044 - RNA, 19 nt, Artificial Sequence
  Description of Artificial Sequence: Synthetic oligonucleotide
augugcacugagauucaua

SEQ ID NO: 676045 - RNA, 19 nt, Artificial Sequence
  Description of Artificial Sequence: Synthetic oligonucleotide
cacucccuauucuuucucu

SEQ ID NO: 676046 - RNA, 19 nt, Artificial Sequence
  Description of Artificial Sequence: Synthetic oligonucleotide
accugaggaucuggaauuu

SEQ ID NO: 676047 - RNA, 19 nt, Artificial Sequence
  Description of Artificial Sequence: Synthetic oligonucleotide
auaccauggucuggaggua

SEQ ID NO: 676048 - RNA, 19 nt, Artificial Sequence
  Description of Artificial Sequence: Synthetic oligonucleotide
caugaucauacuggguuau

SEQ ID NO: 676049 - RNA, 19 nt, Artificial Sequence
  Description of Artificial Sequence: Synthetic oligonucleotide
cagagggcaggaggaguuc

SEQ ID NO: 676050 - RNA, 19 nt, Artificial Sequence
  Description of Artificial Sequence: Synthetic oligonucleotide
ccgggacuaacuuaucucu

SEQ ID NO: 676051 - RNA, 19 nt, Artificial Sequence
  Description of Artificial Sequence: Synthetic oligonucleotide
cagaccacuuaagguagua

SEQ ID NO: 676052 - RNA, 19 nt, Artificial Sequence
  Description of Artificial Sequence: Synthetic oligonucleotide
uagagucgacaugcaucua

SEQ ID NO: 676053 - RNA, 19 nt, Artificial Sequence
  Description of Artificial Sequence: Synthetic oligonucleotide
ccacaccggcauaaacaac

SEQ ID NO: 676054 - RNA, 19 nt, Artificial Sequence
  Description of Artificial Sequence: Synthetic oligonucleotide
cgaaacgacaggaccuaca

SEQ ID NO: 676055 - RNA, 19 nt, Artificial Sequence
  Description of Artificial Sequence: Synthetic oligonucleotide
gcguaugaucagccaucug

SEQ ID NO: 676056 - RNA, 19 nt, Artificial Sequence
  Description of Artificial Sequence: Synthetic oligonucleotide
gggcaguaaacucgggaau

SEQ ID NO: 676057 - RNA, 19 nt, Artificial Sequence
  Description of Artificial Sequence: Synthetic oligonucleotide
gcaaccccugagacauuag

SEQ ID NO: 676058 - RNA, 19 nt, Artificial Sequence
  Description of Artificial Sequence: Synthetic oligonucleotide
guaauagcucagggacucu

SEQ ID NO: 676059 - RNA, 19 nt, Artificial Sequence
  Description of Artificial Sequence: Synthetic oligonucleotide
ccauaauaugguucugaau

SEQ ID NO: 676060 - RNA, 19 nt, Artificial Sequence
  Description of Artificial Sequence: Synthetic oligonucleotide
gggaaacuucaggacaagu

SEQ ID NO: 676061 - RNA, 19 nt, Artificial Sequence
  Description of Artificial Sequence: Synthetic oligonucleotide
aucuccccuuaaagagaca

SEQ ID NO: 676062 - RNA, 19 nt, Artificial Sequence
  Description of Artificial Sequence: Synthetic oligonucleotide
cagcucaacagaggcugaa

SEQ ID NO: 676063 - RNA, 19 nt, Artificial Sequence
  Description of Artificial Sequence: Synthetic oligonucleotide
ccacugaaccagggucucg

SEQ ID NO: 676064 - RNA, 19 nt, Artificial Sequence
  Description of Artificial Sequence: Synthetic oligonucleotide
ggcguaugaucagccaucu

SEQ ID NO: 676065 - RNA, 19 nt, Artificial Sequence
  Description of Artificial Sequence: Synthetic oligonucleotide
cccagucauuguacgucuc

SEQ ID NO: 676066 - RNA, 19 nt, Artificial Sequence
  Description of Artificial Sequence: Synthetic oligonucleotide
ccccuuaaagagacagaaa

SEQ ID NO: 676067 - RNA, 19 nt, Artificial Sequence
  Description of Artificial Sequence: Synthetic oligonucleotide
gggucucgcuuucuuuucu

SEQ ID NO: 676068 - RNA, 19 nt, Artificial Sequence
  Description of Artificial Sequence: Synthetic oligonucleotide
acgcaugcaccaaguccaa

SEQ ID NO: 676069 - RNA, 19 nt, Artificial Sequence
  Description of Artificial Sequence: Synthetic oligonucleotide
cgaagacuaaugaggccaa

SEQ ID NO: 676070 - RNA, 19 nt, Artificial Sequence
  Description of Artificial Sequence: Synthetic oligonucleotide
gggcgaucuuaaagaauaa

SEQ ID NO: 676071 - RNA, 19 nt, Artificial Sequence
  Description of Artificial Sequence: Synthetic oligonucleotide
cauggcccauggccuacua

SEQ ID NO: 676072 - RNA, 19 nt, Artificial Sequence
  Description of Artificial Sequence: Synthetic oligonucleotide
cugcaacacaucuccccuu

SEQ ID NO: 676073 - RNA, 19 nt, Artificial Sequence
  Description of Artificial Sequence: Synthetic oligonucleotide
gggaauacaaggggauguu

SEQ ID NO: 676074 - RNA, 19 nt, Artificial Sequence
  Description of Artificial Sequence: Synthetic oligonucleotide
cagguuccccagucauugu

SEQ ID NO: 676075 - RNA, 19 nt, Artificial Sequence
  Description of Artificial Sequence: Synthetic oligonucleotide
gcuuguguucuugccaguu

SEQ ID NO: 676076 - RNA, 19 nt, Artificial Sequence
  Description of Artificial Sequence: Synthetic oligonucleotide
gugacacaaggaggucagu

SEQ ID NO: 676077 - RNA, 19 nt, Artificial Sequence
  Description of Artificial Sequence: Synthetic oligonucleotide
gggugaguuuggguuccaa

SEQ ID NO: 676078 - RNA, 19 nt, Artificial Sequence
  Description of Artificial Sequence: Synthetic oligonucleotide
gcauaccacuguccauggu

SEQ ID NO: 676079 - RNA, 19 nt, Artificial Sequence
  Description of Artificial Sequence: Synthetic oligonucleotide
cgaaccucuaacugcucau

SEQ ID NO: 676080 - RNA, 19 nt, Artificial Sequence
  Description of Artificial Sequence: Synthetic oligonucleotide
cgacaggaccuacauuacu

SEQ ID NO: 676081 - RNA, 19 nt, Artificial Sequence
  Description of Artificial Sequence: Synthetic oligonucleotide
gcagaccacuuaagguagu

SEQ ID NO: 676082 - RNA, 19 nt, Artificial Sequence
  Description of Artificial Sequence: Synthetic oligonucleotide
ccgucauauccucccugcu

SEQ ID NO: 676083 - RNA, 19 nt, Artificial Sequence
  Description of Artificial Sequence: Synthetic oligonucleotide
gcaugacguuugaccaacu

SEQ ID NO: 676084 - RNA, 19 nt, Artificial Sequence
  Description of Artificial Sequence: Synthetic oligonucleotide
cgccgggacuaacuuaucu

SEQ ID NO: 676085 - RNA, 19 nt, Artificial Sequence
  Description of Artificial Sequence: Synthetic oligonucleotide
gagcaaccccugagacauu

SEQ ID NO: 676086 - RNA, 19 nt, Artificial Sequence
  Description of Artificial Sequence: Synthetic oligonucleotide
aagacuacuaagucugugc

SEQ ID NO: 676087 - RNA, 19 nt, Artificial Sequence
  Description of Artificial Sequence: Synthetic oligonucleotide
  modified_base (7)..(7): a, c, u, g, unknown or other
gacauunuuucaaauaggg

SEQ ID NO: 676088 - RNA, 19 nt, Artificial Sequence
  Description of Artificial Sequence: Synthetic oligonucleotide
uuauuugucuaaguaaacg

SEQ ID NO: 676089 - RNA, 19 nt, Artificial Sequence
  Description of Artificial Sequence: Synthetic oligonucleotide
aggagaaccggauuggggc

SEQ ID NO: 676090 - RNA, 19 nt, Artificial Sequence
  Description of Artificial Sequence: Synthetic oligonucleotide
acuacuaagucugugcccc

SEQ ID NO: 676091 - RNA, 19 nt, Artificial Sequence
  Description of Artificial Sequence: Synthetic oligonucleotide
agacuacuaagucugugcc

SEQ ID NO: 676092 - RNA, 19 nt, Artificial Sequence
  Description of Artificial Sequence: Synthetic oligonucleotide
uuugucuaaguaaacguac

SEQ ID NO: 676093 - RNA, 19 nt, Artificial Sequence
  Description of Artificial Sequence: Synthetic oligonucleotide
gaagagguaguuugcaggg

SEQ ID NO: 676094 - RNA, 19 nt, Artificial Sequence
  Description of Artificial Sequence: Synthetic oligonucleotide
uauuugucuaaguaaacgu

SEQ ID NO: 676095 - RNA, 19 nt, Artificial Sequence
  Description of Artificial Sequence: Synthetic oligonucleotide
aauaaguuagaguggaauu

SEQ ID NO: 676096 - RNA, 19 nt, Artificial Sequence
  Description of Artificial Sequence: Synthetic oligonucleotide
aauuauuugucuaaguaaa

SEQ ID NO: 676097 - RNA, 19 nt, Artificial Sequence
  Description of Artificial Sequence: Synthetic oligonucleotide
uaaguuagaguggaauucg

SEQ ID NO: 676098 - RNA, 19 nt, Artificial Sequence
  Description of Artificial Sequence: Synthetic oligonucleotide
  modified_base (5)..(5): a, c, u, g, unknown or other
cauunuuucaaauagggcu

SEQ ID NO: 676099 - RNA, 19 nt, Artificial Sequence
  Description of Artificial Sequence: Synthetic oligonucleotide
auaaguuagaguggaauuc

SEQ ID NO: 676100 - RNA, 19 nt, Artificial Sequence
  Description of Artificial Sequence: Synthetic oligonucleotide
uccucaagagccccuaugg

SEQ ID NO: 676101 - RNA, 19 nt, Artificial Sequence
  Description of Artificial Sequence: Synthetic oligonucleotide
uugguuuguauacacguca

SEQ ID NO: 676102 - RNA, 19 nt, Artificial Sequence
  Description of Artificial Sequence: Synthetic oligonucleotide
ucaagagccccuaugggcc

SEQ ID NO: 676103 - RNA, 19 nt, Artificial Sequence
  Description of Artificial Sequence: Synthetic oligonucleotide
acuugaacggcuugcugcc

SEQ ID NO: 676104 - RNA, 19 nt, Artificial Sequence
  Description of Artificial Sequence: Synthetic oligonucleotide
ugagaagacuacuaagucu

SEQ ID NO: 676105 - RNA, 19 nt, Artificial Sequence
  Description of Artificial Sequence: Synthetic oligonucleotide
uuguauacacgucaaaaua

SEQ ID NO: 676106 - RNA, 19 nt, Artificial Sequence
  Description of Artificial Sequence: Synthetic oligonucleotide
  modified_base (4)..(4): a, c, u, g, unknown or other
auunuuucaaauagggcug

SEQ ID NO: 676107 - RNA, 19 nt, Artificial Sequence
  Description of Artificial Sequence: Synthetic oligonucleotide
cuuuucagaaagcugggag

SEQ ID NO: 676108 - RNA, 19 nt, Artificial Sequence
  Description of Artificial Sequence: Synthetic oligonucleotide
aaauaaguuagaguggaau

SEQ ID NO: 676109 - RNA, 19 nt, Artificial Sequence
  Description of Artificial Sequence: Synthetic oligonucleotide
  modified_base (9)..(9): a, c, u, g, unknown or other
gggacauunuuucaaauag

SEQ ID NO: 676110 - RNA, 19 nt, Artificial Sequence
  Description of Artificial Sequence: Synthetic oligonucleotide
cuuugagaagacuacuaag

SEQ ID NO: 676111 - RNA, 19 nt, Artificial Sequence
  Description of Artificial Sequence: Synthetic oligonucleotide
uuuaugagcaugguacucc

SEQ ID NO: 676112 - RNA, 19 nt, Artificial Sequence
  Description of Artificial Sequence: Synthetic oligonucleotide
ggaaucgcuaaacaguugg

SEQ ID NO: 676113 - RNA, 19 nt, Artificial Sequence
  Description of Artificial Sequence: Synthetic oligonucleotide
uguacaugcgguugaagga

SEQ ID NO: 676114 - RNA, 19 nt, Artificial Sequence
  Description of Artificial Sequence: Synthetic oligonucleotide
augacaggcaccugggagg

SEQ ID NO: 676115 - RNA, 19 nt, Artificial Sequence
  Description of Artificial Sequence: Synthetic oligonucleotide
uguggaucagcauguggcg

SEQ ID NO: 676116 - RNA, 19 nt, Artificial Sequence
  Description of Artificial Sequence: Synthetic oligonucleotide
ugugccaauggcaggcugg

SEQ ID NO: 676117 - RNA, 19 nt, Artificial Sequence
  Description of Artificial Sequence: Synthetic oligonucleotide
uaaguaaacguacucuuuu

SEQ ID NO: 676118 - RNA, 19 nt, Artificial Sequence
  Description of Artificial Sequence: Synthetic oligonucleotide
  modified_base (3)..(3): a, c, u, g, unknown or other
uunuuucaaauagggcugg

SEQ ID NO: 676119 - RNA, 19 nt, Artificial Sequence
  Description of Artificial Sequence: Synthetic oligonucleotide
cacuugaacuccuucacgc

SEQ ID NO: 676120 - RNA, 19 nt, Artificial Sequence
  Description of Artificial Sequence: Synthetic oligonucleotide
uccuucacgcccuuguggg

SEQ ID NO: 676121 - RNA, 19 nt, Artificial Sequence
  Description of Artificial Sequence: Synthetic oligonucleotide
cauuguguccaucugacuc

SEQ ID NO: 676122 - RNA, 19 nt, Artificial Sequence
  Description of Artificial Sequence: Synthetic oligonucleotide
uauacacgucaaaauaagu

SEQ ID NO: 676123 - RNA, 19 nt, Artificial Sequence
  Description of Artificial Sequence: Synthetic oligonucleotide
cucgacacagacauggcag

SEQ ID NO: 676124 - RNA, 19 nt, Artificial Sequence
  Description of Artificial Sequence: Synthetic oligonucleotide
guuuccaagaccaaggcca

SEQ ID NO: 676125 - RNA, 19 nt, Artificial Sequence
  Description of Artificial Sequence: Synthetic oligonucleotide
aggagaaaugucuuguaca

SEQ ID NO: 676126 - RNA, 19 nt, Artificial Sequence
  Description of Artificial Sequence: Synthetic oligonucleotide
aacguacucuuuuaaacua

SEQ ID NO: 676127 - RNA, 19 nt, Artificial Sequence
  Description of Artificial Sequence: Synthetic oligonucleotide
cucaagagccccuaugggc

SEQ ID NO: 676128 - RNA, 19 nt, Artificial Sequence
  Description of Artificial Sequence: Synthetic oligonucleotide
aggcugauguccaugacgc

SEQ ID NO: 676129 - RNA, 19 nt, Artificial Sequence
  Description of Artificial Sequence: Synthetic oligonucleotide
gacaagaccuggcucaagc

SEQ ID NO: 676130 - RNA, 19 nt, Artificial Sequence
  Description of Artificial Sequence: Synthetic oligonucleotide
guccuuaaaggccagaguc

SEQ ID NO: 676131 - RNA, 19 nt, Artificial Sequence
  Description of Artificial Sequence: Synthetic oligonucleotide
cuugaggugauggaucugg

SEQ ID NO: 676132 - RNA, 19 nt, Artificial Sequence
  Description of Artificial Sequence: Synthetic oligonucleotide
ucgcuaaacaguugguuug

SEQ ID NO: 676133 - RNA, 19 nt, Artificial Sequence
  Description of Artificial Sequence: Synthetic oligonucleotide
cuaauuauuugucuaagua

SEQ ID NO: 676134 - RNA, 19 nt, Artificial Sequence
  Description of Artificial Sequence: Synthetic oligonucleotide
uggcuugggcacauuaggg

SEQ ID NO: 676135 - RNA, 19 nt, Artificial Sequence
  Description of Artificial Sequence: Synthetic oligonucleotide
ggacuugucacacucgagg

SEQ ID NO: 676136 - RNA, 19 nt, Artificial Sequence
  Description of Artificial Sequence: Synthetic oligonucleotide
cuagcauuucccuacccac

SEQ ID NO: 676137 - RNA, 19 nt, Artificial Sequence
  Description of Artificial Sequence: Synthetic oligonucleotide
ugacucccaguuuugaaca

SEQ ID NO: 676138 - RNA, 19 nt, Artificial Sequence
  Description of Artificial Sequence: Synthetic oligonucleotide
agcgcagauguccuuaaag

SEQ ID NO: 676139 - RNA, 19 nt, Artificial Sequence
  Description of Artificial Sequence: Synthetic oligonucleotide
uaggccugcgcccagcucc

SEQ ID NO: 676140 - RNA, 19 nt, Artificial Sequence
  Description of Artificial Sequence: Synthetic oligonucleotide
ugucuaaguaaacguacuc

SEQ ID NO: 676141 - RNA, 19 nt, Artificial Sequence
  Description of Artificial Sequence: Synthetic oligonucleotide
gggagaaagucauuguggg

SEQ ID NO: 676142 - RNA, 19 nt, Artificial Sequence
  Description of Artificial Sequence: Synthetic oligonucleotide
cuaaucacugccaccugag

SEQ ID NO: 676143 - RNA, 19 nt, Artificial Sequence
  Description of Artificial Sequence: Synthetic oligonucleotide
  modified_base (10)..(10): a, c, u, g, unknown or other
agggacauunuuucaaaua

SEQ ID NO: 676144 - RNA, 19 nt, Artificial Sequence
  Description of Artificial Sequence: Synthetic oligonucleotide
ucgaggcacugguagaggg

SEQ ID NO: 676145 - RNA, 19 nt, Artificial Sequence
  Description of Artificial Sequence: Synthetic oligonucleotide
gaauggagacaagaccugg

SEQ ID NO: 676146 - RNA, 19 nt, Artificial Sequence
  Description of Artificial Sequence: Synthetic oligonucleotide
acuagcauuucccuaccca

SEQ ID NO: 676147 - RNA, 19 nt, Artificial Sequence
  Description of Artificial Sequence: Synthetic oligonucleotide
agggcgucugcacaagugg

SEQ ID NO: 676148 - RNA, 19 nt, Artificial Sequence
  Description of Artificial Sequence: Synthetic oligonucleotide
  modified_base (12)..(12): a, c, u, g, unknown or other
uuagggacauunuuucaaa

SEQ ID NO: 676149 - RNA, 19 nt, Artificial Sequence
  Description of Artificial Sequence: Synthetic oligonucleotide
uggugcuugagcauauggu

SEQ ID NO: 676150 - RNA, 19 nt, Artificial Sequence
  Description of Artificial Sequence: Synthetic oligonucleotide
cuugaagcagauguggcac

SEQ ID NO: 676151 - RNA, 19 nt, Artificial Sequence
  Description of Artificial Sequence: Synthetic oligonucleotide
uccucuaauuauuugucua

SEQ ID NO: 676152 - RNA, 19 nt, Artificial Sequence
  Description of Artificial Sequence: Synthetic oligonucleotide
aaggagaaccggauugggg

SEQ ID NO: 676153 - RNA, 19 nt, Artificial Sequence
  Description of Artificial Sequence: Synthetic oligonucleotide
aaguuagaguggaauucgg

SEQ ID NO: 676154 - RNA, 19 nt, Artificial Sequence
  Description of Artificial Sequence: Synthetic oligonucleotide
aagucuaggccgcacucga

SEQ ID NO: 676155 - RNA, 19 nt, Artificial Sequence
  Description of Artificial Sequence: Synthetic oligonucleotide
gacaccuaaucacugccac

SEQ ID NO: 676156 - RNA, 19 nt, Artificial Sequence
  Description of Artificial Sequence: Synthetic oligonucleotide
ugacuggucugggugaagg

SEQ ID NO: 676157 - RNA, 19 nt, Artificial Sequence
  Description of Artificial Sequence: Synthetic oligonucleotide
gacuacuaagucugugccc

SEQ ID NO: 676158 - RNA, 19 nt, Artificial Sequence
  Description of Artificial Sequence: Synthetic oligonucleotide
agagguaguuugcaggggu

SEQ ID NO: 676159 - RNA, 19 nt, Artificial Sequence
  Description of Artificial Sequence: Synthetic oligonucleotide
ugcaggagcgcagaugucc

SEQ ID NO: 676160 - RNA, 19 nt, Artificial Sequence
  Description of Artificial Sequence: Synthetic oligonucleotide
gucaccccuuuucagaaag

SEQ ID NO: 676161 - RNA, 19 nt, Artificial Sequence
  Description of Artificial Sequence: Synthetic oligonucleotide
aucgcuaaacaguugguuu

SEQ ID NO: 676162 - RNA, 19 nt, Artificial Sequence
  Description of Artificial Sequence: Synthetic oligonucleotide
gaugccuaggccugcgccc

SEQ ID NO: 676163 - RNA, 19 nt, Artificial Sequence
  Description of Artificial Sequence: Synthetic oligonucleotide
uuaugagcaugguacuccu

SEQ ID NO: 676164 - RNA, 19 nt, Artificial Sequence
  Description of Artificial Sequence: Synthetic oligonucleotide
uggaauucggccaggguuu

SEQ ID NO: 676165 - RNA, 19 nt, Artificial Sequence
  Description of Artificial Sequence: Synthetic oligonucleotide
ggcucaagcauucucuucc

SEQ ID NO: 676166 - RNA, 19 nt, Artificial Sequence
  Description of Artificial Sequence: Synthetic oligonucleotide
gauggaucuggcugaacuc

SEQ ID NO: 676167 - RNA, 19 nt, Artificial Sequence
  Description of Artificial Sequence: Synthetic oligonucleotide
ugcuugaggugauggaucu

SEQ ID NO: 676168 - RNA, 19 nt, Artificial Sequence
  Description of Artificial Sequence: Synthetic oligonucleotide
uggcguuugaggugacugg

SEQ ID NO: 676169 - RNA, 19 nt, Artificial Sequence
  Description of Artificial Sequence: Synthetic oligonucleotide
cucuaauuauuugucuaag

SEQ ID NO: 676170 - RNA, 19 nt, Artificial Sequence
  Description of Artificial Sequence: Synthetic oligonucleotide
uagggcuugaccucagagu

SEQ ID NO: 676171 - RNA, 19 nt, Artificial Sequence
  Description of Artificial Sequence: Synthetic oligonucleotide
gagcaugguacuccucagg

SEQ ID NO: 676172 - RNA, 19 nt, Artificial Sequence
  Description of Artificial Sequence: Synthetic oligonucleotide
guacucuuuuaaacuaagg

SEQ ID NO: 676173 - RNA, 19 nt, Artificial Sequence
  Description of Artificial Sequence: Synthetic oligonucleotide
uugagcgucugcuucugca

SEQ ID NO: 676174 - RNA, 19 nt, Artificial Sequence
  Description of Artificial Sequence: Synthetic oligonucleotide
uguguuguaccuuccucuc

SEQ ID NO: 676175 - RNA, 19 nt, Artificial Sequence
  Description of Artificial Sequence: Synthetic oligonucleotide
acuugggucauugugucca

SEQ ID NO: 676176 - RNA, 19 nt, Artificial Sequence
  Description of Artificial Sequence: Synthetic oligonucleotide
  modified_base (2)..(2): a, c, u, g, unknown or other
unuuucaaauagggcuggg

SEQ ID NO: 676177 - RNA, 19 nt, Artificial Sequence
  Description of Artificial Sequence: Synthetic oligonucleotide
auacacgucaaaauaaguu

SEQ ID NO: 676178 - RNA, 19 nt, Artificial Sequence
  Description of Artificial Sequence: Synthetic oligonucleotide
gaggcaaugagagacccca

SEQ ID NO: 676179 - RNA, 19 nt, Artificial Sequence
  Description of Artificial Sequence: Synthetic oligonucleotide
gcgcagauguccuuaaagg

SEQ ID NO: 676180 - RNA, 19 nt, Artificial Sequence
  Description of Artificial Sequence: Synthetic oligonucleotide
agucauugugggaagaggu

SEQ ID NO: 676181 - RNA, 19 nt, Artificial Sequence
  Description of Artificial Sequence: Synthetic oligonucleotide
ucgacacagacauggcagc

SEQ ID NO: 676182 - RNA, 19 nt, Artificial Sequence
  Description of Artificial Sequence: Synthetic oligonucleotide
  modified_base (14)..(14): a, c, u, g, unknown or other
cauuagggacauunuuuca

SEQ ID NO: 676183 - RNA, 19 nt, Artificial Sequence
  Description of Artificial Sequence: Synthetic oligonucleotide
cuguuuccaagaccaaggc

SEQ ID NO: 676184 - RNA, 19 nt, Artificial Sequence
  Description of Artificial Sequence: Synthetic oligonucleotide
gaggaggaggaggaggagg

SEQ ID NO: 676185 - RNA, 19 nt, Artificial Sequence
  Description of Artificial Sequence: Synthetic oligonucleotide
  modified_base (13)..(13): a, c, u, g, unknown or other
auuagggacauunuuucaa

SEQ ID NO: 676186 - RNA, 19 nt, Artificial Sequence
  Description of Artificial Sequence: Synthetic oligonucleotide
guaaacguacucuuuuaaa

SEQ ID NO: 676187 - RNA, 19 nt, Artificial Sequence
  Description of Artificial Sequence: Synthetic oligonucleotide
uguaccuuccucucugcau

SEQ ID NO: 676188 - RNA, 19 nt, Artificial Sequence
  Description of Artificial Sequence: Synthetic oligonucleotide
aaucgcuaaacaguugguu

SEQ ID NO: 676189 - RNA, 19 nt, Artificial Sequence
  Description of Artificial Sequence: Synthetic oligonucleotide
ugguuuguauacacgucaa

SEQ ID NO: 676190 - RNA, 19 nt, Artificial Sequence
  Description of Artificial Sequence: Synthetic oligonucleotide
  modified_base (2)..(2): a, c, u, g, unknown or other
cncaaagggccgcacauuc

SEQ ID NO: 676191 - RNA, 19 nt, Artificial Sequence
  Description of Artificial Sequence: Synthetic oligonucleotide
gaagacuacuaagucugug

SEQ ID NO: 676192 - RNA, 19 nt, Artificial Sequence
  Description of Artificial Sequence: Synthetic oligonucleotide
uggaucagcauguggcgcu

SEQ ID NO: 676193 - RNA, 19 nt, Artificial Sequence
  Description of Artificial Sequence: Synthetic oligonucleotide
  modified_base (9)..(9): a, c, u, g, unknown or other
cugugcacncaaagggccg

SEQ ID NO: 676194 - RNA, 19 nt, Artificial Sequence
  Description of Artificial Sequence: Synthetic oligonucleotide
  modified_base (8)..(8): a, c, u, g, unknown or other
ggacauunuuucaaauagg

SEQ ID NO: 676195 - RNA, 19 nt, Artificial Sequence
  Description of Artificial Sequence: Synthetic oligonucleotide
gagcgucugcuucugcacg

SEQ ID NO: 676196 - RNA, 19 nt, Artificial Sequence
  Description of Artificial Sequence: Synthetic oligonucleotide
guacagugacaccuaauca

SEQ ID NO: 676197 - RNA, 19 nt, Artificial Sequence
  Description of Artificial Sequence: Synthetic oligonucleotide
gcacucgacacagacaugg

SEQ ID NO: 676198 - RNA, 19 nt, Artificial Sequence
  Description of Artificial Sequence: Synthetic oligonucleotide
uaccaggggagaaagucau

SEQ ID NO: 676199 - RNA, 19 nt, Artificial Sequence
  Description of Artificial Sequence: Synthetic oligonucleotide
ugcuuuaccucgugggccu

SEQ ID NO: 676200 - RNA, 19 nt, Artificial Sequence
  Description of Artificial Sequence: Synthetic oligonucleotide
uagggcgucugcacaagug

SEQ ID NO: 676201 - RNA, 19 nt, Artificial Sequence
  Description of Artificial Sequence: Synthetic oligonucleotide
cuuaagcucgcugggguag

SEQ ID NO: 676202 - RNA, 19 nt, Artificial Sequence
  Description of Artificial Sequence: Synthetic oligonucleotide
ucacuagcauuucccuacc

SEQ ID NO: 676203 - RNA, 19 nt, Artificial Sequence
  Description of Artificial Sequence: Synthetic oligonucleotide
acucgacacagacauggca

SEQ ID NO: 676204 - RNA, 19 nt, Artificial Sequence
  Description of Artificial Sequence: Synthetic oligonucleotide
ugggguaggcaaagccacg

SEQ ID NO: 676205 - RNA, 19 nt, Artificial Sequence
  Description of Artificial Sequence: Synthetic oligonucleotide
aaccacacuugggucauug

SEQ ID NO: 676206 - RNA, 19 nt, Artificial Sequence
  Description of Artificial Sequence: Synthetic oligonucleotide
uugagcauaugguuuugua

SEQ ID NO: 676207 - RNA, 19 nt, Artificial Sequence
  Description of Artificial Sequence: Synthetic oligonucleotide
uucgguaguggaaggacuu

SEQ ID NO: 676208 - RNA, 19 nt, Artificial Sequence
  Description of Artificial Sequence: Synthetic oligonucleotide
auaugguuuuguagcuggc

SEQ ID NO: 676209 - RNA, 19 nt, Artificial Sequence
  Description of Artificial Sequence: Synthetic oligonucleotide
cuggcuucgguaguggaag

SEQ ID NO: 676210 - RNA, 19 nt, Artificial Sequence
  Description of Artificial Sequence: Synthetic oligonucleotide
uggaaucgcuaaacaguug

SEQ ID NO: 676211 - RNA, 19 nt, Artificial Sequence
  Description of Artificial Sequence: Synthetic oligonucleotide
cuccaugccgcauucugug

SEQ ID NO: 676212 - RNA, 19 nt, Artificial Sequence
  Description of Artificial Sequence: Synthetic oligonucleotide
aaagggccgcacauucugg

SEQ ID NO: 676213 - RNA, 19 nt, Artificial Sequence
  Description of Artificial Sequence: Synthetic oligonucleotide
aagggccgcacauucuggu

SEQ ID NO: 676214 - RNA, 19 nt, Artificial Sequence
  Description of Artificial Sequence: Synthetic oligonucleotide
uugaggugauggaucuggc

SEQ ID NO: 676215 - RNA, 19 nt, Artificial Sequence
  Description of Artificial Sequence: Synthetic oligonucleotide
ugagcgucugcuucugcac

SEQ ID NO: 676216 - RNA, 19 nt, Artificial Sequence
  Description of Artificial Sequence: Synthetic oligonucleotide
ugcuugagcauaugguuuu

SEQ ID NO: 676217 - RNA, 19 nt, Artificial Sequence
  Description of Artificial Sequence: Synthetic oligonucleotide
acaagaccuggcucaagca

SEQ ID NO: 676218 - RNA, 19 nt, Artificial Sequence
  Description of Artificial Sequence: Synthetic oligonucleotide
ucuaggccgcacucgacac

SEQ ID NO: 676219 - RNA, 19 nt, Artificial Sequence
  Description of Artificial Sequence: Synthetic oligonucleotide
uacaugcgguugaaggacu

SEQ ID NO: 676220 - RNA, 19 nt, Artificial Sequence
  Description of Artificial Sequence: Synthetic oligonucleotide
uguagcuggcuucgguagu

SEQ ID NO: 676221 - RNA, 19 nt, Artificial Sequence
  Description of Artificial Sequence: Synthetic oligonucleotide
guacaugcgguugaaggac

SEQ ID NO: 676222 - RNA, 19 nt, Artificial Sequence
  Description of Artificial Sequence: Synthetic oligonucleotide
cugagucaccccuuuucag

SEQ ID NO: 676223 - RNA, 19 nt, Artificial Sequence
  Description of Artificial Sequence: Synthetic oligonucleotide
  modified_base (11)..(11): a, c, u, g, unknown or other
uagggacauunuuucaaau

SEQ ID NO: 676224 - RNA, 19 nt, Artificial Sequence
  Description of Artificial Sequence: Synthetic oligonucleotide
uuaagcucgcugggguagg

SEQ ID NO: 676225 - RNA, 19 nt, Artificial Sequence
  Description of Artificial Sequence: Synthetic oligonucleotide
gagucggugcagaauggag

SEQ ID NO: 676226 - RNA, 19 nt, Artificial Sequence
  Description of Artificial Sequence: Synthetic oligonucleotide
cuuuaugagcaugguacuc

SEQ ID NO: 676227 - RNA, 19 nt, Artificial Sequence
  Description of Artificial Sequence: Synthetic oligonucleotide
  modified_base (8)..(8): a, c, u, g, unknown or other
ugugcacncaaagggccgc

SEQ ID NO: 676228 - RNA, 19 nt, Artificial Sequence
  Description of Artificial Sequence: Synthetic oligonucleotide
acucgaggcacugguagag

SEQ ID NO: 676229 - RNA, 19 nt, Artificial Sequence
  Description of Artificial Sequence: Synthetic oligonucleotide
caaggagaaccggauuggg

SEQ ID NO: 676230 - RNA, 19 nt, Artificial Sequence
  Description of Artificial Sequence: Synthetic oligonucleotide
cagagucggugcagaaugg

SEQ ID NO: 676231 - RNA, 19 nt, Artificial Sequence
  Description of Artificial Sequence: Synthetic oligonucleotide
agaauggagacaagaccug

SEQ ID NO: 676232 - RNA, 19 nt, Artificial Sequence
  Description of Artificial Sequence: Synthetic oligonucleotide
gguaaggguggcucugccg

SEQ ID NO: 676233 - RNA, 19 nt, Artificial Sequence
  Description of Artificial Sequence: Synthetic oligonucleotide
ugguagggccgcacacugg

SEQ ID NO: 676234 - RNA, 19 nt, Artificial Sequence
  Description of Artificial Sequence: Synthetic oligonucleotide
caaguggaaucgcuaaaca

SEQ ID NO: 676235 - RNA, 19 nt, Artificial Sequence
  Description of Artificial Sequence: Synthetic oligonucleotide
ugaccagugcaggagcgca

SEQ ID NO: 676236 - RNA, 19 nt, Artificial Sequence
  Description of Artificial Sequence: Synthetic oligonucleotide
gagaggaggaggaggagga

SEQ ID NO: 676237 - RNA, 19 nt, Artificial Sequence
  Description of Artificial Sequence: Synthetic oligonucleotide
cugguuaccuuucccucac

SEQ ID NO: 676238 - RNA, 19 nt, Artificial Sequence
  Description of Artificial Sequence: Synthetic oligonucleotide
ggagaggaggaggaggagg

SEQ ID NO: 676239 - RNA, 19 nt, Artificial Sequence
  Description of Artificial Sequence: Synthetic oligonucleotide
aguggaauucggccagggu

SEQ ID NO: 676240 - RNA, 19 nt, Artificial Sequence
  Description of Artificial Sequence: Synthetic oligonucleotide
gguuaccuuucccucacug

SEQ ID NO: 676241 - RNA, 19 nt, Artificial Sequence
  Description of Artificial Sequence: Synthetic oligonucleotide
gguaccaggggagaaaguc

SEQ ID NO: 676242 - RNA, 19 nt, Artificial Sequence
  Description of Artificial Sequence: Synthetic oligonucleotide
gugcuuuaccucgugggcc

SEQ ID NO: 676243 - RNA, 19 nt, Artificial Sequence
  Description of Artificial Sequence: Synthetic oligonucleotide
guugggucagaguggagaa

SEQ ID NO: 676244 - RNA, 19 nt, Artificial Sequence
  Description of Artificial Sequence: Synthetic oligonucleotide
cacgucaaaauaaguuaga

SEQ ID NO: 676245 - RNA, 19 nt, Artificial Sequence
  Description of Artificial Sequence: Synthetic oligonucleotide
uucccuugagguugaacuu

SEQ ID NO: 676246 - RNA, 19 nt, Artificial Sequence
  Description of Artificial Sequence: Synthetic oligonucleotide
uccaugccgcauucugugc

SEQ ID NO: 676247 - RNA, 19 nt, Artificial Sequence
  Description of Artificial Sequence: Synthetic oligonucleotide
gucuaaguaaacguacucu

SEQ ID NO: 676248 - RNA, 19 nt, Artificial Sequence
  Description of Artificial Sequence: Synthetic oligonucleotide
gauuggggccuccugguua

SEQ ID NO: 676249 - RNA, 19 nt, Artificial Sequence
  Description of Artificial Sequence: Synthetic oligonucleotide
auggcagcggccacucucg

SEQ ID NO: 676250 - RNA, 19 nt, Artificial Sequence
  Description of Artificial Sequence: Synthetic oligonucleotide
cacacuugggucauugugu

SEQ ID NO: 676251 - RNA, 19 nt, Artificial Sequence
  Description of Artificial Sequence: Synthetic oligonucleotide
ggagaaccggauuggggcc

SEQ ID NO: 676252 - RNA, 19 nt, Artificial Sequence
  Description of Artificial Sequence: Synthetic oligonucleotide
uaugagcaugguacuccuc

SEQ ID NO: 676253 - RNA, 19 nt, Artificial Sequence
  Description of Artificial Sequence: Synthetic oligonucleotide
uccccggcucuccuacagg

SEQ ID NO: 676254 - RNA, 19 nt, Artificial Sequence
  Description of Artificial Sequence: Synthetic oligonucleotide
cuucacgcccuugugggug

SEQ ID NO: 676255 - RNA, 19 nt, Artificial Sequence
  Description of Artificial Sequence: Synthetic oligonucleotide
gucuaggccgcacucgaca

SEQ ID NO: 676256 - RNA, 19 nt, Artificial Sequence
  Description of Artificial Sequence: Synthetic oligonucleotide
cgcagauguccuuaaaggc

SEQ ID NO: 676257 - RNA, 19 nt, Artificial Sequence
  Description of Artificial Sequence: Synthetic oligonucleotide
guggaauucggccaggguu

SEQ ID NO: 676258 - RNA, 19 nt, Artificial Sequence
  Description of Artificial Sequence: Synthetic oligonucleotide
cacucgacacagacauggc

SEQ ID NO: 676259 - RNA, 19 nt, Artificial Sequence
  Description of Artificial Sequence: Synthetic oligonucleotide
guggagaagucuaggccgc

SEQ ID NO: 676260 - RNA, 19 nt, Artificial Sequence
  Description of Artificial Sequence: Synthetic oligonucleotide
ucgguaguggaaggacuug

SEQ ID NO: 676261 - RNA, 19 nt, Artificial Sequence
  Description of Artificial Sequence: Synthetic oligonucleotide
aggaggaggaggaggaggu

SEQ ID NO: 676262 - RNA, 19 nt, Artificial Sequence
  Description of Artificial Sequence: Synthetic oligonucleotide
guagcuggcuucgguagug

SEQ ID NO: 676263 - RNA, 19 nt, Artificial Sequence
  Description of Artificial Sequence: Synthetic oligonucleotide
uggcucaagcauucucuuc

SEQ ID NO: 676264 - RNA, 19 nt, Artificial Sequence
  Description of Artificial Sequence: Synthetic oligonucleotide
uucacgcccuuguggguga

SEQ ID NO: 676265 - RNA, 19 nt, Artificial Sequence
  Description of Artificial Sequence: Synthetic oligonucleotide
gagagaccccacccaggcc

SEQ ID NO: 676266 - RNA, 19 nt, Artificial Sequence
  Description of Artificial Sequence: Synthetic oligonucleotide
cacuagcauuucccuaccc

SEQ ID NO: 676267 - RNA, 19 nt, Artificial Sequence
  Description of Artificial Sequence: Synthetic oligonucleotide
agguaguuugcagggguga

SEQ ID NO: 676268 - RNA, 19 nt, Artificial Sequence
  Description of Artificial Sequence: Synthetic oligonucleotide
uuucugagucaccccuuuu

SEQ ID NO: 676269 - RNA, 19 nt, Artificial Sequence
  Description of Artificial Sequence: Synthetic oligonucleotide
ggaugccuaggccugcgcc

SEQ ID NO: 676270 - RNA, 19 nt, Artificial Sequence
  Description of Artificial Sequence: Synthetic oligonucleotide
accuaaucacugccaccug

SEQ ID NO: 676271 - RNA, 19 nt, Artificial Sequence
  Description of Artificial Sequence: Synthetic oligonucleotide
cguacucuuuuaaacuaag

SEQ ID NO: 676272 - RNA, 19 nt, Artificial Sequence
  Description of Artificial Sequence: Synthetic oligonucleotide
ugggaugccuaggccugcg

SEQ ID NO: 676273 - RNA, 19 nt, Artificial Sequence
  Description of Artificial Sequence: Synthetic oligonucleotide
agggccgcacauucuggug

SEQ ID NO: 676274 - RNA, 19 nt, Artificial Sequence
  Description of Artificial Sequence: Synthetic oligonucleotide
ucccucacugggaugccua

SEQ ID NO: 676275 - RNA, 19 nt, Artificial Sequence
  Description of Artificial Sequence: Synthetic oligonucleotide
guagaaggcagagugcccu

SEQ ID NO: 676276 - RNA, 19 nt, Artificial Sequence
  Description of Artificial Sequence: Synthetic oligonucleotide
gggaaaccacacuuggguc

SEQ ID NO: 676277 - RNA, 19 nt, Artificial Sequence
  Description of Artificial Sequence: Synthetic oligonucleotide
ggagaaagucauuguggga

SEQ ID NO: 676278 - RNA, 19 nt, Artificial Sequence
  Description of Artificial Sequence: Synthetic oligonucleotide
cuuguacagugacaccuaa

SEQ ID NO: 676279 - RNA, 19 nt, Artificial Sequence
  Description of Artificial Sequence: Synthetic oligonucleotide
cucgcugggguaggcaaag

SEQ ID NO: 676280 - RNA, 19 nt, Artificial Sequence
  Description of Artificial Sequence: Synthetic oligonucleotide
uuuaccucgugggccuuaa

SEQ ID NO: 676281 - RNA, 19 nt, Artificial Sequence
  Description of Artificial Sequence: Synthetic oligonucleotide
cuaaguaaacguacucuuu

SEQ ID NO: 676282 - RNA, 19 nt, Artificial Sequence
  Description of Artificial Sequence: Synthetic oligonucleotide
gggccgcacauucuggugc

SEQ ID NO: 676283 - RNA, 19 nt, Artificial Sequence
  Description of Artificial Sequence: Synthetic oligonucleotide
ccaaggagaaccggauugg

SEQ ID NO: 676284 - RNA, 19 nt, Artificial Sequence
  Description of Artificial Sequence: Synthetic oligonucleotide
acgggccgcaugcaugucu

SEQ ID NO: 676285 - RNA, 19 nt, Artificial Sequence
  Description of Artificial Sequence: Synthetic oligonucleotide
acguacucuuuuaaacuaa

SEQ ID NO: 676286 - RNA, 19 nt, Artificial Sequence
  Description of Artificial Sequence: Synthetic oligonucleotide
gggccuuaagcucgcuggg

SEQ ID NO: 676287 - RNA, 19 nt, Artificial Sequence
  Description of Artificial Sequence: Synthetic oligonucleotide
caccuaaucacugccaccu

SEQ ID NO: 676288 - RNA, 19 nt, Artificial Sequence
  Description of Artificial Sequence: Synthetic oligonucleotide
agccccuaugggccugagg

SEQ ID NO: 676289 - RNA, 19 nt, Artificial Sequence
  Description of Artificial Sequence: Synthetic oligonucleotide
gucugugcaggguuggagu

SEQ ID NO: 676290 - RNA, 19 nt, Artificial Sequence
  Description of Artificial Sequence: Synthetic oligonucleotide
agucuaggccgcacucgac

SEQ ID NO: 676291 - RNA, 19 nt, Artificial Sequence
  Description of Artificial Sequence: Synthetic oligonucleotide
ucgugggccuuaagcucgc

SEQ ID NO: 676292 - RNA, 19 nt, Artificial Sequence
  Description of Artificial Sequence: Synthetic oligonucleotide
agaggaggaggaggaggag

SEQ ID NO: 676293 - RNA, 19 nt, Artificial Sequence
  Description of Artificial Sequence: Synthetic oligonucleotide
ggugcuugagcauaugguu

SEQ ID NO: 676294 - RNA, 19 nt, Artificial Sequence
  Description of Artificial Sequence: Synthetic oligonucleotide
agcuggcuucgguagugga

SEQ ID NO: 676295 - RNA, 19 nt, Artificial Sequence
  Description of Artificial Sequence: Synthetic oligonucleotide
cugaccagugcaggagcgc

SEQ ID NO: 676296 - RNA, 19 nt, Artificial Sequence
  Description of Artificial Sequence: Synthetic oligonucleotide
ccggauuggggccuccugg

SEQ ID NO: 676297 - RNA, 19 nt, Artificial Sequence
  Description of Artificial Sequence: Synthetic oligonucleotide
uaagcucgcugggguaggc

SEQ ID NO: 676298 - RNA, 19 nt, Artificial Sequence
  Description of Artificial Sequence: Synthetic oligonucleotide
agaagacuacuaagucugu

SEQ ID NO: 676299 - RNA, 19 nt, Artificial Sequence
  Description of Artificial Sequence: Synthetic oligonucleotide
cuccccggcucuccuacag

SEQ ID NO: 676300 - RNA, 19 nt, Artificial Sequence
  Description of Artificial Sequence: Synthetic oligonucleotide
  modified_base (6)..(6): a, c, u, g, unknown or other
ugcacncaaagggccgcac

SEQ ID NO: 676301 - RNA, 19 nt, Artificial Sequence
  Description of Artificial Sequence: Synthetic oligonucleotide
uguguccaucugacuccca

SEQ ID NO: 676302 - RNA, 19 nt, Artificial Sequence
  Description of Artificial Sequence: Synthetic oligonucleotide
gcacaaguggaaucgcuaa

SEQ ID NO: 676303 - RNA, 19 nt, Artificial Sequence
  Description of Artificial Sequence: Synthetic oligonucleotide
agaaccggauuggggccuc

SEQ ID NO: 676304 - RNA, 19 nt, Artificial Sequence
  Description of Artificial Sequence: Synthetic oligonucleotide
ugguuaccuuucccucacu

SEQ ID NO: 676305 - RNA, 19 nt, Artificial Sequence
  Description of Artificial Sequence: Synthetic oligonucleotide
caagagaccucacuagcau

SEQ ID NO: 676306 - RNA, 19 nt, Artificial Sequence
  Description of Artificial Sequence: Synthetic oligonucleotide
cuccugguuaccuuucccu

SEQ ID NO: 676307 - RNA, 19 nt, Artificial Sequence
  Description of Artificial Sequence: Synthetic oligonucleotide
gguuuguauacacgucaaa

SEQ ID NO: 676308 - RNA, 19 nt, Artificial Sequence
  Description of Artificial Sequence: Synthetic oligonucleotide
uugugggaagagguaguuu

SEQ ID NO: 676309 - RNA, 19 nt, Artificial Sequence
  Description of Artificial Sequence: Synthetic oligonucleotide
aggagaggaggaggaggag

SEQ ID NO: 676310 - RNA, 19 nt, Artificial Sequence
  Description of Artificial Sequence: Synthetic oligonucleotide
guggacgaucauguggguc

SEQ ID NO: 676311 - RNA, 19 nt, Artificial Sequence
  Description of Artificial Sequence: Synthetic oligonucleotide
gaaucgcuaaacaguuggu

SEQ ID NO: 676312 - RNA, 19 nt, Artificial Sequence
  Description of Artificial Sequence: Synthetic oligonucleotide
gucauugugggaagaggua

SEQ ID NO: 676313 - RNA, 19 nt, Artificial Sequence
  Description of Artificial Sequence: Synthetic oligonucleotide
  modified_base (4)..(4): a, c, u, g, unknown or other
cacncaaagggccgcacau

SEQ ID NO: 676314 - RNA, 19 nt, Artificial Sequence
  Description of Artificial Sequence: Synthetic oligonucleotide
guggaaucgcuaaacaguu

SEQ ID NO: 676315 - RNA, 19 nt, Artificial Sequence
  Description of Artificial Sequence: Synthetic oligonucleotide
caugcgguugaaggacuuc

SEQ ID NO: 676316 - RNA, 19 nt, Artificial Sequence
  Description of Artificial Sequence: Synthetic oligonucleotide
ggcacgaggcguagggcgg

SEQ ID NO: 676317 - RNA, 19 nt, Artificial Sequence
  Description of Artificial Sequence: Synthetic oligonucleotide
ggccgcacucgacacagac

SEQ ID NO: 676318 - RNA, 19 nt, Artificial Sequence
  Description of Artificial Sequence: Synthetic oligonucleotide
ggccuuaagcucgcugggg

SEQ ID NO: 676319 - RNA, 19 nt, Artificial Sequence
  Description of Artificial Sequence: Synthetic oligonucleotide
ggagugcugcuugagguga

SEQ ID NO: 676320 - RNA, 19 nt, Artificial Sequence
  Description of Artificial Sequence: Synthetic oligonucleotide
gccacggccacagaaguga

SEQ ID NO: 676321 - RNA, 19 nt, Artificial Sequence
  Description of Artificial Sequence: Synthetic oligonucleotide
aaccggauuggggccuccu

SEQ ID NO: 676322 - RNA, 19 nt, Artificial Sequence
  Description of Artificial Sequence: Synthetic oligonucleotide
ccuaaucacugccaccuga

SEQ ID NO: 676323 - RNA, 19 nt, Artificial Sequence
  Description of Artificial Sequence: Synthetic oligonucleotide
gcuuuaugagcaugguacu

SEQ ID NO: 676324 - RNA, 19 nt, Artificial Sequence
  Description of Artificial Sequence: Synthetic oligonucleotide
cugcaugcaggugcauaug

SEQ ID NO: 676325 - RNA, 19 nt, Artificial Sequence
  Description of Artificial Sequence: Synthetic oligonucleotide
caguagggcgucugcacaa

SEQ ID NO: 676326 - RNA, 19 nt, Artificial Sequence
  Description of Artificial Sequence: Synthetic oligonucleotide
  modified_base (3)..(3): a, c, u, g, unknown or other
acncaaagggccgcacauu

SEQ ID NO: 676327 - RNA, 19 nt, Artificial Sequence
  Description of Artificial Sequence: Synthetic oligonucleotide
ggaagagguucuugggucu

SEQ ID NO: 676328 - RNA, 19 nt, Artificial Sequence
  Description of Artificial Sequence: Synthetic oligonucleotide
cccuaugggccugaggcag

SEQ ID NO: 676329 - RNA, 19 nt, Artificial Sequence
  Description of Artificial Sequence: Synthetic oligonucleotide
agucacccugaggccuggc

SEQ ID NO: 676330 - RNA, 19 nt, Artificial Sequence
  Description of Artificial Sequence: Synthetic oligonucleotide
uggggccuccugguuaccu

SEQ ID NO: 676331 - RNA, 19 nt, Artificial Sequence
  Description of Artificial Sequence: Synthetic oligonucleotide
caugugccggcucagguuu

SEQ ID NO: 676332 - RNA, 19 nt, Artificial Sequence
  Description of Artificial Sequence: Synthetic oligonucleotide
ccugguuaccuuucccuca

SEQ ID NO: 676333 - RNA, 19 nt, Artificial Sequence
  Description of Artificial Sequence: Synthetic oligonucleotide
accggcgaguggacgauca

SEQ ID NO: 676334 - RNA, 19 nt, Artificial Sequence
  Description of Artificial Sequence: Synthetic oligonucleotide
gaguugggucagaguggag

SEQ ID NO: 676335 - RNA, 19 nt, Artificial Sequence
  Description of Artificial Sequence: Synthetic oligonucleotide
ggccgugugcccuggugug

SEQ ID NO: 676336 - RNA, 19 nt, Artificial Sequence
  Description of Artificial Sequence: Synthetic oligonucleotide
  modified_base (5)..(5): a, c, u, g, unknown or other
gcacncaaagggccgcaca

SEQ ID NO: 676337 - RNA, 19 nt, Artificial Sequence
  Description of Artificial Sequence: Synthetic oligonucleotide
ggcgaguggacgaucaugu

SEQ ID NO: 676338 - RNA, 19 nt, Artificial Sequence
  Description of Artificial Sequence: Synthetic oligonucleotide
guguuguaccuuccucucu

SEQ ID NO: 676339 - RNA, 19 nt, Artificial Sequence
  Description of Artificial Sequence: Synthetic oligonucleotide
ggcugauguccaugacgcc

SEQ ID NO: 676340 - RNA, 19 nt, Artificial Sequence
  Description of Artificial Sequence: Synthetic oligonucleotide
cugggaugccuaggccugc

SEQ ID NO: 676341 - RNA, 19 nt, Artificial Sequence
  Description of Artificial Sequence: Synthetic oligonucleotide
cuaggccgcacucgacaca

SEQ ID NO: 676342 - RNA, 19 nt, Artificial Sequence
  Description of Artificial Sequence: Synthetic oligonucleotide
ucaccggcgaguggacgau

SEQ ID NO: 676343 - RNA, 19 nt, Artificial Sequence
  Description of Artificial Sequence: Synthetic oligonucleotide
gugacuggucugggugaag

SEQ ID NO: 676344 - RNA, 19 nt, Artificial Sequence
  Description of Artificial Sequence: Synthetic oligonucleotide
caccccuuuucagaaagcu

SEQ ID NO: 676345 - RNA, 19 nt, Artificial Sequence
  Description of Artificial Sequence: Synthetic oligonucleotide
gagcgcagauguccuuaaa

SEQ ID NO: 676346 - RNA, 19 nt, Artificial Sequence
  Description of Artificial Sequence: Synthetic oligonucleotide
agccacggccacagaagug

SEQ ID NO: 676347 - RNA, 19 nt, Artificial Sequence
  Description of Artificial Sequence: Synthetic oligonucleotide
gcuugagcauaugguuuug

SEQ ID NO: 676348 - RNA, 19 nt, Artificial Sequence
  Description of Artificial Sequence: Synthetic oligonucleotide
cgucaaaauaaguuagagu

SEQ ID NO: 676349 - RNA, 19 nt, Artificial Sequence
  Description of Artificial Sequence: Synthetic oligonucleotide
  modified_base (7)..(7): a, c, u, g, unknown or other
gugcacncaaagggccgca

SEQ ID NO: 676350 - RNA, 19 nt, Artificial Sequence
  Description of Artificial Sequence: Synthetic oligonucleotide
gagaaccggauuggggccu

SEQ ID NO: 676351 - RNA, 19 nt, Artificial Sequence
  Description of Artificial Sequence: Synthetic oligonucleotide
gugcuugagcauaugguuu

SEQ ID NO: 676352 - RNA, 19 nt, Artificial Sequence
  Description of Artificial Sequence: Synthetic oligonucleotide
gaaccggauuggggccucc

SEQ ID NO: 676353 - RNA, 19 nt, Artificial Sequence
  Description of Artificial Sequence: Synthetic oligonucleotide
cuugagcauaugguuuugu

SEQ ID NO: 676354 - RNA, 19 nt, Artificial Sequence
  Description of Artificial Sequence: Synthetic oligonucleotide
ggucagaguggagaagucu

SEQ ID NO: 676355 - RNA, 19 nt, Artificial Sequence
  Description of Artificial Sequence: Synthetic oligonucleotide
acaugcgguugaaggacuu

SEQ ID NO: 676356 - RNA, 19 nt, Artificial Sequence
  Description of Artificial Sequence: Synthetic oligonucleotide
gccuuaagcucgcuggggu

SEQ ID NO: 676357 - RNA, 19 nt, Artificial Sequence
  Description of Artificial Sequence: Synthetic oligonucleotide
cacgaggcguagggcgggg

SEQ ID NO: 676358 - RNA, 19 nt, Artificial Sequence
  Description of Artificial Sequence: Synthetic oligonucleotide
ggagccuugccaggaccgc

SEQ ID NO: 676359 - RNA, 19 nt, Artificial Sequence
  Description of Artificial Sequence: Synthetic oligonucleotide
guagggcgucugcacaagu

SEQ ID NO: 676360 - RNA, 19 nt, Artificial Sequence
  Description of Artificial Sequence: Synthetic oligonucleotide
cgucugcacaaguggaauc

SEQ ID NO: 676361 - RNA, 19 nt, Artificial Sequence
  Description of Artificial Sequence: Synthetic oligonucleotide
gacaggcaccugggaggcc

SEQ ID NO: 676362 - RNA, 19 nt, Artificial Sequence
  Description of Artificial Sequence: Synthetic oligonucleotide
ggggccgugugcccuggug

SEQ ID NO: 676363 - RNA, 19 nt, Artificial Sequence
  Description of Artificial Sequence: Synthetic oligonucleotide
cuggcucaagcauucucuu

SEQ ID NO: 676364 - RNA, 19 nt, Artificial Sequence
  Description of Artificial Sequence: Synthetic oligonucleotide
aaaccacacuugggucauu

SEQ ID NO: 676365 - RNA, 19 nt, Artificial Sequence
  Description of Artificial Sequence: Synthetic oligonucleotide
ggaauucggccaggguuuc

SEQ ID NO: 676366 - RNA, 19 nt, Artificial Sequence
  Description of Artificial Sequence: Synthetic oligonucleotide
cacccaggccagacuucuc

SEQ ID NO: 676367 - RNA, 19 nt, Artificial Sequence
  Description of Artificial Sequence: Synthetic oligonucleotide
agagccccuaugggccuga

SEQ ID NO: 676368 - RNA, 19 nt, Artificial Sequence
  Description of Artificial Sequence: Synthetic oligonucleotide
gcacgaggcguagggcggg

SEQ ID NO: 676369 - RNA, 19 nt, Artificial Sequence
  Description of Artificial Sequence: Synthetic oligonucleotide
ggcguuugaggugacuggu

SEQ ID NO: 676370 - RNA, 19 nt, Artificial Sequence
  Description of Artificial Sequence: Synthetic oligonucleotide
cuccaacugugcacugugu

SEQ ID NO: 676371 - RNA, 19 nt, Artificial Sequence
  Description of Artificial Sequence: Synthetic oligonucleotide
gggcgucugcacaagugga

SEQ ID NO: 676372 - RNA, 19 nt, Artificial Sequence
  Description of Artificial Sequence: Synthetic oligonucleotide
gccgggagccuugggaaac

SEQ ID NO: 676373 - RNA, 19 nt, Artificial Sequence
  Description of Artificial Sequence: Synthetic oligonucleotide
ccgcacacugguguggauc

SEQ ID NO: 676374 - RNA, 19 nt, Artificial Sequence
  Description of Artificial Sequence: Synthetic oligonucleotide
ggagguacagggugcuuuu

SEQ ID NO: 676375 - RNA, 19 nt, Artificial Sequence
  Description of Artificial Sequence: Synthetic oligonucleotide
gccagguggcgcuugaguu

SEQ ID NO: 676376 - RNA, 19 nt, Artificial Sequence
  Description of Artificial Sequence: Synthetic oligonucleotide
  modified_base (18)..(18): a, c, u, g, unknown or other
ggcacauuagggacauunu

SEQ ID NO: 676377 - RNA, 19 nt, Artificial Sequence
  Description of Artificial Sequence: Synthetic oligonucleotide
gaauucggccaggguuucu

SEQ ID NO: 676378 - RNA, 19 nt, Artificial Sequence
  Description of Artificial Sequence: Synthetic oligonucleotide
gagccccuaugggccugag

SEQ ID NO: 676379 - RNA, 19 nt, Artificial Sequence
  Description of Artificial Sequence: Synthetic oligonucleotide
cgggccgcaugcaugucug

SEQ ID NO: 676380 - RNA, 19 nt, Artificial Sequence
  Description of Artificial Sequence: Synthetic oligonucleotide
ccuuaagcucgcuggggua

SEQ ID NO: 676381 - RNA, 19 nt, Artificial Sequence
  Description of Artificial Sequence: Synthetic oligonucleotide
gggccgugugcccuggugu

SEQ ID NO: 676382 - RNA, 19 nt, Artificial Sequence
  Description of Artificial Sequence: Synthetic oligonucleotide
uggggccgugugcccuggu

SEQ ID NO: 676383 - RNA, 19 nt, Artificial Sequence
  Description of Artificial Sequence: Synthetic oligonucleotide
gcacgggccgcaugcaugu

SEQ ID NO: 676384 - RNA, 19 nt, Artificial Sequence
  Description of Artificial Sequence: Synthetic oligonucleotide
gguaguuugcaggggugau

SEQ ID NO: 676385 - RNA, 19 nt, Artificial Sequence
  Description of Artificial Sequence: Synthetic oligonucleotide
cuaugggccugaggcagcu

SEQ ID NO: 676386 - RNA, 19 nt, Artificial Sequence
  Description of Artificial Sequence: Synthetic oligonucleotide
gccgcacucgacacagaca

SEQ ID NO: 676387 - RNA, 19 nt, Artificial Sequence
  Description of Artificial Sequence: Synthetic oligonucleotide
agguggcgcuugaguuggg

SEQ ID NO: 676388 - RNA, 19 nt, Artificial Sequence
  Description of Artificial Sequence: Synthetic oligonucleotide
ccugcaaggcuuggcuguc

SEQ ID NO: 676389 - RNA, 19 nt, Artificial Sequence
  Description of Artificial Sequence: Synthetic oligonucleotide
gcuucaccggcgaguggac

SEQ ID NO: 676390 - RNA, 19 nt, Artificial Sequence
  Description of Artificial Sequence: Synthetic oligonucleotide
cccugcaaggcuuggcugu

SEQ ID NO: 676391 - RNA, 19 nt, Artificial Sequence
  Description of Artificial Sequence: Synthetic oligonucleotide
gcaggagcgcagauguccu

SEQ ID NO: 676392 - RNA, 19 nt, Artificial Sequence
  Description of Artificial Sequence: Synthetic oligonucleotide
caccggcgaguggacgauc

SEQ ID NO: 676393 - RNA, 19 nt, Artificial Sequence
  Description of Artificial Sequence: Synthetic oligonucleotide
ccaugccugcaagagaccu

SEQ ID NO: 676394 - RNA, 19 nt, Artificial Sequence
  Description of Artificial Sequence: Synthetic oligonucleotide
gccugcaugcaggugcaua

SEQ ID NO: 676395 - RNA, 19 nt, Artificial Sequence
  Description of Artificial Sequence: Synthetic oligonucleotide
ggccggagccuugccagga

SEQ ID NO: 676396 - RNA, 19 nt, Artificial Sequence
  Description of Artificial Sequence: Synthetic oligonucleotide
ccgugugcccugguguguc

SEQ ID NO: 676397 - RNA, 19 nt, Artificial Sequence
  Description of Artificial Sequence: Synthetic oligonucleotide
gcgucugcacaaguggaau

SEQ ID NO: 676398 - RNA, 19 nt, Artificial Sequence
  Description of Artificial Sequence: Synthetic oligonucleotide
gguggcgcuugaguugggu

SEQ ID NO: 676399 - RNA, 19 nt, Artificial Sequence
  Description of Artificial Sequence: Synthetic oligonucleotide
cacgggccgcaugcauguc

SEQ ID NO: 676400 - RNA, 19 nt, Artificial Sequence
  Description of Artificial Sequence: Synthetic oligonucleotide
gcgcuucauguuggccugc

SEQ ID NO: 676401 - RNA, 19 nt, Artificial Sequence
  Description of Artificial Sequence: Synthetic oligonucleotide
ggaggaggaggaggaggua

SEQ ID NO: 676402 - RNA, 19 nt, Artificial Sequence
  Description of Artificial Sequence: Synthetic oligonucleotide
gaggagguacagggugcuu

SEQ ID NO: 676403 - RNA, 19 nt, Artificial Sequence
  Description of Artificial Sequence: Synthetic oligonucleotide
caggagcgcagauguccuu

SEQ ID NO: 676404 - RNA, 19 nt, Artificial Sequence
  Description of Artificial Sequence: Synthetic oligonucleotide
gcgucugcuucugcacgaa

SEQ ID NO: 676405 - RNA, 19 nt, Artificial Sequence
  Description of Artificial Sequence: Synthetic oligonucleotide
ccuucacgcccuugugggu

SEQ ID NO: 676406 - RNA, 19 nt, Artificial Sequence
  Description of Artificial Sequence: Synthetic oligonucleotide
ggacgaucaugugggucuu

SEQ ID NO: 676407 - RNA, 19 nt, Artificial Sequence
  Description of Artificial Sequence: Synthetic oligonucleotide
gccgugugcccuggugugu

SEQ ID NO: 676408 - RNA, 19 nt, Artificial Sequence
  Description of Artificial Sequence: Synthetic oligonucleotide
cgggagccuugggaaacca

SEQ ID NO: 676409 - RNA, 19 nt, Artificial Sequence
  Description of Artificial Sequence: Synthetic oligonucleotide
ccggcgaguggacgaucau

SEQ ID NO: 676410 - RNA, 19 nt, Artificial Sequence
  Description of Artificial Sequence: Synthetic oligonucleotide
gccgcacauucuggugcuu

SEQ ID NO: 676411 - RNA, 19 nt, Artificial Sequence
  Description of Artificial Sequence: Synthetic oligonucleotide
acuuuugcuacauugaggg

SEQ ID NO: 676412 - RNA, 19 nt, Artificial Sequence
  Description of Artificial Sequence: Synthetic oligonucleotide
aacaugaacgaacuauacc

SEQ ID NO: 676413 - RNA, 19 nt, Artificial Sequence
  Description of Artificial Sequence: Synthetic oligonucleotide
ucaacagucaaacugaggu

SEQ ID NO: 676414 - RNA, 19 nt, Artificial Sequence
  Description of Artificial Sequence: Synthetic oligonucleotide
gauggaaccuccuagaaug

SEQ ID NO: 676415 - RNA, 19 nt, Artificial Sequence
  Description of Artificial Sequence: Synthetic oligonucleotide
aaacccaacaauaacuggc

SEQ ID NO: 676416 - RNA, 19 nt, Artificial Sequence
  Description of Artificial Sequence: Synthetic oligonucleotide
aacaacaaagccccgguuc

SEQ ID NO: 676417 - RNA, 19 nt, Artificial Sequence
  Description of Artificial Sequence: Synthetic oligonucleotide
ucuccuaaagggcaaaggg

SEQ ID NO: 676418 - RNA, 19 nt, Artificial Sequence
  Description of Artificial Sequence: Synthetic oligonucleotide
uuguuauugcagaucaggg

SEQ ID NO: 676419 - RNA, 19 nt, Artificial Sequence
  Description of Artificial Sequence: Synthetic oligonucleotide
uuagagaaguaaauaacac

SEQ ID NO: 676420 - RNA, 19 nt, Artificial Sequence
  Description of Artificial Sequence: Synthetic oligonucleotide
cauccuagauacuacaggg

SEQ ID NO: 676421 - RNA, 19 nt, Artificial Sequence
  Description of Artificial Sequence: Synthetic oligonucleotide
uucaaagucccauaagcag

SEQ ID NO: 676422 - RNA, 19 nt, Artificial Sequence
  Description of Artificial Sequence: Synthetic oligonucleotide
uauuuuauacgcaauuguc

SEQ ID NO: 676423 - RNA, 19 nt, Artificial Sequence
  Description of Artificial Sequence: Synthetic oligonucleotide
aucucuagacuuuugcuac

SEQ ID NO: 676424 - RNA, 19 nt, Artificial Sequence
  Description of Artificial Sequence: Synthetic oligonucleotide
ucuacgauguuauugauuu

SEQ ID NO: 676425 - RNA, 19 nt, Artificial Sequence
  Description of Artificial Sequence: Synthetic oligonucleotide
uuggguuccacccaggccc

SEQ ID NO: 676426 - RNA, 19 nt, Artificial Sequence
  Description of Artificial Sequence: Synthetic oligonucleotide
uuuacaaacacaugggaua

SEQ ID NO: 676427 - RNA, 19 nt, Artificial Sequence
  Description of Artificial Sequence: Synthetic oligonucleotide
acgaacuauaccuucacag

SEQ ID NO: 676428 - RNA, 19 nt, Artificial Sequence
  Description of Artificial Sequence: Synthetic oligonucleotide
aaagccccgguucugugcc

SEQ ID NO: 676429 - RNA, 19 nt, Artificial Sequence
  Description of Artificial Sequence: Synthetic oligonucleotide
uuaccuggcguuauguggg

SEQ ID NO: 676430 - RNA, 19 nt, Artificial Sequence
  Description of Artificial Sequence: Synthetic oligonucleotide
uaaaacacaggccuggcuc

SEQ ID NO: 676431 - RNA, 19 nt, Artificial Sequence
  Description of Artificial Sequence: Synthetic oligonucleotide
uuuggagggacccuaggag

SEQ ID NO: 676432 - RNA, 19 nt, Artificial Sequence
  Description of Artificial Sequence: Synthetic oligonucleotide
ugagauucggcucuuggca

SEQ ID NO: 676433 - RNA, 19 nt, Artificial Sequence
  Description of Artificial Sequence: Synthetic oligonucleotide
ugccagaauauuuacaaac

SEQ ID NO: 676434 - RNA, 19 nt, Artificial Sequence
  Description of Artificial Sequence: Synthetic oligonucleotide
agauuauagggugaucugc

SEQ ID NO: 676435 - RNA, 19 nt, Artificial Sequence
  Description of Artificial Sequence: Synthetic oligonucleotide
uccuuguuauugcagauca

SEQ ID NO: 676436 - RNA, 19 nt, Artificial Sequence
  Description of Artificial Sequence: Synthetic oligonucleotide
agaacugaggcucauacau

SEQ ID NO: 676437 - RNA, 19 nt, Artificial Sequence
  Description of Artificial Sequence: Synthetic oligonucleotide
cuuaccuggcguuaugugg

SEQ ID NO: 676438 - RNA, 19 nt, Artificial Sequence
  Description of Artificial Sequence: Synthetic oligonucleotide
ucuagcuaacugaaggccc

SEQ ID NO: 676439 - RNA, 19 nt, Artificial Sequence
  Description of Artificial Sequence: Synthetic oligonucleotide
acaucuguaaccaacaccu

SEQ ID NO: 676440 - RNA, 19 nt, Artificial Sequence
  Description of Artificial Sequence: Synthetic oligonucleotide
ugucaauagaugaucuggc

SEQ ID NO: 676441 - RNA, 19 nt, Artificial Sequence
  Description of Artificial Sequence: Synthetic oligonucleotide
uuuuauacgcaauugucua

SEQ ID NO: 676442 - RNA, 19 nt, Artificial Sequence
  Description of Artificial Sequence: Synthetic oligonucleotide
aagauuauagggugaucug

SEQ ID NO: 676443 - RNA, 19 nt, Artificial Sequence
  Description of Artificial Sequence: Synthetic oligonucleotide
uccuagauacuacagggga

SEQ ID NO: 676444 - RNA, 19 nt, Artificial Sequence
  Description of Artificial Sequence: Synthetic oligonucleotide
uacgcaauugucuauaguu

SEQ ID NO: 676445 - RNA, 19 nt, Artificial Sequence
  Description of Artificial Sequence: Synthetic oligonucleotide
aauagaugaucuggccugc

SEQ ID NO: 676446 - RNA, 19 nt, Artificial Sequence
  Description of Artificial Sequence: Synthetic oligonucleotide
caagaggagaaguagcggc

SEQ ID NO: 676447 - RNA, 19 nt, Artificial Sequence
  Description of Artificial Sequence: Synthetic oligonucleotide
ucuauaguuagagaaguaa

SEQ ID NO: 676448 - RNA, 19 nt, Artificial Sequence
  Description of Artificial Sequence: Synthetic oligonucleotide
uauagggugaucugccaag

SEQ ID NO: 676449 - RNA, 19 nt, Artificial Sequence
  Description of Artificial Sequence: Synthetic oligonucleotide
gugucaauagaugaucugg

SEQ ID NO: 676450 - RNA, 19 nt, Artificial Sequence
  Description of Artificial Sequence: Synthetic oligonucleotide
agaccuauagcccuuugug

SEQ ID NO: 676451 - RNA, 19 nt, Artificial Sequence
  Description of Artificial Sequence: Synthetic oligonucleotide
augaacgaacuauaccuuc

SEQ ID NO: 676452 - RNA, 19 nt, Artificial Sequence
  Description of Artificial Sequence: Synthetic oligonucleotide
uagacuuuugcuacauuga

SEQ ID NO: 676453 - RNA, 19 nt, Artificial Sequence
  Description of Artificial Sequence: Synthetic oligonucleotide
uccccuacaccccacaagc

SEQ ID NO: 676454 - RNA, 19 nt, Artificial Sequence
  Description of Artificial Sequence: Synthetic oligonucleotide
augucuacgauguuauuga

SEQ ID NO: 676455 - RNA, 19 nt, Artificial Sequence
  Description of Artificial Sequence: Synthetic oligonucleotide
gugugauggacacacaggc

SEQ ID NO: 676456 - RNA, 19 nt, Artificial Sequence
  Description of Artificial Sequence: Synthetic oligonucleotide
uaagucuccaugucuacga

SEQ ID NO: 676457 - RNA, 19 nt, Artificial Sequence
  Description of Artificial Sequence: Synthetic oligonucleotide
ucucaacagagagagggcg

SEQ ID NO: 676458 - RNA, 19 nt, Artificial Sequence
  Description of Artificial Sequence: Synthetic oligonucleotide
gauuauagggugaucugcc

SEQ ID NO: 676459 - RNA, 19 nt, Artificial Sequence
  Description of Artificial Sequence: Synthetic oligonucleotide
ugacagaaacccaacaaua

SEQ ID NO: 676460 - RNA, 19 nt, Artificial Sequence
  Description of Artificial Sequence: Synthetic oligonucleotide
guuagagaaguaaauaaca

SEQ ID NO: 676461 - RNA, 19 nt, Artificial Sequence
  Description of Artificial Sequence: Synthetic oligonucleotide
cugcccaacaacaaagccc

SEQ ID NO: 676462 - RNA, 19 nt, Artificial Sequence
  Description of Artificial Sequence: Synthetic oligonucleotide
aggguacuggccuagaacu

SEQ ID NO: 676463 - RNA, 19 nt, Artificial Sequence
  Description of Artificial Sequence: Synthetic oligonucleotide
uuuuggagggacccuagga

SEQ ID NO: 676464 - RNA, 19 nt, Artificial Sequence
  Description of Artificial Sequence: Synthetic oligonucleotide
cuagaacugaggcucauac

SEQ ID NO: 676465 - RNA, 19 nt, Artificial Sequence
  Description of Artificial Sequence: Synthetic oligonucleotide
cugaggacuaccauccuag

SEQ ID NO: 676466 - RNA, 19 nt, Artificial Sequence
  Description of Artificial Sequence: Synthetic oligonucleotide
ugggcuacguaccuaaagu

SEQ ID NO: 676467 - RNA, 19 nt, Artificial Sequence
  Description of Artificial Sequence: Synthetic oligonucleotide
uucuaagggucucacgccc

SEQ ID NO: 676468 - RNA, 19 nt, Artificial Sequence
  Description of Artificial Sequence: Synthetic oligonucleotide
auuuuauacgcaauugucu

SEQ ID NO: 676469 - RNA, 19 nt, Artificial Sequence
  Description of Artificial Sequence: Synthetic oligonucleotide
aggaguuugcuacuuaccu

SEQ ID NO: 676470 - RNA, 19 nt, Artificial Sequence
  Description of Artificial Sequence: Synthetic oligonucleotide
ugggaagcaccaaaggaca

SEQ ID NO: 676471 - RNA, 19 nt, Artificial Sequence
  Description of Artificial Sequence: Synthetic oligonucleotide
gacaggugucaauagauga

SEQ ID NO: 676472 - RNA, 19 nt, Artificial Sequence
  Description of Artificial Sequence: Synthetic oligonucleotide
accaacaccucuccuaaag

SEQ ID NO: 676473 - RNA, 19 nt, Artificial Sequence
  Description of Artificial Sequence: Synthetic oligonucleotide
uugagguuauugcaggggu

SEQ ID NO: 676474 - RNA, 19 nt, Artificial Sequence
  Description of Artificial Sequence: Synthetic oligonucleotide
guaaacaucuguaaccaac

SEQ ID NO: 676475 - RNA, 19 nt, Artificial Sequence
  Description of Artificial Sequence: Synthetic oligonucleotide
ugcagaucaggguggagag

SEQ ID NO: 676476 - RNA, 19 nt, Artificial Sequence
  Description of Artificial Sequence: Synthetic oligonucleotide
ugguaaaacacaggccugg

SEQ ID NO: 676477 - RNA, 19 nt, Artificial Sequence
  Description of Artificial Sequence: Synthetic oligonucleotide
gaaccuccuagaaugaccc

SEQ ID NO: 676478 - RNA, 19 nt, Artificial Sequence
  Description of Artificial Sequence: Synthetic oligonucleotide
uauacgcaauugucuauag

SEQ ID NO: 676479 - RNA, 19 nt, Artificial Sequence
  Description of Artificial Sequence: Synthetic oligonucleotide
gaacuauaccuucacagaa

SEQ ID NO: 676480 - RNA, 19 nt, Artificial Sequence
  Description of Artificial Sequence: Synthetic oligonucleotide
ucuacugaggaucucgcuu

SEQ ID NO: 676481 - RNA, 19 nt, Artificial Sequence
  Description of Artificial Sequence: Synthetic oligonucleotide
caugucuacgauguuauug

SEQ ID NO: 676482 - RNA, 19 nt, Artificial Sequence
  Description of Artificial Sequence: Synthetic oligonucleotide
accuauagcccuuuguggu

SEQ ID NO: 676483 - RNA, 19 nt, Artificial Sequence
  Description of Artificial Sequence: Synthetic oligonucleotide
ugcgggaugucuacugagg

SEQ ID NO: 676484 - RNA, 19 nt, Artificial Sequence
  Description of Artificial Sequence: Synthetic oligonucleotide
cuagcuaacugaaggcccc

SEQ ID NO: 676485 - RNA, 19 nt, Artificial Sequence
  Description of Artificial Sequence: Synthetic oligonucleotide
acuauaccuucacagaaaa

SEQ ID NO: 676486 - RNA, 19 nt, Artificial Sequence
  Description of Artificial Sequence: Synthetic oligonucleotide
aggacuaccauccuagaua

SEQ ID NO: 676487 - RNA, 19 nt, Artificial Sequence
  Description of Artificial Sequence: Synthetic oligonucleotide
ugagaggguaucucuagac

SEQ ID NO: 676488 - RNA, 19 nt, Artificial Sequence
  Description of Artificial Sequence: Synthetic oligonucleotide
agaggccuaaggcaagagg

SEQ ID NO: 676489 - RNA, 19 nt, Artificial Sequence
  Description of Artificial Sequence: Synthetic oligonucleotide
gucccaacccuacugacag

SEQ ID NO: 676490 - RNA, 19 nt, Artificial Sequence
  Description of Artificial Sequence: Synthetic oligonucleotide
aacgaacuauaccuucaca

SEQ ID NO: 676491 - RNA, 19 nt, Artificial Sequence
  Description of Artificial Sequence: Synthetic oligonucleotide
acgugcgcgaacaugaacg

SEQ ID NO: 676492 - RNA, 19 nt, Artificial Sequence
  Description of Artificial Sequence: Synthetic oligonucleotide
gucaauagaugaucuggcc

SEQ ID NO: 676493 - RNA, 19 nt, Artificial Sequence
  Description of Artificial Sequence: Synthetic oligonucleotide
cauacgugcgcgaacauga

SEQ ID NO: 676494 - RNA, 19 nt, Artificial Sequence
  Description of Artificial Sequence: Synthetic oligonucleotide
ugugaacgcacucccuugc

SEQ ID NO: 676495 - RNA, 19 nt, Artificial Sequence
  Description of Artificial Sequence: Synthetic oligonucleotide
ggugugaagcgccaggagg

SEQ ID NO: 676496 - RNA, 19 nt, Artificial Sequence
  Description of Artificial Sequence: Synthetic oligonucleotide
uuauagggugaucugccaa

SEQ ID NO: 676497 - RNA, 19 nt, Artificial Sequence
  Description of Artificial Sequence: Synthetic oligonucleotide
ccuacuggaacucugcucc

SEQ ID NO: 676498 - RNA, 19 nt, Artificial Sequence
  Description of Artificial Sequence: Synthetic oligonucleotide
caacccuacugacagagac

SEQ ID NO: 676499 - RNA, 19 nt, Artificial Sequence
  Description of Artificial Sequence: Synthetic oligonucleotide
augucuacugaggaucucg

SEQ ID NO: 676500 - RNA, 19 nt, Artificial Sequence
  Description of Artificial Sequence: Synthetic oligonucleotide
uucggcucuuggcaggagg

SEQ ID NO: 676501 - RNA, 19 nt, Artificial Sequence
  Description of Artificial Sequence: Synthetic oligonucleotide
gagauucggcucuuggcag

SEQ ID NO: 676502 - RNA, 19 nt, Artificial Sequence
  Description of Artificial Sequence: Synthetic oligonucleotide
accuaaagucucuucugag

SEQ ID NO: 676503 - RNA, 19 nt, Artificial Sequence
  Description of Artificial Sequence: Synthetic oligonucleotide
uuuauacgcaauugucuau

SEQ ID NO: 676504 - RNA, 19 nt, Artificial Sequence
  Description of Artificial Sequence: Synthetic oligonucleotide
ucccuaagccuccacguug

SEQ ID NO: 676505 - RNA, 19 nt, Artificial Sequence
  Description of Artificial Sequence: Synthetic oligonucleotide
auaguuagagaaguaaaua

SEQ ID NO: 676506 - RNA, 19 nt, Artificial Sequence
  Description of Artificial Sequence: Synthetic oligonucleotide
ugucuacugaggaucucgc

SEQ ID NO: 676507 - RNA, 19 nt, Artificial Sequence
  Description of Artificial Sequence: Synthetic oligonucleotide
uaaggcaagaggagaagua

SEQ ID NO: 676508 - RNA, 19 nt, Artificial Sequence
  Description of Artificial Sequence: Synthetic oligonucleotide
guugagguuauugcagggg

SEQ ID NO: 676509 - RNA, 19 nt, Artificial Sequence
  Description of Artificial Sequence: Synthetic oligonucleotide
cugagauucggcucuuggc

SEQ ID NO: 676510 - RNA, 19 nt, Artificial Sequence
  Description of Artificial Sequence: Synthetic oligonucleotide
auuuacaaacacaugggau

SEQ ID NO: 676511 - RNA, 19 nt, Artificial Sequence
  Description of Artificial Sequence: Synthetic oligonucleotide
uccacguugagcagggguc

SEQ ID NO: 676512 - RNA, 19 nt, Artificial Sequence
  Description of Artificial Sequence: Synthetic oligonucleotide
accuacuggaacucugcuc

SEQ ID NO: 676513 - RNA, 19 nt, Artificial Sequence
  Description of Artificial Sequence: Synthetic oligonucleotide
ugaacgcacucccuugccc

SEQ ID NO: 676514 - RNA, 19 nt, Artificial Sequence
  Description of Artificial Sequence: Synthetic oligonucleotide
ugaggaucucgcuuccuug

SEQ ID NO: 676515 - RNA, 19 nt, Artificial Sequence
  Description of Artificial Sequence: Synthetic oligonucleotide
agucccauaagcaggagga

SEQ ID NO: 676516 - RNA, 19 nt, Artificial Sequence
  Description of Artificial Sequence: Synthetic oligonucleotide
ucccaauuguucucguggc

SEQ ID NO: 676517 - RNA, 19 nt, Artificial Sequence
  Description of Artificial Sequence: Synthetic oligonucleotide
ccuagaaugacccagaacu

SEQ ID NO: 676518 - RNA, 19 nt, Artificial Sequence
  Description of Artificial Sequence: Synthetic oligonucleotide
aacccaacaauaacuggca

SEQ ID NO: 676519 - RNA, 19 nt, Artificial Sequence
  Description of Artificial Sequence: Synthetic oligonucleotide
acuaccauccuagauacua

SEQ ID NO: 676520 - RNA, 19 nt, Artificial Sequence
  Description of Artificial Sequence: Synthetic oligonucleotide
gaggccucuagcuaacuga

SEQ ID NO: 676521 - RNA, 19 nt, Artificial Sequence
  Description of Artificial Sequence: Synthetic oligonucleotide
agauucggcucuuggcagg

SEQ ID NO: 676522 - RNA, 19 nt, Artificial Sequence
  Description of Artificial Sequence: Synthetic oligonucleotide
gaacgaacuauaccuucac

SEQ ID NO: 676523 - RNA, 19 nt, Artificial Sequence
  Description of Artificial Sequence: Synthetic oligonucleotide
auuauagggugaucugcca

SEQ ID NO: 676524 - RNA, 19 nt, Artificial Sequence
  Description of Artificial Sequence: Synthetic oligonucleotide
ccuaaagucucuucugagg

SEQ ID NO: 676525 - RNA, 19 nt, Artificial Sequence
  Description of Artificial Sequence: Synthetic oligonucleotide
uaccauccuagauacuaca

SEQ ID NO: 676526 - RNA, 19 nt, Artificial Sequence
  Description of Artificial Sequence: Synthetic oligonucleotide
gaugaucuggccugcccug

SEQ ID NO: 676527 - RNA, 19 nt, Artificial Sequence
  Description of Artificial Sequence: Synthetic oligonucleotide
cuaagucuccaugucuacg

SEQ ID NO: 676528 - RNA, 19 nt, Artificial Sequence
  Description of Artificial Sequence: Synthetic oligonucleotide
gguguguagagagaugggg

SEQ ID NO: 676529 - RNA, 19 nt, Artificial Sequence
  Description of Artificial Sequence: Synthetic oligonucleotide
guuuguaaacuggacucag

SEQ ID NO: 676530 - RNA, 19 nt, Artificial Sequence
  Description of Artificial Sequence: Synthetic oligonucleotide
cuaaggaagugguggcacc

SEQ ID NO: 676531 - RNA, 19 nt, Artificial Sequence
  Description of Artificial Sequence: Synthetic oligonucleotide
uguagagagauggggacuc

SEQ ID NO: 676532 - RNA, 19 nt, Artificial Sequence
  Description of Artificial Sequence: Synthetic oligonucleotide
uggccuacaagcucccagc

SEQ ID NO: 676533 - RNA, 19 nt, Artificial Sequence
  Description of Artificial Sequence: Synthetic oligonucleotide
uguaaccaacaccucuccu

SEQ ID NO: 676534 - RNA, 19 nt, Artificial Sequence
  Description of Artificial Sequence: Synthetic oligonucleotide
agggaugcgggaugucuac

SEQ ID NO: 676535 - RNA, 19 nt, Artificial Sequence
  Description of Artificial Sequence: Synthetic oligonucleotide
uggggcgagacagacacgc

SEQ ID NO: 676536 - RNA, 19 nt, Artificial Sequence
  Description of Artificial Sequence: Synthetic oligonucleotide
uuauacgcaauugucuaua

SEQ ID NO: 676537 - RNA, 19 nt, Artificial Sequence
  Description of Artificial Sequence: Synthetic oligonucleotide
uacuacaggggagaggccu

SEQ ID NO: 676538 - RNA, 19 nt, Artificial Sequence
  Description of Artificial Sequence: Synthetic oligonucleotide
acccaacaauaacuggcac

SEQ ID NO: 676539 - RNA, 19 nt, Artificial Sequence
  Description of Artificial Sequence: Synthetic oligonucleotide
uccuagaaugacccagaac

SEQ ID NO: 676540 - RNA, 19 nt, Artificial Sequence
  Description of Artificial Sequence: Synthetic oligonucleotide
aggaggggcaccuacugga

SEQ ID NO: 676541 - RNA, 19 nt, Artificial Sequence
  Description of Artificial Sequence: Synthetic oligonucleotide
uagaacugaggcucauaca

SEQ ID NO: 676542 - RNA, 19 nt, Artificial Sequence
  Description of Artificial Sequence: Synthetic oligonucleotide
caggaaagcgggaccaggc

SEQ ID NO: 676543 - RNA, 19 nt, Artificial Sequence
  Description of Artificial Sequence: Synthetic oligonucleotide
agacuugcacuguacugug

SEQ ID NO: 676544 - RNA, 19 nt, Artificial Sequence
  Description of Artificial Sequence: Synthetic oligonucleotide
acuuaccuggcguuaugug

SEQ ID NO: 676545 - RNA, 19 nt, Artificial Sequence
  Description of Artificial Sequence: Synthetic oligonucleotide
gugaauuccuguugugcug

SEQ ID NO: 676546 - RNA, 19 nt, Artificial Sequence
  Description of Artificial Sequence: Synthetic oligonucleotide
ugccaaggggugugaagcg

SEQ ID NO: 676547 - RNA, 19 nt, Artificial Sequence
  Description of Artificial Sequence: Synthetic oligonucleotide
ggacuaccauccuagauac

SEQ ID NO: 676548 - RNA, 19 nt, Artificial Sequence
  Description of Artificial Sequence: Synthetic oligonucleotide
uguuucccugcuuguuggg

SEQ ID NO: 676549 - RNA, 19 nt, Artificial Sequence
  Description of Artificial Sequence: Synthetic oligonucleotide
aacuauaccuucacagaaa

SEQ ID NO: 676550 - RNA, 19 nt, Artificial Sequence
  Description of Artificial Sequence: Synthetic oligonucleotide
uauugcagggguucccuaa

SEQ ID NO: 676551 - RNA, 19 nt, Artificial Sequence
  Description of Artificial Sequence: Synthetic oligonucleotide
ggcaagaggagaaguagcg

SEQ ID NO: 676552 - RNA, 19 nt, Artificial Sequence
  Description of Artificial Sequence: Synthetic oligonucleotide
cuggggaaaggugaauucc

SEQ ID NO: 676553 - RNA, 19 nt, Artificial Sequence
  Description of Artificial Sequence: Synthetic oligonucleotide
cuaccauccuagauacuac

SEQ ID NO: 676554 - RNA, 19 nt, Artificial Sequence
  Description of Artificial Sequence: Synthetic oligonucleotide
gauucccugaggagugugg

SEQ ID NO: 676555 - RNA, 19 nt, Artificial Sequence
  Description of Artificial Sequence: Synthetic oligonucleotide
aaagggucccaacccuacu

SEQ ID NO: 676556 - RNA, 19 nt, Artificial Sequence
  Description of Artificial Sequence: Synthetic oligonucleotide
ugcuccuuguagcuagcca

SEQ ID NO: 676557 - RNA, 19 nt, Artificial Sequence
  Description of Artificial Sequence: Synthetic oligonucleotide
guaaccaacaccucuccua

SEQ ID NO: 676558 - RNA, 19 nt, Artificial Sequence
  Description of Artificial Sequence: Synthetic oligonucleotide
accuccuagaaugacccag

SEQ ID NO: 676559 - RNA, 19 nt, Artificial Sequence
  Description of Artificial Sequence: Synthetic oligonucleotide
gaggcgagacaggagaaug

SEQ ID NO: 676560 - RNA, 19 nt, Artificial Sequence
  Description of Artificial Sequence: Synthetic oligonucleotide
ucugguucaaagucccaua

SEQ ID NO: 676561 - RNA, 19 nt, Artificial Sequence
  Description of Artificial Sequence: Synthetic oligonucleotide
agauacuacaggggagagg

SEQ ID NO: 676562 - RNA, 19 nt, Artificial Sequence
  Description of Artificial Sequence: Synthetic oligonucleotide
gguucccuaagccuccacg

SEQ ID NO: 676563 - RNA, 19 nt, Artificial Sequence
  Description of Artificial Sequence: Synthetic oligonucleotide
gagugugguaaaacacagg

SEQ ID NO: 676564 - RNA, 19 nt, Artificial Sequence
  Description of Artificial Sequence: Synthetic oligonucleotide
agaggccucccacacagga

SEQ ID NO: 676565 - RNA, 19 nt, Artificial Sequence
  Description of Artificial Sequence: Synthetic oligonucleotide
aguuuguaaacuggacuca

SEQ ID NO: 676566 - RNA, 19 nt, Artificial Sequence
  Description of Artificial Sequence: Synthetic oligonucleotide
caaagucccauaagcagga

SEQ ID NO: 676567 - RNA, 19 nt, Artificial Sequence
  Description of Artificial Sequence: Synthetic oligonucleotide
acguaccuaaagucucuuc

SEQ ID NO: 676568 - RNA, 19 nt, Artificial Sequence
  Description of Artificial Sequence: Synthetic oligonucleotide
cuagauacuacaggggaga

SEQ ID NO: 676569 - RNA, 19 nt, Artificial Sequence
  Description of Artificial Sequence: Synthetic oligonucleotide
cuguaaccaacaccucucc

SEQ ID NO: 676570 - RNA, 19 nt, Artificial Sequence
  Description of Artificial Sequence: Synthetic oligonucleotide
ucuaagggucucacgcccu

SEQ ID NO: 676571 - RNA, 19 nt, Artificial Sequence
  Description of Artificial Sequence: Synthetic oligonucleotide
uuguugggugcccauggaa

SEQ ID NO: 676572 - RNA, 19 nt, Artificial Sequence
  Description of Artificial Sequence: Synthetic oligonucleotide
gagguuauugcagggguuc

SEQ ID NO: 676573 - RNA, 19 nt, Artificial Sequence
  Description of Artificial Sequence: Synthetic oligonucleotide
gaggaguuugcuacuuacc

SEQ ID NO: 676574 - RNA, 19 nt, Artificial Sequence
  Description of Artificial Sequence: Synthetic oligonucleotide
uggaacucugcucccaauu

SEQ ID NO: 676575 - RNA, 19 nt, Artificial Sequence
  Description of Artificial Sequence: Synthetic oligonucleotide
uucucguggcugcaggggu

SEQ ID NO: 676576 - RNA, 19 nt, Artificial Sequence
  Description of Artificial Sequence: Synthetic oligonucleotide
ggucccaaaggagagcugg

SEQ ID NO: 676577 - RNA, 19 nt, Artificial Sequence
  Description of Artificial Sequence: Synthetic oligonucleotide
auagaugaucuggccugcc

SEQ ID NO: 676578 - RNA, 19 nt, Artificial Sequence
  Description of Artificial Sequence: Synthetic oligonucleotide
uggaagauuauagggugau

SEQ ID NO: 676579 - RNA, 19 nt, Artificial Sequence
  Description of Artificial Sequence: Synthetic oligonucleotide
ucggcucuuggcaggagga

SEQ ID NO: 676580 - RNA, 19 nt, Artificial Sequence
  Description of Artificial Sequence: Synthetic oligonucleotide
ccacaagccagcucaaagg

SEQ ID NO: 676581 - RNA, 19 nt, Artificial Sequence
  Description of Artificial Sequence: Synthetic oligonucleotide
agaaugaggccggagggcu

SEQ ID NO: 676582 - RNA, 19 nt, Artificial Sequence
  Description of Artificial Sequence: Synthetic oligonucleotide
gacccuaggagaggcaacc

SEQ ID NO: 676583 - RNA, 19 nt, Artificial Sequence
  Description of Artificial Sequence: Synthetic oligonucleotide
ugaucugccaaggggugug

SEQ ID NO: 676584 - RNA, 19 nt, Artificial Sequence
  Description of Artificial Sequence: Synthetic oligonucleotide
auacgcaauugucuauagu

SEQ ID NO: 676585 - RNA, 19 nt, Artificial Sequence
  Description of Artificial Sequence: Synthetic oligonucleotide
uagauacuacaggggagag

SEQ ID NO: 676586 - RNA, 19 nt, Artificial Sequence
  Description of Artificial Sequence: Synthetic oligonucleotide
uccuauucuccugccaucu

SEQ ID NO: 676587 - RNA, 19 nt, Artificial Sequence
  Description of Artificial Sequence: Synthetic oligonucleotide
cugggcuacguaccuaaag

SEQ ID NO: 676588 - RNA, 19 nt, Artificial Sequence
  Description of Artificial Sequence: Synthetic oligonucleotide
caaagggucccaacccuac

SEQ ID NO: 676589 - RNA, 19 nt, Artificial Sequence
  Description of Artificial Sequence: Synthetic oligonucleotide
agucagucuguuucagggu

SEQ ID NO: 676590 - RNA, 19 nt, Artificial Sequence
  Description of Artificial Sequence: Synthetic oligonucleotide
gacucugacagaaacccaa

SEQ ID NO: 676591 - RNA, 19 nt, Artificial Sequence
  Description of Artificial Sequence: Synthetic oligonucleotide
augcgggaugucuacugag

SEQ ID NO: 676592 - RNA, 19 nt, Artificial Sequence
  Description of Artificial Sequence: Synthetic oligonucleotide
caaagccccgguucugugc

SEQ ID NO: 676593 - RNA, 19 nt, Artificial Sequence
  Description of Artificial Sequence: Synthetic oligonucleotide
uuguagcuagccagccagc

SEQ ID NO: 676594 - RNA, 19 nt, Artificial Sequence
  Description of Artificial Sequence: Synthetic oligonucleotide
ugccaagccuccuauucuc

SEQ ID NO: 676595 - RNA, 19 nt, Artificial Sequence
  Description of Artificial Sequence: Synthetic oligonucleotide
gaugcgggaugucuacuga

SEQ ID NO: 676596 - RNA, 19 nt, Artificial Sequence
  Description of Artificial Sequence: Synthetic oligonucleotide
uacgugcgcgaacaugaac

SEQ ID NO: 676597 - RNA, 19 nt, Artificial Sequence
  Description of Artificial Sequence: Synthetic oligonucleotide
ggaggaguuugcuacuuac

SEQ ID NO: 676598 - RNA, 19 nt, Artificial Sequence
  Description of Artificial Sequence: Synthetic oligonucleotide
gggagcaucacacagcugu

SEQ ID NO: 676599 - RNA, 19 nt, Artificial Sequence
  Description of Artificial Sequence: Synthetic oligonucleotide
uacuuaccuggcguuaugu

SEQ ID NO: 676600 - RNA, 19 nt, Artificial Sequence
  Description of Artificial Sequence: Synthetic oligonucleotide
accauccuagauacuacag

SEQ ID NO: 676601 - RNA, 19 nt, Artificial Sequence
  Description of Artificial Sequence: Synthetic oligonucleotide
ucucguggcugcaggggug

SEQ ID NO: 676602 - RNA, 19 nt, Artificial Sequence
  Description of Artificial Sequence: Synthetic oligonucleotide
aauuguucucguggcugca

SEQ ID NO: 676603 - RNA, 19 nt, Artificial Sequence
  Description of Artificial Sequence: Synthetic oligonucleotide
aacccuacugacagagaca

SEQ ID NO: 676604 - RNA, 19 nt, Artificial Sequence
  Description of Artificial Sequence: Synthetic oligonucleotide
aaaaccuccucagggccaa

SEQ ID NO: 676605 - RNA, 19 nt, Artificial Sequence
  Description of Artificial Sequence: Synthetic oligonucleotide
uauugcagaucagggugga

SEQ ID NO: 676606 - RNA, 19 nt, Artificial Sequence
  Description of Artificial Sequence: Synthetic oligonucleotide
ugcaaggguacuggccuag

SEQ ID NO: 676607 - RNA, 19 nt, Artificial Sequence
  Description of Artificial Sequence: Synthetic oligonucleotide
acauacgugcgcgaacaug

SEQ ID NO: 676608 - RNA, 19 nt, Artificial Sequence
  Description of Artificial Sequence: Synthetic oligonucleotide
aagccccgguucugugccc

SEQ ID NO: 676609 - RNA, 19 nt, Artificial Sequence
  Description of Artificial Sequence: Synthetic oligonucleotide
augccagaauauuuacaaa

SEQ ID NO: 676610 - RNA, 19 nt, Artificial Sequence
  Description of Artificial Sequence: Synthetic oligonucleotide
ggaaccuccuagaaugacc

SEQ ID NO: 676611 - RNA, 19 nt, Artificial Sequence
  Description of Artificial Sequence: Synthetic oligonucleotide
cgcaauugucuauaguuag

SEQ ID NO: 676612 - RNA, 19 nt, Artificial Sequence
  Description of Artificial Sequence: Synthetic oligonucleotide
cuugcccuagggacacagg

SEQ ID NO: 676613 - RNA, 19 nt, Artificial Sequence
  Description of Artificial Sequence: Synthetic oligonucleotide
agccagcucaaaggggccc

SEQ ID NO: 676614 - RNA, 19 nt, Artificial Sequence
  Description of Artificial Sequence: Synthetic oligonucleotide
cuggugagguaucuggaca

SEQ ID NO: 676615 - RNA, 19 nt, Artificial Sequence
  Description of Artificial Sequence: Synthetic oligonucleotide
gucucuucugaggacuacc

SEQ ID NO: 676616 - RNA, 19 nt, Artificial Sequence
  Description of Artificial Sequence: Synthetic oligonucleotide
agggucccaacccuacuga

SEQ ID NO: 676617 - RNA, 19 nt, Artificial Sequence
  Description of Artificial Sequence: Synthetic oligonucleotide
gagggacccuaggagaggc

SEQ ID NO: 676618 - RNA, 19 nt, Artificial Sequence
  Description of Artificial Sequence: Synthetic oligonucleotide
cacaggaucucaacagaga

SEQ ID NO: 676619 - RNA, 19 nt, Artificial Sequence
  Description of Artificial Sequence: Synthetic oligonucleotide
cacuuccuauccagggagc

SEQ ID NO: 676620 - RNA, 19 nt, Artificial Sequence
  Description of Artificial Sequence: Synthetic oligonucleotide
aaccuccuagaaugaccca

SEQ ID NO: 676621 - RNA, 19 nt, Artificial Sequence
  Description of Artificial Sequence: Synthetic oligonucleotide
aacucugcucccaauuguu

SEQ ID NO: 676622 - RNA, 19 nt, Artificial Sequence
  Description of Artificial Sequence: Synthetic oligonucleotide
cuccccuacaccccacaag

SEQ ID NO: 676623 - RNA, 19 nt, Artificial Sequence
  Description of Artificial Sequence: Synthetic oligonucleotide
gugguaaaacacaggccug

SEQ ID NO: 676624 - RNA, 19 nt, Artificial Sequence
  Description of Artificial Sequence: Synthetic oligonucleotide
ugccaucuguuccccuacc

SEQ ID NO: 676625 - RNA, 19 nt, Artificial Sequence
  Description of Artificial Sequence: Synthetic oligonucleotide
cagucaaacugagguaaac

SEQ ID NO: 676626 - RNA, 19 nt, Artificial Sequence
  Description of Artificial Sequence: Synthetic oligonucleotide
cauaagcaggaggagguga

SEQ ID NO: 676627 - RNA, 19 nt, Artificial Sequence
  Description of Artificial Sequence: Synthetic oligonucleotide
ggugaauuccuguugugcu

SEQ ID NO: 676628 - RNA, 19 nt, Artificial Sequence
  Description of Artificial Sequence: Synthetic oligonucleotide
acccuaggagaggcaaccc

SEQ ID NO: 676629 - RNA, 19 nt, Artificial Sequence
  Description of Artificial Sequence: Synthetic oligonucleotide
ccuacaccccacaagccag

SEQ ID NO: 676630 - RNA, 19 nt, Artificial Sequence
  Description of Artificial Sequence: Synthetic oligonucleotide
augaucuggccugcccugg

SEQ ID NO: 676631 - RNA, 19 nt, Artificial Sequence
  Description of Artificial Sequence: Synthetic oligonucleotide
agaucaggguggagaggcc

SEQ ID NO: 676632 - RNA, 19 nt, Artificial Sequence
  Description of Artificial Sequence: Synthetic oligonucleotide
gugaacgcacucccuugcc

SEQ ID NO: 676633 - RNA, 19 nt, Artificial Sequence
  Description of Artificial Sequence: Synthetic oligonucleotide
uucccuaagccuccacguu

SEQ ID NO: 676634 - RNA, 19 nt, Artificial Sequence
  Description of Artificial Sequence: Synthetic oligonucleotide
uggaaccuccuagaaugac

SEQ ID NO: 676635 - RNA, 19 nt, Artificial Sequence
  Description of Artificial Sequence: Synthetic oligonucleotide
ggaugcgggaugucuacug

SEQ ID NO: 676636 - RNA, 19 nt, Artificial Sequence
  Description of Artificial Sequence: Synthetic oligonucleotide
gaacgcacucccuugcccu

SEQ ID NO: 676637 - RNA, 19 nt, Artificial Sequence
  Description of Artificial Sequence: Synthetic oligonucleotide
acaagcucccagccuuugu

SEQ ID NO: 676638 - RNA, 19 nt, Artificial Sequence
  Description of Artificial Sequence: Synthetic oligonucleotide
gacaguaccagugguggcu

SEQ ID NO: 676639 - RNA, 19 nt, Artificial Sequence
  Description of Artificial Sequence: Synthetic oligonucleotide
cuacuuaccuggcguuaug

SEQ ID NO: 676640 - RNA, 19 nt, Artificial Sequence
  Description of Artificial Sequence: Synthetic oligonucleotide
gagaccuauagcccuuugu

SEQ ID NO: 676641 - RNA, 19 nt, Artificial Sequence
  Description of Artificial Sequence: Synthetic oligonucleotide
uuauugcagggguucccua

SEQ ID NO: 676642 - RNA, 19 nt, Artificial Sequence
  Description of Artificial Sequence: Synthetic oligonucleotide
guucccuaagccuccacgu

SEQ ID NO: 676643 - RNA, 19 nt, Artificial Sequence
  Description of Artificial Sequence: Synthetic oligonucleotide
gaggaucucgcuuccuugu

SEQ ID NO: 676644 - RNA, 19 nt, Artificial Sequence
  Description of Artificial Sequence: Synthetic oligonucleotide
gugagaggguaucucuaga

SEQ ID NO: 676645 - RNA, 19 nt, Artificial Sequence
  Description of Artificial Sequence: Synthetic oligonucleotide
aaccaacaccucuccuaaa

SEQ ID NO: 676646 - RNA, 19 nt, Artificial Sequence
  Description of Artificial Sequence: Synthetic oligonucleotide
uccuauccagggagcuccc

SEQ ID NO: 676647 - RNA, 19 nt, Artificial Sequence
  Description of Artificial Sequence: Synthetic oligonucleotide
ggcgagacaggagaaugag

SEQ ID NO: 676648 - RNA, 19 nt, Artificial Sequence
  Description of Artificial Sequence: Synthetic oligonucleotide
gagaggccuaaggcaagag

SEQ ID NO: 676649 - RNA, 19 nt, Artificial Sequence
  Description of Artificial Sequence: Synthetic oligonucleotide
uaccuggcguuaugugggc

SEQ ID NO: 676650 - RNA, 19 nt, Artificial Sequence
  Description of Artificial Sequence: Synthetic oligonucleotide
gcuacguaccuaaagucuc

SEQ ID NO: 676651 - RNA, 19 nt, Artificial Sequence
  Description of Artificial Sequence: Synthetic oligonucleotide
agccagacccagucagucu

SEQ ID NO: 676652 - RNA, 19 nt, Artificial Sequence
  Description of Artificial Sequence: Synthetic oligonucleotide
ugggauaggggaggcgaga

SEQ ID NO: 676653 - RNA, 19 nt, Artificial Sequence
  Description of Artificial Sequence: Synthetic oligonucleotide
ggcccuguguccacuaagg

SEQ ID NO: 676654 - RNA, 19 nt, Artificial Sequence
  Description of Artificial Sequence: Synthetic oligonucleotide
cuaagggucucacgcccuc

SEQ ID NO: 676655 - RNA, 19 nt, Artificial Sequence
  Description of Artificial Sequence: Synthetic oligonucleotide
ccaauuguucucguggcug

SEQ ID NO: 676656 - RNA, 19 nt, Artificial Sequence
  Description of Artificial Sequence: Synthetic oligonucleotide
ugugaagcgccaggagggu

SEQ ID NO: 676657 - RNA, 19 nt, Artificial Sequence
  Description of Artificial Sequence: Synthetic oligonucleotide
accuggcguuaugugggcc

SEQ ID NO: 676658 - RNA, 19 nt, Artificial Sequence
  Description of Artificial Sequence: Synthetic oligonucleotide
acgcaauugucuauaguua

SEQ ID NO: 676659 - RNA, 19 nt, Artificial Sequence
  Description of Artificial Sequence: Synthetic oligonucleotide
gagccagacccagucaguc

SEQ ID NO: 676660 - RNA, 19 nt, Artificial Sequence
  Description of Artificial Sequence: Synthetic oligonucleotide
uacaagcucccagccuuug

SEQ ID NO: 676661 - RNA, 19 nt, Artificial Sequence
  Description of Artificial Sequence: Synthetic oligonucleotide
gggcuacguaccuaaaguc

SEQ ID NO: 676662 - RNA, 19 nt, Artificial Sequence
  Description of Artificial Sequence: Synthetic oligonucleotide
ccaaggggugugaagcgcc

SEQ ID NO: 676663 - RNA, 19 nt, Artificial Sequence
  Description of Artificial Sequence: Synthetic oligonucleotide
ggucucacgcccucucugc

SEQ ID NO: 676664 - RNA, 19 nt, Artificial Sequence
  Description of Artificial Sequence: Synthetic oligonucleotide
aaagggcaaagggucccaa

SEQ ID NO: 676665 - RNA, 19 nt, Artificial Sequence
  Description of Artificial Sequence: Synthetic oligonucleotide
gcuggugagguaucuggac

SEQ ID NO: 676666 - RNA, 19 nt, Artificial Sequence
  Description of Artificial Sequence: Synthetic oligonucleotide
ccuauagcccuuuguggug

SEQ ID NO: 676667 - RNA, 19 nt, Artificial Sequence
  Description of Artificial Sequence: Synthetic oligonucleotide
ccuggcguuaugugggccc

SEQ ID NO: 676668 - RNA, 19 nt, Artificial Sequence
  Description of Artificial Sequence: Synthetic oligonucleotide
agcuggggaaaggugaauu

SEQ ID NO: 676669 - RNA, 19 nt, Artificial Sequence
  Description of Artificial Sequence: Synthetic oligonucleotide
ccagucagucuguuucagg

SEQ ID NO: 676670 - RNA, 19 nt, Artificial Sequence
  Description of Artificial Sequence: Synthetic oligonucleotide
uggugaguggguggugcca

SEQ ID NO: 676671 - RNA, 19 nt, Artificial Sequence
  Description of Artificial Sequence: Synthetic oligonucleotide
gaggacuaccauccuagau

SEQ ID NO: 676672 - RNA, 19 nt, Artificial Sequence
  Description of Artificial Sequence: Synthetic oligonucleotide
cagucuguuucagggucag

SEQ ID NO: 676673 - RNA, 19 nt, Artificial Sequence
  Description of Artificial Sequence: Synthetic oligonucleotide
ccuacugacagagacagua

SEQ ID NO: 676674 - RNA, 19 nt, Artificial Sequence
  Description of Artificial Sequence: Synthetic oligonucleotide
cccaacccuacugacagag

SEQ ID NO: 676675 - RNA, 19 nt, Artificial Sequence
  Description of Artificial Sequence: Synthetic oligonucleotide
gcuggggaaaggugaauuc

SEQ ID NO: 676676 - RNA, 19 nt, Artificial Sequence
  Description of Artificial Sequence: Synthetic oligonucleotide
gauucggcucuuggcagga

SEQ ID NO: 676677 - RNA, 19 nt, Artificial Sequence
  Description of Artificial Sequence: Synthetic oligonucleotide
ucccuugcccuagggacac

SEQ ID NO: 676678 - RNA, 19 nt, Artificial Sequence
  Description of Artificial Sequence: Synthetic oligonucleotide
ggaggccucuagcuaacug

SEQ ID NO: 676679 - RNA, 19 nt, Artificial Sequence
  Description of Artificial Sequence: Synthetic oligonucleotide
ugcuacuuaccuggcguua

SEQ ID NO: 676680 - RNA, 19 nt, Artificial Sequence
  Description of Artificial Sequence: Synthetic oligonucleotide
cuacaggggagaggccucc

SEQ ID NO: 676681 - RNA, 19 nt, Artificial Sequence
  Description of Artificial Sequence: Synthetic oligonucleotide
gggcgagacagacacgcac

SEQ ID NO: 676682 - RNA, 19 nt, Artificial Sequence
  Description of Artificial Sequence: Synthetic oligonucleotide
gugagguaucuggacacuc

SEQ ID NO: 676683 - RNA, 19 nt, Artificial Sequence
  Description of Artificial Sequence: Synthetic oligonucleotide
uagcuaacugaaggcccca

SEQ ID NO: 676684 - RNA, 19 nt, Artificial Sequence
  Description of Artificial Sequence: Synthetic oligonucleotide
gaaagcgggaccaggcccu

SEQ ID NO: 676685 - RNA, 19 nt, Artificial Sequence
  Description of Artificial Sequence: Synthetic oligonucleotide
guagagagauggggacucc

SEQ ID NO: 676686 - RNA, 19 nt, Artificial Sequence
  Description of Artificial Sequence: Synthetic oligonucleotide
aggccggagggcuuggguu

SEQ ID NO: 676687 - RNA, 19 nt, Artificial Sequence
  Description of Artificial Sequence: Synthetic oligonucleotide
uaagggucucacgcccucu

SEQ ID NO: 676688 - RNA, 19 nt, Artificial Sequence
  Description of Artificial Sequence: Synthetic oligonucleotide
cacuccccugcaaggguac

SEQ ID NO: 676689 - RNA, 19 nt, Artificial Sequence
  Description of Artificial Sequence: Synthetic oligonucleotide
cgaacuauaccuucacaga

SEQ ID NO: 676690 - RNA, 19 nt, Artificial Sequence
  Description of Artificial Sequence: Synthetic oligonucleotide
aggaggaguuugcuacuua

SEQ ID NO: 676691 - RNA, 19 nt, Artificial Sequence
  Description of Artificial Sequence: Synthetic oligonucleotide
ggugaucugccaaggggug

SEQ ID NO: 676692 - RNA, 19 nt, Artificial Sequence
  Description of Artificial Sequence: Synthetic oligonucleotide
guuauugcagggguucccu

SEQ ID NO: 676693 - RNA, 19 nt, Artificial Sequence
  Description of Artificial Sequence: Synthetic oligonucleotide
gagaaguaaauaacacauu

SEQ ID NO: 676694 - RNA, 19 nt, Artificial Sequence
  Description of Artificial Sequence: Synthetic oligonucleotide
uacguaccuaaagucucuu

SEQ ID NO: 676695 - RNA, 19 nt, Artificial Sequence
  Description of Artificial Sequence: Synthetic oligonucleotide
ggccuacaagcucccagcc

SEQ ID NO: 676696 - RNA, 19 nt, Artificial Sequence
  Description of Artificial Sequence: Synthetic oligonucleotide
aggaucucgcuuccuuguu

SEQ ID NO: 676697 - RNA, 19 nt, Artificial Sequence
  Description of Artificial Sequence: Synthetic oligonucleotide
gcgagacaggagaaugagg

SEQ ID NO: 676698 - RNA, 19 nt, Artificial Sequence
  Description of Artificial Sequence: Synthetic oligonucleotide
cuacguaccuaaagucucu

SEQ ID NO: 676699 - RNA, 19 nt, Artificial Sequence
  Description of Artificial Sequence: Synthetic oligonucleotide
caacaaagccccgguucug

SEQ ID NO: 676700 - RNA, 19 nt, Artificial Sequence
  Description of Artificial Sequence: Synthetic oligonucleotide
ccuuguuauugcagaucag

SEQ ID NO: 676701 - RNA, 19 nt, Artificial Sequence
  Description of Artificial Sequence: Synthetic oligonucleotide
cagggagaccuauagcccu

SEQ ID NO: 676702 - RNA, 19 nt, Artificial Sequence
  Description of Artificial Sequence: Synthetic oligonucleotide
ccuagggacacaggagugc

SEQ ID NO: 676703 - RNA, 19 nt, Artificial Sequence
  Description of Artificial Sequence: Synthetic oligonucleotide
aggccucuagcuaacugaa

SEQ ID NO: 676704 - RNA, 19 nt, Artificial Sequence
  Description of Artificial Sequence: Synthetic oligonucleotide
aaacacaggccuggcucuu

SEQ ID NO: 676705 - RNA, 19 nt, Artificial Sequence
  Description of Artificial Sequence: Synthetic oligonucleotide
gcacauacgugcgcgaaca

SEQ ID NO: 676706 - RNA, 19 nt, Artificial Sequence
  Description of Artificial Sequence: Synthetic oligonucleotide
cuagaaugacccagaacuu

SEQ ID NO: 676707 - RNA, 19 nt, Artificial Sequence
  Description of Artificial Sequence: Synthetic oligonucleotide
gcggcugggaaggagggcc

SEQ ID NO: 676708 - RNA, 19 nt, Artificial Sequence
  Description of Artificial Sequence: Synthetic oligonucleotide
ggguguguagagagauggg

SEQ ID NO: 676709 - RNA, 19 nt, Artificial Sequence
  Description of Artificial Sequence: Synthetic oligonucleotide
aggguaucucuagacuuuu

SEQ ID NO: 676710 - RNA, 19 nt, Artificial Sequence
  Description of Artificial Sequence: Synthetic oligonucleotide
gggucucacgcccucucug

SEQ ID NO: 676711 - RNA, 19 nt, Artificial Sequence
  Description of Artificial Sequence: Synthetic oligonucleotide
ucccaacccuacugacaga

SEQ ID NO: 676712 - RNA, 19 nt, Artificial Sequence
  Description of Artificial Sequence: Synthetic oligonucleotide
gcgaacaugaacgaacuau

SEQ ID NO: 676713 - RNA, 19 nt, Artificial Sequence
  Description of Artificial Sequence: Synthetic oligonucleotide
caaggggugugaagcgcca

SEQ ID NO: 676714 - RNA, 19 nt, Artificial Sequence
  Description of Artificial Sequence: Synthetic oligonucleotide
uacaggggagaggccuccc

SEQ ID NO: 676715 - RNA, 19 nt, Artificial Sequence
  Description of Artificial Sequence: Synthetic oligonucleotide
gggcgcacgagggaugcgg

SEQ ID NO: 676716 - RNA, 19 nt, Artificial Sequence
  Description of Artificial Sequence: Synthetic oligonucleotide
ugccacagacuugcacugu

SEQ ID NO: 676717 - RNA, 19 nt, Artificial Sequence
  Description of Artificial Sequence: Synthetic oligonucleotide
agagccagacccagucagu

SEQ ID NO: 676718 - RNA, 19 nt, Artificial Sequence
  Description of Artificial Sequence: Synthetic oligonucleotide
gggcccuguguccacuaag

SEQ ID NO: 676719 - RNA, 19 nt, Artificial Sequence
  Description of Artificial Sequence: Synthetic oligonucleotide
guagggcuccucugcucac

SEQ ID NO: 676720 - RNA, 19 nt, Artificial Sequence
  Description of Artificial Sequence: Synthetic oligonucleotide
cuccuagaaugacccagaa

SEQ ID NO: 676721 - RNA, 19 nt, Artificial Sequence
  Description of Artificial Sequence: Synthetic oligonucleotide
ggcuacguaccuaaagucu

SEQ ID NO: 676722 - RNA, 19 nt, Artificial Sequence
  Description of Artificial Sequence: Synthetic oligonucleotide
cuauccagggagcuccccu

SEQ ID NO: 676723 - RNA, 19 nt, Artificial Sequence
  Description of Artificial Sequence: Synthetic oligonucleotide
cugacauccugggcacaac

SEQ ID NO: 676724 - RNA, 19 nt, Artificial Sequence
  Description of Artificial Sequence: Synthetic oligonucleotide
ggcgagacagacacgcaca

SEQ ID NO: 676725 - RNA, 19 nt, Artificial Sequence
  Description of Artificial Sequence: Synthetic oligonucleotide
ggaagauuauagggugauc

SEQ ID NO: 676726 - RNA, 19 nt, Artificial Sequence
  Description of Artificial Sequence: Synthetic oligonucleotide
gggauaggggaggcgagac

SEQ ID NO: 676727 - RNA, 19 nt, Artificial Sequence
  Description of Artificial Sequence: Synthetic oligonucleotide
cagagcucagucuggccua

SEQ ID NO: 676728 - RNA, 19 nt, Artificial Sequence
  Description of Artificial Sequence: Synthetic oligonucleotide
ggagaccuauagcccuuug

SEQ ID NO: 676729 - RNA, 19 nt, Artificial Sequence
  Description of Artificial Sequence: Synthetic oligonucleotide
ucccugcuuguugggugcc

SEQ ID NO: 676730 - RNA, 19 nt, Artificial Sequence
  Description of Artificial Sequence: Synthetic oligonucleotide
ggccuaaggcaagaggaga

SEQ ID NO: 676731 - RNA, 19 nt, Artificial Sequence
  Description of Artificial Sequence: Synthetic oligonucleotide
ggguacuggccuagaacug

SEQ ID NO: 676732 - RNA, 19 nt, Artificial Sequence
  Description of Artificial Sequence: Synthetic oligonucleotide
cccuagggacacaggagug

SEQ ID NO: 676733 - RNA, 19 nt, Artificial Sequence
  Description of Artificial Sequence: Synthetic oligonucleotide
gggucccaacccuacugac

SEQ ID NO: 676734 - RNA, 19 nt, Artificial Sequence
  Description of Artificial Sequence: Synthetic oligonucleotide
aaguagcggcugggaagga

SEQ ID NO: 676735 - RNA, 19 nt, Artificial Sequence
  Description of Artificial Sequence: Synthetic oligonucleotide
acgcccucucugcccaaca

SEQ ID NO: 676736 - RNA, 19 nt, Artificial Sequence
  Description of Artificial Sequence: Synthetic oligonucleotide
ggcaaagggucccaacccu

SEQ ID NO: 676737 - RNA, 19 nt, Artificial Sequence
  Description of Artificial Sequence: Synthetic oligonucleotide
ggcugccaccucugaacag

SEQ ID NO: 676738 - RNA, 19 nt, Artificial Sequence
  Description of Artificial Sequence: Synthetic oligonucleotide
ggauaggggaggcgagaca

SEQ ID NO: 676739 - RNA, 19 nt, Artificial Sequence
  Description of Artificial Sequence: Synthetic oligonucleotide
acgcacauacgugcgcgaa

SEQ ID NO: 676740 - RNA, 19 nt, Artificial Sequence
  Description of Artificial Sequence: Synthetic oligonucleotide
ggucccaacccuacugaca

SEQ ID NO: 676741 - RNA, 19 nt, Artificial Sequence
  Description of Artificial Sequence: Synthetic oligonucleotide
acaggagaaugaggccgga

SEQ ID NO: 676742 - RNA, 19 nt, Artificial Sequence
  Description of Artificial Sequence: Synthetic oligonucleotide
cguaccuaaagucucuucu

SEQ ID NO: 676743 - RNA, 19 nt, Artificial Sequence
  Description of Artificial Sequence: Synthetic oligonucleotide
gccaaggggugugaagcgc

SEQ ID NO: 676744 - RNA, 19 nt, Artificial Sequence
  Description of Artificial Sequence: Synthetic oligonucleotide
auucggcucuuggcaggag

SEQ ID NO: 676745 - RNA, 19 nt, Artificial Sequence
  Description of Artificial Sequence: Synthetic oligonucleotide
gcccucucugcccaacaac

SEQ ID NO: 676746 - RNA, 19 nt, Artificial Sequence
  Description of Artificial Sequence: Synthetic oligonucleotide
gggugaucugccaaggggu

SEQ ID NO: 676747 - RNA, 19 nt, Artificial Sequence
  Description of Artificial Sequence: Synthetic oligonucleotide
ggaucucgcuuccuuguua

SEQ ID NO: 676748 - RNA, 19 nt, Artificial Sequence
  Description of Artificial Sequence: Synthetic oligonucleotide
gcccuagggacacaggagu

SEQ ID NO: 676749 - RNA, 19 nt, Artificial Sequence
  Description of Artificial Sequence: Synthetic oligonucleotide
guacugugcugugggcuca

SEQ ID NO: 676750 - RNA, 19 nt, Artificial Sequence
  Description of Artificial Sequence: Synthetic oligonucleotide
augaggccggagggcuugg

SEQ ID NO: 676751 - RNA, 19 nt, Artificial Sequence
  Description of Artificial Sequence: Synthetic oligonucleotide
acgagggaugcgggauguc

SEQ ID NO: 676752 - RNA, 19 nt, Artificial Sequence
  Description of Artificial Sequence: Synthetic oligonucleotide
gugaagcgccaggaggguc

SEQ ID NO: 676753 - RNA, 19 nt, Artificial Sequence
  Description of Artificial Sequence: Synthetic oligonucleotide
gaagcgccaggagggucca

SEQ ID NO: 676754 - RNA, 19 nt, Artificial Sequence
  Description of Artificial Sequence: Synthetic oligonucleotide
ggcgcacgagggaugcggg

SEQ ID NO: 676755 - RNA, 19 nt, Artificial Sequence
  Description of Artificial Sequence: Synthetic oligonucleotide
caccucuccuaaagggcaa

SEQ ID NO: 676756 - RNA, 19 nt, Artificial Sequence
  Description of Artificial Sequence: Synthetic oligonucleotide
gcagggguucccuaagccu

SEQ ID NO: 676757 - RNA, 19 nt, Artificial Sequence
  Description of Artificial Sequence: Synthetic oligonucleotide
accucuccuaaagggcaaa

SEQ ID NO: 676758 - RNA, 19 nt, Artificial Sequence
  Description of Artificial Sequence: Synthetic oligonucleotide
gguuccacccaggcccugc

SEQ ID NO: 676759 - RNA, 19 nt, Artificial Sequence
  Description of Artificial Sequence: Synthetic oligonucleotide
auacgugcgcgaacaugaa

SEQ ID NO: 676760 - RNA, 19 nt, Artificial Sequence
  Description of Artificial Sequence: Synthetic oligonucleotide
uggcguuaugugggcccug

SEQ ID NO: 676761 - RNA, 19 nt, Artificial Sequence
  Description of Artificial Sequence: Synthetic oligonucleotide
gaucuggugggaggccucu

SEQ ID NO: 676762 - RNA, 19 nt, Artificial Sequence
  Description of Artificial Sequence: Synthetic oligonucleotide
gcuaacugaaggccccacu

SEQ ID NO: 676763 - RNA, 19 nt, Artificial Sequence
  Description of Artificial Sequence: Synthetic oligonucleotide
agggagaccuauagcccuu

SEQ ID NO: 676764 - RNA, 19 nt, Artificial Sequence
  Description of Artificial Sequence: Synthetic oligonucleotide
caccuacuggaacucugcu

SEQ ID NO: 676765 - RNA, 19 nt, Artificial Sequence
  Description of Artificial Sequence: Synthetic oligonucleotide
cucuagacuuuugcuacau

SEQ ID NO: 676766 - RNA, 19 nt, Artificial Sequence
  Description of Artificial Sequence: Synthetic oligonucleotide
cccuaggagaggcaaccca

SEQ ID NO: 676767 - RNA, 19 nt, Artificial Sequence
  Description of Artificial Sequence: Synthetic oligonucleotide
ggacccuaggagaggcaac

SEQ ID NO: 676768 - RNA, 19 nt, Artificial Sequence
  Description of Artificial Sequence: Synthetic oligonucleotide
agggcgcacgagggaugcg

SEQ ID NO: 676769 - RNA, 19 nt, Artificial Sequence
  Description of Artificial Sequence: Synthetic oligonucleotide
gugaucugccaaggggugu

SEQ ID NO: 676770 - RNA, 19 nt, Artificial Sequence
  Description of Artificial Sequence: Synthetic oligonucleotide
aaaccuccucagggccaaa

SEQ ID NO: 676771 - RNA, 19 nt, Artificial Sequence
  Description of Artificial Sequence: Synthetic oligonucleotide
gugcgcgaacaugaacgaa

SEQ ID NO: 676772 - RNA, 19 nt, Artificial Sequence
  Description of Artificial Sequence: Synthetic oligonucleotide
gccccugggaagcaccaaa

SEQ ID NO: 676773 - RNA, 19 nt, Artificial Sequence
  Description of Artificial Sequence: Synthetic oligonucleotide
gcguuaugugggcccugug

SEQ ID NO: 676774 - RNA, 19 nt, Artificial Sequence
  Description of Artificial Sequence: Synthetic oligonucleotide
gggagaggccucccacaca

SEQ ID NO: 676775 - RNA, 19 nt, Artificial Sequence
  Description of Artificial Sequence: Synthetic oligonucleotide
caacaacaaagccccgguu

SEQ ID NO: 676776 - RNA, 19 nt, Artificial Sequence
  Description of Artificial Sequence: Synthetic oligonucleotide
ggggcaccuacuggaacuc

SEQ ID NO: 676777 - RNA, 19 nt, Artificial Sequence
  Description of Artificial Sequence: Synthetic oligonucleotide
cuacgauguuauugauuuu

SEQ ID NO: 676778 - RNA, 19 nt, Artificial Sequence
  Description of Artificial Sequence: Synthetic oligonucleotide
cgcacauacgugcgcgaac

SEQ ID NO: 676779 - RNA, 19 nt, Artificial Sequence
  Description of Artificial Sequence: Synthetic oligonucleotide
gcaaagggucccaacccua

SEQ ID NO: 676780 - RNA, 19 nt, Artificial Sequence
  Description of Artificial Sequence: Synthetic oligonucleotide
gaggccucccacacaggau

SEQ ID NO: 676781 - RNA, 19 nt, Artificial Sequence
  Description of Artificial Sequence: Synthetic oligonucleotide
ggccaaaggaugccagaau

SEQ ID NO: 676782 - RNA, 19 nt, Artificial Sequence
  Description of Artificial Sequence: Synthetic oligonucleotide
cgugcgcgaacaugaacga

SEQ ID NO: 676783 - RNA, 19 nt, Artificial Sequence
  Description of Artificial Sequence: Synthetic oligonucleotide
gcuacuuaccuggcguuau

SEQ ID NO: 676784 - RNA, 19 nt, Artificial Sequence
  Description of Artificial Sequence: Synthetic oligonucleotide
gcgagacagacacgcacau

SEQ ID NO: 676785 - RNA, 19 nt, Artificial Sequence
  Description of Artificial Sequence: Synthetic oligonucleotide
gggaggcgagacaggagaa

SEQ ID NO: 676786 - RNA, 19 nt, Artificial Sequence
  Description of Artificial Sequence: Synthetic oligonucleotide
ggccuagaacugaggcuca

SEQ ID NO: 676787 - RNA, 19 nt, Artificial Sequence
  Description of Artificial Sequence: Synthetic oligonucleotide
cuggcguuaugugggcccu

SEQ ID NO: 676788 - RNA, 19 nt, Artificial Sequence
  Description of Artificial Sequence: Synthetic oligonucleotide
gcccuggggcgagacagac

SEQ ID NO: 676789 - RNA, 19 nt, Artificial Sequence
  Description of Artificial Sequence: Synthetic oligonucleotide
ccaacagcaggugucuccu

SEQ ID NO: 676790 - RNA, 19 nt, Artificial Sequence
  Description of Artificial Sequence: Synthetic oligonucleotide
aucuggugggaggccucua

SEQ ID NO: 676791 - RNA, 19 nt, Artificial Sequence
  Description of Artificial Sequence: Synthetic oligonucleotide
cacauacgugcgcgaacau

SEQ ID NO: 676792 - RNA, 19 nt, Artificial Sequence
  Description of Artificial Sequence: Synthetic oligonucleotide
gcaaggguacuggccuaga

SEQ ID NO: 676793 - RNA, 19 nt, Artificial Sequence
  Description of Artificial Sequence: Synthetic oligonucleotide
gcgcacgagggaugcggga

SEQ ID NO: 676794 - RNA, 19 nt, Artificial Sequence
  Description of Artificial Sequence: Synthetic oligonucleotide
ggguggcuuuccuucuggu

SEQ ID NO: 676795 - RNA, 19 nt, Artificial Sequence
  Description of Artificial Sequence: Synthetic oligonucleotide
ggcguuaugugggcccugu

SEQ ID NO: 676796 - RNA, 19 nt, Artificial Sequence
  Description of Artificial Sequence: Synthetic oligonucleotide
cccugcuuguugggugccc

SEQ ID NO: 676797 - RNA, 19 nt, Artificial Sequence
  Description of Artificial Sequence: Synthetic oligonucleotide
caggaggaguuugcuacuu

SEQ ID NO: 676798 - RNA, 19 nt, Artificial Sequence
  Description of Artificial Sequence: Synthetic oligonucleotide
ggggcgagacagacacgca

SEQ ID NO: 676799 - RNA, 19 nt, Artificial Sequence
  Description of Artificial Sequence: Synthetic oligonucleotide
ccuagaacugaggcucaua

SEQ ID NO: 676800 - RNA, 19 nt, Artificial Sequence
  Description of Artificial Sequence: Synthetic oligonucleotide
ccuccacguugagcagggg

SEQ ID NO: 676801 - RNA, 19 nt, Artificial Sequence
  Description of Artificial Sequence: Synthetic oligonucleotide
gggaugcgggaugucuacu

SEQ ID NO: 676802 - RNA, 19 nt, Artificial Sequence
  Description of Artificial Sequence: Synthetic oligonucleotide
cccuggggcgagacagaca

SEQ ID NO: 676803 - RNA, 19 nt, Artificial Sequence
  Description of Artificial Sequence: Synthetic oligonucleotide
ggguuccacccaggcccug

SEQ ID NO: 676804 - RNA, 19 nt, Artificial Sequence
  Description of Artificial Sequence: Synthetic oligonucleotide
cgggaugucuacugaggau

SEQ ID NO: 676805 - RNA, 19 nt, Artificial Sequence
  Description of Artificial Sequence: Synthetic oligonucleotide
gccuagaacugaggcucau

SEQ ID NO: 676806 - RNA, 19 nt, Artificial Sequence
  Description of Artificial Sequence: Synthetic oligonucleotide
cgagacagacacgcacaua

SEQ ID NO: 676807 - RNA, 19 nt, Artificial Sequence
  Description of Artificial Sequence: Synthetic oligonucleotide
cccuacugacagagacagu

SEQ ID NO: 676808 - RNA, 19 nt, Artificial Sequence
  Description of Artificial Sequence: Synthetic oligonucleotide
cgcacgagggaugcgggau

SEQ ID NO: 676809 - RNA, 19 nt, Artificial Sequence
  Description of Artificial Sequence: Synthetic oligonucleotide
aaugcaacguaguaggcac

SEQ ID NO: 676810 - RNA, 19 nt, Artificial Sequence
  Description of Artificial Sequence: Synthetic oligonucleotide
uguguagugaaucauagac

SEQ ID NO: 676811 - RNA, 19 nt, Artificial Sequence
  Description of Artificial Sequence: Synthetic oligonucleotide
uguagugaaucauagacgc

SEQ ID NO: 676812 - RNA, 19 nt, Artificial Sequence
  Description of Artificial Sequence: Synthetic oligonucleotide
uucauuucgaaugagauca

SEQ ID NO: 676813 - RNA, 19 nt, Artificial Sequence
  Description of Artificial Sequence: Synthetic oligonucleotide
aagagauuaaccagggucc

SEQ ID NO: 676814 - RNA, 19 nt, Artificial Sequence
  Description of Artificial Sequence: Synthetic oligonucleotide
aaauaaaacauaguaguug

SEQ ID NO: 676815 - RNA, 19 nt, Artificial Sequence
  Description of Artificial Sequence: Synthetic oligonucleotide
uauggauaccaccacacgg

SEQ ID NO: 676816 - RNA, 19 nt, Artificial Sequence
  Description of Artificial Sequence: Synthetic oligonucleotide
ugaaugaacagaacaauca

SEQ ID NO: 676817 - RNA, 19 nt, Artificial Sequence
  Description of Artificial Sequence: Synthetic oligonucleotide
ugaaagauaacaucacuug

SEQ ID NO: 676818 - RNA, 19 nt, Artificial Sequence
  Description of Artificial Sequence: Synthetic oligonucleotide
guaaguagcaccaagcggg

SEQ ID NO: 676819 - RNA, 19 nt, Artificial Sequence
  Description of Artificial Sequence: Synthetic oligonucleotide
uuaaguucaaucuuuuacu

SEQ ID NO: 676820 - RNA, 19 nt, Artificial Sequence
  Description of Artificial Sequence: Synthetic oligonucleotide
ucgaaugagaucaggagag

SEQ ID NO: 676821 - RNA, 19 nt, Artificial Sequence
  Description of Artificial Sequence: Synthetic oligonucleotide
gaagagauuaaccaggguc

SEQ ID NO: 676822 - RNA, 19 nt, Artificial Sequence
  Description of Artificial Sequence: Synthetic oligonucleotide
uauauaaacaucugcugug

SEQ ID NO: 676823 - RNA, 19 nt, Artificial Sequence
  Description of Artificial Sequence: Synthetic oligonucleotide
uuucaaaacauaauaguau

SEQ ID NO: 676824 - RNA, 19 nt, Artificial Sequence
  Description of Artificial Sequence: Synthetic oligonucleotide
cuuaaguucaaucuuuuac

SEQ ID NO: 676825 - RNA, 19 nt, Artificial Sequence
  Description of Artificial Sequence: Synthetic oligonucleotide
aggaugauuguauggauac

SEQ ID NO: 676826 - RNA, 19 nt, Artificial Sequence
  Description of Artificial Sequence: Synthetic oligonucleotide
ucuauauaaacaucugcug

SEQ ID NO: 676827 - RNA, 19 nt, Artificial Sequence
  Description of Artificial Sequence: Synthetic oligonucleotide
uuaacggucgaugaaacag

SEQ ID NO: 676828 - RNA, 19 nt, Artificial Sequence
  Description of Artificial Sequence: Synthetic oligonucleotide
augggauacaucugaaggc

SEQ ID NO: 676829 - RNA, 19 nt, Artificial Sequence
  Description of Artificial Sequence: Synthetic oligonucleotide
uuaaggcugugauaggugg

SEQ ID NO: 676830 - RNA, 19 nt, Artificial Sequence
  Description of Artificial Sequence: Synthetic oligonucleotide
aguucguaacuguugaggg

SEQ ID NO: 676831 - RNA, 19 nt, Artificial Sequence
  Description of Artificial Sequence: Synthetic oligonucleotide
uuucgaaugagaucaggag

SEQ ID NO: 676832 - RNA, 19 nt, Artificial Sequence
  Description of Artificial Sequence: Synthetic oligonucleotide
aguaaguagcaccaagcgg

SEQ ID NO: 676833 - RNA, 19 nt, Artificial Sequence
  Description of Artificial Sequence: Synthetic oligonucleotide
uaaugaggugcucacauga

SEQ ID NO: 676834 - RNA, 19 nt, Artificial Sequence
  Description of Artificial Sequence: Synthetic oligonucleotide
ucugaguucucccucaugu

SEQ ID NO: 676835 - RNA, 19 nt, Artificial Sequence
  Description of Artificial Sequence: Synthetic oligonucleotide
aucacuuguuuauggauac

SEQ ID NO: 676836 - RNA, 19 nt, Artificial Sequence
  Description of Artificial Sequence: Synthetic oligonucleotide
uucgaaugagaucaggaga

SEQ ID NO: 676837 - RNA, 19 nt, Artificial Sequence
  Description of Artificial Sequence: Synthetic oligonucleotide
uguuuauggauacauuuaa

SEQ ID NO: 676838 - RNA, 19 nt, Artificial Sequence
  Description of Artificial Sequence: Synthetic oligonucleotide
ugauaggugggacuggaag

SEQ ID NO: 676839 - RNA, 19 nt, Artificial Sequence
  Description of Artificial Sequence: Synthetic oligonucleotide
ucaacuuauuucaacugca

SEQ ID NO: 676840 - RNA, 19 nt, Artificial Sequence
  Description of Artificial Sequence: Synthetic oligonucleotide
uaaacuguucuuuuagaga

SEQ ID NO: 676841 - RNA, 19 nt, Artificial Sequence
  Description of Artificial Sequence: Synthetic oligonucleotide
caggaauuuggcaaugacg

SEQ ID NO: 676842 - RNA, 19 nt, Artificial Sequence
  Description of Artificial Sequence: Synthetic oligonucleotide
uugucaacuuauuucaacu

SEQ ID NO: 676843 - RNA, 19 nt, Artificial Sequence
  Description of Artificial Sequence: Synthetic oligonucleotide
ugggagaaaugcaacguag

SEQ ID NO: 676844 - RNA, 19 nt, Artificial Sequence
  Description of Artificial Sequence: Synthetic oligonucleotide
uaacggucgaugaaacagg

SEQ ID NO: 676845 - RNA, 19 nt, Artificial Sequence
  Description of Artificial Sequence: Synthetic oligonucleotide
aaaauagaucguaugaaaa

SEQ ID NO: 676846 - RNA, 19 nt, Artificial Sequence
  Description of Artificial Sequence: Synthetic oligonucleotide
aaacugcccacauucgaag

SEQ ID NO: 676847 - RNA, 19 nt, Artificial Sequence
  Description of Artificial Sequence: Synthetic oligonucleotide
gguuaccagacccagaccg

SEQ ID NO: 676848 - RNA, 19 nt, Artificial Sequence
  Description of Artificial Sequence: Synthetic oligonucleotide
auucaaugaaguacaagac

SEQ ID NO: 676849 - RNA, 19 nt, Artificial Sequence
  Description of Artificial Sequence: Synthetic oligonucleotide
uagguuaccagacccagac

SEQ ID NO: 676850 - RNA, 19 nt, Artificial Sequence
  Description of Artificial Sequence: Synthetic oligonucleotide
ugccaggugauaaucaaug

SEQ ID NO: 676851 - RNA, 19 nt, Artificial Sequence
  Description of Artificial Sequence: Synthetic oligonucleotide
uggcucuauauaaacaucu

SEQ ID NO: 676852 - RNA, 19 nt, Artificial Sequence
  Description of Artificial Sequence: Synthetic oligonucleotide
auugcuguagaacccaugu

SEQ ID NO: 676853 - RNA, 19 nt, Artificial Sequence
  Description of Artificial Sequence: Synthetic oligonucleotide
aaucuuuuacugaagggca

SEQ ID NO: 676854 - RNA, 19 nt, Artificial Sequence
  Description of Artificial Sequence: Synthetic oligonucleotide
uagugaaucauagacgcug

SEQ ID NO: 676855 - RNA, 19 nt, Artificial Sequence
  Description of Artificial Sequence: Synthetic oligonucleotide
augaggugcucacaugacc

SEQ ID NO: 676856 - RNA, 19 nt, Artificial Sequence
  Description of Artificial Sequence: Synthetic oligonucleotide
ugaggugcucacaugacca

SEQ ID NO: 676857 - RNA, 19 nt, Artificial Sequence
  Description of Artificial Sequence: Synthetic oligonucleotide
agaacaggcucccaucgac

SEQ ID NO: 676858 - RNA, 19 nt, Artificial Sequence
  Description of Artificial Sequence: Synthetic oligonucleotide
gucaacuuauuucaacugc

SEQ ID NO: 676859 - RNA, 19 nt, Artificial Sequence
  Description of Artificial Sequence: Synthetic oligonucleotide
aaugguugucaacuuauuu

SEQ ID NO: 676860 - RNA, 19 nt, Artificial Sequence
  Description of Artificial Sequence: Synthetic oligonucleotide
ugauuguauggauaccacc

SEQ ID NO: 676861 - RNA, 19 nt, Artificial Sequence
  Description of Artificial Sequence: Synthetic oligonucleotide
gaagaugugcucuacuauc

SEQ ID NO: 676862 - RNA, 19 nt, Artificial Sequence
  Description of Artificial Sequence: Synthetic oligonucleotide
acuaacacaugaaagauaa

SEQ ID NO: 676863 - RNA, 19 nt, Artificial Sequence
  Description of Artificial Sequence: Synthetic oligonucleotide
ugucaacuuauuucaacug

SEQ ID NO: 676864 - RNA, 19 nt, Artificial Sequence
  Description of Artificial Sequence: Synthetic oligonucleotide
auauuguguuuucugacca

SEQ ID NO: 676865 - RNA, 19 nt, Artificial Sequence
  Description of Artificial Sequence: Synthetic oligonucleotide
gaguucguaacuguugagg

SEQ ID NO: 676866 - RNA, 19 nt, Artificial Sequence
  Description of Artificial Sequence: Synthetic oligonucleotide
guaguaggcacugaagagg

SEQ ID NO: 676867 - RNA, 19 nt, Artificial Sequence
  Description of Artificial Sequence: Synthetic oligonucleotide
aauuuggcaaugacgaaca

SEQ ID NO: 676868 - RNA, 19 nt, Artificial Sequence
  Description of Artificial Sequence: Synthetic oligonucleotide
ggagcauugcuguagaacc

SEQ ID NO: 676869 - RNA, 19 nt, Artificial Sequence
  Description of Artificial Sequence: Synthetic oligonucleotide
aguaugcccugccuaagac

SEQ ID NO: 676870 - RNA, 19 nt, Artificial Sequence
  Description of Artificial Sequence: Synthetic oligonucleotide
uuuuaucugaguucucccu

SEQ ID NO: 676871 - RNA, 19 nt, Artificial Sequence
  Description of Artificial Sequence: Synthetic oligonucleotide
uuuacugaagggcauccuc

SEQ ID NO: 676872 - RNA, 19 nt, Artificial Sequence
  Description of Artificial Sequence: Synthetic oligonucleotide
gaugauuguauggauacca

SEQ ID NO: 676873 - RNA, 19 nt, Artificial Sequence
  Description of Artificial Sequence: Synthetic oligonucleotide
aaucgugucgggucacuag

SEQ ID NO: 676874 - RNA, 19 nt, Artificial Sequence
  Description of Artificial Sequence: Synthetic oligonucleotide
aaugacgaacaggaccugg

SEQ ID NO: 676875 - RNA, 19 nt, Artificial Sequence
  Description of Artificial Sequence: Synthetic oligonucleotide
acugccacguuguaagguc

SEQ ID NO: 676876 - RNA, 19 nt, Artificial Sequence
  Description of Artificial Sequence: Synthetic oligonucleotide
aaaugcaacguaguaggca

SEQ ID NO: 676877 - RNA, 19 nt, Artificial Sequence
  Description of Artificial Sequence: Synthetic oligonucleotide
ucuacuaucuugguggaaa

SEQ ID NO: 676878 - RNA, 19 nt, Artificial Sequence
  Description of Artificial Sequence: Synthetic oligonucleotide
agauuaaccaggguccaac

SEQ ID NO: 676879 - RNA, 19 nt, Artificial Sequence
  Description of Artificial Sequence: Synthetic oligonucleotide
gauaacaucacuuguuuau

SEQ ID NO: 676880 - RNA, 19 nt, Artificial Sequence
  Description of Artificial Sequence: Synthetic oligonucleotide
uuaauaucccuuacccuuc

SEQ ID NO: 676881 - RNA, 19 nt, Artificial Sequence
  Description of Artificial Sequence: Synthetic oligonucleotide
uaugcccugccuaagacua

SEQ ID NO: 676882 - RNA, 19 nt, Artificial Sequence
  Description of Artificial Sequence: Synthetic oligonucleotide
accccaucaccacucauac

SEQ ID NO: 676883 - RNA, 19 nt, Artificial Sequence
  Description of Artificial Sequence: Synthetic oligonucleotide
gaaugagaucaggagagag

SEQ ID NO: 676884 - RNA, 19 nt, Artificial Sequence
  Description of Artificial Sequence: Synthetic oligonucleotide
acguaguaggcacugaaga

SEQ ID NO: 676885 - RNA, 19 nt, Artificial Sequence
  Description of Artificial Sequence: Synthetic oligonucleotide
ugacgaacaggaccugggg

SEQ ID NO: 676886 - RNA, 19 nt, Artificial Sequence
  Description of Artificial Sequence: Synthetic oligonucleotide
aaauaaaagcgggcauggg

SEQ ID NO: 676887 - RNA, 19 nt, Artificial Sequence
  Description of Artificial Sequence: Synthetic oligonucleotide
acguuguaaggucccaugg

SEQ ID NO: 676888 - RNA, 19 nt, Artificial Sequence
  Description of Artificial Sequence: Synthetic oligonucleotide
gaccccacgcacucgaacg

SEQ ID NO: 676889 - RNA, 19 nt, Artificial Sequence
  Description of Artificial Sequence: Synthetic oligonucleotide
aucgugucgggucacuagg

SEQ ID NO: 676890 - RNA, 19 nt, Artificial Sequence
  Description of Artificial Sequence: Synthetic oligonucleotide
agaacaaucagcagguaga

SEQ ID NO: 676891 - RNA, 19 nt, Artificial Sequence
  Description of Artificial Sequence: Synthetic oligonucleotide
guguagugaaucauagacg

SEQ ID NO: 676892 - RNA, 19 nt, Artificial Sequence
  Description of Artificial Sequence: Synthetic oligonucleotide
guuccauugccacagccgc

SEQ ID NO: 676893 - RNA, 19 nt, Artificial Sequence
  Description of Artificial Sequence: Synthetic oligonucleotide
auccacaccauaaugaggu

SEQ ID NO: 676894 - RNA, 19 nt, Artificial Sequence
  Description of Artificial Sequence: Synthetic oligonucleotide
aagacuauucugucccgga

SEQ ID NO: 676895 - RNA, 19 nt, Artificial Sequence
  Description of Artificial Sequence: Synthetic oligonucleotide
agugaaucauagacgcugc

SEQ ID NO: 676896 - RNA, 19 nt, Artificial Sequence
  Description of Artificial Sequence: Synthetic oligonucleotide
uugcaacccgggcuaaugg

SEQ ID NO: 676897 - RNA, 19 nt, Artificial Sequence
  Description of Artificial Sequence: Synthetic oligonucleotide
uaagacuauucugucccgg

SEQ ID NO: 676898 - RNA, 19 nt, Artificial Sequence
  Description of Artificial Sequence: Synthetic oligonucleotide
aaccaaagucugcauagaa

SEQ ID NO: 676899 - RNA, 19 nt, Artificial Sequence
  Description of Artificial Sequence: Synthetic oligonucleotide
guucguaacuguugagggg

SEQ ID NO: 676900 - RNA, 19 nt, Artificial Sequence
  Description of Artificial Sequence: Synthetic oligonucleotide
ugucgggucacuagguuac

SEQ ID NO: 676901 - RNA, 19 nt, Artificial Sequence
  Description of Artificial Sequence: Synthetic oligonucleotide
uuccuguuucucaagccug

SEQ ID NO: 676902 - RNA, 19 nt, Artificial Sequence
  Description of Artificial Sequence: Synthetic oligonucleotide
gaacccauguuccaacuuc

SEQ ID NO: 676903 - RNA, 19 nt, Artificial Sequence
  Description of Artificial Sequence: Synthetic oligonucleotide
ugaacggcuuagcugcugc

SEQ ID NO: 676904 - RNA, 19 nt, Artificial Sequence
  Description of Artificial Sequence: Synthetic oligonucleotide
aguaucagagcuguguagu

SEQ ID NO: 676905 - RNA, 19 nt, Artificial Sequence
  Description of Artificial Sequence: Synthetic oligonucleotide
gaaagauaacaucacuugu

SEQ ID NO: 676906 - RNA, 19 nt, Artificial Sequence
  Description of Artificial Sequence: Synthetic oligonucleotide
ucugaccgcagcaaggaau

SEQ ID NO: 676907 - RNA, 19 nt, Artificial Sequence
  Description of Artificial Sequence: Synthetic oligonucleotide
cagugggagaaaugcaacg

SEQ ID NO: 676908 - RNA, 19 nt, Artificial Sequence
  Description of Artificial Sequence: Synthetic oligonucleotide
ugaugaaugcugccaggug

SEQ ID NO: 676909 - RNA, 19 nt, Artificial Sequence
  Description of Artificial Sequence: Synthetic oligonucleotide
aacggcuuagcugcugccg

SEQ ID NO: 676910 - RNA, 19 nt, Artificial Sequence
  Description of Artificial Sequence: Synthetic oligonucleotide
auacaagccuccucgcaag

SEQ ID NO: 676911 - RNA, 19 nt, Artificial Sequence
  Description of Artificial Sequence: Synthetic oligonucleotide
aagaugugcucuacuaucu

SEQ ID NO: 676912 - RNA, 19 nt, Artificial Sequence
  Description of Artificial Sequence: Synthetic oligonucleotide
acauaaacaccaaacgggu

SEQ ID NO: 676913 - RNA, 19 nt, Artificial Sequence
  Description of Artificial Sequence: Synthetic oligonucleotide
aacguaguaggcacugaag

SEQ ID NO: 676914 - RNA, 19 nt, Artificial Sequence
  Description of Artificial Sequence: Synthetic oligonucleotide
uaaguagcaccaagcgggc

SEQ ID NO: 676915 - RNA, 19 nt, Artificial Sequence
  Description of Artificial Sequence: Synthetic oligonucleotide
auagccuuaacggucgaug

SEQ ID NO: 676916 - RNA, 19 nt, Artificial Sequence
  Description of Artificial Sequence: Synthetic oligonucleotide
gaagaggccggccacggac

SEQ ID NO: 676917 - RNA, 19 nt, Artificial Sequence
  Description of Artificial Sequence: Synthetic oligonucleotide
agaagaugugcucuacuau

SEQ ID NO: 676918 - RNA, 19 nt, Artificial Sequence
  Description of Artificial Sequence: Synthetic oligonucleotide
auaaugaggugcucacaug

SEQ ID NO: 676919 - RNA, 19 nt, Artificial Sequence
  Description of Artificial Sequence: Synthetic oligonucleotide
aagguaaagcugaacggcu

SEQ ID NO: 676920 - RNA, 19 nt, Artificial Sequence
  Description of Artificial Sequence: Synthetic oligonucleotide
uuacccuucccaacuuuca

SEQ ID NO: 676921 - RNA, 19 nt, Artificial Sequence
  Description of Artificial Sequence: Synthetic oligonucleotide
auaaaagcgggcaugggau

SEQ ID NO: 676922 - RNA, 19 nt, Artificial Sequence
  Description of Artificial Sequence: Synthetic oligonucleotide
agacuauucugucccggag

SEQ ID NO: 676923 - RNA, 19 nt, Artificial Sequence
  Description of Artificial Sequence: Synthetic oligonucleotide
auagcacuaccauuccugu

SEQ ID NO: 676924 - RNA, 19 nt, Artificial Sequence
  Description of Artificial Sequence: Synthetic oligonucleotide
cuuuuacugaagggcaucc

SEQ ID NO: 676925 - RNA, 19 nt, Artificial Sequence
  Description of Artificial Sequence: Synthetic oligonucleotide
augauuguauggauaccac

SEQ ID NO: 676926 - RNA, 19 nt, Artificial Sequence
  Description of Artificial Sequence: Synthetic oligonucleotide
ucgaugaaacaggaaauaa

SEQ ID NO: 676927 - RNA, 19 nt, Artificial Sequence
  Description of Artificial Sequence: Synthetic oligonucleotide
gacgcaggaugauuguaug

SEQ ID NO: 676928 - RNA, 19 nt, Artificial Sequence
  Description of Artificial Sequence: Synthetic oligonucleotide
acgcaggaugauuguaugg

SEQ ID NO: 676929 - RNA, 19 nt, Artificial Sequence
  Description of Artificial Sequence: Synthetic oligonucleotide
uggauacauuuaauauccc

SEQ ID NO: 676930 - RNA, 19 nt, Artificial Sequence
  Description of Artificial Sequence: Synthetic oligonucleotide
ugaguucguaacuguugag

SEQ ID NO: 676931 - RNA, 19 nt, Artificial Sequence
  Description of Artificial Sequence: Synthetic oligonucleotide
ucccuuacccuucccaacu

SEQ ID NO: 676932 - RNA, 19 nt, Artificial Sequence
  Description of Artificial Sequence: Synthetic oligonucleotide
uagccuuaacggucgauga

SEQ ID NO: 676933 - RNA, 19 nt, Artificial Sequence
  Description of Artificial Sequence: Synthetic oligonucleotide
ugucguaauacuggguacu

SEQ ID NO: 676934 - RNA, 19 nt, Artificial Sequence
  Description of Artificial Sequence: Synthetic oligonucleotide
uagaucguaugaaaauauu

SEQ ID NO: 676935 - RNA, 19 nt, Artificial Sequence
  Description of Artificial Sequence: Synthetic oligonucleotide
ugcucacaugaccagcgca

SEQ ID NO: 676936 - RNA, 19 nt, Artificial Sequence
  Description of Artificial Sequence: Synthetic oligonucleotide
ccucucauguauaauauuc

SEQ ID NO: 676937 - RNA, 19 nt, Artificial Sequence
  Description of Artificial Sequence: Synthetic oligonucleotide
gcccauacaagccuccucg

SEQ ID NO: 676938 - RNA, 19 nt, Artificial Sequence
  Description of Artificial Sequence: Synthetic oligonucleotide
agagcccgaccccaucacc

SEQ ID NO: 676939 - RNA, 19 nt, Artificial Sequence
  Description of Artificial Sequence: Synthetic oligonucleotide
caaacauucuacuucauuu

SEQ ID NO: 676940 - RNA, 19 nt, Artificial Sequence
  Description of Artificial Sequence: Synthetic oligonucleotide
aggcgguggcuucacagac

SEQ ID NO: 676941 - RNA, 19 nt, Artificial Sequence
  Description of Artificial Sequence: Synthetic oligonucleotide
agcagcugauuuauguaac

SEQ ID NO: 676942 - RNA, 19 nt, Artificial Sequence
  Description of Artificial Sequence: Synthetic oligonucleotide
auagaucguaugaaaauau

SEQ ID NO: 676943 - RNA, 19 nt, Artificial Sequence
  Description of Artificial Sequence: Synthetic oligonucleotide
cacauucgaagcaccuucc

SEQ ID NO: 676944 - RNA, 19 nt, Artificial Sequence
  Description of Artificial Sequence: Synthetic oligonucleotide
acucgaacgcccucccuuc

SEQ ID NO: 676945 - RNA, 19 nt, Artificial Sequence
  Description of Artificial Sequence: Synthetic oligonucleotide
uaucagagcuguguaguga

SEQ ID NO: 676946 - RNA, 19 nt, Artificial Sequence
  Description of Artificial Sequence: Synthetic oligonucleotide
aaguagcaccaagcgggcc

SEQ ID NO: 676947 - RNA, 19 nt, Artificial Sequence
  Description of Artificial Sequence: Synthetic oligonucleotide
agaucguaugaaaauauuu

SEQ ID NO: 676948 - RNA, 19 nt, Artificial Sequence
  Description of Artificial Sequence: Synthetic oligonucleotide
uuagagacuccagcaauaa

SEQ ID NO: 676949 - RNA, 19 nt, Artificial Sequence
  Description of Artificial Sequence: Synthetic oligonucleotide
ugugauaggugggacugga

SEQ ID NO: 676950 - RNA, 19 nt, Artificial Sequence
  Description of Artificial Sequence: Synthetic oligonucleotide
uggaucgcugggaggaggc

SEQ ID NO: 676951 - RNA, 19 nt, Artificial Sequence
  Description of Artificial Sequence: Synthetic oligonucleotide
auuaaggcugugauaggug

SEQ ID NO: 676952 - RNA, 19 nt, Artificial Sequence
  Description of Artificial Sequence: Synthetic oligonucleotide
cauucuacuucauuucgaa

SEQ ID NO: 676953 - RNA, 19 nt, Artificial Sequence
  Description of Artificial Sequence: Synthetic oligonucleotide
ucacaugaccagcgcaugu

SEQ ID NO: 676954 - RNA, 19 nt, Artificial Sequence
  Description of Artificial Sequence: Synthetic oligonucleotide
guaucagagcuguguagug

SEQ ID NO: 676955 - RNA, 19 nt, Artificial Sequence
  Description of Artificial Sequence: Synthetic oligonucleotide
uaggaguaugcccugccua

SEQ ID NO: 676956 - RNA, 19 nt, Artificial Sequence
  Description of Artificial Sequence: Synthetic oligonucleotide
ucccggaggagcuuaaaua

SEQ ID NO: 676957 - RNA, 19 nt, Artificial Sequence
  Description of Artificial Sequence: Synthetic oligonucleotide
uggguacucuucacaaaac

SEQ ID NO: 676958 - RNA, 19 nt, Artificial Sequence
  Description of Artificial Sequence: Synthetic oligonucleotide
ugcaacguaguaggcacug

SEQ ID NO: 676959 - RNA, 19 nt, Artificial Sequence
  Description of Artificial Sequence: Synthetic oligonucleotide
gagaacugaauggcuucgg

SEQ ID NO: 676960 - RNA, 19 nt, Artificial Sequence
  Description of Artificial Sequence: Synthetic oligonucleotide
gaaaugcaacguaguaggc

SEQ ID NO: 676961 - RNA, 19 nt, Artificial Sequence
  Description of Artificial Sequence: Synthetic oligonucleotide
augacgaacaggaccuggg

SEQ ID NO: 676962 - RNA, 19 nt, Artificial Sequence
  Description of Artificial Sequence: Synthetic oligonucleotide
auggcucuauauaaacauc

SEQ ID NO: 676963 - RNA, 19 nt, Artificial Sequence
  Description of Artificial Sequence: Synthetic oligonucleotide
auggauaccaccacacggu

SEQ ID NO: 676964 - RNA, 19 nt, Artificial Sequence
  Description of Artificial Sequence: Synthetic oligonucleotide
ggugauaaucaaugagaug

SEQ ID NO: 676965 - RNA, 19 nt, Artificial Sequence
  Description of Artificial Sequence: Synthetic oligonucleotide
agauaacaucacuuguuua

SEQ ID NO: 676966 - RNA, 19 nt, Artificial Sequence
  Description of Artificial Sequence: Synthetic oligonucleotide
aggugauaaucaaugagau

SEQ ID NO: 676967 - RNA, 19 nt, Artificial Sequence
  Description of Artificial Sequence: Synthetic oligonucleotide
gauuaaggcugugauaggu

SEQ ID NO: 676968 - RNA, 19 nt, Artificial Sequence
  Description of Artificial Sequence: Synthetic oligonucleotide
uagaacccauguuccaacu

SEQ ID NO: 676969 - RNA, 19 nt, Artificial Sequence
  Description of Artificial Sequence: Synthetic oligonucleotide
cacguuguaaggucccaug

SEQ ID NO: 676970 - RNA, 19 nt, Artificial Sequence
  Description of Artificial Sequence: Synthetic oligonucleotide
gccaauagcacuaccauuc

SEQ ID NO: 676971 - RNA, 19 nt, Artificial Sequence
  Description of Artificial Sequence: Synthetic oligonucleotide
ccaucgacugguaagucag

SEQ ID NO: 676972 - RNA, 19 nt, Artificial Sequence
  Description of Artificial Sequence: Synthetic oligonucleotide
aggccaauagcacuaccau

SEQ ID NO: 676973 - RNA, 19 nt, Artificial Sequence
  Description of Artificial Sequence: Synthetic oligonucleotide
aacuuaaguucaaucuuuu

SEQ ID NO: 676974 - RNA, 19 nt, Artificial Sequence
  Description of Artificial Sequence: Synthetic oligonucleotide
augggcguggcauuauuaa

SEQ ID NO: 676975 - RNA, 19 nt, Artificial Sequence
  Description of Artificial Sequence: Synthetic oligonucleotide
aggaguaugcccugccuaa

SEQ ID NO: 676976 - RNA, 19 nt, Artificial Sequence
  Description of Artificial Sequence: Synthetic oligonucleotide
ugcaacccgggcuaauggu

SEQ ID NO: 676977 - RNA, 19 nt, Artificial Sequence
  Description of Artificial Sequence: Synthetic oligonucleotide
ucugaccaaaugugcugug

SEQ ID NO: 676978 - RNA, 19 nt, Artificial Sequence
  Description of Artificial Sequence: Synthetic oligonucleotide
acuuaaguucaaucuuuua

SEQ ID NO: 676979 - RNA, 19 nt, Artificial Sequence
  Description of Artificial Sequence: Synthetic oligonucleotide
uaaugguugucaacuuauu

SEQ ID NO: 676980 - RNA, 19 nt, Artificial Sequence
  Description of Artificial Sequence: Synthetic oligonucleotide
ugugccgcaccaacacccc

SEQ ID NO: 676981 - RNA, 19 nt, Artificial Sequence
  Description of Artificial Sequence: Synthetic oligonucleotide
gaaggccaauagcacuacc

SEQ ID NO: 676982 - RNA, 19 nt, Artificial Sequence
  Description of Artificial Sequence: Synthetic oligonucleotide
aggaugagugccauggaga

SEQ ID NO: 676983 - RNA, 19 nt, Artificial Sequence
  Description of Artificial Sequence: Synthetic oligonucleotide
ugccacguuguaagguccc

SEQ ID NO: 676984 - RNA, 19 nt, Artificial Sequence
  Description of Artificial Sequence: Synthetic oligonucleotide
aacgcccucccuucuuuga

SEQ ID NO: 676985 - RNA, 19 nt, Artificial Sequence
  Description of Artificial Sequence: Synthetic oligonucleotide
uugcguggugagcaugaca

SEQ ID NO: 676986 - RNA, 19 nt, Artificial Sequence
  Description of Artificial Sequence: Synthetic oligonucleotide
ugaauggcuucggaagaga

SEQ ID NO: 676987 - RNA, 19 nt, Artificial Sequence
  Description of Artificial Sequence: Synthetic oligonucleotide
caggguccaacagagcacc

SEQ ID NO: 676988 - RNA, 19 nt, Artificial Sequence
  Description of Artificial Sequence: Synthetic oligonucleotide
uuccauugccacagccgcc

SEQ ID NO: 676989 - RNA, 19 nt, Artificial Sequence
  Description of Artificial Sequence: Synthetic oligonucleotide
gagcauugcuguagaaccc

SEQ ID NO: 676990 - RNA, 19 nt, Artificial Sequence
  Description of Artificial Sequence: Synthetic oligonucleotide
cuggguacucuucacaaaa

SEQ ID NO: 676991 - RNA, 19 nt, Artificial Sequence
  Description of Artificial Sequence: Synthetic oligonucleotide
aaugugcuguggagcauug

SEQ ID NO: 676992 - RNA, 19 nt, Artificial Sequence
  Description of Artificial Sequence: Synthetic oligonucleotide
uuuuacugaagggcauccu

SEQ ID NO: 676993 - RNA, 19 nt, Artificial Sequence
  Description of Artificial Sequence: Synthetic oligonucleotide
cauacaagccuccucgcaa

SEQ ID NO: 676994 - RNA, 19 nt, Artificial Sequence
  Description of Artificial Sequence: Synthetic oligonucleotide
acauucgaagcaccuuccu

SEQ ID NO: 676995 - RNA, 19 nt, Artificial Sequence
  Description of Artificial Sequence: Synthetic oligonucleotide
cauugcuguagaacccaug

SEQ ID NO: 676996 - RNA, 19 nt, Artificial Sequence
  Description of Artificial Sequence: Synthetic oligonucleotide
caacccgggcuaaugguug

SEQ ID NO: 676997 - RNA, 19 nt, Artificial Sequence
  Description of Artificial Sequence: Synthetic oligonucleotide
ucgacugguaagucaggaa

SEQ ID NO: 676998 - RNA, 19 nt, Artificial Sequence
  Description of Artificial Sequence: Synthetic oligonucleotide
cagaccgggaguccgugcc

SEQ ID NO: 676999 - RNA, 19 nt, Artificial Sequence
  Description of Artificial Sequence: Synthetic oligonucleotide
ggugcucacaugaccagcg

SEQ ID NO: 677000 - RNA, 19 nt, Artificial Sequence
  Description of Artificial Sequence: Synthetic oligonucleotide
agcgcaugucguaauacug

SEQ ID NO: 677001 - RNA, 19 nt, Artificial Sequence
  Description of Artificial Sequence: Synthetic oligonucleotide
cugccacguuguaaggucc

SEQ ID NO: 677002 - RNA, 19 nt, Artificial Sequence
  Description of Artificial Sequence: Synthetic oligonucleotide
aaaaucgugucgggucacu

SEQ ID NO: 677003 - RNA, 19 nt, Artificial Sequence
  Description of Artificial Sequence: Synthetic oligonucleotide
ggccauauuguguuuucug

SEQ ID NO: 677004 - RNA, 19 nt, Artificial Sequence
  Description of Artificial Sequence: Synthetic oligonucleotide
gaguucucccucauguuga

SEQ ID NO: 677005 - RNA, 19 nt, Artificial Sequence
  Description of Artificial Sequence: Synthetic oligonucleotide
agcauugcuguagaaccca

SEQ ID NO: 677006 - RNA, 19 nt, Artificial Sequence
  Description of Artificial Sequence: Synthetic oligonucleotide
acaaaagcauugauccaca

SEQ ID NO: 677007 - RNA, 19 nt, Artificial Sequence
  Description of Artificial Sequence: Synthetic oligonucleotide
gugcucuacuaucuuggug

SEQ ID NO: 677008 - RNA, 19 nt, Artificial Sequence
  Description of Artificial Sequence: Synthetic oligonucleotide
cuguggagcauugcuguag

SEQ ID NO: 677009 - RNA, 19 nt, Artificial Sequence
  Description of Artificial Sequence: Synthetic oligonucleotide
gggaguccgugccagagcc

SEQ ID NO: 677010 - RNA, 19 nt, Artificial Sequence
  Description of Artificial Sequence: Synthetic oligonucleotide
agagauuaaccagggucca

SEQ ID NO: 677011 - RNA, 19 nt, Artificial Sequence
  Description of Artificial Sequence: Synthetic oligonucleotide
acgcacucgaacgcccucc

SEQ ID NO: 677012 - RNA, 19 nt, Artificial Sequence
  Description of Artificial Sequence: Synthetic oligonucleotide
caucgacugguaagucagg

SEQ ID NO: 677013 - RNA, 19 nt, Artificial Sequence
  Description of Artificial Sequence: Synthetic oligonucleotide
ugggcguggcauuauuaaa

SEQ ID NO: 677014 - RNA, 19 nt, Artificial Sequence
  Description of Artificial Sequence: Synthetic oligonucleotide
cuuaacggucgaugaaaca

SEQ ID NO: 677015 - RNA, 19 nt, Artificial Sequence
  Description of Artificial Sequence: Synthetic oligonucleotide
gaguaugcccugccuaaga

SEQ ID NO: 677016 - RNA, 19 nt, Artificial Sequence
  Description of Artificial Sequence: Synthetic oligonucleotide
ugcccacauucgaagcacc

SEQ ID NO: 677017 - RNA, 19 nt, Artificial Sequence
  Description of Artificial Sequence: Synthetic oligonucleotide
gccauauuguguuuucuga

SEQ ID NO: 677018 - RNA, 19 nt, Artificial Sequence
  Description of Artificial Sequence: Synthetic oligonucleotide
gaggagauugagaacugaa

SEQ ID NO: 677019 - RNA, 19 nt, Artificial Sequence
  Description of Artificial Sequence: Synthetic oligonucleotide
ccggccacggacuggaucg

SEQ ID NO: 677020 - RNA, 19 nt, Artificial Sequence
  Description of Artificial Sequence: Synthetic oligonucleotide
aacccgggcuaaugguugu

SEQ ID NO: 677021 - RNA, 19 nt, Artificial Sequence
  Description of Artificial Sequence: Synthetic oligonucleotide
gaacggcuuagcugcugcc

SEQ ID NO: 677022 - RNA, 19 nt, Artificial Sequence
  Description of Artificial Sequence: Synthetic oligonucleotide
aucgacugguaagucagga

SEQ ID NO: 677023 - RNA, 19 nt, Artificial Sequence
  Description of Artificial Sequence: Synthetic oligonucleotide
aauggcuucggaagagauu

SEQ ID NO: 677024 - RNA, 19 nt, Artificial Sequence
  Description of Artificial Sequence: Synthetic oligonucleotide
agcccgaccccaucaccac

SEQ ID NO: 677025 - RNA, 19 nt, Artificial Sequence
  Description of Artificial Sequence: Synthetic oligonucleotide
guauuuggaugguagcagu

SEQ ID NO: 677026 - RNA, 19 nt, Artificial Sequence
  Description of Artificial Sequence: Synthetic oligonucleotide
gcuucggaagagauuaacc

SEQ ID NO: 677027 - RNA, 19 nt, Artificial Sequence
  Description of Artificial Sequence: Synthetic oligonucleotide
acugguaagucaggaauuu

SEQ ID NO: 677028 - RNA, 19 nt, Artificial Sequence
  Description of Artificial Sequence: Synthetic oligonucleotide
aggagauugagaacugaau

SEQ ID NO: 677029 - RNA, 19 nt, Artificial Sequence
  Description of Artificial Sequence: Synthetic oligonucleotide
ucgugucgggucacuaggu

SEQ ID NO: 677030 - RNA, 19 nt, Artificial Sequence
  Description of Artificial Sequence: Synthetic oligonucleotide
uccucucauguauaauauu

SEQ ID NO: 677031 - RNA, 19 nt, Artificial Sequence
  Description of Artificial Sequence: Synthetic oligonucleotide
ucguaauacuggguacucu

SEQ ID NO: 677032 - RNA, 19 nt, Artificial Sequence
  Description of Artificial Sequence: Synthetic oligonucleotide
aggaccccaccggagaguc

SEQ ID NO: 677033 - RNA, 19 nt, Artificial Sequence
  Description of Artificial Sequence: Synthetic oligonucleotide
guaauacuggguacucuuc

SEQ ID NO: 677034 - RNA, 19 nt, Artificial Sequence
  Description of Artificial Sequence: Synthetic oligonucleotide
cuugaggccauauuguguu

SEQ ID NO: 677035 - RNA, 19 nt, Artificial Sequence
  Description of Artificial Sequence: Synthetic oligonucleotide
uuuggccaaacugcccaca

SEQ ID NO: 677036 - RNA, 19 nt, Artificial Sequence
  Description of Artificial Sequence: Synthetic oligonucleotide
uacaagacgcaggaugauu

SEQ ID NO: 677037 - RNA, 19 nt, Artificial Sequence
  Description of Artificial Sequence: Synthetic oligonucleotide
acuggguacucuucacaaa

SEQ ID NO: 677038 - RNA, 19 nt, Artificial Sequence
  Description of Artificial Sequence: Synthetic oligonucleotide
agugccauggagagugugu

SEQ ID NO: 677039 - RNA, 19 nt, Artificial Sequence
  Description of Artificial Sequence: Synthetic oligonucleotide
uucgaagcaccuuccucua

SEQ ID NO: 677040 - RNA, 19 nt, Artificial Sequence
  Description of Artificial Sequence: Synthetic oligonucleotide
caccacacggucuuauaga

SEQ ID NO: 677041 - RNA, 19 nt, Artificial Sequence
  Description of Artificial Sequence: Synthetic oligonucleotide
acgcaggcaggaccccacc

SEQ ID NO: 677042 - RNA, 19 nt, Artificial Sequence
  Description of Artificial Sequence: Synthetic oligonucleotide
gcgcaugucguaauacugg

SEQ ID NO: 677043 - RNA, 19 nt, Artificial Sequence
  Description of Artificial Sequence: Synthetic oligonucleotide
agaacccauguuccaacuu

SEQ ID NO: 677044 - RNA, 19 nt, Artificial Sequence
  Description of Artificial Sequence: Synthetic oligonucleotide
auccucucauguauaauau

SEQ ID NO: 677045 - RNA, 19 nt, Artificial Sequence
  Description of Artificial Sequence: Synthetic oligonucleotide
ucccaacuuucaaaacaua

SEQ ID NO: 677046 - RNA, 19 nt, Artificial Sequence
  Description of Artificial Sequence: Synthetic oligonucleotide
aaagcgggcaugggauaca

SEQ ID NO: 677047 - RNA, 19 nt, Artificial Sequence
  Description of Artificial Sequence: Synthetic oligonucleotide
caauaaggagaggaaaucu

SEQ ID NO: 677048 - RNA, 19 nt, Artificial Sequence
  Description of Artificial Sequence: Synthetic oligonucleotide
aucaccacucauaccucag

SEQ ID NO: 677049 - RNA, 19 nt, Artificial Sequence
  Description of Artificial Sequence: Synthetic oligonucleotide
gcaauaaggagaggaaauc

SEQ ID NO: 677050 - RNA, 19 nt, Artificial Sequence
  Description of Artificial Sequence: Synthetic oligonucleotide
aagacgcaggaugauugua

SEQ ID NO: 677051 - RNA, 19 nt, Artificial Sequence
  Description of Artificial Sequence: Synthetic oligonucleotide
aguugcguggugagcauga

SEQ ID NO: 677052 - RNA, 19 nt, Artificial Sequence
  Description of Artificial Sequence: Synthetic oligonucleotide
acagacccgaccccacgca

SEQ ID NO: 677053 - RNA, 19 nt, Artificial Sequence
  Description of Artificial Sequence: Synthetic oligonucleotide
ggaggagcuuaaauaaaac

SEQ ID NO: 677054 - RNA, 19 nt, Artificial Sequence
  Description of Artificial Sequence: Synthetic oligonucleotide
aggaccccuccuucuacug

SEQ ID NO: 677055 - RNA, 19 nt, Artificial Sequence
  Description of Artificial Sequence: Synthetic oligonucleotide
ugaccagcgcaugucguaa

SEQ ID NO: 677056 - RNA, 19 nt, Artificial Sequence
  Description of Artificial Sequence: Synthetic oligonucleotide
agccuuaacggucgaugaa

SEQ ID NO: 677057 - RNA, 19 nt, Artificial Sequence
  Description of Artificial Sequence: Synthetic oligonucleotide
ucgaagcaccuuccucuac

SEQ ID NO: 677058 - RNA, 19 nt, Artificial Sequence
  Description of Artificial Sequence: Synthetic oligonucleotide
aaaucgugucgggucacua

SEQ ID NO: 677059 - RNA, 19 nt, Artificial Sequence
  Description of Artificial Sequence: Synthetic oligonucleotide
ugaggauaagcagguucaa

SEQ ID NO: 677060 - RNA, 19 nt, Artificial Sequence
  Description of Artificial Sequence: Synthetic oligonucleotide
ccuuaacggucgaugaaac

SEQ ID NO: 677061 - RNA, 19 nt, Artificial Sequence
  Description of Artificial Sequence: Synthetic oligonucleotide
cugguaagucaggaauuug

SEQ ID NO: 677062 - RNA, 19 nt, Artificial Sequence
  Description of Artificial Sequence: Synthetic oligonucleotide
aacaaucagcagguagaua

SEQ ID NO: 677063 - RNA, 19 nt, Artificial Sequence
  Description of Artificial Sequence: Synthetic oligonucleotide
acggguagccaaggaagag

SEQ ID NO: 677064 - RNA, 19 nt, Artificial Sequence
  Description of Artificial Sequence: Synthetic oligonucleotide
cacuagguuaccagaccca

SEQ ID NO: 677065 - RNA, 19 nt, Artificial Sequence
  Description of Artificial Sequence: Synthetic oligonucleotide
augaccagcgcaugucgua

SEQ ID NO: 677066 - RNA, 19 nt, Artificial Sequence
  Description of Artificial Sequence: Synthetic oligonucleotide
agacgcaggaugauuguau

SEQ ID NO: 677067 - RNA, 19 nt, Artificial Sequence
  Description of Artificial Sequence: Synthetic oligonucleotide
acucauaccucagccucca

SEQ ID NO: 677068 - RNA, 19 nt, Artificial Sequence
  Description of Artificial Sequence: Synthetic oligonucleotide
gucgaugaaacaggaaaua

SEQ ID NO: 677069 - RNA, 19 nt, Artificial Sequence
  Description of Artificial Sequence: Synthetic oligonucleotide
ggucacuagguuaccagac

SEQ ID NO: 677070 - RNA, 19 nt, Artificial Sequence
  Description of Artificial Sequence: Synthetic oligonucleotide
cuggaucgcugggaggagg

SEQ ID NO: 677071 - RNA, 19 nt, Artificial Sequence
  Description of Artificial Sequence: Synthetic oligonucleotide
gaccccaccggagagucga

SEQ ID NO: 677072 - RNA, 19 nt, Artificial Sequence
  Description of Artificial Sequence: Synthetic oligonucleotide
cugaccgcagcaaggaaua

SEQ ID NO: 677073 - RNA, 19 nt, Artificial Sequence
  Description of Artificial Sequence: Synthetic oligonucleotide
ggcucuauauaaacaucug

SEQ ID NO: 677074 - RNA, 19 nt, Artificial Sequence
  Description of Artificial Sequence: Synthetic oligonucleotide
caccauaaugaggugcuca

SEQ ID NO: 677075 - RNA, 19 nt, Artificial Sequence
  Description of Artificial Sequence: Synthetic oligonucleotide
gcaaugacgaacaggaccu

SEQ ID NO: 677076 - RNA, 19 nt, Artificial Sequence
  Description of Artificial Sequence: Synthetic oligonucleotide
aagaggccggccacggacu

SEQ ID NO: 677077 - RNA, 19 nt, Artificial Sequence
  Description of Artificial Sequence: Synthetic oligonucleotide
acaccauaaugaggugcuc

SEQ ID NO: 677078 - RNA, 19 nt, Artificial Sequence
  Description of Artificial Sequence: Synthetic oligonucleotide
gggcaugggauacaucuga

SEQ ID NO: 677079 - RNA, 19 nt, Artificial Sequence
  Description of Artificial Sequence: Synthetic oligonucleotide
aucuuuuacugaagggcau

SEQ ID NO: 677080 - RNA, 19 nt, Artificial Sequence
  Description of Artificial Sequence: Synthetic oligonucleotide
ggugauuaaggcugugaua

SEQ ID NO: 677081 - RNA, 19 nt, Artificial Sequence
  Description of Artificial Sequence: Synthetic oligonucleotide
gucguaauacuggguacuc

SEQ ID NO: 677082 - RNA, 19 nt, Artificial Sequence
  Description of Artificial Sequence: Synthetic oligonucleotide
gcgggcaugggauacaucu

SEQ ID NO: 677083 - RNA, 19 nt, Artificial Sequence
  Description of Artificial Sequence: Synthetic oligonucleotide
ucgggucacuagguuacca

SEQ ID NO: 677084 - RNA, 19 nt, Artificial Sequence
  Description of Artificial Sequence: Synthetic oligonucleotide
cuagguuaccagacccaga

SEQ ID NO: 677085 - RNA, 19 nt, Artificial Sequence
  Description of Artificial Sequence: Synthetic oligonucleotide
gagcccgaccccaucacca

SEQ ID NO: 677086 - RNA, 19 nt, Artificial Sequence
  Description of Artificial Sequence: Synthetic oligonucleotide
ggaugauuguauggauacc

SEQ ID NO: 677087 - RNA, 19 nt, Artificial Sequence
  Description of Artificial Sequence: Synthetic oligonucleotide
agacgcugcaccugccuua

SEQ ID NO: 677088 - RNA, 19 nt, Artificial Sequence
  Description of Artificial Sequence: Synthetic oligonucleotide
gacccgaccccacgcacuc

SEQ ID NO: 677089 - RNA, 19 nt, Artificial Sequence
  Description of Artificial Sequence: Synthetic oligonucleotide
ugaccgcagcaaggaauag

SEQ ID NO: 677090 - RNA, 19 nt, Artificial Sequence
  Description of Artificial Sequence: Synthetic oligonucleotide
gcuaaugguugucaacuua

SEQ ID NO: 677091 - RNA, 19 nt, Artificial Sequence
  Description of Artificial Sequence: Synthetic oligonucleotide
gugucgggucacuagguua

SEQ ID NO: 677092 - RNA, 19 nt, Artificial Sequence
  Description of Artificial Sequence: Synthetic oligonucleotide
ggacuggaucgcugggagg

SEQ ID NO: 677093 - RNA, 19 nt, Artificial Sequence
  Description of Artificial Sequence: Synthetic oligonucleotide
gguaaagcugaacggcuua

SEQ ID NO: 677094 - RNA, 19 nt, Artificial Sequence
  Description of Artificial Sequence: Synthetic oligonucleotide
guaugcccugccuaagacu

SEQ ID NO: 677095 - RNA, 19 nt, Artificial Sequence
  Description of Artificial Sequence: Synthetic oligonucleotide
uagcacuaccauuccuguu

SEQ ID NO: 677096 - RNA, 19 nt, Artificial Sequence
  Description of Artificial Sequence: Synthetic oligonucleotide
caagcgggccaguaucaga

SEQ ID NO: 677097 - RNA, 19 nt, Artificial Sequence
  Description of Artificial Sequence: Synthetic oligonucleotide
aggccauauuguguuuucu

SEQ ID NO: 677098 - RNA, 19 nt, Artificial Sequence
  Description of Artificial Sequence: Synthetic oligonucleotide
gaugggcguggcauuauua

SEQ ID NO: 677099 - RNA, 19 nt, Artificial Sequence
  Description of Artificial Sequence: Synthetic oligonucleotide
caacuuauuucaacugcau

SEQ ID NO: 677100 - RNA, 19 nt, Artificial Sequence
  Description of Artificial Sequence: Synthetic oligonucleotide
gcguggcauuauuaaacug

SEQ ID NO: 677101 - RNA, 19 nt, Artificial Sequence
  Description of Artificial Sequence: Synthetic oligonucleotide
cagcugauuuauguaacaa

SEQ ID NO: 677102 - RNA, 19 nt, Artificial Sequence
  Description of Artificial Sequence: Synthetic oligonucleotide
uggccaaacugcccacauu

SEQ ID NO: 677103 - RNA, 19 nt, Artificial Sequence
  Description of Artificial Sequence: Synthetic oligonucleotide
accagcgcaugucguaaua

SEQ ID NO: 677104 - RNA, 19 nt, Artificial Sequence
  Description of Artificial Sequence: Synthetic oligonucleotide
acuggaucgcugggaggag

SEQ ID NO: 677105 - RNA, 19 nt, Artificial Sequence
  Description of Artificial Sequence: Synthetic oligonucleotide
ucgaacgcccucccuucuu

SEQ ID NO: 677106 - RNA, 19 nt, Artificial Sequence
  Description of Artificial Sequence: Synthetic oligonucleotide
uggcuucggaagagauuaa

SEQ ID NO: 677107 - RNA, 19 nt, Artificial Sequence
  Description of Artificial Sequence: Synthetic oligonucleotide
gcccucaaugaggauaagc

SEQ ID NO: 677108 - RNA, 19 nt, Artificial Sequence
  Description of Artificial Sequence: Synthetic oligonucleotide
gccaggugauaaucaauga

SEQ ID NO: 677109 - RNA, 19 nt, Artificial Sequence
  Description of Artificial Sequence: Synthetic oligonucleotide
guaggaguaugcccugccu

SEQ ID NO: 677110 - RNA, 19 nt, Artificial Sequence
  Description of Artificial Sequence: Synthetic oligonucleotide
acggacuggaucgcuggga

SEQ ID NO: 677111 - RNA, 19 nt, Artificial Sequence
  Description of Artificial Sequence: Synthetic oligonucleotide
gagauuaaccaggguccaa

SEQ ID NO: 677112 - RNA, 19 nt, Artificial Sequence
  Description of Artificial Sequence: Synthetic oligonucleotide
agguaaagcugaacggcuu

SEQ ID NO: 677113 - RNA, 19 nt, Artificial Sequence
  Description of Artificial Sequence: Synthetic oligonucleotide
gacgcaggcaggaccccac

SEQ ID NO: 677114 - RNA, 19 nt, Artificial Sequence
  Description of Artificial Sequence: Synthetic oligonucleotide
acgcccucccuucuuugaa

SEQ ID NO: 677115 - RNA, 19 nt, Artificial Sequence
  Description of Artificial Sequence: Synthetic oligonucleotide
ggaguaugcccugccuaag

SEQ ID NO: 677116 - RNA, 19 nt, Artificial Sequence
  Description of Artificial Sequence: Synthetic oligonucleotide
caaugacgaacaggaccug

SEQ ID NO: 677117 - RNA, 19 nt, Artificial Sequence
  Description of Artificial Sequence: Synthetic oligonucleotide
ggcauccucucauguauaa

SEQ ID NO: 677118 - RNA, 19 nt, Artificial Sequence
  Description of Artificial Sequence: Synthetic oligonucleotide
gggugauuaaggcugugau

SEQ ID NO: 677119 - RNA, 19 nt, Artificial Sequence
  Description of Artificial Sequence: Synthetic oligonucleotide
cugaacggcuuagcugcug

SEQ ID NO: 677120 - RNA, 19 nt, Artificial Sequence
  Description of Artificial Sequence: Synthetic oligonucleotide
ugcccugccuaagacuauu

SEQ ID NO: 677121 - RNA, 19 nt, Artificial Sequence
  Description of Artificial Sequence: Synthetic oligonucleotide
caggcaggaccccaccgga

SEQ ID NO: 677122 - RNA, 19 nt, Artificial Sequence
  Description of Artificial Sequence: Synthetic oligonucleotide
gccuuaacggucgaugaaa

SEQ ID NO: 677123 - RNA, 19 nt, Artificial Sequence
  Description of Artificial Sequence: Synthetic oligonucleotide
gaggauaagcagguucaau

SEQ ID NO: 677124 - RNA, 19 nt, Artificial Sequence
  Description of Artificial Sequence: Synthetic oligonucleotide
gcacuaccauuccuguuuc

SEQ ID NO: 677125 - RNA, 19 nt, Artificial Sequence
  Description of Artificial Sequence: Synthetic oligonucleotide
ggcaggaccccaccggaga

SEQ ID NO: 677126 - RNA, 19 nt, Artificial Sequence
  Description of Artificial Sequence: Synthetic oligonucleotide
ucccaucgacugguaaguc

SEQ ID NO: 677127 - RNA, 19 nt, Artificial Sequence
  Description of Artificial Sequence: Synthetic oligonucleotide
caguugcguggugagcaug

SEQ ID NO: 677128 - RNA, 19 nt, Artificial Sequence
  Description of Artificial Sequence: Synthetic oligonucleotide
cagcgcaugucguaauacu

SEQ ID NO: 677129 - RNA, 19 nt, Artificial Sequence
  Description of Artificial Sequence: Synthetic oligonucleotide
gcucuacuaucuuggugga

SEQ ID NO: 677130 - RNA, 19 nt, Artificial Sequence
  Description of Artificial Sequence: Synthetic oligonucleotide
agacccgaccccacgcacu

SEQ ID NO: 677131 - RNA, 19 nt, Artificial Sequence
  Description of Artificial Sequence: Synthetic oligonucleotide
gggguaggaguaugcccug

SEQ ID NO: 677132 - RNA, 19 nt, Artificial Sequence
  Description of Artificial Sequence: Synthetic oligonucleotide
guugcguggugagcaugac

SEQ ID NO: 677133 - RNA, 19 nt, Artificial Sequence
  Description of Artificial Sequence: Synthetic oligonucleotide
augcaacguaguaggcacu

SEQ ID NO: 677134 - RNA, 19 nt, Artificial Sequence
  Description of Artificial Sequence: Synthetic oligonucleotide
ggucgaugaaacaggaaau

SEQ ID NO: 677135 - RNA, 19 nt, Artificial Sequence
  Description of Artificial Sequence: Synthetic oligonucleotide
cacgcacucgaacgcccuc

SEQ ID NO: 677136 - RNA, 19 nt, Artificial Sequence
  Description of Artificial Sequence: Synthetic oligonucleotide
aggcaggaccccaccggag

SEQ ID NO: 677137 - RNA, 19 nt, Artificial Sequence
  Description of Artificial Sequence: Synthetic oligonucleotide
cccacgcacucgaacgccc

SEQ ID NO: 677138 - RNA, 19 nt, Artificial Sequence
  Description of Artificial Sequence: Synthetic oligonucleotide
cucccaucgacugguaagu

SEQ ID NO: 677139 - RNA, 19 nt, Artificial Sequence
  Description of Artificial Sequence: Synthetic oligonucleotide
ccaaaacagcugccgggac

SEQ ID NO: 677140 - RNA, 19 nt, Artificial Sequence
  Description of Artificial Sequence: Synthetic oligonucleotide
ccagcgcaugucguaauac

SEQ ID NO: 677141 - RNA, 19 nt, Artificial Sequence
  Description of Artificial Sequence: Synthetic oligonucleotide
guggagcauugcuguagaa

SEQ ID NO: 677142 - RNA, 19 nt, Artificial Sequence
  Description of Artificial Sequence: Synthetic oligonucleotide
gucgggucacuagguuacc

SEQ ID NO: 677143 - RNA, 19 nt, Artificial Sequence
  Description of Artificial Sequence: Synthetic oligonucleotide
uccuucuacugggcauguc

SEQ ID NO: 677144 - RNA, 19 nt, Artificial Sequence
  Description of Artificial Sequence: Synthetic oligonucleotide
ggagagugugugguuccac

SEQ ID NO: 677145 - RNA, 19 nt, Artificial Sequence
  Description of Artificial Sequence: Synthetic oligonucleotide
agcgggcaugggauacauc

SEQ ID NO: 677146 - RNA, 19 nt, Artificial Sequence
  Description of Artificial Sequence: Synthetic oligonucleotide
cgcaggaugauuguaugga

SEQ ID NO: 677147 - RNA, 19 nt, Artificial Sequence
  Description of Artificial Sequence: Synthetic oligonucleotide
ggcgguggcuucacagacc

SEQ ID NO: 677148 - RNA, 19 nt, Artificial Sequence
  Description of Artificial Sequence: Synthetic oligonucleotide
acggucgaugaaacaggaa

SEQ ID NO: 677149 - RNA, 19 nt, Artificial Sequence
  Description of Artificial Sequence: Synthetic oligonucleotide
cccucauguugagaggcac

SEQ ID NO: 677150 - RNA, 19 nt, Artificial Sequence
  Description of Artificial Sequence: Synthetic oligonucleotide
ggguccaacagagcaccca

SEQ ID NO: 677151 - RNA, 19 nt, Artificial Sequence
  Description of Artificial Sequence: Synthetic oligonucleotide
cucugaccgcagcaaggaa

SEQ ID NO: 677152 - RNA, 19 nt, Artificial Sequence
  Description of Artificial Sequence: Synthetic oligonucleotide
gugauaggugggacuggaa

SEQ ID NO: 677153 - RNA, 19 nt, Artificial Sequence
  Description of Artificial Sequence: Synthetic oligonucleotide
gccauggagaguguguggu

SEQ ID NO: 677154 - RNA, 19 nt, Artificial Sequence
  Description of Artificial Sequence: Synthetic oligonucleotide
ccccaucaccacucauacc

SEQ ID NO: 677155 - RNA, 19 nt, Artificial Sequence
  Description of Artificial Sequence: Synthetic oligonucleotide
cucuacuaucuugguggaa

SEQ ID NO: 677156 - RNA, 19 nt, Artificial Sequence
  Description of Artificial Sequence: Synthetic oligonucleotide
ggccaauagcacuaccauu

SEQ ID NO: 677157 - RNA, 19 nt, Artificial Sequence
  Description of Artificial Sequence: Synthetic oligonucleotide
gaccagcgcaugucguaau

SEQ ID NO: 677158 - RNA, 19 nt, Artificial Sequence
  Description of Artificial Sequence: Synthetic oligonucleotide
cacugccacguuguaaggu

SEQ ID NO: 677159 - RNA, 19 nt, Artificial Sequence
  Description of Artificial Sequence: Synthetic oligonucleotide
cguaauacuggguacucuu

SEQ ID NO: 677160 - RNA, 19 nt, Artificial Sequence
  Description of Artificial Sequence: Synthetic oligonucleotide
gcucacaugaccagcgcau

SEQ ID NO: 677161 - RNA, 19 nt, Artificial Sequence
  Description of Artificial Sequence: Synthetic oligonucleotide
cgacugguaagucaggaau

SEQ ID NO: 677162 - RNA, 19 nt, Artificial Sequence
  Description of Artificial Sequence: Synthetic oligonucleotide
cgggcaugggauacaucug

SEQ ID NO: 677163 - RNA, 19 nt, Artificial Sequence
  Description of Artificial Sequence: Synthetic oligonucleotide
acccagaccgggaguccgu

SEQ ID NO: 677164 - RNA, 19 nt, Artificial Sequence
  Description of Artificial Sequence: Synthetic oligonucleotide
gcaacguaguaggcacuga

SEQ ID NO: 677165 - RNA, 19 nt, Artificial Sequence
  Description of Artificial Sequence: Synthetic oligonucleotide
ggcuaaugguugucaacuu

SEQ ID NO: 677166 - RNA, 19 nt, Artificial Sequence
  Description of Artificial Sequence: Synthetic oligonucleotide
aacaccccuugaggccaua

SEQ ID NO: 677167 - RNA, 19 nt, Artificial Sequence
  Description of Artificial Sequence: Synthetic oligonucleotide
aguccgugccagagccaga

SEQ ID NO: 677168 - RNA, 19 nt, Artificial Sequence
  Description of Artificial Sequence: Synthetic oligonucleotide
cacuaccauuccuguuucu

SEQ ID NO: 677169 - RNA, 19 nt, Artificial Sequence
  Description of Artificial Sequence: Synthetic oligonucleotide
ccccacgcacucgaacgcc

SEQ ID NO: 677170 - RNA, 19 nt, Artificial Sequence
  Description of Artificial Sequence: Synthetic oligonucleotide
cgcacucgaacgcccuccc

SEQ ID NO: 677171 - RNA, 19 nt, Artificial Sequence
  Description of Artificial Sequence: Synthetic oligonucleotide
ggaccccaccggagagucg

SEQ ID NO: 677172 - RNA, 19 nt, Artificial Sequence
  Description of Artificial Sequence: Synthetic oligonucleotide
acgcugcaccugccuuagu

SEQ ID NO: 677173 - RNA, 19 nt, Artificial Sequence
  Description of Artificial Sequence: Synthetic oligonucleotide
cucgaacgcccucccuucu

SEQ ID NO: 677174 - RNA, 19 nt, Artificial Sequence
  Description of Artificial Sequence: Synthetic oligonucleotide
gcgcuccaaaacagcugcc

SEQ ID NO: 677175 - RNA, 19 nt, Artificial Sequence
  Description of Artificial Sequence: Synthetic oligonucleotide
cgaccccacgcacucgaac

SEQ ID NO: 677176 - RNA, 19 nt, Artificial Sequence
  Description of Artificial Sequence: Synthetic oligonucleotide
gcaugucguaauacugggu

SEQ ID NO: 677177 - RNA, 19 nt, Artificial Sequence
  Description of Artificial Sequence: Synthetic oligonucleotide
gugccgcaccaacaccccu

SEQ ID NO: 677178 - RNA, 19 nt, Artificial Sequence
  Description of Artificial Sequence: Synthetic oligonucleotide
ccgggcuaaugguugucaa

SEQ ID NO: 677179 - RNA, 19 nt, Artificial Sequence
  Description of Artificial Sequence: Synthetic oligonucleotide
gccgacuaggaccccuccu

SEQ ID NO: 677180 - RNA, 19 nt, Artificial Sequence
  Description of Artificial Sequence: Synthetic oligonucleotide
cccgaccccacgcacucga

SEQ ID NO: 677181 - RNA, 19 nt, Artificial Sequence
  Description of Artificial Sequence: Synthetic oligonucleotide
cggcuuagcugcugccgac

SEQ ID NO: 677182 - RNA, 19 nt, Artificial Sequence
  Description of Artificial Sequence: Synthetic oligonucleotide
ggaguccgugccagagcca

SEQ ID NO: 677183 - RNA, 19 nt, Artificial Sequence
  Description of Artificial Sequence: Synthetic oligonucleotide
ggcuuagcugcugccgacu

SEQ ID NO: 677184 - RNA, 19 nt, Artificial Sequence
  Description of Artificial Sequence: Synthetic oligonucleotide
gcaacccgggcuaaugguu

SEQ ID NO: 677185 - RNA, 19 nt, Artificial Sequence
  Description of Artificial Sequence: Synthetic oligonucleotide
cccagaccgggaguccgug

SEQ ID NO: 677186 - RNA, 19 nt, Artificial Sequence
  Description of Artificial Sequence: Synthetic oligonucleotide
ccucugaaaugagggccca

SEQ ID NO: 677187 - RNA, 19 nt, Artificial Sequence
  Description of Artificial Sequence: Synthetic oligonucleotide
cccgggcuaaugguuguca

SEQ ID NO: 677188 - RNA, 19 nt, Artificial Sequence
  Description of Artificial Sequence: Synthetic oligonucleotide
caguugcaacccgggcuaa

SEQ ID NO: 677189 - RNA, 19 nt, Artificial Sequence
  Description of Artificial Sequence: Synthetic oligonucleotide
cuccuucuacugggcaugu

SEQ ID NO: 677190 - RNA, 19 nt, Artificial Sequence
  Description of Artificial Sequence: Synthetic oligonucleotide
ccuccucgcaagcaucacu

SEQ ID NO: 677191 - RNA, 19 nt, Artificial Sequence
  Description of Artificial Sequence: Synthetic oligonucleotide
gcccacauucgaagcaccu

SEQ ID NO: 677192 - RNA, 19 nt, Artificial Sequence
  Description of Artificial Sequence: Synthetic oligonucleotide
caggaccccaccggagagu

SEQ ID NO: 677193 - RNA, 19 nt, Artificial Sequence
  Description of Artificial Sequence: Synthetic oligonucleotide
ccuuacccuucccaacuuu

SEQ ID NO: 677194 - RNA, 19 nt, Artificial Sequence
  Description of Artificial Sequence: Synthetic oligonucleotide
gcccgaccccaucaccacu

SEQ ID NO: 677195 - RNA, 19 nt, Artificial Sequence
  Description of Artificial Sequence: Synthetic oligonucleotide
gcugaacggcuuagcugcu

SEQ ID NO: 677196 - RNA, 19 nt, Artificial Sequence
  Description of Artificial Sequence: Synthetic oligonucleotide
ccacgcacucgaacgcccu

SEQ ID NO: 677197 - RNA, 19 nt, Artificial Sequence
  Description of Artificial Sequence: Synthetic oligonucleotide
cccacauucgaagcaccuu

SEQ ID NO: 677198 - RNA, 19 nt, Artificial Sequence
  Description of Artificial Sequence: Synthetic oligonucleotide
ccacguuguaaggucccau

SEQ ID NO: 677199 - RNA, 19 nt, Artificial Sequence
  Description of Artificial Sequence: Synthetic oligonucleotide
ccgcaccaacaccccuuga

SEQ ID NO: 677200 - RNA, 19 nt, Artificial Sequence
  Description of Artificial Sequence: Synthetic oligonucleotide
cgugucgggucacuagguu

SEQ ID NO: 677201 - RNA, 19 nt, Artificial Sequence
  Description of Artificial Sequence: Synthetic oligonucleotide
cccuuacccuucccaacuu

SEQ ID NO: 677202 - RNA, 19 nt, Artificial Sequence
  Description of Artificial Sequence: Synthetic oligonucleotide
cgaccccaucaccacucau

SEQ ID NO: 677203 - RNA, 19 nt, Artificial Sequence
  Description of Artificial Sequence: Synthetic oligonucleotide
uucaaauucgauaacaagg

SEQ ID NO: 677204 - RNA, 19 nt, Artificial Sequence
  Description of Artificial Sequence: Synthetic oligonucleotide
gauuauauccuuuugagag

SEQ ID NO: 677205 - RNA, 19 nt, Artificial Sequence
  Description of Artificial Sequence: Synthetic oligonucleotide
aaauucgauaacaaggucc

SEQ ID NO: 677206 - RNA, 19 nt, Artificial Sequence
  Description of Artificial Sequence: Synthetic oligonucleotide
aaugcagguggcuauaugg

SEQ ID NO: 677207 - RNA, 19 nt, Artificial Sequence
  Description of Artificial Sequence: Synthetic oligonucleotide
auuacacacacacacacac

SEQ ID NO: 677208 - RNA, 19 nt, Artificial Sequence
  Description of Artificial Sequence: Synthetic oligonucleotide
aauucgauaacaagguccc

SEQ ID NO: 677209 - RNA, 19 nt, Artificial Sequence
  Description of Artificial Sequence: Synthetic oligonucleotide
gauagaugacaucagaacc

SEQ ID NO: 677210 - RNA, 19 nt, Artificial Sequence
  Description of Artificial Sequence: Synthetic oligonucleotide
cuuacaaugagucgaaugc

SEQ ID NO: 677211 - RNA, 19 nt, Artificial Sequence
  Description of Artificial Sequence: Synthetic oligonucleotide
aagggauuauaucuagggc

SEQ ID NO: 677212 - RNA, 19 nt, Artificial Sequence
  Description of Artificial Sequence: Synthetic oligonucleotide
aaaaucucgcgcuugcgcg

SEQ ID NO: 677213 - RNA, 19 nt, Artificial Sequence
  Description of Artificial Sequence: Synthetic oligonucleotide
auuguaauauauucugugg

SEQ ID NO: 677214 - RNA, 19 nt, Artificial Sequence
  Description of Artificial Sequence: Synthetic oligonucleotide
uuugcaucagucuuuaaug

SEQ ID NO: 677215 - RNA, 19 nt, Artificial Sequence
  Description of Artificial Sequence: Synthetic oligonucleotide
uagugagcgacuuugaaag

SEQ ID NO: 677216 - RNA, 19 nt, Artificial Sequence
  Description of Artificial Sequence: Synthetic oligonucleotide
ucaaauucgauaacaaggu

SEQ ID NO: 677217 - RNA, 19 nt, Artificial Sequence
  Description of Artificial Sequence: Synthetic oligonucleotide
uuugaauacaacagggaug

SEQ ID NO: 677218 - RNA, 19 nt, Artificial Sequence
  Description of Artificial Sequence: Synthetic oligonucleotide
acaagaaccucucacacag

SEQ ID NO: 677219 - RNA, 19 nt, Artificial Sequence
  Description of Artificial Sequence: Synthetic oligonucleotide
aacuaaaggacagcaaugg

SEQ ID NO: 677220 - RNA, 19 nt, Artificial Sequence
  Description of Artificial Sequence: Synthetic oligonucleotide
uuguaauauauucugugga

SEQ ID NO: 677221 - RNA, 19 nt, Artificial Sequence
  Description of Artificial Sequence: Synthetic oligonucleotide
guaguggcaacuuacaaug

SEQ ID NO: 677222 - RNA, 19 nt, Artificial Sequence
  Description of Artificial Sequence: Synthetic oligonucleotide
agaacagaccccuucacuc

SEQ ID NO: 677223 - RNA, 19 nt, Artificial Sequence
  Description of Artificial Sequence: Synthetic oligonucleotide
gucuauuacacacacacac

SEQ ID NO: 677224 - RNA, 19 nt, Artificial Sequence
  Description of Artificial Sequence: Synthetic oligonucleotide
gacgaugucagcuggaaug

SEQ ID NO: 677225 - RNA, 19 nt, Artificial Sequence
  Description of Artificial Sequence: Synthetic oligonucleotide
agggauuauaucuagggcu

SEQ ID NO: 677226 - RNA, 19 nt, Artificial Sequence
  Description of Artificial Sequence: Synthetic oligonucleotide
aggagguaccauuagcacc

SEQ ID NO: 677227 - RNA, 19 nt, Artificial Sequence
  Description of Artificial Sequence: Synthetic oligonucleotide
uauugaacuagucucaauu

SEQ ID NO: 677228 - RNA, 19 nt, Artificial Sequence
  Description of Artificial Sequence: Synthetic oligonucleotide
cuauaugggaagaaccugc

SEQ ID NO: 677229 - RNA, 19 nt, Artificial Sequence
  Description of Artificial Sequence: Synthetic oligonucleotide
uacacacacacacacacac

SEQ ID NO: 677230 - RNA, 19 nt, Artificial Sequence
  Description of Artificial Sequence: Synthetic oligonucleotide
auaaagggauuauaucuag

SEQ ID NO: 677231 - RNA, 19 nt, Artificial Sequence
  Description of Artificial Sequence: Synthetic oligonucleotide
ugagucgaaugccagagca

SEQ ID NO: 677232 - RNA, 19 nt, Artificial Sequence
  Description of Artificial Sequence: Synthetic oligonucleotide
aaaagucccuggcucaguc

SEQ ID NO: 677233 - RNA, 19 nt, Artificial Sequence
  Description of Artificial Sequence: Synthetic oligonucleotide
ucgaaugcucuuuccaucg

SEQ ID NO: 677234 - RNA, 19 nt, Artificial Sequence
  Description of Artificial Sequence: Synthetic oligonucleotide
uuauauccuuuugagagag

SEQ ID NO: 677235 - RNA, 19 nt, Artificial Sequence
  Description of Artificial Sequence: Synthetic oligonucleotide
ucugguaauaguccuugcc

SEQ ID NO: 677236 - RNA, 19 nt, Artificial Sequence
  Description of Artificial Sequence: Synthetic oligonucleotide
acguccaaaguucacauug

SEQ ID NO: 677237 - RNA, 19 nt, Artificial Sequence
  Description of Artificial Sequence: Synthetic oligonucleotide
cuauuacacacacacacac

SEQ ID NO: 677238 - RNA, 19 nt, Artificial Sequence
  Description of Artificial Sequence: Synthetic oligonucleotide
ugacuagugcacaaggucu

SEQ ID NO: 677239 - RNA, 19 nt, Artificial Sequence
  Description of Artificial Sequence: Synthetic oligonucleotide
auuggaaagcccgagaaug

SEQ ID NO: 677240 - RNA, 19 nt, Artificial Sequence
  Description of Artificial Sequence: Synthetic oligonucleotide
ucuauuacacacacacaca

SEQ ID NO: 677241 - RNA, 19 nt, Artificial Sequence
  Description of Artificial Sequence: Synthetic oligonucleotide
ucggcgaucuccuugaacu

SEQ ID NO: 677242 - RNA, 19 nt, Artificial Sequence
  Description of Artificial Sequence: Synthetic oligonucleotide
gaaugggucaucgaugucc

SEQ ID NO: 677243 - RNA, 19 nt, Artificial Sequence
  Description of Artificial Sequence: Synthetic oligonucleotide
aguccuauugaacuagucu

SEQ ID NO: 677244 - RNA, 19 nt, Artificial Sequence
  Description of Artificial Sequence: Synthetic oligonucleotide
uuggaaagcccgagaaugg

SEQ ID NO: 677245 - RNA, 19 nt, Artificial Sequence
  Description of Artificial Sequence: Synthetic oligonucleotide
uggcuauaugggaagaacc

SEQ ID NO: 677246 - RNA, 19 nt, Artificial Sequence
  Description of Artificial Sequence: Synthetic oligonucleotide
uuauaucuagggcugugca

SEQ ID NO: 677247 - RNA, 19 nt, Artificial Sequence
  Description of Artificial Sequence: Synthetic oligonucleotide
gaaaaucucgcgcuugcgc

SEQ ID NO: 677248 - RNA, 19 nt, Artificial Sequence
  Description of Artificial Sequence: Synthetic oligonucleotide
cugguaauaguccuugccc

SEQ ID NO: 677249 - RNA, 19 nt, Artificial Sequence
  Description of Artificial Sequence: Synthetic oligonucleotide
uaugcaaccagugaacggu

SEQ ID NO: 677250 - RNA, 19 nt, Artificial Sequence
  Description of Artificial Sequence: Synthetic oligonucleotide
aauaucagaggcuggccau

SEQ ID NO: 677251 - RNA, 19 nt, Artificial Sequence
  Description of Artificial Sequence: Synthetic oligonucleotide
aaacuaaaggacagcaaug

SEQ ID NO: 677252 - RNA, 19 nt, Artificial Sequence
  Description of Artificial Sequence: Synthetic oligonucleotide
aaaucucgcgcuugcgcgg

SEQ ID NO: 677253 - RNA, 19 nt, Artificial Sequence
  Description of Artificial Sequence: Synthetic oligonucleotide
uccuauugaacuagucuca

SEQ ID NO: 677254 - RNA, 19 nt, Artificial Sequence
  Description of Artificial Sequence: Synthetic oligonucleotide
agagcaaaagcccucccug

SEQ ID NO: 677255 - RNA, 19 nt, Artificial Sequence
  Description of Artificial Sequence: Synthetic oligonucleotide
auucggcagagcaaaagcc

SEQ ID NO: 677256 - RNA, 19 nt, Artificial Sequence
  Description of Artificial Sequence: Synthetic oligonucleotide
auuucgaaugcucuuucca

SEQ ID NO: 677257 - RNA, 19 nt, Artificial Sequence
  Description of Artificial Sequence: Synthetic oligonucleotide
guagcggucgaaaaucucg

SEQ ID NO: 677258 - RNA, 19 nt, Artificial Sequence
  Description of Artificial Sequence: Synthetic oligonucleotide
guccuauugaacuagucuc

SEQ ID NO: 677259 - RNA, 19 nt, Artificial Sequence
  Description of Artificial Sequence: Synthetic oligonucleotide
ugagguuuugcaucagucu

SEQ ID NO: 677260 - RNA, 19 nt, Artificial Sequence
  Description of Artificial Sequence: Synthetic oligonucleotide
gaaccaucucucuugaaga

SEQ ID NO: 677261 - RNA, 19 nt, Artificial Sequence
  Description of Artificial Sequence: Synthetic oligonucleotide
ugguaauaguccuugccca

SEQ ID NO: 677262 - RNA, 19 nt, Artificial Sequence
  Description of Artificial Sequence: Synthetic oligonucleotide
uggcaacuuacaaugaguc

SEQ ID NO: 677263 - RNA, 19 nt, Artificial Sequence
  Description of Artificial Sequence: Synthetic oligonucleotide
auacccauuggaaagcccg

SEQ ID NO: 677264 - RNA, 19 nt, Artificial Sequence
  Description of Artificial Sequence: Synthetic oligonucleotide
aguaugcaaccagugaacg

SEQ ID NO: 677265 - RNA, 19 nt, Artificial Sequence
  Description of Artificial Sequence: Synthetic oligonucleotide
uauuacacacacacacaca

SEQ ID NO: 677266 - RNA, 19 nt, Artificial Sequence
  Description of Artificial Sequence: Synthetic oligonucleotide
aacuuuccgccgcaugccg

SEQ ID NO: 677267 - RNA, 19 nt, Artificial Sequence
  Description of Artificial Sequence: Synthetic oligonucleotide
gaaccucucacacagugga

SEQ ID NO: 677268 - RNA, 19 nt, Artificial Sequence
  Description of Artificial Sequence: Synthetic oligonucleotide
cauucggcagagcaaaagc

SEQ ID NO: 677269 - RNA, 19 nt, Artificial Sequence
  Description of Artificial Sequence: Synthetic oligonucleotide
aaacauucggcagagcaaa

SEQ ID NO: 677270 - RNA, 19 nt, Artificial Sequence
  Description of Artificial Sequence: Synthetic oligonucleotide
cacacacacacacacacac

SEQ ID NO: 677271 - RNA, 19 nt, Artificial Sequence
  Description of Artificial Sequence: Synthetic oligonucleotide
uugaucucgucgucggacg

SEQ ID NO: 677272 - RNA, 19 nt, Artificial Sequence
  Description of Artificial Sequence: Synthetic oligonucleotide
aacaagguccccacguuuc

SEQ ID NO: 677273 - RNA, 19 nt, Artificial Sequence
  Description of Artificial Sequence: Synthetic oligonucleotide
acaacagggaugguccugc

SEQ ID NO: 677274 - RNA, 19 nt, Artificial Sequence
  Description of Artificial Sequence: Synthetic oligonucleotide
uuacaaugagucgaaugcc

SEQ ID NO: 677275 - RNA, 19 nt, Artificial Sequence
  Description of Artificial Sequence: Synthetic oligonucleotide
acagacguuucacagggcu

SEQ ID NO: 677276 - RNA, 19 nt, Artificial Sequence
  Description of Artificial Sequence: Synthetic oligonucleotide
acaauaucagaggcuggcc

SEQ ID NO: 677277 - RNA, 19 nt, Artificial Sequence
  Description of Artificial Sequence: Synthetic oligonucleotide
agacccuuuuauauaaagg

SEQ ID NO: 677278 - RNA, 19 nt, Artificial Sequence
  Description of Artificial Sequence: Synthetic oligonucleotide
ggagguaccauuagcaccg

SEQ ID NO: 677279 - RNA, 19 nt, Artificial Sequence
  Description of Artificial Sequence: Synthetic oligonucleotide
ucgaaaaucucgcgcuugc

SEQ ID NO: 677280 - RNA, 19 nt, Artificial Sequence
  Description of Artificial Sequence: Synthetic oligonucleotide
ugaacgguccggaaaucug

SEQ ID NO: 677281 - RNA, 19 nt, Artificial Sequence
  Description of Artificial Sequence: Synthetic oligonucleotide
cuuugaauggaauuauaaa

SEQ ID NO: 677282 - RNA, 19 nt, Artificial Sequence
  Description of Artificial Sequence: Synthetic oligonucleotide
ucaucgauguccaugccuu

SEQ ID NO: 677283 - RNA, 19 nt, Artificial Sequence
  Description of Artificial Sequence: Synthetic oligonucleotide
auauuguguggcuuguccu

SEQ ID NO: 677284 - RNA, 19 nt, Artificial Sequence
  Description of Artificial Sequence: Synthetic oligonucleotide
guaugcaaccagugaacgg

SEQ ID NO: 677285 - RNA, 19 nt, Artificial Sequence
  Description of Artificial Sequence: Synthetic oligonucleotide
gaacagaccccuucacucc

SEQ ID NO: 677286 - RNA, 19 nt, Artificial Sequence
  Description of Artificial Sequence: Synthetic oligonucleotide
gagcaaaagcccucccugg

SEQ ID NO: 677287 - RNA, 19 nt, Artificial Sequence
  Description of Artificial Sequence: Synthetic oligonucleotide
agcaaaagcccucccuggg

SEQ ID NO: 677288 - RNA, 19 nt, Artificial Sequence
  Description of Artificial Sequence: Synthetic oligonucleotide
cacacacacacaauaucag

SEQ ID NO: 677289 - RNA, 19 nt, Artificial Sequence
  Description of Artificial Sequence: Synthetic oligonucleotide
ggauagaugacaucagaac

SEQ ID NO: 677290 - RNA, 19 nt, Artificial Sequence
  Description of Artificial Sequence: Synthetic oligonucleotide
aguucacauuggugaagcc

SEQ ID NO: 677291 - RNA, 19 nt, Artificial Sequence
  Description of Artificial Sequence: Synthetic oligonucleotide
gauaacaagguccccacgu

SEQ ID NO: 677292 - RNA, 19 nt, Artificial Sequence
  Description of Artificial Sequence: Synthetic oligonucleotide
agucuagugagcgacuuug

SEQ ID NO: 677293 - RNA, 19 nt, Artificial Sequence
  Description of Artificial Sequence: Synthetic oligonucleotide
cugacuagugcacaagguc

SEQ ID NO: 677294 - RNA, 19 nt, Artificial Sequence
  Description of Artificial Sequence: Synthetic oligonucleotide
uugguaguggcaacuuaca

SEQ ID NO: 677295 - RNA, 19 nt, Artificial Sequence
  Description of Artificial Sequence: Synthetic oligonucleotide
uugaagauauuguguggcu

SEQ ID NO: 677296 - RNA, 19 nt, Artificial Sequence
  Description of Artificial Sequence: Synthetic oligonucleotide
uggaauuauaaaacauauu

SEQ ID NO: 677297 - RNA, 19 nt, Artificial Sequence
  Description of Artificial Sequence: Synthetic oligonucleotide
acacacacacacaauauca

SEQ ID NO: 677298 - RNA, 19 nt, Artificial Sequence
  Description of Artificial Sequence: Synthetic oligonucleotide
uauaucuagggcugugcaa

SEQ ID NO: 677299 - RNA, 19 nt, Artificial Sequence
  Description of Artificial Sequence: Synthetic oligonucleotide
ucccgaaggcuaauccugg

SEQ ID NO: 677300 - RNA, 19 nt, Artificial Sequence
  Description of Artificial Sequence: Synthetic oligonucleotide
augagucgaaugccagagc

SEQ ID NO: 677301 - RNA, 19 nt, Artificial Sequence
  Description of Artificial Sequence: Synthetic oligonucleotide
uuacacacacacacacaca

SEQ ID NO: 677302 - RNA, 19 nt, Artificial Sequence
  Description of Artificial Sequence: Synthetic oligonucleotide
aagguccccacguuucuca

SEQ ID NO: 677303 - RNA, 19 nt, Artificial Sequence
  Description of Artificial Sequence: Synthetic oligonucleotide
ucgauaacaagguccccac

SEQ ID NO: 677304 - RNA, 19 nt, Artificial Sequence
  Description of Artificial Sequence: Synthetic oligonucleotide
uagcggucgaaaaucucgc

SEQ ID NO: 677305 - RNA, 19 nt, Artificial Sequence
  Description of Artificial Sequence: Synthetic oligonucleotide
acacacuuuggucucgugu

SEQ ID NO: 677306 - RNA, 19 nt, Artificial Sequence
  Description of Artificial Sequence: Synthetic oligonucleotide
uucgaaugcucuuuccauc

SEQ ID NO: 677307 - RNA, 19 nt, Artificial Sequence
  Description of Artificial Sequence: Synthetic oligonucleotide
aaggcaugggacaaauaca

SEQ ID NO: 677308 - RNA, 19 nt, Artificial Sequence
  Description of Artificial Sequence: Synthetic oligonucleotide
uguuguucccaccgccugc

SEQ ID NO: 677309 - RNA, 19 nt, Artificial Sequence
  Description of Artificial Sequence: Synthetic oligonucleotide
ucgaaugccagagcaccgg

SEQ ID NO: 677310 - RNA, 19 nt, Artificial Sequence
  Description of Artificial Sequence: Synthetic oligonucleotide
gauuauaucuagggcugug

SEQ ID NO: 677311 - RNA, 19 nt, Artificial Sequence
  Description of Artificial Sequence: Synthetic oligonucleotide
auccuuucggggaagauga

SEQ ID NO: 677312 - RNA, 19 nt, Artificial Sequence
  Description of Artificial Sequence: Synthetic oligonucleotide
gucucaauuugagauggcc

SEQ ID NO: 677313 - RNA, 19 nt, Artificial Sequence
  Description of Artificial Sequence: Synthetic oligonucleotide
aaugggucaucgaugucca

SEQ ID NO: 677314 - RNA, 19 nt, Artificial Sequence
  Description of Artificial Sequence: Synthetic oligonucleotide
gagaaugggucaucgaugu

SEQ ID NO: 677315 - RNA, 19 nt, Artificial Sequence
  Description of Artificial Sequence: Synthetic oligonucleotide
aggaacaacaaggcauggg

SEQ ID NO: 677316 - RNA, 19 nt, Artificial Sequence
  Description of Artificial Sequence: Synthetic oligonucleotide
auauccuuuugagagaguu

SEQ ID NO: 677317 - RNA, 19 nt, Artificial Sequence
  Description of Artificial Sequence: Synthetic oligonucleotide
acagacaguaguaguugac

SEQ ID NO: 677318 - RNA, 19 nt, Artificial Sequence
  Description of Artificial Sequence: Synthetic oligonucleotide
ucucguguugguaguggca

SEQ ID NO: 677319 - RNA, 19 nt, Artificial Sequence
  Description of Artificial Sequence: Synthetic oligonucleotide
uguagucuagugagcgacu

SEQ ID NO: 677320 - RNA, 19 nt, Artificial Sequence
  Description of Artificial Sequence: Synthetic oligonucleotide
gcuaauccuggcuggauag

SEQ ID NO: 677321 - RNA, 19 nt, Artificial Sequence
  Description of Artificial Sequence: Synthetic oligonucleotide
cucccgaaggcuaauccug

SEQ ID NO: 677322 - RNA, 19 nt, Artificial Sequence
  Description of Artificial Sequence: Synthetic oligonucleotide
caaauucgauaacaagguc

SEQ ID NO: 677323 - RNA, 19 nt, Artificial Sequence
  Description of Artificial Sequence: Synthetic oligonucleotide
gcaacuuacaaugagucga

SEQ ID NO: 677324 - RNA, 19 nt, Artificial Sequence
  Description of Artificial Sequence: Synthetic oligonucleotide
cacacacacacacaauauc

SEQ ID NO: 677325 - RNA, 19 nt, Artificial Sequence
  Description of Artificial Sequence: Synthetic oligonucleotide
ugguaguggcaacuuacaa

SEQ ID NO: 677326 - RNA, 19 nt, Artificial Sequence
  Description of Artificial Sequence: Synthetic oligonucleotide
guaggcucgcuugaucucg

SEQ ID NO: 677327 - RNA, 19 nt, Artificial Sequence
  Description of Artificial Sequence: Synthetic oligonucleotide
gaacgguccggaaaucugc

SEQ ID NO: 677328 - RNA, 19 nt, Artificial Sequence
  Description of Artificial Sequence: Synthetic oligonucleotide
ugcaaccagugaacggucc

SEQ ID NO: 677329 - RNA, 19 nt, Artificial Sequence
  Description of Artificial Sequence: Synthetic oligonucleotide
ucccgcaguaugcaaccag

SEQ ID NO: 677330 - RNA, 19 nt, Artificial Sequence
  Description of Artificial Sequence: Synthetic oligonucleotide
guaccauuagcaccgccac

SEQ ID NO: 677331 - RNA, 19 nt, Artificial Sequence
  Description of Artificial Sequence: Synthetic oligonucleotide
caccgggcuagcuucaaag

SEQ ID NO: 677332 - RNA, 19 nt, Artificial Sequence
  Description of Artificial Sequence: Synthetic oligonucleotide
gagcgacuuugaaagauug

SEQ ID NO: 677333 - RNA, 19 nt, Artificial Sequence
  Description of Artificial Sequence: Synthetic oligonucleotide
agaagcaaagacccuuuua

SEQ ID NO: 677334 - RNA, 19 nt, Artificial Sequence
  Description of Artificial Sequence: Synthetic oligonucleotide
cuuugaauacaacagggau

SEQ ID NO: 677335 - RNA, 19 nt, Artificial Sequence
  Description of Artificial Sequence: Synthetic oligonucleotide
agugcacaaggucuggcaa

SEQ ID NO: 677336 - RNA, 19 nt, Artificial Sequence
  Description of Artificial Sequence: Synthetic oligonucleotide
aguaguugacagggacugc

SEQ ID NO: 677337 - RNA, 19 nt, Artificial Sequence
  Description of Artificial Sequence: Synthetic oligonucleotide
cuuuccgccgcaugccggg

SEQ ID NO: 677338 - RNA, 19 nt, Artificial Sequence
  Description of Artificial Sequence: Synthetic oligonucleotide
cauacccauuggaaagccc

SEQ ID NO: 677339 - RNA, 19 nt, Artificial Sequence
  Description of Artificial Sequence: Synthetic oligonucleotide
uccguagcggucgaaaauc

SEQ ID NO: 677340 - RNA, 19 nt, Artificial Sequence
  Description of Artificial Sequence: Synthetic oligonucleotide
agcggucgaaaaucucgcg

SEQ ID NO: 677341 - RNA, 19 nt, Artificial Sequence
  Description of Artificial Sequence: Synthetic oligonucleotide
ugagcgacuuugaaagauu

SEQ ID NO: 677342 - RNA, 19 nt, Artificial Sequence
  Description of Artificial Sequence: Synthetic oligonucleotide
cuucaagggagacccggag

SEQ ID NO: 677343 - RNA, 19 nt, Artificial Sequence
  Description of Artificial Sequence: Synthetic oligonucleotide
aaucucgcgcuugcgcggg

SEQ ID NO: 677344 - RNA, 19 nt, Artificial Sequence
  Description of Artificial Sequence: Synthetic oligonucleotide
acauucggcagagcaaaag

SEQ ID NO: 677345 - RNA, 19 nt, Artificial Sequence
  Description of Artificial Sequence: Synthetic oligonucleotide
uucggggaagaugacuuca

SEQ ID NO: 677346 - RNA, 19 nt, Artificial Sequence
  Description of Artificial Sequence: Synthetic oligonucleotide
cacagcccuggacagacag

SEQ ID NO: 677347 - RNA, 19 nt, Artificial Sequence
  Description of Artificial Sequence: Synthetic oligonucleotide
cacacacacacacacacaa

SEQ ID NO: 677348 - RNA, 19 nt, Artificial Sequence
  Description of Artificial Sequence: Synthetic oligonucleotide
caauaucagaggcuggcca

SEQ ID NO: 677349 - RNA, 19 nt, Artificial Sequence
  Description of Artificial Sequence: Synthetic oligonucleotide
uccuguaaccagguauugc

SEQ ID NO: 677350 - RNA, 19 nt, Artificial Sequence
  Description of Artificial Sequence: Synthetic oligonucleotide
agguaccauuagcaccgcc

SEQ ID NO: 677351 - RNA, 19 nt, Artificial Sequence
  Description of Artificial Sequence: Synthetic oligonucleotide
auucgauaacaaggucccc

SEQ ID NO: 677352 - RNA, 19 nt, Artificial Sequence
  Description of Artificial Sequence: Synthetic oligonucleotide
uguugguaguggcaacuua

SEQ ID NO: 677353 - RNA, 19 nt, Artificial Sequence
  Description of Artificial Sequence: Synthetic oligonucleotide
ugcucuuuccaucgggguu

SEQ ID NO: 677354 - RNA, 19 nt, Artificial Sequence
  Description of Artificial Sequence: Synthetic oligonucleotide
uccuuguucuugucggggu

SEQ ID NO: 677355 - RNA, 19 nt, Artificial Sequence
  Description of Artificial Sequence: Synthetic oligonucleotide
gggauuauaucuagggcug

SEQ ID NO: 677356 - RNA, 19 nt, Artificial Sequence
  Description of Artificial Sequence: Synthetic oligonucleotide
auaacaagguccccacguu

SEQ ID NO: 677357 - RNA, 19 nt, Artificial Sequence
  Description of Artificial Sequence: Synthetic oligonucleotide
uacccauuggaaagcccga

SEQ ID NO: 677358 - RNA, 19 nt, Artificial Sequence
  Description of Artificial Sequence: Synthetic oligonucleotide
agaaugggucaucgauguc

SEQ ID NO: 677359 - RNA, 19 nt, Artificial Sequence
  Description of Artificial Sequence: Synthetic oligonucleotide
acuagugcacaaggucugg

SEQ ID NO: 677360 - RNA, 19 nt, Artificial Sequence
  Description of Artificial Sequence: Synthetic oligonucleotide
acuguagucuagugagcga

SEQ ID NO: 677361 - RNA, 19 nt, Artificial Sequence
  Description of Artificial Sequence: Synthetic oligonucleotide
cacacacacacacacaaua

SEQ ID NO: 677362 - RNA, 19 nt, Artificial Sequence
  Description of Artificial Sequence: Synthetic oligonucleotide
gaggaacaacaaggcaugg

SEQ ID NO: 677363 - RNA, 19 nt, Artificial Sequence
  Description of Artificial Sequence: Synthetic oligonucleotide
gggacauuuacagugcaac

SEQ ID NO: 677364 - RNA, 19 nt, Artificial Sequence
  Description of Artificial Sequence: Synthetic oligonucleotide
uauauccuuuugagagagu

SEQ ID NO: 677365 - RNA, 19 nt, Artificial Sequence
  Description of Artificial Sequence: Synthetic oligonucleotide
uuccccguugcgcugccca

SEQ ID NO: 677366 - RNA, 19 nt, Artificial Sequence
  Description of Artificial Sequence: Synthetic oligonucleotide
ucgggguucagccgcuugu

SEQ ID NO: 677367 - RNA, 19 nt, Artificial Sequence
  Description of Artificial Sequence: Synthetic oligonucleotide
ucgucggacgcgccgcggg

SEQ ID NO: 677368 - RNA, 19 nt, Artificial Sequence
  Description of Artificial Sequence: Synthetic oligonucleotide
guucagagucuauuacaca

SEQ ID NO: 677369 - RNA, 19 nt, Artificial Sequence
  Description of Artificial Sequence: Synthetic oligonucleotide
caaccagugaacgguccgg

SEQ ID NO: 677370 - RNA, 19 nt, Artificial Sequence
  Description of Artificial Sequence: Synthetic oligonucleotide
aggaacuuuccgccgcaug

SEQ ID NO: 677371 - RNA, 19 nt, Artificial Sequence
  Description of Artificial Sequence: Synthetic oligonucleotide
uuggucucguguugguagu

SEQ ID NO: 677372 - RNA, 19 nt, Artificial Sequence
  Description of Artificial Sequence: Synthetic oligonucleotide
auacaacagggaugguccu

SEQ ID NO: 677373 - RNA, 19 nt, Artificial Sequence
  Description of Artificial Sequence: Synthetic oligonucleotide
aguugacagggacugcuuu

SEQ ID NO: 677374 - RNA, 19 nt, Artificial Sequence
  Description of Artificial Sequence: Synthetic oligonucleotide
acgucguaggccucggcga

SEQ ID NO: 677375 - RNA, 19 nt, Artificial Sequence
  Description of Artificial Sequence: Synthetic oligonucleotide
cagugcaaccacagagagc

SEQ ID NO: 677376 - RNA, 19 nt, Artificial Sequence
  Description of Artificial Sequence: Synthetic oligonucleotide
caauuugagauggccaaga

SEQ ID NO: 677377 - RNA, 19 nt, Artificial Sequence
  Description of Artificial Sequence: Synthetic oligonucleotide
acaagguccccacguuucu

SEQ ID NO: 677378 - RNA, 19 nt, Artificial Sequence
  Description of Artificial Sequence: Synthetic oligonucleotide
caauggucaggaucuuauc

SEQ ID NO: 677379 - RNA, 19 nt, Artificial Sequence
  Description of Artificial Sequence: Synthetic oligonucleotide
acugacuagugcacaaggu

SEQ ID NO: 677380 - RNA, 19 nt, Artificial Sequence
  Description of Artificial Sequence: Synthetic oligonucleotide
uaccauuagcaccgccacu

SEQ ID NO: 677381 - RNA, 19 nt, Artificial Sequence
  Description of Artificial Sequence: Synthetic oligonucleotide
uuucggggaagaugacuuc

SEQ ID NO: 677382 - RNA, 19 nt, Artificial Sequence
  Description of Artificial Sequence: Synthetic oligonucleotide
uaucuagggcugugcaaaa

SEQ ID NO: 677383 - RNA, 19 nt, Artificial Sequence
  Description of Artificial Sequence: Synthetic oligonucleotide
cacagagagccucccgaag

SEQ ID NO: 677384 - RNA, 19 nt, Artificial Sequence
  Description of Artificial Sequence: Synthetic oligonucleotide
accgggcuagcuucaaaga

SEQ ID NO: 677385 - RNA, 19 nt, Artificial Sequence
  Description of Artificial Sequence: Synthetic oligonucleotide
aacgguccggaaaucugca

SEQ ID NO: 677386 - RNA, 19 nt, Artificial Sequence
  Description of Artificial Sequence: Synthetic oligonucleotide
ccagcgucugguaauaguc

SEQ ID NO: 677387 - RNA, 19 nt, Artificial Sequence
  Description of Artificial Sequence: Synthetic oligonucleotide
gcuagcuucaaagaacaga

SEQ ID NO: 677388 - RNA, 19 nt, Artificial Sequence
  Description of Artificial Sequence: Synthetic oligonucleotide
gguuucugccaccaaagaa

SEQ ID NO: 677389 - RNA, 19 nt, Artificial Sequence
  Description of Artificial Sequence: Synthetic oligonucleotide
cucaguccuuggagaaugc

SEQ ID NO: 677390 - RNA, 19 nt, Artificial Sequence
  Description of Artificial Sequence: Synthetic oligonucleotide
gaaugccagagcaccgggc

SEQ ID NO: 677391 - RNA, 19 nt, Artificial Sequence
  Description of Artificial Sequence: Synthetic oligonucleotide
auaucagaggcuggccaug

SEQ ID NO: 677392 - RNA, 19 nt, Artificial Sequence
  Description of Artificial Sequence: Synthetic oligonucleotide
gucgaaaaucucgcgcuug

SEQ ID NO: 677393 - RNA, 19 nt, Artificial Sequence
  Description of Artificial Sequence: Synthetic oligonucleotide
cuagugcacaaggucuggc

SEQ ID NO: 677394 - RNA, 19 nt, Artificial Sequence
  Description of Artificial Sequence: Synthetic oligonucleotide
guuguucccaccgccugcc

SEQ ID NO: 677395 - RNA, 19 nt, Artificial Sequence
  Description of Artificial Sequence: Synthetic oligonucleotide
gguaccauuagcaccgcca

SEQ ID NO: 677396 - RNA, 19 nt, Artificial Sequence
  Description of Artificial Sequence: Synthetic oligonucleotide
cucgucgucggacgcgccg

SEQ ID NO: 677397 - RNA, 19 nt, Artificial Sequence
  Description of Artificial Sequence: Synthetic oligonucleotide
agugaacgguccggaaauc

SEQ ID NO: 677398 - RNA, 19 nt, Artificial Sequence
  Description of Artificial Sequence: Synthetic oligonucleotide
caguccuauugaacuaguc

SEQ ID NO: 677399 - RNA, 19 nt, Artificial Sequence
  Description of Artificial Sequence: Synthetic oligonucleotide
gcuuugaauggaauuauaa

SEQ ID NO: 677400 - RNA, 19 nt, Artificial Sequence
  Description of Artificial Sequence: Synthetic oligonucleotide
gucuuggggagagggaggc

SEQ ID NO: 677401 - RNA, 19 nt, Artificial Sequence
  Description of Artificial Sequence: Synthetic oligonucleotide
acacacacacacacaauau

SEQ ID NO: 677402 - RNA, 19 nt, Artificial Sequence
  Description of Artificial Sequence: Synthetic oligonucleotide
gcggucgaaaaucucgcgc

SEQ ID NO: 677403 - RNA, 19 nt, Artificial Sequence
  Description of Artificial Sequence: Synthetic oligonucleotide
caguggagacugacuagug

SEQ ID NO: 677404 - RNA, 19 nt, Artificial Sequence
  Description of Artificial Sequence: Synthetic oligonucleotide
uuaggccuucuucuccgua

SEQ ID NO: 677405 - RNA, 19 nt, Artificial Sequence
  Description of Artificial Sequence: Synthetic oligonucleotide
aacuuacaaugagucgaau

SEQ ID NO: 677406 - RNA, 19 nt, Artificial Sequence
  Description of Artificial Sequence: Synthetic oligonucleotide
gagucgaaugccagagcac

SEQ ID NO: 677407 - RNA, 19 nt, Artificial Sequence
  Description of Artificial Sequence: Synthetic oligonucleotide
acgguccggaaaucugcag

SEQ ID NO: 677408 - RNA, 19 nt, Artificial Sequence
  Description of Artificial Sequence: Synthetic oligonucleotide
cacccauacccauuggaaa

SEQ ID NO: 677409 - RNA, 19 nt, Artificial Sequence
  Description of Artificial Sequence: Synthetic oligonucleotide
uucuggaugucaggggaau

SEQ ID NO: 677410 - RNA, 19 nt, Artificial Sequence
  Description of Artificial Sequence: Synthetic oligonucleotide
caugggacaaauacagaau

SEQ ID NO: 677411 - RNA, 19 nt, Artificial Sequence
  Description of Artificial Sequence: Synthetic oligonucleotide
gcaaaagcccucccugggc

SEQ ID NO: 677412 - RNA, 19 nt, Artificial Sequence
  Description of Artificial Sequence: Synthetic oligonucleotide
ucguguugguaguggcaac

SEQ ID NO: 677413 - RNA, 19 nt, Artificial Sequence
  Description of Artificial Sequence: Synthetic oligonucleotide
uagucuagugagcgacuuu

SEQ ID NO: 677414 - RNA, 19 nt, Artificial Sequence
  Description of Artificial Sequence: Synthetic oligonucleotide
ggaaaagucccuggcucag

SEQ ID NO: 677415 - RNA, 19 nt, Artificial Sequence
  Description of Artificial Sequence: Synthetic oligonucleotide
cugcuaccgccacuggggc

SEQ ID NO: 677416 - RNA, 19 nt, Artificial Sequence
  Description of Artificial Sequence: Synthetic oligonucleotide
acuuuccgccgcaugccgg

SEQ ID NO: 677417 - RNA, 19 nt, Artificial Sequence
  Description of Artificial Sequence: Synthetic oligonucleotide
aggacgguucuggauguca

SEQ ID NO: 677418 - RNA, 19 nt, Artificial Sequence
  Description of Artificial Sequence: Synthetic oligonucleotide
cgagaaugggucaucgaug

SEQ ID NO: 677419 - RNA, 19 nt, Artificial Sequence
  Description of Artificial Sequence: Synthetic oligonucleotide
ggucucguguugguagugg

SEQ ID NO: 677420 - RNA, 19 nt, Artificial Sequence
  Description of Artificial Sequence: Synthetic oligonucleotide
aucgggguucagccgcuug

SEQ ID NO: 677421 - RNA, 19 nt, Artificial Sequence
  Description of Artificial Sequence: Synthetic oligonucleotide
aagcccgagaaugggucau

SEQ ID NO: 677422 - RNA, 19 nt, Artificial Sequence
  Description of Artificial Sequence: Synthetic oligonucleotide
cucgcgcuugcgcgggucg

SEQ ID NO: 677423 - RNA, 19 nt, Artificial Sequence
  Description of Artificial Sequence: Synthetic oligonucleotide
cguccaaaguucacauugg

SEQ ID NO: 677424 - RNA, 19 nt, Artificial Sequence
  Description of Artificial Sequence: Synthetic oligonucleotide
uccuuucggggaagaugac

SEQ ID NO: 677425 - RNA, 19 nt, Artificial Sequence
  Description of Artificial Sequence: Synthetic oligonucleotide
agcgacuuugaaagauugu

SEQ ID NO: 677426 - RNA, 19 nt, Artificial Sequence
  Description of Artificial Sequence: Synthetic oligonucleotide
cucguguugguaguggcaa

SEQ ID NO: 677427 - RNA, 19 nt, Artificial Sequence
  Description of Artificial Sequence: Synthetic oligonucleotide
cgaaggcuaauccuggcug

SEQ ID NO: 677428 - RNA, 19 nt, Artificial Sequence
  Description of Artificial Sequence: Synthetic oligonucleotide
aagggguuucugccaccaa

SEQ ID NO: 677429 - RNA, 19 nt, Artificial Sequence
  Description of Artificial Sequence: Synthetic oligonucleotide
caccgccugccuaucacuc

SEQ ID NO: 677430 - RNA, 19 nt, Artificial Sequence
  Description of Artificial Sequence: Synthetic oligonucleotide
gugguagcgcagcgccugg

SEQ ID NO: 677431 - RNA, 19 nt, Artificial Sequence
  Description of Artificial Sequence: Synthetic oligonucleotide
gaugguccugccguccaga

SEQ ID NO: 677432 - RNA, 19 nt, Artificial Sequence
  Description of Artificial Sequence: Synthetic oligonucleotide
uggucucguguugguagug

SEQ ID NO: 677433 - RNA, 19 nt, Artificial Sequence
  Description of Artificial Sequence: Synthetic oligonucleotide
aacauucggcagagcaaaa

SEQ ID NO: 677434 - RNA, 19 nt, Artificial Sequence
  Description of Artificial Sequence: Synthetic oligonucleotide
gcgacuuugaaagauugua

SEQ ID NO: 677435 - RNA, 19 nt, Artificial Sequence
  Description of Artificial Sequence: Synthetic oligonucleotide
gggcuagcuucaaagaaca

SEQ ID NO: 677436 - RNA, 19 nt, Artificial Sequence
  Description of Artificial Sequence: Synthetic oligonucleotide
guccccacguuucucaggu

SEQ ID NO: 677437 - RNA, 19 nt, Artificial Sequence
  Description of Artificial Sequence: Synthetic oligonucleotide
accgccugccuaucacuca

SEQ ID NO: 677438 - RNA, 19 nt, Artificial Sequence
  Description of Artificial Sequence: Synthetic oligonucleotide
caucgauguccaugccuuc

SEQ ID NO: 677439 - RNA, 19 nt, Artificial Sequence
  Description of Artificial Sequence: Synthetic oligonucleotide
guggcaacuuacaaugagu

SEQ ID NO: 677440 - RNA, 19 nt, Artificial Sequence
  Description of Artificial Sequence: Synthetic oligonucleotide
accagugaacgguccggaa

SEQ ID NO: 677441 - RNA, 19 nt, Artificial Sequence
  Description of Artificial Sequence: Synthetic oligonucleotide
acacacacacacacacaca

SEQ ID NO: 677442 - RNA, 19 nt, Artificial Sequence
  Description of Artificial Sequence: Synthetic oligonucleotide
gggccaccacccuuuaggc

SEQ ID NO: 677443 - RNA, 19 nt, Artificial Sequence
  Description of Artificial Sequence: Synthetic oligonucleotide
ucacuucaauggucaggau

SEQ ID NO: 677444 - RNA, 19 nt, Artificial Sequence
  Description of Artificial Sequence: Synthetic oligonucleotide
gccucccgaaggcuaaucc

SEQ ID NO: 677445 - RNA, 19 nt, Artificial Sequence
  Description of Artificial Sequence: Synthetic oligonucleotide
agccgcuugugggagauuu

SEQ ID NO: 677446 - RNA, 19 nt, Artificial Sequence
  Description of Artificial Sequence: Synthetic oligonucleotide
ggcacguccaaaguucaca

SEQ ID NO: 677447 - RNA, 19 nt, Artificial Sequence
  Description of Artificial Sequence: Synthetic oligonucleotide
ggacgguucuggaugucag

SEQ ID NO: 677448 - RNA, 19 nt, Artificial Sequence
  Description of Artificial Sequence: Synthetic oligonucleotide
cgggcuagcuucaaagaac

SEQ ID NO: 677449 - RNA, 19 nt, Artificial Sequence
  Description of Artificial Sequence: Synthetic oligonucleotide
ggcuauaugggaagaaccu

SEQ ID NO: 677450 - RNA, 19 nt, Artificial Sequence
  Description of Artificial Sequence: Synthetic oligonucleotide
acccggagaucguggguga

SEQ ID NO: 677451 - RNA, 19 nt, Artificial Sequence
  Description of Artificial Sequence: Synthetic oligonucleotide
ugagcacgucguaggccuc

SEQ ID NO: 677452 - RNA, 19 nt, Artificial Sequence
  Description of Artificial Sequence: Synthetic oligonucleotide
agcuuugaauggaauuaua

SEQ ID NO: 677453 - RNA, 19 nt, Artificial Sequence
  Description of Artificial Sequence: Synthetic oligonucleotide
cuucauuucgaaugcucuu

SEQ ID NO: 677454 - RNA, 19 nt, Artificial Sequence
  Description of Artificial Sequence: Synthetic oligonucleotide
agaugacuucaaauucgau

SEQ ID NO: 677455 - RNA, 19 nt, Artificial Sequence
  Description of Artificial Sequence: Synthetic oligonucleotide
agcacgucguaggccucgg

SEQ ID NO: 677456 - RNA, 19 nt, Artificial Sequence
  Description of Artificial Sequence: Synthetic oligonucleotide
ugccguccagaguggggac

SEQ ID NO: 677457 - RNA, 19 nt, Artificial Sequence
  Description of Artificial Sequence: Synthetic oligonucleotide
gguaggcucgcuugaucuc

SEQ ID NO: 677458 - RNA, 19 nt, Artificial Sequence
  Description of Artificial Sequence: Synthetic oligonucleotide
augacaagucacacacuuu

SEQ ID NO: 677459 - RNA, 19 nt, Artificial Sequence
  Description of Artificial Sequence: Synthetic oligonucleotide
agccucccgaaggcuaauc

SEQ ID NO: 677460 - RNA, 19 nt, Artificial Sequence
  Description of Artificial Sequence: Synthetic oligonucleotide
agccccucuucacuucaau

SEQ ID NO: 677461 - RNA, 19 nt, Artificial Sequence
  Description of Artificial Sequence: Synthetic oligonucleotide
gagaaugcagguggcuaua

SEQ ID NO: 677462 - RNA, 19 nt, Artificial Sequence
  Description of Artificial Sequence: Synthetic oligonucleotide
cagugaacgguccggaaau

SEQ ID NO: 677463 - RNA, 19 nt, Artificial Sequence
  Description of Artificial Sequence: Synthetic oligonucleotide
agguggcuauaugggaaga

SEQ ID NO: 677464 - RNA, 19 nt, Artificial Sequence
  Description of Artificial Sequence: Synthetic oligonucleotide
ucccaccgccugccuauca

SEQ ID NO: 677465 - RNA, 19 nt, Artificial Sequence
  Description of Artificial Sequence: Synthetic oligonucleotide
gcggcgguaggcucgcuug

SEQ ID NO: 677466 - RNA, 19 nt, Artificial Sequence
  Description of Artificial Sequence: Synthetic oligonucleotide
ggagacugacuagugcaca

SEQ ID NO: 677467 - RNA, 19 nt, Artificial Sequence
  Description of Artificial Sequence: Synthetic oligonucleotide
cuaauccuggcuggauaga

SEQ ID NO: 677468 - RNA, 19 nt, Artificial Sequence
  Description of Artificial Sequence: Synthetic oligonucleotide
cgguccggaaaucugcagc

SEQ ID NO: 677469 - RNA, 19 nt, Artificial Sequence
  Description of Artificial Sequence: Synthetic oligonucleotide
gucuagugagcgacuuuga

SEQ ID NO: 677470 - RNA, 19 nt, Artificial Sequence
  Description of Artificial Sequence: Synthetic oligonucleotide
acacacacacacacacaau

SEQ ID NO: 677471 - RNA, 19 nt, Artificial Sequence
  Description of Artificial Sequence: Synthetic oligonucleotide
cuauugaacuagucucaau

SEQ ID NO: 677472 - RNA, 19 nt, Artificial Sequence
  Description of Artificial Sequence: Synthetic oligonucleotide
caagguccccacguuucuc

SEQ ID NO: 677473 - RNA, 19 nt, Artificial Sequence
  Description of Artificial Sequence: Synthetic oligonucleotide
gagguaccauuagcaccgc

SEQ ID NO: 677474 - RNA, 19 nt, Artificial Sequence
  Description of Artificial Sequence: Synthetic oligonucleotide
gguaauaguccuugcccau

SEQ ID NO: 677475 - RNA, 19 nt, Artificial Sequence
  Description of Artificial Sequence: Synthetic oligonucleotide
cauuggaaagcccgagaau

SEQ ID NO: 677476 - RNA, 19 nt, Artificial Sequence
  Description of Artificial Sequence: Synthetic oligonucleotide
ggcuaauccuggcuggaua

SEQ ID NO: 677477 - RNA, 19 nt, Artificial Sequence
  Description of Artificial Sequence: Synthetic oligonucleotide
cuugcgcgggucgcugagc

SEQ ID NO: 677478 - RNA, 19 nt, Artificial Sequence
  Description of Artificial Sequence: Synthetic oligonucleotide
gccucacacccuugggcag

SEQ ID NO: 677479 - RNA, 19 nt, Artificial Sequence
  Description of Artificial Sequence: Synthetic oligonucleotide
ccgcaguaugcaaccagug

SEQ ID NO: 677480 - RNA, 19 nt, Artificial Sequence
  Description of Artificial Sequence: Synthetic oligonucleotide
cgaaugccagagcaccggg

SEQ ID NO: 677481 - RNA, 19 nt, Artificial Sequence
  Description of Artificial Sequence: Synthetic oligonucleotide
cgauaacaagguccccacg

SEQ ID NO: 677482 - RNA, 19 nt, Artificial Sequence
  Description of Artificial Sequence: Synthetic oligonucleotide
cgucugguaauaguccuug

SEQ ID NO: 677483 - RNA, 19 nt, Artificial Sequence
  Description of Artificial Sequence: Synthetic oligonucleotide
ggcuagcuucaaagaacag

SEQ ID NO: 677484 - RNA, 19 nt, Artificial Sequence
  Description of Artificial Sequence: Synthetic oligonucleotide
gcgggcacguccaaaguuc

SEQ ID NO: 677485 - RNA, 19 nt, Artificial Sequence
  Description of Artificial Sequence: Synthetic oligonucleotide
cugcuuucaucugggcgca

SEQ ID NO: 677486 - RNA, 19 nt, Artificial Sequence
  Description of Artificial Sequence: Synthetic oligonucleotide
aggcuaauccuggcuggau

SEQ ID NO: 677487 - RNA, 19 nt, Artificial Sequence
  Description of Artificial Sequence: Synthetic oligonucleotide
ugcgcgggucgcugagcac

SEQ ID NO: 677488 - RNA, 19 nt, Artificial Sequence
  Description of Artificial Sequence: Synthetic oligonucleotide
gguccauuccaggagggcu

SEQ ID NO: 677489 - RNA, 19 nt, Artificial Sequence
  Description of Artificial Sequence: Synthetic oligonucleotide
ccucacacccuugggcagg

SEQ ID NO: 677490 - RNA, 19 nt, Artificial Sequence
  Description of Artificial Sequence: Synthetic oligonucleotide
cgaaaaucucgcgcuugcg

SEQ ID NO: 677491 - RNA, 19 nt, Artificial Sequence
  Description of Artificial Sequence: Synthetic oligonucleotide
guagucuagugagcgacuu

SEQ ID NO: 677492 - RNA, 19 nt, Artificial Sequence
  Description of Artificial Sequence: Synthetic oligonucleotide
ggugucuuggggagaggga

SEQ ID NO: 677493 - RNA, 19 nt, Artificial Sequence
  Description of Artificial Sequence: Synthetic oligonucleotide
gaagccacccauacccauu

SEQ ID NO: 677494 - RNA, 19 nt, Artificial Sequence
  Description of Artificial Sequence: Synthetic oligonucleotide
gucgucggacgcgccgcgg

SEQ ID NO: 677495 - RNA, 19 nt, Artificial Sequence
  Description of Artificial Sequence: Synthetic oligonucleotide
gggagacccggagaucgug

SEQ ID NO: 677496 - RNA, 19 nt, Artificial Sequence
  Description of Artificial Sequence: Synthetic oligonucleotide
gcuuucaucugggcgcaca

SEQ ID NO: 677497 - RNA, 19 nt, Artificial Sequence
  Description of Artificial Sequence: Synthetic oligonucleotide
cuccguagcggucgaaaau

SEQ ID NO: 677498 - RNA, 19 nt, Artificial Sequence
  Description of Artificial Sequence: Synthetic oligonucleotide
acaaggcaugggacaaaua

SEQ ID NO: 677499 - RNA, 19 nt, Artificial Sequence
  Description of Artificial Sequence: Synthetic oligonucleotide
gcacguccaaaguucacau

SEQ ID NO: 677500 - RNA, 19 nt, Artificial Sequence
  Description of Artificial Sequence: Synthetic oligonucleotide
gccugccuaucacucaaaa

SEQ ID NO: 677501 - RNA, 19 nt, Artificial Sequence
  Description of Artificial Sequence: Synthetic oligonucleotide
cgcaguaugcaaccaguga

SEQ ID NO: 677502 - RNA, 19 nt, Artificial Sequence
  Description of Artificial Sequence: Synthetic oligonucleotide
ccgcuugugggagauuuuc

SEQ ID NO: 677503 - RNA, 19 nt, Artificial Sequence
  Description of Artificial Sequence: Synthetic oligonucleotide
ggaaagcccgagaaugggu

SEQ ID NO: 677504 - RNA, 19 nt, Artificial Sequence
  Description of Artificial Sequence: Synthetic oligonucleotide
ccuauugaacuagucucaa

SEQ ID NO: 677505 - RNA, 19 nt, Artificial Sequence
  Description of Artificial Sequence: Synthetic oligonucleotide
gguccuguaaccagguauu

SEQ ID NO: 677506 - RNA, 19 nt, Artificial Sequence
  Description of Artificial Sequence: Synthetic oligonucleotide
ggcgccgggcuccuuguuc

SEQ ID NO: 677507 - RNA, 19 nt, Artificial Sequence
  Description of Artificial Sequence: Synthetic oligonucleotide
ugccgggccugaugacauc

SEQ ID NO: 677508 - RNA, 19 nt, Artificial Sequence
  Description of Artificial Sequence: Synthetic oligonucleotide
agcccagcgucugguaaua

SEQ ID NO: 677509 - RNA, 19 nt, Artificial Sequence
  Description of Artificial Sequence: Synthetic oligonucleotide
ccgggcuagcuucaaagaa

SEQ ID NO: 677510 - RNA, 19 nt, Artificial Sequence
  Description of Artificial Sequence: Synthetic oligonucleotide
cccaccgccugccuaucac

SEQ ID NO: 677511 - RNA, 19 nt, Artificial Sequence
  Description of Artificial Sequence: Synthetic oligonucleotide
cguagcggucgaaaaucuc

SEQ ID NO: 677512 - RNA, 19 nt, Artificial Sequence
  Description of Artificial Sequence: Synthetic oligonucleotide
gcgaguccaguugcaggcc

SEQ ID NO: 677513 - RNA, 19 nt, Artificial Sequence
  Description of Artificial Sequence: Synthetic oligonucleotide
ugcuuucaucugggcgcac

SEQ ID NO: 677514 - RNA, 19 nt, Artificial Sequence
  Description of Artificial Sequence: Synthetic oligonucleotide
ggauuauaucuagggcugu

SEQ ID NO: 677515 - RNA, 19 nt, Artificial Sequence
  Description of Artificial Sequence: Synthetic oligonucleotide
ggggacauuuacagugcaa

SEQ ID NO: 677516 - RNA, 19 nt, Artificial Sequence
  Description of Artificial Sequence: Synthetic oligonucleotide
cuuccccguugcgcugccc

SEQ ID NO: 677517 - RNA, 19 nt, Artificial Sequence
  Description of Artificial Sequence: Synthetic oligonucleotide
uucccaccgccugccuauc

SEQ ID NO: 677518 - RNA, 19 nt, Artificial Sequence
  Description of Artificial Sequence: Synthetic oligonucleotide
ccucccgaaggcuaauccu

SEQ ID NO: 677519 - RNA, 19 nt, Artificial Sequence
  Description of Artificial Sequence: Synthetic oligonucleotide
ggucgaaaaucucgcgcuu

SEQ ID NO: 677520 - RNA, 19 nt, Artificial Sequence
  Description of Artificial Sequence: Synthetic oligonucleotide
cggucgaaaaucucgcgcu

SEQ ID NO: 677521 - RNA, 19 nt, Artificial Sequence
  Description of Artificial Sequence: Synthetic oligonucleotide
cacguccaaaguucacauu

SEQ ID NO: 677522 - RNA, 19 nt, Artificial Sequence
  Description of Artificial Sequence: Synthetic oligonucleotide
ggcgggcacguccaaaguu

SEQ ID NO: 677523 - RNA, 19 nt, Artificial Sequence
  Description of Artificial Sequence: Synthetic oligonucleotide
cccgagaaugggucaucga

SEQ ID NO: 677524 - RNA, 19 nt, Artificial Sequence
  Description of Artificial Sequence: Synthetic oligonucleotide
cgguaggcucgcuugaucu

SEQ ID NO: 677525 - RNA, 19 nt, Artificial Sequence
  Description of Artificial Sequence: Synthetic oligonucleotide
gggcacguccaaaguucac

SEQ ID NO: 677526 - RNA, 19 nt, Artificial Sequence
  Description of Artificial Sequence: Synthetic oligonucleotide
ccgaaggcuaauccuggcu

SEQ ID NO: 677527 - RNA, 19 nt, Artificial Sequence
  Description of Artificial Sequence: Synthetic oligonucleotide
ggcccucccgcaguaugca

SEQ ID NO: 677528 - RNA, 19 nt, Artificial Sequence
  Description of Artificial Sequence: Synthetic oligonucleotide
gcccagcgucugguaauag

SEQ ID NO: 677529 - RNA, 19 nt, Artificial Sequence
  Description of Artificial Sequence: Synthetic oligonucleotide
ccuuucggggaagaugacu

SEQ ID NO: 677530 - RNA, 19 nt, Artificial Sequence
  Description of Artificial Sequence: Synthetic oligonucleotide
cccagcgucugguaauagu

SEQ ID NO: 677531 - RNA, 19 nt, Artificial Sequence
  Description of Artificial Sequence: Synthetic oligonucleotide
gcaguccuauugaacuagu

SEQ ID NO: 677532 - RNA, 19 nt, Artificial Sequence
  Description of Artificial Sequence: Synthetic oligonucleotide
cacguuucucaggugucuu

SEQ ID NO: 677533 - RNA, 19 nt, Artificial Sequence
  Description of Artificial Sequence: Synthetic oligonucleotide
ccgccugccuaucacucaa

SEQ ID NO: 677534 - RNA, 19 nt, Artificial Sequence
  Description of Artificial Sequence: Synthetic oligonucleotide
cgggcacguccaaaguuca

SEQ ID NO: 677535 - RNA, 19 nt, Artificial Sequence
  Description of Artificial Sequence: Synthetic oligonucleotide
ccguagcggucgaaaaucu

SEQ ID NO: 677536 - RNA, 19 nt, Artificial Sequence
  Description of Artificial Sequence: Synthetic oligonucleotide
ccgccgcccagcugucgcc

SEQ ID NO: 677537 - RNA, 19 nt, Artificial Sequence
  Description of Artificial Sequence: Synthetic oligonucleotide
gcaccgggcuagcuucaaa

SEQ ID NO: 677538 - RNA, 19 nt, Artificial Sequence
  Description of Artificial Sequence: Synthetic oligonucleotide
cuucuccguagcggucgaa

SEQ ID NO: 677539 - RNA, 19 nt, Artificial Sequence
  Description of Artificial Sequence: Synthetic oligonucleotide
gggcgcacaccagcuuuga

SEQ ID NO: 677540 - RNA, 19 nt, Artificial Sequence
  Description of Artificial Sequence: Synthetic oligonucleotide
gggucgcugagcacgucgu

SEQ ID NO: 677541 - RNA, 19 nt, Artificial Sequence
  Description of Artificial Sequence: Synthetic oligonucleotide
cccguugcgcugcccaaaa

SEQ ID NO: 677542 - RNA, 19 nt, Artificial Sequence
  Description of Artificial Sequence: Synthetic oligonucleotide
caccacccuuuaggccuuc

SEQ ID NO: 677543 - RNA, 19 nt, Artificial Sequence
  Description of Artificial Sequence: Synthetic oligonucleotide
cccggagaucgugggugac

SEQ ID NO: 677544 - RNA, 19 nt, Artificial Sequence
  Description of Artificial Sequence: Synthetic oligonucleotide
gggcgggcacguccaaagu

SEQ ID NO: 677545 - RNA, 19 nt, Artificial Sequence
  Description of Artificial Sequence: Synthetic oligonucleotide
ccaccgccugccuaucacu

SEQ ID NO: 677546 - RNA, 19 nt, Artificial Sequence
  Description of Artificial Sequence: Synthetic oligonucleotide
gagccucccgaaggcuaau

SEQ ID NO: 677547 - RNA, 19 nt, Artificial Sequence
  Description of Artificial Sequence: Synthetic oligonucleotide
ggcggcgguaggcucgcuu

SEQ ID NO: 677548 - RNA, 19 nt, Artificial Sequence
  Description of Artificial Sequence: Synthetic oligonucleotide
ccggagaucgugggugacu

SEQ ID NO: 677549 - RNA, 19 nt, Artificial Sequence
  Description of Artificial Sequence: Synthetic oligonucleotide
ccccguugcgcugcccaaa

SEQ ID NO: 677550 - RNA, 19 nt, Artificial Sequence
  Description of Artificial Sequence: Synthetic oligonucleotide
cgccugccuaucacucaaa

SEQ ID NO: 677551 - RNA, 19 nt, Artificial Sequence
  Description of Artificial Sequence: Synthetic oligonucleotide
gcgggucgcugagcacguc

SEQ ID NO: 677552 - RNA, 19 nt, Artificial Sequence
  Description of Artificial Sequence: Synthetic oligonucleotide
caucgggguucagccgcuu

SEQ ID NO: 677553 - RNA, 19 nt, Artificial Sequence
  Description of Artificial Sequence: Synthetic oligonucleotide
cgcgggucgcugagcacgu

SEQ ID NO: 677554 - RNA, 19 nt, Artificial Sequence
  Description of Artificial Sequence: Synthetic oligonucleotide
gccgcaugccgggccugau

SEQ ID NO: 677555 - RNA, 19 nt, Artificial Sequence
  Description of Artificial Sequence: Synthetic oligonucleotide
cgccgcaugccgggccuga

SEQ ID NO: 677556 - RNA, 19 nt, Artificial Sequence
  Description of Artificial Sequence: Synthetic oligonucleotide
cagccgcuugugggagauu

SEQ ID NO: 677557 - RNA, 19 nt, Artificial Sequence
  Description of Artificial Sequence: Synthetic oligonucleotide
cggacgcgccgcgggccaa

SEQ ID NO: 677558 - RNA, 19 nt, Artificial Sequence
  Description of Artificial Sequence: Synthetic oligonucleotide
cggcgccgggcuccuuguu

SEQ ID NO: 677559 - RNA, 19 nt, Artificial Sequence
  Description of Artificial Sequence: Synthetic oligonucleotide
uucauaaccacgaaguugg

SEQ ID NO: 677560 - RNA, 19 nt, Artificial Sequence
  Description of Artificial Sequence: Synthetic oligonucleotide
uuaguaaaggcuauaagca

SEQ ID NO: 677561 - RNA, 19 nt, Artificial Sequence
  Description of Artificial Sequence: Synthetic oligonucleotide
uguaaguucgguaaguuca

SEQ ID NO: 677562 - RNA, 19 nt, Artificial Sequence
  Description of Artificial Sequence: Synthetic oligonucleotide
aacaagacuacaaaauggc

SEQ ID NO: 677563 - RNA, 19 nt, Artificial Sequence
  Description of Artificial Sequence: Synthetic oligonucleotide
uuauccacgaggaaagugg

SEQ ID NO: 677564 - RNA, 19 nt, Artificial Sequence
  Description of Artificial Sequence: Synthetic oligonucleotide
aaaauggccgaacacagug

SEQ ID NO: 677565 - RNA, 19 nt, Artificial Sequence
  Description of Artificial Sequence: Synthetic oligonucleotide
uggguuaugaauguaaagg

SEQ ID NO: 677566 - RNA, 19 nt, Artificial Sequence
  Description of Artificial Sequence: Synthetic oligonucleotide
agagaaaucaaauucggga

SEQ ID NO: 677567 - RNA, 19 nt, Artificial Sequence
  Description of Artificial Sequence: Synthetic oligonucleotide
ugcuaaaagcuucauaacc

SEQ ID NO: 677568 - RNA, 19 nt, Artificial Sequence
  Description of Artificial Sequence: Synthetic oligonucleotide
aaauccguacgucauugac

SEQ ID NO: 677569 - RNA, 19 nt, Artificial Sequence
  Description of Artificial Sequence: Synthetic oligonucleotide
accuugaaagaacacaugg

SEQ ID NO: 677570 - RNA, 19 nt, Artificial Sequence
  Description of Artificial Sequence: Synthetic oligonucleotide
uuauagaggcaacacuugg

SEQ ID NO: 677571 - RNA, 19 nt, Artificial Sequence
  Description of Artificial Sequence: Synthetic oligonucleotide
ugacuguucacuaaauuca

SEQ ID NO: 677572 - RNA, 19 nt, Artificial Sequence
  Description of Artificial Sequence: Synthetic oligonucleotide
uuaugaauguaaaggcagg

SEQ ID NO: 677573 - RNA, 19 nt, Artificial Sequence
  Description of Artificial Sequence: Synthetic oligonucleotide
uuuaccauauccugcauga

SEQ ID NO: 677574 - RNA, 19 nt, Artificial Sequence
  Description of Artificial Sequence: Synthetic oligonucleotide
aaauugagaacuuuccgau

SEQ ID NO: 677575 - RNA, 19 nt, Artificial Sequence
  Description of Artificial Sequence: Synthetic oligonucleotide
uucacgacuucacagacug

SEQ ID NO: 677576 - RNA, 19 nt, Artificial Sequence
  Description of Artificial Sequence: Synthetic oligonucleotide
auaaccacgaaguugggcu

SEQ ID NO: 677577 - RNA, 19 nt, Artificial Sequence
  Description of Artificial Sequence: Synthetic oligonucleotide
ugaauguaaaggcagguaa

SEQ ID NO: 677578 - RNA, 19 nt, Artificial Sequence
  Description of Artificial Sequence: Synthetic oligonucleotide
uguuucagcaacauagugu

SEQ ID NO: 677579 - RNA, 19 nt, Artificial Sequence
  Description of Artificial Sequence: Synthetic oligonucleotide
aguauuugugaacagagaa

SEQ ID NO: 677580 - RNA, 19 nt, Artificial Sequence
  Description of Artificial Sequence: Synthetic oligonucleotide
uauagaggcaacacuuggg

SEQ ID NO: 677581 - RNA, 19 nt, Artificial Sequence
  Description of Artificial Sequence: Synthetic oligonucleotide
agcaacauagugugaagcg

SEQ ID NO: 677582 - RNA, 19 nt, Artificial Sequence
  Description of Artificial Sequence: Synthetic oligonucleotide
cuaucaaguucaaacuugg

SEQ ID NO: 677583 - RNA, 19 nt, Artificial Sequence
  Description of Artificial Sequence: Synthetic oligonucleotide
uuaacaaggggcucaaaac

SEQ ID NO: 677584 - RNA, 19 nt, Artificial Sequence
  Description of Artificial Sequence: Synthetic oligonucleotide
ugcgucuuuuaccauaucc

SEQ ID NO: 677585 - RNA, 19 nt, Artificial Sequence
  Description of Artificial Sequence: Synthetic oligonucleotide
aauggccgaacacagugag

SEQ ID NO: 677586 - RNA, 19 nt, Artificial Sequence
  Description of Artificial Sequence: Synthetic oligonucleotide
ucuuaguaaaggcuauaag

SEQ ID NO: 677587 - RNA, 19 nt, Artificial Sequence
  Description of Artificial Sequence: Synthetic oligonucleotide
gaucauaaugcgaagguug

SEQ ID NO: 677588 - RNA, 19 nt, Artificial Sequence
  Description of Artificial Sequence: Synthetic oligonucleotide
uuguaagguagcaaacucc

SEQ ID NO: 677589 - RNA, 19 nt, Artificial Sequence
  Description of Artificial Sequence: Synthetic oligonucleotide
auuuuaaauccguacguca

SEQ ID NO: 677590 - RNA, 19 nt, Artificial Sequence
  Description of Artificial Sequence: Synthetic oligonucleotide
uguugaacggggcaaaccu

SEQ ID NO: 677591 - RNA, 19 nt, Artificial Sequence
  Description of Artificial Sequence: Synthetic oligonucleotide
gauccgacugaccucacgg

SEQ ID NO: 677592 - RNA, 19 nt, Artificial Sequence
  Description of Artificial Sequence: Synthetic oligonucleotide
aucauaauuggauggucuc

SEQ ID NO: 677593 - RNA, 19 nt, Artificial Sequence
  Description of Artificial Sequence: Synthetic oligonucleotide
uacuggaucauaaugcgaa

SEQ ID NO: 677594 - RNA, 19 nt, Artificial Sequence
  Description of Artificial Sequence: Synthetic oligonucleotide
cuguuugccauuuuaaauc

SEQ ID NO: 677595 - RNA, 19 nt, Artificial Sequence
  Description of Artificial Sequence: Synthetic oligonucleotide
uacgucauugacuaacagc

SEQ ID NO: 677596 - RNA, 19 nt, Artificial Sequence
  Description of Artificial Sequence: Synthetic oligonucleotide
aguucgguaaguucacgac

SEQ ID NO: 677597 - RNA, 19 nt, Artificial Sequence
  Description of Artificial Sequence: Synthetic oligonucleotide
caacauagugugaagcgcg

SEQ ID NO: 677598 - RNA, 19 nt, Artificial Sequence
  Description of Artificial Sequence: Synthetic oligonucleotide
ugacaaaggaccgaagugc

SEQ ID NO: 677599 - RNA, 19 nt, Artificial Sequence
  Description of Artificial Sequence: Synthetic oligonucleotide
uuauuccuaucaauucagg

SEQ ID NO: 677600 - RNA, 19 nt, Artificial Sequence
  Description of Artificial Sequence: Synthetic oligonucleotide
cauaaugcgaagguugugg

SEQ ID NO: 677601 - RNA, 19 nt, Artificial Sequence
  Description of Artificial Sequence: Synthetic oligonucleotide
aacccaucauaauuggaug

SEQ ID NO: 677602 - RNA, 19 nt, Artificial Sequence
  Description of Artificial Sequence: Synthetic oligonucleotide
uuugccauuuuaaauccgu

SEQ ID NO: 677603 - RNA, 19 nt, Artificial Sequence
  Description of Artificial Sequence: Synthetic oligonucleotide
uccaaucauaccagcaucc

SEQ ID NO: 677604 - RNA, 19 nt, Artificial Sequence
  Description of Artificial Sequence: Synthetic oligonucleotide
aacacauggugacuguuca

SEQ ID NO: 677605 - RNA, 19 nt, Artificial Sequence
  Description of Artificial Sequence: Synthetic oligonucleotide
ugaguaacaaaggagucga

SEQ ID NO: 677606 - RNA, 19 nt, Artificial Sequence
  Description of Artificial Sequence: Synthetic oligonucleotide
uguaacucgaagaucuguc

SEQ ID NO: 677607 - RNA, 19 nt, Artificial Sequence
  Description of Artificial Sequence: Synthetic oligonucleotide
aaggcuauaagcacuguca

SEQ ID NO: 677608 - RNA, 19 nt, Artificial Sequence
  Description of Artificial Sequence: Synthetic oligonucleotide
uggaucauaaugcgaaggu

SEQ ID NO: 677609 - RNA, 19 nt, Artificial Sequence
  Description of Artificial Sequence: Synthetic oligonucleotide
agagccaucggcucggcuc

SEQ ID NO: 677610 - RNA, 19 nt, Artificial Sequence
  Description of Artificial Sequence: Synthetic oligonucleotide
aaugccgccaggcauugcu

SEQ ID NO: 677611 - RNA, 19 nt, Artificial Sequence
  Description of Artificial Sequence: Synthetic oligonucleotide
acuacaaaauggccgaaca

SEQ ID NO: 677612 - RNA, 19 nt, Artificial Sequence
  Description of Artificial Sequence: Synthetic oligonucleotide
acgucauugacuaacagca

SEQ ID NO: 677613 - RNA, 19 nt, Artificial Sequence
  Description of Artificial Sequence: Synthetic oligonucleotide
acccaucauaauuggaugg

SEQ ID NO: 677614 - RNA, 19 nt, Artificial Sequence
  Description of Artificial Sequence: Synthetic oligonucleotide
aucaauucaggcaagguga

SEQ ID NO: 677615 - RNA, 19 nt, Artificial Sequence
  Description of Artificial Sequence: Synthetic oligonucleotide
ucaaaauucccagagcaaa

SEQ ID NO: 677616 - RNA, 19 nt, Artificial Sequence
  Description of Artificial Sequence: Synthetic oligonucleotide
aaguucgguaaguucacga

SEQ ID NO: 677617 - RNA, 19 nt, Artificial Sequence
  Description of Artificial Sequence: Synthetic oligonucleotide
auguaaguucgguaaguuc

SEQ ID NO: 677618 - RNA, 19 nt, Artificial Sequence
  Description of Artificial Sequence: Synthetic oligonucleotide
ucuuugagcauuccuguaa

SEQ ID NO: 677619 - RNA, 19 nt, Artificial Sequence
  Description of Artificial Sequence: Synthetic oligonucleotide
aacggggcaaaccugugcu

SEQ ID NO: 677620 - RNA, 19 nt, Artificial Sequence
  Description of Artificial Sequence: Synthetic oligonucleotide
acaagacuacaaaauggcc

SEQ ID NO: 677621 - RNA, 19 nt, Artificial Sequence
  Description of Artificial Sequence: Synthetic oligonucleotide
ucaauucaggcaaggugag

SEQ ID NO: 677622 - RNA, 19 nt, Artificial Sequence
  Description of Artificial Sequence: Synthetic oligonucleotide
acaauguaaguucgguaag

SEQ ID NO: 677623 - RNA, 19 nt, Artificial Sequence
  Description of Artificial Sequence: Synthetic oligonucleotide
caugcguacaggaauucag

SEQ ID NO: 677624 - RNA, 19 nt, Artificial Sequence
  Description of Artificial Sequence: Synthetic oligonucleotide
gauacaguccuuagccugg

SEQ ID NO: 677625 - RNA, 19 nt, Artificial Sequence
  Description of Artificial Sequence: Synthetic oligonucleotide
augucaaaugccaccaucg

SEQ ID NO: 677626 - RNA, 19 nt, Artificial Sequence
  Description of Artificial Sequence: Synthetic oligonucleotide
ugcguacaggaauucagag

SEQ ID NO: 677627 - RNA, 19 nt, Artificial Sequence
  Description of Artificial Sequence: Synthetic oligonucleotide
aucguuuugaacaucccag

SEQ ID NO: 677628 - RNA, 19 nt, Artificial Sequence
  Description of Artificial Sequence: Synthetic oligonucleotide
aggaaaguauuugugaaca

SEQ ID NO: 677629 - RNA, 19 nt, Artificial Sequence
  Description of Artificial Sequence: Synthetic oligonucleotide
gacaaaggaccgaagugcg

SEQ ID NO: 677630 - RNA, 19 nt, Artificial Sequence
  Description of Artificial Sequence: Synthetic oligonucleotide
guauuuauugaggucagac

SEQ ID NO: 677631 - RNA, 19 nt, Artificial Sequence
  Description of Artificial Sequence: Synthetic oligonucleotide
cuugguuuccaaucauacc

SEQ ID NO: 677632 - RNA, 19 nt, Artificial Sequence
  Description of Artificial Sequence: Synthetic oligonucleotide
uuuacucuccuuugcauau

SEQ ID NO: 677633 - RNA, 19 nt, Artificial Sequence
  Description of Artificial Sequence: Synthetic oligonucleotide
ugaagucuggguuaugaau

SEQ ID NO: 677634 - RNA, 19 nt, Artificial Sequence
  Description of Artificial Sequence: Synthetic oligonucleotide
gugaguaacaaaggagucg

SEQ ID NO: 677635 - RNA, 19 nt, Artificial Sequence
  Description of Artificial Sequence: Synthetic oligonucleotide
ugauaggccuggcucauug

SEQ ID NO: 677636 - RNA, 19 nt, Artificial Sequence
  Description of Artificial Sequence: Synthetic oligonucleotide
cuuguaagguagcaaacuc

SEQ ID NO: 677637 - RNA, 19 nt, Artificial Sequence
  Description of Artificial Sequence: Synthetic oligonucleotide
uaacucgaagaucugucac

SEQ ID NO: 677638 - RNA, 19 nt, Artificial Sequence
  Description of Artificial Sequence: Synthetic oligonucleotide
uucgaguacucuuuacucu

SEQ ID NO: 677639 - RNA, 19 nt, Artificial Sequence
  Description of Artificial Sequence: Synthetic oligonucleotide
ucaagaaugugacccaguu

SEQ ID NO: 677640 - RNA, 19 nt, Artificial Sequence
  Description of Artificial Sequence: Synthetic oligonucleotide
cugucuauuaaucuugaga

SEQ ID NO: 677641 - RNA, 19 nt, Artificial Sequence
  Description of Artificial Sequence: Synthetic oligonucleotide
uugaacggggcaaaccugu

SEQ ID NO: 677642 - RNA, 19 nt, Artificial Sequence
  Description of Artificial Sequence: Synthetic oligonucleotide
uuuccgauucacuugguuu

SEQ ID NO: 677643 - RNA, 19 nt, Artificial Sequence
  Description of Artificial Sequence: Synthetic oligonucleotide
guagccucugguuaacaag

SEQ ID NO: 677644 - RNA, 19 nt, Artificial Sequence
  Description of Artificial Sequence: Synthetic oligonucleotide
ucauaauuggauggucucc

SEQ ID NO: 677645 - RNA, 19 nt, Artificial Sequence
  Description of Artificial Sequence: Synthetic oligonucleotide
ucuggguuaugaauguaaa

SEQ ID NO: 677646 - RNA, 19 nt, Artificial Sequence
  Description of Artificial Sequence: Synthetic oligonucleotide
cuucauaaccacgaaguug

SEQ ID NO: 677647 - RNA, 19 nt, Artificial Sequence
  Description of Artificial Sequence: Synthetic oligonucleotide
cuucgaguacucuuuacuc

SEQ ID NO: 677648 - RNA, 19 nt, Artificial Sequence
  Description of Artificial Sequence: Synthetic oligonucleotide
uaguacucaugcaugcugu

SEQ ID NO: 677649 - RNA, 19 nt, Artificial Sequence
  Description of Artificial Sequence: Synthetic oligonucleotide
ucguuuugaacaucccagc

SEQ ID NO: 677650 - RNA, 19 nt, Artificial Sequence
  Description of Artificial Sequence: Synthetic oligonucleotide
acagaucuucaaaauuccc

SEQ ID NO: 677651 - RNA, 19 nt, Artificial Sequence
  Description of Artificial Sequence: Synthetic oligonucleotide
cuugcgaugucacagaucu

SEQ ID NO: 677652 - RNA, 19 nt, Artificial Sequence
  Description of Artificial Sequence: Synthetic oligonucleotide
ugcgaugucacagaucuuc

SEQ ID NO: 677653 - RNA, 19 nt, Artificial Sequence
  Description of Artificial Sequence: Synthetic oligonucleotide
aguaaaggcuauaagcacu

SEQ ID NO: 677654 - RNA, 19 nt, Artificial Sequence
  Description of Artificial Sequence: Synthetic oligonucleotide
uuccaaucauaccagcauc

SEQ ID NO: 677655 - RNA, 19 nt, Artificial Sequence
  Description of Artificial Sequence: Synthetic oligonucleotide
aggcuauaagcacugucag

SEQ ID NO: 677656 - RNA, 19 nt, Artificial Sequence
  Description of Artificial Sequence: Synthetic oligonucleotide
uggaaguagccucugguua

SEQ ID NO: 677657 - RNA, 19 nt, Artificial Sequence
  Description of Artificial Sequence: Synthetic oligonucleotide
uucgguaaguucacgacuu

SEQ ID NO: 677658 - RNA, 19 nt, Artificial Sequence
  Description of Artificial Sequence: Synthetic oligonucleotide
uuucgaggaucauuuuagc

SEQ ID NO: 677659 - RNA, 19 nt, Artificial Sequence
  Description of Artificial Sequence: Synthetic oligonucleotide
aucauaccagcauccaucu

SEQ ID NO: 677660 - RNA, 19 nt, Artificial Sequence
  Description of Artificial Sequence: Synthetic oligonucleotide
uuuuaauggugccauccuu

SEQ ID NO: 677661 - RNA, 19 nt, Artificial Sequence
  Description of Artificial Sequence: Synthetic oligonucleotide
aacauagugugaagcgcgg

SEQ ID NO: 677662 - RNA, 19 nt, Artificial Sequence
  Description of Artificial Sequence: Synthetic oligonucleotide
uuuaaauccguacgucauu

SEQ ID NO: 677663 - RNA, 19 nt, Artificial Sequence
  Description of Artificial Sequence: Synthetic oligonucleotide
ucaaauucgggaggaaccu

SEQ ID NO: 677664 - RNA, 19 nt, Artificial Sequence
  Description of Artificial Sequence: Synthetic oligonucleotide
ugaagcgcggcaucaaccu

SEQ ID NO: 677665 - RNA, 19 nt, Artificial Sequence
  Description of Artificial Sequence: Synthetic oligonucleotide
aauccguacgucauugacu

SEQ ID NO: 677666 - RNA, 19 nt, Artificial Sequence
  Description of Artificial Sequence: Synthetic oligonucleotide
ucgaguacucuuuacucuc

SEQ ID NO: 677667 - RNA, 19 nt, Artificial Sequence
  Description of Artificial Sequence: Synthetic oligonucleotide
uucugucuauuaaucuuga

SEQ ID NO: 677668 - RNA, 19 nt, Artificial Sequence
  Description of Artificial Sequence: Synthetic oligonucleotide
ccuguuauggccauggauc

SEQ ID NO: 677669 - RNA, 19 nt, Artificial Sequence
  Description of Artificial Sequence: Synthetic oligonucleotide
aauugagaacuuuccgauu

SEQ ID NO: 677670 - RNA, 19 nt, Artificial Sequence
  Description of Artificial Sequence: Synthetic oligonucleotide
guaccaguagauguaguag

SEQ ID NO: 677671 - RNA, 19 nt, Artificial Sequence
  Description of Artificial Sequence: Synthetic oligonucleotide
aaaggaccgaagugcgucu

SEQ ID NO: 677672 - RNA, 19 nt, Artificial Sequence
  Description of Artificial Sequence: Synthetic oligonucleotide
aagaacacauggugacugu

SEQ ID NO: 677673 - RNA, 19 nt, Artificial Sequence
  Description of Artificial Sequence: Synthetic oligonucleotide
aauguaaguucgguaaguu

SEQ ID NO: 677674 - RNA, 19 nt, Artificial Sequence
  Description of Artificial Sequence: Synthetic oligonucleotide
cuggaucauaaugcgaagg

SEQ ID NO: 677675 - RNA, 19 nt, Artificial Sequence
  Description of Artificial Sequence: Synthetic oligonucleotide
acacauguucugauaggcc

SEQ ID NO: 677676 - RNA, 19 nt, Artificial Sequence
  Description of Artificial Sequence: Synthetic oligonucleotide
uggaucugaacaagacuac

SEQ ID NO: 677677 - RNA, 19 nt, Artificial Sequence
  Description of Artificial Sequence: Synthetic oligonucleotide
agggcuguauuuauugagg

SEQ ID NO: 677678 - RNA, 19 nt, Artificial Sequence
  Description of Artificial Sequence: Synthetic oligonucleotide
uuagccuggugauuguuau

SEQ ID NO: 677679 - RNA, 19 nt, Artificial Sequence
  Description of Artificial Sequence: Synthetic oligonucleotide
gauuguuauagaggcaaca

SEQ ID NO: 677680 - RNA, 19 nt, Artificial Sequence
  Description of Artificial Sequence: Synthetic oligonucleotide
guaaaggcuauaagcacug

SEQ ID NO: 677681 - RNA, 19 nt, Artificial Sequence
  Description of Artificial Sequence: Synthetic oligonucleotide
ugccguccaugucaaaugc

SEQ ID NO: 677682 - RNA, 19 nt, Artificial Sequence
  Description of Artificial Sequence: Synthetic oligonucleotide
aguucaaacuugggcuugc

SEQ ID NO: 677683 - RNA, 19 nt, Artificial Sequence
  Description of Artificial Sequence: Synthetic oligonucleotide
ugauuguuauagaggcaac

SEQ ID NO: 677684 - RNA, 19 nt, Artificial Sequence
  Description of Artificial Sequence: Synthetic oligonucleotide
aagugcgucuuuuaccaua

SEQ ID NO: 677685 - RNA, 19 nt, Artificial Sequence
  Description of Artificial Sequence: Synthetic oligonucleotide
agcuccaguucaaagccgc

SEQ ID NO: 677686 - RNA, 19 nt, Artificial Sequence
  Description of Artificial Sequence: Synthetic oligonucleotide
gaggacugacaaaggaccg

SEQ ID NO: 677687 - RNA, 19 nt, Artificial Sequence
  Description of Artificial Sequence: Synthetic oligonucleotide
gagucgauacaguccuuag

SEQ ID NO: 677688 - RNA, 19 nt, Artificial Sequence
  Description of Artificial Sequence: Synthetic oligonucleotide
guuauagaggcaacacuug

SEQ ID NO: 677689 - RNA, 19 nt, Artificial Sequence
  Description of Artificial Sequence: Synthetic oligonucleotide
cauacagcucuggagacug

SEQ ID NO: 677690 - RNA, 19 nt, Artificial Sequence
  Description of Artificial Sequence: Synthetic oligonucleotide
ucuccuugucgacuucgag

SEQ ID NO: 677691 - RNA, 19 nt, Artificial Sequence
  Description of Artificial Sequence: Synthetic oligonucleotide
ucgacuucgaguacucuuu

SEQ ID NO: 677692 - RNA, 19 nt, Artificial Sequence
  Description of Artificial Sequence: Synthetic oligonucleotide
caugucaaaugccaccauc

SEQ ID NO: 677693 - RNA, 19 nt, Artificial Sequence
  Description of Artificial Sequence: Synthetic oligonucleotide
uuuuguuauccacgaggaa

SEQ ID NO: 677694 - RNA, 19 nt, Artificial Sequence
  Description of Artificial Sequence: Synthetic oligonucleotide
ugugaagcgcggcaucaac

SEQ ID NO: 677695 - RNA, 19 nt, Artificial Sequence
  Description of Artificial Sequence: Synthetic oligonucleotide
gaccucacggucuggguug

SEQ ID NO: 677696 - RNA, 19 nt, Artificial Sequence
  Description of Artificial Sequence: Synthetic oligonucleotide
cuaguucaacuucuggauc

SEQ ID NO: 677697 - RNA, 19 nt, Artificial Sequence
  Description of Artificial Sequence: Synthetic oligonucleotide
aaaccugugcucauaccga

SEQ ID NO: 677698 - RNA, 19 nt, Artificial Sequence
  Description of Artificial Sequence: Synthetic oligonucleotide
acacauggugacuguucac

SEQ ID NO: 677699 - RNA, 19 nt, Artificial Sequence
  Description of Artificial Sequence: Synthetic oligonucleotide
uccuaucaauucaggcaag

SEQ ID NO: 677700 - RNA, 19 nt, Artificial Sequence
  Description of Artificial Sequence: Synthetic oligonucleotide
gacccagguuccuaagcag

SEQ ID NO: 677701 - RNA, 19 nt, Artificial Sequence
  Description of Artificial Sequence: Synthetic oligonucleotide
cuuugguagugccauucug

SEQ ID NO: 677702 - RNA, 19 nt, Artificial Sequence
  Description of Artificial Sequence: Synthetic oligonucleotide
uccuugauagcuuguucaa

SEQ ID NO: 677703 - RNA, 19 nt, Artificial Sequence
  Description of Artificial Sequence: Synthetic oligonucleotide
cauuauccucuccucggcc

SEQ ID NO: 677704 - RNA, 19 nt, Artificial Sequence
  Description of Artificial Sequence: Synthetic oligonucleotide
agaccuugaaagaacacau

SEQ ID NO: 677705 - RNA, 19 nt, Artificial Sequence
  Description of Artificial Sequence: Synthetic oligonucleotide
acauagugugaagcgcggc

SEQ ID NO: 677706 - RNA, 19 nt, Artificial Sequence
  Description of Artificial Sequence: Synthetic oligonucleotide
cucauaccgaaccuguuca

SEQ ID NO: 677707 - RNA, 19 nt, Artificial Sequence
  Description of Artificial Sequence: Synthetic oligonucleotide
uccacgaggaaagugguuu

SEQ ID NO: 677708 - RNA, 19 nt, Artificial Sequence
  Description of Artificial Sequence: Synthetic oligonucleotide
accgaaccuguucacuauc

SEQ ID NO: 677709 - RNA, 19 nt, Artificial Sequence
  Description of Artificial Sequence: Synthetic oligonucleotide
auggcaggauccucuauga

SEQ ID NO: 677710 - RNA, 19 nt, Artificial Sequence
  Description of Artificial Sequence: Synthetic oligonucleotide
auggugacuguucacuaaa

SEQ ID NO: 677711 - RNA, 19 nt, Artificial Sequence
  Description of Artificial Sequence: Synthetic oligonucleotide
uaaauccguacgucauuga

SEQ ID NO: 677712 - RNA, 19 nt, Artificial Sequence
  Description of Artificial Sequence: Synthetic oligonucleotide
aaccugugcucauaccgaa

SEQ ID NO: 677713 - RNA, 19 nt, Artificial Sequence
  Description of Artificial Sequence: Synthetic oligonucleotide
gcuaaaagcuucauaacca

SEQ ID NO: 677714 - RNA, 19 nt, Artificial Sequence
  Description of Artificial Sequence: Synthetic oligonucleotide
gagguaccaguagauguag

SEQ ID NO: 677715 - RNA, 19 nt, Artificial Sequence
  Description of Artificial Sequence: Synthetic oligonucleotide
gaacggggcaaaccugugc

SEQ ID NO: 677716 - RNA, 19 nt, Artificial Sequence
  Description of Artificial Sequence: Synthetic oligonucleotide
agcaccggaggacugacaa

SEQ ID NO: 677717 - RNA, 19 nt, Artificial Sequence
  Description of Artificial Sequence: Synthetic oligonucleotide
caaaggaccgaagugcguc

SEQ ID NO: 677718 - RNA, 19 nt, Artificial Sequence
  Description of Artificial Sequence: Synthetic oligonucleotide
aaaugccaccaucguuuug

SEQ ID NO: 677719 - RNA, 19 nt, Artificial Sequence
  Description of Artificial Sequence: Synthetic oligonucleotide
gaauguaaaggcagguaaa

SEQ ID NO: 677720 - RNA, 19 nt, Artificial Sequence
  Description of Artificial Sequence: Synthetic oligonucleotide
cucugcaacagcacugguc

SEQ ID NO: 677721 - RNA, 19 nt, Artificial Sequence
  Description of Artificial Sequence: Synthetic oligonucleotide
uccucggccaucugagagc

SEQ ID NO: 677722 - RNA, 19 nt, Artificial Sequence
  Description of Artificial Sequence: Synthetic oligonucleotide
caucguuuugaacauccca

SEQ ID NO: 677723 - RNA, 19 nt, Artificial Sequence
  Description of Artificial Sequence: Synthetic oligonucleotide
guuauggccauggaucuga

SEQ ID NO: 677724 - RNA, 19 nt, Artificial Sequence
  Description of Artificial Sequence: Synthetic oligonucleotide
aaauucgggaggaaccuuu

SEQ ID NO: 677725 - RNA, 19 nt, Artificial Sequence
  Description of Artificial Sequence: Synthetic oligonucleotide
guacgucauugacuaacag

SEQ ID NO: 677726 - RNA, 19 nt, Artificial Sequence
  Description of Artificial Sequence: Synthetic oligonucleotide
cauugugaucucucggcuc

SEQ ID NO: 677727 - RNA, 19 nt, Artificial Sequence
  Description of Artificial Sequence: Synthetic oligonucleotide
cuccucggccaucugagag

SEQ ID NO: 677728 - RNA, 19 nt, Artificial Sequence
  Description of Artificial Sequence: Synthetic oligonucleotide
cauagugugaagcgcggca

SEQ ID NO: 677729 - RNA, 19 nt, Artificial Sequence
  Description of Artificial Sequence: Synthetic oligonucleotide
caaggugagaucuuuaauu

SEQ ID NO: 677730 - RNA, 19 nt, Artificial Sequence
  Description of Artificial Sequence: Synthetic oligonucleotide
caucacgcuguugaacggg

SEQ ID NO: 677731 - RNA, 19 nt, Artificial Sequence
  Description of Artificial Sequence: Synthetic oligonucleotide
aaauggccgaacacaguga

SEQ ID NO: 677732 - RNA, 19 nt, Artificial Sequence
  Description of Artificial Sequence: Synthetic oligonucleotide
gaaggucugcugcuuggac

SEQ ID NO: 677733 - RNA, 19 nt, Artificial Sequence
  Description of Artificial Sequence: Synthetic oligonucleotide
uccugcuaaaagcuucaua

SEQ ID NO: 677734 - RNA, 19 nt, Artificial Sequence
  Description of Artificial Sequence: Synthetic oligonucleotide
ugaacggggcaaaccugug

SEQ ID NO: 677735 - RNA, 19 nt, Artificial Sequence
  Description of Artificial Sequence: Synthetic oligonucleotide
gaggauccgacugaccuca

SEQ ID NO: 677736 - RNA, 19 nt, Artificial Sequence
  Description of Artificial Sequence: Synthetic oligonucleotide
ugacucuuucuuguguccu

SEQ ID NO: 677737 - RNA, 19 nt, Artificial Sequence
  Description of Artificial Sequence: Synthetic oligonucleotide
uuucccuugcgaugucaca

SEQ ID NO: 677738 - RNA, 19 nt, Artificial Sequence
  Description of Artificial Sequence: Synthetic oligonucleotide
gacuucgaguacucuuuac

SEQ ID NO: 677739 - RNA, 19 nt, Artificial Sequence
  Description of Artificial Sequence: Synthetic oligonucleotide
cucaaaacccaucauaauu

SEQ ID NO: 677740 - RNA, 19 nt, Artificial Sequence
  Description of Artificial Sequence: Synthetic oligonucleotide
ucauaccgaaccuguucac

SEQ ID NO: 677741 - RNA, 19 nt, Artificial Sequence
  Description of Artificial Sequence: Synthetic oligonucleotide
cuuuacucuccuuugcaua

SEQ ID NO: 677742 - RNA, 19 nt, Artificial Sequence
  Description of Artificial Sequence: Synthetic oligonucleotide
ucauuuuagcuugcuggaa

SEQ ID NO: 677743 - RNA, 19 nt, Artificial Sequence
  Description of Artificial Sequence: Synthetic oligonucleotide
caucauaauuggauggucu

SEQ ID NO: 677744 - RNA, 19 nt, Artificial Sequence
  Description of Artificial Sequence: Synthetic oligonucleotide
guaaguucgguaaguucac

SEQ ID NO: 677745 - RNA, 19 nt, Artificial Sequence
  Description of Artificial Sequence: Synthetic oligonucleotide
uguacaggcggcgguguca

SEQ ID NO: 677746 - RNA, 19 nt, Artificial Sequence
  Description of Artificial Sequence: Synthetic oligonucleotide
gccaugaugcaaugaagug

SEQ ID NO: 677747 - RNA, 19 nt, Artificial Sequence
  Description of Artificial Sequence: Synthetic oligonucleotide
uccgauucacuugguuucc

SEQ ID NO: 677748 - RNA, 19 nt, Artificial Sequence
  Description of Artificial Sequence: Synthetic oligonucleotide
cauauccugcaugagguga

SEQ ID NO: 677749 - RNA, 19 nt, Artificial Sequence
  Description of Artificial Sequence: Synthetic oligonucleotide
uaaugcgaagguuguggua

SEQ ID NO: 677750 - RNA, 19 nt, Artificial Sequence
  Description of Artificial Sequence: Synthetic oligonucleotide
uugucgacuucgaguacuc

SEQ ID NO: 677751 - RNA, 19 nt, Artificial Sequence
  Description of Artificial Sequence: Synthetic oligonucleotide
uuauccucuccucggccau

SEQ ID NO: 677752 - RNA, 19 nt, Artificial Sequence
  Description of Artificial Sequence: Synthetic oligonucleotide
uggcucauugugaucucuc

SEQ ID NO: 677753 - RNA, 19 nt, Artificial Sequence
  Description of Artificial Sequence: Synthetic oligonucleotide
cuguugaacggggcaaacc

SEQ ID NO: 677754 - RNA, 19 nt, Artificial Sequence
  Description of Artificial Sequence: Synthetic oligonucleotide
aucacgcuguugaacgggg

SEQ ID NO: 677755 - RNA, 19 nt, Artificial Sequence
  Description of Artificial Sequence: Synthetic oligonucleotide
gcggcaucaaccuucucug

SEQ ID NO: 677756 - RNA, 19 nt, Artificial Sequence
  Description of Artificial Sequence: Synthetic oligonucleotide
gguaaguucacgacuucac

SEQ ID NO: 677757 - RNA, 19 nt, Artificial Sequence
  Description of Artificial Sequence: Synthetic oligonucleotide
gguuuccaaucauaccagc

SEQ ID NO: 677758 - RNA, 19 nt, Artificial Sequence
  Description of Artificial Sequence: Synthetic oligonucleotide
gcaacauagugugaagcgc

SEQ ID NO: 677759 - RNA, 19 nt, Artificial Sequence
  Description of Artificial Sequence: Synthetic oligonucleotide
gagcauuccuguaacucga

SEQ ID NO: 677760 - RNA, 19 nt, Artificial Sequence
  Description of Artificial Sequence: Synthetic oligonucleotide
gugaagcgcggcaucaacc

SEQ ID NO: 677761 - RNA, 19 nt, Artificial Sequence
  Description of Artificial Sequence: Synthetic oligonucleotide
ucacgcuguugaacggggc

SEQ ID NO: 677762 - RNA, 19 nt, Artificial Sequence
  Description of Artificial Sequence: Synthetic oligonucleotide
agagcaccggaggacugac

SEQ ID NO: 677763 - RNA, 19 nt, Artificial Sequence
  Description of Artificial Sequence: Synthetic oligonucleotide
cucuaugaagucuggguua

SEQ ID NO: 677764 - RNA, 19 nt, Artificial Sequence
  Description of Artificial Sequence: Synthetic oligonucleotide
augaauguaaaggcaggua

SEQ ID NO: 677765 - RNA, 19 nt, Artificial Sequence
  Description of Artificial Sequence: Synthetic oligonucleotide
agguauccauuauuccuau

SEQ ID NO: 677766 - RNA, 19 nt, Artificial Sequence
  Description of Artificial Sequence: Synthetic oligonucleotide
guugaacggggcaaaccug

SEQ ID NO: 677767 - RNA, 19 nt, Artificial Sequence
  Description of Artificial Sequence: Synthetic oligonucleotide
uggugacuguucacuaaau

SEQ ID NO: 677768 - RNA, 19 nt, Artificial Sequence
  Description of Artificial Sequence: Synthetic oligonucleotide
uauugaggucagacauuuc

SEQ ID NO: 677769 - RNA, 19 nt, Artificial Sequence
  Description of Artificial Sequence: Synthetic oligonucleotide
ucugguuaacaaggggcuc

SEQ ID NO: 677770 - RNA, 19 nt, Artificial Sequence
  Description of Artificial Sequence: Synthetic oligonucleotide
uagugugaagcgcggcauc

SEQ ID NO: 677771 - RNA, 19 nt, Artificial Sequence
  Description of Artificial Sequence: Synthetic oligonucleotide
gaaguugggcuuggcgacc

SEQ ID NO: 677772 - RNA, 19 nt, Artificial Sequence
  Description of Artificial Sequence: Synthetic oligonucleotide
uugcauagcgagggaaggu

SEQ ID NO: 677773 - RNA, 19 nt, Artificial Sequence
  Description of Artificial Sequence: Synthetic oligonucleotide
gccaaguaaucaaacagca

SEQ ID NO: 677774 - RNA, 19 nt, Artificial Sequence
  Description of Artificial Sequence: Synthetic oligonucleotide
ggaauggccuucuagccaa

SEQ ID NO: 677775 - RNA, 19 nt, Artificial Sequence
  Description of Artificial Sequence: Synthetic oligonucleotide
gguaccaguagauguagua

SEQ ID NO: 677776 - RNA, 19 nt, Artificial Sequence
  Description of Artificial Sequence: Synthetic oligonucleotide
auagugugaagcgcggcau

SEQ ID NO: 677777 - RNA, 19 nt, Artificial Sequence
  Description of Artificial Sequence: Synthetic oligonucleotide
guucgguaaguucacgacu

SEQ ID NO: 677778 - RNA, 19 nt, Artificial Sequence
  Description of Artificial Sequence: Synthetic oligonucleotide
ugcgaagguugugguaaag

SEQ ID NO: 677779 - RNA, 19 nt, Artificial Sequence
  Description of Artificial Sequence: Synthetic oligonucleotide
ccgaagugcgucuuuuacc

SEQ ID NO: 677780 - RNA, 19 nt, Artificial Sequence
  Description of Artificial Sequence: Synthetic oligonucleotide
ugaaugccgccaggcauug

SEQ ID NO: 677781 - RNA, 19 nt, Artificial Sequence
  Description of Artificial Sequence: Synthetic oligonucleotide
acggggcaaaccugugcuc

SEQ ID NO: 677782 - RNA, 19 nt, Artificial Sequence
  Description of Artificial Sequence: Synthetic oligonucleotide
uaaccacgaaguugggcuu

SEQ ID NO: 677783 - RNA, 19 nt, Artificial Sequence
  Description of Artificial Sequence: Synthetic oligonucleotide
ucgguaaguucacgacuuc

SEQ ID NO: 677784 - RNA, 19 nt, Artificial Sequence
  Description of Artificial Sequence: Synthetic oligonucleotide
gaaguagccucugguuaac

SEQ ID NO: 677785 - RNA, 19 nt, Artificial Sequence
  Description of Artificial Sequence: Synthetic oligonucleotide
cacgaggaaagugguuugc

SEQ ID NO: 677786 - RNA, 19 nt, Artificial Sequence
  Description of Artificial Sequence: Synthetic oligonucleotide
agagguaccaguagaugua

SEQ ID NO: 677787 - RNA, 19 nt, Artificial Sequence
  Description of Artificial Sequence: Synthetic oligonucleotide
auccgacugaccucacggu

SEQ ID NO: 677788 - RNA, 19 nt, Artificial Sequence
  Description of Artificial Sequence: Synthetic oligonucleotide
augcguacaggaauucaga

SEQ ID NO: 677789 - RNA, 19 nt, Artificial Sequence
  Description of Artificial Sequence: Synthetic oligonucleotide
ucaaagccgcugagcagau

SEQ ID NO: 677790 - RNA, 19 nt, Artificial Sequence
  Description of Artificial Sequence: Synthetic oligonucleotide
cucugguuaacaaggggcu

SEQ ID NO: 677791 - RNA, 19 nt, Artificial Sequence
  Description of Artificial Sequence: Synthetic oligonucleotide
ccuaucaauucaggcaagg

SEQ ID NO: 677792 - RNA, 19 nt, Artificial Sequence
  Description of Artificial Sequence: Synthetic oligonucleotide
gcucauaccgaaccuguuc

SEQ ID NO: 677793 - RNA, 19 nt, Artificial Sequence
  Description of Artificial Sequence: Synthetic oligonucleotide
agugcgucuuuuaccauau

SEQ ID NO: 677794 - RNA, 19 nt, Artificial Sequence
  Description of Artificial Sequence: Synthetic oligonucleotide
uuauggccauggaucugaa

SEQ ID NO: 677795 - RNA, 19 nt, Artificial Sequence
  Description of Artificial Sequence: Synthetic oligonucleotide
cauaauuggauggucuccu

SEQ ID NO: 677796 - RNA, 19 nt, Artificial Sequence
  Description of Artificial Sequence: Synthetic oligonucleotide
acgaggaaagugguuugca

SEQ ID NO: 677797 - RNA, 19 nt, Artificial Sequence
  Description of Artificial Sequence: Synthetic oligonucleotide
ugacccaguuugucucucu

SEQ ID NO: 677798 - RNA, 19 nt, Artificial Sequence
  Description of Artificial Sequence: Synthetic oligonucleotide
ggacccagguuccuaagca

SEQ ID NO: 677799 - RNA, 19 nt, Artificial Sequence
  Description of Artificial Sequence: Synthetic oligonucleotide
cuguuauggccauggaucu

SEQ ID NO: 677800 - RNA, 19 nt, Artificial Sequence
  Description of Artificial Sequence: Synthetic oligonucleotide
auggccuucuagccaagua

SEQ ID NO: 677801 - RNA, 19 nt, Artificial Sequence
  Description of Artificial Sequence: Synthetic oligonucleotide
caucugagagccaucggcu

SEQ ID NO: 677802 - RNA, 19 nt, Artificial Sequence
  Description of Artificial Sequence: Synthetic oligonucleotide
accugugcucauaccgaac

SEQ ID NO: 677803 - RNA, 19 nt, Artificial Sequence
  Description of Artificial Sequence: Synthetic oligonucleotide
gggcuugcgcaccuugccg

SEQ ID NO: 677804 - RNA, 19 nt, Artificial Sequence
  Description of Artificial Sequence: Synthetic oligonucleotide
auagcagacauggcuucaa

SEQ ID NO: 677805 - RNA, 19 nt, Artificial Sequence
  Description of Artificial Sequence: Synthetic oligonucleotide
cgaagugcgucuuuuacca

SEQ ID NO: 677806 - RNA, 19 nt, Artificial Sequence
  Description of Artificial Sequence: Synthetic oligonucleotide
ggauccgacugaccucacg

SEQ ID NO: 677807 - RNA, 19 nt, Artificial Sequence
  Description of Artificial Sequence: Synthetic oligonucleotide
cacgcuguugaacggggca

SEQ ID NO: 677808 - RNA, 19 nt, Artificial Sequence
  Description of Artificial Sequence: Synthetic oligonucleotide
ugguuaacaaggggcucaa

SEQ ID NO: 677809 - RNA, 19 nt, Artificial Sequence
  Description of Artificial Sequence: Synthetic oligonucleotide
ucacgacuucacagacugu

SEQ ID NO: 677810 - RNA, 19 nt, Artificial Sequence
  Description of Artificial Sequence: Synthetic oligonucleotide
accggaggacugacaaagg

SEQ ID NO: 677811 - RNA, 19 nt, Artificial Sequence
  Description of Artificial Sequence: Synthetic oligonucleotide
ggaucugaacaagacuaca

SEQ ID NO: 677812 - RNA, 19 nt, Artificial Sequence
  Description of Artificial Sequence: Synthetic oligonucleotide
gcaaaccugugcucauacc

SEQ ID NO: 677813 - RNA, 19 nt, Artificial Sequence
  Description of Artificial Sequence: Synthetic oligonucleotide
guaagguagcaaacuccuc

SEQ ID NO: 677814 - RNA, 19 nt, Artificial Sequence
  Description of Artificial Sequence: Synthetic oligonucleotide
cuuucacaccagcuucaca

SEQ ID NO: 677815 - RNA, 19 nt, Artificial Sequence
  Description of Artificial Sequence: Synthetic oligonucleotide
ccauuaguuucugagccuc

SEQ ID NO: 677816 - RNA, 19 nt, Artificial Sequence
  Description of Artificial Sequence: Synthetic oligonucleotide
ugucgacuucgaguacucu

SEQ ID NO: 677817 - RNA, 19 nt, Artificial Sequence
  Description of Artificial Sequence: Synthetic oligonucleotide
caaugggcgaacuuucuuu

SEQ ID NO: 677818 - RNA, 19 nt, Artificial Sequence
  Description of Artificial Sequence: Synthetic oligonucleotide
ccguacgucauugacuaac

SEQ ID NO: 677819 - RNA, 19 nt, Artificial Sequence
  Description of Artificial Sequence: Synthetic oligonucleotide
cucggcucagcguugacau

SEQ ID NO: 677820 - RNA, 19 nt, Artificial Sequence
  Description of Artificial Sequence: Synthetic oligonucleotide
gucaaaugccaccaucguu

SEQ ID NO: 677821 - RNA, 19 nt, Artificial Sequence
  Description of Artificial Sequence: Synthetic oligonucleotide
ccaucguuuugaacauccc

SEQ ID NO: 677822 - RNA, 19 nt, Artificial Sequence
  Description of Artificial Sequence: Synthetic oligonucleotide
guguucuaguucaacuucu

SEQ ID NO: 677823 - RNA, 19 nt, Artificial Sequence
  Description of Artificial Sequence: Synthetic oligonucleotide
guaguguacaggcggcggu

SEQ ID NO: 677824 - RNA, 19 nt, Artificial Sequence
  Description of Artificial Sequence: Synthetic oligonucleotide
gcgggugaacuucacucug

SEQ ID NO: 677825 - RNA, 19 nt, Artificial Sequence
  Description of Artificial Sequence: Synthetic oligonucleotide
cggaggacugacaaaggac

SEQ ID NO: 677826 - RNA, 19 nt, Artificial Sequence
  Description of Artificial Sequence: Synthetic oligonucleotide
ccaguagauguaguaguac

SEQ ID NO: 677827 - RNA, 19 nt, Artificial Sequence
  Description of Artificial Sequence: Synthetic oligonucleotide
cuugucgacuucgaguacu

SEQ ID NO: 677828 - RNA, 19 nt, Artificial Sequence
  Description of Artificial Sequence: Synthetic oligonucleotide
gagagcaccggaggacuga

SEQ ID NO: 677829 - RNA, 19 nt, Artificial Sequence
  Description of Artificial Sequence: Synthetic oligonucleotide
caauguaaguucgguaagu

SEQ ID NO: 677830 - RNA, 19 nt, Artificial Sequence
  Description of Artificial Sequence: Synthetic oligonucleotide
ccguccaugucaaaugcca

SEQ ID NO: 677831 - RNA, 19 nt, Artificial Sequence
  Description of Artificial Sequence: Synthetic oligonucleotide
gucgacuucgaguacucuu

SEQ ID NO: 677832 - RNA, 19 nt, Artificial Sequence
  Description of Artificial Sequence: Synthetic oligonucleotide
ggccauggaucugaacaag

SEQ ID NO: 677833 - RNA, 19 nt, Artificial Sequence
  Description of Artificial Sequence: Synthetic oligonucleotide
ucggcucaaugggcgaacu

SEQ ID NO: 677834 - RNA, 19 nt, Artificial Sequence
  Description of Artificial Sequence: Synthetic oligonucleotide
aaggaccgaagugcgucuu

SEQ ID NO: 677835 - RNA, 19 nt, Artificial Sequence
  Description of Artificial Sequence: Synthetic oligonucleotide
gccaucugagagccaucgg

SEQ ID NO: 677836 - RNA, 19 nt, Artificial Sequence
  Description of Artificial Sequence: Synthetic oligonucleotide
uggugccauccuugauagc

SEQ ID NO: 677837 - RNA, 19 nt, Artificial Sequence
  Description of Artificial Sequence: Synthetic oligonucleotide
ucacacuguuugccauuuu

SEQ ID NO: 677838 - RNA, 19 nt, Artificial Sequence
  Description of Artificial Sequence: Synthetic oligonucleotide
gcgaccuugaggauccgac

SEQ ID NO: 677839 - RNA, 19 nt, Artificial Sequence
  Description of Artificial Sequence: Synthetic oligonucleotide
cuaugaagucuggguuaug

SEQ ID NO: 677840 - RNA, 19 nt, Artificial Sequence
  Description of Artificial Sequence: Synthetic oligonucleotide
gaccgaagugcgucuuuua

SEQ ID NO: 677841 - RNA, 19 nt, Artificial Sequence
  Description of Artificial Sequence: Synthetic oligonucleotide
agccaugcguacaggaauu

SEQ ID NO: 677842 - RNA, 19 nt, Artificial Sequence
  Description of Artificial Sequence: Synthetic oligonucleotide
gguauccauuauuccuauc

SEQ ID NO: 677843 - RNA, 19 nt, Artificial Sequence
  Description of Artificial Sequence: Synthetic oligonucleotide
ccgaacacagugaguaaca

SEQ ID NO: 677844 - RNA, 19 nt, Artificial Sequence
  Description of Artificial Sequence: Synthetic oligonucleotide
cugcugcuuggaccauuag

SEQ ID NO: 677845 - RNA, 19 nt, Artificial Sequence
  Description of Artificial Sequence: Synthetic oligonucleotide
ccacgaggaaagugguuug

SEQ ID NO: 677846 - RNA, 19 nt, Artificial Sequence
  Description of Artificial Sequence: Synthetic oligonucleotide
uccguacgucauugacuaa

SEQ ID NO: 677847 - RNA, 19 nt, Artificial Sequence
  Description of Artificial Sequence: Synthetic oligonucleotide
ccuugaaagaacacauggu

SEQ ID NO: 677848 - RNA, 19 nt, Artificial Sequence
  Description of Artificial Sequence: Synthetic oligonucleotide
cucggcucaaugggcgaac

SEQ ID NO: 677849 - RNA, 19 nt, Artificial Sequence
  Description of Artificial Sequence: Synthetic oligonucleotide
gcgucuuuuaccauauccu

SEQ ID NO: 677850 - RNA, 19 nt, Artificial Sequence
  Description of Artificial Sequence: Synthetic oligonucleotide
aggaccgaagugcgucuuu

SEQ ID NO: 677851 - RNA, 19 nt, Artificial Sequence
  Description of Artificial Sequence: Synthetic oligonucleotide
ccucggccaucugagagcc

SEQ ID NO: 677852 - RNA, 19 nt, Artificial Sequence
  Description of Artificial Sequence: Synthetic oligonucleotide
ggcggcggugucaucacgc

SEQ ID NO: 677853 - RNA, 19 nt, Artificial Sequence
  Description of Artificial Sequence: Synthetic oligonucleotide
cugaaugccgccaggcauu

SEQ ID NO: 677854 - RNA, 19 nt, Artificial Sequence
  Description of Artificial Sequence: Synthetic oligonucleotide
acgacuucacagacuguuu

SEQ ID NO: 677855 - RNA, 19 nt, Artificial Sequence
  Description of Artificial Sequence: Synthetic oligonucleotide
cacgacuucacagacuguu

SEQ ID NO: 677856 - RNA, 19 nt, Artificial Sequence
  Description of Artificial Sequence: Synthetic oligonucleotide
ugagagccaucggcucggc

SEQ ID NO: 677857 - RNA, 19 nt, Artificial Sequence
  Description of Artificial Sequence: Synthetic oligonucleotide
ggugacuguucacuaaauu

SEQ ID NO: 677858 - RNA, 19 nt, Artificial Sequence
  Description of Artificial Sequence: Synthetic oligonucleotide
gugcucauaccgaaccugu

SEQ ID NO: 677859 - RNA, 19 nt, Artificial Sequence
  Description of Artificial Sequence: Synthetic oligonucleotide
cagccaugcguacaggaau

SEQ ID NO: 677860 - RNA, 19 nt, Artificial Sequence
  Description of Artificial Sequence: Synthetic oligonucleotide
uugcgaugucacagaucuu

SEQ ID NO: 677861 - RNA, 19 nt, Artificial Sequence
  Description of Artificial Sequence: Synthetic oligonucleotide
gaagugcgucuuuuaccau

SEQ ID NO: 677862 - RNA, 19 nt, Artificial Sequence
  Description of Artificial Sequence: Synthetic oligonucleotide
ccuugaggauccgacugac

SEQ ID NO: 677863 - RNA, 19 nt, Artificial Sequence
  Description of Artificial Sequence: Synthetic oligonucleotide
auggccgaacacagugagu

SEQ ID NO: 677864 - RNA, 19 nt, Artificial Sequence
  Description of Artificial Sequence: Synthetic oligonucleotide
ccaugaugcaaugaagugu

SEQ ID NO: 677865 - RNA, 19 nt, Artificial Sequence
  Description of Artificial Sequence: Synthetic oligonucleotide
agcgcggcaucaaccuucu

SEQ ID NO: 677866 - RNA, 19 nt, Artificial Sequence
  Description of Artificial Sequence: Synthetic oligonucleotide
ccuugcgaugucacagauc

SEQ ID NO: 677867 - RNA, 19 nt, Artificial Sequence
  Description of Artificial Sequence: Synthetic oligonucleotide
cuuuccgauucacuugguu

SEQ ID NO: 677868 - RNA, 19 nt, Artificial Sequence
  Description of Artificial Sequence: Synthetic oligonucleotide
cgggugaacuucacucugc

SEQ ID NO: 677869 - RNA, 19 nt, Artificial Sequence
  Description of Artificial Sequence: Synthetic oligonucleotide
ccgaaccuguucacuauca

SEQ ID NO: 677870 - RNA, 19 nt, Artificial Sequence
  Description of Artificial Sequence: Synthetic oligonucleotide
augccgccaggcauugcug

SEQ ID NO: 677871 - RNA, 19 nt, Artificial Sequence
  Description of Artificial Sequence: Synthetic oligonucleotide
cguacgucauugacuaaca

SEQ ID NO: 677872 - RNA, 19 nt, Artificial Sequence
  Description of Artificial Sequence: Synthetic oligonucleotide
ccggaggacugacaaagga

SEQ ID NO: 677873 - RNA, 19 nt, Artificial Sequence
  Description of Artificial Sequence: Synthetic oligonucleotide
gaaugccgccaggcauugc

SEQ ID NO: 677874 - RNA, 19 nt, Artificial Sequence
  Description of Artificial Sequence: Synthetic oligonucleotide
cugugccagggaauggccu

SEQ ID NO: 677875 - RNA, 19 nt, Artificial Sequence
  Description of Artificial Sequence: Synthetic oligonucleotide
gccguccaugucaaaugcc

SEQ ID NO: 677876 - RNA, 19 nt, Artificial Sequence
  Description of Artificial Sequence: Synthetic oligonucleotide
gggcgaacuuucuuucucu

SEQ ID NO: 677877 - RNA, 19 nt, Artificial Sequence
  Description of Artificial Sequence: Synthetic oligonucleotide
cugugcucauaccgaaccu

SEQ ID NO: 677878 - RNA, 19 nt, Artificial Sequence
  Description of Artificial Sequence: Synthetic oligonucleotide
aggauccgacugaccucac

SEQ ID NO: 677879 - RNA, 19 nt, Artificial Sequence
  Description of Artificial Sequence: Synthetic oligonucleotide
cagcguugacaucagccau

SEQ ID NO: 677880 - RNA, 19 nt, Artificial Sequence
  Description of Artificial Sequence: Synthetic oligonucleotide
gugcgucuuuuaccauauc

SEQ ID NO: 677881 - RNA, 19 nt, Artificial Sequence
  Description of Artificial Sequence: Synthetic oligonucleotide
ggaucauaaugcgaagguu

SEQ ID NO: 677882 - RNA, 19 nt, Artificial Sequence
  Description of Artificial Sequence: Synthetic oligonucleotide
gaagcgcggcaucaaccuu

SEQ ID NO: 677883 - RNA, 19 nt, Artificial Sequence
  Description of Artificial Sequence: Synthetic oligonucleotide
ccuugucgacuucgaguac

SEQ ID NO: 677884 - RNA, 19 nt, Artificial Sequence
  Description of Artificial Sequence: Synthetic oligonucleotide
gaacuucacucugcugaau

SEQ ID NO: 677885 - RNA, 19 nt, Artificial Sequence
  Description of Artificial Sequence: Synthetic oligonucleotide
cacggucuggguuggggau

SEQ ID NO: 677886 - RNA, 19 nt, Artificial Sequence
  Description of Artificial Sequence: Synthetic oligonucleotide
cauugacuaacagcagcuu

SEQ ID NO: 677887 - RNA, 19 nt, Artificial Sequence
  Description of Artificial Sequence: Synthetic oligonucleotide
ggccgaacacagugaguaa

SEQ ID NO: 677888 - RNA, 19 nt, Artificial Sequence
  Description of Artificial Sequence: Synthetic oligonucleotide
ccuugauagcuuguucaaa

SEQ ID NO: 677889 - RNA, 19 nt, Artificial Sequence
  Description of Artificial Sequence: Synthetic oligonucleotide
ccaugcguacaggaauuca

SEQ ID NO: 677890 - RNA, 19 nt, Artificial Sequence
  Description of Artificial Sequence: Synthetic oligonucleotide
caucggcucggcucagcgu

SEQ ID NO: 677891 - RNA, 19 nt, Artificial Sequence
  Description of Artificial Sequence: Synthetic oligonucleotide
ggcgaacuuucuuucucuu

SEQ ID NO: 677892 - RNA, 19 nt, Artificial Sequence
  Description of Artificial Sequence: Synthetic oligonucleotide
caaauucgggaggaaccuu

SEQ ID NO: 677893 - RNA, 19 nt, Artificial Sequence
  Description of Artificial Sequence: Synthetic oligonucleotide
gcaccggaggacugacaaa

SEQ ID NO: 677894 - RNA, 19 nt, Artificial Sequence
  Description of Artificial Sequence: Synthetic oligonucleotide
cgguaaguucacgacuuca

SEQ ID NO: 677895 - RNA, 19 nt, Artificial Sequence
  Description of Artificial Sequence: Synthetic oligonucleotide
ggcgaccuugaggauccga

SEQ ID NO: 677896 - RNA, 19 nt, Artificial Sequence
  Description of Artificial Sequence: Synthetic oligonucleotide
cgaaccuguucacuaucaa

SEQ ID NO: 677897 - RNA, 19 nt, Artificial Sequence
  Description of Artificial Sequence: Synthetic oligonucleotide
cgaacacagugaguaacaa

SEQ ID NO: 677898 - RNA, 19 nt, Artificial Sequence
  Description of Artificial Sequence: Synthetic oligonucleotide
gcggcggugucaucacgcu

SEQ ID NO: 677899 - RNA, 19 nt, Artificial Sequence
  Description of Artificial Sequence: Synthetic oligonucleotide
ggaccgaagugcgucuuuu

SEQ ID NO: 677900 - RNA, 19 nt, Artificial Sequence
  Description of Artificial Sequence: Synthetic oligonucleotide
ccgauucacuugguuucca

SEQ ID NO: 677901 - RNA, 19 nt, Artificial Sequence
  Description of Artificial Sequence: Synthetic oligonucleotide
gcacgcgggugaacuucac

SEQ ID NO: 677902 - RNA, 19 nt, Artificial Sequence
  Description of Artificial Sequence: Synthetic oligonucleotide
cgacuucgaguacucuuua

SEQ ID NO: 677903 - RNA, 19 nt, Artificial Sequence
  Description of Artificial Sequence: Synthetic oligonucleotide
ccucacggucuggguuggg

SEQ ID NO: 677904 - RNA, 19 nt, Artificial Sequence
  Description of Artificial Sequence: Synthetic oligonucleotide
cccuugcgaugucacagau

SEQ ID NO: 677905 - RNA, 19 nt, Artificial Sequence
  Description of Artificial Sequence: Synthetic oligonucleotide
cugauaggccuggcucauu

SEQ ID NO: 677906 - RNA, 19 nt, Artificial Sequence
  Description of Artificial Sequence: Synthetic oligonucleotide
gcgcggcaucaaccuucuc

SEQ ID NO: 677907 - RNA, 19 nt, Artificial Sequence
  Description of Artificial Sequence: Synthetic oligonucleotide
gguuugcaacagagaccuu

SEQ ID NO: 677908 - RNA, 19 nt, Artificial Sequence
  Description of Artificial Sequence: Synthetic oligonucleotide
cggcucaaugggcgaacuu

SEQ ID NO: 677909 - RNA, 19 nt, Artificial Sequence
  Description of Artificial Sequence: Synthetic oligonucleotide
aaagauuuagcacucuucc

SEQ ID NO: 677910 - RNA, 19 nt, Artificial Sequence
  Description of Artificial Sequence: Synthetic oligonucleotide
auuagaauguaucucaucg

SEQ ID NO: 677911 - RNA, 19 nt, Artificial Sequence
  Description of Artificial Sequence: Synthetic oligonucleotide
aacacuaacguacucagag

SEQ ID NO: 677912 - RNA, 19 nt, Artificial Sequence
  Description of Artificial Sequence: Synthetic oligonucleotide
uauagaagcuuuaugagcu

SEQ ID NO: 677913 - RNA, 19 nt, Artificial Sequence
  Description of Artificial Sequence: Synthetic oligonucleotide
cucuuuauaaucaaccacc

SEQ ID NO: 677914 - RNA, 19 nt, Artificial Sequence
  Description of Artificial Sequence: Synthetic oligonucleotide
aagauuuagcacucuuccc

SEQ ID NO: 677915 - RNA, 19 nt, Artificial Sequence
  Description of Artificial Sequence: Synthetic oligonucleotide
aagcgagaggccuucaggc

SEQ ID NO: 677916 - RNA, 19 nt, Artificial Sequence
  Description of Artificial Sequence: Synthetic oligonucleotide
agugaugucccacagauga

SEQ ID NO: 677917 - RNA, 19 nt, Artificial Sequence
  Description of Artificial Sequence: Synthetic oligonucleotide
agcacuuauccucaaagcg

SEQ ID NO: 677918 - RNA, 19 nt, Artificial Sequence
  Description of Artificial Sequence: Synthetic oligonucleotide
ucaucugacacagauaagc

SEQ ID NO: 677919 - RNA, 19 nt, Artificial Sequence
  Description of Artificial Sequence: Synthetic oligonucleotide
augguuguccaccagguac

SEQ ID NO: 677920 - RNA, 19 nt, Artificial Sequence
  Description of Artificial Sequence: Synthetic oligonucleotide
aaucaaccaccguagggac

SEQ ID NO: 677921 - RNA, 19 nt, Artificial Sequence
  Description of Artificial Sequence: Synthetic oligonucleotide
uccuguuucacuccuagug

SEQ ID NO: 677922 - RNA, 19 nt, Artificial Sequence
  Description of Artificial Sequence: Synthetic oligonucleotide
cuugugaaguccuucauug

SEQ ID NO: 677923 - RNA, 19 nt, Artificial Sequence
  Description of Artificial Sequence: Synthetic oligonucleotide
guucauguagaccacagug

SEQ ID NO: 677924 - RNA, 19 nt, Artificial Sequence
  Description of Artificial Sequence: Synthetic oligonucleotide
agaagcuggagcuuguauc

SEQ ID NO: 677925 - RNA, 19 nt, Artificial Sequence
  Description of Artificial Sequence: Synthetic oligonucleotide
ugugaaguccuucauugug

SEQ ID NO: 677926 - RNA, 19 nt, Artificial Sequence
  Description of Artificial Sequence: Synthetic oligonucleotide
agauuuagcacucuuccca

SEQ ID NO: 677927 - RNA, 19 nt, Artificial Sequence
  Description of Artificial Sequence: Synthetic oligonucleotide
guauagaagcuuuaugagc

SEQ ID NO: 677928 - RNA, 19 nt, Artificial Sequence
  Description of Artificial Sequence: Synthetic oligonucleotide
auggccaacacuaacguac

SEQ ID NO: 677929 - RNA, 19 nt, Artificial Sequence
  Description of Artificial Sequence: Synthetic oligonucleotide
aggucguuguaagagaacc

SEQ ID NO: 677930 - RNA, 19 nt, Artificial Sequence
  Description of Artificial Sequence: Synthetic oligonucleotide
uaaucaaccaccguaggga

SEQ ID NO: 677931 - RNA, 19 nt, Artificial Sequence
  Description of Artificial Sequence: Synthetic oligonucleotide
uuuagcacucuucccaagc

SEQ ID NO: 677932 - RNA, 19 nt, Artificial Sequence
  Description of Artificial Sequence: Synthetic oligonucleotide
ugaugaaccgaguacagau

SEQ ID NO: 677933 - RNA, 19 nt, Artificial Sequence
  Description of Artificial Sequence: Synthetic oligonucleotide
uucauuguagagguaggcg

SEQ ID NO: 677934 - RNA, 19 nt, Artificial Sequence
  Description of Artificial Sequence: Synthetic oligonucleotide
aaguucguguccucgucac

SEQ ID NO: 677935 - RNA, 19 nt, Artificial Sequence
  Description of Artificial Sequence: Synthetic oligonucleotide
cuuaugggacucaagcugc

SEQ ID NO: 677936 - RNA, 19 nt, Artificial Sequence
  Description of Artificial Sequence: Synthetic oligonucleotide
caucauucguaccaagucc

SEQ ID NO: 677937 - RNA, 19 nt, Artificial Sequence
  Description of Artificial Sequence: Synthetic oligonucleotide
acacuaacguacucagagc

SEQ ID NO: 677938 - RNA, 19 nt, Artificial Sequence
  Description of Artificial Sequence: Synthetic oligonucleotide
uucccaacuucacagucag

SEQ ID NO: 677939 - RNA, 19 nt, Artificial Sequence
  Description of Artificial Sequence: Synthetic oligonucleotide
uagaauguaucucaucgua

SEQ ID NO: 677940 - RNA, 19 nt, Artificial Sequence
  Description of Artificial Sequence: Synthetic oligonucleotide
agaaucucuuugcugauga

SEQ ID NO: 677941 - RNA, 19 nt, Artificial Sequence
  Description of Artificial Sequence: Synthetic oligonucleotide
ugcacugacagguuuuggc

SEQ ID NO: 677942 - RNA, 19 nt, Artificial Sequence
  Description of Artificial Sequence: Synthetic oligonucleotide
ucucuuugcugaugaaccg

SEQ ID NO: 677943 - RNA, 19 nt, Artificial Sequence
  Description of Artificial Sequence: Synthetic oligonucleotide
caucguaucgcugagcccc

SEQ ID NO: 677944 - RNA, 19 nt, Artificial Sequence
  Description of Artificial Sequence: Synthetic oligonucleotide
aguaccggucuacacacuc

SEQ ID NO: 677945 - RNA, 19 nt, Artificial Sequence
  Description of Artificial Sequence: Synthetic oligonucleotide
auguaucucaucguaucgc

SEQ ID NO: 677946 - RNA, 19 nt, Artificial Sequence
  Description of Artificial Sequence: Synthetic oligonucleotide
guaguauagaagcuuuaug

SEQ ID NO: 677947 - RNA, 19 nt, Artificial Sequence
  Description of Artificial Sequence: Synthetic oligonucleotide
gguacuucaggugagagug

SEQ ID NO: 677948 - RNA, 19 nt, Artificial Sequence
  Description of Artificial Sequence: Synthetic oligonucleotide
uguaucucaucguaucgcu

SEQ ID NO: 677949 - RNA, 19 nt, Artificial Sequence
  Description of Artificial Sequence: Synthetic oligonucleotide
uuagaauguaucucaucgu

SEQ ID NO: 677950 - RNA, 19 nt, Artificial Sequence
  Description of Artificial Sequence: Synthetic oligonucleotide
uaguauuccaaggaagcug

SEQ ID NO: 677951 - RNA, 19 nt, Artificial Sequence
  Description of Artificial Sequence: Synthetic oligonucleotide
acagaugagugguccaggg

SEQ ID NO: 677952 - RNA, 19 nt, Artificial Sequence
  Description of Artificial Sequence: Synthetic oligonucleotide
gaagccuaaguucgugucc

SEQ ID NO: 677953 - RNA, 19 nt, Artificial Sequence
  Description of Artificial Sequence: Synthetic oligonucleotide
uagagauggguuccacggg

SEQ ID NO: 677954 - RNA, 19 nt, Artificial Sequence
  Description of Artificial Sequence: Synthetic oligonucleotide
gauuuggagggcgacacug

SEQ ID NO: 677955 - RNA, 19 nt, Artificial Sequence
  Description of Artificial Sequence: Synthetic oligonucleotide
caucaaggaguccacuggg

SEQ ID NO: 677956 - RNA, 19 nt, Artificial Sequence
  Description of Artificial Sequence: Synthetic oligonucleotide
uuggaugugccgcuuggug

SEQ ID NO: 677957 - RNA, 19 nt, Artificial Sequence
  Description of Artificial Sequence: Synthetic oligonucleotide
uacagaugaccaugcaggc

SEQ ID NO: 677958 - RNA, 19 nt, Artificial Sequence
  Description of Artificial Sequence: Synthetic oligonucleotide
gaaccgaguacagaugacc

SEQ ID NO: 677959 - RNA, 19 nt, Artificial Sequence
  Description of Artificial Sequence: Synthetic oligonucleotide
uaaguucguguccucguca

SEQ ID NO: 677960 - RNA, 19 nt, Artificial Sequence
  Description of Artificial Sequence: Synthetic oligonucleotide
uguaguauagaagcuuuau

SEQ ID NO: 677961 - RNA, 19 nt, Artificial Sequence
  Description of Artificial Sequence: Synthetic oligonucleotide
acggguguggcaugacugc

SEQ ID NO: 677962 - RNA, 19 nt, Artificial Sequence
  Description of Artificial Sequence: Synthetic oligonucleotide
agguguuggguucuggaug

SEQ ID NO: 677963 - RNA, 19 nt, Artificial Sequence
  Description of Artificial Sequence: Synthetic oligonucleotide
auaagccuucauuguagag

SEQ ID NO: 677964 - RNA, 19 nt, Artificial Sequence
  Description of Artificial Sequence: Synthetic oligonucleotide
gcuuaugggacucaagcug

SEQ ID NO: 677965 - RNA, 19 nt, Artificial Sequence
  Description of Artificial Sequence: Synthetic oligonucleotide
gauucccaacuucacaguc

SEQ ID NO: 677966 - RNA, 19 nt, Artificial Sequence
  Description of Artificial Sequence: Synthetic oligonucleotide
aagcaguguaguauagaag

SEQ ID NO: 677967 - RNA, 19 nt, Artificial Sequence
  Description of Artificial Sequence: Synthetic oligonucleotide
augaccaugcaggcaauac

SEQ ID NO: 677968 - RNA, 19 nt, Artificial Sequence
  Description of Artificial Sequence: Synthetic oligonucleotide
ucuacacacuccaccguca

SEQ ID NO: 677969 - RNA, 19 nt, Artificial Sequence
  Description of Artificial Sequence: Synthetic oligonucleotide
guauguguugucugugagc

SEQ ID NO: 677970 - RNA, 19 nt, Artificial Sequence
  Description of Artificial Sequence: Synthetic oligonucleotide
uucauuguggcaacuucua

SEQ ID NO: 677971 - RNA, 19 nt, Artificial Sequence
  Description of Artificial Sequence: Synthetic oligonucleotide
uguaucgggguaccagucu

SEQ ID NO: 677972 - RNA, 19 nt, Artificial Sequence
  Description of Artificial Sequence: Synthetic oligonucleotide
auucguaccaaguccucgu

SEQ ID NO: 677973 - RNA, 19 nt, Artificial Sequence
  Description of Artificial Sequence: Synthetic oligonucleotide
cugugcucgggaaagauga

SEQ ID NO: 677974 - RNA, 19 nt, Artificial Sequence
  Description of Artificial Sequence: Synthetic oligonucleotide
cuaacguacucagagcuuc

SEQ ID NO: 677975 - RNA, 19 nt, Artificial Sequence
  Description of Artificial Sequence: Synthetic oligonucleotide
aacccagugaugucccaca

SEQ ID NO: 677976 - RNA, 19 nt, Artificial Sequence
  Description of Artificial Sequence: Synthetic oligonucleotide
uaugaaggcucaagacgca

SEQ ID NO: 677977 - RNA, 19 nt, Artificial Sequence
  Description of Artificial Sequence: Synthetic oligonucleotide
agggacucgaaucuucccu

SEQ ID NO: 677978 - RNA, 19 nt, Artificial Sequence
  Description of Artificial Sequence: Synthetic oligonucleotide
aagccuaaguucguguccu

SEQ ID NO: 677979 - RNA, 19 nt, Artificial Sequence
  Description of Artificial Sequence: Synthetic oligonucleotide
gacgcagggcgugaggucg

SEQ ID NO: 677980 - RNA, 19 nt, Artificial Sequence
  Description of Artificial Sequence: Synthetic oligonucleotide
aacccauauucaauuucuc

SEQ ID NO: 677981 - RNA, 19 nt, Artificial Sequence
  Description of Artificial Sequence: Synthetic oligonucleotide
gcgauucccaacuucacag

SEQ ID NO: 677982 - RNA, 19 nt, Artificial Sequence
  Description of Artificial Sequence: Synthetic oligonucleotide
accguagggacucgaaucu

SEQ ID NO: 677983 - RNA, 19 nt, Artificial Sequence
  Description of Artificial Sequence: Synthetic oligonucleotide
acguacucagagcuucagg

SEQ ID NO: 677984 - RNA, 19 nt, Artificial Sequence
  Description of Artificial Sequence: Synthetic oligonucleotide
acggccuugcagcagcuuc

SEQ ID NO: 677985 - RNA, 19 nt, Artificial Sequence
  Description of Artificial Sequence: Synthetic oligonucleotide
cuucauuguagagguaggc

SEQ ID NO: 677986 - RNA, 19 nt, Artificial Sequence
  Description of Artificial Sequence: Synthetic oligonucleotide
uaccggucuacacacucca

SEQ ID NO: 677987 - RNA, 19 nt, Artificial Sequence
  Description of Artificial Sequence: Synthetic oligonucleotide
acgaucucucccaucauuc

SEQ ID NO: 677988 - RNA, 19 nt, Artificial Sequence
  Description of Artificial Sequence: Synthetic oligonucleotide
ucaaccaccguagggacuc

SEQ ID NO: 677989 - RNA, 19 nt, Artificial Sequence
  Description of Artificial Sequence: Synthetic oligonucleotide
agguaggcgauucccaacu

SEQ ID NO: 677990 - RNA, 19 nt, Artificial Sequence
  Description of Artificial Sequence: Synthetic oligonucleotide
aggcucaugcucccagagc

SEQ ID NO: 677991 - RNA, 19 nt, Artificial Sequence
  Description of Artificial Sequence: Synthetic oligonucleotide
uccucguacuuguaugugu

SEQ ID NO: 677992 - RNA, 19 nt, Artificial Sequence
  Description of Artificial Sequence: Synthetic oligonucleotide
gucgugauguccuugccca

SEQ ID NO: 677993 - RNA, 19 nt, Artificial Sequence
  Description of Artificial Sequence: Synthetic oligonucleotide
uaccaaccagucaauuaga

SEQ ID NO: 677994 - RNA, 19 nt, Artificial Sequence
  Description of Artificial Sequence: Synthetic oligonucleotide
uacacacuccaccgucagg

SEQ ID NO: 677995 - RNA, 19 nt, Artificial Sequence
  Description of Artificial Sequence: Synthetic oligonucleotide
ucguacuuguauguguugu

SEQ ID NO: 677996 - RNA, 19 nt, Artificial Sequence
  Description of Artificial Sequence: Synthetic oligonucleotide
aguccucguacuuguaugu

SEQ ID NO: 677997 - RNA, 19 nt, Artificial Sequence
  Description of Artificial Sequence: Synthetic oligonucleotide
cuguaacuggcacucugcc

SEQ ID NO: 677998 - RNA, 19 nt, Artificial Sequence
  Description of Artificial Sequence: Synthetic oligonucleotide
ggcaacuucuaccaaccag

SEQ ID NO: 677999 - RNA, 19 nt, Artificial Sequence
  Description of Artificial Sequence: Synthetic oligonucleotide
uguugaccacaguaaacau

SEQ ID NO: 678000 - RNA, 19 nt, Artificial Sequence
  Description of Artificial Sequence: Synthetic oligonucleotide
ucugcccugaggcugucgu

SEQ ID NO: 678001 - RNA, 19 nt, Artificial Sequence
  Description of Artificial Sequence: Synthetic oligonucleotide
aucauucguaccaaguccu

SEQ ID NO: 678002 - RNA, 19 nt, Artificial Sequence
  Description of Artificial Sequence: Synthetic oligonucleotide
ucgggaaagaugagggcuc

SEQ ID NO: 678003 - RNA, 19 nt, Artificial Sequence
  Description of Artificial Sequence: Synthetic oligonucleotide
ugcugacggaagaguaucc

SEQ ID NO: 678004 - RNA, 19 nt, Artificial Sequence
  Description of Artificial Sequence: Synthetic oligonucleotide
uaucgggguaccagucucc

SEQ ID NO: 678005 - RNA, 19 nt, Artificial Sequence
  Description of Artificial Sequence: Synthetic oligonucleotide
aacguacucagagcuucag

SEQ ID NO: 678006 - RNA, 19 nt, Artificial Sequence
  Description of Artificial Sequence: Synthetic oligonucleotide
gagacacuugucuguaguc

SEQ ID NO: 678007 - RNA, 19 nt, Artificial Sequence
  Description of Artificial Sequence: Synthetic oligonucleotide
gacucgaaucuucccuucc

SEQ ID NO: 678008 - RNA, 19 nt, Artificial Sequence
  Description of Artificial Sequence: Synthetic oligonucleotide
gagggcgacacuguaaaca

SEQ ID NO: 678009 - RNA, 19 nt, Artificial Sequence
  Description of Artificial Sequence: Synthetic oligonucleotide
caccguagggacucgaauc

SEQ ID NO: 678010 - RNA, 19 nt, Artificial Sequence
  Description of Artificial Sequence: Synthetic oligonucleotide
ugcaaguaccggucuacac

SEQ ID NO: 678011 - RNA, 19 nt, Artificial Sequence
  Description of Artificial Sequence: Synthetic oligonucleotide
agacggugagcugaggaag

SEQ ID NO: 678012 - RNA, 19 nt, Artificial Sequence
  Description of Artificial Sequence: Synthetic oligonucleotide
gacggugagcugaggaagg

SEQ ID NO: 678013 - RNA, 19 nt, Artificial Sequence
  Description of Artificial Sequence: Synthetic oligonucleotide
uucccaagcaguguaguau

SEQ ID NO: 678014 - RNA, 19 nt, Artificial Sequence
  Description of Artificial Sequence: Synthetic oligonucleotide
cacggguguggcaugacug

SEQ ID NO: 678015 - RNA, 19 nt, Artificial Sequence
  Description of Artificial Sequence: Synthetic oligonucleotide
ccaacacuaacguacucag

SEQ ID NO: 678016 - RNA, 19 nt, Artificial Sequence
  Description of Artificial Sequence: Synthetic oligonucleotide
ucugcaaguaccggucuac

SEQ ID NO: 678017 - RNA, 19 nt, Artificial Sequence
  Description of Artificial Sequence: Synthetic oligonucleotide
agggcgacacuguaaacau

SEQ ID NO: 678018 - RNA, 19 nt, Artificial Sequence
  Description of Artificial Sequence: Synthetic oligonucleotide
ucguaccaaguccucguac

SEQ ID NO: 678019 - RNA, 19 nt, Artificial Sequence
  Description of Artificial Sequence: Synthetic oligonucleotide
cuuguauguguugucugug

SEQ ID NO: 678020 - RNA, 19 nt, Artificial Sequence
  Description of Artificial Sequence: Synthetic oligonucleotide
uuguaucgggguaccaguc

SEQ ID NO: 678021 - RNA, 19 nt, Artificial Sequence
  Description of Artificial Sequence: Synthetic oligonucleotide
uaacguacucagagcuuca

SEQ ID NO: 678022 - RNA, 19 nt, Artificial Sequence
  Description of Artificial Sequence: Synthetic oligonucleotide
ggagcguagauggacaggc

SEQ ID NO: 678023 - RNA, 19 nt, Artificial Sequence
  Description of Artificial Sequence: Synthetic oligonucleotide
gucguuguaagagaaccca

SEQ ID NO: 678024 - RNA, 19 nt, Artificial Sequence
  Description of Artificial Sequence: Synthetic oligonucleotide
guauccagaggucgugaug

SEQ ID NO: 678025 - RNA, 19 nt, Artificial Sequence
  Description of Artificial Sequence: Synthetic oligonucleotide
ccauccagggagcuuaugg

SEQ ID NO: 678026 - RNA, 19 nt, Artificial Sequence
  Description of Artificial Sequence: Synthetic oligonucleotide
ucaucguaucgcugagccc

SEQ ID NO: 678027 - RNA, 19 nt, Artificial Sequence
  Description of Artificial Sequence: Synthetic oligonucleotide
acagcggucagagacacuu

SEQ ID NO: 678028 - RNA, 19 nt, Artificial Sequence
  Description of Artificial Sequence: Synthetic oligonucleotide
gaacccauauucaauuucu

SEQ ID NO: 678029 - RNA, 19 nt, Artificial Sequence
  Description of Artificial Sequence: Synthetic oligonucleotide
aguguaguauagaagcuuu

SEQ ID NO: 678030 - RNA, 19 nt, Artificial Sequence
  Description of Artificial Sequence: Synthetic oligonucleotide
uggccaacacuaacguacu

SEQ ID NO: 678031 - RNA, 19 nt, Artificial Sequence
  Description of Artificial Sequence: Synthetic oligonucleotide
caggaccucuuuauaauca

SEQ ID NO: 678032 - RNA, 19 nt, Artificial Sequence
  Description of Artificial Sequence: Synthetic oligonucleotide
gaugagugguccagggcug

SEQ ID NO: 678033 - RNA, 19 nt, Artificial Sequence
  Description of Artificial Sequence: Synthetic oligonucleotide
gcugucguggaccacggcc

SEQ ID NO: 678034 - RNA, 19 nt, Artificial Sequence
  Description of Artificial Sequence: Synthetic oligonucleotide
uaucgcugagccccuucug

SEQ ID NO: 678035 - RNA, 19 nt, Artificial Sequence
  Description of Artificial Sequence: Synthetic oligonucleotide
ggucagagacacuugucug

SEQ ID NO: 678036 - RNA, 19 nt, Artificial Sequence
  Description of Artificial Sequence: Synthetic oligonucleotide
cuaaguucguguccucguc

SEQ ID NO: 678037 - RNA, 19 nt, Artificial Sequence
  Description of Artificial Sequence: Synthetic oligonucleotide
uacccguugcuggugaaca

SEQ ID NO: 678038 - RNA, 19 nt, Artificial Sequence
  Description of Artificial Sequence: Synthetic oligonucleotide
caacuucuaccaaccaguc

SEQ ID NO: 678039 - RNA, 19 nt, Artificial Sequence
  Description of Artificial Sequence: Synthetic oligonucleotide
cacagccucucuaaugguc

SEQ ID NO: 678040 - RNA, 19 nt, Artificial Sequence
  Description of Artificial Sequence: Synthetic oligonucleotide
cauggugggcggaugaaga

SEQ ID NO: 678041 - RNA, 19 nt, Artificial Sequence
  Description of Artificial Sequence: Synthetic oligonucleotide
acuccuagugcagugcaca

SEQ ID NO: 678042 - RNA, 19 nt, Artificial Sequence
  Description of Artificial Sequence: Synthetic oligonucleotide
gucuacacacuccaccguc

SEQ ID NO: 678043 - RNA, 19 nt, Artificial Sequence
  Description of Artificial Sequence: Synthetic oligonucleotide
gcaaguaccggucuacaca

SEQ ID NO: 678044 - RNA, 19 nt, Artificial Sequence
  Description of Artificial Sequence: Synthetic oligonucleotide
aguauccagaggucgugau

SEQ ID NO: 678045 - RNA, 19 nt, Artificial Sequence
  Description of Artificial Sequence: Synthetic oligonucleotide
agccauacugaagaagcga

SEQ ID NO: 678046 - RNA, 19 nt, Artificial Sequence
  Description of Artificial Sequence: Synthetic oligonucleotide
ucauucguaccaaguccuc

SEQ ID NO: 678047 - RNA, 19 nt, Artificial Sequence
  Description of Artificial Sequence: Synthetic oligonucleotide
cgucauagcacuuauccuc

SEQ ID NO: 678048 - RNA, 19 nt, Artificial Sequence
  Description of Artificial Sequence: Synthetic oligonucleotide
ggaugugccgcuugguggc

SEQ ID NO: 678049 - RNA, 19 nt, Artificial Sequence
  Description of Artificial Sequence: Synthetic oligonucleotide
ugggcggaugaagagccag

SEQ ID NO: 678050 - RNA, 19 nt, Artificial Sequence
  Description of Artificial Sequence: Synthetic oligonucleotide
augaaggcucaagacgcag

SEQ ID NO: 678051 - RNA, 19 nt, Artificial Sequence
  Description of Artificial Sequence: Synthetic oligonucleotide
guaucgggguaccagucuc

SEQ ID NO: 678052 - RNA, 19 nt, Artificial Sequence
  Description of Artificial Sequence: Synthetic oligonucleotide
guagaucggggagagcccc

SEQ ID NO: 678053 - RNA, 19 nt, Artificial Sequence
  Description of Artificial Sequence: Synthetic oligonucleotide
gguuggaugugccgcuugg

SEQ ID NO: 678054 - RNA, 19 nt, Artificial Sequence
  Description of Artificial Sequence: Synthetic oligonucleotide
uccccugugcucgggaaag

SEQ ID NO: 678055 - RNA, 19 nt, Artificial Sequence
  Description of Artificial Sequence: Synthetic oligonucleotide
cacuaacguacucagagcu

SEQ ID NO: 678056 - RNA, 19 nt, Artificial Sequence
  Description of Artificial Sequence: Synthetic oligonucleotide
cucuucccaagcaguguag

SEQ ID NO: 678057 - RNA, 19 nt, Artificial Sequence
  Description of Artificial Sequence: Synthetic oligonucleotide
cuagugcagugcacaauuc

SEQ ID NO: 678058 - RNA, 19 nt, Artificial Sequence
  Description of Artificial Sequence: Synthetic oligonucleotide
uggugggcggaugaagagc

SEQ ID NO: 678059 - RNA, 19 nt, Artificial Sequence
  Description of Artificial Sequence: Synthetic oligonucleotide
uuggcgcuuuacccguugc

SEQ ID NO: 678060 - RNA, 19 nt, Artificial Sequence
  Description of Artificial Sequence: Synthetic oligonucleotide
gccauacugaagaagcgag

SEQ ID NO: 678061 - RNA, 19 nt, Artificial Sequence
  Description of Artificial Sequence: Synthetic oligonucleotide
guaggcgauucccaacuuc

SEQ ID NO: 678062 - RNA, 19 nt, Artificial Sequence
  Description of Artificial Sequence: Synthetic oligonucleotide
caccagguacuucagguga

SEQ ID NO: 678063 - RNA, 19 nt, Artificial Sequence
  Description of Artificial Sequence: Synthetic oligonucleotide
cucguacuuguauguguug

SEQ ID NO: 678064 - RNA, 19 nt, Artificial Sequence
  Description of Artificial Sequence: Synthetic oligonucleotide
agacgcagggcgugagguc

SEQ ID NO: 678065 - RNA, 19 nt, Artificial Sequence
  Description of Artificial Sequence: Synthetic oligonucleotide
cacagaugagugguccagg

SEQ ID NO: 678066 - RNA, 19 nt, Artificial Sequence
  Description of Artificial Sequence: Synthetic oligonucleotide
ggcgacacuguaaacauga

SEQ ID NO: 678067 - RNA, 19 nt, Artificial Sequence
  Description of Artificial Sequence: Synthetic oligonucleotide
cucaagcugcugacggaag

SEQ ID NO: 678068 - RNA, 19 nt, Artificial Sequence
  Description of Artificial Sequence: Synthetic oligonucleotide
agaaggguagagauggguu

SEQ ID NO: 678069 - RNA, 19 nt, Artificial Sequence
  Description of Artificial Sequence: Synthetic oligonucleotide
gcgcuuuacccguugcugg

SEQ ID NO: 678070 - RNA, 19 nt, Artificial Sequence
  Description of Artificial Sequence: Synthetic oligonucleotide
ucaagacgcagggcgugag

SEQ ID NO: 678071 - RNA, 19 nt, Artificial Sequence
  Description of Artificial Sequence: Synthetic oligonucleotide
gugagaguguacagcucgg

SEQ ID NO: 678072 - RNA, 19 nt, Artificial Sequence
  Description of Artificial Sequence: Synthetic oligonucleotide
uggcaacuucuaccaacca

SEQ ID NO: 678073 - RNA, 19 nt, Artificial Sequence
  Description of Artificial Sequence: Synthetic oligonucleotide
cacuuauccucaaagcgcu

SEQ ID NO: 678074 - RNA, 19 nt, Artificial Sequence
  Description of Artificial Sequence: Synthetic oligonucleotide
caagacgcagggcgugagg

SEQ ID NO: 678075 - RNA, 19 nt, Artificial Sequence
  Description of Artificial Sequence: Synthetic oligonucleotide
cugaucucgucauagcacu

SEQ ID NO: 678076 - RNA, 19 nt, Artificial Sequence
  Description of Artificial Sequence: Synthetic oligonucleotide
ucggggagagccccucaug

SEQ ID NO: 678077 - RNA, 19 nt, Artificial Sequence
  Description of Artificial Sequence: Synthetic oligonucleotide
ucucgucauagcacuuauc

SEQ ID NO: 678078 - RNA, 19 nt, Artificial Sequence
  Description of Artificial Sequence: Synthetic oligonucleotide
ucguguccucgucacugug

SEQ ID NO: 678079 - RNA, 19 nt, Artificial Sequence
  Description of Artificial Sequence: Synthetic oligonucleotide
ccaucauucguaccaaguc

SEQ ID NO: 678080 - RNA, 19 nt, Artificial Sequence
  Description of Artificial Sequence: Synthetic oligonucleotide
cauguagaccacagugaca

SEQ ID NO: 678081 - RNA, 19 nt, Artificial Sequence
  Description of Artificial Sequence: Synthetic oligonucleotide
uggcgcuuuacccguugcu

SEQ ID NO: 678082 - RNA, 19 nt, Artificial Sequence
  Description of Artificial Sequence: Synthetic oligonucleotide
ggaagccuaaguucguguc

SEQ ID NO: 678083 - RNA, 19 nt, Artificial Sequence
  Description of Artificial Sequence: Synthetic oligonucleotide
guguccucgucacugugca

SEQ ID NO: 678084 - RNA, 19 nt, Artificial Sequence
  Description of Artificial Sequence: Synthetic oligonucleotide
cagauaagccuucauugua

SEQ ID NO: 678085 - RNA, 19 nt, Artificial Sequence
  Description of Artificial Sequence: Synthetic oligonucleotide
gacucaagcugcugacgga

SEQ ID NO: 678086 - RNA, 19 nt, Artificial Sequence
  Description of Artificial Sequence: Synthetic oligonucleotide
gaacccagugaugucccac

SEQ ID NO: 678087 - RNA, 19 nt, Artificial Sequence
  Description of Artificial Sequence: Synthetic oligonucleotide
ggcgugaggucguuguaag

SEQ ID NO: 678088 - RNA, 19 nt, Artificial Sequence
  Description of Artificial Sequence: Synthetic oligonucleotide
ugacacagauaagccuuca

SEQ ID NO: 678089 - RNA, 19 nt, Artificial Sequence
  Description of Artificial Sequence: Synthetic oligonucleotide
guaucucaucguaucgcug

SEQ ID NO: 678090 - RNA, 19 nt, Artificial Sequence
  Description of Artificial Sequence: Synthetic oligonucleotide
accgaguacagaugaccau

SEQ ID NO: 678091 - RNA, 19 nt, Artificial Sequence
  Description of Artificial Sequence: Synthetic oligonucleotide
cuuguaucgggguaccagu

SEQ ID NO: 678092 - RNA, 19 nt, Artificial Sequence
  Description of Artificial Sequence: Synthetic oligonucleotide
uuuccccugugcucgggaa

SEQ ID NO: 678093 - RNA, 19 nt, Artificial Sequence
  Description of Artificial Sequence: Synthetic oligonucleotide
auuuccccugugcucggga

SEQ ID NO: 678094 - RNA, 19 nt, Artificial Sequence
  Description of Artificial Sequence: Synthetic oligonucleotide
guggaccacggccuugcag

SEQ ID NO: 678095 - RNA, 19 nt, Artificial Sequence
  Description of Artificial Sequence: Synthetic oligonucleotide
cugcugacggaagaguauc

SEQ ID NO: 678096 - RNA, 19 nt, Artificial Sequence
  Description of Artificial Sequence: Synthetic oligonucleotide
ucguggaccacggccuugc

SEQ ID NO: 678097 - RNA, 19 nt, Artificial Sequence
  Description of Artificial Sequence: Synthetic oligonucleotide
ugggugcaucaucauggaa

SEQ ID NO: 678098 - RNA, 19 nt, Artificial Sequence
  Description of Artificial Sequence: Synthetic oligonucleotide
guuuuggcgcuuuacccgu

SEQ ID NO: 678099 - RNA, 19 nt, Artificial Sequence
  Description of Artificial Sequence: Synthetic oligonucleotide
guaguccuugggugcauca

SEQ ID NO: 678100 - RNA, 19 nt, Artificial Sequence
  Description of Artificial Sequence: Synthetic oligonucleotide
cuuuacccguugcugguga

SEQ ID NO: 678101 - RNA, 19 nt, Artificial Sequence
  Description of Artificial Sequence: Synthetic oligonucleotide
ucauagcacuuauccucaa

SEQ ID NO: 678102 - RNA, 19 nt, Artificial Sequence
  Description of Artificial Sequence: Synthetic oligonucleotide
agccuaaguucguguccuc

SEQ ID NO: 678103 - RNA, 19 nt, Artificial Sequence
  Description of Artificial Sequence: Synthetic oligonucleotide
caggcaauacccagaagcu

SEQ ID NO: 678104 - RNA, 19 nt, Artificial Sequence
  Description of Artificial Sequence: Synthetic oligonucleotide
ugaucucgucauagcacuu

SEQ ID NO: 678105 - RNA, 19 nt, Artificial Sequence
  Description of Artificial Sequence: Synthetic oligonucleotide
guaccggucuacacacucc

SEQ ID NO: 678106 - RNA, 19 nt, Artificial Sequence
  Description of Artificial Sequence: Synthetic oligonucleotide
uuccccugugcucgggaaa

SEQ ID NO: 678107 - RNA, 19 nt, Artificial Sequence
  Description of Artificial Sequence: Synthetic oligonucleotide
guccaugcaucagucuggc

SEQ ID NO: 678108 - RNA, 19 nt, Artificial Sequence
  Description of Artificial Sequence: Synthetic oligonucleotide
cagugaugucccacagaug

SEQ ID NO: 678109 - RNA, 19 nt, Artificial Sequence
  Description of Artificial Sequence: Synthetic oligonucleotide
auuuggagggcgacacugu

SEQ ID NO: 678110 - RNA, 19 nt, Artificial Sequence
  Description of Artificial Sequence: Synthetic oligonucleotide
guacuuguauguguugucu

SEQ ID NO: 678111 - RNA, 19 nt, Artificial Sequence
  Description of Artificial Sequence: Synthetic oligonucleotide
aucaaggaguccacuggga

SEQ ID NO: 678112 - RNA, 19 nt, Artificial Sequence
  Description of Artificial Sequence: Synthetic oligonucleotide
gggauuuggagggcgacac

SEQ ID NO: 678113 - RNA, 19 nt, Artificial Sequence
  Description of Artificial Sequence: Synthetic oligonucleotide
agaucggggagagccccuc

SEQ ID NO: 678114 - RNA, 19 nt, Artificial Sequence
  Description of Artificial Sequence: Synthetic oligonucleotide
uagaucggggagagccccu

SEQ ID NO: 678115 - RNA, 19 nt, Artificial Sequence
  Description of Artificial Sequence: Synthetic oligonucleotide
gaucucgucauagcacuua

SEQ ID NO: 678116 - RNA, 19 nt, Artificial Sequence
  Description of Artificial Sequence: Synthetic oligonucleotide
gcaacuucuaccaaccagu

SEQ ID NO: 678117 - RNA, 19 nt, Artificial Sequence
  Description of Artificial Sequence: Synthetic oligonucleotide
cacuccuagugcagugcac

SEQ ID NO: 678118 - RNA, 19 nt, Artificial Sequence
  Description of Artificial Sequence: Synthetic oligonucleotide
cagucuccucugcaaguac

SEQ ID NO: 678119 - RNA, 19 nt, Artificial Sequence
  Description of Artificial Sequence: Synthetic oligonucleotide
gccuaaguucguguccucg

SEQ ID NO: 678120 - RNA, 19 nt, Artificial Sequence
  Description of Artificial Sequence: Synthetic oligonucleotide
ggcgauucccaacuucaca

SEQ ID NO: 678121 - RNA, 19 nt, Artificial Sequence
  Description of Artificial Sequence: Synthetic oligonucleotide
augugccgcuugguggccc

SEQ ID NO: 678122 - RNA, 19 nt, Artificial Sequence
  Description of Artificial Sequence: Synthetic oligonucleotide
caauuagaauguaucucau

SEQ ID NO: 678123 - RNA, 19 nt, Artificial Sequence
  Description of Artificial Sequence: Synthetic oligonucleotide
ggcgcuuuacccguugcug

SEQ ID NO: 678124 - RNA, 19 nt, Artificial Sequence
  Description of Artificial Sequence: Synthetic oligonucleotide
caacacuaacguacucaga

SEQ ID NO: 678125 - RNA, 19 nt, Artificial Sequence
  Description of Artificial Sequence: Synthetic oligonucleotide
gcuguugaccacaguaaac

SEQ ID NO: 678126 - RNA, 19 nt, Artificial Sequence
  Description of Artificial Sequence: Synthetic oligonucleotide
ugugccgcuugguggcccu

SEQ ID NO: 678127 - RNA, 19 nt, Artificial Sequence
  Description of Artificial Sequence: Synthetic oligonucleotide
cuaguauuccaaggaagcu

SEQ ID NO: 678128 - RNA, 19 nt, Artificial Sequence
  Description of Artificial Sequence: Synthetic oligonucleotide
guccucguacuuguaugug

SEQ ID NO: 678129 - RNA, 19 nt, Artificial Sequence
  Description of Artificial Sequence: Synthetic oligonucleotide
acuaacguacucagagcuu

SEQ ID NO: 678130 - RNA, 19 nt, Artificial Sequence
  Description of Artificial Sequence: Synthetic oligonucleotide
gguggcaaggcuuuguguu

SEQ ID NO: 678131 - RNA, 19 nt, Artificial Sequence
  Description of Artificial Sequence: Synthetic oligonucleotide
ggcuguugaccacaguaaa

SEQ ID NO: 678132 - RNA, 19 nt, Artificial Sequence
  Description of Artificial Sequence: Synthetic oligonucleotide
gguagaucggggagagccc

SEQ ID NO: 678133 - RNA, 19 nt, Artificial Sequence
  Description of Artificial Sequence: Synthetic oligonucleotide
gcucgggaaagaugagggc

SEQ ID NO: 678134 - RNA, 19 nt, Artificial Sequence
  Description of Artificial Sequence: Synthetic oligonucleotide
gacacagauaagccuucau

SEQ ID NO: 678135 - RNA, 19 nt, Artificial Sequence
  Description of Artificial Sequence: Synthetic oligonucleotide
uuccacggguguggcauga

SEQ ID NO: 678136 - RNA, 19 nt, Artificial Sequence
  Description of Artificial Sequence: Synthetic oligonucleotide
gaugugccgcuugguggcc

SEQ ID NO: 678137 - RNA, 19 nt, Artificial Sequence
  Description of Artificial Sequence: Synthetic oligonucleotide
accggucuacacacuccac

SEQ ID NO: 678138 - RNA, 19 nt, Artificial Sequence
  Description of Artificial Sequence: Synthetic oligonucleotide
uguccucgucacugugcac

SEQ ID NO: 678139 - RNA, 19 nt, Artificial Sequence
  Description of Artificial Sequence: Synthetic oligonucleotide
uuuuggcgcuuuacccguu

SEQ ID NO: 678140 - RNA, 19 nt, Artificial Sequence
  Description of Artificial Sequence: Synthetic oligonucleotide
agacgaucucucccaucau

SEQ ID NO: 678141 - RNA, 19 nt, Artificial Sequence
  Description of Artificial Sequence: Synthetic oligonucleotide
cugucguggaccacggccu

SEQ ID NO: 678142 - RNA, 19 nt, Artificial Sequence
  Description of Artificial Sequence: Synthetic oligonucleotide
acuuauccucaaagcgcug

SEQ ID NO: 678143 - RNA, 19 nt, Artificial Sequence
  Description of Artificial Sequence: Synthetic oligonucleotide
aaguaccggucuacacacu

SEQ ID NO: 678144 - RNA, 19 nt, Artificial Sequence
  Description of Artificial Sequence: Synthetic oligonucleotide
aaccaccguagggacucga

SEQ ID NO: 678145 - RNA, 19 nt, Artificial Sequence
  Description of Artificial Sequence: Synthetic oligonucleotide
cagcggucagagacacuug

SEQ ID NO: 678146 - RNA, 19 nt, Artificial Sequence
  Description of Artificial Sequence: Synthetic oligonucleotide
aggguagagauggguucca

SEQ ID NO: 678147 - RNA, 19 nt, Artificial Sequence
  Description of Artificial Sequence: Synthetic oligonucleotide
augagugguccagggcugu

SEQ ID NO: 678148 - RNA, 19 nt, Artificial Sequence
  Description of Artificial Sequence: Synthetic oligonucleotide
ggcuggagcguagauggac

SEQ ID NO: 678149 - RNA, 19 nt, Artificial Sequence
  Description of Artificial Sequence: Synthetic oligonucleotide
cuccccuguugcagagaag

SEQ ID NO: 678150 - RNA, 19 nt, Artificial Sequence
  Description of Artificial Sequence: Synthetic oligonucleotide
ggacucgaaucuucccuuc

SEQ ID NO: 678151 - RNA, 19 nt, Artificial Sequence
  Description of Artificial Sequence: Synthetic oligonucleotide
gcugacggaagaguaucca

SEQ ID NO: 678152 - RNA, 19 nt, Artificial Sequence
  Description of Artificial Sequence: Synthetic oligonucleotide
gcuagacagcucugcugug

SEQ ID NO: 678153 - RNA, 19 nt, Artificial Sequence
  Description of Artificial Sequence: Synthetic oligonucleotide
agccucucuaauggucaga

SEQ ID NO: 678154 - RNA, 19 nt, Artificial Sequence
  Description of Artificial Sequence: Synthetic oligonucleotide
gcuggagcguagauggaca

SEQ ID NO: 678155 - RNA, 19 nt, Artificial Sequence
  Description of Artificial Sequence: Synthetic oligonucleotide
ggguuggaugugccgcuug

SEQ ID NO: 678156 - RNA, 19 nt, Artificial Sequence
  Description of Artificial Sequence: Synthetic oligonucleotide
cuuugcugaugaaccgagu

SEQ ID NO: 678157 - RNA, 19 nt, Artificial Sequence
  Description of Artificial Sequence: Synthetic oligonucleotide
gggcguggugacaaagcug

SEQ ID NO: 678158 - RNA, 19 nt, Artificial Sequence
  Description of Artificial Sequence: Synthetic oligonucleotide
caggcgggcuggagcguag

SEQ ID NO: 678159 - RNA, 19 nt, Artificial Sequence
  Description of Artificial Sequence: Synthetic oligonucleotide
cugcaaguaccggucuaca

SEQ ID NO: 678160 - RNA, 19 nt, Artificial Sequence
  Description of Artificial Sequence: Synthetic oligonucleotide
gccucucuaauggucagaa

SEQ ID NO: 678161 - RNA, 19 nt, Artificial Sequence
  Description of Artificial Sequence: Synthetic oligonucleotide
cucaagacgcagggcguga

SEQ ID NO: 678162 - RNA, 19 nt, Artificial Sequence
  Description of Artificial Sequence: Synthetic oligonucleotide
cucugcaaguaccggucua

SEQ ID NO: 678163 - RNA, 19 nt, Artificial Sequence
  Description of Artificial Sequence: Synthetic oligonucleotide
aucguaucgcugagccccu

SEQ ID NO: 678164 - RNA, 19 nt, Artificial Sequence
  Description of Artificial Sequence: Synthetic oligonucleotide
gcuuuacccguugcuggug

SEQ ID NO: 678165 - RNA, 19 nt, Artificial Sequence
  Description of Artificial Sequence: Synthetic oligonucleotide
cuggagcuuguaucggggu

SEQ ID NO: 678166 - RNA, 19 nt, Artificial Sequence
  Description of Artificial Sequence: Synthetic oligonucleotide
caaccaccguagggacucg

SEQ ID NO: 678167 - RNA, 19 nt, Artificial Sequence
  Description of Artificial Sequence: Synthetic oligonucleotide
agggagcuuaugggacuca

SEQ ID NO: 678168 - RNA, 19 nt, Artificial Sequence
  Description of Artificial Sequence: Synthetic oligonucleotide
gucguggaccacggccuug

SEQ ID NO: 678169 - RNA, 19 nt, Artificial Sequence
  Description of Artificial Sequence: Synthetic oligonucleotide
accaccguagggacucgaa

SEQ ID NO: 678170 - RNA, 19 nt, Artificial Sequence
  Description of Artificial Sequence: Synthetic oligonucleotide
gcgggcuggagcguagaug

SEQ ID NO: 678171 - RNA, 19 nt, Artificial Sequence
  Description of Artificial Sequence: Synthetic oligonucleotide
cccaucauucguaccaagu

SEQ ID NO: 678172 - RNA, 19 nt, Artificial Sequence
  Description of Artificial Sequence: Synthetic oligonucleotide
gcuggcagaugcccacaca

SEQ ID NO: 678173 - RNA, 19 nt, Artificial Sequence
  Description of Artificial Sequence: Synthetic oligonucleotide
gggaaagaugagggcucug

SEQ ID NO: 678174 - RNA, 19 nt, Artificial Sequence
  Description of Artificial Sequence: Synthetic oligonucleotide
ccaagcaguguaguauaga

SEQ ID NO: 678175 - RNA, 19 nt, Artificial Sequence
  Description of Artificial Sequence: Synthetic oligonucleotide
gggacucgaaucuucccuu

SEQ ID NO: 678176 - RNA, 19 nt, Artificial Sequence
  Description of Artificial Sequence: Synthetic oligonucleotide
cguaccaaguccucguacu

SEQ ID NO: 678177 - RNA, 19 nt, Artificial Sequence
  Description of Artificial Sequence: Synthetic oligonucleotide
gcgugaggucguuguaaga

SEQ ID NO: 678178 - RNA, 19 nt, Artificial Sequence
  Description of Artificial Sequence: Synthetic oligonucleotide
gagcguagauggacaggcu

SEQ ID NO: 678179 - RNA, 19 nt, Artificial Sequence
  Description of Artificial Sequence: Synthetic oligonucleotide
cagugcuguucuggguuca

SEQ ID NO: 678180 - RNA, 19 nt, Artificial Sequence
  Description of Artificial Sequence: Synthetic oligonucleotide
accgucagguggagacaca

SEQ ID NO: 678181 - RNA, 19 nt, Artificial Sequence
  Description of Artificial Sequence: Synthetic oligonucleotide
gggcgugaggucguuguaa

SEQ ID NO: 678182 - RNA, 19 nt, Artificial Sequence
  Description of Artificial Sequence: Synthetic oligonucleotide
gggagcuuaugggacucaa

SEQ ID NO: 678183 - RNA, 19 nt, Artificial Sequence
  Description of Artificial Sequence: Synthetic oligonucleotide
ggcugucguggaccacggc

SEQ ID NO: 678184 - RNA, 19 nt, Artificial Sequence
  Description of Artificial Sequence: Synthetic oligonucleotide
ggauuuggagggcgacacu

SEQ ID NO: 678185 - RNA, 19 nt, Artificial Sequence
  Description of Artificial Sequence: Synthetic oligonucleotide
gugaccauggugggcggau

SEQ ID NO: 678186 - RNA, 19 nt, Artificial Sequence
  Description of Artificial Sequence: Synthetic oligonucleotide
cgggguaccagucuccucu

SEQ ID NO: 678187 - RNA, 19 nt, Artificial Sequence
  Description of Artificial Sequence: Synthetic oligonucleotide
gggcggaugaagagccaga

SEQ ID NO: 678188 - RNA, 19 nt, Artificial Sequence
  Description of Artificial Sequence: Synthetic oligonucleotide
ccucguacuuguauguguu

SEQ ID NO: 678189 - RNA, 19 nt, Artificial Sequence
  Description of Artificial Sequence: Synthetic oligonucleotide
cguaucgcugagccccuuc

SEQ ID NO: 678190 - RNA, 19 nt, Artificial Sequence
  Description of Artificial Sequence: Synthetic oligonucleotide
ggcggaugaagagccagau

SEQ ID NO: 678191 - RNA, 19 nt, Artificial Sequence
  Description of Artificial Sequence: Synthetic oligonucleotide
ucguaucgcugagccccuu

SEQ ID NO: 678192 - RNA, 19 nt, Artificial Sequence
  Description of Artificial Sequence: Synthetic oligonucleotide
cugugggcguggugacaaa

SEQ ID NO: 678193 - RNA, 19 nt, Artificial Sequence
  Description of Artificial Sequence: Synthetic oligonucleotide
gcguggugacaaagcugcc

SEQ ID NO: 678194 - RNA, 19 nt, Artificial Sequence
  Description of Artificial Sequence: Synthetic oligonucleotide
ggcucaagacgcagggcgu

SEQ ID NO: 678195 - RNA, 19 nt, Artificial Sequence
  Description of Artificial Sequence: Synthetic oligonucleotide
gcagggcgugaggucguug

SEQ ID NO: 678196 - RNA, 19 nt, Artificial Sequence
  Description of Artificial Sequence: Synthetic oligonucleotide
gguaggcgauucccaacuu

SEQ ID NO: 678197 - RNA, 19 nt, Artificial Sequence
  Description of Artificial Sequence: Synthetic oligonucleotide
ggcuccaauccagcaggcu

SEQ ID NO: 678198 - RNA, 19 nt, Artificial Sequence
  Description of Artificial Sequence: Synthetic oligonucleotide
ccucugcaaguaccggucu

SEQ ID NO: 678199 - RNA, 19 nt, Artificial Sequence
  Description of Artificial Sequence: Synthetic oligonucleotide
ccaccguagggacucgaau

SEQ ID NO: 678200 - RNA, 19 nt, Artificial Sequence
  Description of Artificial Sequence: Synthetic oligonucleotide
cgcuuuacccguugcuggu

SEQ ID NO: 678201 - RNA, 19 nt, Artificial Sequence
  Description of Artificial Sequence: Synthetic oligonucleotide
gccgcuugguggcccuugu

SEQ ID NO: 678202 - RNA, 19 nt, Artificial Sequence
  Description of Artificial Sequence: Synthetic oligonucleotide
cugacagguuuuggcgcuu

SEQ ID NO: 678203 - RNA, 19 nt, Artificial Sequence
  Description of Artificial Sequence: Synthetic oligonucleotide
ggcgggcuggagcguagau

SEQ ID NO: 678204 - RNA, 19 nt, Artificial Sequence
  Description of Artificial Sequence: Synthetic oligonucleotide
gggguuggaugugccgcuu

SEQ ID NO: 678205 - RNA, 19 nt, Artificial Sequence
  Description of Artificial Sequence: Synthetic oligonucleotide
ccccugugcucgggaaaga

SEQ ID NO: 678206 - RNA, 19 nt, Artificial Sequence
  Description of Artificial Sequence: Synthetic oligonucleotide
cugugacgucacccuccuu

SEQ ID NO: 678207 - RNA, 19 nt, Artificial Sequence
  Description of Artificial Sequence: Synthetic oligonucleotide
cacggccuugcagcagcuu

SEQ ID NO: 678208 - RNA, 19 nt, Artificial Sequence
  Description of Artificial Sequence: Synthetic oligonucleotide
cgcagggcgugaggucguu

SEQ ID NO: 678209 - RNA, 19 nt, Artificial Sequence
  Description of Artificial Sequence: Synthetic oligonucleotide
aauacaccgacccacaugg

SEQ ID NO: 678210 - RNA, 19 nt, Artificial Sequence
  Description of Artificial Sequence: Synthetic oligonucleotide
ucuuaaaauacaccgaccc

SEQ ID NO: 678211 - RNA, 19 nt, Artificial Sequence
  Description of Artificial Sequence: Synthetic oligonucleotide
uuuaugguaagcauauuag

SEQ ID NO: 678212 - RNA, 19 nt, Artificial Sequence
  Description of Artificial Sequence: Synthetic oligonucleotide
uaugguaagcauauuagag

SEQ ID NO: 678213 - RNA, 19 nt, Artificial Sequence
  Description of Artificial Sequence: Synthetic oligonucleotide
agaaguaucguccugcacg

SEQ ID NO: 678214 - RNA, 19 nt, Artificial Sequence
  Description of Artificial Sequence: Synthetic oligonucleotide
aacaaugagcaccuggcgg

SEQ ID NO: 678215 - RNA, 19 nt, Artificial Sequence
  Description of Artificial Sequence: Synthetic oligonucleotide
ugugaaagugcccaccugg

SEQ ID NO: 678216 - RNA, 19 nt, Artificial Sequence
  Description of Artificial Sequence: Synthetic oligonucleotide
gacgaaagugcacagacag

SEQ ID NO: 678217 - RNA, 19 nt, Artificial Sequence
  Description of Artificial Sequence: Synthetic oligonucleotide
acucauugagggcauagcc

SEQ ID NO: 678218 - RNA, 19 nt, Artificial Sequence
  Description of Artificial Sequence: Synthetic oligonucleotide
gacaggaugucauauacug

SEQ ID NO: 678219 - RNA, 19 nt, Artificial Sequence
  Description of Artificial Sequence: Synthetic oligonucleotide
cuucgugugcaaaugaagg

SEQ ID NO: 678220 - RNA, 19 nt, Artificial Sequence
  Description of Artificial Sequence: Synthetic oligonucleotide
uucgguugggaccaggagg

SEQ ID NO: 678221 - RNA, 19 nt, Artificial Sequence
  Description of Artificial Sequence: Synthetic oligonucleotide
guauacuucaugcuggaag

SEQ ID NO: 678222 - RNA, 19 nt, Artificial Sequence
  Description of Artificial Sequence: Synthetic oligonucleotide
uuaaaauacaccgacccac

SEQ ID NO: 678223 - RNA, 19 nt, Artificial Sequence
  Description of Artificial Sequence: Synthetic oligonucleotide
ugaaggaauuuguugaucu

SEQ ID NO: 678224 - RNA, 19 nt, Artificial Sequence
  Description of Artificial Sequence: Synthetic oligonucleotide
uccuguacugcucaauggg

SEQ ID NO: 678225 - RNA, 19 nt, Artificial Sequence
  Description of Artificial Sequence: Synthetic oligonucleotide
uggguauacuucaugcugg

SEQ ID NO: 678226 - RNA, 19 nt, Artificial Sequence
  Description of Artificial Sequence: Synthetic oligonucleotide
aacaaggcagcaguguggc

SEQ ID NO: 678227 - RNA, 19 nt, Artificial Sequence
  Description of Artificial Sequence: Synthetic oligonucleotide
ucaauggguagccacagga

SEQ ID NO: 678228 - RNA, 19 nt, Artificial Sequence
  Description of Artificial Sequence: Synthetic oligonucleotide
acaaugagcaccuggcggg

SEQ ID NO: 678229 - RNA, 19 nt, Artificial Sequence
  Description of Artificial Sequence: Synthetic oligonucleotide
auauuagagugugagcgcc

SEQ ID NO: 678230 - RNA, 19 nt, Artificial Sequence
  Description of Artificial Sequence: Synthetic oligonucleotide
gcauauuagagugugagcg

SEQ ID NO: 678231 - RNA, 19 nt, Artificial Sequence
  Description of Artificial Sequence: Synthetic oligonucleotide
agaguugcacaacugagug

SEQ ID NO: 678232 - RNA, 19 nt, Artificial Sequence
  Description of Artificial Sequence: Synthetic oligonucleotide
uccgauacccaccuuuggg

SEQ ID NO: 678233 - RNA, 19 nt, Artificial Sequence
  Description of Artificial Sequence: Synthetic oligonucleotide
ucaggaucuuaaaauacac

SEQ ID NO: 678234 - RNA, 19 nt, Artificial Sequence
  Description of Artificial Sequence: Synthetic oligonucleotide
aaauacaccgacccacaug

SEQ ID NO: 678235 - RNA, 19 nt, Artificial Sequence
  Description of Artificial Sequence: Synthetic oligonucleotide
acaacugagugcauggggc

SEQ ID NO: 678236 - RNA, 19 nt, Artificial Sequence
  Description of Artificial Sequence: Synthetic oligonucleotide
agaacgcuugucuuguagg

SEQ ID NO: 678237 - RNA, 19 nt, Artificial Sequence
  Description of Artificial Sequence: Synthetic oligonucleotide
augguaagcauauuagagu

SEQ ID NO: 678238 - RNA, 19 nt, Artificial Sequence
  Description of Artificial Sequence: Synthetic oligonucleotide
ucuacggugacaugcuugc

SEQ ID NO: 678239 - RNA, 19 nt, Artificial Sequence
  Description of Artificial Sequence: Synthetic oligonucleotide
agagcaugguccuuaugcg

SEQ ID NO: 678240 - RNA, 19 nt, Artificial Sequence
  Description of Artificial Sequence: Synthetic oligonucleotide
augcuugccaugguaaucc

SEQ ID NO: 678241 - RNA, 19 nt, Artificial Sequence
  Description of Artificial Sequence: Synthetic oligonucleotide
gaacgcuugucuuguaggg

SEQ ID NO: 678242 - RNA, 19 nt, Artificial Sequence
  Description of Artificial Sequence: Synthetic oligonucleotide
uaguaccacacgcugcugg

SEQ ID NO: 678243 - RNA, 19 nt, Artificial Sequence
  Description of Artificial Sequence: Synthetic oligonucleotide
uauacugucucagcuguag

SEQ ID NO: 678244 - RNA, 19 nt, Artificial Sequence
  Description of Artificial Sequence: Synthetic oligonucleotide
aaagucucuaccccauaga

SEQ ID NO: 678245 - RNA, 19 nt, Artificial Sequence
  Description of Artificial Sequence: Synthetic oligonucleotide
aguagaugggcuguggguc

SEQ ID NO: 678246 - RNA, 19 nt, Artificial Sequence
  Description of Artificial Sequence: Synthetic oligonucleotide
cauauuagagugugagcgc

SEQ ID NO: 678247 - RNA, 19 nt, Artificial Sequence
  Description of Artificial Sequence: Synthetic oligonucleotide
agguuguuggccucugcgc

SEQ ID NO: 678248 - RNA, 19 nt, Artificial Sequence
  Description of Artificial Sequence: Synthetic oligonucleotide
agguauccuucacaguggc

SEQ ID NO: 678249 - RNA, 19 nt, Artificial Sequence
  Description of Artificial Sequence: Synthetic oligonucleotide
uggugaaaccaacucuugc

SEQ ID NO: 678250 - RNA, 19 nt, Artificial Sequence
  Description of Artificial Sequence: Synthetic oligonucleotide
cagacgaaagugcacagac

SEQ ID NO: 678251 - RNA, 19 nt, Artificial Sequence
  Description of Artificial Sequence: Synthetic oligonucleotide
uucgugugcaaaugaagga

SEQ ID NO: 678252 - RNA, 19 nt, Artificial Sequence
  Description of Artificial Sequence: Synthetic oligonucleotide
caggaucuuaaaauacacc

SEQ ID NO: 678253 - RNA, 19 nt, Artificial Sequence
  Description of Artificial Sequence: Synthetic oligonucleotide
aguaucguccugcacgaug

SEQ ID NO: 678254 - RNA, 19 nt, Artificial Sequence
  Description of Artificial Sequence: Synthetic oligonucleotide
gaugccuaggccaggggcg

SEQ ID NO: 678255 - RNA, 19 nt, Artificial Sequence
  Description of Artificial Sequence: Synthetic oligonucleotide
uacaccgacccacauggca

SEQ ID NO: 678256 - RNA, 19 nt, Artificial Sequence
  Description of Artificial Sequence: Synthetic oligonucleotide
agucccuucugcucauggc

SEQ ID NO: 678257 - RNA, 19 nt, Artificial Sequence
  Description of Artificial Sequence: Synthetic oligonucleotide
gauuauugguuuuaccacu

SEQ ID NO: 678258 - RNA, 19 nt, Artificial Sequence
  Description of Artificial Sequence: Synthetic oligonucleotide
aguaccacacgcugcuggg

SEQ ID NO: 678259 - RNA, 19 nt, Artificial Sequence
  Description of Artificial Sequence: Synthetic oligonucleotide
cuuaugcgcaucuggcagg

SEQ ID NO: 678260 - RNA, 19 nt, Artificial Sequence
  Description of Artificial Sequence: Synthetic oligonucleotide
uaggauuauugguuuuacc

SEQ ID NO: 678261 - RNA, 19 nt, Artificial Sequence
  Description of Artificial Sequence: Synthetic oligonucleotide
guucaaggguccaaaagcc

SEQ ID NO: 678262 - RNA, 19 nt, Artificial Sequence
  Description of Artificial Sequence: Synthetic oligonucleotide
ucaaggaugcagaacucau

SEQ ID NO: 678263 - RNA, 19 nt, Artificial Sequence
  Description of Artificial Sequence: Synthetic oligonucleotide
gaacaaggcagcagugugg

SEQ ID NO: 678264 - RNA, 19 nt, Artificial Sequence
  Description of Artificial Sequence: Synthetic oligonucleotide
ggauuauugguuuuaccac

SEQ ID NO: 678265 - RNA, 19 nt, Artificial Sequence
  Description of Artificial Sequence: Synthetic oligonucleotide
ugcgcaucuggcaggaucu

SEQ ID NO: 678266 - RNA, 19 nt, Artificial Sequence
  Description of Artificial Sequence: Synthetic oligonucleotide
aguucgugggguucgguug

SEQ ID NO: 678267 - RNA, 19 nt, Artificial Sequence
  Description of Artificial Sequence: Synthetic oligonucleotide
gaaguaucguccugcacga

SEQ ID NO: 678268 - RNA, 19 nt, Artificial Sequence
  Description of Artificial Sequence: Synthetic oligonucleotide
gugaagaacgcuugucuug

SEQ ID NO: 678269 - RNA, 19 nt, Artificial Sequence
  Description of Artificial Sequence: Synthetic oligonucleotide
cuggucuacggugacaugc

SEQ ID NO: 678270 - RNA, 19 nt, Artificial Sequence
  Description of Artificial Sequence: Synthetic oligonucleotide
aagaguugcacaacugagu

SEQ ID NO: 678271 - RNA, 19 nt, Artificial Sequence
  Description of Artificial Sequence: Synthetic oligonucleotide
ugugggucacagcaaucag

SEQ ID NO: 678272 - RNA, 19 nt, Artificial Sequence
  Description of Artificial Sequence: Synthetic oligonucleotide
acucucacggcgaauuggc

SEQ ID NO: 678273 - RNA, 19 nt, Artificial Sequence
  Description of Artificial Sequence: Synthetic oligonucleotide
ugaagaacgcuugucuugu

SEQ ID NO: 678274 - RNA, 19 nt, Artificial Sequence
  Description of Artificial Sequence: Synthetic oligonucleotide
gagacacuuggcugagugg

SEQ ID NO: 678275 - RNA, 19 nt, Artificial Sequence
  Description of Artificial Sequence: Synthetic oligonucleotide
auagaggugccagaugaag

SEQ ID NO: 678276 - RNA, 19 nt, Artificial Sequence
  Description of Artificial Sequence: Synthetic oligonucleotide
uccacgcgccacuugagag

SEQ ID NO: 678277 - RNA, 19 nt, Artificial Sequence
  Description of Artificial Sequence: Synthetic oligonucleotide
gauucuugcggauguccug

SEQ ID NO: 678278 - RNA, 19 nt, Artificial Sequence
  Description of Artificial Sequence: Synthetic oligonucleotide
ugcagcgccuuuaugguaa

SEQ ID NO: 678279 - RNA, 19 nt, Artificial Sequence
  Description of Artificial Sequence: Synthetic oligonucleotide
ucucggacagcaucauaag

SEQ ID NO: 678280 - RNA, 19 nt, Artificial Sequence
  Description of Artificial Sequence: Synthetic oligonucleotide
uuugggguaccgcccgagg

SEQ ID NO: 678281 - RNA, 19 nt, Artificial Sequence
  Description of Artificial Sequence: Synthetic oligonucleotide
gaucugguuucgcaugccc

SEQ ID NO: 678282 - RNA, 19 nt, Artificial Sequence
  Description of Artificial Sequence: Synthetic oligonucleotide
aaccucauggggacuacuc

SEQ ID NO: 678283 - RNA, 19 nt, Artificial Sequence
  Description of Artificial Sequence: Synthetic oligonucleotide
cucaggaucuuaaaauaca

SEQ ID NO: 678284 - RNA, 19 nt, Artificial Sequence
  Description of Artificial Sequence: Synthetic oligonucleotide
uaagcauauuagaguguga

SEQ ID NO: 678285 - RNA, 19 nt, Artificial Sequence
  Description of Artificial Sequence: Synthetic oligonucleotide
gacacugacccacacgcuc

SEQ ID NO: 678286 - RNA, 19 nt, Artificial Sequence
  Description of Artificial Sequence: Synthetic oligonucleotide
acggagagacacuuggcug

SEQ ID NO: 678287 - RNA, 19 nt, Artificial Sequence
  Description of Artificial Sequence: Synthetic oligonucleotide
cuuaggugccugcagucag

SEQ ID NO: 678288 - RNA, 19 nt, Artificial Sequence
  Description of Artificial Sequence: Synthetic oligonucleotide
ugcgcaguuuccgugaaga

SEQ ID NO: 678289 - RNA, 19 nt, Artificial Sequence
  Description of Artificial Sequence: Synthetic oligonucleotide
cuuaaaauacaccgaccca

SEQ ID NO: 678290 - RNA, 19 nt, Artificial Sequence
  Description of Artificial Sequence: Synthetic oligonucleotide
caauggguagccacaggag

SEQ ID NO: 678291 - RNA, 19 nt, Artificial Sequence
  Description of Artificial Sequence: Synthetic oligonucleotide
agcgggagaugggagacgc

SEQ ID NO: 678292 - RNA, 19 nt, Artificial Sequence
  Description of Artificial Sequence: Synthetic oligonucleotide
gcucauggccccuugaugc

SEQ ID NO: 678293 - RNA, 19 nt, Artificial Sequence
  Description of Artificial Sequence: Synthetic oligonucleotide
ugcucauggccccuugaug

SEQ ID NO: 678294 - RNA, 19 nt, Artificial Sequence
  Description of Artificial Sequence: Synthetic oligonucleotide
ugucacaauggguucccca

SEQ ID NO: 678295 - RNA, 19 nt, Artificial Sequence
  Description of Artificial Sequence: Synthetic oligonucleotide
guggacgacccaaaggagg

SEQ ID NO: 678296 - RNA, 19 nt, Artificial Sequence
  Description of Artificial Sequence: Synthetic oligonucleotide
ucucacggcgaauuggcaa

SEQ ID NO: 678297 - RNA, 19 nt, Artificial Sequence
  Description of Artificial Sequence: Synthetic oligonucleotide
uauuagagugugagcgccu

SEQ ID NO: 678298 - RNA, 19 nt, Artificial Sequence
  Description of Artificial Sequence: Synthetic oligonucleotide
cucacggcgaauuggcaac

SEQ ID NO: 678299 - RNA, 19 nt, Artificial Sequence
  Description of Artificial Sequence: Synthetic oligonucleotide
gaguugcacaacugagugc

SEQ ID NO: 678300 - RNA, 19 nt, Artificial Sequence
  Description of Artificial Sequence: Synthetic oligonucleotide
guucgugggguucgguugg

SEQ ID NO: 678301 - RNA, 19 nt, Artificial Sequence
  Description of Artificial Sequence: Synthetic oligonucleotide
auacccaccuuugggguac

SEQ ID NO: 678302 - RNA, 19 nt, Artificial Sequence
  Description of Artificial Sequence: Synthetic oligonucleotide
ugagacacggagagacacu

SEQ ID NO: 678303 - RNA, 19 nt, Artificial Sequence
  Description of Artificial Sequence: Synthetic oligonucleotide
uggguagaucuuaggugcc

SEQ ID NO: 678304 - RNA, 19 nt, Artificial Sequence
  Description of Artificial Sequence: Synthetic oligonucleotide
ucccggaacccuuggaaga

SEQ ID NO: 678305 - RNA, 19 nt, Artificial Sequence
  Description of Artificial Sequence: Synthetic oligonucleotide
gaggaguucgugggguucg

SEQ ID NO: 678306 - RNA, 19 nt, Artificial Sequence
  Description of Artificial Sequence: Synthetic oligonucleotide
ggaagaguugcacaacuga

SEQ ID NO: 678307 - RNA, 19 nt, Artificial Sequence
  Description of Artificial Sequence: Synthetic oligonucleotide
uggucuacggugacaugcu

SEQ ID NO: 678308 - RNA, 19 nt, Artificial Sequence
  Description of Artificial Sequence: Synthetic oligonucleotide
ucauggggacuacucgcug

SEQ ID NO: 678309 - RNA, 19 nt, Artificial Sequence
  Description of Artificial Sequence: Synthetic oligonucleotide
cuaggauuauugguuuuac

SEQ ID NO: 678310 - RNA, 19 nt, Artificial Sequence
  Description of Artificial Sequence: Synthetic oligonucleotide
uuagagugugagcgccuug

SEQ ID NO: 678311 - RNA, 19 nt, Artificial Sequence
  Description of Artificial Sequence: Synthetic oligonucleotide
acggcgaauuggcaacagg

SEQ ID NO: 678312 - RNA, 19 nt, Artificial Sequence
  Description of Artificial Sequence: Synthetic oligonucleotide
cuacucgcugucucugugc

SEQ ID NO: 678313 - RNA, 19 nt, Artificial Sequence
  Description of Artificial Sequence: Synthetic oligonucleotide
agcugugucacaauggguu

SEQ ID NO: 678314 - RNA, 19 nt, Artificial Sequence
  Description of Artificial Sequence: Synthetic oligonucleotide
uggugcugccguccgauac

SEQ ID NO: 678315 - RNA, 19 nt, Artificial Sequence
  Description of Artificial Sequence: Synthetic oligonucleotide
aacgccgggacgggaggcc

SEQ ID NO: 678316 - RNA, 19 nt, Artificial Sequence
  Description of Artificial Sequence: Synthetic oligonucleotide
uagaucuuaggugccugca

SEQ ID NO: 678317 - RNA, 19 nt, Artificial Sequence
  Description of Artificial Sequence: Synthetic oligonucleotide
ucgcuucgugugcaaauga

SEQ ID NO: 678318 - RNA, 19 nt, Artificial Sequence
  Description of Artificial Sequence: Synthetic oligonucleotide
uggccaaccggucucggau

SEQ ID NO: 678319 - RNA, 19 nt, Artificial Sequence
  Description of Artificial Sequence: Synthetic oligonucleotide
uuaggugccugcagucagu

SEQ ID NO: 678320 - RNA, 19 nt, Artificial Sequence
  Description of Artificial Sequence: Synthetic oligonucleotide
ugggguucgguugggacca

SEQ ID NO: 678321 - RNA, 19 nt, Artificial Sequence
  Description of Artificial Sequence: Synthetic oligonucleotide
ugcagucaguccugggucu

SEQ ID NO: 678322 - RNA, 19 nt, Artificial Sequence
  Description of Artificial Sequence: Synthetic oligonucleotide
gagcaguguccuuucuccc

SEQ ID NO: 678323 - RNA, 19 nt, Artificial Sequence
  Description of Artificial Sequence: Synthetic oligonucleotide
cuggugaaaccaacucuug

SEQ ID NO: 678324 - RNA, 19 nt, Artificial Sequence
  Description of Artificial Sequence: Synthetic oligonucleotide
guucgguugggaccaggag

SEQ ID NO: 678325 - RNA, 19 nt, Artificial Sequence
  Description of Artificial Sequence: Synthetic oligonucleotide
ccuuaugcgcaucuggcag

SEQ ID NO: 678326 - RNA, 19 nt, Artificial Sequence
  Description of Artificial Sequence: Synthetic oligonucleotide
ccgauacccaccuuugggg

SEQ ID NO: 678327 - RNA, 19 nt, Artificial Sequence
  Description of Artificial Sequence: Synthetic oligonucleotide
ugcccucucggacagcauc

SEQ ID NO: 678328 - RNA, 19 nt, Artificial Sequence
  Description of Artificial Sequence: Synthetic oligonucleotide
guaucguccugcacgauga

SEQ ID NO: 678329 - RNA, 19 nt, Artificial Sequence
  Description of Artificial Sequence: Synthetic oligonucleotide
ugaggcgcccgucuuuccu

SEQ ID NO: 678330 - RNA, 19 nt, Artificial Sequence
  Description of Artificial Sequence: Synthetic oligonucleotide
cacucucacggcgaauugg

SEQ ID NO: 678331 - RNA, 19 nt, Artificial Sequence
  Description of Artificial Sequence: Synthetic oligonucleotide
gggagcgacaugcagcgcc

SEQ ID NO: 678332 - RNA, 19 nt, Artificial Sequence
  Description of Artificial Sequence: Synthetic oligonucleotide
cugcagucaguccuggguc

SEQ ID NO: 678333 - RNA, 19 nt, Artificial Sequence
  Description of Artificial Sequence: Synthetic oligonucleotide
gacaugcuugccaugguaa

SEQ ID NO: 678334 - RNA, 19 nt, Artificial Sequence
  Description of Artificial Sequence: Synthetic oligonucleotide
ggugaaaccaacucuugcu

SEQ ID NO: 678335 - RNA, 19 nt, Artificial Sequence
  Description of Artificial Sequence: Synthetic oligonucleotide
acaugcuugccaugguaau

SEQ ID NO: 678336 - RNA, 19 nt, Artificial Sequence
  Description of Artificial Sequence: Synthetic oligonucleotide
uuccgugaagaacgcuugu

SEQ ID NO: 678337 - RNA, 19 nt, Artificial Sequence
  Description of Artificial Sequence: Synthetic oligonucleotide
acgaaagugcacagacagg

SEQ ID NO: 678338 - RNA, 19 nt, Artificial Sequence
  Description of Artificial Sequence: Synthetic oligonucleotide
guccgauacccaccuuugg

SEQ ID NO: 678339 - RNA, 19 nt, Artificial Sequence
  Description of Artificial Sequence: Synthetic oligonucleotide
gucuacggugacaugcuug

SEQ ID NO: 678340 - RNA, 19 nt, Artificial Sequence
  Description of Artificial Sequence: Synthetic oligonucleotide
gagcgggaaggggagaccc

SEQ ID NO: 678341 - RNA, 19 nt, Artificial Sequence
  Description of Artificial Sequence: Synthetic oligonucleotide
ugccguccgauacccaccu

SEQ ID NO: 678342 - RNA, 19 nt, Artificial Sequence
  Description of Artificial Sequence: Synthetic oligonucleotide
caccucagaugugaagcgg

SEQ ID NO: 678343 - RNA, 19 nt, Artificial Sequence
  Description of Artificial Sequence: Synthetic oligonucleotide
auggguagccacaggaggu

SEQ ID NO: 678344 - RNA, 19 nt, Artificial Sequence
  Description of Artificial Sequence: Synthetic oligonucleotide
guagccacaggaggucccg

SEQ ID NO: 678345 - RNA, 19 nt, Artificial Sequence
  Description of Artificial Sequence: Synthetic oligonucleotide
ggaucuuaaaauacaccga

SEQ ID NO: 678346 - RNA, 19 nt, Artificial Sequence
  Description of Artificial Sequence: Synthetic oligonucleotide
gggagaaguaucguccugc

SEQ ID NO: 678347 - RNA, 19 nt, Artificial Sequence
  Description of Artificial Sequence: Synthetic oligonucleotide
ccaccuuugggguaccgcc

SEQ ID NO: 678348 - RNA, 19 nt, Artificial Sequence
  Description of Artificial Sequence: Synthetic oligonucleotide
uccgugaagaacgcuuguc

SEQ ID NO: 678349 - RNA, 19 nt, Artificial Sequence
  Description of Artificial Sequence: Synthetic oligonucleotide
uccccagacgaaagugcac

SEQ ID NO: 678350 - RNA, 19 nt, Artificial Sequence
  Description of Artificial Sequence: Synthetic oligonucleotide
gcuucgugugcaaaugaag

SEQ ID NO: 678351 - RNA, 19 nt, Artificial Sequence
  Description of Artificial Sequence: Synthetic oligonucleotide
cucgcuucgugugcaaaug

SEQ ID NO: 678352 - RNA, 19 nt, Artificial Sequence
  Description of Artificial Sequence: Synthetic oligonucleotide
guaccgcccgaggaguucg

SEQ ID NO: 678353 - RNA, 19 nt, Artificial Sequence
  Description of Artificial Sequence: Synthetic oligonucleotide
ccaagcacauuggaugugg

SEQ ID NO: 678354 - RNA, 19 nt, Artificial Sequence
  Description of Artificial Sequence: Synthetic oligonucleotide
aucauaagccuuggccaug

SEQ ID NO: 678355 - RNA, 19 nt, Artificial Sequence
  Description of Artificial Sequence: Synthetic oligonucleotide
gucuuguagggagcgggag

SEQ ID NO: 678356 - RNA, 19 nt, Artificial Sequence
  Description of Artificial Sequence: Synthetic oligonucleotide
cugccguccgauacccacc

SEQ ID NO: 678357 - RNA, 19 nt, Artificial Sequence
  Description of Artificial Sequence: Synthetic oligonucleotide
gauacccaccuuuggggua

SEQ ID NO: 678358 - RNA, 19 nt, Artificial Sequence
  Description of Artificial Sequence: Synthetic oligonucleotide
cggcgaauuggcaacaggc

SEQ ID NO: 678359 - RNA, 19 nt, Artificial Sequence
  Description of Artificial Sequence: Synthetic oligonucleotide
cacgcucaggaucuuaaaa

SEQ ID NO: 678360 - RNA, 19 nt, Artificial Sequence
  Description of Artificial Sequence: Synthetic oligonucleotide
accucagaugugaagcgga

SEQ ID NO: 678361 - RNA, 19 nt, Artificial Sequence
  Description of Artificial Sequence: Synthetic oligonucleotide
ccagaugaaggagacuccc

SEQ ID NO: 678362 - RNA, 19 nt, Artificial Sequence
  Description of Artificial Sequence: Synthetic oligonucleotide
auuagagugugagcgccuu

SEQ ID NO: 678363 - RNA, 19 nt, Artificial Sequence
  Description of Artificial Sequence: Synthetic oligonucleotide
caugagacacggagagaca

SEQ ID NO: 678364 - RNA, 19 nt, Artificial Sequence
  Description of Artificial Sequence: Synthetic oligonucleotide
ugcauggggcccacgccuc

SEQ ID NO: 678365 - RNA, 19 nt, Artificial Sequence
  Description of Artificial Sequence: Synthetic oligonucleotide
agacgaaagugcacagaca

SEQ ID NO: 678366 - RNA, 19 nt, Artificial Sequence
  Description of Artificial Sequence: Synthetic oligonucleotide
caguggguagaucuuaggu

SEQ ID NO: 678367 - RNA, 19 nt, Artificial Sequence
  Description of Artificial Sequence: Synthetic oligonucleotide
ucucggggcgcgaugccua

SEQ ID NO: 678368 - RNA, 19 nt, Artificial Sequence
  Description of Artificial Sequence: Synthetic oligonucleotide
acaccgacccacauggcau

SEQ ID NO: 678369 - RNA, 19 nt, Artificial Sequence
  Description of Artificial Sequence: Synthetic oligonucleotide
caugcagcgccuuuauggu

SEQ ID NO: 678370 - RNA, 19 nt, Artificial Sequence
  Description of Artificial Sequence: Synthetic oligonucleotide
agacucccguaguaccaca

SEQ ID NO: 678371 - RNA, 19 nt, Artificial Sequence
  Description of Artificial Sequence: Synthetic oligonucleotide
auacaccgacccacauggc

SEQ ID NO: 678372 - RNA, 19 nt, Artificial Sequence
  Description of Artificial Sequence: Synthetic oligonucleotide
uggggccuggugaaaccaa

SEQ ID NO: 678373 - RNA, 19 nt, Artificial Sequence
  Description of Artificial Sequence: Synthetic oligonucleotide
gauguggccucuguugcua

SEQ ID NO: 678374 - RNA, 19 nt, Artificial Sequence
  Description of Artificial Sequence: Synthetic oligonucleotide
gacucccguaguaccacac

SEQ ID NO: 678375 - RNA, 19 nt, Artificial Sequence
  Description of Artificial Sequence: Synthetic oligonucleotide
cucugcgcaguuuccguga

SEQ ID NO: 678376 - RNA, 19 nt, Artificial Sequence
  Description of Artificial Sequence: Synthetic oligonucleotide
cacggagagacacuuggcu

SEQ ID NO: 678377 - RNA, 19 nt, Artificial Sequence
  Description of Artificial Sequence: Synthetic oligonucleotide
uucgugggguucgguuggg

SEQ ID NO: 678378 - RNA, 19 nt, Artificial Sequence
  Description of Artificial Sequence: Synthetic oligonucleotide
aguuuccgugaagaacgcu

SEQ ID NO: 678379 - RNA, 19 nt, Artificial Sequence
  Description of Artificial Sequence: Synthetic oligonucleotide
gcugccguccgauacccac

SEQ ID NO: 678380 - RNA, 19 nt, Artificial Sequence
  Description of Artificial Sequence: Synthetic oligonucleotide
cauagaggugccagaugaa

SEQ ID NO: 678381 - RNA, 19 nt, Artificial Sequence
  Description of Artificial Sequence: Synthetic oligonucleotide
ugcccaccuggucuacggu

SEQ ID NO: 678382 - RNA, 19 nt, Artificial Sequence
  Description of Artificial Sequence: Synthetic oligonucleotide
augugaagcggaacucccu

SEQ ID NO: 678383 - RNA, 19 nt, Artificial Sequence
  Description of Artificial Sequence: Synthetic oligonucleotide
guuuccgugaagaacgcuu

SEQ ID NO: 678384 - RNA, 19 nt, Artificial Sequence
  Description of Artificial Sequence: Synthetic oligonucleotide
gagcgggagaugggagacg

SEQ ID NO: 678385 - RNA, 19 nt, Artificial Sequence
  Description of Artificial Sequence: Synthetic oligonucleotide
cagccgcucgcuucgugug

SEQ ID NO: 678386 - RNA, 19 nt, Artificial Sequence
  Description of Artificial Sequence: Synthetic oligonucleotide
ccguaguaccacacgcugc

SEQ ID NO: 678387 - RNA, 19 nt, Artificial Sequence
  Description of Artificial Sequence: Synthetic oligonucleotide
aggaguucgugggguucgg

SEQ ID NO: 678388 - RNA, 19 nt, Artificial Sequence
  Description of Artificial Sequence: Synthetic oligonucleotide
ggcgaauuggcaacaggca

SEQ ID NO: 678389 - RNA, 19 nt, Artificial Sequence
  Description of Artificial Sequence: Synthetic oligonucleotide
cacgaugauggggccuggg

SEQ ID NO: 678390 - RNA, 19 nt, Artificial Sequence
  Description of Artificial Sequence: Synthetic oligonucleotide
caccuccccaugagacacg

SEQ ID NO: 678391 - RNA, 19 nt, Artificial Sequence
  Description of Artificial Sequence: Synthetic oligonucleotide
caguggccgcucuuccggc

SEQ ID NO: 678392 - RNA, 19 nt, Artificial Sequence
  Description of Artificial Sequence: Synthetic oligonucleotide
guaccacacgcugcugggc

SEQ ID NO: 678393 - RNA, 19 nt, Artificial Sequence
  Description of Artificial Sequence: Synthetic oligonucleotide
caccgacccacauggcauc

SEQ ID NO: 678394 - RNA, 19 nt, Artificial Sequence
  Description of Artificial Sequence: Synthetic oligonucleotide
cucauggggacuacucgcu

SEQ ID NO: 678395 - RNA, 19 nt, Artificial Sequence
  Description of Artificial Sequence: Synthetic oligonucleotide
gugcugccguccgauaccc

SEQ ID NO: 678396 - RNA, 19 nt, Artificial Sequence
  Description of Artificial Sequence: Synthetic oligonucleotide
ugagugcauggggcccacg

SEQ ID NO: 678397 - RNA, 19 nt, Artificial Sequence
  Description of Artificial Sequence: Synthetic oligonucleotide
gcucuugaacaaugagcac

SEQ ID NO: 678398 - RNA, 19 nt, Artificial Sequence
  Description of Artificial Sequence: Synthetic oligonucleotide
caucucggggcgcgaugcc

SEQ ID NO: 678399 - RNA, 19 nt, Artificial Sequence
  Description of Artificial Sequence: Synthetic oligonucleotide
augcagcgccuuuauggua

SEQ ID NO: 678400 - RNA, 19 nt, Artificial Sequence
  Description of Artificial Sequence: Synthetic oligonucleotide
agcgacaugcagcgccuuu

SEQ ID NO: 678401 - RNA, 19 nt, Artificial Sequence
  Description of Artificial Sequence: Synthetic oligonucleotide
caugcuggaagcucacuuu

SEQ ID NO: 678402 - RNA, 19 nt, Artificial Sequence
  Description of Artificial Sequence: Synthetic oligonucleotide
ccacgcgccacuugagagc

SEQ ID NO: 678403 - RNA, 19 nt, Artificial Sequence
  Description of Artificial Sequence: Synthetic oligonucleotide
cacgcgccacuugagagca

SEQ ID NO: 678404 - RNA, 19 nt, Artificial Sequence
  Description of Artificial Sequence: Synthetic oligonucleotide
ggacuacucgcugucucug

SEQ ID NO: 678405 - RNA, 19 nt, Artificial Sequence
  Description of Artificial Sequence: Synthetic oligonucleotide
guaguaccacacgcugcug

SEQ ID NO: 678406 - RNA, 19 nt, Artificial Sequence
  Description of Artificial Sequence: Synthetic oligonucleotide
cgaugccuaggccaggggc

SEQ ID NO: 678407 - RNA, 19 nt, Artificial Sequence
  Description of Artificial Sequence: Synthetic oligonucleotide
ggcgcgaugccuaggccag

SEQ ID NO: 678408 - RNA, 19 nt, Artificial Sequence
  Description of Artificial Sequence: Synthetic oligonucleotide
gaguucgugggguucgguu

SEQ ID NO: 678409 - RNA, 19 nt, Artificial Sequence
  Description of Artificial Sequence: Synthetic oligonucleotide
cucucacggcgaauuggca

SEQ ID NO: 678410 - RNA, 19 nt, Artificial Sequence
  Description of Artificial Sequence: Synthetic oligonucleotide
ggagacgccggggacagga

SEQ ID NO: 678411 - RNA, 19 nt, Artificial Sequence
  Description of Artificial Sequence: Synthetic oligonucleotide
gaagaacgcuugucuugua

SEQ ID NO: 678412 - RNA, 19 nt, Artificial Sequence
  Description of Artificial Sequence: Synthetic oligonucleotide
cucggggcgcgaugccuag

SEQ ID NO: 678413 - RNA, 19 nt, Artificial Sequence
  Description of Artificial Sequence: Synthetic oligonucleotide
cugggagaaguaucguccu

SEQ ID NO: 678414 - RNA, 19 nt, Artificial Sequence
  Description of Artificial Sequence: Synthetic oligonucleotide
uccggcccucccaggcugc

SEQ ID NO: 678415 - RNA, 19 nt, Artificial Sequence
  Description of Artificial Sequence: Synthetic oligonucleotide
aucucggggcgcgaugccu

SEQ ID NO: 678416 - RNA, 19 nt, Artificial Sequence
  Description of Artificial Sequence: Synthetic oligonucleotide
gacuacucgcugucucugu

SEQ ID NO: 678417 - RNA, 19 nt, Artificial Sequence
  Description of Artificial Sequence: Synthetic oligonucleotide
ggggacuacucgcugucuc

SEQ ID NO: 678418 - RNA, 19 nt, Artificial Sequence
  Description of Artificial Sequence: Synthetic oligonucleotide
agacacggagagacacuug

SEQ ID NO: 678419 - RNA, 19 nt, Artificial Sequence
  Description of Artificial Sequence: Synthetic oligonucleotide
gacgccggggacaggaugu

SEQ ID NO: 678420 - RNA, 19 nt, Artificial Sequence
  Description of Artificial Sequence: Synthetic oligonucleotide
gguggccuagcuguggguc

SEQ ID NO: 678421 - RNA, 19 nt, Artificial Sequence
  Description of Artificial Sequence: Synthetic oligonucleotide
uggggacuacucgcugucu

SEQ ID NO: 678422 - RNA, 19 nt, Artificial Sequence
  Description of Artificial Sequence: Synthetic oligonucleotide
gggcgcgaugccuaggcca

SEQ ID NO: 678423 - RNA, 19 nt, Artificial Sequence
  Description of Artificial Sequence: Synthetic oligonucleotide
cugcgcaguuuccgugaag

SEQ ID NO: 678424 - RNA, 19 nt, Artificial Sequence
  Description of Artificial Sequence: Synthetic oligonucleotide
cacggcgaauuggcaacag

SEQ ID NO: 678425 - RNA, 19 nt, Artificial Sequence
  Description of Artificial Sequence: Synthetic oligonucleotide
agacacugacccacacgcu

SEQ ID NO: 678426 - RNA, 19 nt, Artificial Sequence
  Description of Artificial Sequence: Synthetic oligonucleotide
augccuaggccaggggcgu

SEQ ID NO: 678427 - RNA, 19 nt, Artificial Sequence
  Description of Artificial Sequence: Synthetic oligonucleotide
cucggaucucuagcucuug

SEQ ID NO: 678428 - RNA, 19 nt, Artificial Sequence
  Description of Artificial Sequence: Synthetic oligonucleotide
aaguaucguccugcacgau

SEQ ID NO: 678429 - RNA, 19 nt, Artificial Sequence
  Description of Artificial Sequence: Synthetic oligonucleotide
ccaccuccccaugagacac

SEQ ID NO: 678430 - RNA, 19 nt, Artificial Sequence
  Description of Artificial Sequence: Synthetic oligonucleotide
ggcgucaaggaugcagaac

SEQ ID NO: 678431 - RNA, 19 nt, Artificial Sequence
  Description of Artificial Sequence: Synthetic oligonucleotide
ugcugccguccgauaccca

SEQ ID NO: 678432 - RNA, 19 nt, Artificial Sequence
  Description of Artificial Sequence: Synthetic oligonucleotide
gccuuuaugguaagcauau

SEQ ID NO: 678433 - RNA, 19 nt, Artificial Sequence
  Description of Artificial Sequence: Synthetic oligonucleotide
cucuuccggcuccuggcca

SEQ ID NO: 678434 - RNA, 19 nt, Artificial Sequence
  Description of Artificial Sequence: Synthetic oligonucleotide
gguucgguugggaccagga

SEQ ID NO: 678435 - RNA, 19 nt, Artificial Sequence
  Description of Artificial Sequence: Synthetic oligonucleotide
gugucacaauggguucccc

SEQ ID NO: 678436 - RNA, 19 nt, Artificial Sequence
  Description of Artificial Sequence: Synthetic oligonucleotide
ccucugcgcaguuuccgug

SEQ ID NO: 678437 - RNA, 19 nt, Artificial Sequence
  Description of Artificial Sequence: Synthetic oligonucleotide
cguccgauacccaccuuug

SEQ ID NO: 678438 - RNA, 19 nt, Artificial Sequence
  Description of Artificial Sequence: Synthetic oligonucleotide
cggagagacacuuggcuga

SEQ ID NO: 678439 - RNA, 19 nt, Artificial Sequence
  Description of Artificial Sequence: Synthetic oligonucleotide
accgacccacauggcaucu

SEQ ID NO: 678440 - RNA, 19 nt, Artificial Sequence
  Description of Artificial Sequence: Synthetic oligonucleotide
ucggggcgcgaugccuagg

SEQ ID NO: 678441 - RNA, 19 nt, Artificial Sequence
  Description of Artificial Sequence: Synthetic oligonucleotide
auauacugucucagcugua

SEQ ID NO: 678442 - RNA, 19 nt, Artificial Sequence
  Description of Artificial Sequence: Synthetic oligonucleotide
gcaaaugaaggaauuuguu

SEQ ID NO: 678443 - RNA, 19 nt, Artificial Sequence
  Description of Artificial Sequence: Synthetic oligonucleotide
caaugagcaccuggcggga

SEQ ID NO: 678444 - RNA, 19 nt, Artificial Sequence
  Description of Artificial Sequence: Synthetic oligonucleotide
caugguaauccaggcagau

SEQ ID NO: 678445 - RNA, 19 nt, Artificial Sequence
  Description of Artificial Sequence: Synthetic oligonucleotide
cugugcccucagacugccc

SEQ ID NO: 678446 - RNA, 19 nt, Artificial Sequence
  Description of Artificial Sequence: Synthetic oligonucleotide
gcgaugccuaggccagggg

SEQ ID NO: 678447 - RNA, 19 nt, Artificial Sequence
  Description of Artificial Sequence: Synthetic oligonucleotide
gcagcgccuuuaugguaag

SEQ ID NO: 678448 - RNA, 19 nt, Artificial Sequence
  Description of Artificial Sequence: Synthetic oligonucleotide
uaccgcccgaggaguucgu

SEQ ID NO: 678449 - RNA, 19 nt, Artificial Sequence
  Description of Artificial Sequence: Synthetic oligonucleotide
gaaugcccucucggacagc

SEQ ID NO: 678450 - RNA, 19 nt, Artificial Sequence
  Description of Artificial Sequence: Synthetic oligonucleotide
cccggaacccuuggaagag

SEQ ID NO: 678451 - RNA, 19 nt, Artificial Sequence
  Description of Artificial Sequence: Synthetic oligonucleotide
cgugggguucgguugggac

SEQ ID NO: 678452 - RNA, 19 nt, Artificial Sequence
  Description of Artificial Sequence: Synthetic oligonucleotide
acccaccuuugggguaccg

SEQ ID NO: 678453 - RNA, 19 nt, Artificial Sequence
  Description of Artificial Sequence: Synthetic oligonucleotide
ggccaaccggucucggauc

SEQ ID NO: 678454 - RNA, 19 nt, Artificial Sequence
  Description of Artificial Sequence: Synthetic oligonucleotide
gaaccucauggggacuacu

SEQ ID NO: 678455 - RNA, 19 nt, Artificial Sequence
  Description of Artificial Sequence: Synthetic oligonucleotide
gguauacuucaugcuggaa

SEQ ID NO: 678456 - RNA, 19 nt, Artificial Sequence
  Description of Artificial Sequence: Synthetic oligonucleotide
ccccagacgaaagugcaca

SEQ ID NO: 678457 - RNA, 19 nt, Artificial Sequence
  Description of Artificial Sequence: Synthetic oligonucleotide
ccgugaagaacgcuugucu

SEQ ID NO: 678458 - RNA, 19 nt, Artificial Sequence
  Description of Artificial Sequence: Synthetic oligonucleotide
ccacucucacggcgaauug

SEQ ID NO: 678459 - RNA, 19 nt, Artificial Sequence
  Description of Artificial Sequence: Synthetic oligonucleotide
ggaaccucauggggacuac

SEQ ID NO: 678460 - RNA, 19 nt, Artificial Sequence
  Description of Artificial Sequence: Synthetic oligonucleotide
accgcccgaggaguucgug

SEQ ID NO: 678461 - RNA, 19 nt, Artificial Sequence
  Description of Artificial Sequence: Synthetic oligonucleotide
cguaguaccacacgcugcu

SEQ ID NO: 678462 - RNA, 19 nt, Artificial Sequence
  Description of Artificial Sequence: Synthetic oligonucleotide
uaugcgcaucuggcaggau

SEQ ID NO: 678463 - RNA, 19 nt, Artificial Sequence
  Description of Artificial Sequence: Synthetic oligonucleotide
ggggcgcgaugccuaggcc

SEQ ID NO: 678464 - RNA, 19 nt, Artificial Sequence
  Description of Artificial Sequence: Synthetic oligonucleotide
ccccuacagcaccugucag

SEQ ID NO: 678465 - RNA, 19 nt, Artificial Sequence
  Description of Artificial Sequence: Synthetic oligonucleotide
caaccggucucggaucucu

SEQ ID NO: 678466 - RNA, 19 nt, Artificial Sequence
  Description of Artificial Sequence: Synthetic oligonucleotide
ggcagacugggcagguauc

SEQ ID NO: 678467 - RNA, 19 nt, Artificial Sequence
  Description of Artificial Sequence: Synthetic oligonucleotide
cugcucauggccccuugau

SEQ ID NO: 678468 - RNA, 19 nt, Artificial Sequence
  Description of Artificial Sequence: Synthetic oligonucleotide
ggagaccaugccggcagca

SEQ ID NO: 678469 - RNA, 19 nt, Artificial Sequence
  Description of Artificial Sequence: Synthetic oligonucleotide
ccucagaugugaagcggaa

SEQ ID NO: 678470 - RNA, 19 nt, Artificial Sequence
  Description of Artificial Sequence: Synthetic oligonucleotide
gguaccgcccgaggaguuc

SEQ ID NO: 678471 - RNA, 19 nt, Artificial Sequence
  Description of Artificial Sequence: Synthetic oligonucleotide
ccagccgguugcucaguuc

SEQ ID NO: 678472 - RNA, 19 nt, Artificial Sequence
  Description of Artificial Sequence: Synthetic oligonucleotide
gcgccuuuaugguaagcau

SEQ ID NO: 678473 - RNA, 19 nt, Artificial Sequence
  Description of Artificial Sequence: Synthetic oligonucleotide
ccuggucuacggugacaug

SEQ ID NO: 678474 - RNA, 19 nt, Artificial Sequence
  Description of Artificial Sequence: Synthetic oligonucleotide
gcagccgcucgcuucgugu

SEQ ID NO: 678475 - RNA, 19 nt, Artificial Sequence
  Description of Artificial Sequence: Synthetic oligonucleotide
cggggcgcgaugccuaggc

SEQ ID NO: 678476 - RNA, 19 nt, Artificial Sequence
  Description of Artificial Sequence: Synthetic oligonucleotide
cgcgaugccuaggccaggg

SEQ ID NO: 678477 - RNA, 19 nt, Artificial Sequence
  Description of Artificial Sequence: Synthetic oligonucleotide
gcucgcuucgugugcaaau

SEQ ID NO: 678478 - RNA, 19 nt, Artificial Sequence
  Description of Artificial Sequence: Synthetic oligonucleotide
gccaaccggucucggaucu

SEQ ID NO: 678479 - RNA, 19 nt, Artificial Sequence
  Description of Artificial Sequence: Synthetic oligonucleotide
uccccaucucggggcgcga

SEQ ID NO: 678480 - RNA, 19 nt, Artificial Sequence
  Description of Artificial Sequence: Synthetic oligonucleotide
gcgacaugcagcgccuuua

SEQ ID NO: 678481 - RNA, 19 nt, Artificial Sequence
  Description of Artificial Sequence: Synthetic oligonucleotide
cgcuucgugugcaaaugaa

SEQ ID NO: 678482 - RNA, 19 nt, Artificial Sequence
  Description of Artificial Sequence: Synthetic oligonucleotide
ccgguugcucaguuccaga

SEQ ID NO: 678483 - RNA, 19 nt, Artificial Sequence
  Description of Artificial Sequence: Synthetic oligonucleotide
cuggugcugccguccgaua

SEQ ID NO: 678484 - RNA, 19 nt, Artificial Sequence
  Description of Artificial Sequence: Synthetic oligonucleotide
ggagcgacaugcagcgccu

SEQ ID NO: 678485 - RNA, 19 nt, Artificial Sequence
  Description of Artificial Sequence: Synthetic oligonucleotide
ggagacccguggggccugg

SEQ ID NO: 678486 - RNA, 19 nt, Artificial Sequence
  Description of Artificial Sequence: Synthetic oligonucleotide
ggccccacucucacggcga

SEQ ID NO: 678487 - RNA, 19 nt, Artificial Sequence
  Description of Artificial Sequence: Synthetic oligonucleotide
cgugaagaacgcuugucuu

SEQ ID NO: 678488 - RNA, 19 nt, Artificial Sequence
  Description of Artificial Sequence: Synthetic oligonucleotide
gugccagaugaaggagacu

SEQ ID NO: 678489 - RNA, 19 nt, Artificial Sequence
  Description of Artificial Sequence: Synthetic oligonucleotide
uggcagccgcucgcuucgu

SEQ ID NO: 678490 - RNA, 19 nt, Artificial Sequence
  Description of Artificial Sequence: Synthetic oligonucleotide
ccgaaugaggcgcccgucu

SEQ ID NO: 678491 - RNA, 19 nt, Artificial Sequence
  Description of Artificial Sequence: Synthetic oligonucleotide
gccccaacgccgggacggg

SEQ ID NO: 678492 - RNA, 19 nt, Artificial Sequence
  Description of Artificial Sequence: Synthetic oligonucleotide
guugcacaacugagugcau

SEQ ID NO: 678493 - RNA, 19 nt, Artificial Sequence
  Description of Artificial Sequence: Synthetic oligonucleotide
gcgcaucuggcaggaucug

SEQ ID NO: 678494 - RNA, 19 nt, Artificial Sequence
  Description of Artificial Sequence: Synthetic oligonucleotide
augcccucucggacagcau

SEQ ID NO: 678495 - RNA, 19 nt, Artificial Sequence
  Description of Artificial Sequence: Synthetic oligonucleotide
gggguaccgcccgaggagu

SEQ ID NO: 678496 - RNA, 19 nt, Artificial Sequence
  Description of Artificial Sequence: Synthetic oligonucleotide
ggucuacggugacaugcuu

SEQ ID NO: 678497 - RNA, 19 nt, Artificial Sequence
  Description of Artificial Sequence: Synthetic oligonucleotide
cccgaaugaggcgcccguc

SEQ ID NO: 678498 - RNA, 19 nt, Artificial Sequence
  Description of Artificial Sequence: Synthetic oligonucleotide
gcgcgaugccuaggccagg

SEQ ID NO: 678499 - RNA, 19 nt, Artificial Sequence
  Description of Artificial Sequence: Synthetic oligonucleotide
gaccagccgguugcucagu

SEQ ID NO: 678500 - RNA, 19 nt, Artificial Sequence
  Description of Artificial Sequence: Synthetic oligonucleotide
cggucucggaucucuagcu

SEQ ID NO: 678501 - RNA, 19 nt, Artificial Sequence
  Description of Artificial Sequence: Synthetic oligonucleotide
gagacgccggggacaggau

SEQ ID NO: 678502 - RNA, 19 nt, Artificial Sequence
  Description of Artificial Sequence: Synthetic oligonucleotide
ccguccgauacccaccuuu

SEQ ID NO: 678503 - RNA, 19 nt, Artificial Sequence
  Description of Artificial Sequence: Synthetic oligonucleotide
guuggccucugcgcaguuu

SEQ ID NO: 678504 - RNA, 19 nt, Artificial Sequence
  Description of Artificial Sequence: Synthetic oligonucleotide
gggagacgccggggacagg

SEQ ID NO: 678505 - RNA, 19 nt, Artificial Sequence
  Description of Artificial Sequence: Synthetic oligonucleotide
ggaguucgugggguucggu

SEQ ID NO: 678506 - RNA, 19 nt, Artificial Sequence
  Description of Artificial Sequence: Synthetic oligonucleotide
ccaaccggucucggaucuc

SEQ ID NO: 678507 - RNA, 19 nt, Artificial Sequence
  Description of Artificial Sequence: Synthetic oligonucleotide
gagcgccuuggcagccgcu

SEQ ID NO: 678508 - RNA, 19 nt, Artificial Sequence
  Description of Artificial Sequence: Synthetic oligonucleotide
cgccgggacgggaggcccc

SEQ ID NO: 678509 - RNA, 19 nt, Artificial Sequence
  Description of Artificial Sequence: Synthetic oligonucleotide
gagcgacaugcagcgccuu

SEQ ID NO: 678510 - RNA, 19 nt, Artificial Sequence
  Description of Artificial Sequence: Synthetic oligonucleotide
gccgggacgggaggcccca

SEQ ID NO: 678511 - RNA, 19 nt, Artificial Sequence
  Description of Artificial Sequence: Synthetic oligonucleotide
gagacccguggggccuggu

SEQ ID NO: 678512 - RNA, 19 nt, Artificial Sequence
  Description of Artificial Sequence: Synthetic oligonucleotide
ccccgaaugaggcgcccgu

SEQ ID NO: 678513 - RNA, 19 nt, Artificial Sequence
  Description of Artificial Sequence: Synthetic oligonucleotide
acgcgccacuugagagcau

SEQ ID NO: 678514 - RNA, 19 nt, Artificial Sequence
  Description of Artificial Sequence: Synthetic oligonucleotide
caggggcgucaaggaugca

SEQ ID NO: 678515 - RNA, 19 nt, Artificial Sequence
  Description of Artificial Sequence: Synthetic oligonucleotide
ccgaggaguucgugggguu

SEQ ID NO: 678516 - RNA, 19 nt, Artificial Sequence
  Description of Artificial Sequence: Synthetic oligonucleotide
ccucuguugcuaggauuau

SEQ ID NO: 678517 - RNA, 19 nt, Artificial Sequence
  Description of Artificial Sequence: Synthetic oligonucleotide
ccggaacccuuggaagagu

SEQ ID NO: 678518 - RNA, 19 nt, Artificial Sequence
  Description of Artificial Sequence: Synthetic oligonucleotide
ggguaccgcccgaggaguu

SEQ ID NO: 678519 - RNA, 19 nt, Artificial Sequence
  Description of Artificial Sequence: Synthetic oligonucleotide
ccccaacgccgggacggga

SEQ ID NO: 678520 - RNA, 19 nt, Artificial Sequence
  Description of Artificial Sequence: Synthetic oligonucleotide
gccguccgauacccaccuu

SEQ ID NO: 678521 - RNA, 19 nt, Artificial Sequence
  Description of Artificial Sequence: Synthetic oligonucleotide
ccccaucucggggcgcgau

SEQ ID NO: 678522 - RNA, 19 nt, Artificial Sequence
  Description of Artificial Sequence: Synthetic oligonucleotide
ccgacccacauggcaucuu

SEQ ID NO: 678523 - RNA, 19 nt, Artificial Sequence
  Description of Artificial Sequence: Synthetic oligonucleotide
cccacacgcucaggaucuu

SEQ ID NO: 678524 - RNA, 19 nt, Artificial Sequence
  Description of Artificial Sequence: Synthetic oligonucleotide
uuguaauugacaaagagcu

SEQ ID NO: 678525 - RNA, 19 nt, Artificial Sequence
  Description of Artificial Sequence: Synthetic oligonucleotide
aauauaugcguacagcguc

SEQ ID NO: 678526 - RNA, 19 nt, Artificial Sequence
  Description of Artificial Sequence: Synthetic oligonucleotide
aaauuuggacuccacaucg

SEQ ID NO: 678527 - RNA, 19 nt, Artificial Sequence
  Description of Artificial Sequence: Synthetic oligonucleotide
aaaagagccauuugauccc

SEQ ID NO: 678528 - RNA, 19 nt, Artificial Sequence
  Description of Artificial Sequence: Synthetic oligonucleotide
aagacaaguacuucauggc

SEQ ID NO: 678529 - RNA, 19 nt, Artificial Sequence
  Description of Artificial Sequence: Synthetic oligonucleotide
agagauauaaguugguguc

SEQ ID NO: 678530 - RNA, 19 nt, Artificial Sequence
  Description of Artificial Sequence: Synthetic oligonucleotide
uaggaauuccccuaaagcc

SEQ ID NO: 678531 - RNA, 19 nt, Artificial Sequence
  Description of Artificial Sequence: Synthetic oligonucleotide
aagagauauaaguuggugu

SEQ ID NO: 678532 - RNA, 19 nt, Artificial Sequence
  Description of Artificial Sequence: Synthetic oligonucleotide
uaaagguagaccaggaaca

SEQ ID NO: 678533 - RNA, 19 nt, Artificial Sequence
  Description of Artificial Sequence: Synthetic oligonucleotide
agacauuccaaucaugcuc

SEQ ID NO: 678534 - RNA, 19 nt, Artificial Sequence
  Description of Artificial Sequence: Synthetic oligonucleotide
aaauucauugacccugcuc

SEQ ID NO: 678535 - RNA, 19 nt, Artificial Sequence
  Description of Artificial Sequence: Synthetic oligonucleotide
auugacccugcucuuaucc

SEQ ID NO: 678536 - RNA, 19 nt, Artificial Sequence
  Description of Artificial Sequence: Synthetic oligonucleotide
ucuuauacuugauauucag

SEQ ID NO: 678537 - RNA, 19 nt, Artificial Sequence
  Description of Artificial Sequence: Synthetic oligonucleotide
acucuuauacuugauauuc

SEQ ID NO: 678538 - RNA, 19 nt, Artificial Sequence
  Description of Artificial Sequence: Synthetic oligonucleotide
uguccuuucaaauuuggac

SEQ ID NO: 678539 - RNA, 19 nt, Artificial Sequence
  Description of Artificial Sequence: Synthetic oligonucleotide
ugguacagaaacauuaacu

SEQ ID NO: 678540 - RNA, 19 nt, Artificial Sequence
  Description of Artificial Sequence: Synthetic oligonucleotide
aaauccaucacucucccua

SEQ ID NO: 678541 - RNA, 19 nt, Artificial Sequence
  Description of Artificial Sequence: Synthetic oligonucleotide
uuaagcuuuaaacaaucaa

SEQ ID NO: 678542 - RNA, 19 nt, Artificial Sequence
  Description of Artificial Sequence: Synthetic oligonucleotide
gacgauaccguacaugacc

SEQ ID NO: 678543 - RNA, 19 nt, Artificial Sequence
  Description of Artificial Sequence: Synthetic oligonucleotide
uuucugaaaacccgaacug

SEQ ID NO: 678544 - RNA, 19 nt, Artificial Sequence
  Description of Artificial Sequence: Synthetic oligonucleotide
uuaaaagccuuguagguaa

SEQ ID NO: 678545 - RNA, 19 nt, Artificial Sequence
  Description of Artificial Sequence: Synthetic oligonucleotide
aaaggaggugaaaugcugc

SEQ ID NO: 678546 - RNA, 19 nt, Artificial Sequence
  Description of Artificial Sequence: Synthetic oligonucleotide
gauacugagaaaugcucag

SEQ ID NO: 678547 - RNA, 19 nt, Artificial Sequence
  Description of Artificial Sequence: Synthetic oligonucleotide
agaacaacuaugcacgugu

SEQ ID NO: 678548 - RNA, 19 nt, Artificial Sequence
  Description of Artificial Sequence: Synthetic oligonucleotide
gguacagaaacauuaacug

SEQ ID NO: 678549 - RNA, 19 nt, Artificial Sequence
  Description of Artificial Sequence: Synthetic oligonucleotide
auacuugauauucaggagu

SEQ ID NO: 678550 - RNA, 19 nt, Artificial Sequence
  Description of Artificial Sequence: Synthetic oligonucleotide
aaagccuuguagguaaagg

SEQ ID NO: 678551 - RNA, 19 nt, Artificial Sequence
  Description of Artificial Sequence: Synthetic oligonucleotide
aguaccaacucuuauacuu

SEQ ID NO: 678552 - RNA, 19 nt, Artificial Sequence
  Description of Artificial Sequence: Synthetic oligonucleotide
aacauuaacuguccuuuca

SEQ ID NO: 678553 - RNA, 19 nt, Artificial Sequence
  Description of Artificial Sequence: Synthetic oligonucleotide
ucuaggaauuccccuaaag

SEQ ID NO: 678554 - RNA, 19 nt, Artificial Sequence
  Description of Artificial Sequence: Synthetic oligonucleotide
auaaggagcacuuggacaa

SEQ ID NO: 678555 - RNA, 19 nt, Artificial Sequence
  Description of Artificial Sequence: Synthetic oligonucleotide
cauaagacuccccaaauuc

SEQ ID NO: 678556 - RNA, 19 nt, Artificial Sequence
  Description of Artificial Sequence: Synthetic oligonucleotide
uauaaguuggugucuacaa

SEQ ID NO: 678557 - RNA, 19 nt, Artificial Sequence
  Description of Artificial Sequence: Synthetic oligonucleotide
aaggucaaugcuaagagau

SEQ ID NO: 678558 - RNA, 19 nt, Artificial Sequence
  Description of Artificial Sequence: Synthetic oligonucleotide
aaagguagaccaggaacac

SEQ ID NO: 678559 - RNA, 19 nt, Artificial Sequence
  Description of Artificial Sequence: Synthetic oligonucleotide
aagaaggucaaugcuaaga

SEQ ID NO: 678560 - RNA, 19 nt, Artificial Sequence
  Description of Artificial Sequence: Synthetic oligonucleotide
uaagagauauaaguuggug

SEQ ID NO: 678561 - RNA, 19 nt, Artificial Sequence
  Description of Artificial Sequence: Synthetic oligonucleotide
uaggaaaauauaugcguac

SEQ ID NO: 678562 - RNA, 19 nt, Artificial Sequence
  Description of Artificial Sequence: Synthetic oligonucleotide
caaguugacguggaaaucc

SEQ ID NO: 678563 - RNA, 19 nt, Artificial Sequence
  Description of Artificial Sequence: Synthetic oligonucleotide
uguaauugacaaagagcug

SEQ ID NO: 678564 - RNA, 19 nt, Artificial Sequence
  Description of Artificial Sequence: Synthetic oligonucleotide
cuugauauucaggagugag

SEQ ID NO: 678565 - RNA, 19 nt, Artificial Sequence
  Description of Artificial Sequence: Synthetic oligonucleotide
ugcacuagagcuacccuug

SEQ ID NO: 678566 - RNA, 19 nt, Artificial Sequence
  Description of Artificial Sequence: Synthetic oligonucleotide
cauguagguagucagagga

SEQ ID NO: 678567 - RNA, 19 nt, Artificial Sequence
  Description of Artificial Sequence: Synthetic oligonucleotide
gacacgagaagagagggug

SEQ ID NO: 678568 - RNA, 19 nt, Artificial Sequence
  Description of Artificial Sequence: Synthetic oligonucleotide
acaacuaugcacgugugug

SEQ ID NO: 678569 - RNA, 19 nt, Artificial Sequence
  Description of Artificial Sequence: Synthetic oligonucleotide
aaacccgaacugcugcagg

SEQ ID NO: 678570 - RNA, 19 nt, Artificial Sequence
  Description of Artificial Sequence: Synthetic oligonucleotide
uugauauucaggagugagu

SEQ ID NO: 678571 - RNA, 19 nt, Artificial Sequence
  Description of Artificial Sequence: Synthetic oligonucleotide
agccuuguagguaaaggcc

SEQ ID NO: 678572 - RNA, 19 nt, Artificial Sequence
  Description of Artificial Sequence: Synthetic oligonucleotide
uccacguucaagaccaggu

SEQ ID NO: 678573 - RNA, 19 nt, Artificial Sequence
  Description of Artificial Sequence: Synthetic oligonucleotide
ugugugguuaagugcuacg

SEQ ID NO: 678574 - RNA, 19 nt, Artificial Sequence
  Description of Artificial Sequence: Synthetic oligonucleotide
uggugguguaaacacuuag

SEQ ID NO: 678575 - RNA, 19 nt, Artificial Sequence
  Description of Artificial Sequence: Synthetic oligonucleotide
acggguguagacgauaccg

SEQ ID NO: 678576 - RNA, 19 nt, Artificial Sequence
  Description of Artificial Sequence: Synthetic oligonucleotide
ugccacgggacacucaugc

SEQ ID NO: 678577 - RNA, 19 nt, Artificial Sequence
  Description of Artificial Sequence: Synthetic oligonucleotide
aauugacaaagagcugggg

SEQ ID NO: 678578 - RNA, 19 nt, Artificial Sequence
  Description of Artificial Sequence: Synthetic oligonucleotide
aacaacuaugcacgugugu

SEQ ID NO: 678579 - RNA, 19 nt, Artificial Sequence
  Description of Artificial Sequence: Synthetic oligonucleotide
ucagauucacugugggugc

SEQ ID NO: 678580 - RNA, 19 nt, Artificial Sequence
  Description of Artificial Sequence: Synthetic oligonucleotide
auauaugcguacagcgucc

SEQ ID NO: 678581 - RNA, 19 nt, Artificial Sequence
  Description of Artificial Sequence: Synthetic oligonucleotide
aacaccacgucaucucuga

SEQ ID NO: 678582 - RNA, 19 nt, Artificial Sequence
  Description of Artificial Sequence: Synthetic oligonucleotide
uguucucugcaccaaggcu

SEQ ID NO: 678583 - RNA, 19 nt, Artificial Sequence
  Description of Artificial Sequence: Synthetic oligonucleotide
aaagaaggucaaugcuaag

SEQ ID NO: 678584 - RNA, 19 nt, Artificial Sequence
  Description of Artificial Sequence: Synthetic oligonucleotide
uugguacagaaacauuaac

SEQ ID NO: 678585 - RNA, 19 nt, Artificial Sequence
  Description of Artificial Sequence: Synthetic oligonucleotide
ugagagacggguucgucca

SEQ ID NO: 678586 - RNA, 19 nt, Artificial Sequence
  Description of Artificial Sequence: Synthetic oligonucleotide
acgauaccguacaugaccc

SEQ ID NO: 678587 - RNA, 19 nt, Artificial Sequence
  Description of Artificial Sequence: Synthetic oligonucleotide
uguugaugagccaggagua

SEQ ID NO: 678588 - RNA, 19 nt, Artificial Sequence
  Description of Artificial Sequence: Synthetic oligonucleotide
agagucuguacagaacaac

SEQ ID NO: 678589 - RNA, 19 nt, Artificial Sequence
  Description of Artificial Sequence: Synthetic oligonucleotide
cacgucaucucugaaacag

SEQ ID NO: 678590 - RNA, 19 nt, Artificial Sequence
  Description of Artificial Sequence: Synthetic oligonucleotide
acucaugcacuagagcuac

SEQ ID NO: 678591 - RNA, 19 nt, Artificial Sequence
  Description of Artificial Sequence: Synthetic oligonucleotide
uguggugguguaaacacuu

SEQ ID NO: 678592 - RNA, 19 nt, Artificial Sequence
  Description of Artificial Sequence: Synthetic oligonucleotide
aagucguccaccaucacau

SEQ ID NO: 678593 - RNA, 19 nt, Artificial Sequence
  Description of Artificial Sequence: Synthetic oligonucleotide
uauucaggagugaguagac

SEQ ID NO: 678594 - RNA, 19 nt, Artificial Sequence
  Description of Artificial Sequence: Synthetic oligonucleotide
cauaaggagcacuuggaca

SEQ ID NO: 678595 - RNA, 19 nt, Artificial Sequence
  Description of Artificial Sequence: Synthetic oligonucleotide
agacgcucagucugggugg

SEQ ID NO: 678596 - RNA, 19 nt, Artificial Sequence
  Description of Artificial Sequence: Synthetic oligonucleotide
acuacggugcugaagcaac

SEQ ID NO: 678597 - RNA, 19 nt, Artificial Sequence
  Description of Artificial Sequence: Synthetic oligonucleotide
ggaguaccaacucuuauac

SEQ ID NO: 678598 - RNA, 19 nt, Artificial Sequence
  Description of Artificial Sequence: Synthetic oligonucleotide
gacggguucguccagggca

SEQ ID NO: 678599 - RNA, 19 nt, Artificial Sequence
  Description of Artificial Sequence: Synthetic oligonucleotide
ucaugcacuagagcuaccc

SEQ ID NO: 678600 - RNA, 19 nt, Artificial Sequence
  Description of Artificial Sequence: Synthetic oligonucleotide
uagacauuccaaucaugcu

SEQ ID NO: 678601 - RNA, 19 nt, Artificial Sequence
  Description of Artificial Sequence: Synthetic oligonucleotide
aacugaaacacaggccuca

SEQ ID NO: 678602 - RNA, 19 nt, Artificial Sequence
  Description of Artificial Sequence: Synthetic oligonucleotide
cuuggacaaguugacgugg

SEQ ID NO: 678603 - RNA, 19 nt, Artificial Sequence
  Description of Artificial Sequence: Synthetic oligonucleotide
gaugcacaucugcaggcag

SEQ ID NO: 678604 - RNA, 19 nt, Artificial Sequence
  Description of Artificial Sequence: Synthetic oligonucleotide
ucauaagacuccccaaauu

SEQ ID NO: 678605 - RNA, 19 nt, Artificial Sequence
  Description of Artificial Sequence: Synthetic oligonucleotide
uucacugugggugccaaac

SEQ ID NO: 678606 - RNA, 19 nt, Artificial Sequence
  Description of Artificial Sequence: Synthetic oligonucleotide
gucgccagagcacggacgg

SEQ ID NO: 678607 - RNA, 19 nt, Artificial Sequence
  Description of Artificial Sequence: Synthetic oligonucleotide
ucagguguaccuguuuccc

SEQ ID NO: 678608 - RNA, 19 nt, Artificial Sequence
  Description of Artificial Sequence: Synthetic oligonucleotide
gugugguuaagugcuacgg

SEQ ID NO: 678609 - RNA, 19 nt, Artificial Sequence
  Description of Artificial Sequence: Synthetic oligonucleotide
aagguguuaaaagccuugu

SEQ ID NO: 678610 - RNA, 19 nt, Artificial Sequence
  Description of Artificial Sequence: Synthetic oligonucleotide
auaaguuggugucuacaaa

SEQ ID NO: 678611 - RNA, 19 nt, Artificial Sequence
  Description of Artificial Sequence: Synthetic oligonucleotide
agcacggacggguguagac

SEQ ID NO: 678612 - RNA, 19 nt, Artificial Sequence
  Description of Artificial Sequence: Synthetic oligonucleotide
auauaaguuggugucuaca

SEQ ID NO: 678613 - RNA, 19 nt, Artificial Sequence
  Description of Artificial Sequence: Synthetic oligonucleotide
agagcuacccuugggugac

SEQ ID NO: 678614 - RNA, 19 nt, Artificial Sequence
  Description of Artificial Sequence: Synthetic oligonucleotide
cagggauacugagaaaugc

SEQ ID NO: 678615 - RNA, 19 nt, Artificial Sequence
  Description of Artificial Sequence: Synthetic oligonucleotide
cacccgguugcucagcugg

SEQ ID NO: 678616 - RNA, 19 nt, Artificial Sequence
  Description of Artificial Sequence: Synthetic oligonucleotide
uuggcgucgccagagcacg

SEQ ID NO: 678617 - RNA, 19 nt, Artificial Sequence
  Description of Artificial Sequence: Synthetic oligonucleotide
aggacugaucagguguacc

SEQ ID NO: 678618 - RNA, 19 nt, Artificial Sequence
  Description of Artificial Sequence: Synthetic oligonucleotide
gguggagcgguuuaucacc

SEQ ID NO: 678619 - RNA, 19 nt, Artificial Sequence
  Description of Artificial Sequence: Synthetic oligonucleotide
acguggaaauccaucacuc

SEQ ID NO: 678620 - RNA, 19 nt, Artificial Sequence
  Description of Artificial Sequence: Synthetic oligonucleotide
ucguacuucucagucuucc

SEQ ID NO: 678621 - RNA, 19 nt, Artificial Sequence
  Description of Artificial Sequence: Synthetic oligonucleotide
uuggacaaguugacgugga

SEQ ID NO: 678622 - RNA, 19 nt, Artificial Sequence
  Description of Artificial Sequence: Synthetic oligonucleotide
agcaacgccagagcacugc

SEQ ID NO: 678623 - RNA, 19 nt, Artificial Sequence
  Description of Artificial Sequence: Synthetic oligonucleotide
cacauucagggucagccug

SEQ ID NO: 678624 - RNA, 19 nt, Artificial Sequence
  Description of Artificial Sequence: Synthetic oligonucleotide
uacacggcguccugcaugu

SEQ ID NO: 678625 - RNA, 19 nt, Artificial Sequence
  Description of Artificial Sequence: Synthetic oligonucleotide
gugguguaaacacuuagcu

SEQ ID NO: 678626 - RNA, 19 nt, Artificial Sequence
  Description of Artificial Sequence: Synthetic oligonucleotide
auaccguacaugacccagc

SEQ ID NO: 678627 - RNA, 19 nt, Artificial Sequence
  Description of Artificial Sequence: Synthetic oligonucleotide
gagacggguucguccaggg

SEQ ID NO: 678628 - RNA, 19 nt, Artificial Sequence
  Description of Artificial Sequence: Synthetic oligonucleotide
cccaggaauacucauggcc

SEQ ID NO: 678629 - RNA, 19 nt, Artificial Sequence
  Description of Artificial Sequence: Synthetic oligonucleotide
uuggcaccucaccaagacc

SEQ ID NO: 678630 - RNA, 19 nt, Artificial Sequence
  Description of Artificial Sequence: Synthetic oligonucleotide
agacaccauucacaaagcu

SEQ ID NO: 678631 - RNA, 19 nt, Artificial Sequence
  Description of Artificial Sequence: Synthetic oligonucleotide
ucucccuacccgugcaugc

SEQ ID NO: 678632 - RNA, 19 nt, Artificial Sequence
  Description of Artificial Sequence: Synthetic oligonucleotide
guguagacgauaccguaca

SEQ ID NO: 678633 - RNA, 19 nt, Artificial Sequence
  Description of Artificial Sequence: Synthetic oligonucleotide
cuacccuugggugacugcc

SEQ ID NO: 678634 - RNA, 19 nt, Artificial Sequence
  Description of Artificial Sequence: Synthetic oligonucleotide
guagacgauaccguacaug

SEQ ID NO: 678635 - RNA, 19 nt, Artificial Sequence
  Description of Artificial Sequence: Synthetic oligonucleotide
uucaugugggguguguggu

SEQ ID NO: 678636 - RNA, 19 nt, Artificial Sequence
  Description of Artificial Sequence: Synthetic oligonucleotide
ugguggagcgguuuaucac

SEQ ID NO: 678637 - RNA, 19 nt, Artificial Sequence
  Description of Artificial Sequence: Synthetic oligonucleotide
gucgaugaacaggaugggg

SEQ ID NO: 678638 - RNA, 19 nt, Artificial Sequence
  Description of Artificial Sequence: Synthetic oligonucleotide
guacuucucagucuuccuc

SEQ ID NO: 678639 - RNA, 19 nt, Artificial Sequence
  Description of Artificial Sequence: Synthetic oligonucleotide
gguuaagugcuacgguucc

SEQ ID NO: 678640 - RNA, 19 nt, Artificial Sequence
  Description of Artificial Sequence: Synthetic oligonucleotide
ugggugccaaacugaaaca

SEQ ID NO: 678641 - RNA, 19 nt, Artificial Sequence
  Description of Artificial Sequence: Synthetic oligonucleotide
uauaugcguacagcguccc

SEQ ID NO: 678642 - RNA, 19 nt, Artificial Sequence
  Description of Artificial Sequence: Synthetic oligonucleotide
auguagguagucagaggac

SEQ ID NO: 678643 - RNA, 19 nt, Artificial Sequence
  Description of Artificial Sequence: Synthetic oligonucleotide
gacauuccaaucaugcucu

SEQ ID NO: 678644 - RNA, 19 nt, Artificial Sequence
  Description of Artificial Sequence: Synthetic oligonucleotide
gccagauagggcuggaugc

SEQ ID NO: 678645 - RNA, 19 nt, Artificial Sequence
  Description of Artificial Sequence: Synthetic oligonucleotide
gggaggacccaucaaagac

SEQ ID NO: 678646 - RNA, 19 nt, Artificial Sequence
  Description of Artificial Sequence: Synthetic oligonucleotide
uaugcguacagcgucccau

SEQ ID NO: 678647 - RNA, 19 nt, Artificial Sequence
  Description of Artificial Sequence: Synthetic oligonucleotide
cuacggugcugaagcaacg

SEQ ID NO: 678648 - RNA, 19 nt, Artificial Sequence
  Description of Artificial Sequence: Synthetic oligonucleotide
uuccacguucaagaccagg

SEQ ID NO: 678649 - RNA, 19 nt, Artificial Sequence
  Description of Artificial Sequence: Synthetic oligonucleotide
caggguaaagccaccucug

SEQ ID NO: 678650 - RNA, 19 nt, Artificial Sequence
  Description of Artificial Sequence: Synthetic oligonucleotide
aaguugacguggaaaucca

SEQ ID NO: 678651 - RNA, 19 nt, Artificial Sequence
  Description of Artificial Sequence: Synthetic oligonucleotide
aauuuggacuccacaucga

SEQ ID NO: 678652 - RNA, 19 nt, Artificial Sequence
  Description of Artificial Sequence: Synthetic oligonucleotide
agacggguucguccagggc

SEQ ID NO: 678653 - RNA, 19 nt, Artificial Sequence
  Description of Artificial Sequence: Synthetic oligonucleotide
ggugcucagggauacugag

SEQ ID NO: 678654 - RNA, 19 nt, Artificial Sequence
  Description of Artificial Sequence: Synthetic oligonucleotide
cucuuauacuugauauuca

SEQ ID NO: 678655 - RNA, 19 nt, Artificial Sequence
  Description of Artificial Sequence: Synthetic oligonucleotide
guacacggcguccugcaug

SEQ ID NO: 678656 - RNA, 19 nt, Artificial Sequence
  Description of Artificial Sequence: Synthetic oligonucleotide
agguguaccuguuucccau

SEQ ID NO: 678657 - RNA, 19 nt, Artificial Sequence
  Description of Artificial Sequence: Synthetic oligonucleotide
agagccauuugaucccaga

SEQ ID NO: 678658 - RNA, 19 nt, Artificial Sequence
  Description of Artificial Sequence: Synthetic oligonucleotide
augcacuagagcuacccuu

SEQ ID NO: 678659 - RNA, 19 nt, Artificial Sequence
  Description of Artificial Sequence: Synthetic oligonucleotide
uccacauaaggagcacuug

SEQ ID NO: 678660 - RNA, 19 nt, Artificial Sequence
  Description of Artificial Sequence: Synthetic oligonucleotide
gacguggaaauccaucacu

SEQ ID NO: 678661 - RNA, 19 nt, Artificial Sequence
  Description of Artificial Sequence: Synthetic oligonucleotide
gaugcaguuggcgucgcca

SEQ ID NO: 678662 - RNA, 19 nt, Artificial Sequence
  Description of Artificial Sequence: Synthetic oligonucleotide
guaggaaaauauaugcgua

SEQ ID NO: 678663 - RNA, 19 nt, Artificial Sequence
  Description of Artificial Sequence: Synthetic oligonucleotide
aaacacuuagcugcagcuu

SEQ ID NO: 678664 - RNA, 19 nt, Artificial Sequence
  Description of Artificial Sequence: Synthetic oligonucleotide
uguaccuguuucccaucgu

SEQ ID NO: 678665 - RNA, 19 nt, Artificial Sequence
  Description of Artificial Sequence: Synthetic oligonucleotide
gacugaucagguguaccug

SEQ ID NO: 678666 - RNA, 19 nt, Artificial Sequence
  Description of Artificial Sequence: Synthetic oligonucleotide
ggaaauccaucacucuccc

SEQ ID NO: 678667 - RNA, 19 nt, Artificial Sequence
  Description of Artificial Sequence: Synthetic oligonucleotide
aguuggcgucgccagagca

SEQ ID NO: 678668 - RNA, 19 nt, Artificial Sequence
  Description of Artificial Sequence: Synthetic oligonucleotide
agggauacugagaaaugcu

SEQ ID NO: 678669 - RNA, 19 nt, Artificial Sequence
  Description of Artificial Sequence: Synthetic oligonucleotide
ucauguaccgaugcacauc

SEQ ID NO: 678670 - RNA, 19 nt, Artificial Sequence
  Description of Artificial Sequence: Synthetic oligonucleotide
guugacguggaaauccauc

SEQ ID NO: 678671 - RNA, 19 nt, Artificial Sequence
  Description of Artificial Sequence: Synthetic oligonucleotide
cagaagacauggugucuag

SEQ ID NO: 678672 - RNA, 19 nt, Artificial Sequence
  Description of Artificial Sequence: Synthetic oligonucleotide
gugacugcccguuggcacc

SEQ ID NO: 678673 - RNA, 19 nt, Artificial Sequence
  Description of Artificial Sequence: Synthetic oligonucleotide
accguguggugguguaaac

SEQ ID NO: 678674 - RNA, 19 nt, Artificial Sequence
  Description of Artificial Sequence: Synthetic oligonucleotide
caugcucaguguccacugg

SEQ ID NO: 678675 - RNA, 19 nt, Artificial Sequence
  Description of Artificial Sequence: Synthetic oligonucleotide
ugacaaagagcuggggcaa

SEQ ID NO: 678676 - RNA, 19 nt, Artificial Sequence
  Description of Artificial Sequence: Synthetic oligonucleotide
gacaaguacuucauggccu

SEQ ID NO: 678677 - RNA, 19 nt, Artificial Sequence
  Description of Artificial Sequence: Synthetic oligonucleotide
uguagacgauaccguacau

SEQ ID NO: 678678 - RNA, 19 nt, Artificial Sequence
  Description of Artificial Sequence: Synthetic oligonucleotide
uaaaagccuuguagguaaa

SEQ ID NO: 678679 - RNA, 19 nt, Artificial Sequence
  Description of Artificial Sequence: Synthetic oligonucleotide
uacggugcugaagcaacgc

SEQ ID NO: 678680 - RNA, 19 nt, Artificial Sequence
  Description of Artificial Sequence: Synthetic oligonucleotide
ucgccagugagagacgggu

SEQ ID NO: 678681 - RNA, 19 nt, Artificial Sequence
  Description of Artificial Sequence: Synthetic oligonucleotide
cacuuggacaaguugacgu

SEQ ID NO: 678682 - RNA, 19 nt, Artificial Sequence
  Description of Artificial Sequence: Synthetic oligonucleotide
aguucauguggggugugug

SEQ ID NO: 678683 - RNA, 19 nt, Artificial Sequence
  Description of Artificial Sequence: Synthetic oligonucleotide
ugcccguuggcaccucacc

SEQ ID NO: 678684 - RNA, 19 nt, Artificial Sequence
  Description of Artificial Sequence: Synthetic oligonucleotide
ggaauuccccuaaagcccc

SEQ ID NO: 678685 - RNA, 19 nt, Artificial Sequence
  Description of Artificial Sequence: Synthetic oligonucleotide
cauguaccgaugcacaucu

SEQ ID NO: 678686 - RNA, 19 nt, Artificial Sequence
  Description of Artificial Sequence: Synthetic oligonucleotide
gaacaacuaugcacgugug

SEQ ID NO: 678687 - RNA, 19 nt, Artificial Sequence
  Description of Artificial Sequence: Synthetic oligonucleotide
ucagugguggagcgguuua

SEQ ID NO: 678688 - RNA, 19 nt, Artificial Sequence
  Description of Artificial Sequence: Synthetic oligonucleotide
aacaggauggggagguaau

SEQ ID NO: 678689 - RNA, 19 nt, Artificial Sequence
  Description of Artificial Sequence: Synthetic oligonucleotide
uguuucccaucgugccagg

SEQ ID NO: 678690 - RNA, 19 nt, Artificial Sequence
  Description of Artificial Sequence: Synthetic oligonucleotide
gaguacacggcguccugca

SEQ ID NO: 678691 - RNA, 19 nt, Artificial Sequence
  Description of Artificial Sequence: Synthetic oligonucleotide
caacuaugcacguguguga

SEQ ID NO: 678692 - RNA, 19 nt, Artificial Sequence
  Description of Artificial Sequence: Synthetic oligonucleotide
ugugggugccaaacugaaa

SEQ ID NO: 678693 - RNA, 19 nt, Artificial Sequence
  Description of Artificial Sequence: Synthetic oligonucleotide
agacgauaccguacaugac

SEQ ID NO: 678694 - RNA, 19 nt, Artificial Sequence
  Description of Artificial Sequence: Synthetic oligonucleotide
uggacaaguugacguggaa

SEQ ID NO: 678695 - RNA, 19 nt, Artificial Sequence
  Description of Artificial Sequence: Synthetic oligonucleotide
acguucaagaccaggucca

SEQ ID NO: 678696 - RNA, 19 nt, Artificial Sequence
  Description of Artificial Sequence: Synthetic oligonucleotide
ggauacugagaaaugcuca

SEQ ID NO: 678697 - RNA, 19 nt, Artificial Sequence
  Description of Artificial Sequence: Synthetic oligonucleotide
uaugcacgugugugaaauc

SEQ ID NO: 678698 - RNA, 19 nt, Artificial Sequence
  Description of Artificial Sequence: Synthetic oligonucleotide
gcuacgguuccuuccagac

SEQ ID NO: 678699 - RNA, 19 nt, Artificial Sequence
  Description of Artificial Sequence: Synthetic oligonucleotide
gaacaccacgucaucucug

SEQ ID NO: 678700 - RNA, 19 nt, Artificial Sequence
  Description of Artificial Sequence: Synthetic oligonucleotide
gacggguguagacgauacc

SEQ ID NO: 678701 - RNA, 19 nt, Artificial Sequence
  Description of Artificial Sequence: Synthetic oligonucleotide
gaggguagagcagguaaga

SEQ ID NO: 678702 - RNA, 19 nt, Artificial Sequence
  Description of Artificial Sequence: Synthetic oligonucleotide
cuuugguagacauuccaau

SEQ ID NO: 678703 - RNA, 19 nt, Artificial Sequence
  Description of Artificial Sequence: Synthetic oligonucleotide
acgucaucucugaaacagg

SEQ ID NO: 678704 - RNA, 19 nt, Artificial Sequence
  Description of Artificial Sequence: Synthetic oligonucleotide
ugacuacggugcugaagca

SEQ ID NO: 678705 - RNA, 19 nt, Artificial Sequence
  Description of Artificial Sequence: Synthetic oligonucleotide
gugucuaggaauuccccua

SEQ ID NO: 678706 - RNA, 19 nt, Artificial Sequence
  Description of Artificial Sequence: Synthetic oligonucleotide
guaaugcacugucuuccca

SEQ ID NO: 678707 - RNA, 19 nt, Artificial Sequence
  Description of Artificial Sequence: Synthetic oligonucleotide
gaauacucauggcccaacu

SEQ ID NO: 678708 - RNA, 19 nt, Artificial Sequence
  Description of Artificial Sequence: Synthetic oligonucleotide
agccgccccagugagaucu

SEQ ID NO: 678709 - RNA, 19 nt, Artificial Sequence
  Description of Artificial Sequence: Synthetic oligonucleotide
guaccgaugcacaucugca

SEQ ID NO: 678710 - RNA, 19 nt, Artificial Sequence
  Description of Artificial Sequence: Synthetic oligonucleotide
ggugacugcccguuggcac

SEQ ID NO: 678711 - RNA, 19 nt, Artificial Sequence
  Description of Artificial Sequence: Synthetic oligonucleotide
cuaagagauauaaguuggu

SEQ ID NO: 678712 - RNA, 19 nt, Artificial Sequence
  Description of Artificial Sequence: Synthetic oligonucleotide
gauggggagguaaugcacu

SEQ ID NO: 678713 - RNA, 19 nt, Artificial Sequence
  Description of Artificial Sequence: Synthetic oligonucleotide
gguguagacgauaccguac

SEQ ID NO: 678714 - RNA, 19 nt, Artificial Sequence
  Description of Artificial Sequence: Synthetic oligonucleotide
gacgcucagucuggguggg

SEQ ID NO: 678715 - RNA, 19 nt, Artificial Sequence
  Description of Artificial Sequence: Synthetic oligonucleotide
gaaaugcucagagggauuu

SEQ ID NO: 678716 - RNA, 19 nt, Artificial Sequence
  Description of Artificial Sequence: Synthetic oligonucleotide
cacggacggguguagacga

SEQ ID NO: 678717 - RNA, 19 nt, Artificial Sequence
  Description of Artificial Sequence: Synthetic oligonucleotide
ggcauuagauggcuucuuc

SEQ ID NO: 678718 - RNA, 19 nt, Artificial Sequence
  Description of Artificial Sequence: Synthetic oligonucleotide
cacuuagcugcagcuuggg

SEQ ID NO: 678719 - RNA, 19 nt, Artificial Sequence
  Description of Artificial Sequence: Synthetic oligonucleotide
ggggagguaaugcacuguc

SEQ ID NO: 678720 - RNA, 19 nt, Artificial Sequence
  Description of Artificial Sequence: Synthetic oligonucleotide
auaugcguacagcguccca

SEQ ID NO: 678721 - RNA, 19 nt, Artificial Sequence
  Description of Artificial Sequence: Synthetic oligonucleotide
acgagaagagagggugcuc

SEQ ID NO: 678722 - RNA, 19 nt, Artificial Sequence
  Description of Artificial Sequence: Synthetic oligonucleotide
agcgucccauuguuucuug

SEQ ID NO: 678723 - RNA, 19 nt, Artificial Sequence
  Description of Artificial Sequence: Synthetic oligonucleotide
guuggcgucgccagagcac

SEQ ID NO: 678724 - RNA, 19 nt, Artificial Sequence
  Description of Artificial Sequence: Synthetic oligonucleotide
ggagcgguuuaucaccauc

SEQ ID NO: 678725 - RNA, 19 nt, Artificial Sequence
  Description of Artificial Sequence: Synthetic oligonucleotide
auccacauaaggagcacuu

SEQ ID NO: 678726 - RNA, 19 nt, Artificial Sequence
  Description of Artificial Sequence: Synthetic oligonucleotide
ccaucacucucccuacccg

SEQ ID NO: 678727 - RNA, 19 nt, Artificial Sequence
  Description of Artificial Sequence: Synthetic oligonucleotide
ucccuacccgugcaugcuc

SEQ ID NO: 678728 - RNA, 19 nt, Artificial Sequence
  Description of Artificial Sequence: Synthetic oligonucleotide
gacuacggugcugaagcaa

SEQ ID NO: 678729 - RNA, 19 nt, Artificial Sequence
  Description of Artificial Sequence: Synthetic oligonucleotide
ccacgggacacucaugcac

SEQ ID NO: 678730 - RNA, 19 nt, Artificial Sequence
  Description of Artificial Sequence: Synthetic oligonucleotide
cagauucacugugggugcc

SEQ ID NO: 678731 - RNA, 19 nt, Artificial Sequence
  Description of Artificial Sequence: Synthetic oligonucleotide
cacucaugcacuagagcua

SEQ ID NO: 678732 - RNA, 19 nt, Artificial Sequence
  Description of Artificial Sequence: Synthetic oligonucleotide
cauugacccugcucuuauc

SEQ ID NO: 678733 - RNA, 19 nt, Artificial Sequence
  Description of Artificial Sequence: Synthetic oligonucleotide
gugugugguuaagugcuac

SEQ ID NO: 678734 - RNA, 19 nt, Artificial Sequence
  Description of Artificial Sequence: Synthetic oligonucleotide
ggacugaucagguguaccu

SEQ ID NO: 678735 - RNA, 19 nt, Artificial Sequence
  Description of Artificial Sequence: Synthetic oligonucleotide
gggugccaaacugaaacac

SEQ ID NO: 678736 - RNA, 19 nt, Artificial Sequence
  Description of Artificial Sequence: Synthetic oligonucleotide
gcacggacggguguagacg

SEQ ID NO: 678737 - RNA, 19 nt, Artificial Sequence
  Description of Artificial Sequence: Synthetic oligonucleotide
gcacuuggacaaguugacg

SEQ ID NO: 678738 - RNA, 19 nt, Artificial Sequence
  Description of Artificial Sequence: Synthetic oligonucleotide
cuacgguuccuuccagaca

SEQ ID NO: 678739 - RNA, 19 nt, Artificial Sequence
  Description of Artificial Sequence: Synthetic oligonucleotide
uggcgucgccagagcacgg

SEQ ID NO: 678740 - RNA, 19 nt, Artificial Sequence
  Description of Artificial Sequence: Synthetic oligonucleotide
ggugccaaacugaaacaca

SEQ ID NO: 678741 - RNA, 19 nt, Artificial Sequence
  Description of Artificial Sequence: Synthetic oligonucleotide
agauucacugugggugcca

SEQ ID NO: 678742 - RNA, 19 nt, Artificial Sequence
  Description of Artificial Sequence: Synthetic oligonucleotide
aucguacuucucagucuuc

SEQ ID NO: 678743 - RNA, 19 nt, Artificial Sequence
  Description of Artificial Sequence: Synthetic oligonucleotide
gaggacugaucagguguac

SEQ ID NO: 678744 - RNA, 19 nt, Artificial Sequence
  Description of Artificial Sequence: Synthetic oligonucleotide
acgccagagcacugcuuug

SEQ ID NO: 678745 - RNA, 19 nt, Artificial Sequence
  Description of Artificial Sequence: Synthetic oligonucleotide
gaguaccaacucuuauacu

SEQ ID NO: 678746 - RNA, 19 nt, Artificial Sequence
  Description of Artificial Sequence: Synthetic oligonucleotide
aguacacggcguccugcau

SEQ ID NO: 678747 - RNA, 19 nt, Artificial Sequence
  Description of Artificial Sequence: Synthetic oligonucleotide
agacacgagaagagagggu

SEQ ID NO: 678748 - RNA, 19 nt, Artificial Sequence
  Description of Artificial Sequence: Synthetic oligonucleotide
ggucaaugcuaagagauau

SEQ ID NO: 678749 - RNA, 19 nt, Artificial Sequence
  Description of Artificial Sequence: Synthetic oligonucleotide
agaaaugcucagagggauu

SEQ ID NO: 678750 - RNA, 19 nt, Artificial Sequence
  Description of Artificial Sequence: Synthetic oligonucleotide
caucguacuucucagucuu

SEQ ID NO: 678751 - RNA, 19 nt, Artificial Sequence
  Description of Artificial Sequence: Synthetic oligonucleotide
ccuuccagacacgagaaga

SEQ ID NO: 678752 - RNA, 19 nt, Artificial Sequence
  Description of Artificial Sequence: Synthetic oligonucleotide
gaccguguggugguguaaa

SEQ ID NO: 678753 - RNA, 19 nt, Artificial Sequence
  Description of Artificial Sequence: Synthetic oligonucleotide
ggagguaaugcacugucuu

SEQ ID NO: 678754 - RNA, 19 nt, Artificial Sequence
  Description of Artificial Sequence: Synthetic oligonucleotide
gugcuacgguuccuuccag

SEQ ID NO: 678755 - RNA, 19 nt, Artificial Sequence
  Description of Artificial Sequence: Synthetic oligonucleotide
acggcguccugcaugugga

SEQ ID NO: 678756 - RNA, 19 nt, Artificial Sequence
  Description of Artificial Sequence: Synthetic oligonucleotide
gucgccagugagagacggg

SEQ ID NO: 678757 - RNA, 19 nt, Artificial Sequence
  Description of Artificial Sequence: Synthetic oligonucleotide
cacgggacacucaugcacu

SEQ ID NO: 678758 - RNA, 19 nt, Artificial Sequence
  Description of Artificial Sequence: Synthetic oligonucleotide
gcucuuauccacaggguaa

SEQ ID NO: 678759 - RNA, 19 nt, Artificial Sequence
  Description of Artificial Sequence: Synthetic oligonucleotide
caguuggcgucgccagagc

SEQ ID NO: 678760 - RNA, 19 nt, Artificial Sequence
  Description of Artificial Sequence: Synthetic oligonucleotide
ccgugcaugcucagugucc

SEQ ID NO: 678761 - RNA, 19 nt, Artificial Sequence
  Description of Artificial Sequence: Synthetic oligonucleotide
ugacugcccguuggcaccu

SEQ ID NO: 678762 - RNA, 19 nt, Artificial Sequence
  Description of Artificial Sequence: Synthetic oligonucleotide
caucacucucccuacccgu

SEQ ID NO: 678763 - RNA, 19 nt, Artificial Sequence
  Description of Artificial Sequence: Synthetic oligonucleotide
guggagcgguuuaucacca

SEQ ID NO: 678764 - RNA, 19 nt, Artificial Sequence
  Description of Artificial Sequence: Synthetic oligonucleotide
ggcccaacugugcugugca

SEQ ID NO: 678765 - RNA, 19 nt, Artificial Sequence
  Description of Artificial Sequence: Synthetic oligonucleotide
cugcccguuggcaccucac

SEQ ID NO: 678766 - RNA, 19 nt, Artificial Sequence
  Description of Artificial Sequence: Synthetic oligonucleotide
aguugacguggaaauccau

SEQ ID NO: 678767 - RNA, 19 nt, Artificial Sequence
  Description of Artificial Sequence: Synthetic oligonucleotide
agaugacuacggugcugaa

SEQ ID NO: 678768 - RNA, 19 nt, Artificial Sequence
  Description of Artificial Sequence: Synthetic oligonucleotide
aagcaacgccagagcacug

SEQ ID NO: 678769 - RNA, 19 nt, Artificial Sequence
  Description of Artificial Sequence: Synthetic oligonucleotide
cagccggugggacgugggc

SEQ ID NO: 678770 - RNA, 19 nt, Artificial Sequence
  Description of Artificial Sequence: Synthetic oligonucleotide
ggacggguguagacgauac

SEQ ID NO: 678771 - RNA, 19 nt, Artificial Sequence
  Description of Artificial Sequence: Synthetic oligonucleotide
acucucccuacccgugcau

SEQ ID NO: 678772 - RNA, 19 nt, Artificial Sequence
  Description of Artificial Sequence: Synthetic oligonucleotide
ggguguagacgauaccgua

SEQ ID NO: 678773 - RNA, 19 nt, Artificial Sequence
  Description of Artificial Sequence: Synthetic oligonucleotide
gguguaccuguuucccauc

SEQ ID NO: 678774 - RNA, 19 nt, Artificial Sequence
  Description of Artificial Sequence: Synthetic oligonucleotide
gugcucagggauacugaga

SEQ ID NO: 678775 - RNA, 19 nt, Artificial Sequence
  Description of Artificial Sequence: Synthetic oligonucleotide
acgguuccuuccagacacg

SEQ ID NO: 678776 - RNA, 19 nt, Artificial Sequence
  Description of Artificial Sequence: Synthetic oligonucleotide
gcuacccuugggugacugc

SEQ ID NO: 678777 - RNA, 19 nt, Artificial Sequence
  Description of Artificial Sequence: Synthetic oligonucleotide
ccguuggcaccucaccaag

SEQ ID NO: 678778 - RNA, 19 nt, Artificial Sequence
  Description of Artificial Sequence: Synthetic oligonucleotide
gccgagacgcucagucugg

SEQ ID NO: 678779 - RNA, 19 nt, Artificial Sequence
  Description of Artificial Sequence: Synthetic oligonucleotide
cacucucccuacccgugca

SEQ ID NO: 678780 - RNA, 19 nt, Artificial Sequence
  Description of Artificial Sequence: Synthetic oligonucleotide
gggaguacacggcguccug

SEQ ID NO: 678781 - RNA, 19 nt, Artificial Sequence
  Description of Artificial Sequence: Synthetic oligonucleotide
cugccacgggacacucaug

SEQ ID NO: 678782 - RNA, 19 nt, Artificial Sequence
  Description of Artificial Sequence: Synthetic oligonucleotide
gcaucguacuucucagucu

SEQ ID NO: 678783 - RNA, 19 nt, Artificial Sequence
  Description of Artificial Sequence: Synthetic oligonucleotide
gcccguuggcaccucacca

SEQ ID NO: 678784 - RNA, 19 nt, Artificial Sequence
  Description of Artificial Sequence: Synthetic oligonucleotide
cacgagaagagagggugcu

SEQ ID NO: 678785 - RNA, 19 nt, Artificial Sequence
  Description of Artificial Sequence: Synthetic oligonucleotide
cgucgccagagcacggacg

SEQ ID NO: 678786 - RNA, 19 nt, Artificial Sequence
  Description of Artificial Sequence: Synthetic oligonucleotide
ggaugcaguuggcgucgcc

SEQ ID NO: 678787 - RNA, 19 nt, Artificial Sequence
  Description of Artificial Sequence: Synthetic oligonucleotide
cagggucagccugggucgc

SEQ ID NO: 678788 - RNA, 19 nt, Artificial Sequence
  Description of Artificial Sequence: Synthetic oligonucleotide
cugaaacaggccagccggu

SEQ ID NO: 678789 - RNA, 19 nt, Artificial Sequence
  Description of Artificial Sequence: Synthetic oligonucleotide
ccagccggugggacguggg

SEQ ID NO: 678790 - RNA, 19 nt, Artificial Sequence
  Description of Artificial Sequence: Synthetic oligonucleotide
gcugccacgggacacucau

SEQ ID NO: 678791 - RNA, 19 nt, Artificial Sequence
  Description of Artificial Sequence: Synthetic oligonucleotide
gucauaggacacagugagu

SEQ ID NO: 678792 - RNA, 19 nt, Artificial Sequence
  Description of Artificial Sequence: Synthetic oligonucleotide
gagcacggacggguguaga

SEQ ID NO: 678793 - RNA, 19 nt, Artificial Sequence
  Description of Artificial Sequence: Synthetic oligonucleotide
ccuacccgugcaugcucag

SEQ ID NO: 678794 - RNA, 19 nt, Artificial Sequence
  Description of Artificial Sequence: Synthetic oligonucleotide
acgugggcauggugaugau

SEQ ID NO: 678795 - RNA, 19 nt, Artificial Sequence
  Description of Artificial Sequence: Synthetic oligonucleotide
gggugcucagggauacuga

SEQ ID NO: 678796 - RNA, 19 nt, Artificial Sequence
  Description of Artificial Sequence: Synthetic oligonucleotide
cagagcacggacgggugua

SEQ ID NO: 678797 - RNA, 19 nt, Artificial Sequence
  Description of Artificial Sequence: Synthetic oligonucleotide
gugcgccacugacuucauc

SEQ ID NO: 678798 - RNA, 19 nt, Artificial Sequence
  Description of Artificial Sequence: Synthetic oligonucleotide
gccacgggacacucaugca

SEQ ID NO: 678799 - RNA, 19 nt, Artificial Sequence
  Description of Artificial Sequence: Synthetic oligonucleotide
gcgucgccagagcacggac

SEQ ID NO: 678800 - RNA, 19 nt, Artificial Sequence
  Description of Artificial Sequence: Synthetic oligonucleotide
cccguuggcaccucaccaa

SEQ ID NO: 678801 - RNA, 19 nt, Artificial Sequence
  Description of Artificial Sequence: Synthetic oligonucleotide
acccgguugcucagcuggu

SEQ ID NO: 678802 - RNA, 19 nt, Artificial Sequence
  Description of Artificial Sequence: Synthetic oligonucleotide
gcguacagcgucccauugu

SEQ ID NO: 678803 - RNA, 19 nt, Artificial Sequence
  Description of Artificial Sequence: Synthetic oligonucleotide
cccuacccgugcaugcuca

SEQ ID NO: 678804 - RNA, 19 nt, Artificial Sequence
  Description of Artificial Sequence: Synthetic oligonucleotide
gccccaauaccagcaggga

SEQ ID NO: 678805 - RNA, 19 nt, Artificial Sequence
  Description of Artificial Sequence: Synthetic oligonucleotide
ccgagacgcucagucuggg

SEQ ID NO: 678806 - RNA, 19 nt, Artificial Sequence
  Description of Artificial Sequence: Synthetic oligonucleotide
cgugcaugcucagugucca

SEQ ID NO: 678807 - RNA, 19 nt, Artificial Sequence
  Description of Artificial Sequence: Synthetic oligonucleotide
gggagguaaugcacugucu

SEQ ID NO: 678808 - RNA, 19 nt, Artificial Sequence
  Description of Artificial Sequence: Synthetic oligonucleotide
caccauucacaaagcuguu

SEQ ID NO: 678809 - RNA, 19 nt, Artificial Sequence
  Description of Artificial Sequence: Synthetic oligonucleotide
ggugugugguuaagugcua

SEQ ID NO: 678810 - RNA, 19 nt, Artificial Sequence
  Description of Artificial Sequence: Synthetic oligonucleotide
gggcaucguacuucucagu

SEQ ID NO: 678811 - RNA, 19 nt, Artificial Sequence
  Description of Artificial Sequence: Synthetic oligonucleotide
acggacggguguagacgau

SEQ ID NO: 678812 - RNA, 19 nt, Artificial Sequence
  Description of Artificial Sequence: Synthetic oligonucleotide
caccaaggcuggaccgugu

SEQ ID NO: 678813 - RNA, 19 nt, Artificial Sequence
  Description of Artificial Sequence: Synthetic oligonucleotide
cucccuacccgugcaugcu

SEQ ID NO: 678814 - RNA, 19 nt, Artificial Sequence
  Description of Artificial Sequence: Synthetic oligonucleotide
gcuggaccgugugguggug

SEQ ID NO: 678815 - RNA, 19 nt, Artificial Sequence
  Description of Artificial Sequence: Synthetic oligonucleotide
caacgccagagcacugcuu

SEQ ID NO: 678816 - RNA, 19 nt, Artificial Sequence
  Description of Artificial Sequence: Synthetic oligonucleotide
cagugagagacggguucgu

SEQ ID NO: 678817 - RNA, 19 nt, Artificial Sequence
  Description of Artificial Sequence: Synthetic oligonucleotide
cguuggcaccucaccaaga

SEQ ID NO: 678818 - RNA, 19 nt, Artificial Sequence
  Description of Artificial Sequence: Synthetic oligonucleotide
ccccaaauucauugacccu

SEQ ID NO: 678819 - RNA, 19 nt, Artificial Sequence
  Description of Artificial Sequence: Synthetic oligonucleotide
guacagcgucccauuguuu

SEQ ID NO: 678820 - RNA, 19 nt, Artificial Sequence
  Description of Artificial Sequence: Synthetic oligonucleotide
cuggaccgugugguggugu

SEQ ID NO: 678821 - RNA, 19 nt, Artificial Sequence
  Description of Artificial Sequence: Synthetic oligonucleotide
ggguucguccagggcauua

SEQ ID NO: 678822 - RNA, 19 nt, Artificial Sequence
  Description of Artificial Sequence: Synthetic oligonucleotide
cguacagcgucccauuguu

SEQ ID NO: 678823 - RNA, 19 nt, Artificial Sequence
  Description of Artificial Sequence: Synthetic oligonucleotide
gccggugggacgugggcau

SEQ ID NO: 678824 - RNA, 19 nt, Artificial Sequence
  Description of Artificial Sequence: Synthetic oligonucleotide
ccccaauaccagcagggau

SEQ ID NO: 678825 - RNA, 19 nt, Artificial Sequence
  Description of Artificial Sequence: Synthetic oligonucleotide
ggaccguguggugguguaa

SEQ ID NO: 678826 - RNA, 19 nt, Artificial Sequence
  Description of Artificial Sequence: Synthetic oligonucleotide
gcgucccauuguuucuugu

SEQ ID NO: 678827 - RNA, 19 nt, Artificial Sequence
  Description of Artificial Sequence: Synthetic oligonucleotide
cggguguagacgauaccgu

SEQ ID NO: 678828 - RNA, 19 nt, Artificial Sequence
  Description of Artificial Sequence: Synthetic oligonucleotide
cagugguggagcgguuuau

SEQ ID NO: 678829 - RNA, 19 nt, Artificial Sequence
  Description of Artificial Sequence: Synthetic oligonucleotide
cagcgucccauuguuucuu

SEQ ID NO: 678830 - RNA, 19 nt, Artificial Sequence
  Description of Artificial Sequence: Synthetic oligonucleotide
gagcuacccuugggugacu

SEQ ID NO: 678831 - RNA, 19 nt, Artificial Sequence
  Description of Artificial Sequence: Synthetic oligonucleotide
ccgccccagugagaucuug

SEQ ID NO: 678832 - RNA, 19 nt, Artificial Sequence
  Description of Artificial Sequence: Synthetic oligonucleotide
ccucaccaagacccaaguu

SEQ ID NO: 678833 - RNA, 19 nt, Artificial Sequence
  Description of Artificial Sequence: Synthetic oligonucleotide
ggugcgccacugacuucau

SEQ ID NO: 678834 - RNA, 19 nt, Artificial Sequence
  Description of Artificial Sequence: Synthetic oligonucleotide
gccgccccagugagaucuu

SEQ ID NO: 678835 - RNA, 19 nt, Artificial Sequence
  Description of Artificial Sequence: Synthetic oligonucleotide
aauaauucuaccccuuugc

SEQ ID NO: 678836 - RNA, 19 nt, Artificial Sequence
  Description of Artificial Sequence: Synthetic oligonucleotide
aaauaauacaccuuguuca

SEQ ID NO: 678837 - RNA, 19 nt, Artificial Sequence
  Description of Artificial Sequence: Synthetic oligonucleotide
uuugauuaauaucagaccc

SEQ ID NO: 678838 - RNA, 19 nt, Artificial Sequence
  Description of Artificial Sequence: Synthetic oligonucleotide
aucuauuaaacccugaagg

SEQ ID NO: 678839 - RNA, 19 nt, Artificial Sequence
  Description of Artificial Sequence: Synthetic oligonucleotide
uuacuuaucacauuguucc

SEQ ID NO: 678840 - RNA, 19 nt, Artificial Sequence
  Description of Artificial Sequence: Synthetic oligonucleotide
aauaauacaccuuguucac

SEQ ID NO: 678841 - RNA, 19 nt, Artificial Sequence
  Description of Artificial Sequence: Synthetic oligonucleotide
aagagaguguguucaaucc

SEQ ID NO: 678842 - RNA, 19 nt, Artificial Sequence
  Description of Artificial Sequence: Synthetic oligonucleotide
aaauaguccacuuggacug

SEQ ID NO: 678843 - RNA, 19 nt, Artificial Sequence
  Description of Artificial Sequence: Synthetic oligonucleotide
uugauuaauaauucuaccc

SEQ ID NO: 678844 - RNA, 19 nt, Artificial Sequence
  Description of Artificial Sequence: Synthetic oligonucleotide
cucauuauccacaaagugg

SEQ ID NO: 678845 - RNA, 19 nt, Artificial Sequence
  Description of Artificial Sequence: Synthetic oligonucleotide
uggucuucagauauuaacg

SEQ ID NO: 678846 - RNA, 19 nt, Artificial Sequence
  Description of Artificial Sequence: Synthetic oligonucleotide
aaucuauuaaacccugaag

SEQ ID NO: 678847 - RNA, 19 nt, Artificial Sequence
  Description of Artificial Sequence: Synthetic oligonucleotide
aauguaaaugaucggaagu

SEQ ID NO: 678848 - RNA, 19 nt, Artificial Sequence
  Description of Artificial Sequence: Synthetic oligonucleotide
uuaacgaugaauugguuga

SEQ ID NO: 678849 - RNA, 19 nt, Artificial Sequence
  Description of Artificial Sequence: Synthetic oligonucleotide
agcauuaaugaccacgugg

SEQ ID NO: 678850 - RNA, 19 nt, Artificial Sequence
  Description of Artificial Sequence: Synthetic oligonucleotide
aaauaacuacucuccuucc

SEQ ID NO: 678851 - RNA, 19 nt, Artificial Sequence
  Description of Artificial Sequence: Synthetic oligonucleotide
aaagcaguugcucugauuu

SEQ ID NO: 678852 - RNA, 19 nt, Artificial Sequence
  Description of Artificial Sequence: Synthetic oligonucleotide
uuaaugacuugaagaaugg

SEQ ID NO: 678853 - RNA, 19 nt, Artificial Sequence
  Description of Artificial Sequence: Synthetic oligonucleotide
uuguuagcgaucuucagag

SEQ ID NO: 678854 - RNA, 19 nt, Artificial Sequence
  Description of Artificial Sequence: Synthetic oligonucleotide
aucugcaacauuuaccgac

SEQ ID NO: 678855 - RNA, 19 nt, Artificial Sequence
  Description of Artificial Sequence: Synthetic oligonucleotide
gaugaauugguugaccugg

SEQ ID NO: 678856 - RNA, 19 nt, Artificial Sequence
  Description of Artificial Sequence: Synthetic oligonucleotide
gauuaugucuacaagugag

SEQ ID NO: 678857 - RNA, 19 nt, Artificial Sequence
  Description of Artificial Sequence: Synthetic oligonucleotide
aauucuaccccuuugccau

SEQ ID NO: 678858 - RNA, 19 nt, Artificial Sequence
  Description of Artificial Sequence: Synthetic oligonucleotide
aacgauaggcuuuugauua

SEQ ID NO: 678859 - RNA, 19 nt, Artificial Sequence
  Description of Artificial Sequence: Synthetic oligonucleotide
gaucaugcgauauuugaag

SEQ ID NO: 678860 - RNA, 19 nt, Artificial Sequence
  Description of Artificial Sequence: Synthetic oligonucleotide
uuguucacuucaauaaggg

SEQ ID NO: 678861 - RNA, 19 nt, Artificial Sequence
  Description of Artificial Sequence: Synthetic oligonucleotide
accuaagacauaaaggugc

SEQ ID NO: 678862 - RNA, 19 nt, Artificial Sequence
  Description of Artificial Sequence: Synthetic oligonucleotide
acucauaagcagucgauac

SEQ ID NO: 678863 - RNA, 19 nt, Artificial Sequence
  Description of Artificial Sequence: Synthetic oligonucleotide
ucuauuaaacccugaagga

SEQ ID NO: 678864 - RNA, 19 nt, Artificial Sequence
  Description of Artificial Sequence: Synthetic oligonucleotide
ugcauuauggccgcaaugg

SEQ ID NO: 678865 - RNA, 19 nt, Artificial Sequence
  Description of Artificial Sequence: Synthetic oligonucleotide
cuuauugcagucuugggug

SEQ ID NO: 678866 - RNA, 19 nt, Artificial Sequence
  Description of Artificial Sequence: Synthetic oligonucleotide
aagaucaugcgauauuuga

SEQ ID NO: 678867 - RNA, 19 nt, Artificial Sequence
  Description of Artificial Sequence: Synthetic oligonucleotide
uucaauaaggggaaagaac

SEQ ID NO: 678868 - RNA, 19 nt, Artificial Sequence
  Description of Artificial Sequence: Synthetic oligonucleotide
aguucuccgauuuagccuc

SEQ ID NO: 678869 - RNA, 19 nt, Artificial Sequence
  Description of Artificial Sequence: Synthetic oligonucleotide
ugaaguuggggaauucccg

SEQ ID NO: 678870 - RNA, 19 nt, Artificial Sequence
  Description of Artificial Sequence: Synthetic oligonucleotide
uucacguccaucacagugg

SEQ ID NO: 678871 - RNA, 19 nt, Artificial Sequence
  Description of Artificial Sequence: Synthetic oligonucleotide
uuaaugaccacgugguacc

SEQ ID NO: 678872 - RNA, 19 nt, Artificial Sequence
  Description of Artificial Sequence: Synthetic oligonucleotide
uuugcgaaggaacaccacc

SEQ ID NO: 678873 - RNA, 19 nt, Artificial Sequence
  Description of Artificial Sequence: Synthetic oligonucleotide
aagcagucgauaccggggc

SEQ ID NO: 678874 - RNA, 19 nt, Artificial Sequence
  Description of Artificial Sequence: Synthetic oligonucleotide
guauaacccauucugcugg

SEQ ID NO: 678875 - RNA, 19 nt, Artificial Sequence
  Description of Artificial Sequence: Synthetic oligonucleotide
cuuugagaaauaauacacc

SEQ ID NO: 678876 - RNA, 19 nt, Artificial Sequence
  Description of Artificial Sequence: Synthetic oligonucleotide
uaagcagucgauaccgggg

SEQ ID NO: 678877 - RNA, 19 nt, Artificial Sequence
  Description of Artificial Sequence: Synthetic oligonucleotide
gaauguaaaugaucggaag

SEQ ID NO: 678878 - RNA, 19 nt, Artificial Sequence
  Description of Artificial Sequence: Synthetic oligonucleotide
auuauggccgcaauggccc

SEQ ID NO: 678879 - RNA, 19 nt, Artificial Sequence
  Description of Artificial Sequence: Synthetic oligonucleotide
ucucacagcgguauaaccc

SEQ ID NO: 678880 - RNA, 19 nt, Artificial Sequence
  Description of Artificial Sequence: Synthetic oligonucleotide
ucucacuccucccaggagg

SEQ ID NO: 678881 - RNA, 19 nt, Artificial Sequence
  Description of Artificial Sequence: Synthetic oligonucleotide
aguuacgcaauuuaccuca

SEQ ID NO: 678882 - RNA, 19 nt, Artificial Sequence
  Description of Artificial Sequence: Synthetic oligonucleotide
auugaaagucaucucguag

SEQ ID NO: 678883 - RNA, 19 nt, Artificial Sequence
  Description of Artificial Sequence: Synthetic oligonucleotide
agcgguauaacccauucug

SEQ ID NO: 678884 - RNA, 19 nt, Artificial Sequence
  Description of Artificial Sequence: Synthetic oligonucleotide
aaugggacggauguuaaug

SEQ ID NO: 678885 - RNA, 19 nt, Artificial Sequence
  Description of Artificial Sequence: Synthetic oligonucleotide
uugaaagucaucucguagu

SEQ ID NO: 678886 - RNA, 19 nt, Artificial Sequence
  Description of Artificial Sequence: Synthetic oligonucleotide
aaguuacgcaauuuaccuc

SEQ ID NO: 678887 - RNA, 19 nt, Artificial Sequence
  Description of Artificial Sequence: Synthetic oligonucleotide
uuauugaaagucaucucgu

SEQ ID NO: 678888 - RNA, 19 nt, Artificial Sequence
  Description of Artificial Sequence: Synthetic oligonucleotide
uaaaugaucggaaguuggc

SEQ ID NO: 678889 - RNA, 19 nt, Artificial Sequence
  Description of Artificial Sequence: Synthetic oligonucleotide
auguccuucauuauagggc

SEQ ID NO: 678890 - RNA, 19 nt, Artificial Sequence
  Description of Artificial Sequence: Synthetic oligonucleotide
uuuagccucauacaaaguu

SEQ ID NO: 678891 - RNA, 19 nt, Artificial Sequence
  Description of Artificial Sequence: Synthetic oligonucleotide
uugcgaaggaacaccaccg

SEQ ID NO: 678892 - RNA, 19 nt, Artificial Sequence
  Description of Artificial Sequence: Synthetic oligonucleotide
uuaacgauaggcuuuugau

SEQ ID NO: 678893 - RNA, 19 nt, Artificial Sequence
  Description of Artificial Sequence: Synthetic oligonucleotide
gaaguuggggaauucccgg

SEQ ID NO: 678894 - RNA, 19 nt, Artificial Sequence
  Description of Artificial Sequence: Synthetic oligonucleotide
ucgagauucaucguuguag

SEQ ID NO: 678895 - RNA, 19 nt, Artificial Sequence
  Description of Artificial Sequence: Synthetic oligonucleotide
uuaucagccguccucagaa

SEQ ID NO: 678896 - RNA, 19 nt, Artificial Sequence
  Description of Artificial Sequence: Synthetic oligonucleotide
aaugaucggaaguuggcau

SEQ ID NO: 678897 - RNA, 19 nt, Artificial Sequence
  Description of Artificial Sequence: Synthetic oligonucleotide
gauauuugaaguuggggaa

SEQ ID NO: 678898 - RNA, 19 nt, Artificial Sequence
  Description of Artificial Sequence: Synthetic oligonucleotide
aacgaugaauugguugacc

SEQ ID NO: 678899 - RNA, 19 nt, Artificial Sequence
  Description of Artificial Sequence: Synthetic oligonucleotide
acugguaaggguuuaggcu

SEQ ID NO: 678900 - RNA, 19 nt, Artificial Sequence
  Description of Artificial Sequence: Synthetic oligonucleotide
acugauucucuugaaaauc

SEQ ID NO: 678901 - RNA, 19 nt, Artificial Sequence
  Description of Artificial Sequence: Synthetic oligonucleotide
agguaugcaguguucugcc

SEQ ID NO: 678902 - RNA, 19 nt, Artificial Sequence
  Description of Artificial Sequence: Synthetic oligonucleotide
uuuaacagcugagaauugc

SEQ ID NO: 678903 - RNA, 19 nt, Artificial Sequence
  Description of Artificial Sequence: Synthetic oligonucleotide
uuagcgaucuucagagugc

SEQ ID NO: 678904 - RNA, 19 nt, Artificial Sequence
  Description of Artificial Sequence: Synthetic oligonucleotide
aauacaccuuguucacuuc

SEQ ID NO: 678905 - RNA, 19 nt, Artificial Sequence
  Description of Artificial Sequence: Synthetic oligonucleotide
uuagucaacuucucuguug

SEQ ID NO: 678906 - RNA, 19 nt, Artificial Sequence
  Description of Artificial Sequence: Synthetic oligonucleotide
uacgcaauuuaccucauua

SEQ ID NO: 678907 - RNA, 19 nt, Artificial Sequence
  Description of Artificial Sequence: Synthetic oligonucleotide
ucagagugcccuuugagaa

SEQ ID NO: 678908 - RNA, 19 nt, Artificial Sequence
  Description of Artificial Sequence: Synthetic oligonucleotide
uucccugacauauccauca

SEQ ID NO: 678909 - RNA, 19 nt, Artificial Sequence
  Description of Artificial Sequence: Synthetic oligonucleotide
auagccaucacaggcugcc

SEQ ID NO: 678910 - RNA, 19 nt, Artificial Sequence
  Description of Artificial Sequence: Synthetic oligonucleotide
ucuacaagugagucuuuag

SEQ ID NO: 678911 - RNA, 19 nt, Artificial Sequence
  Description of Artificial Sequence: Synthetic oligonucleotide
cauuauggccgcaauggcc

SEQ ID NO: 678912 - RNA, 19 nt, Artificial Sequence
  Description of Artificial Sequence: Synthetic oligonucleotide
aagccuuugauuccaggga

SEQ ID NO: 678913 - RNA, 19 nt, Artificial Sequence
  Description of Artificial Sequence: Synthetic oligonucleotide
aauucgagauucaucguug

SEQ ID NO: 678914 - RNA, 19 nt, Artificial Sequence
  Description of Artificial Sequence: Synthetic oligonucleotide
gguguuaacgaugaauugg

SEQ ID NO: 678915 - RNA, 19 nt, Artificial Sequence
  Description of Artificial Sequence: Synthetic oligonucleotide
acaagugagucuuuagacu

SEQ ID NO: 678916 - RNA, 19 nt, Artificial Sequence
  Description of Artificial Sequence: Synthetic oligonucleotide
gaagaaugggcuuuaugga

SEQ ID NO: 678917 - RNA, 19 nt, Artificial Sequence
  Description of Artificial Sequence: Synthetic oligonucleotide
ugcgauauuugaaguuggg

SEQ ID NO: 678918 - RNA, 19 nt, Artificial Sequence
  Description of Artificial Sequence: Synthetic oligonucleotide
agauauuaacgauaggcuu

SEQ ID NO: 678919 - RNA, 19 nt, Artificial Sequence
  Description of Artificial Sequence: Synthetic oligonucleotide
auuaacgauaggcuuuuga

SEQ ID NO: 678920 - RNA, 19 nt, Artificial Sequence
  Description of Artificial Sequence: Synthetic oligonucleotide
ucugcaacauuuaccgaca

SEQ ID NO: 678921 - RNA, 19 nt, Artificial Sequence
  Description of Artificial Sequence: Synthetic oligonucleotide
uaauucgagauucaucguu

SEQ ID NO: 678922 - RNA, 19 nt, Artificial Sequence
  Description of Artificial Sequence: Synthetic oligonucleotide
caauuuugauuaauaucag

SEQ ID NO: 678923 - RNA, 19 nt, Artificial Sequence
  Description of Artificial Sequence: Synthetic oligonucleotide
ggauguaucucccuguugc

SEQ ID NO: 678924 - RNA, 19 nt, Artificial Sequence
  Description of Artificial Sequence: Synthetic oligonucleotide
gaagagaguguguucaauc

SEQ ID NO: 678925 - RNA, 19 nt, Artificial Sequence
  Description of Artificial Sequence: Synthetic oligonucleotide
uguggguaagugauggcca

SEQ ID NO: 678926 - RNA, 19 nt, Artificial Sequence
  Description of Artificial Sequence: Synthetic oligonucleotide
gacucagucuauuaaaucu

SEQ ID NO: 678927 - RNA, 19 nt, Artificial Sequence
  Description of Artificial Sequence: Synthetic oligonucleotide
uuuaccucauuauccacaa

SEQ ID NO: 678928 - RNA, 19 nt, Artificial Sequence
  Description of Artificial Sequence: Synthetic oligonucleotide
agaauugcuuguuagcgau

SEQ ID NO: 678929 - RNA, 19 nt, Artificial Sequence
  Description of Artificial Sequence: Synthetic oligonucleotide
guugcuagacuucacugug

SEQ ID NO: 678930 - RNA, 19 nt, Artificial Sequence
  Description of Artificial Sequence: Synthetic oligonucleotide
ucuuugcgaaggaacacca

SEQ ID NO: 678931 - RNA, 19 nt, Artificial Sequence
  Description of Artificial Sequence: Synthetic oligonucleotide
aaaugaucggaaguuggca

SEQ ID NO: 678932 - RNA, 19 nt, Artificial Sequence
  Description of Artificial Sequence: Synthetic oligonucleotide
uaacccauucugcugguca

SEQ ID NO: 678933 - RNA, 19 nt, Artificial Sequence
  Description of Artificial Sequence: Synthetic oligonucleotide
aguucuauagagaaaaguu

SEQ ID NO: 678934 - RNA, 19 nt, Artificial Sequence
  Description of Artificial Sequence: Synthetic oligonucleotide
uuauccacaaagugggguc

SEQ ID NO: 678935 - RNA, 19 nt, Artificial Sequence
  Description of Artificial Sequence: Synthetic oligonucleotide
uaaggguuuaggcuggcaa

SEQ ID NO: 678936 - RNA, 19 nt, Artificial Sequence
  Description of Artificial Sequence: Synthetic oligonucleotide
ugaaagucaucucguaguc

SEQ ID NO: 678937 - RNA, 19 nt, Artificial Sequence
  Description of Artificial Sequence: Synthetic oligonucleotide
agugagucuuuagacuugc

SEQ ID NO: 678938 - RNA, 19 nt, Artificial Sequence
  Description of Artificial Sequence: Synthetic oligonucleotide
uguugcuagacuucacugu

SEQ ID NO: 678939 - RNA, 19 nt, Artificial Sequence
  Description of Artificial Sequence: Synthetic oligonucleotide
ccuagaaccaucaaacuug

SEQ ID NO: 678940 - RNA, 19 nt, Artificial Sequence
  Description of Artificial Sequence: Synthetic oligonucleotide
cuucacguccaucacagug

SEQ ID NO: 678941 - RNA, 19 nt, Artificial Sequence
  Description of Artificial Sequence: Synthetic oligonucleotide
uucuuauugcagucuuggg

SEQ ID NO: 678942 - RNA, 19 nt, Artificial Sequence
  Description of Artificial Sequence: Synthetic oligonucleotide
uguagcaaugggacggaug

SEQ ID NO: 678943 - RNA, 19 nt, Artificial Sequence
  Description of Artificial Sequence: Synthetic oligonucleotide
uccgauuuagccucauaca

SEQ ID NO: 678944 - RNA, 19 nt, Artificial Sequence
  Description of Artificial Sequence: Synthetic oligonucleotide
aguugcagucaccacuuuc

SEQ ID NO: 678945 - RNA, 19 nt, Artificial Sequence
  Description of Artificial Sequence: Synthetic oligonucleotide
aaacccugaaggaaggaug

SEQ ID NO: 678946 - RNA, 19 nt, Artificial Sequence
  Description of Artificial Sequence: Synthetic oligonucleotide
cauaaaggugccaccacug

SEQ ID NO: 678947 - RNA, 19 nt, Artificial Sequence
  Description of Artificial Sequence: Synthetic oligonucleotide
cuccgauuuagccucauac

SEQ ID NO: 678948 - RNA, 19 nt, Artificial Sequence
  Description of Artificial Sequence: Synthetic oligonucleotide
uaauacaccuuguucacuu

SEQ ID NO: 678949 - RNA, 19 nt, Artificial Sequence
  Description of Artificial Sequence: Synthetic oligonucleotide
uuagccucauacaaaguuu

SEQ ID NO: 678950 - RNA, 19 nt, Artificial Sequence
  Description of Artificial Sequence: Synthetic oligonucleotide
acacccgcuaaacaccugg

SEQ ID NO: 678951 - RNA, 19 nt, Artificial Sequence
  Description of Artificial Sequence: Synthetic oligonucleotide
guagaacccauucccaagc

SEQ ID NO: 678952 - RNA, 19 nt, Artificial Sequence
  Description of Artificial Sequence: Synthetic oligonucleotide
acgaugaauugguugaccu

SEQ ID NO: 678953 - RNA, 19 nt, Artificial Sequence
  Description of Artificial Sequence: Synthetic oligonucleotide
caugcgauauuugaaguug

SEQ ID NO: 678954 - RNA, 19 nt, Artificial Sequence
  Description of Artificial Sequence: Synthetic oligonucleotide
augacuugaagaaugggcu

SEQ ID NO: 678955 - RNA, 19 nt, Artificial Sequence
  Description of Artificial Sequence: Synthetic oligonucleotide
agucaaugcuuaucagccg

SEQ ID NO: 678956 - RNA, 19 nt, Artificial Sequence
  Description of Artificial Sequence: Synthetic oligonucleotide
gugacacgggcacaaauag

SEQ ID NO: 678957 - RNA, 19 nt, Artificial Sequence
  Description of Artificial Sequence: Synthetic oligonucleotide
aaccuaagacauaaaggug

SEQ ID NO: 678958 - RNA, 19 nt, Artificial Sequence
  Description of Artificial Sequence: Synthetic oligonucleotide
gauucaucguuguaggucu

SEQ ID NO: 678959 - RNA, 19 nt, Artificial Sequence
  Description of Artificial Sequence: Synthetic oligonucleotide
auuaaacccugaaggaagg

SEQ ID NO: 678960 - RNA, 19 nt, Artificial Sequence
  Description of Artificial Sequence: Synthetic oligonucleotide
ucccuguugcauuauggcc

SEQ ID NO: 678961 - RNA, 19 nt, Artificial Sequence
  Description of Artificial Sequence: Synthetic oligonucleotide
auaacuacucuccuuccau

SEQ ID NO: 678962 - RNA, 19 nt, Artificial Sequence
  Description of Artificial Sequence: Synthetic oligonucleotide
accggggcggacuauuccc

SEQ ID NO: 678963 - RNA, 19 nt, Artificial Sequence
  Description of Artificial Sequence: Synthetic oligonucleotide
ugauuaauaucagacccau

SEQ ID NO: 678964 - RNA, 19 nt, Artificial Sequence
  Description of Artificial Sequence: Synthetic oligonucleotide
aucaugcgauauuugaagu

SEQ ID NO: 678965 - RNA, 19 nt, Artificial Sequence
  Description of Artificial Sequence: Synthetic oligonucleotide
uucucacagcgguauaacc

SEQ ID NO: 678966 - RNA, 19 nt, Artificial Sequence
  Description of Artificial Sequence: Synthetic oligonucleotide
cuuuagacuugcucucuag

SEQ ID NO: 678967 - RNA, 19 nt, Artificial Sequence
  Description of Artificial Sequence: Synthetic oligonucleotide
gggucaauuacuuaucaca

SEQ ID NO: 678968 - RNA, 19 nt, Artificial Sequence
  Description of Artificial Sequence: Synthetic oligonucleotide
aauucccggucacacuucu

SEQ ID NO: 678969 - RNA, 19 nt, Artificial Sequence
  Description of Artificial Sequence: Synthetic oligonucleotide
uggggucaauuacuuauca

SEQ ID NO: 678970 - RNA, 19 nt, Artificial Sequence
  Description of Artificial Sequence: Synthetic oligonucleotide
guaagugauggccaucuuc

SEQ ID NO: 678971 - RNA, 19 nt, Artificial Sequence
  Description of Artificial Sequence: Synthetic oligonucleotide
cuugucggcgucuucuccc

SEQ ID NO: 678972 - RNA, 19 nt, Artificial Sequence
  Description of Artificial Sequence: Synthetic oligonucleotide
aguuggggaauucccgguc

SEQ ID NO: 678973 - RNA, 19 nt, Artificial Sequence
  Description of Artificial Sequence: Synthetic oligonucleotide
ucccgauuaugucuacaag

SEQ ID NO: 678974 - RNA, 19 nt, Artificial Sequence
  Description of Artificial Sequence: Synthetic oligonucleotide
uaacgauaggcuuuugauu

SEQ ID NO: 678975 - RNA, 19 nt, Artificial Sequence
  Description of Artificial Sequence: Synthetic oligonucleotide
uuaauucgagauucaucgu

SEQ ID NO: 678976 - RNA, 19 nt, Artificial Sequence
  Description of Artificial Sequence: Synthetic oligonucleotide
acuucaauaaggggaaaga

SEQ ID NO: 678977 - RNA, 19 nt, Artificial Sequence
  Description of Artificial Sequence: Synthetic oligonucleotide
cauucugcuggucaaucac

SEQ ID NO: 678978 - RNA, 19 nt, Artificial Sequence
  Description of Artificial Sequence: Synthetic oligonucleotide
aauaguccacuuggacugg

SEQ ID NO: 678979 - RNA, 19 nt, Artificial Sequence
  Description of Artificial Sequence: Synthetic oligonucleotide
aguggccuuaauucgagau

SEQ ID NO: 678980 - RNA, 19 nt, Artificial Sequence
  Description of Artificial Sequence: Synthetic oligonucleotide
ugccauuccaagcauuaau

SEQ ID NO: 678981 - RNA, 19 nt, Artificial Sequence
  Description of Artificial Sequence: Synthetic oligonucleotide
ugacucagucuauuaaauc

SEQ ID NO: 678982 - RNA, 19 nt, Artificial Sequence
  Description of Artificial Sequence: Synthetic oligonucleotide
gagaauugcuuguuagcga

SEQ ID NO: 678983 - RNA, 19 nt, Artificial Sequence
  Description of Artificial Sequence: Synthetic oligonucleotide
uuauagggcacuggauucc

SEQ ID NO: 678984 - RNA, 19 nt, Artificial Sequence
  Description of Artificial Sequence: Synthetic oligonucleotide
ccaaguuacgcaauuuacc

SEQ ID NO: 678985 - RNA, 19 nt, Artificial Sequence
  Description of Artificial Sequence: Synthetic oligonucleotide
aaguuggggaauucccggu

SEQ ID NO: 678986 - RNA, 19 nt, Artificial Sequence
  Description of Artificial Sequence: Synthetic oligonucleotide
auauuucucuuagucaacu

SEQ ID NO: 678987 - RNA, 19 nt, Artificial Sequence
  Description of Artificial Sequence: Synthetic oligonucleotide
aagcauuaaugaccacgug

SEQ ID NO: 678988 - RNA, 19 nt, Artificial Sequence
  Description of Artificial Sequence: Synthetic oligonucleotide
acagaguugcagucaccac

SEQ ID NO: 678989 - RNA, 19 nt, Artificial Sequence
  Description of Artificial Sequence: Synthetic oligonucleotide
gguauaacccauucugcug

SEQ ID NO: 678990 - RNA, 19 nt, Artificial Sequence
  Description of Artificial Sequence: Synthetic oligonucleotide
acggauguuaaugacuuga

SEQ ID NO: 678991 - RNA, 19 nt, Artificial Sequence
  Description of Artificial Sequence: Synthetic oligonucleotide
uaaacaccuggguucuccc

SEQ ID NO: 678992 - RNA, 19 nt, Artificial Sequence
  Description of Artificial Sequence: Synthetic oligonucleotide
cccuguugcauuauggccg

SEQ ID NO: 678993 - RNA, 19 nt, Artificial Sequence
  Description of Artificial Sequence: Synthetic oligonucleotide
auuuaccucauuauccaca

SEQ ID NO: 678994 - RNA, 19 nt, Artificial Sequence
  Description of Artificial Sequence: Synthetic oligonucleotide
ugauguucaugaucagccu

SEQ ID NO: 678995 - RNA, 19 nt, Artificial Sequence
  Description of Artificial Sequence: Synthetic oligonucleotide
cuguggguaagugauggcc

SEQ ID NO: 678996 - RNA, 19 nt, Artificial Sequence
  Description of Artificial Sequence: Synthetic oligonucleotide
caaguuacgcaauuuaccu

SEQ ID NO: 678997 - RNA, 19 nt, Artificial Sequence
  Description of Artificial Sequence: Synthetic oligonucleotide
agaagucucauuauugaaa

SEQ ID NO: 678998 - RNA, 19 nt, Artificial Sequence
  Description of Artificial Sequence: Synthetic oligonucleotide
auaguccgccuugucaccc

SEQ ID NO: 678999 - RNA, 19 nt, Artificial Sequence
  Description of Artificial Sequence: Synthetic oligonucleotide
auacaccuuguucacuuca

SEQ ID NO: 679000 - RNA, 19 nt, Artificial Sequence
  Description of Artificial Sequence: Synthetic oligonucleotide
agacauaaaggugccacca

SEQ ID NO: 679001 - RNA, 19 nt, Artificial Sequence
  Description of Artificial Sequence: Synthetic oligonucleotide
ugcuagacuucacugugau

SEQ ID NO: 679002 - RNA, 19 nt, Artificial Sequence
  Description of Artificial Sequence: Synthetic oligonucleotide
gcuuugaggcaccauaagc

SEQ ID NO: 679003 - RNA, 19 nt, Artificial Sequence
  Description of Artificial Sequence: Synthetic oligonucleotide
acugaucccugugaaauca

SEQ ID NO: 679004 - RNA, 19 nt, Artificial Sequence
  Description of Artificial Sequence: Synthetic oligonucleotide
augggacggauguuaauga

SEQ ID NO: 679005 - RNA, 19 nt, Artificial Sequence
  Description of Artificial Sequence: Synthetic oligonucleotide
ucaugcgauauuugaaguu

SEQ ID NO: 679006 - RNA, 19 nt, Artificial Sequence
  Description of Artificial Sequence: Synthetic oligonucleotide
gaucccugugaaaucaaac

SEQ ID NO: 679007 - RNA, 19 nt, Artificial Sequence
  Description of Artificial Sequence: Synthetic oligonucleotide
caagaucaugcgauauuug

SEQ ID NO: 679008 - RNA, 19 nt, Artificial Sequence
  Description of Artificial Sequence: Synthetic oligonucleotide
uucccuucgggaauugcuc

SEQ ID NO: 679009 - RNA, 19 nt, Artificial Sequence
  Description of Artificial Sequence: Synthetic oligonucleotide
ugcuuaucagccguccuca

SEQ ID NO: 679010 - RNA, 19 nt, Artificial Sequence
  Description of Artificial Sequence: Synthetic oligonucleotide
auuaugucuacaagugagu

SEQ ID NO: 679011 - RNA, 19 nt, Artificial Sequence
  Description of Artificial Sequence: Synthetic oligonucleotide
auggcuuugaggcaccaua

SEQ ID NO: 679012 - RNA, 19 nt, Artificial Sequence
  Description of Artificial Sequence: Synthetic oligonucleotide
uggauguaucucccuguug

SEQ ID NO: 679013 - RNA, 19 nt, Artificial Sequence
  Description of Artificial Sequence: Synthetic oligonucleotide
ucccuguagcaaugggacg

SEQ ID NO: 679014 - RNA, 19 nt, Artificial Sequence
  Description of Artificial Sequence: Synthetic oligonucleotide
ccgauuaugucuacaagug

SEQ ID NO: 679015 - RNA, 19 nt, Artificial Sequence
  Description of Artificial Sequence: Synthetic oligonucleotide
cauucucacuccucccagg

SEQ ID NO: 679016 - RNA, 19 nt, Artificial Sequence
  Description of Artificial Sequence: Synthetic oligonucleotide
uuaggcuggcaauggguac

SEQ ID NO: 679017 - RNA, 19 nt, Artificial Sequence
  Description of Artificial Sequence: Synthetic oligonucleotide
aggccugguacauacaguu

SEQ ID NO: 679018 - RNA, 19 nt, Artificial Sequence
  Description of Artificial Sequence: Synthetic oligonucleotide
cacuucaauaaggggaaag

SEQ ID NO: 679019 - RNA, 19 nt, Artificial Sequence
  Description of Artificial Sequence: Synthetic oligonucleotide
ucccuucgggaauugcucc

SEQ ID NO: 679020 - RNA, 19 nt, Artificial Sequence
  Description of Artificial Sequence: Synthetic oligonucleotide
uaccgacaagaucaugcga

SEQ ID NO: 679021 - RNA, 19 nt, Artificial Sequence
  Description of Artificial Sequence: Synthetic oligonucleotide
aucccgauuaugucuacaa

SEQ ID NO: 679022 - RNA, 19 nt, Artificial Sequence
  Description of Artificial Sequence: Synthetic oligonucleotide
uggcuuugaggcaccauaa

SEQ ID NO: 679023 - RNA, 19 nt, Artificial Sequence
  Description of Artificial Sequence: Synthetic oligonucleotide
ugcugaaauaguccgccuu

SEQ ID NO: 679024 - RNA, 19 nt, Artificial Sequence
  Description of Artificial Sequence: Synthetic oligonucleotide
gauauuaacgauaggcuuu

SEQ ID NO: 679025 - RNA, 19 nt, Artificial Sequence
  Description of Artificial Sequence: Synthetic oligonucleotide
uucgggaauugcuccaggu

SEQ ID NO: 679026 - RNA, 19 nt, Artificial Sequence
  Description of Artificial Sequence: Synthetic oligonucleotide
cucacagcgguauaaccca

SEQ ID NO: 679027 - RNA, 19 nt, Artificial Sequence
  Description of Artificial Sequence: Synthetic oligonucleotide
ugcagaucccgauuauguc

SEQ ID NO: 679028 - RNA, 19 nt, Artificial Sequence
  Description of Artificial Sequence: Synthetic oligonucleotide
aggguguuaacgaugaauu

SEQ ID NO: 679029 - RNA, 19 nt, Artificial Sequence
  Description of Artificial Sequence: Synthetic oligonucleotide
uugcuagacuucacuguga

SEQ ID NO: 679030 - RNA, 19 nt, Artificial Sequence
  Description of Artificial Sequence: Synthetic oligonucleotide
acgcaauuuaccucauuau

SEQ ID NO: 679031 - RNA, 19 nt, Artificial Sequence
  Description of Artificial Sequence: Synthetic oligonucleotide
uaacuacucuccuuccauc

SEQ ID NO: 679032 - RNA, 19 nt, Artificial Sequence
  Description of Artificial Sequence: Synthetic oligonucleotide
ucaaugcuuaucagccguc

SEQ ID NO: 679033 - RNA, 19 nt, Artificial Sequence
  Description of Artificial Sequence: Synthetic oligonucleotide
ugccuagaaccaucaaacu

SEQ ID NO: 679034 - RNA, 19 nt, Artificial Sequence
  Description of Artificial Sequence: Synthetic oligonucleotide
caugaucagccuuuuggca

SEQ ID NO: 679035 - RNA, 19 nt, Artificial Sequence
  Description of Artificial Sequence: Synthetic oligonucleotide
ucuuuagacuugcucucua

SEQ ID NO: 679036 - RNA, 19 nt, Artificial Sequence
  Description of Artificial Sequence: Synthetic oligonucleotide
augcgauauuugaaguugg

SEQ ID NO: 679037 - RNA, 19 nt, Artificial Sequence
  Description of Artificial Sequence: Synthetic oligonucleotide
acacgggcacaaauagucc

SEQ ID NO: 679038 - RNA, 19 nt, Artificial Sequence
  Description of Artificial Sequence: Synthetic oligonucleotide
cccauguccuucauuauag

SEQ ID NO: 679039 - RNA, 19 nt, Artificial Sequence
  Description of Artificial Sequence: Synthetic oligonucleotide
uauccacaaagugggguca

SEQ ID NO: 679040 - RNA, 19 nt, Artificial Sequence
  Description of Artificial Sequence: Synthetic oligonucleotide
agcaguugcucugauuuca

SEQ ID NO: 679041 - RNA, 19 nt, Artificial Sequence
  Description of Artificial Sequence: Synthetic oligonucleotide
gcugaaauaguccgccuug

SEQ ID NO: 679042 - RNA, 19 nt, Artificial Sequence
  Description of Artificial Sequence: Synthetic oligonucleotide
aagugagucuuuagacuug

SEQ ID NO: 679043 - RNA, 19 nt, Artificial Sequence
  Description of Artificial Sequence: Synthetic oligonucleotide
ccuaagacauaaaggugcc

SEQ ID NO: 679044 - RNA, 19 nt, Artificial Sequence
  Description of Artificial Sequence: Synthetic oligonucleotide
ugggacggauguuaaugac

SEQ ID NO: 679045 - RNA, 19 nt, Artificial Sequence
  Description of Artificial Sequence: Synthetic oligonucleotide
cugugcugaaauaguccgc

SEQ ID NO: 679046 - RNA, 19 nt, Artificial Sequence
  Description of Artificial Sequence: Synthetic oligonucleotide
acauauccaucagauaaau

SEQ ID NO: 679047 - RNA, 19 nt, Artificial Sequence
  Description of Artificial Sequence: Synthetic oligonucleotide
auauuugaaguuggggaau

SEQ ID NO: 679048 - RNA, 19 nt, Artificial Sequence
  Description of Artificial Sequence: Synthetic oligonucleotide
acgugguaccucugcaaag

SEQ ID NO: 679049 - RNA, 19 nt, Artificial Sequence
  Description of Artificial Sequence: Synthetic oligonucleotide
ucucuuugcgaaggaacac

SEQ ID NO: 679050 - RNA, 19 nt, Artificial Sequence
  Description of Artificial Sequence: Synthetic oligonucleotide
uacggaucugacuuuuguu

SEQ ID NO: 679051 - RNA, 19 nt, Artificial Sequence
  Description of Artificial Sequence: Synthetic oligonucleotide
uagcgaucuucagagugcc

SEQ ID NO: 679052 - RNA, 19 nt, Artificial Sequence
  Description of Artificial Sequence: Synthetic oligonucleotide
auauuaacgauaggcuuuu

SEQ ID NO: 679053 - RNA, 19 nt, Artificial Sequence
  Description of Artificial Sequence: Synthetic oligonucleotide
gguuuaggcuggcaauggg

SEQ ID NO: 679054 - RNA, 19 nt, Artificial Sequence
  Description of Artificial Sequence: Synthetic oligonucleotide
caaugcuuaucagccgucc

SEQ ID NO: 679055 - RNA, 19 nt, Artificial Sequence
  Description of Artificial Sequence: Synthetic oligonucleotide
gcgauauuugaaguugggg

SEQ ID NO: 679056 - RNA, 19 nt, Artificial Sequence
  Description of Artificial Sequence: Synthetic oligonucleotide
ccucauuauccacaaagug

SEQ ID NO: 679057 - RNA, 19 nt, Artificial Sequence
  Description of Artificial Sequence: Synthetic oligonucleotide
uauaacccauucugcuggu

SEQ ID NO: 679058 - RNA, 19 nt, Artificial Sequence
  Description of Artificial Sequence: Synthetic oligonucleotide
ugaucagccuuuuggcaua

SEQ ID NO: 679059 - RNA, 19 nt, Artificial Sequence
  Description of Artificial Sequence: Synthetic oligonucleotide
cgauauuugaaguugggga

SEQ ID NO: 679060 - RNA, 19 nt, Artificial Sequence
  Description of Artificial Sequence: Synthetic oligonucleotide
cuuaucacauuguuccucu

SEQ ID NO: 679061 - RNA, 19 nt, Artificial Sequence
  Description of Artificial Sequence: Synthetic oligonucleotide
gacauauccaucagauaaa

SEQ ID NO: 679062 - RNA, 19 nt, Artificial Sequence
  Description of Artificial Sequence: Synthetic oligonucleotide
agcagucgauaccggggcg

SEQ ID NO: 679063 - RNA, 19 nt, Artificial Sequence
  Description of Artificial Sequence: Synthetic oligonucleotide
cgagauucaucguuguagg

SEQ ID NO: 679064 - RNA, 19 nt, Artificial Sequence
  Description of Artificial Sequence: Synthetic oligonucleotide
auaauacaccuuguucacu

SEQ ID NO: 679065 - RNA, 19 nt, Artificial Sequence
  Description of Artificial Sequence: Synthetic oligonucleotide
uauuugaaguuggggaauu

SEQ ID NO: 679066 - RNA, 19 nt, Artificial Sequence
  Description of Artificial Sequence: Synthetic oligonucleotide
ugguacauacaguucucuu

SEQ ID NO: 679067 - RNA, 19 nt, Artificial Sequence
  Description of Artificial Sequence: Synthetic oligonucleotide
cuuugcgaaggaacaccac

SEQ ID NO: 679068 - RNA, 19 nt, Artificial Sequence
  Description of Artificial Sequence: Synthetic oligonucleotide
agucaucucguagucauuu

SEQ ID NO: 679069 - RNA, 19 nt, Artificial Sequence
  Description of Artificial Sequence: Synthetic oligonucleotide
gccaacaugaaagaagaga

SEQ ID NO: 679070 - RNA, 19 nt, Artificial Sequence
  Description of Artificial Sequence: Synthetic oligonucleotide
cuucaauaaggggaaagaa

SEQ ID NO: 679071 - RNA, 19 nt, Artificial Sequence
  Description of Artificial Sequence: Synthetic oligonucleotide
uguugcauuauggccgcaa

SEQ ID NO: 679072 - RNA, 19 nt, Artificial Sequence
  Description of Artificial Sequence: Synthetic oligonucleotide
uaccggggcggacuauucc

SEQ ID NO: 679073 - RNA, 19 nt, Artificial Sequence
  Description of Artificial Sequence: Synthetic oligonucleotide
uugucggcgucuucucccc

SEQ ID NO: 679074 - RNA, 19 nt, Artificial Sequence
  Description of Artificial Sequence: Synthetic oligonucleotide
uggugacacgggcacaaau

SEQ ID NO: 679075 - RNA, 19 nt, Artificial Sequence
  Description of Artificial Sequence: Synthetic oligonucleotide
uguuagcgaucuucagagu

SEQ ID NO: 679076 - RNA, 19 nt, Artificial Sequence
  Description of Artificial Sequence: Synthetic oligonucleotide
acuauucccuguagcaaug

SEQ ID NO: 679077 - RNA, 19 nt, Artificial Sequence
  Description of Artificial Sequence: Synthetic oligonucleotide
augaucggaaguuggcauu

SEQ ID NO: 679078 - RNA, 19 nt, Artificial Sequence
  Description of Artificial Sequence: Synthetic oligonucleotide
gacggauguuaaugacuug

SEQ ID NO: 679079 - RNA, 19 nt, Artificial Sequence
  Description of Artificial Sequence: Synthetic oligonucleotide
ugaaagcaguugcucugau

SEQ ID NO: 679080 - RNA, 19 nt, Artificial Sequence
  Description of Artificial Sequence: Synthetic oligonucleotide
guuggggaauucccgguca

SEQ ID NO: 679081 - RNA, 19 nt, Artificial Sequence
  Description of Artificial Sequence: Synthetic oligonucleotide
ggguguuaacgaugaauug

SEQ ID NO: 679082 - RNA, 19 nt, Artificial Sequence
  Description of Artificial Sequence: Synthetic oligonucleotide
cacgggcacaaauagucca

SEQ ID NO: 679083 - RNA, 19 nt, Artificial Sequence
  Description of Artificial Sequence: Synthetic oligonucleotide
accacgugguaccucugca

SEQ ID NO: 679084 - RNA, 19 nt, Artificial Sequence
  Description of Artificial Sequence: Synthetic oligonucleotide
auggauguaucucccuguu

SEQ ID NO: 679085 - RNA, 19 nt, Artificial Sequence
  Description of Artificial Sequence: Synthetic oligonucleotide
acucagucuauuaaaucua

SEQ ID NO: 679086 - RNA, 19 nt, Artificial Sequence
  Description of Artificial Sequence: Synthetic oligonucleotide
cuaggggauggcaagucaa

SEQ ID NO: 679087 - RNA, 19 nt, Artificial Sequence
  Description of Artificial Sequence: Synthetic oligonucleotide
cacccgcuaaacaccuggg

SEQ ID NO: 679088 - RNA, 19 nt, Artificial Sequence
  Description of Artificial Sequence: Synthetic oligonucleotide
aguuggcauucuggaaaac

SEQ ID NO: 679089 - RNA, 19 nt, Artificial Sequence
  Description of Artificial Sequence: Synthetic oligonucleotide
guguuaacgaugaauuggu

SEQ ID NO: 679090 - RNA, 19 nt, Artificial Sequence
  Description of Artificial Sequence: Synthetic oligonucleotide
cgaaggaacaccaccguug

SEQ ID NO: 679091 - RNA, 19 nt, Artificial Sequence
  Description of Artificial Sequence: Synthetic oligonucleotide
agccguccucagaagagac

SEQ ID NO: 679092 - RNA, 19 nt, Artificial Sequence
  Description of Artificial Sequence: Synthetic oligonucleotide
ccaaguucuccgauuuagc

SEQ ID NO: 679093 - RNA, 19 nt, Artificial Sequence
  Description of Artificial Sequence: Synthetic oligonucleotide
auaacccauucugcugguc

SEQ ID NO: 679094 - RNA, 19 nt, Artificial Sequence
  Description of Artificial Sequence: Synthetic oligonucleotide
gaacuguggguaagugaug

SEQ ID NO: 679095 - RNA, 19 nt, Artificial Sequence
  Description of Artificial Sequence: Synthetic oligonucleotide
auuuaccgacaagaucaug

SEQ ID NO: 679096 - RNA, 19 nt, Artificial Sequence
  Description of Artificial Sequence: Synthetic oligonucleotide
agugcccuuugagaaauaa

SEQ ID NO: 679097 - RNA, 19 nt, Artificial Sequence
  Description of Artificial Sequence: Synthetic oligonucleotide
cacugaucccugugaaauc

SEQ ID NO: 679098 - RNA, 19 nt, Artificial Sequence
  Description of Artificial Sequence: Synthetic oligonucleotide
cuuaucagccguccucaga

SEQ ID NO: 679099 - RNA, 19 nt, Artificial Sequence
  Description of Artificial Sequence: Synthetic oligonucleotide
ggacugguaaggguuuagg

SEQ ID NO: 679100 - RNA, 19 nt, Artificial Sequence
  Description of Artificial Sequence: Synthetic oligonucleotide
acccgcuaaacaccugggu

SEQ ID NO: 679101 - RNA, 19 nt, Artificial Sequence
  Description of Artificial Sequence: Synthetic oligonucleotide
aaauggcuuugaggcacca

SEQ ID NO: 679102 - RNA, 19 nt, Artificial Sequence
  Description of Artificial Sequence: Synthetic oligonucleotide
gaucagccuuuuggcauag

SEQ ID NO: 679103 - RNA, 19 nt, Artificial Sequence
  Description of Artificial Sequence: Synthetic oligonucleotide
gcauuauggccgcaauggc

SEQ ID NO: 679104 - RNA, 19 nt, Artificial Sequence
  Description of Artificial Sequence: Synthetic oligonucleotide
agucaacuucucuguugcu

SEQ ID NO: 679105 - RNA, 19 nt, Artificial Sequence
  Description of Artificial Sequence: Synthetic oligonucleotide
uauuaacgauaggcuuuug

SEQ ID NO: 679106 - RNA, 19 nt, Artificial Sequence
  Description of Artificial Sequence: Synthetic oligonucleotide
uuacgcaauuuaccucauu

SEQ ID NO: 679107 - RNA, 19 nt, Artificial Sequence
  Description of Artificial Sequence: Synthetic oligonucleotide
ggggucaauuacuuaucac

SEQ ID NO: 679108 - RNA, 19 nt, Artificial Sequence
  Description of Artificial Sequence: Synthetic oligonucleotide
ggaaagaacuuguccaccu

SEQ ID NO: 679109 - RNA, 19 nt, Artificial Sequence
  Description of Artificial Sequence: Synthetic oligonucleotide
ccgcuaaacaccuggguuc

SEQ ID NO: 679110 - RNA, 19 nt, Artificial Sequence
  Description of Artificial Sequence: Synthetic oligonucleotide
cacccacugauucucuuga

SEQ ID NO: 679111 - RNA, 19 nt, Artificial Sequence
  Description of Artificial Sequence: Synthetic oligonucleotide
cagaucccgauuaugucua

SEQ ID NO: 679112 - RNA, 19 nt, Artificial Sequence
  Description of Artificial Sequence: Synthetic oligonucleotide
ggguuuaggcuggcaaugg

SEQ ID NO: 679113 - RNA, 19 nt, Artificial Sequence
  Description of Artificial Sequence: Synthetic oligonucleotide
guaucucccuguugcauua

SEQ ID NO: 679114 - RNA, 19 nt, Artificial Sequence
  Description of Artificial Sequence: Synthetic oligonucleotide
gcauuaaugaccacguggu

SEQ ID NO: 679115 - RNA, 19 nt, Artificial Sequence
  Description of Artificial Sequence: Synthetic oligonucleotide
gaauugcuuguuagcgauc

SEQ ID NO: 679116 - RNA, 19 nt, Artificial Sequence
  Description of Artificial Sequence: Synthetic oligonucleotide
guacggaucugacuuuugu

SEQ ID NO: 679117 - RNA, 19 nt, Artificial Sequence
  Description of Artificial Sequence: Synthetic oligonucleotide
ucuccgauuuagccucaua

SEQ ID NO: 679118 - RNA, 19 nt, Artificial Sequence
  Description of Artificial Sequence: Synthetic oligonucleotide
ucgauaccggggcggacua

SEQ ID NO: 679119 - RNA, 19 nt, Artificial Sequence
  Description of Artificial Sequence: Synthetic oligonucleotide
gguaccacuuuggacugug

SEQ ID NO: 679120 - RNA, 19 nt, Artificial Sequence
  Description of Artificial Sequence: Synthetic oligonucleotide
agcgaucuucagagugccc

SEQ ID NO: 679121 - RNA, 19 nt, Artificial Sequence
  Description of Artificial Sequence: Synthetic oligonucleotide
gcagaucccgauuaugucu

SEQ ID NO: 679122 - RNA, 19 nt, Artificial Sequence
  Description of Artificial Sequence: Synthetic oligonucleotide
cuucccuucgggaauugcu

SEQ ID NO: 679123 - RNA, 19 nt, Artificial Sequence
  Description of Artificial Sequence: Synthetic oligonucleotide
cucuugcagaucccgauua

SEQ ID NO: 679124 - RNA, 19 nt, Artificial Sequence
  Description of Artificial Sequence: Synthetic oligonucleotide
cagcuugacccugauucug

SEQ ID NO: 679125 - RNA, 19 nt, Artificial Sequence
  Description of Artificial Sequence: Synthetic oligonucleotide
gcggacuauucccuguagc

SEQ ID NO: 679126 - RNA, 19 nt, Artificial Sequence
  Description of Artificial Sequence: Synthetic oligonucleotide
ccgauuuagccucauacaa

SEQ ID NO: 679127 - RNA, 19 nt, Artificial Sequence
  Description of Artificial Sequence: Synthetic oligonucleotide
gcaaaccccaaguuacgca

SEQ ID NO: 679128 - RNA, 19 nt, Artificial Sequence
  Description of Artificial Sequence: Synthetic oligonucleotide
gaucccgauuaugucuaca

SEQ ID NO: 679129 - RNA, 19 nt, Artificial Sequence
  Description of Artificial Sequence: Synthetic oligonucleotide
guuuaggcuggcaaugggu

SEQ ID NO: 679130 - RNA, 19 nt, Artificial Sequence
  Description of Artificial Sequence: Synthetic oligonucleotide
cacgugguaccucugcaaa

SEQ ID NO: 679131 - RNA, 19 nt, Artificial Sequence
  Description of Artificial Sequence: Synthetic oligonucleotide
cuuucaggguguuaacgau

SEQ ID NO: 679132 - RNA, 19 nt, Artificial Sequence
  Description of Artificial Sequence: Synthetic oligonucleotide
agacuccuggaaacauguc

SEQ ID NO: 679133 - RNA, 19 nt, Artificial Sequence
  Description of Artificial Sequence: Synthetic oligonucleotide
gcagucgauaccggggcgg

SEQ ID NO: 679134 - RNA, 19 nt, Artificial Sequence
  Description of Artificial Sequence: Synthetic oligonucleotide
aggauagccuccgcagacu

SEQ ID NO: 679135 - RNA, 19 nt, Artificial Sequence
  Description of Artificial Sequence: Synthetic oligonucleotide
uccccaagguaugcagugu

SEQ ID NO: 679136 - RNA, 19 nt, Artificial Sequence
  Description of Artificial Sequence: Synthetic oligonucleotide
auaccggggcggacuauuc

SEQ ID NO: 679137 - RNA, 19 nt, Artificial Sequence
  Description of Artificial Sequence: Synthetic oligonucleotide
cacugauucucuugaaaau

SEQ ID NO: 679138 - RNA, 19 nt, Artificial Sequence
  Description of Artificial Sequence: Synthetic oligonucleotide
cagggaaguacagaagucu

SEQ ID NO: 679139 - RNA, 19 nt, Artificial Sequence
  Description of Artificial Sequence: Synthetic oligonucleotide
ccugugaaaucaaacugaa

SEQ ID NO: 679140 - RNA, 19 nt, Artificial Sequence
  Description of Artificial Sequence: Synthetic oligonucleotide
ggucaauuacuuaucacau

SEQ ID NO: 679141 - RNA, 19 nt, Artificial Sequence
  Description of Artificial Sequence: Synthetic oligonucleotide
acaagaggguucagcugug

SEQ ID NO: 679142 - RNA, 19 nt, Artificial Sequence
  Description of Artificial Sequence: Synthetic oligonucleotide
gccuuagccacaguagaac

SEQ ID NO: 679143 - RNA, 19 nt, Artificial Sequence
  Description of Artificial Sequence: Synthetic oligonucleotide
cccgauuaugucuacaagu

SEQ ID NO: 679144 - RNA, 19 nt, Artificial Sequence
  Description of Artificial Sequence: Synthetic oligonucleotide
uaguccgccuugucacccu

SEQ ID NO: 679145 - RNA, 19 nt, Artificial Sequence
  Description of Artificial Sequence: Synthetic oligonucleotide
agucgauaccggggcggac

SEQ ID NO: 679146 - RNA, 19 nt, Artificial Sequence
  Description of Artificial Sequence: Synthetic oligonucleotide
ggaauucccggucacacuu

SEQ ID NO: 679147 - RNA, 19 nt, Artificial Sequence
  Description of Artificial Sequence: Synthetic oligonucleotide
auaguccacuuggacuggu

SEQ ID NO: 679148 - RNA, 19 nt, Artificial Sequence
  Description of Artificial Sequence: Synthetic oligonucleotide
gaaagcaguugcucugauu

SEQ ID NO: 679149 - RNA, 19 nt, Artificial Sequence
  Description of Artificial Sequence: Synthetic oligonucleotide
gucggcgucuucuccccac

SEQ ID NO: 679150 - RNA, 19 nt, Artificial Sequence
  Description of Artificial Sequence: Synthetic oligonucleotide
gggaaguacagaagucuca

SEQ ID NO: 679151 - RNA, 19 nt, Artificial Sequence
  Description of Artificial Sequence: Synthetic oligonucleotide
ugucggcgucuucucccca

SEQ ID NO: 679152 - RNA, 19 nt, Artificial Sequence
  Description of Artificial Sequence: Synthetic oligonucleotide
uggguaagugauggccauc

SEQ ID NO: 679153 - RNA, 19 nt, Artificial Sequence
  Description of Artificial Sequence: Synthetic oligonucleotide
cagagugcccuuugagaaa

SEQ ID NO: 679154 - RNA, 19 nt, Artificial Sequence
  Description of Artificial Sequence: Synthetic oligonucleotide
cacucauaagcagucgaua

SEQ ID NO: 679155 - RNA, 19 nt, Artificial Sequence
  Description of Artificial Sequence: Synthetic oligonucleotide
ggugacacgggcacaaaua

SEQ ID NO: 679156 - RNA, 19 nt, Artificial Sequence
  Description of Artificial Sequence: Synthetic oligonucleotide
ggcggacuauucccuguag

SEQ ID NO: 679157 - RNA, 19 nt, Artificial Sequence
  Description of Artificial Sequence: Synthetic oligonucleotide
caucacaguggccuuaauu

SEQ ID NO: 679158 - RNA, 19 nt, Artificial Sequence
  Description of Artificial Sequence: Synthetic oligonucleotide
agguacggaucugacuuuu

SEQ ID NO: 679159 - RNA, 19 nt, Artificial Sequence
  Description of Artificial Sequence: Synthetic oligonucleotide
gcuuaucagccguccucag

SEQ ID NO: 679160 - RNA, 19 nt, Artificial Sequence
  Description of Artificial Sequence: Synthetic oligonucleotide
acccacugauucucuugaa

SEQ ID NO: 679161 - RNA, 19 nt, Artificial Sequence
  Description of Artificial Sequence: Synthetic oligonucleotide
ggacuauucccuguagcaa

SEQ ID NO: 679162 - RNA, 19 nt, Artificial Sequence
  Description of Artificial Sequence: Synthetic oligonucleotide
cggacuauucccuguagca

SEQ ID NO: 679163 - RNA, 19 nt, Artificial Sequence
  Description of Artificial Sequence: Synthetic oligonucleotide
gacacccgcuaaacaccug

SEQ ID NO: 679164 - RNA, 19 nt, Artificial Sequence
  Description of Artificial Sequence: Synthetic oligonucleotide
cacuuggacugguaagggu

SEQ ID NO: 679165 - RNA, 19 nt, Artificial Sequence
  Description of Artificial Sequence: Synthetic oligonucleotide
cuuagucaacuucucuguu

SEQ ID NO: 679166 - RNA, 19 nt, Artificial Sequence
  Description of Artificial Sequence: Synthetic oligonucleotide
gguacggaucugacuuuug

SEQ ID NO: 679167 - RNA, 19 nt, Artificial Sequence
  Description of Artificial Sequence: Synthetic oligonucleotide
gucuuuagacuugcucucu

SEQ ID NO: 679168 - RNA, 19 nt, Artificial Sequence
  Description of Artificial Sequence: Synthetic oligonucleotide
uaucucccuguugcauuau

SEQ ID NO: 679169 - RNA, 19 nt, Artificial Sequence
  Description of Artificial Sequence: Synthetic oligonucleotide
cccugauucugaauguaaa

SEQ ID NO: 679170 - RNA, 19 nt, Artificial Sequence
  Description of Artificial Sequence: Synthetic oligonucleotide
guggguaagugauggccau

SEQ ID NO: 679171 - RNA, 19 nt, Artificial Sequence
  Description of Artificial Sequence: Synthetic oligonucleotide
ggguaagugauggccaucu

SEQ ID NO: 679172 - RNA, 19 nt, Artificial Sequence
  Description of Artificial Sequence: Synthetic oligonucleotide
accccaaguuacgcaauuu

SEQ ID NO: 679173 - RNA, 19 nt, Artificial Sequence
  Description of Artificial Sequence: Synthetic oligonucleotide
gucgauaccggggcggacu

SEQ ID NO: 679174 - RNA, 19 nt, Artificial Sequence
  Description of Artificial Sequence: Synthetic oligonucleotide
ggacggauguuaaugacuu

SEQ ID NO: 679175 - RNA, 19 nt, Artificial Sequence
  Description of Artificial Sequence: Synthetic oligonucleotide
ccauucugcuggucaauca

SEQ ID NO: 679176 - RNA, 19 nt, Artificial Sequence
  Description of Artificial Sequence: Synthetic oligonucleotide
gauaccggggcggacuauu

SEQ ID NO: 679177 - RNA, 19 nt, Artificial Sequence
  Description of Artificial Sequence: Synthetic oligonucleotide
cugaaauaguccgccuugu

SEQ ID NO: 679178 - RNA, 19 nt, Artificial Sequence
  Description of Artificial Sequence: Synthetic oligonucleotide
caguggccuuaauucgaga

SEQ ID NO: 679179 - RNA, 19 nt, Artificial Sequence
  Description of Artificial Sequence: Synthetic oligonucleotide
gggacggauguuaaugacu

SEQ ID NO: 679180 - RNA, 19 nt, Artificial Sequence
  Description of Artificial Sequence: Synthetic oligonucleotide
uucuccgauuuagccucau

SEQ ID NO: 679181 - RNA, 19 nt, Artificial Sequence
  Description of Artificial Sequence: Synthetic oligonucleotide
cugguacauacaguucucu

SEQ ID NO: 679182 - RNA, 19 nt, Artificial Sequence
  Description of Artificial Sequence: Synthetic oligonucleotide
gcaaugggacggauguuaa

SEQ ID NO: 679183 - RNA, 19 nt, Artificial Sequence
  Description of Artificial Sequence: Synthetic oligonucleotide
cagucgauaccggggcgga

SEQ ID NO: 679184 - RNA, 19 nt, Artificial Sequence
  Description of Artificial Sequence: Synthetic oligonucleotide
ccccaaguuacgcaauuua

SEQ ID NO: 679185 - RNA, 19 nt, Artificial Sequence
  Description of Artificial Sequence: Synthetic oligonucleotide
caaugggacggauguuaau

SEQ ID NO: 679186 - RNA, 19 nt, Artificial Sequence
  Description of Artificial Sequence: Synthetic oligonucleotide
cagcgguauaacccauucu

SEQ ID NO: 679187 - RNA, 19 nt, Artificial Sequence
  Description of Artificial Sequence: Synthetic oligonucleotide
gggaauucccggucacacu

SEQ ID NO: 679188 - RNA, 19 nt, Artificial Sequence
  Description of Artificial Sequence: Synthetic oligonucleotide
guucuccgauuuagccuca

SEQ ID NO: 679189 - RNA, 19 nt, Artificial Sequence
  Description of Artificial Sequence: Synthetic oligonucleotide
ggccuuaauucgagauuca

SEQ ID NO: 679190 - RNA, 19 nt, Artificial Sequence
  Description of Artificial Sequence: Synthetic oligonucleotide
ggccugguacauacaguuc

SEQ ID NO: 679191 - RNA, 19 nt, Artificial Sequence
  Description of Artificial Sequence: Synthetic oligonucleotide
gugcccuuugagaaauaau

SEQ ID NO: 679192 - RNA, 19 nt, Artificial Sequence
  Description of Artificial Sequence: Synthetic oligonucleotide
ccuucccuucgggaauugc

SEQ ID NO: 679193 - RNA, 19 nt, Artificial Sequence
  Description of Artificial Sequence: Synthetic oligonucleotide
guuacgcaauuuaccucau

SEQ ID NO: 679194 - RNA, 19 nt, Artificial Sequence
  Description of Artificial Sequence: Synthetic oligonucleotide
gggcggacuauucccugua

SEQ ID NO: 679195 - RNA, 19 nt, Artificial Sequence
  Description of Artificial Sequence: Synthetic oligonucleotide
gccuuaauucgagauucau

SEQ ID NO: 679196 - RNA, 19 nt, Artificial Sequence
  Description of Artificial Sequence: Synthetic oligonucleotide
cccuaggggauggcaaguc

SEQ ID NO: 679197 - RNA, 19 nt, Artificial Sequence
  Description of Artificial Sequence: Synthetic oligonucleotide
ccagcuugacccugauucu

SEQ ID NO: 679198 - RNA, 19 nt, Artificial Sequence
  Description of Artificial Sequence: Synthetic oligonucleotide
caagaggguucagcugugu

SEQ ID NO: 679199 - RNA, 19 nt, Artificial Sequence
  Description of Artificial Sequence: Synthetic oligonucleotide
gcgaaggaacaccaccguu

SEQ ID NO: 679200 - RNA, 19 nt, Artificial Sequence
  Description of Artificial Sequence: Synthetic oligonucleotide
ggggcggacuauucccugu

SEQ ID NO: 679201 - RNA, 19 nt, Artificial Sequence
  Description of Artificial Sequence: Synthetic oligonucleotide
gcuugcugacugguggugu

SEQ ID NO: 679202 - RNA, 19 nt, Artificial Sequence
  Description of Artificial Sequence: Synthetic oligonucleotide
guaccacuuuggacugugu

SEQ ID NO: 679203 - RNA, 19 nt, Artificial Sequence
  Description of Artificial Sequence: Synthetic oligonucleotide
gguaagugauggccaucuu

SEQ ID NO: 679204 - RNA, 19 nt, Artificial Sequence
  Description of Artificial Sequence: Synthetic oligonucleotide
cuguugcauuauggccgca

SEQ ID NO: 679205 - RNA, 19 nt, Artificial Sequence
  Description of Artificial Sequence: Synthetic oligonucleotide
cggggcggacuauucccug

SEQ ID NO: 679206 - RNA, 19 nt, Artificial Sequence
  Description of Artificial Sequence: Synthetic oligonucleotide
cuguagcaaugggacggau

SEQ ID NO: 679207 - RNA, 19 nt, Artificial Sequence
  Description of Artificial Sequence: Synthetic oligonucleotide
ccggggcggacuauucccu

SEQ ID NO: 679208 - RNA, 19 nt, Artificial Sequence
  Description of Artificial Sequence: Synthetic oligonucleotide
cccaucugacucagucuau

SEQ ID NO: 679209 - RNA, 19 nt, Artificial Sequence
  Description of Artificial Sequence: Synthetic oligonucleotide
cguugccacugugcugaaa

SEQ ID NO: 679210 - RNA, 19 nt, Artificial Sequence
  Description of Artificial Sequence: Synthetic oligonucleotide
cgauaccggggcggacuau

SEQ ID NO: 679211 - RNA, 19 nt, Artificial Sequence
  Description of Artificial Sequence: Synthetic oligonucleotide
aaggucaugaaguacaggc

SEQ ID NO: 679212 - RNA, 19 nt, Artificial Sequence
  Description of Artificial Sequence: Synthetic oligonucleotide
aauacugugguguuauugc

SEQ ID NO: 679213 - RNA, 19 nt, Artificial Sequence
  Description of Artificial Sequence: Synthetic oligonucleotide
aaaaugauugucugcaugg

SEQ ID NO: 679214 - RNA, 19 nt, Artificial Sequence
  Description of Artificial Sequence: Synthetic oligonucleotide
cauagaaguaccuucaggc

SEQ ID NO: 679215 - RNA, 19 nt, Artificial Sequence
  Description of Artificial Sequence: Synthetic oligonucleotide
ugugugguuaauaaaucgg

SEQ ID NO: 679216 - RNA, 19 nt, Artificial Sequence
  Description of Artificial Sequence: Synthetic oligonucleotide
ucguaaauaucauagaagu

SEQ ID NO: 679217 - RNA, 19 nt, Artificial Sequence
  Description of Artificial Sequence: Synthetic oligonucleotide
ugugcgaagagguaggccg

SEQ ID NO: 679218 - RNA, 19 nt, Artificial Sequence
  Description of Artificial Sequence: Synthetic oligonucleotide
ugagagaucaaacaaguuc

SEQ ID NO: 679219 - RNA, 19 nt, Artificial Sequence
  Description of Artificial Sequence: Synthetic oligonucleotide
aacuucguaaauaucauag

SEQ ID NO: 679220 - RNA, 19 nt, Artificial Sequence
  Description of Artificial Sequence: Synthetic oligonucleotide
aaugaaauagaagggcuuc

SEQ ID NO: 679221 - RNA, 19 nt, Artificial Sequence
  Description of Artificial Sequence: Synthetic oligonucleotide
uaguacauaauacuguggu

SEQ ID NO: 679222 - RNA, 19 nt, Artificial Sequence
  Description of Artificial Sequence: Synthetic oligonucleotide
aacugucuauaggagaugc

SEQ ID NO: 679223 - RNA, 19 nt, Artificial Sequence
  Description of Artificial Sequence: Synthetic oligonucleotide
uucgacuucacaaggaugu

SEQ ID NO: 679224 - RNA, 19 nt, Artificial Sequence
  Description of Artificial Sequence: Synthetic oligonucleotide
acgauaaagcuccagaaug

SEQ ID NO: 679225 - RNA, 19 nt, Artificial Sequence
  Description of Artificial Sequence: Synthetic oligonucleotide
aagauaaggaaggcugucc

SEQ ID NO: 679226 - RNA, 19 nt, Artificial Sequence
  Description of Artificial Sequence: Synthetic oligonucleotide
aaacaaguuccauccagag

SEQ ID NO: 679227 - RNA, 19 nt, Artificial Sequence
  Description of Artificial Sequence: Synthetic oligonucleotide
uguagaaacgcaucaggcc

SEQ ID NO: 679228 - RNA, 19 nt, Artificial Sequence
  Description of Artificial Sequence: Synthetic oligonucleotide
ucggcuguaguucaugcgg

SEQ ID NO: 679229 - RNA, 19 nt, Artificial Sequence
  Description of Artificial Sequence: Synthetic oligonucleotide
ugacguagcuccuugaccc

SEQ ID NO: 679230 - RNA, 19 nt, Artificial Sequence
  Description of Artificial Sequence: Synthetic oligonucleotide
gguguuauugcauagaaga

SEQ ID NO: 679231 - RNA, 19 nt, Artificial Sequence
  Description of Artificial Sequence: Synthetic oligonucleotide
auugagauaguaguagccg

SEQ ID NO: 679232 - RNA, 19 nt, Artificial Sequence
  Description of Artificial Sequence: Synthetic oligonucleotide
gacccauacaaaaugauug

SEQ ID NO: 679233 - RNA, 19 nt, Artificial Sequence
  Description of Artificial Sequence: Synthetic oligonucleotide
gugguuaauaaaucgguag

SEQ ID NO: 679234 - RNA, 19 nt, Artificial Sequence
  Description of Artificial Sequence: Synthetic oligonucleotide
ugauaauucauuucccagu

SEQ ID NO: 679235 - RNA, 19 nt, Artificial Sequence
  Description of Artificial Sequence: Synthetic oligonucleotide
aaugauugucugcauggug

SEQ ID NO: 679236 - RNA, 19 nt, Artificial Sequence
  Description of Artificial Sequence: Synthetic oligonucleotide
uccauagaugguaagaaau

SEQ ID NO: 679237 - RNA, 19 nt, Artificial Sequence
  Description of Artificial Sequence: Synthetic oligonucleotide
uaauaaaucgguaggcauc

SEQ ID NO: 679238 - RNA, 19 nt, Artificial Sequence
  Description of Artificial Sequence: Synthetic oligonucleotide
auaguagaagaugagcagg

SEQ ID NO: 679239 - RNA, 19 nt, Artificial Sequence
  Description of Artificial Sequence: Synthetic oligonucleotide
uuaauaaaucgguaggcau

SEQ ID NO: 679240 - RNA, 19 nt, Artificial Sequence
  Description of Artificial Sequence: Synthetic oligonucleotide
uagguaacaaaucauugua

SEQ ID NO: 679241 - RNA, 19 nt, Artificial Sequence
  Description of Artificial Sequence: Synthetic oligonucleotide
gaacaguuccacuccauag

SEQ ID NO: 679242 - RNA, 19 nt, Artificial Sequence
  Description of Artificial Sequence: Synthetic oligonucleotide
ucuuauuguccacugugug

SEQ ID NO: 679243 - RNA, 19 nt, Artificial Sequence
  Description of Artificial Sequence: Synthetic oligonucleotide
aguuggcuugaugagaccc

SEQ ID NO: 679244 - RNA, 19 nt, Artificial Sequence
  Description of Artificial Sequence: Synthetic oligonucleotide
uguuauugcauagaagagu

SEQ ID NO: 679245 - RNA, 19 nt, Artificial Sequence
  Description of Artificial Sequence: Synthetic oligonucleotide
ucuuuuauugacacaccac

SEQ ID NO: 679246 - RNA, 19 nt, Artificial Sequence
  Description of Artificial Sequence: Synthetic oligonucleotide
caccucacgauaaagcucc

SEQ ID NO: 679247 - RNA, 19 nt, Artificial Sequence
  Description of Artificial Sequence: Synthetic oligonucleotide
agguguguugcucugguuc

SEQ ID NO: 679248 - RNA, 19 nt, Artificial Sequence
  Description of Artificial Sequence: Synthetic oligonucleotide
uguggaguaaggcuggggu

SEQ ID NO: 679249 - RNA, 19 nt, Artificial Sequence
  Description of Artificial Sequence: Synthetic oligonucleotide
aucgguaggcaucagccac

SEQ ID NO: 679250 - RNA, 19 nt, Artificial Sequence
  Description of Artificial Sequence: Synthetic oligonucleotide
cuuuuauugacacaccaca

SEQ ID NO: 679251 - RNA, 19 nt, Artificial Sequence
  Description of Artificial Sequence: Synthetic oligonucleotide
acauuguaguacauaauac

SEQ ID NO: 679252 - RNA, 19 nt, Artificial Sequence
  Description of Artificial Sequence: Synthetic oligonucleotide
acaauauagaaggucauga

SEQ ID NO: 679253 - RNA, 19 nt, Artificial Sequence
  Description of Artificial Sequence: Synthetic oligonucleotide
auucggggcuuguagaaac

SEQ ID NO: 679254 - RNA, 19 nt, Artificial Sequence
  Description of Artificial Sequence: Synthetic oligonucleotide
uuuuauugacacaccacaa

SEQ ID NO: 679255 - RNA, 19 nt, Artificial Sequence
  Description of Artificial Sequence: Synthetic oligonucleotide
acaaccgugagcucaaaca

SEQ ID NO: 679256 - RNA, 19 nt, Artificial Sequence
  Description of Artificial Sequence: Synthetic oligonucleotide
aaggccacgauaaugguca

SEQ ID NO: 679257 - RNA, 19 nt, Artificial Sequence
  Description of Artificial Sequence: Synthetic oligonucleotide
ucuguaaauaugugcauau

SEQ ID NO: 679258 - RNA, 19 nt, Artificial Sequence
  Description of Artificial Sequence: Synthetic oligonucleotide
guccaugaaauacuggaag

SEQ ID NO: 679259 - RNA, 19 nt, Artificial Sequence
  Description of Artificial Sequence: Synthetic oligonucleotide
gauaaggaaggcuguccgg

SEQ ID NO: 679260 - RNA, 19 nt, Artificial Sequence
  Description of Artificial Sequence: Synthetic oligonucleotide
cacgauaauggucauuacc

SEQ ID NO: 679261 - RNA, 19 nt, Artificial Sequence
  Description of Artificial Sequence: Synthetic oligonucleotide
cucccuagcacucauucgg

SEQ ID NO: 679262 - RNA, 19 nt, Artificial Sequence
  Description of Artificial Sequence: Synthetic oligonucleotide
ugucuauaggagaugccgc

SEQ ID NO: 679263 - RNA, 19 nt, Artificial Sequence
  Description of Artificial Sequence: Synthetic oligonucleotide
cacgaugcccuuaaguugc

SEQ ID NO: 679264 - RNA, 19 nt, Artificial Sequence
  Description of Artificial Sequence: Synthetic oligonucleotide
cugucuauaggagaugccg

SEQ ID NO: 679265 - RNA, 19 nt, Artificial Sequence
  Description of Artificial Sequence: Synthetic oligonucleotide
uauauaugagugugucugc

SEQ ID NO: 679266 - RNA, 19 nt, Artificial Sequence
  Description of Artificial Sequence: Synthetic oligonucleotide
agcuccuugacccauacaa

SEQ ID NO: 679267 - RNA, 19 nt, Artificial Sequence
  Description of Artificial Sequence: Synthetic oligonucleotide
uggaguugcagcaguugcg

SEQ ID NO: 679268 - RNA, 19 nt, Artificial Sequence
  Description of Artificial Sequence: Synthetic oligonucleotide
uucuagguaacaaaucauu

SEQ ID NO: 679269 - RNA, 19 nt, Artificial Sequence
  Description of Artificial Sequence: Synthetic oligonucleotide
acgauaauggucauuacca

SEQ ID NO: 679270 - RNA, 19 nt, Artificial Sequence
  Description of Artificial Sequence: Synthetic oligonucleotide
agcucaucaaaccaaugcu

SEQ ID NO: 679271 - RNA, 19 nt, Artificial Sequence
  Description of Artificial Sequence: Synthetic oligonucleotide
auaauggucauuaccacca

SEQ ID NO: 679272 - RNA, 19 nt, Artificial Sequence
  Description of Artificial Sequence: Synthetic oligonucleotide
guugcucugguucaaggcc

SEQ ID NO: 679273 - RNA, 19 nt, Artificial Sequence
  Description of Artificial Sequence: Synthetic oligonucleotide
aguacauaauacuguggug

SEQ ID NO: 679274 - RNA, 19 nt, Artificial Sequence
  Description of Artificial Sequence: Synthetic oligonucleotide
uugugugcgaagagguagg

SEQ ID NO: 679275 - RNA, 19 nt, Artificial Sequence
  Description of Artificial Sequence: Synthetic oligonucleotide
cauagaugguaagaaauac

SEQ ID NO: 679276 - RNA, 19 nt, Artificial Sequence
  Description of Artificial Sequence: Synthetic oligonucleotide
aaauaaccucagcagcuga

SEQ ID NO: 679277 - RNA, 19 nt, Artificial Sequence
  Description of Artificial Sequence: Synthetic oligonucleotide
cuucgaacugucuauagga

SEQ ID NO: 679278 - RNA, 19 nt, Artificial Sequence
  Description of Artificial Sequence: Synthetic oligonucleotide
auagaaggucaugaaguac

SEQ ID NO: 679279 - RNA, 19 nt, Artificial Sequence
  Description of Artificial Sequence: Synthetic oligonucleotide
uaccaguuguugacaaccg

SEQ ID NO: 679280 - RNA, 19 nt, Artificial Sequence
  Description of Artificial Sequence: Synthetic oligonucleotide
uugagauaguaguagccgu

SEQ ID NO: 679281 - RNA, 19 nt, Artificial Sequence
  Description of Artificial Sequence: Synthetic oligonucleotide
ugguguuauugcauagaag

SEQ ID NO: 679282 - RNA, 19 nt, Artificial Sequence
  Description of Artificial Sequence: Synthetic oligonucleotide
ucgcuuaugcagcagcuga

SEQ ID NO: 679283 - RNA, 19 nt, Artificial Sequence
  Description of Artificial Sequence: Synthetic oligonucleotide
gauaaagcuccagaauggc

SEQ ID NO: 679284 - RNA, 19 nt, Artificial Sequence
  Description of Artificial Sequence: Synthetic oligonucleotide
ugugguuaauaaaucggua

SEQ ID NO: 679285 - RNA, 19 nt, Artificial Sequence
  Description of Artificial Sequence: Synthetic oligonucleotide
acucauucggggcuuguag

SEQ ID NO: 679286 - RNA, 19 nt, Artificial Sequence
  Description of Artificial Sequence: Synthetic oligonucleotide
uguccggggaagcucauca

SEQ ID NO: 679287 - RNA, 19 nt, Artificial Sequence
  Description of Artificial Sequence: Synthetic oligonucleotide
ucgaacugucuauaggaga

SEQ ID NO: 679288 - RNA, 19 nt, Artificial Sequence
  Description of Artificial Sequence: Synthetic oligonucleotide
ugcauauauaugagugugu

SEQ ID NO: 679289 - RNA, 19 nt, Artificial Sequence
  Description of Artificial Sequence: Synthetic oligonucleotide
uuggauaguuccuucucga

SEQ ID NO: 679290 - RNA, 19 nt, Artificial Sequence
  Description of Artificial Sequence: Synthetic oligonucleotide
uucugucucuguaaauaug

SEQ ID NO: 679291 - RNA, 19 nt, Artificial Sequence
  Description of Artificial Sequence: Synthetic oligonucleotide
uagccguccucuaucuugg

SEQ ID NO: 679292 - RNA, 19 nt, Artificial Sequence
  Description of Artificial Sequence: Synthetic oligonucleotide
agagaugagauucccuccu

SEQ ID NO: 679293 - RNA, 19 nt, Artificial Sequence
  Description of Artificial Sequence: Synthetic oligonucleotide
uauaggagaugccgcccgg

SEQ ID NO: 679294 - RNA, 19 nt, Artificial Sequence
  Description of Artificial Sequence: Synthetic oligonucleotide
ugguauccaacacguugcg

SEQ ID NO: 679295 - RNA, 19 nt, Artificial Sequence
  Description of Artificial Sequence: Synthetic oligonucleotide
cuucguaaauaucauagaa

SEQ ID NO: 679296 - RNA, 19 nt, Artificial Sequence
  Description of Artificial Sequence: Synthetic oligonucleotide
aucuccgucccagaaacac

SEQ ID NO: 679297 - RNA, 19 nt, Artificial Sequence
  Description of Artificial Sequence: Synthetic oligonucleotide
caccauggucacaauauag

SEQ ID NO: 679298 - RNA, 19 nt, Artificial Sequence
  Description of Artificial Sequence: Synthetic oligonucleotide
aaucgguaggcaucagcca

SEQ ID NO: 679299 - RNA, 19 nt, Artificial Sequence
  Description of Artificial Sequence: Synthetic oligonucleotide
acuucguaaauaucauaga

SEQ ID NO: 679300 - RNA, 19 nt, Artificial Sequence
  Description of Artificial Sequence: Synthetic oligonucleotide
guagccguccucuaucuug

SEQ ID NO: 679301 - RNA, 19 nt, Artificial Sequence
  Description of Artificial Sequence: Synthetic oligonucleotide
ugagauucccuccucucaa

SEQ ID NO: 679302 - RNA, 19 nt, Artificial Sequence
  Description of Artificial Sequence: Synthetic oligonucleotide
aacacguugcgguagcguu

SEQ ID NO: 679303 - RNA, 19 nt, Artificial Sequence
  Description of Artificial Sequence: Synthetic oligonucleotide
uaaggaaggcuguccgggg

SEQ ID NO: 679304 - RNA, 19 nt, Artificial Sequence
  Description of Artificial Sequence: Synthetic oligonucleotide
ucaagcucaggucacuuuu

SEQ ID NO: 679305 - RNA, 19 nt, Artificial Sequence
  Description of Artificial Sequence: Synthetic oligonucleotide
ucugacguagcuccuugac

SEQ ID NO: 679306 - RNA, 19 nt, Artificial Sequence
  Description of Artificial Sequence: Synthetic oligonucleotide
aaacgcaucaggccuucga

SEQ ID NO: 679307 - RNA, 19 nt, Artificial Sequence
  Description of Artificial Sequence: Synthetic oligonucleotide
uucggcuguaguucaugcg

SEQ ID NO: 679308 - RNA, 19 nt, Artificial Sequence
  Description of Artificial Sequence: Synthetic oligonucleotide
guuaauaaaucgguaggca

SEQ ID NO: 679309 - RNA, 19 nt, Artificial Sequence
  Description of Artificial Sequence: Synthetic oligonucleotide
guaguacauaauacugugg

SEQ ID NO: 679310 - RNA, 19 nt, Artificial Sequence
  Description of Artificial Sequence: Synthetic oligonucleotide
uuauugcauagaagaguug

SEQ ID NO: 679311 - RNA, 19 nt, Artificial Sequence
  Description of Artificial Sequence: Synthetic oligonucleotide
gucuauaggagaugccgcc

SEQ ID NO: 679312 - RNA, 19 nt, Artificial Sequence
  Description of Artificial Sequence: Synthetic oligonucleotide
uuucggcuguaguucaugc

SEQ ID NO: 679313 - RNA, 19 nt, Artificial Sequence
  Description of Artificial Sequence: Synthetic oligonucleotide
aacgcaucaggccuucgaa

SEQ ID NO: 679314 - RNA, 19 nt, Artificial Sequence
  Description of Artificial Sequence: Synthetic oligonucleotide
ggucuuauuguccacugug

SEQ ID NO: 679315 - RNA, 19 nt, Artificial Sequence
  Description of Artificial Sequence: Synthetic oligonucleotide
augggcgguucgcuuaugc

SEQ ID NO: 679316 - RNA, 19 nt, Artificial Sequence
  Description of Artificial Sequence: Synthetic oligonucleotide
cugacaagcaggcgguagg

SEQ ID NO: 679317 - RNA, 19 nt, Artificial Sequence
  Description of Artificial Sequence: Synthetic oligonucleotide
ucaaaguuauugagauagu

SEQ ID NO: 679318 - RNA, 19 nt, Artificial Sequence
  Description of Artificial Sequence: Synthetic oligonucleotide
aggucugcgaggugacacc

SEQ ID NO: 679319 - RNA, 19 nt, Artificial Sequence
  Description of Artificial Sequence: Synthetic oligonucleotide
guagaaacgcaucaggccu

SEQ ID NO: 679320 - RNA, 19 nt, Artificial Sequence
  Description of Artificial Sequence: Synthetic oligonucleotide
gguuaauaaaucgguaggc

SEQ ID NO: 679321 - RNA, 19 nt, Artificial Sequence
  Description of Artificial Sequence: Synthetic oligonucleotide
gagauaguaguagccgucc

SEQ ID NO: 679322 - RNA, 19 nt, Artificial Sequence
  Description of Artificial Sequence: Synthetic oligonucleotide
uagaagaguuggcuugaug

SEQ ID NO: 679323 - RNA, 19 nt, Artificial Sequence
  Description of Artificial Sequence: Synthetic oligonucleotide
uucggggcuuguagaaacg

SEQ ID NO: 679324 - RNA, 19 nt, Artificial Sequence
  Description of Artificial Sequence: Synthetic oligonucleotide
ugcauagaagaguuggcuu

SEQ ID NO: 679325 - RNA, 19 nt, Artificial Sequence
  Description of Artificial Sequence: Synthetic oligonucleotide
aaaggccuccaagaugaag

SEQ ID NO: 679326 - RNA, 19 nt, Artificial Sequence
  Description of Artificial Sequence: Synthetic oligonucleotide
auagaugguaagaaauaca

SEQ ID NO: 679327 - RNA, 19 nt, Artificial Sequence
  Description of Artificial Sequence: Synthetic oligonucleotide
ugcauacacacaugguuuc

SEQ ID NO: 679328 - RNA, 19 nt, Artificial Sequence
  Description of Artificial Sequence: Synthetic oligonucleotide
aggccuucgacuucacaag

SEQ ID NO: 679329 - RNA, 19 nt, Artificial Sequence
  Description of Artificial Sequence: Synthetic oligonucleotide
acaagcaggcgguaggcgu

SEQ ID NO: 679330 - RNA, 19 nt, Artificial Sequence
  Description of Artificial Sequence: Synthetic oligonucleotide
cacaagucugggcacagug

SEQ ID NO: 679331 - RNA, 19 nt, Artificial Sequence
  Description of Artificial Sequence: Synthetic oligonucleotide
guguuauugcauagaagag

SEQ ID NO: 679332 - RNA, 19 nt, Artificial Sequence
  Description of Artificial Sequence: Synthetic oligonucleotide
auaugagugugucugcaua

SEQ ID NO: 679333 - RNA, 19 nt, Artificial Sequence
  Description of Artificial Sequence: Synthetic oligonucleotide
ugugguguuauugcauaga

SEQ ID NO: 679334 - RNA, 19 nt, Artificial Sequence
  Description of Artificial Sequence: Synthetic oligonucleotide
uguaguucaugcggaagac

SEQ ID NO: 679335 - RNA, 19 nt, Artificial Sequence
  Description of Artificial Sequence: Synthetic oligonucleotide
cugacguagcuccuugacc

SEQ ID NO: 679336 - RNA, 19 nt, Artificial Sequence
  Description of Artificial Sequence: Synthetic oligonucleotide
guauccaacacguugcggu

SEQ ID NO: 679337 - RNA, 19 nt, Artificial Sequence
  Description of Artificial Sequence: Synthetic oligonucleotide
cuucgacuucacaaggaug

SEQ ID NO: 679338 - RNA, 19 nt, Artificial Sequence
  Description of Artificial Sequence: Synthetic oligonucleotide
agcgcugacgaaugacagg

SEQ ID NO: 679339 - RNA, 19 nt, Artificial Sequence
  Description of Artificial Sequence: Synthetic oligonucleotide
agagccgcaacuucguaaa

SEQ ID NO: 679340 - RNA, 19 nt, Artificial Sequence
  Description of Artificial Sequence: Synthetic oligonucleotide
uauaugagugugucugcau

SEQ ID NO: 679341 - RNA, 19 nt, Artificial Sequence
  Description of Artificial Sequence: Synthetic oligonucleotide
ucauucggggcuuguagaa

SEQ ID NO: 679342 - RNA, 19 nt, Artificial Sequence
  Description of Artificial Sequence: Synthetic oligonucleotide
ucaucaaaccaaugcuguc

SEQ ID NO: 679343 - RNA, 19 nt, Artificial Sequence
  Description of Artificial Sequence: Synthetic oligonucleotide
cucacgauaaagcuccaga

SEQ ID NO: 679344 - RNA, 19 nt, Artificial Sequence
  Description of Artificial Sequence: Synthetic oligonucleotide
gaaggucaugaaguacagg

SEQ ID NO: 679345 - RNA, 19 nt, Artificial Sequence
  Description of Artificial Sequence: Synthetic oligonucleotide
guacaggcggcuccagugg

SEQ ID NO: 679346 - RNA, 19 nt, Artificial Sequence
  Description of Artificial Sequence: Synthetic oligonucleotide
agcaguugcgguacagucg

SEQ ID NO: 679347 - RNA, 19 nt, Artificial Sequence
  Description of Artificial Sequence: Synthetic oligonucleotide
ggauaguuccuucucgaug

SEQ ID NO: 679348 - RNA, 19 nt, Artificial Sequence
  Description of Artificial Sequence: Synthetic oligonucleotide
aggaauaguagaagaugag

SEQ ID NO: 679349 - RNA, 19 nt, Artificial Sequence
  Description of Artificial Sequence: Synthetic oligonucleotide
guugcgguagcguuucuuc

SEQ ID NO: 679350 - RNA, 19 nt, Artificial Sequence
  Description of Artificial Sequence: Synthetic oligonucleotide
agucugggagcgcugacga

SEQ ID NO: 679351 - RNA, 19 nt, Artificial Sequence
  Description of Artificial Sequence: Synthetic oligonucleotide
cacaauauagaaggucaug

SEQ ID NO: 679352 - RNA, 19 nt, Artificial Sequence
  Description of Artificial Sequence: Synthetic oligonucleotide
gauugccgccucuugauaa

SEQ ID NO: 679353 - RNA, 19 nt, Artificial Sequence
  Description of Artificial Sequence: Synthetic oligonucleotide
uagauugccgccucuugau

SEQ ID NO: 679354 - RNA, 19 nt, Artificial Sequence
  Description of Artificial Sequence: Synthetic oligonucleotide
uuugguucuugaucuccgu

SEQ ID NO: 679355 - RNA, 19 nt, Artificial Sequence
  Description of Artificial Sequence: Synthetic oligonucleotide
acaagucugggcacagugg

SEQ ID NO: 679356 - RNA, 19 nt, Artificial Sequence
  Description of Artificial Sequence: Synthetic oligonucleotide
aauaaccucagcagcugaa

SEQ ID NO: 679357 - RNA, 19 nt, Artificial Sequence
  Description of Artificial Sequence: Synthetic oligonucleotide
cuguaguucaugcggaaga

SEQ ID NO: 679358 - RNA, 19 nt, Artificial Sequence
  Description of Artificial Sequence: Synthetic oligonucleotide
cuggagguagauugccgcc

SEQ ID NO: 679359 - RNA, 19 nt, Artificial Sequence
  Description of Artificial Sequence: Synthetic oligonucleotide
uugacaaccgugagcucaa

SEQ ID NO: 679360 - RNA, 19 nt, Artificial Sequence
  Description of Artificial Sequence: Synthetic oligonucleotide
ucaaaccggcccuggcuag

SEQ ID NO: 679361 - RNA, 19 nt, Artificial Sequence
  Description of Artificial Sequence: Synthetic oligonucleotide
guagauugccgccucuuga

SEQ ID NO: 679362 - RNA, 19 nt, Artificial Sequence
  Description of Artificial Sequence: Synthetic oligonucleotide
auaggagaugccgcccggc

SEQ ID NO: 679363 - RNA, 19 nt, Artificial Sequence
  Description of Artificial Sequence: Synthetic oligonucleotide
gaguccuggcucuuucggc

SEQ ID NO: 679364 - RNA, 19 nt, Artificial Sequence
  Description of Artificial Sequence: Synthetic oligonucleotide
aggaagcgcucccuagcac

SEQ ID NO: 679365 - RNA, 19 nt, Artificial Sequence
  Description of Artificial Sequence: Synthetic oligonucleotide
ucaugaaguacaggcggcu

SEQ ID NO: 679366 - RNA, 19 nt, Artificial Sequence
  Description of Artificial Sequence: Synthetic oligonucleotide
caucagaggaggcgccucg

SEQ ID NO: 679367 - RNA, 19 nt, Artificial Sequence
  Description of Artificial Sequence: Synthetic oligonucleotide
aagcagaggcucuuuuauu

SEQ ID NO: 679368 - RNA, 19 nt, Artificial Sequence
  Description of Artificial Sequence: Synthetic oligonucleotide
guggaguaaggcuggggug

SEQ ID NO: 679369 - RNA, 19 nt, Artificial Sequence
  Description of Artificial Sequence: Synthetic oligonucleotide
cugugguguuauugcauag

SEQ ID NO: 679370 - RNA, 19 nt, Artificial Sequence
  Description of Artificial Sequence: Synthetic oligonucleotide
aggcacgaugcccuuaagu

SEQ ID NO: 679371 - RNA, 19 nt, Artificial Sequence
  Description of Artificial Sequence: Synthetic oligonucleotide
ucugggagcgcugacgaau

SEQ ID NO: 679372 - RNA, 19 nt, Artificial Sequence
  Description of Artificial Sequence: Synthetic oligonucleotide
ugacaagcaggcgguaggc

SEQ ID NO: 679373 - RNA, 19 nt, Artificial Sequence
  Description of Artificial Sequence: Synthetic oligonucleotide
agauaguaguagccguccu

SEQ ID NO: 679374 - RNA, 19 nt, Artificial Sequence
  Description of Artificial Sequence: Synthetic oligonucleotide
cugaguccuggcucuuucg

SEQ ID NO: 679375 - RNA, 19 nt, Artificial Sequence
  Description of Artificial Sequence: Synthetic oligonucleotide
guacagucgcccauugaag

SEQ ID NO: 679376 - RNA, 19 nt, Artificial Sequence
  Description of Artificial Sequence: Synthetic oligonucleotide
caaggcgguucaaaccggc

SEQ ID NO: 679377 - RNA, 19 nt, Artificial Sequence
  Description of Artificial Sequence: Synthetic oligonucleotide
uaguagccguccucuaucu

SEQ ID NO: 679378 - RNA, 19 nt, Artificial Sequence
  Description of Artificial Sequence: Synthetic oligonucleotide
uggucacaauauagaaggu

SEQ ID NO: 679379 - RNA, 19 nt, Artificial Sequence
  Description of Artificial Sequence: Synthetic oligonucleotide
caagcucaggucacuuuug

SEQ ID NO: 679380 - RNA, 19 nt, Artificial Sequence
  Description of Artificial Sequence: Synthetic oligonucleotide
gacaaccgugagcucaaac

SEQ ID NO: 679381 - RNA, 19 nt, Artificial Sequence
  Description of Artificial Sequence: Synthetic oligonucleotide
gagcgcugacgaaugacag

SEQ ID NO: 679382 - RNA, 19 nt, Artificial Sequence
  Description of Artificial Sequence: Synthetic oligonucleotide
ugagacccggcuagguaac

SEQ ID NO: 679383 - RNA, 19 nt, Artificial Sequence
  Description of Artificial Sequence: Synthetic oligonucleotide
cuucugacguagcuccuug

SEQ ID NO: 679384 - RNA, 19 nt, Artificial Sequence
  Description of Artificial Sequence: Synthetic oligonucleotide
gguucgcuuaugcagcagc

SEQ ID NO: 679385 - RNA, 19 nt, Artificial Sequence
  Description of Artificial Sequence: Synthetic oligonucleotide
ggucauuaccaccaugguc

SEQ ID NO: 679386 - RNA, 19 nt, Artificial Sequence
  Description of Artificial Sequence: Synthetic oligonucleotide
uaggccgccagugcucugg

SEQ ID NO: 679387 - RNA, 19 nt, Artificial Sequence
  Description of Artificial Sequence: Synthetic oligonucleotide
uucgcuuaugcagcagcug

SEQ ID NO: 679388 - RNA, 19 nt, Artificial Sequence
  Description of Artificial Sequence: Synthetic oligonucleotide
gaggucugcgaggugacac

SEQ ID NO: 679389 - RNA, 19 nt, Artificial Sequence
  Description of Artificial Sequence: Synthetic oligonucleotide
cuccgucccagaaacacca

SEQ ID NO: 679390 - RNA, 19 nt, Artificial Sequence
  Description of Artificial Sequence: Synthetic oligonucleotide
ccuucgaacugucuauagg

SEQ ID NO: 679391 - RNA, 19 nt, Artificial Sequence
  Description of Artificial Sequence: Synthetic oligonucleotide
aaaccggcccuggcuaguc

SEQ ID NO: 679392 - RNA, 19 nt, Artificial Sequence
  Description of Artificial Sequence: Synthetic oligonucleotide
cgcaacuucguaaauauca

SEQ ID NO: 679393 - RNA, 19 nt, Artificial Sequence
  Description of Artificial Sequence: Synthetic oligonucleotide
caaaguuauugagauagua

SEQ ID NO: 679394 - RNA, 19 nt, Artificial Sequence
  Description of Artificial Sequence: Synthetic oligonucleotide
agguaacaaaucauuguau

SEQ ID NO: 679395 - RNA, 19 nt, Artificial Sequence
  Description of Artificial Sequence: Synthetic oligonucleotide
gaacugucuauaggagaug

SEQ ID NO: 679396 - RNA, 19 nt, Artificial Sequence
  Description of Artificial Sequence: Synthetic oligonucleotide
ugggcgguucgcuuaugca

SEQ ID NO: 679397 - RNA, 19 nt, Artificial Sequence
  Description of Artificial Sequence: Synthetic oligonucleotide
ggucacgaagcuguugagg

SEQ ID NO: 679398 - RNA, 19 nt, Artificial Sequence
  Description of Artificial Sequence: Synthetic oligonucleotide
gaugagacccggcuaggua

SEQ ID NO: 679399 - RNA, 19 nt, Artificial Sequence
  Description of Artificial Sequence: Synthetic oligonucleotide
cucauucggggcuuguaga

SEQ ID NO: 679400 - RNA, 19 nt, Artificial Sequence
  Description of Artificial Sequence: Synthetic oligonucleotide
cugcgagagggugucaagc

SEQ ID NO: 679401 - RNA, 19 nt, Artificial Sequence
  Description of Artificial Sequence: Synthetic oligonucleotide
gcacgaugcccuuaaguug

SEQ ID NO: 679402 - RNA, 19 nt, Artificial Sequence
  Description of Artificial Sequence: Synthetic oligonucleotide
ggucacaauauagaagguc

SEQ ID NO: 679403 - RNA, 19 nt, Artificial Sequence
  Description of Artificial Sequence: Synthetic oligonucleotide
uucugacguagcuccuuga

SEQ ID NO: 679404 - RNA, 19 nt, Artificial Sequence
  Description of Artificial Sequence: Synthetic oligonucleotide
cagcucaaacaugguaucc

SEQ ID NO: 679405 - RNA, 19 nt, Artificial Sequence
  Description of Artificial Sequence: Synthetic oligonucleotide
aggccuucgaacugucuau

SEQ ID NO: 679406 - RNA, 19 nt, Artificial Sequence
  Description of Artificial Sequence: Synthetic oligonucleotide
cugggagcgcugacgaaug

SEQ ID NO: 679407 - RNA, 19 nt, Artificial Sequence
  Description of Artificial Sequence: Synthetic oligonucleotide
caugaacaguuccacucca

SEQ ID NO: 679408 - RNA, 19 nt, Artificial Sequence
  Description of Artificial Sequence: Synthetic oligonucleotide
acaucagaggaggcgccuc

SEQ ID NO: 679409 - RNA, 19 nt, Artificial Sequence
  Description of Artificial Sequence: Synthetic oligonucleotide
acccggcuagguaacaguc

SEQ ID NO: 679410 - RNA, 19 nt, Artificial Sequence
  Description of Artificial Sequence: Synthetic oligonucleotide
ugcagcaguugcgguacag

SEQ ID NO: 679411 - RNA, 19 nt, Artificial Sequence
  Description of Artificial Sequence: Synthetic oligonucleotide
ucacgaagcuguugaggau

SEQ ID NO: 679412 - RNA, 19 nt, Artificial Sequence
  Description of Artificial Sequence: Synthetic oligonucleotide
gacgaugccacuguccacu

SEQ ID NO: 679413 - RNA, 19 nt, Artificial Sequence
  Description of Artificial Sequence: Synthetic oligonucleotide
caguuccacuccauagaug

SEQ ID NO: 679414 - RNA, 19 nt, Artificial Sequence
  Description of Artificial Sequence: Synthetic oligonucleotide
cuccauagaugguaagaaa

SEQ ID NO: 679415 - RNA, 19 nt, Artificial Sequence
  Description of Artificial Sequence: Synthetic oligonucleotide
cuuucggcuguaguucaug

SEQ ID NO: 679416 - RNA, 19 nt, Artificial Sequence
  Description of Artificial Sequence: Synthetic oligonucleotide
gacgcaggaccacaaugaa

SEQ ID NO: 679417 - RNA, 19 nt, Artificial Sequence
  Description of Artificial Sequence: Synthetic oligonucleotide
aaguaccuucaggcccagc

SEQ ID NO: 679418 - RNA, 19 nt, Artificial Sequence
  Description of Artificial Sequence: Synthetic oligonucleotide
cucgcaccucacgauaaag

SEQ ID NO: 679419 - RNA, 19 nt, Artificial Sequence
  Description of Artificial Sequence: Synthetic oligonucleotide
acgauggcgaaggaauagu

SEQ ID NO: 679420 - RNA, 19 nt, Artificial Sequence
  Description of Artificial Sequence: Synthetic oligonucleotide
uggcuugaugagacccggc

SEQ ID NO: 679421 - RNA, 19 nt, Artificial Sequence
  Description of Artificial Sequence: Synthetic oligonucleotide
gugugguuaauaaaucggu

SEQ ID NO: 679422 - RNA, 19 nt, Artificial Sequence
  Description of Artificial Sequence: Synthetic oligonucleotide
gguauccaacacguugcgg

SEQ ID NO: 679423 - RNA, 19 nt, Artificial Sequence
  Description of Artificial Sequence: Synthetic oligonucleotide
gcucccuagcacucauucg

SEQ ID NO: 679424 - RNA, 19 nt, Artificial Sequence
  Description of Artificial Sequence: Synthetic oligonucleotide
gaugccgcccggccucugc

SEQ ID NO: 679425 - RNA, 19 nt, Artificial Sequence
  Description of Artificial Sequence: Synthetic oligonucleotide
gaaacgcaucaggccuucg

SEQ ID NO: 679426 - RNA, 19 nt, Artificial Sequence
  Description of Artificial Sequence: Synthetic oligonucleotide
gaagacagagcaaggcggu

SEQ ID NO: 679427 - RNA, 19 nt, Artificial Sequence
  Description of Artificial Sequence: Synthetic oligonucleotide
ucucgaugacgaugccacu

SEQ ID NO: 679428 - RNA, 19 nt, Artificial Sequence
  Description of Artificial Sequence: Synthetic oligonucleotide
ugcgaagagguaggccgcc

SEQ ID NO: 679429 - RNA, 19 nt, Artificial Sequence
  Description of Artificial Sequence: Synthetic oligonucleotide
gucauuguucuggccuucc

SEQ ID NO: 679430 - RNA, 19 nt, Artificial Sequence
  Description of Artificial Sequence: Synthetic oligonucleotide
acgcuucaaagagaugaga

SEQ ID NO: 679431 - RNA, 19 nt, Artificial Sequence
  Description of Artificial Sequence: Synthetic oligonucleotide
ucugcaugguguggaguaa

SEQ ID NO: 679432 - RNA, 19 nt, Artificial Sequence
  Description of Artificial Sequence: Synthetic oligonucleotide
caacuucguaaauaucaua

SEQ ID NO: 679433 - RNA, 19 nt, Artificial Sequence
  Description of Artificial Sequence: Synthetic oligonucleotide
agacccggcuagguaacag

SEQ ID NO: 679434 - RNA, 19 nt, Artificial Sequence
  Description of Artificial Sequence: Synthetic oligonucleotide
aggcucuuuuauugacaca

SEQ ID NO: 679435 - RNA, 19 nt, Artificial Sequence
  Description of Artificial Sequence: Synthetic oligonucleotide
cauccgugguagcagcuca

SEQ ID NO: 679436 - RNA, 19 nt, Artificial Sequence
  Description of Artificial Sequence: Synthetic oligonucleotide
ggcgguucgcuuaugcagc

SEQ ID NO: 679437 - RNA, 19 nt, Artificial Sequence
  Description of Artificial Sequence: Synthetic oligonucleotide
ugggagcgcugacgaauga

SEQ ID NO: 679438 - RNA, 19 nt, Artificial Sequence
  Description of Artificial Sequence: Synthetic oligonucleotide
agauugccgccucuugaua

SEQ ID NO: 679439 - RNA, 19 nt, Artificial Sequence
  Description of Artificial Sequence: Synthetic oligonucleotide
gccacgauaauggucauua

SEQ ID NO: 679440 - RNA, 19 nt, Artificial Sequence
  Description of Artificial Sequence: Synthetic oligonucleotide
gcuguaguucaugcggaag

SEQ ID NO: 679441 - RNA, 19 nt, Artificial Sequence
  Description of Artificial Sequence: Synthetic oligonucleotide
cagagccgcaacuucguaa

SEQ ID NO: 679442 - RNA, 19 nt, Artificial Sequence
  Description of Artificial Sequence: Synthetic oligonucleotide
ggacgcaggaccacaauga

SEQ ID NO: 679443 - RNA, 19 nt, Artificial Sequence
  Description of Artificial Sequence: Synthetic oligonucleotide
cgauaauggucauuaccac

SEQ ID NO: 679444 - RNA, 19 nt, Artificial Sequence
  Description of Artificial Sequence: Synthetic oligonucleotide
caggccuucgaacugucua

SEQ ID NO: 679445 - RNA, 19 nt, Artificial Sequence
  Description of Artificial Sequence: Synthetic oligonucleotide
cacguugcgguagcguuuc

SEQ ID NO: 679446 - RNA, 19 nt, Artificial Sequence
  Description of Artificial Sequence: Synthetic oligonucleotide
gugugcgaagagguaggcc

SEQ ID NO: 679447 - RNA, 19 nt, Artificial Sequence
  Description of Artificial Sequence: Synthetic oligonucleotide
ccggcuagguaacagucug

SEQ ID NO: 679448 - RNA, 19 nt, Artificial Sequence
  Description of Artificial Sequence: Synthetic oligonucleotide
ggcacgaugcccuuaaguu

SEQ ID NO: 679449 - RNA, 19 nt, Artificial Sequence
  Description of Artificial Sequence: Synthetic oligonucleotide
cacgauaaagcuccagaau

SEQ ID NO: 679450 - RNA, 19 nt, Artificial Sequence
  Description of Artificial Sequence: Synthetic oligonucleotide
aucugcgagagggugucaa

SEQ ID NO: 679451 - RNA, 19 nt, Artificial Sequence
  Description of Artificial Sequence: Synthetic oligonucleotide
gucuuauuguccacugugu

SEQ ID NO: 679452 - RNA, 19 nt, Artificial Sequence
  Description of Artificial Sequence: Synthetic oligonucleotide
ggagcgcugacgaaugaca

SEQ ID NO: 679453 - RNA, 19 nt, Artificial Sequence
  Description of Artificial Sequence: Synthetic oligonucleotide
ccgggugacaucagaggag

SEQ ID NO: 679454 - RNA, 19 nt, Artificial Sequence
  Description of Artificial Sequence: Synthetic oligonucleotide
agccgcaacuucguaaaua

SEQ ID NO: 679455 - RNA, 19 nt, Artificial Sequence
  Description of Artificial Sequence: Synthetic oligonucleotide
cacaguggguuucuaggua

SEQ ID NO: 679456 - RNA, 19 nt, Artificial Sequence
  Description of Artificial Sequence: Synthetic oligonucleotide
uccgugguagcagcucaaa

SEQ ID NO: 679457 - RNA, 19 nt, Artificial Sequence
  Description of Artificial Sequence: Synthetic oligonucleotide
accaagaauuuugcuggua

SEQ ID NO: 679458 - RNA, 19 nt, Artificial Sequence
  Description of Artificial Sequence: Synthetic oligonucleotide
gggcgugcuccucauacca

SEQ ID NO: 679459 - RNA, 19 nt, Artificial Sequence
  Description of Artificial Sequence: Synthetic oligonucleotide
cggggaagcucaucaaacc

SEQ ID NO: 679460 - RNA, 19 nt, Artificial Sequence
  Description of Artificial Sequence: Synthetic oligonucleotide
aguagccguccucuaucuu

SEQ ID NO: 679461 - RNA, 19 nt, Artificial Sequence
  Description of Artificial Sequence: Synthetic oligonucleotide
cccaguuguguccgguggg

SEQ ID NO: 679462 - RNA, 19 nt, Artificial Sequence
  Description of Artificial Sequence: Synthetic oligonucleotide
cuggccauccgugguagca

SEQ ID NO: 679463 - RNA, 19 nt, Artificial Sequence
  Description of Artificial Sequence: Synthetic oligonucleotide
gacccggcuagguaacagu

SEQ ID NO: 679464 - RNA, 19 nt, Artificial Sequence
  Description of Artificial Sequence: Synthetic oligonucleotide
agcgcucccuagcacucau

SEQ ID NO: 679465 - RNA, 19 nt, Artificial Sequence
  Description of Artificial Sequence: Synthetic oligonucleotide
ggagguagauugccgccuc

SEQ ID NO: 679466 - RNA, 19 nt, Artificial Sequence
  Description of Artificial Sequence: Synthetic oligonucleotide
aagcgcucccuagcacuca

SEQ ID NO: 679467 - RNA, 19 nt, Artificial Sequence
  Description of Artificial Sequence: Synthetic oligonucleotide
ggccauccgugguagcagc

SEQ ID NO: 679468 - RNA, 19 nt, Artificial Sequence
  Description of Artificial Sequence: Synthetic oligonucleotide
gccgcaacuucguaaauau

SEQ ID NO: 679469 - RNA, 19 nt, Artificial Sequence
  Description of Artificial Sequence: Synthetic oligonucleotide
agaccagacuggggaacca

SEQ ID NO: 679470 - RNA, 19 nt, Artificial Sequence
  Description of Artificial Sequence: Synthetic oligonucleotide
gcuagguaacagucuggga

SEQ ID NO: 679471 - RNA, 19 nt, Artificial Sequence
  Description of Artificial Sequence: Synthetic oligonucleotide
gccgccucuugauaauuca

SEQ ID NO: 679472 - RNA, 19 nt, Artificial Sequence
  Description of Artificial Sequence: Synthetic oligonucleotide
uguguccggugggacugga

SEQ ID NO: 679473 - RNA, 19 nt, Artificial Sequence
  Description of Artificial Sequence: Synthetic oligonucleotide
cuggcguccuugggguggg

SEQ ID NO: 679474 - RNA, 19 nt, Artificial Sequence
  Description of Artificial Sequence: Synthetic oligonucleotide
acgcaggaccacaaugaaa

SEQ ID NO: 679475 - RNA, 19 nt, Artificial Sequence
  Description of Artificial Sequence: Synthetic oligonucleotide
ccgucccagaaacaccaag

SEQ ID NO: 679476 - RNA, 19 nt, Artificial Sequence
  Description of Artificial Sequence: Synthetic oligonucleotide
gcaccucacgauaaagcuc

SEQ ID NO: 679477 - RNA, 19 nt, Artificial Sequence
  Description of Artificial Sequence: Synthetic oligonucleotide
ggaggcgccucgcaccuca

SEQ ID NO: 679478 - RNA, 19 nt, Artificial Sequence
  Description of Artificial Sequence: Synthetic oligonucleotide
cguaaauaucauagaagua

SEQ ID NO: 679479 - RNA, 19 nt, Artificial Sequence
  Description of Artificial Sequence: Synthetic oligonucleotide
ggaaggcuguccggggaag

SEQ ID NO: 679480 - RNA, 19 nt, Artificial Sequence
  Description of Artificial Sequence: Synthetic oligonucleotide
cgcuuaugcagcagcugag

SEQ ID NO: 679481 - RNA, 19 nt, Artificial Sequence
  Description of Artificial Sequence: Synthetic oligonucleotide
uugccgccucuugauaauu

SEQ ID NO: 679482 - RNA, 19 nt, Artificial Sequence
  Description of Artificial Sequence: Synthetic oligonucleotide
caggcacgaugcccuuaag

SEQ ID NO: 679483 - RNA, 19 nt, Artificial Sequence
  Description of Artificial Sequence: Synthetic oligonucleotide
cauucggggcuuguagaaa

SEQ ID NO: 679484 - RNA, 19 nt, Artificial Sequence
  Description of Artificial Sequence: Synthetic oligonucleotide
gagguagauugccgccucu

SEQ ID NO: 679485 - RNA, 19 nt, Artificial Sequence
  Description of Artificial Sequence: Synthetic oligonucleotide
ccacuccauagaugguaag

SEQ ID NO: 679486 - RNA, 19 nt, Artificial Sequence
  Description of Artificial Sequence: Synthetic oligonucleotide
cugagagaucaaacaaguu

SEQ ID NO: 679487 - RNA, 19 nt, Artificial Sequence
  Description of Artificial Sequence: Synthetic oligonucleotide
gaugggcgguucgcuuaug

SEQ ID NO: 679488 - RNA, 19 nt, Artificial Sequence
  Description of Artificial Sequence: Synthetic oligonucleotide
gcuggcugacaagcaggcg

SEQ ID NO: 679489 - RNA, 19 nt, Artificial Sequence
  Description of Artificial Sequence: Synthetic oligonucleotide
gcacaguggguuucuaggu

SEQ ID NO: 679490 - RNA, 19 nt, Artificial Sequence
  Description of Artificial Sequence: Synthetic oligonucleotide
ccacgauaauggucauuac

SEQ ID NO: 679491 - RNA, 19 nt, Artificial Sequence
  Description of Artificial Sequence: Synthetic oligonucleotide
uagcacucauucggggcuu

SEQ ID NO: 679492 - RNA, 19 nt, Artificial Sequence
  Description of Artificial Sequence: Synthetic oligonucleotide
gggagcgcugacgaaugac

SEQ ID NO: 679493 - RNA, 19 nt, Artificial Sequence
  Description of Artificial Sequence: Synthetic oligonucleotide
cgaacugucuauaggagau

SEQ ID NO: 679494 - RNA, 19 nt, Artificial Sequence
  Description of Artificial Sequence: Synthetic oligonucleotide
ggcuguaguucaugcggaa

SEQ ID NO: 679495 - RNA, 19 nt, Artificial Sequence
  Description of Artificial Sequence: Synthetic oligonucleotide
guguccggugggacuggag

SEQ ID NO: 679496 - RNA, 19 nt, Artificial Sequence
  Description of Artificial Sequence: Synthetic oligonucleotide
gcaacuucguaaauaucau

SEQ ID NO: 679497 - RNA, 19 nt, Artificial Sequence
  Description of Artificial Sequence: Synthetic oligonucleotide
gagacccggcuagguaaca

SEQ ID NO: 679498 - RNA, 19 nt, Artificial Sequence
  Description of Artificial Sequence: Synthetic oligonucleotide
ugacaaccgugagcucaaa

SEQ ID NO: 679499 - RNA, 19 nt, Artificial Sequence
  Description of Artificial Sequence: Synthetic oligonucleotide
gcgguacagucgcccauug

SEQ ID NO: 679500 - RNA, 19 nt, Artificial Sequence
  Description of Artificial Sequence: Synthetic oligonucleotide
cggcuagguaacagucugg

SEQ ID NO: 679501 - RNA, 19 nt, Artificial Sequence
  Description of Artificial Sequence: Synthetic oligonucleotide
ccucacgauaaagcuccag

SEQ ID NO: 679502 - RNA, 19 nt, Artificial Sequence
  Description of Artificial Sequence: Synthetic oligonucleotide
gccuucgacuucacaagga

SEQ ID NO: 679503 - RNA, 19 nt, Artificial Sequence
  Description of Artificial Sequence: Synthetic oligonucleotide
ccgcaacuucguaaauauc

SEQ ID NO: 679504 - RNA, 19 nt, Artificial Sequence
  Description of Artificial Sequence: Synthetic oligonucleotide
guaggccgccagugcucug

SEQ ID NO: 679505 - RNA, 19 nt, Artificial Sequence
  Description of Artificial Sequence: Synthetic oligonucleotide
cuguccggggaagcucauc

SEQ ID NO: 679506 - RNA, 19 nt, Artificial Sequence
  Description of Artificial Sequence: Synthetic oligonucleotide
aggggacgcaggaccacaa

SEQ ID NO: 679507 - RNA, 19 nt, Artificial Sequence
  Description of Artificial Sequence: Synthetic oligonucleotide
acgaugcccuuaaguugcu

SEQ ID NO: 679508 - RNA, 19 nt, Artificial Sequence
  Description of Artificial Sequence: Synthetic oligonucleotide
acguugcgguagcguuucu

SEQ ID NO: 679509 - RNA, 19 nt, Artificial Sequence
  Description of Artificial Sequence: Synthetic oligonucleotide
ucccgggcgugcuccucau

SEQ ID NO: 679510 - RNA, 19 nt, Artificial Sequence
  Description of Artificial Sequence: Synthetic oligonucleotide
cgugcuccucauaccacuc

SEQ ID NO: 679511 - RNA, 19 nt, Artificial Sequence
  Description of Artificial Sequence: Synthetic oligonucleotide
gagguguguugcucugguu

SEQ ID NO: 679512 - RNA, 19 nt, Artificial Sequence
  Description of Artificial Sequence: Synthetic oligonucleotide
gcgugcuccucauaccacu

SEQ ID NO: 679513 - RNA, 19 nt, Artificial Sequence
  Description of Artificial Sequence: Synthetic oligonucleotide
ggcgugcuccucauaccac

SEQ ID NO: 679514 - RNA, 19 nt, Artificial Sequence
  Description of Artificial Sequence: Synthetic oligonucleotide
gucgcccauugaagaacuc

SEQ ID NO: 679515 - RNA, 19 nt, Artificial Sequence
  Description of Artificial Sequence: Synthetic oligonucleotide
cacucauucggggcuugua

SEQ ID NO: 679516 - RNA, 19 nt, Artificial Sequence
  Description of Artificial Sequence: Synthetic oligonucleotide
ccuucgacuucacaaggau

SEQ ID NO: 679517 - RNA, 19 nt, Artificial Sequence
  Description of Artificial Sequence: Synthetic oligonucleotide
aggaggcgccucgcaccuc

SEQ ID NO: 679518 - RNA, 19 nt, Artificial Sequence
  Description of Artificial Sequence: Synthetic oligonucleotide
agccaccgugcuggaguug

SEQ ID NO: 679519 - RNA, 19 nt, Artificial Sequence
  Description of Artificial Sequence: Synthetic oligonucleotide
accucacgauaaagcucca

SEQ ID NO: 679520 - RNA, 19 nt, Artificial Sequence
  Description of Artificial Sequence: Synthetic oligonucleotide
ccaggcacgaugcccuuaa

SEQ ID NO: 679521 - RNA, 19 nt, Artificial Sequence
  Description of Artificial Sequence: Synthetic oligonucleotide
cacaucccauugacagcua

SEQ ID NO: 679522 - RNA, 19 nt, Artificial Sequence
  Description of Artificial Sequence: Synthetic oligonucleotide
gagccgcaacuucguaaau

SEQ ID NO: 679523 - RNA, 19 nt, Artificial Sequence
  Description of Artificial Sequence: Synthetic oligonucleotide
ccaccauggucacaauaua

SEQ ID NO: 679524 - RNA, 19 nt, Artificial Sequence
  Description of Artificial Sequence: Synthetic oligonucleotide
ggucugcgaggugacaccu

SEQ ID NO: 679525 - RNA, 19 nt, Artificial Sequence
  Description of Artificial Sequence: Synthetic oligonucleotide
ccggugggacuggagggag

SEQ ID NO: 679526 - RNA, 19 nt, Artificial Sequence
  Description of Artificial Sequence: Synthetic oligonucleotide
gguaggccgccagugcucu

SEQ ID NO: 679527 - RNA, 19 nt, Artificial Sequence
  Description of Artificial Sequence: Synthetic oligonucleotide
ggaugggcgguucgcuuau

SEQ ID NO: 679528 - RNA, 19 nt, Artificial Sequence
  Description of Artificial Sequence: Synthetic oligonucleotide
caucugcgagaggguguca

SEQ ID NO: 679529 - RNA, 19 nt, Artificial Sequence
  Description of Artificial Sequence: Synthetic oligonucleotide
caaaccggcccuggcuagu

SEQ ID NO: 679530 - RNA, 19 nt, Artificial Sequence
  Description of Artificial Sequence: Synthetic oligonucleotide
gagaugccgcccggccucu

SEQ ID NO: 679531 - RNA, 19 nt, Artificial Sequence
  Description of Artificial Sequence: Synthetic oligonucleotide
cccggcuagguaacagucu

SEQ ID NO: 679532 - RNA, 19 nt, Artificial Sequence
  Description of Artificial Sequence: Synthetic oligonucleotide
cagccaccgugcuggaguu

SEQ ID NO: 679533 - RNA, 19 nt, Artificial Sequence
  Description of Artificial Sequence: Synthetic oligonucleotide
cgguucgcuuaugcagcag

SEQ ID NO: 679534 - RNA, 19 nt, Artificial Sequence
  Description of Artificial Sequence: Synthetic oligonucleotide
ggcgugcuggaugggcggu

SEQ ID NO: 679535 - RNA, 19 nt, Artificial Sequence
  Description of Artificial Sequence: Synthetic oligonucleotide
gcgccucgcaccucacgau

SEQ ID NO: 679536 - RNA, 19 nt, Artificial Sequence
  Description of Artificial Sequence: Synthetic oligonucleotide
ccgugagcucaaacagggu

SEQ ID NO: 679537 - RNA, 19 nt, Artificial Sequence
  Description of Artificial Sequence: Synthetic oligonucleotide
cgccucgcaccucacgaua

SEQ ID NO: 679538 - RNA, 19 nt, Artificial Sequence
  Description of Artificial Sequence: Synthetic oligonucleotide
cccgggcgugcuccucaua

SEQ ID NO: 679539 - RNA, 19 nt, Artificial Sequence
  Description of Artificial Sequence: Synthetic oligonucleotide
gcgcucccuagcacucauu

SEQ ID NO: 679540 - RNA, 19 nt, Artificial Sequence
  Description of Artificial Sequence: Synthetic oligonucleotide
aaaguuagcacuaacaagg

SEQ ID NO: 679541 - RNA, 19 nt, Artificial Sequence
  Description of Artificial Sequence: Synthetic oligonucleotide
aacuuuagguuuuaguugc

SEQ ID NO: 679542 - RNA, 19 nt, Artificial Sequence
  Description of Artificial Sequence: Synthetic oligonucleotide
cuaagaauuacauuuacgg

SEQ ID NO: 679543 - RNA, 19 nt, Artificial Sequence
  Description of Artificial Sequence: Synthetic oligonucleotide
caaaccauuauuauaaagg

SEQ ID NO: 679544 - RNA, 19 nt, Artificial Sequence
  Description of Artificial Sequence: Synthetic oligonucleotide
uuuacuagaugaaacagac

SEQ ID NO: 679545 - RNA, 19 nt, Artificial Sequence
  Description of Artificial Sequence: Synthetic oligonucleotide
uacuagaugaaacagacuc

SEQ ID NO: 679546 - RNA, 19 nt, Artificial Sequence
  Description of Artificial Sequence: Synthetic oligonucleotide
uuauuaaugugaaacugag

SEQ ID NO: 679547 - RNA, 19 nt, Artificial Sequence
  Description of Artificial Sequence: Synthetic oligonucleotide
auuacauuuacgguggagc

SEQ ID NO: 679548 - RNA, 19 nt, Artificial Sequence
  Description of Artificial Sequence: Synthetic oligonucleotide
uccauuauacaauauggcc

SEQ ID NO: 679549 - RNA, 19 nt, Artificial Sequence
  Description of Artificial Sequence: Synthetic oligonucleotide
ugauuaagcaauaauuuuc

SEQ ID NO: 679550 - RNA, 19 nt, Artificial Sequence
  Description of Artificial Sequence: Synthetic oligonucleotide
aaaaggucacauuugaaau

SEQ ID NO: 679551 - RNA, 19 nt, Artificial Sequence
  Description of Artificial Sequence: Synthetic oligonucleotide
aguuuaggcauuuauaccu

SEQ ID NO: 679552 - RNA, 19 nt, Artificial Sequence
  Description of Artificial Sequence: Synthetic oligonucleotide
aguuuacuccuacucaugc

SEQ ID NO: 679553 - RNA, 19 nt, Artificial Sequence
  Description of Artificial Sequence: Synthetic oligonucleotide
agcauccuaacgcaaagcc

SEQ ID NO: 679554 - RNA, 19 nt, Artificial Sequence
  Description of Artificial Sequence: Synthetic oligonucleotide
uaaaguuagcacuaacaag

SEQ ID NO: 679555 - RNA, 19 nt, Artificial Sequence
  Description of Artificial Sequence: Synthetic oligonucleotide
aaagcaacuauaauguucu

SEQ ID NO: 679556 - RNA, 19 nt, Artificial Sequence
  Description of Artificial Sequence: Synthetic oligonucleotide
uuuccguuagcuaugguga

SEQ ID NO: 679557 - RNA, 19 nt, Artificial Sequence
  Description of Artificial Sequence: Synthetic oligonucleotide
gaucagagcauccuaacgc

SEQ ID NO: 679558 - RNA, 19 nt, Artificial Sequence
  Description of Artificial Sequence: Synthetic oligonucleotide
uaaaccguagaacaguaac

SEQ ID NO: 679559 - RNA, 19 nt, Artificial Sequence
  Description of Artificial Sequence: Synthetic oligonucleotide
aacgauaccaugauauccg

SEQ ID NO: 679560 - RNA, 19 nt, Artificial Sequence
  Description of Artificial Sequence: Synthetic oligonucleotide
uuugguaaaagcuccauua

SEQ ID NO: 679561 - RNA, 19 nt, Artificial Sequence
  Description of Artificial Sequence: Synthetic oligonucleotide
acucaugcacuuuaauagc

SEQ ID NO: 679562 - RNA, 19 nt, Artificial Sequence
  Description of Artificial Sequence: Synthetic oligonucleotide
acuauaauguucuuaaaua

SEQ ID NO: 679563 - RNA, 19 nt, Artificial Sequence
  Description of Artificial Sequence: Synthetic oligonucleotide
uuuacuccuacucaugcac

SEQ ID NO: 679564 - RNA, 19 nt, Artificial Sequence
  Description of Artificial Sequence: Synthetic oligonucleotide
uuuacgguggagcuuuggg

SEQ ID NO: 679565 - RNA, 19 nt, Artificial Sequence
  Description of Artificial Sequence: Synthetic oligonucleotide
uccaacgauaccaugauau

SEQ ID NO: 679566 - RNA, 19 nt, Artificial Sequence
  Description of Artificial Sequence: Synthetic oligonucleotide
ucaaaccauuauuauaaag

SEQ ID NO: 679567 - RNA, 19 nt, Artificial Sequence
  Description of Artificial Sequence: Synthetic oligonucleotide
auuuccguuagcuauggug

SEQ ID NO: 679568 - RNA, 19 nt, Artificial Sequence
  Description of Artificial Sequence: Synthetic oligonucleotide
uuguauaaccauauuuaug

SEQ ID NO: 679569 - RNA, 19 nt, Artificial Sequence
  Description of Artificial Sequence: Synthetic oligonucleotide
aaccguagaacaguaacuc

SEQ ID NO: 679570 - RNA, 19 nt, Artificial Sequence
  Description of Artificial Sequence: Synthetic oligonucleotide
ugcucauuaggauuuguag

SEQ ID NO: 679571 - RNA, 19 nt, Artificial Sequence
  Description of Artificial Sequence: Synthetic oligonucleotide
uuggauagcaccuucccca

SEQ ID NO: 679572 - RNA, 19 nt, Artificial Sequence
  Description of Artificial Sequence: Synthetic oligonucleotide
acaaacggcaguuugauua

SEQ ID NO: 679573 - RNA, 19 nt, Artificial Sequence
  Description of Artificial Sequence: Synthetic oligonucleotide
gaugaaacagacucgcaac

SEQ ID NO: 679574 - RNA, 19 nt, Artificial Sequence
  Description of Artificial Sequence: Synthetic oligonucleotide
aaacagacucgcaacauag

SEQ ID NO: 679575 - RNA, 19 nt, Artificial Sequence
  Description of Artificial Sequence: Synthetic oligonucleotide
gagguuaaccaugugagcc

SEQ ID NO: 679576 - RNA, 19 nt, Artificial Sequence
  Description of Artificial Sequence: Synthetic oligonucleotide
uugaguuuacuccuacuca

SEQ ID NO: 679577 - RNA, 19 nt, Artificial Sequence
  Description of Artificial Sequence: Synthetic oligonucleotide
ucuagcacuguuuucgugu

SEQ ID NO: 679578 - RNA, 19 nt, Artificial Sequence
  Description of Artificial Sequence: Synthetic oligonucleotide
agaucagagcauccuaacg

SEQ ID NO: 679579 - RNA, 19 nt, Artificial Sequence
  Description of Artificial Sequence: Synthetic oligonucleotide
auuacacugguauuacuca

SEQ ID NO: 679580 - RNA, 19 nt, Artificial Sequence
  Description of Artificial Sequence: Synthetic oligonucleotide
auucaggugucccgggucc

SEQ ID NO: 679581 - RNA, 19 nt, Artificial Sequence
  Description of Artificial Sequence: Synthetic oligonucleotide
uuuuacuuacagcucauuu

SEQ ID NO: 679582 - RNA, 19 nt, Artificial Sequence
  Description of Artificial Sequence: Synthetic oligonucleotide
ggcauuuauaccuuugugc

SEQ ID NO: 679583 - RNA, 19 nt, Artificial Sequence
  Description of Artificial Sequence: Synthetic oligonucleotide
guccccucagccuauaacg

SEQ ID NO: 679584 - RNA, 19 nt, Artificial Sequence
  Description of Artificial Sequence: Synthetic oligonucleotide
uuacauuuacgguggagcu

SEQ ID NO: 679585 - RNA, 19 nt, Artificial Sequence
  Description of Artificial Sequence: Synthetic oligonucleotide
aucgaaacggagccgcccc

SEQ ID NO: 679586 - RNA, 19 nt, Artificial Sequence
  Description of Artificial Sequence: Synthetic oligonucleotide
auaggagccuacaacauag

SEQ ID NO: 679587 - RNA, 19 nt, Artificial Sequence
  Description of Artificial Sequence: Synthetic oligonucleotide
auauggccaaaacaugaag

SEQ ID NO: 679588 - RNA, 19 nt, Artificial Sequence
  Description of Artificial Sequence: Synthetic oligonucleotide
guauuacucauuauuuugc

SEQ ID NO: 679589 - RNA, 19 nt, Artificial Sequence
  Description of Artificial Sequence: Synthetic oligonucleotide
gaagggauucccuacauua

SEQ ID NO: 679590 - RNA, 19 nt, Artificial Sequence
  Description of Artificial Sequence: Synthetic oligonucleotide
ugaguuuacuccuacucau

SEQ ID NO: 679591 - RNA, 19 nt, Artificial Sequence
  Description of Artificial Sequence: Synthetic oligonucleotide
gauaccaugauauccggcu

SEQ ID NO: 679592 - RNA, 19 nt, Artificial Sequence
  Description of Artificial Sequence: Synthetic oligonucleotide
aauaggagccuacaacaua

SEQ ID NO: 679593 - RNA, 19 nt, Artificial Sequence
  Description of Artificial Sequence: Synthetic oligonucleotide
caauauggccaaaacauga

SEQ ID NO: 679594 - RNA, 19 nt, Artificial Sequence
  Description of Artificial Sequence: Synthetic oligonucleotide
caguuuaggcauuuauacc

SEQ ID NO: 679595 - RNA, 19 nt, Artificial Sequence
  Description of Artificial Sequence: Synthetic oligonucleotide
ucccgguguaguaaugccg

SEQ ID NO: 679596 - RNA, 19 nt, Artificial Sequence
  Description of Artificial Sequence: Synthetic oligonucleotide
uguuacuguagcauugaua

SEQ ID NO: 679597 - RNA, 19 nt, Artificial Sequence
  Description of Artificial Sequence: Synthetic oligonucleotide
aagggauucccuacauuac

SEQ ID NO: 679598 - RNA, 19 nt, Artificial Sequence
  Description of Artificial Sequence: Synthetic oligonucleotide
aacuuguacaggaucguug

SEQ ID NO: 679599 - RNA, 19 nt, Artificial Sequence
  Description of Artificial Sequence: Synthetic oligonucleotide
gcgauaauccuaugaaugg

SEQ ID NO: 679600 - RNA, 19 nt, Artificial Sequence
  Description of Artificial Sequence: Synthetic oligonucleotide
aaacccaccgugggaaugg

SEQ ID NO: 679601 - RNA, 19 nt, Artificial Sequence
  Description of Artificial Sequence: Synthetic oligonucleotide
aaaccguagaacaguaacu

SEQ ID NO: 679602 - RNA, 19 nt, Artificial Sequence
  Description of Artificial Sequence: Synthetic oligonucleotide
aggauuauggcgucccuca

SEQ ID NO: 679603 - RNA, 19 nt, Artificial Sequence
  Description of Artificial Sequence: Synthetic oligonucleotide
uuacgguggagcuuuggga

SEQ ID NO: 679604 - RNA, 19 nt, Artificial Sequence
  Description of Artificial Sequence: Synthetic oligonucleotide
uacgguggagcuuugggaa

SEQ ID NO: 679605 - RNA, 19 nt, Artificial Sequence
  Description of Artificial Sequence: Synthetic oligonucleotide
auagaguccguccccggag

SEQ ID NO: 679606 - RNA, 19 nt, Artificial Sequence
  Description of Artificial Sequence: Synthetic oligonucleotide
guggaggaugcucauuagg

SEQ ID NO: 679607 - RNA, 19 nt, Artificial Sequence
  Description of Artificial Sequence: Synthetic oligonucleotide
gagaucgaaacggagccgc

SEQ ID NO: 679608 - RNA, 19 nt, Artificial Sequence
  Description of Artificial Sequence: Synthetic oligonucleotide
gaaggaccaauacugucca

SEQ ID NO: 679609 - RNA, 19 nt, Artificial Sequence
  Description of Artificial Sequence: Synthetic oligonucleotide
cauccuaacgcaaagccaa

SEQ ID NO: 679610 - RNA, 19 nt, Artificial Sequence
  Description of Artificial Sequence: Synthetic oligonucleotide
auugaaagagguugaugau

SEQ ID NO: 679611 - RNA, 19 nt, Artificial Sequence
  Description of Artificial Sequence: Synthetic oligonucleotide
aggcauuuauaccuuugug

SEQ ID NO: 679612 - RNA, 19 nt, Artificial Sequence
  Description of Artificial Sequence: Synthetic oligonucleotide
uuacuagaugaaacagacu

SEQ ID NO: 679613 - RNA, 19 nt, Artificial Sequence
  Description of Artificial Sequence: Synthetic oligonucleotide
cugcuauuaccccaccccg

SEQ ID NO: 679614 - RNA, 19 nt, Artificial Sequence
  Description of Artificial Sequence: Synthetic oligonucleotide
acgauaccaugauauccgg

SEQ ID NO: 679615 - RNA, 19 nt, Artificial Sequence
  Description of Artificial Sequence: Synthetic oligonucleotide
uauaacgccgccgcgagau

SEQ ID NO: 679616 - RNA, 19 nt, Artificial Sequence
  Description of Artificial Sequence: Synthetic oligonucleotide
ucagccuauaacgccgccg

SEQ ID NO: 679617 - RNA, 19 nt, Artificial Sequence
  Description of Artificial Sequence: Synthetic oligonucleotide
uguccaacgauaccaugau

SEQ ID NO: 679618 - RNA, 19 nt, Artificial Sequence
  Description of Artificial Sequence: Synthetic oligonucleotide
ggcgauaauccuaugaaug

SEQ ID NO: 679619 - RNA, 19 nt, Artificial Sequence
  Description of Artificial Sequence: Synthetic oligonucleotide
ugcuaaaguuagcacuaac

SEQ ID NO: 679620 - RNA, 19 nt, Artificial Sequence
  Description of Artificial Sequence: Synthetic oligonucleotide
uuuccuguauccugcccug

SEQ ID NO: 679621 - RNA, 19 nt, Artificial Sequence
  Description of Artificial Sequence: Synthetic oligonucleotide
uuacuccuacucaugcacu

SEQ ID NO: 679622 - RNA, 19 nt, Artificial Sequence
  Description of Artificial Sequence: Synthetic oligonucleotide
gaacauuacacugguauua

SEQ ID NO: 679623 - RNA, 19 nt, Artificial Sequence
  Description of Artificial Sequence: Synthetic oligonucleotide
uaucagaucagagcauccu

SEQ ID NO: 679624 - RNA, 19 nt, Artificial Sequence
  Description of Artificial Sequence: Synthetic oligonucleotide
ccauuauacaauauggcca

SEQ ID NO: 679625 - RNA, 19 nt, Artificial Sequence
  Description of Artificial Sequence: Synthetic oligonucleotide
ucgcaacauagucugcaug

SEQ ID NO: 679626 - RNA, 19 nt, Artificial Sequence
  Description of Artificial Sequence: Synthetic oligonucleotide
uugcgucuugauuucaaaa

SEQ ID NO: 679627 - RNA, 19 nt, Artificial Sequence
  Description of Artificial Sequence: Synthetic oligonucleotide
cagccuauaacgccgccgc

SEQ ID NO: 679628 - RNA, 19 nt, Artificial Sequence
  Description of Artificial Sequence: Synthetic oligonucleotide
ggcuaaguucaccauacug

SEQ ID NO: 679629 - RNA, 19 nt, Artificial Sequence
  Description of Artificial Sequence: Synthetic oligonucleotide
ucauagaguccguccccgg

SEQ ID NO: 679630 - RNA, 19 nt, Artificial Sequence
  Description of Artificial Sequence: Synthetic oligonucleotide
cuguccaacgauaccauga

SEQ ID NO: 679631 - RNA, 19 nt, Artificial Sequence
  Description of Artificial Sequence: Synthetic oligonucleotide
uuccguuagcuauggugag

SEQ ID NO: 679632 - RNA, 19 nt, Artificial Sequence
  Description of Artificial Sequence: Synthetic oligonucleotide
gauuauggcgucccucauc

SEQ ID NO: 679633 - RNA, 19 nt, Artificial Sequence
  Description of Artificial Sequence: Synthetic oligonucleotide
gcugcuauuaccccacccc

SEQ ID NO: 679634 - RNA, 19 nt, Artificial Sequence
  Description of Artificial Sequence: Synthetic oligonucleotide
cuacucaugcacuuuaaua

SEQ ID NO: 679635 - RNA, 19 nt, Artificial Sequence
  Description of Artificial Sequence: Synthetic oligonucleotide
gauuuguaguuagagguua

SEQ ID NO: 679636 - RNA, 19 nt, Artificial Sequence
  Description of Artificial Sequence: Synthetic oligonucleotide
gagaacuuuagguuuuagu

SEQ ID NO: 679637 - RNA, 19 nt, Artificial Sequence
  Description of Artificial Sequence: Synthetic oligonucleotide
guggcgauaauccuaugaa

SEQ ID NO: 679638 - RNA, 19 nt, Artificial Sequence
  Description of Artificial Sequence: Synthetic oligonucleotide
uccguuagcuauggugagg

SEQ ID NO: 679639 - RNA, 19 nt, Artificial Sequence
  Description of Artificial Sequence: Synthetic oligonucleotide
uccuguauccugcccuggc

SEQ ID NO: 679640 - RNA, 19 nt, Artificial Sequence
  Description of Artificial Sequence: Synthetic oligonucleotide
acauuuacgguggagcuuu

SEQ ID NO: 679641 - RNA, 19 nt, Artificial Sequence
  Description of Artificial Sequence: Synthetic oligonucleotide
aguuagagguuaaccaugu

SEQ ID NO: 679642 - RNA, 19 nt, Artificial Sequence
  Description of Artificial Sequence: Synthetic oligonucleotide
ucgaaacggagccgccccg

SEQ ID NO: 679643 - RNA, 19 nt, Artificial Sequence
  Description of Artificial Sequence: Synthetic oligonucleotide
gaaacagacucgcaacaua

SEQ ID NO: 679644 - RNA, 19 nt, Artificial Sequence
  Description of Artificial Sequence: Synthetic oligonucleotide
gcgagaucgaaacggagcc

SEQ ID NO: 679645 - RNA, 19 nt, Artificial Sequence
  Description of Artificial Sequence: Synthetic oligonucleotide
ugcuauuaccccaccccgu

SEQ ID NO: 679646 - RNA, 19 nt, Artificial Sequence
  Description of Artificial Sequence: Synthetic oligonucleotide
aucguugucuugccggcug

SEQ ID NO: 679647 - RNA, 19 nt, Artificial Sequence
  Description of Artificial Sequence: Synthetic oligonucleotide
guaguuagagguuaaccau

SEQ ID NO: 679648 - RNA, 19 nt, Artificial Sequence
  Description of Artificial Sequence: Synthetic oligonucleotide
cagaucagagcauccuaac

SEQ ID NO: 679649 - RNA, 19 nt, Artificial Sequence
  Description of Artificial Sequence: Synthetic oligonucleotide
uggcgauaauccuaugaau

SEQ ID NO: 679650 - RNA, 19 nt, Artificial Sequence
  Description of Artificial Sequence: Synthetic oligonucleotide
acauuacacugguauuacu

SEQ ID NO: 679651 - RNA, 19 nt, Artificial Sequence
  Description of Artificial Sequence: Synthetic oligonucleotide
aguccguccccggaggugg

SEQ ID NO: 679652 - RNA, 19 nt, Artificial Sequence
  Description of Artificial Sequence: Synthetic oligonucleotide
aguuagcacuaacaaggaa

SEQ ID NO: 679653 - RNA, 19 nt, Artificial Sequence
  Description of Artificial Sequence: Synthetic oligonucleotide
guuuacuccuacucaugca

SEQ ID NO: 679654 - RNA, 19 nt, Artificial Sequence
  Description of Artificial Sequence: Synthetic oligonucleotide
gaucgaaacggagccgccc

SEQ ID NO: 679655 - RNA, 19 nt, Artificial Sequence
  Description of Artificial Sequence: Synthetic oligonucleotide
acucgcaacauagucugca

SEQ ID NO: 679656 - RNA, 19 nt, Artificial Sequence
  Description of Artificial Sequence: Synthetic oligonucleotide
aucuagcacuguuuucgug

SEQ ID NO: 679657 - RNA, 19 nt, Artificial Sequence
  Description of Artificial Sequence: Synthetic oligonucleotide
agcaacuauaauguucuua

SEQ ID NO: 679658 - RNA, 19 nt, Artificial Sequence
  Description of Artificial Sequence: Synthetic oligonucleotide
aucgcgucggaggagccgg

SEQ ID NO: 679659 - RNA, 19 nt, Artificial Sequence
  Description of Artificial Sequence: Synthetic oligonucleotide
ucgugucaaauaucagauc

SEQ ID NO: 679660 - RNA, 19 nt, Artificial Sequence
  Description of Artificial Sequence: Synthetic oligonucleotide
ucccgaauccgggucaggc

SEQ ID NO: 679661 - RNA, 19 nt, Artificial Sequence
  Description of Artificial Sequence: Synthetic oligonucleotide
agacaaacggcaguuugau

SEQ ID NO: 679662 - RNA, 19 nt, Artificial Sequence
  Description of Artificial Sequence: Synthetic oligonucleotide
uauccggcuugacuuuagu

SEQ ID NO: 679663 - RNA, 19 nt, Artificial Sequence
  Description of Artificial Sequence: Synthetic oligonucleotide
agaucgaaacggagccgcc

SEQ ID NO: 679664 - RNA, 19 nt, Artificial Sequence
  Description of Artificial Sequence: Synthetic oligonucleotide
gguggcgauaauccuauga

SEQ ID NO: 679665 - RNA, 19 nt, Artificial Sequence
  Description of Artificial Sequence: Synthetic oligonucleotide
caugauauccggcuugacu

SEQ ID NO: 679666 - RNA, 19 nt, Artificial Sequence
  Description of Artificial Sequence: Synthetic oligonucleotide
ucguugucuugccggcugc

SEQ ID NO: 679667 - RNA, 19 nt, Artificial Sequence
  Description of Artificial Sequence: Synthetic oligonucleotide
gucccgguguaguaaugcc

SEQ ID NO: 679668 - RNA, 19 nt, Artificial Sequence
  Description of Artificial Sequence: Synthetic oligonucleotide
auaccaugauauccggcuu

SEQ ID NO: 679669 - RNA, 19 nt, Artificial Sequence
  Description of Artificial Sequence: Synthetic oligonucleotide
gcgucuugauuucaaaauc

SEQ ID NO: 679670 - RNA, 19 nt, Artificial Sequence
  Description of Artificial Sequence: Synthetic oligonucleotide
cuguuuucgugucaaauau

SEQ ID NO: 679671 - RNA, 19 nt, Artificial Sequence
  Description of Artificial Sequence: Synthetic oligonucleotide
acuaaaccguagaacagua

SEQ ID NO: 679672 - RNA, 19 nt, Artificial Sequence
  Description of Artificial Sequence: Synthetic oligonucleotide
gaauuacauuuacggugga

SEQ ID NO: 679673 - RNA, 19 nt, Artificial Sequence
  Description of Artificial Sequence: Synthetic oligonucleotide
agccuauaacgccgccgcg

SEQ ID NO: 679674 - RNA, 19 nt, Artificial Sequence
  Description of Artificial Sequence: Synthetic oligonucleotide
uagcacuguuuucguguca

SEQ ID NO: 679675 - RNA, 19 nt, Artificial Sequence
  Description of Artificial Sequence: Synthetic oligonucleotide
gaggauuauggcgucccuc

SEQ ID NO: 679676 - RNA, 19 nt, Artificial Sequence
  Description of Artificial Sequence: Synthetic oligonucleotide
uggcgggccucgucgaugc

SEQ ID NO: 679677 - RNA, 19 nt, Artificial Sequence
  Description of Artificial Sequence: Synthetic oligonucleotide
ccacuaaaccguagaacag

SEQ ID NO: 679678 - RNA, 19 nt, Artificial Sequence
  Description of Artificial Sequence: Synthetic oligonucleotide
uacauuuacgguggagcuu

SEQ ID NO: 679679 - RNA, 19 nt, Artificial Sequence
  Description of Artificial Sequence: Synthetic oligonucleotide
gcucauuaggauuuguagu

SEQ ID NO: 679680 - RNA, 19 nt, Artificial Sequence
  Description of Artificial Sequence: Synthetic oligonucleotide
ucgucgaugcggucgcggu

SEQ ID NO: 679681 - RNA, 19 nt, Artificial Sequence
  Description of Artificial Sequence: Synthetic oligonucleotide
ccguuagcuauggugaggg

SEQ ID NO: 679682 - RNA, 19 nt, Artificial Sequence
  Description of Artificial Sequence: Synthetic oligonucleotide
uuccuguauccugcccugg

SEQ ID NO: 679683 - RNA, 19 nt, Artificial Sequence
  Description of Artificial Sequence: Synthetic oligonucleotide
ugcgcucacucgggcaucg

SEQ ID NO: 679684 - RNA, 19 nt, Artificial Sequence
  Description of Artificial Sequence: Synthetic oligonucleotide
uccuaacgcaaagccaaaa

SEQ ID NO: 679685 - RNA, 19 nt, Artificial Sequence
  Description of Artificial Sequence: Synthetic oligonucleotide
gguuaaccaugugagcccc

SEQ ID NO: 679686 - RNA, 19 nt, Artificial Sequence
  Description of Artificial Sequence: Synthetic oligonucleotide
gcauugauauuuguauaac

SEQ ID NO: 679687 - RNA, 19 nt, Artificial Sequence
  Description of Artificial Sequence: Synthetic oligonucleotide
auaacgccgccgcgagauc

SEQ ID NO: 679688 - RNA, 19 nt, Artificial Sequence
  Description of Artificial Sequence: Synthetic oligonucleotide
ccguagaacaguaacucca

SEQ ID NO: 679689 - RNA, 19 nt, Artificial Sequence
  Description of Artificial Sequence: Synthetic oligonucleotide
cuaaaccguagaacaguaa

SEQ ID NO: 679690 - RNA, 19 nt, Artificial Sequence
  Description of Artificial Sequence: Synthetic oligonucleotide
cgauaauccuaugaauggg

SEQ ID NO: 679691 - RNA, 19 nt, Artificial Sequence
  Description of Artificial Sequence: Synthetic oligonucleotide
aagcaacuauaauguucuu

SEQ ID NO: 679692 - RNA, 19 nt, Artificial Sequence
  Description of Artificial Sequence: Synthetic oligonucleotide
auccggcuugacuuuaguu

SEQ ID NO: 679693 - RNA, 19 nt, Artificial Sequence
  Description of Artificial Sequence: Synthetic oligonucleotide
cauagaguccguccccgga

SEQ ID NO: 679694 - RNA, 19 nt, Artificial Sequence
  Description of Artificial Sequence: Synthetic oligonucleotide
ccggcuugacuuuaguuuc

SEQ ID NO: 679695 - RNA, 19 nt, Artificial Sequence
  Description of Artificial Sequence: Synthetic oligonucleotide
aguuuuacuuacagcucau

SEQ ID NO: 679696 - RNA, 19 nt, Artificial Sequence
  Description of Artificial Sequence: Synthetic oligonucleotide
ugucccgaauccgggucag

SEQ ID NO: 679697 - RNA, 19 nt, Artificial Sequence
  Description of Artificial Sequence: Synthetic oligonucleotide
caaccccacuaaaccguag

SEQ ID NO: 679698 - RNA, 19 nt, Artificial Sequence
  Description of Artificial Sequence: Synthetic oligonucleotide
cgcgagaucgaaacggagc

SEQ ID NO: 679699 - RNA, 19 nt, Artificial Sequence
  Description of Artificial Sequence: Synthetic oligonucleotide
ccugcgugcggccugcgcg

SEQ ID NO: 679700 - RNA, 19 nt, Artificial Sequence
  Description of Artificial Sequence: Synthetic oligonucleotide
cucgucgaugcggucgcgg

SEQ ID NO: 679701 - RNA, 19 nt, Artificial Sequence
  Description of Artificial Sequence: Synthetic oligonucleotide
gcagucuacauuuccguua

SEQ ID NO: 679702 - RNA, 19 nt, Artificial Sequence
  Description of Artificial Sequence: Synthetic oligonucleotide
ccaacgauaccaugauauc

SEQ ID NO: 679703 - RNA, 19 nt, Artificial Sequence
  Description of Artificial Sequence: Synthetic oligonucleotide
gccgccgcgagaucgaaac

SEQ ID NO: 679704 - RNA, 19 nt, Artificial Sequence
  Description of Artificial Sequence: Synthetic oligonucleotide
uaguugcgucuugauuuca

SEQ ID NO: 679705 - RNA, 19 nt, Artificial Sequence
  Description of Artificial Sequence: Synthetic oligonucleotide
cucagccuauaacgccgcc

SEQ ID NO: 679706 - RNA, 19 nt, Artificial Sequence
  Description of Artificial Sequence: Synthetic oligonucleotide
acgguggagcuuugggaau

SEQ ID NO: 679707 - RNA, 19 nt, Artificial Sequence
  Description of Artificial Sequence: Synthetic oligonucleotide
caucgcgucggaggagccg

SEQ ID NO: 679708 - RNA, 19 nt, Artificial Sequence
  Description of Artificial Sequence: Synthetic oligonucleotide
cccuacauuaccuguuuca

SEQ ID NO: 679709 - RNA, 19 nt, Artificial Sequence
  Description of Artificial Sequence: Synthetic oligonucleotide
cacuaaaccguagaacagu

SEQ ID NO: 679710 - RNA, 19 nt, Artificial Sequence
  Description of Artificial Sequence: Synthetic oligonucleotide
aguugcgucuugauuucaa

SEQ ID NO: 679711 - RNA, 19 nt, Artificial Sequence
  Description of Artificial Sequence: Synthetic oligonucleotide
cauuuacgguggagcuuug

SEQ ID NO: 679712 - RNA, 19 nt, Artificial Sequence
  Description of Artificial Sequence: Synthetic oligonucleotide
gugagggaacuugaguuua

SEQ ID NO: 679713 - RNA, 19 nt, Artificial Sequence
  Description of Artificial Sequence: Synthetic oligonucleotide
gacucgcaacauagucugc

SEQ ID NO: 679714 - RNA, 19 nt, Artificial Sequence
  Description of Artificial Sequence: Synthetic oligonucleotide
ucgcgucggaggagccggg

SEQ ID NO: 679715 - RNA, 19 nt, Artificial Sequence
  Description of Artificial Sequence: Synthetic oligonucleotide
cccggucauugauaaugcg

SEQ ID NO: 679716 - RNA, 19 nt, Artificial Sequence
  Description of Artificial Sequence: Synthetic oligonucleotide
gcauccuaacgcaaagcca

SEQ ID NO: 679717 - RNA, 19 nt, Artificial Sequence
  Description of Artificial Sequence: Synthetic oligonucleotide
gaugcucauuaggauuugu

SEQ ID NO: 679718 - RNA, 19 nt, Artificial Sequence
  Description of Artificial Sequence: Synthetic oligonucleotide
ccggccugcgcucacucgg

SEQ ID NO: 679719 - RNA, 19 nt, Artificial Sequence
  Description of Artificial Sequence: Synthetic oligonucleotide
gccgcgaggacgcccugcg

SEQ ID NO: 679720 - RNA, 19 nt, Artificial Sequence
  Description of Artificial Sequence: Synthetic oligonucleotide
gguaagaaacuagggcaaa

SEQ ID NO: 679721 - RNA, 19 nt, Artificial Sequence
  Description of Artificial Sequence: Synthetic oligonucleotide
cugucccgaauccggguca

SEQ ID NO: 679722 - RNA, 19 nt, Artificial Sequence
  Description of Artificial Sequence: Synthetic oligonucleotide
cccgaauccgggucaggcc

SEQ ID NO: 679723 - RNA, 19 nt, Artificial Sequence
  Description of Artificial Sequence: Synthetic oligonucleotide
ugguggcgauaauccuaug

SEQ ID NO: 679724 - RNA, 19 nt, Artificial Sequence
  Description of Artificial Sequence: Synthetic oligonucleotide
cgauaccaugauauccggc

SEQ ID NO: 679725 - RNA, 19 nt, Artificial Sequence
  Description of Artificial Sequence: Synthetic oligonucleotide
caucuacagcaagugguaa

SEQ ID NO: 679726 - RNA, 19 nt, Artificial Sequence
  Description of Artificial Sequence: Synthetic oligonucleotide
uccccggagguggcacagg

SEQ ID NO: 679727 - RNA, 19 nt, Artificial Sequence
  Description of Artificial Sequence: Synthetic oligonucleotide
guccaacgauaccaugaua

SEQ ID NO: 679728 - RNA, 19 nt, Artificial Sequence
  Description of Artificial Sequence: Synthetic oligonucleotide
gcggccugcgcgaagcugc

SEQ ID NO: 679729 - RNA, 19 nt, Artificial Sequence
  Description of Artificial Sequence: Synthetic oligonucleotide
gccucgucgaugcggucgc

SEQ ID NO: 679730 - RNA, 19 nt, Artificial Sequence
  Description of Artificial Sequence: Synthetic oligonucleotide
ccaucuacagcaaguggua

SEQ ID NO: 679731 - RNA, 19 nt, Artificial Sequence
  Description of Artificial Sequence: Synthetic oligonucleotide
cgccgcgagaucgaaacgg

SEQ ID NO: 679732 - RNA, 19 nt, Artificial Sequence
  Description of Artificial Sequence: Synthetic oligonucleotide
ggcgucccucaucucccgg

SEQ ID NO: 679733 - RNA, 19 nt, Artificial Sequence
  Description of Artificial Sequence: Synthetic oligonucleotide
auccuaacgcaaagccaaa

SEQ ID NO: 679734 - RNA, 19 nt, Artificial Sequence
  Description of Artificial Sequence: Synthetic oligonucleotide
gccuauaacgccgccgcga

SEQ ID NO: 679735 - RNA, 19 nt, Artificial Sequence
  Description of Artificial Sequence: Synthetic oligonucleotide
cuauaacgccgccgcgaga

SEQ ID NO: 679736 - RNA, 19 nt, Artificial Sequence
  Description of Artificial Sequence: Synthetic oligonucleotide
cccaucgcgucggaggagc

SEQ ID NO: 679737 - RNA, 19 nt, Artificial Sequence
  Description of Artificial Sequence: Synthetic oligonucleotide
auaaugcggugcagcuccu

SEQ ID NO: 679738 - RNA, 19 nt, Artificial Sequence
  Description of Artificial Sequence: Synthetic oligonucleotide
cugcgugcggccugcgcga

SEQ ID NO: 679739 - RNA, 19 nt, Artificial Sequence
  Description of Artificial Sequence: Synthetic oligonucleotide
ccgcgagaucgaaacggag

SEQ ID NO: 679740 - RNA, 19 nt, Artificial Sequence
  Description of Artificial Sequence: Synthetic oligonucleotide
cucgcaacauagucugcau

SEQ ID NO: 679741 - RNA, 19 nt, Artificial Sequence
  Description of Artificial Sequence: Synthetic oligonucleotide
ccgguguaguaaugccgcc

SEQ ID NO: 679742 - RNA, 19 nt, Artificial Sequence
  Description of Artificial Sequence: Synthetic oligonucleotide
gcaacauagucugcaugaa

SEQ ID NO: 679743 - RNA, 19 nt, Artificial Sequence
  Description of Artificial Sequence: Synthetic oligonucleotide
guuuuacuuacagcucauu

SEQ ID NO: 679744 - RNA, 19 nt, Artificial Sequence
  Description of Artificial Sequence: Synthetic oligonucleotide
cgagaucgaaacggagccg

SEQ ID NO: 679745 - RNA, 19 nt, Artificial Sequence
  Description of Artificial Sequence: Synthetic oligonucleotide
cucgggcaucgcccgccgc

SEQ ID NO: 679746 - RNA, 19 nt, Artificial Sequence
  Description of Artificial Sequence: Synthetic oligonucleotide
gcuauuaccccaccccguu

SEQ ID NO: 679747 - RNA, 19 nt, Artificial Sequence
  Description of Artificial Sequence: Synthetic oligonucleotide
cacugguauuacucauuau

SEQ ID NO: 679748 - RNA, 19 nt, Artificial Sequence
  Description of Artificial Sequence: Synthetic oligonucleotide
ggcagucuacauuuccguu

SEQ ID NO: 679749 - RNA, 19 nt, Artificial Sequence
  Description of Artificial Sequence: Synthetic oligonucleotide
ccaucgcgucggaggagcc

SEQ ID NO: 679750 - RNA, 19 nt, Artificial Sequence
  Description of Artificial Sequence: Synthetic oligonucleotide
gccgcgagaucgaaacgga

SEQ ID NO: 679751 - RNA, 19 nt, Artificial Sequence
  Description of Artificial Sequence: Synthetic oligonucleotide
cuauuaccccaccccguuu

SEQ ID NO: 679752 - RNA, 19 nt, Artificial Sequence
  Description of Artificial Sequence: Synthetic oligonucleotide
ccgccgcgagaucgaaacg

SEQ ID NO: 679753 - RNA, 19 nt, Artificial Sequence
  Description of Artificial Sequence: Synthetic oligonucleotide
ugcgugcggccugcgcgaa

SEQ ID NO: 679754 - RNA, 19 nt, Artificial Sequence
  Description of Artificial Sequence: Synthetic oligonucleotide
cugcgcucacucgggcauc

SEQ ID NO: 679755 - RNA, 19 nt, Artificial Sequence
  Description of Artificial Sequence: Synthetic oligonucleotide
cauuuccguuagcuauggu

SEQ ID NO: 679756 - RNA, 19 nt, Artificial Sequence
  Description of Artificial Sequence: Synthetic oligonucleotide
cccgaagaucuuggauagc

SEQ ID NO: 679757 - RNA, 19 nt, Artificial Sequence
  Description of Artificial Sequence: Synthetic oligonucleotide
gcgaggcgcggccggcccg

SEQ ID NO: 679758 - RNA, 19 nt, Artificial Sequence
  Description of Artificial Sequence: Synthetic oligonucleotide
ccaugauauccggcuugac

SEQ ID NO: 679759 - RNA, 19 nt, Artificial Sequence
  Description of Artificial Sequence: Synthetic oligonucleotide
agccccucauagaguccgu

SEQ ID NO: 679760 - RNA, 19 nt, Artificial Sequence
  Description of Artificial Sequence: Synthetic oligonucleotide
ggcgggccucgucgaugcg

SEQ ID NO: 679761 - RNA, 19 nt, Artificial Sequence
  Description of Artificial Sequence: Synthetic oligonucleotide
gggcuaaguucaccauacu

SEQ ID NO: 679762 - RNA, 19 nt, Artificial Sequence
  Description of Artificial Sequence: Synthetic oligonucleotide
cgucugcgccgggagagcc

SEQ ID NO: 679763 - RNA, 19 nt, Artificial Sequence
  Description of Artificial Sequence: Synthetic oligonucleotide
ccagcaugaggauccgcau

SEQ ID NO: 679764 - RNA, 19 nt, Artificial Sequence
  Description of Artificial Sequence: Synthetic oligonucleotide
cccugcgugcggccugcgc

SEQ ID NO: 679765 - RNA, 19 nt, Artificial Sequence
  Description of Artificial Sequence: Synthetic oligonucleotide
ccggcccggaacugccuuc

SEQ ID NO: 679766 - RNA, 19 nt, Artificial Sequence
  Description of Artificial Sequence: Synthetic oligonucleotide
gcgucugcgccgggagagc

SEQ ID NO: 679767 - RNA, 19 nt, Artificial Sequence
  Description of Artificial Sequence: Synthetic oligonucleotide
gcgugcggccugcgcgaag

SEQ ID NO: 679768 - RNA, 19 nt, Artificial Sequence
  Description of Artificial Sequence: Synthetic oligonucleotide
gccgcccugcugaggcgag

SEQ ID NO: 679769 - RNA, 19 nt, Artificial Sequence
  Description of Artificial Sequence: Synthetic oligonucleotide
ccucgucgaugcggucgcg

SEQ ID NO: 679770 - RNA, 19 nt, Artificial Sequence
  Description of Artificial Sequence: Synthetic oligonucleotide
cugcguccagacccagcau

SEQ ID NO: 679771 - RNA, 19 nt, Artificial Sequence
  Description of Artificial Sequence: Synthetic oligonucleotide
ccccaucgcgucggaggag

SEQ ID NO: 679772 - RNA, 19 nt, Artificial Sequence
  Description of Artificial Sequence: Synthetic oligonucleotide
ggucaccgacuggcccagc

SEQ ID NO: 679773 - RNA, 19 nt, Artificial Sequence
  Description of Artificial Sequence: Synthetic oligonucleotide
ccgcccugcugaggcgagg

SEQ ID NO: 679774 - RNA, 19 nt, Artificial Sequence
  Description of Artificial Sequence: Synthetic oligonucleotide
cgggagagccgccgcccug

SEQ ID NO: 679775 - RNA, 19 nt, Artificial Sequence
  Description of Artificial Sequence: Synthetic oligonucleotide
gcgcucacucgggcaucgc

SEQ ID NO: 679776 - RNA, 19 nt, Artificial Sequence
  Description of Artificial Sequence: Synthetic oligonucleotide
gcgcggccggcccggaacu

SEQ ID NO: 679777 - RNA, 19 nt, Artificial Sequence
  Description of Artificial Sequence: Synthetic oligonucleotide
cgccgcgaggacgcccugc

SEQ ID NO: 679778 - RNA, 19 nt, Artificial Sequence
  Description of Artificial Sequence: Synthetic oligonucleotide
gccggcccggaacugccuu

SEQ ID NO: 679779 - RNA, 19 nt, Artificial Sequence
  Description of Artificial Sequence: Synthetic oligonucleotide
ccgggagagccgccgcccu

SEQ ID NO: 679780 - RNA, 19 nt, Artificial Sequence
  Description of Artificial Sequence: Synthetic oligonucleotide
ccgccgcgaggacgcccug

SEQ ID NO: 679781 - RNA, 19 nt, Artificial Sequence
  Description of Artificial Sequence: Synthetic oligonucleotide
cgccgccgcgagaucgaaa

SEQ ID NO: 679782 - RNA, 19 nt, Artificial Sequence
  Description of Artificial Sequence: Synthetic oligonucleotide
ccggguccccucagccuau

SEQ ID NO: 679783 - RNA, 19 nt, Artificial Sequence
  Description of Artificial Sequence: Synthetic oligonucleotide
ccgcgaggacgcccugcgu

SEQ ID NO: 679784 - RNA, 19 nt, Artificial Sequence
  Description of Artificial Sequence: Synthetic oligonucleotide
cggguccccucagccuaua

SEQ ID NO: 679785 - RNA, 19 nt, Artificial Sequence
  Description of Artificial Sequence: Synthetic oligonucleotide
aauaacaaauauuugacca

SEQ ID NO: 679786 - RNA, 19 nt, Artificial Sequence
  Description of Artificial Sequence: Synthetic oligonucleotide
aaggauagcauuccuaugg

SEQ ID NO: 679787 - RNA, 19 nt, Artificial Sequence
  Description of Artificial Sequence: Synthetic oligonucleotide
aacacaugaagcccuaugg

SEQ ID NO: 679788 - RNA, 19 nt, Artificial Sequence
  Description of Artificial Sequence: Synthetic oligonucleotide
ugauuuauugucaucgaag

SEQ ID NO: 679789 - RNA, 19 nt, Artificial Sequence
  Description of Artificial Sequence: Synthetic oligonucleotide
gaugcgaagaagauaaugg

SEQ ID NO: 679790 - RNA, 19 nt, Artificial Sequence
  Description of Artificial Sequence: Synthetic oligonucleotide
gauaguugaaucucggggc

SEQ ID NO: 679791 - RNA, 19 nt, Artificial Sequence
  Description of Artificial Sequence: Synthetic oligonucleotide
aaguugacuccuuugacug

SEQ ID NO: 679792 - RNA, 19 nt, Artificial Sequence
  Description of Artificial Sequence: Synthetic oligonucleotide
uacauaaucaacugacugc

SEQ ID NO: 679793 - RNA, 19 nt, Artificial Sequence
  Description of Artificial Sequence: Synthetic oligonucleotide
ucaguagugucauauaaca

SEQ ID NO: 679794 - RNA, 19 nt, Artificial Sequence
  Description of Artificial Sequence: Synthetic oligonucleotide
ucgauguaagccaugaucu

SEQ ID NO: 679795 - RNA, 19 nt, Artificial Sequence
  Description of Artificial Sequence: Synthetic oligonucleotide
uauaacaagguccuuguaa

SEQ ID NO: 679796 - RNA, 19 nt, Artificial Sequence
  Description of Artificial Sequence: Synthetic oligonucleotide
aagaugaaagcggauaauc

SEQ ID NO: 679797 - RNA, 19 nt, Artificial Sequence
  Description of Artificial Sequence: Synthetic oligonucleotide
aaagagaauuuguccaauc

SEQ ID NO: 679798 - RNA, 19 nt, Artificial Sequence
  Description of Artificial Sequence: Synthetic oligonucleotide
uguaaagauauccuccaca

SEQ ID NO: 679799 - RNA, 19 nt, Artificial Sequence
  Description of Artificial Sequence: Synthetic oligonucleotide
augcgaagaagauaauggc

SEQ ID NO: 679800 - RNA, 19 nt, Artificial Sequence
  Description of Artificial Sequence: Synthetic oligonucleotide
aucaaggcaaaauagcuca

SEQ ID NO: 679801 - RNA, 19 nt, Artificial Sequence
  Description of Artificial Sequence: Synthetic oligonucleotide
aagaccccaaauuucuccg

SEQ ID NO: 679802 - RNA, 19 nt, Artificial Sequence
  Description of Artificial Sequence: Synthetic oligonucleotide
aagagaauuuguccaauca

SEQ ID NO: 679803 - RNA, 19 nt, Artificial Sequence
  Description of Artificial Sequence: Synthetic oligonucleotide
uucuuuaucacccgggcac

SEQ ID NO: 679804 - RNA, 19 nt, Artificial Sequence
  Description of Artificial Sequence: Synthetic oligonucleotide
augacgaccacagacaggg

SEQ ID NO: 679805 - RNA, 19 nt, Artificial Sequence
  Description of Artificial Sequence: Synthetic oligonucleotide
aaaaugcagugucaaaacu

SEQ ID NO: 679806 - RNA, 19 nt, Artificial Sequence
  Description of Artificial Sequence: Synthetic oligonucleotide
agagaauuuguccaaucag

SEQ ID NO: 679807 - RNA, 19 nt, Artificial Sequence
  Description of Artificial Sequence: Synthetic oligonucleotide
aaugaggagguacaccucu

SEQ ID NO: 679808 - RNA, 19 nt, Artificial Sequence
  Description of Artificial Sequence: Synthetic oligonucleotide
ugcgaagaagauaauggcc

SEQ ID NO: 679809 - RNA, 19 nt, Artificial Sequence
  Description of Artificial Sequence: Synthetic oligonucleotide
cacaccacaauuauauacc

SEQ ID NO: 679810 - RNA, 19 nt, Artificial Sequence
  Description of Artificial Sequence: Synthetic oligonucleotide
uuugacugauuuauuguca

SEQ ID NO: 679811 - RNA, 19 nt, Artificial Sequence
  Description of Artificial Sequence: Synthetic oligonucleotide
caaauuucuccgaaggccc

SEQ ID NO: 679812 - RNA, 19 nt, Artificial Sequence
  Description of Artificial Sequence: Synthetic oligonucleotide
aaagcggauaauccaagga

SEQ ID NO: 679813 - RNA, 19 nt, Artificial Sequence
  Description of Artificial Sequence: Synthetic oligonucleotide
agaugaaagcggauaaucc

SEQ ID NO: 679814 - RNA, 19 nt, Artificial Sequence
  Description of Artificial Sequence: Synthetic oligonucleotide
uggagaaaacuccaggcca

SEQ ID NO: 679815 - RNA, 19 nt, Artificial Sequence
  Description of Artificial Sequence: Synthetic oligonucleotide
ucauauaacaagguccuug

SEQ ID NO: 679816 - RNA, 19 nt, Artificial Sequence
  Description of Artificial Sequence: Synthetic oligonucleotide
gaugaaagcggauaaucca

SEQ ID NO: 679817 - RNA, 19 nt, Artificial Sequence
  Description of Artificial Sequence: Synthetic oligonucleotide
auagcauuccuauggucac

SEQ ID NO: 679818 - RNA, 19 nt, Artificial Sequence
  Description of Artificial Sequence: Synthetic oligonucleotide
agacaagaccaacacugcc

SEQ ID NO: 679819 - RNA, 19 nt, Artificial Sequence
  Description of Artificial Sequence: Synthetic oligonucleotide
ucucucgagaugaugcccg

SEQ ID NO: 679820 - RNA, 19 nt, Artificial Sequence
  Description of Artificial Sequence: Synthetic oligonucleotide
ggauaguugaaucucgggg

SEQ ID NO: 679821 - RNA, 19 nt, Artificial Sequence
  Description of Artificial Sequence: Synthetic oligonucleotide
gugucauauaacaaggucc

SEQ ID NO: 679822 - RNA, 19 nt, Artificial Sequence
  Description of Artificial Sequence: Synthetic oligonucleotide
ugagauaagucuuuaugau

SEQ ID NO: 679823 - RNA, 19 nt, Artificial Sequence
  Description of Artificial Sequence: Synthetic oligonucleotide
aaaauagcucaggugacug

SEQ ID NO: 679824 - RNA, 19 nt, Artificial Sequence
  Description of Artificial Sequence: Synthetic oligonucleotide
aagcggauaauccaaggau

SEQ ID NO: 679825 - RNA, 19 nt, Artificial Sequence
  Description of Artificial Sequence: Synthetic oligonucleotide
accacaauuauauacccaa

SEQ ID NO: 679826 - RNA, 19 nt, Artificial Sequence
  Description of Artificial Sequence: Synthetic oligonucleotide
gaaagcggauaauccaagg

SEQ ID NO: 679827 - RNA, 19 nt, Artificial Sequence
  Description of Artificial Sequence: Synthetic oligonucleotide
gaagaccccaaauuucucc

SEQ ID NO: 679828 - RNA, 19 nt, Artificial Sequence
  Description of Artificial Sequence: Synthetic oligonucleotide
ugcugcauguuuuaagggc

SEQ ID NO: 679829 - RNA, 19 nt, Artificial Sequence
  Description of Artificial Sequence: Synthetic oligonucleotide
uugaccaacaaauuauaau

SEQ ID NO: 679830 - RNA, 19 nt, Artificial Sequence
  Description of Artificial Sequence: Synthetic oligonucleotide
aaugcagugucaaaacucu

SEQ ID NO: 679831 - RNA, 19 nt, Artificial Sequence
  Description of Artificial Sequence: Synthetic oligonucleotide
acaauaggaaguuaauaau

SEQ ID NO: 679832 - RNA, 19 nt, Artificial Sequence
  Description of Artificial Sequence: Synthetic oligonucleotide
ugugacaacgugcccuugg

SEQ ID NO: 679833 - RNA, 19 nt, Artificial Sequence
  Description of Artificial Sequence: Synthetic oligonucleotide
gccaauacaaacuucauga

SEQ ID NO: 679834 - RNA, 19 nt, Artificial Sequence
  Description of Artificial Sequence: Synthetic oligonucleotide
uguacauaaucaacugacu

SEQ ID NO: 679835 - RNA, 19 nt, Artificial Sequence
  Description of Artificial Sequence: Synthetic oligonucleotide
cauagagacguccaacagc

SEQ ID NO: 679836 - RNA, 19 nt, Artificial Sequence
  Description of Artificial Sequence: Synthetic oligonucleotide
aggccaacaagaaacaggg

SEQ ID NO: 679837 - RNA, 19 nt, Artificial Sequence
  Description of Artificial Sequence: Synthetic oligonucleotide
ugaaagcggauaauccaag

SEQ ID NO: 679838 - RNA, 19 nt, Artificial Sequence
  Description of Artificial Sequence: Synthetic oligonucleotide
gaagucacggauaggcucg

SEQ ID NO: 679839 - RNA, 19 nt, Artificial Sequence
  Description of Artificial Sequence: Synthetic oligonucleotide
ugacggugcagcaacaaac

SEQ ID NO: 679840 - RNA, 19 nt, Artificial Sequence
  Description of Artificial Sequence: Synthetic oligonucleotide
auaacaaauauuugaccaa

SEQ ID NO: 679841 - RNA, 19 nt, Artificial Sequence
  Description of Artificial Sequence: Synthetic oligonucleotide
ugggcaauccuauuguugu

SEQ ID NO: 679842 - RNA, 19 nt, Artificial Sequence
  Description of Artificial Sequence: Synthetic oligonucleotide
ucaacugacugcaaauaaa

SEQ ID NO: 679843 - RNA, 19 nt, Artificial Sequence
  Description of Artificial Sequence: Synthetic oligonucleotide
aggagguacaccucucucg

SEQ ID NO: 679844 - RNA, 19 nt, Artificial Sequence
  Description of Artificial Sequence: Synthetic oligonucleotide
ucacggauaggcucgaugu

SEQ ID NO: 679845 - RNA, 19 nt, Artificial Sequence
  Description of Artificial Sequence: Synthetic oligonucleotide
uccauagagacguccaaca

SEQ ID NO: 679846 - RNA, 19 nt, Artificial Sequence
  Description of Artificial Sequence: Synthetic oligonucleotide
ugggagucgauaagcaugc

SEQ ID NO: 679847 - RNA, 19 nt, Artificial Sequence
  Description of Artificial Sequence: Synthetic oligonucleotide
cucgauguaagccaugauc

SEQ ID NO: 679848 - RNA, 19 nt, Artificial Sequence
  Description of Artificial Sequence: Synthetic oligonucleotide
aaaggagaacucgcugacc

SEQ ID NO: 679849 - RNA, 19 nt, Artificial Sequence
  Description of Artificial Sequence: Synthetic oligonucleotide
uaaagauauccuccacacc

SEQ ID NO: 679850 - RNA, 19 nt, Artificial Sequence
  Description of Artificial Sequence: Synthetic oligonucleotide
uaacaaauauuugaccaac

SEQ ID NO: 679851 - RNA, 19 nt, Artificial Sequence
  Description of Artificial Sequence: Synthetic oligonucleotide
ccuauuguuguacacagcc

SEQ ID NO: 679852 - RNA, 19 nt, Artificial Sequence
  Description of Artificial Sequence: Synthetic oligonucleotide
auaggcucgauguaagcca

SEQ ID NO: 679853 - RNA, 19 nt, Artificial Sequence
  Description of Artificial Sequence: Synthetic oligonucleotide
aaacaguauccgcaguacu

SEQ ID NO: 679854 - RNA, 19 nt, Artificial Sequence
  Description of Artificial Sequence: Synthetic oligonucleotide
auaaucaacugacugcaaa

SEQ ID NO: 679855 - RNA, 19 nt, Artificial Sequence
  Description of Artificial Sequence: Synthetic oligonucleotide
agcgaaaagagaauuuguc

SEQ ID NO: 679856 - RNA, 19 nt, Artificial Sequence
  Description of Artificial Sequence: Synthetic oligonucleotide
auacaaacuucaugacgac

SEQ ID NO: 679857 - RNA, 19 nt, Artificial Sequence
  Description of Artificial Sequence: Synthetic oligonucleotide
agagacguccaacagcucu

SEQ ID NO: 679858 - RNA, 19 nt, Artificial Sequence
  Description of Artificial Sequence: Synthetic oligonucleotide
auauacccaaacaucgugg

SEQ ID NO: 679859 - RNA, 19 nt, Artificial Sequence
  Description of Artificial Sequence: Synthetic oligonucleotide
aauccaaggauaaggauuu

SEQ ID NO: 679860 - RNA, 19 nt, Artificial Sequence
  Description of Artificial Sequence: Synthetic oligonucleotide
uauucugcuuggaacuggc

SEQ ID NO: 679861 - RNA, 19 nt, Artificial Sequence
  Description of Artificial Sequence: Synthetic oligonucleotide
auagacucuuguuuugaug

SEQ ID NO: 679862 - RNA, 19 nt, Artificial Sequence
  Description of Artificial Sequence: Synthetic oligonucleotide
gauaagcaugcugaggccc

SEQ ID NO: 679863 - RNA, 19 nt, Artificial Sequence
  Description of Artificial Sequence: Synthetic oligonucleotide
uuuaugaagugguggucug

SEQ ID NO: 679864 - RNA, 19 nt, Artificial Sequence
  Description of Artificial Sequence: Synthetic oligonucleotide
cugggagucgauaagcaug

SEQ ID NO: 679865 - RNA, 19 nt, Artificial Sequence
  Description of Artificial Sequence: Synthetic oligonucleotide
gcaaguaagaggcucagug

SEQ ID NO: 679866 - RNA, 19 nt, Artificial Sequence
  Description of Artificial Sequence: Synthetic oligonucleotide
cuagcgaaaagagaauuug

SEQ ID NO: 679867 - RNA, 19 nt, Artificial Sequence
  Description of Artificial Sequence: Synthetic oligonucleotide
cuuagaaugaggagguaca

SEQ ID NO: 679868 - RNA, 19 nt, Artificial Sequence
  Description of Artificial Sequence: Synthetic oligonucleotide
aucaguagugucauauaac

SEQ ID NO: 679869 - RNA, 19 nt, Artificial Sequence
  Description of Artificial Sequence: Synthetic oligonucleotide
gagaauuuguccaaucaga

SEQ ID NO: 679870 - RNA, 19 nt, Artificial Sequence
  Description of Artificial Sequence: Synthetic oligonucleotide
ucgacuccccagaacaaag

SEQ ID NO: 679871 - RNA, 19 nt, Artificial Sequence
  Description of Artificial Sequence: Synthetic oligonucleotide
ucgucaagcauggauagac

SEQ ID NO: 679872 - RNA, 19 nt, Artificial Sequence
  Description of Artificial Sequence: Synthetic oligonucleotide
uagcgaaaagagaauuugu

SEQ ID NO: 679873 - RNA, 19 nt, Artificial Sequence
  Description of Artificial Sequence: Synthetic oligonucleotide
aauauuugaccaacaaauu

SEQ ID NO: 679874 - RNA, 19 nt, Artificial Sequence
  Description of Artificial Sequence: Synthetic oligonucleotide
aaacgguccgcagcuuucc

SEQ ID NO: 679875 - RNA, 19 nt, Artificial Sequence
  Description of Artificial Sequence: Synthetic oligonucleotide
aaauagcucaggugacugu

SEQ ID NO: 679876 - RNA, 19 nt, Artificial Sequence
  Description of Artificial Sequence: Synthetic oligonucleotide
aggggugugcuugauaagg

SEQ ID NO: 679877 - RNA, 19 nt, Artificial Sequence
  Description of Artificial Sequence: Synthetic oligonucleotide
cuuuaugaucagacagagg

SEQ ID NO: 679878 - RNA, 19 nt, Artificial Sequence
  Description of Artificial Sequence: Synthetic oligonucleotide
aaucucauauaaccauaau

SEQ ID NO: 679879 - RNA, 19 nt, Artificial Sequence
  Description of Artificial Sequence: Synthetic oligonucleotide
agcucugugaccgucaaca

SEQ ID NO: 679880 - RNA, 19 nt, Artificial Sequence
  Description of Artificial Sequence: Synthetic oligonucleotide
caucaaggcaaaauagcuc

SEQ ID NO: 679881 - RNA, 19 nt, Artificial Sequence
  Description of Artificial Sequence: Synthetic oligonucleotide
aaaucucauauaaccauaa

SEQ ID NO: 679882 - RNA, 19 nt, Artificial Sequence
  Description of Artificial Sequence: Synthetic oligonucleotide
auaugguccuaugagauaa

SEQ ID NO: 679883 - RNA, 19 nt, Artificial Sequence
  Description of Artificial Sequence: Synthetic oligonucleotide
auggauagacucuuguuuu

SEQ ID NO: 679884 - RNA, 19 nt, Artificial Sequence
  Description of Artificial Sequence: Synthetic oligonucleotide
gacaacgugcccuugggaa

SEQ ID NO: 679885 - RNA, 19 nt, Artificial Sequence
  Description of Artificial Sequence: Synthetic oligonucleotide
aggcaaaauagcucaggug

SEQ ID NO: 679886 - RNA, 19 nt, Artificial Sequence
  Description of Artificial Sequence: Synthetic oligonucleotide
ucaacaucaggaagaugaa

SEQ ID NO: 679887 - RNA, 19 nt, Artificial Sequence
  Description of Artificial Sequence: Synthetic oligonucleotide
gauaaguguuggcaugaca

SEQ ID NO: 679888 - RNA, 19 nt, Artificial Sequence
  Description of Artificial Sequence: Synthetic oligonucleotide
aaucaacugacugcaaaua

SEQ ID NO: 679889 - RNA, 19 nt, Artificial Sequence
  Description of Artificial Sequence: Synthetic oligonucleotide
gaaacaguauccgcaguac

SEQ ID NO: 679890 - RNA, 19 nt, Artificial Sequence
  Description of Artificial Sequence: Synthetic oligonucleotide
uagaaugaggagguacacc

SEQ ID NO: 679891 - RNA, 19 nt, Artificial Sequence
  Description of Artificial Sequence: Synthetic oligonucleotide
gguccuaugagauaagucu

SEQ ID NO: 679892 - RNA, 19 nt, Artificial Sequence
  Description of Artificial Sequence: Synthetic oligonucleotide
aagacgcucugaguggguc

SEQ ID NO: 679893 - RNA, 19 nt, Artificial Sequence
  Description of Artificial Sequence: Synthetic oligonucleotide
gacaagaccaacacugcca

SEQ ID NO: 679894 - RNA, 19 nt, Artificial Sequence
  Description of Artificial Sequence: Synthetic oligonucleotide
gaaucucggggcuuuguca

SEQ ID NO: 679895 - RNA, 19 nt, Artificial Sequence
  Description of Artificial Sequence: Synthetic oligonucleotide
uuagaaugaggagguacac

SEQ ID NO: 679896 - RNA, 19 nt, Artificial Sequence
  Description of Artificial Sequence: Synthetic oligonucleotide
ugaaucucggggcuuuguc

SEQ ID NO: 679897 - RNA, 19 nt, Artificial Sequence
  Description of Artificial Sequence: Synthetic oligonucleotide
ugguccuaugagauaaguc

SEQ ID NO: 679898 - RNA, 19 nt, Artificial Sequence
  Description of Artificial Sequence: Synthetic oligonucleotide
auacaauccacuugaugua

SEQ ID NO: 679899 - RNA, 19 nt, Artificial Sequence
  Description of Artificial Sequence: Synthetic oligonucleotide
uaugguccuaugagauaag

SEQ ID NO: 679900 - RNA, 19 nt, Artificial Sequence
  Description of Artificial Sequence: Synthetic oligonucleotide
aaaacagcagcuagcgaaa

SEQ ID NO: 679901 - RNA, 19 nt, Artificial Sequence
  Description of Artificial Sequence: Synthetic oligonucleotide
ugaggagguacaccucucu

SEQ ID NO: 679902 - RNA, 19 nt, Artificial Sequence
  Description of Artificial Sequence: Synthetic oligonucleotide
agaauuuguccaaucagaa

SEQ ID NO: 679903 - RNA, 19 nt, Artificial Sequence
  Description of Artificial Sequence: Synthetic oligonucleotide
agcuuucggugauaugguc

SEQ ID NO: 679904 - RNA, 19 nt, Artificial Sequence
  Description of Artificial Sequence: Synthetic oligonucleotide
ucaucgaaggcaugcuccu

SEQ ID NO: 679905 - RNA, 19 nt, Artificial Sequence
  Description of Artificial Sequence: Synthetic oligonucleotide
uccgcagcuuuccuuacgu

SEQ ID NO: 679906 - RNA, 19 nt, Artificial Sequence
  Description of Artificial Sequence: Synthetic oligonucleotide
gcacaccacaauuauauac

SEQ ID NO: 679907 - RNA, 19 nt, Artificial Sequence
  Description of Artificial Sequence: Synthetic oligonucleotide
gugacaacgugcccuuggg

SEQ ID NO: 679908 - RNA, 19 nt, Artificial Sequence
  Description of Artificial Sequence: Synthetic oligonucleotide
uaauggccgcuuuccacag

SEQ ID NO: 679909 - RNA, 19 nt, Artificial Sequence
  Description of Artificial Sequence: Synthetic oligonucleotide
ugaccgucaacaucaggaa

SEQ ID NO: 679910 - RNA, 19 nt, Artificial Sequence
  Description of Artificial Sequence: Synthetic oligonucleotide
uccuauuguuguacacagc

SEQ ID NO: 679911 - RNA, 19 nt, Artificial Sequence
  Description of Artificial Sequence: Synthetic oligonucleotide
ugucaucgaaggcaugcuc

SEQ ID NO: 679912 - RNA, 19 nt, Artificial Sequence
  Description of Artificial Sequence: Synthetic oligonucleotide
aaguaagcuuccaagcuua

SEQ ID NO: 679913 - RNA, 19 nt, Artificial Sequence
  Description of Artificial Sequence: Synthetic oligonucleotide
accgucaacaucaggaaga

SEQ ID NO: 679914 - RNA, 19 nt, Artificial Sequence
  Description of Artificial Sequence: Synthetic oligonucleotide
uccuauggucacgaugucc

SEQ ID NO: 679915 - RNA, 19 nt, Artificial Sequence
  Description of Artificial Sequence: Synthetic oligonucleotide
ugggaagagaucagugcuc

SEQ ID NO: 679916 - RNA, 19 nt, Artificial Sequence
  Description of Artificial Sequence: Synthetic oligonucleotide
uccuaugagauaagucuuu

SEQ ID NO: 679917 - RNA, 19 nt, Artificial Sequence
  Description of Artificial Sequence: Synthetic oligonucleotide
gugggauaguugaaucucg

SEQ ID NO: 679918 - RNA, 19 nt, Artificial Sequence
  Description of Artificial Sequence: Synthetic oligonucleotide
ugacuguaaaaugcagugu

SEQ ID NO: 679919 - RNA, 19 nt, Artificial Sequence
  Description of Artificial Sequence: Synthetic oligonucleotide
caucaguagugucauauaa

SEQ ID NO: 679920 - RNA, 19 nt, Artificial Sequence
  Description of Artificial Sequence: Synthetic oligonucleotide
uuaugaagugguggucugc

SEQ ID NO: 679921 - RNA, 19 nt, Artificial Sequence
  Description of Artificial Sequence: Synthetic oligonucleotide
caugacgaccacagacagg

SEQ ID NO: 679922 - RNA, 19 nt, Artificial Sequence
  Description of Artificial Sequence: Synthetic oligonucleotide
ugguuauucugggagucga

SEQ ID NO: 679923 - RNA, 19 nt, Artificial Sequence
  Description of Artificial Sequence: Synthetic oligonucleotide
gggauaguugaaucucggg

SEQ ID NO: 679924 - RNA, 19 nt, Artificial Sequence
  Description of Artificial Sequence: Synthetic oligonucleotide
ugucaaaacucuguacaua

SEQ ID NO: 679925 - RNA, 19 nt, Artificial Sequence
  Description of Artificial Sequence: Synthetic oligonucleotide
aacaucgugggcaauccua

SEQ ID NO: 679926 - RNA, 19 nt, Artificial Sequence
  Description of Artificial Sequence: Synthetic oligonucleotide
auaagucuuuaugaucaga

SEQ ID NO: 679927 - RNA, 19 nt, Artificial Sequence
  Description of Artificial Sequence: Synthetic oligonucleotide
gucuuuaugaucagacaga

SEQ ID NO: 679928 - RNA, 19 nt, Artificial Sequence
  Description of Artificial Sequence: Synthetic oligonucleotide
cauauaacaagguccuugu

SEQ ID NO: 679929 - RNA, 19 nt, Artificial Sequence
  Description of Artificial Sequence: Synthetic oligonucleotide
caguauccgcaguacuucc

SEQ ID NO: 679930 - RNA, 19 nt, Artificial Sequence
  Description of Artificial Sequence: Synthetic oligonucleotide
uuuaucacccgggcacugc

SEQ ID NO: 679931 - RNA, 19 nt, Artificial Sequence
  Description of Artificial Sequence: Synthetic oligonucleotide
caugacaggagaauuugua

SEQ ID NO: 679932 - RNA, 19 nt, Artificial Sequence
  Description of Artificial Sequence: Synthetic oligonucleotide
auccgcaggaggugucccc

SEQ ID NO: 679933 - RNA, 19 nt, Artificial Sequence
  Description of Artificial Sequence: Synthetic oligonucleotide
ucaucaguagugucauaua

SEQ ID NO: 679934 - RNA, 19 nt, Artificial Sequence
  Description of Artificial Sequence: Synthetic oligonucleotide
cuauuguuguacacagcca

SEQ ID NO: 679935 - RNA, 19 nt, Artificial Sequence
  Description of Artificial Sequence: Synthetic oligonucleotide
augaaagcggauaauccaa

SEQ ID NO: 679936 - RNA, 19 nt, Artificial Sequence
  Description of Artificial Sequence: Synthetic oligonucleotide
gcagcuagcgaaaagagaa

SEQ ID NO: 679937 - RNA, 19 nt, Artificial Sequence
  Description of Artificial Sequence: Synthetic oligonucleotide
agacagggugaggaauacc

SEQ ID NO: 679938 - RNA, 19 nt, Artificial Sequence
  Description of Artificial Sequence: Synthetic oligonucleotide
cacgugggauaguugaauc

SEQ ID NO: 679939 - RNA, 19 nt, Artificial Sequence
  Description of Artificial Sequence: Synthetic oligonucleotide
accccaaauuucuccgaag

SEQ ID NO: 679940 - RNA, 19 nt, Artificial Sequence
  Description of Artificial Sequence: Synthetic oligonucleotide
ccuuacgucuucaaggauc

SEQ ID NO: 679941 - RNA, 19 nt, Artificial Sequence
  Description of Artificial Sequence: Synthetic oligonucleotide
ugacugauuuauugucauc

SEQ ID NO: 679942 - RNA, 19 nt, Artificial Sequence
  Description of Artificial Sequence: Synthetic oligonucleotide
uagcauuccuauggucacg

SEQ ID NO: 679943 - RNA, 19 nt, Artificial Sequence
  Description of Artificial Sequence: Synthetic oligonucleotide
ccccaaauuucuccgaagg

SEQ ID NO: 679944 - RNA, 19 nt, Artificial Sequence
  Description of Artificial Sequence: Synthetic oligonucleotide
uccgcaguacuuccaugac

SEQ ID NO: 679945 - RNA, 19 nt, Artificial Sequence
  Description of Artificial Sequence: Synthetic oligonucleotide
cuuacgucuucaaggaucu

SEQ ID NO: 679946 - RNA, 19 nt, Artificial Sequence
  Description of Artificial Sequence: Synthetic oligonucleotide
gaucucgucaagcauggau

SEQ ID NO: 679947 - RNA, 19 nt, Artificial Sequence
  Description of Artificial Sequence: Synthetic oligonucleotide
uauccgcaguacuuccaug

SEQ ID NO: 679948 - RNA, 19 nt, Artificial Sequence
  Description of Artificial Sequence: Synthetic oligonucleotide
ggaugcgaagaagauaaug

SEQ ID NO: 679949 - RNA, 19 nt, Artificial Sequence
  Description of Artificial Sequence: Synthetic oligonucleotide
aggcccgcugauacaaucc

SEQ ID NO: 679950 - RNA, 19 nt, Artificial Sequence
  Description of Artificial Sequence: Synthetic oligonucleotide
uccugccuggauaaguguu

SEQ ID NO: 679951 - RNA, 19 nt, Artificial Sequence
  Description of Artificial Sequence: Synthetic oligonucleotide
ucggugauaugguccuaug

SEQ ID NO: 679952 - RNA, 19 nt, Artificial Sequence
  Description of Artificial Sequence: Synthetic oligonucleotide
guuuuaagggcuuccacuu

SEQ ID NO: 679953 - RNA, 19 nt, Artificial Sequence
  Description of Artificial Sequence: Synthetic oligonucleotide
ucggggcuuugucagaaua

SEQ ID NO: 679954 - RNA, 19 nt, Artificial Sequence
  Description of Artificial Sequence: Synthetic oligonucleotide
cugguuauucugggagucg

SEQ ID NO: 679955 - RNA, 19 nt, Artificial Sequence
  Description of Artificial Sequence: Synthetic oligonucleotide
gggucugauccgcaggagg

SEQ ID NO: 679956 - RNA, 19 nt, Artificial Sequence
  Description of Artificial Sequence: Synthetic oligonucleotide
aguugacuccuuugacuga

SEQ ID NO: 679957 - RNA, 19 nt, Artificial Sequence
  Description of Artificial Sequence: Synthetic oligonucleotide
gcugucagagacuugaccu

SEQ ID NO: 679958 - RNA, 19 nt, Artificial Sequence
  Description of Artificial Sequence: Synthetic oligonucleotide
gaggagguacaccucucuc

SEQ ID NO: 679959 - RNA, 19 nt, Artificial Sequence
  Description of Artificial Sequence: Synthetic oligonucleotide
cucucucgagaugaugccc

SEQ ID NO: 679960 - RNA, 19 nt, Artificial Sequence
  Description of Artificial Sequence: Synthetic oligonucleotide
aucucgucaagcauggaua

SEQ ID NO: 679961 - RNA, 19 nt, Artificial Sequence
  Description of Artificial Sequence: Synthetic oligonucleotide
ugaagcccuauggaugcga

SEQ ID NO: 679962 - RNA, 19 nt, Artificial Sequence
  Description of Artificial Sequence: Synthetic oligonucleotide
ugcacgugggauaguugaa

SEQ ID NO: 679963 - RNA, 19 nt, Artificial Sequence
  Description of Artificial Sequence: Synthetic oligonucleotide
uggucacacuuagaaugag

SEQ ID NO: 679964 - RNA, 19 nt, Artificial Sequence
  Description of Artificial Sequence: Synthetic oligonucleotide
auggucacgauguccuuua

SEQ ID NO: 679965 - RNA, 19 nt, Artificial Sequence
  Description of Artificial Sequence: Synthetic oligonucleotide
cuuuaugaagugguggucu

SEQ ID NO: 679966 - RNA, 19 nt, Artificial Sequence
  Description of Artificial Sequence: Synthetic oligonucleotide
ggacacugccucuuuguug

SEQ ID NO: 679967 - RNA, 19 nt, Artificial Sequence
  Description of Artificial Sequence: Synthetic oligonucleotide
cuuucggugauaugguccu

SEQ ID NO: 679968 - RNA, 19 nt, Artificial Sequence
  Description of Artificial Sequence: Synthetic oligonucleotide
agcuagcgaaaagagaauu

SEQ ID NO: 679969 - RNA, 19 nt, Artificial Sequence
  Description of Artificial Sequence: Synthetic oligonucleotide
auauaacaagguccuugua

SEQ ID NO: 679970 - RNA, 19 nt, Artificial Sequence
  Description of Artificial Sequence: Synthetic oligonucleotide
auaagcaugcugaggccca

SEQ ID NO: 679971 - RNA, 19 nt, Artificial Sequence
  Description of Artificial Sequence: Synthetic oligonucleotide
ugauccgcaggaggugucc

SEQ ID NO: 679972 - RNA, 19 nt, Artificial Sequence
  Description of Artificial Sequence: Synthetic oligonucleotide
acggauaggcucgauguaa

SEQ ID NO: 679973 - RNA, 19 nt, Artificial Sequence
  Description of Artificial Sequence: Synthetic oligonucleotide
uucggugauaugguccuau

SEQ ID NO: 679974 - RNA, 19 nt, Artificial Sequence
  Description of Artificial Sequence: Synthetic oligonucleotide
acaugaggacacugccucu

SEQ ID NO: 679975 - RNA, 19 nt, Artificial Sequence
  Description of Artificial Sequence: Synthetic oligonucleotide
agcggauaauccaaggaua

SEQ ID NO: 679976 - RNA, 19 nt, Artificial Sequence
  Description of Artificial Sequence: Synthetic oligonucleotide
gacgcucugagugggucug

SEQ ID NO: 679977 - RNA, 19 nt, Artificial Sequence
  Description of Artificial Sequence: Synthetic oligonucleotide
agaccccaaauuucuccga

SEQ ID NO: 679978 - RNA, 19 nt, Artificial Sequence
  Description of Artificial Sequence: Synthetic oligonucleotide
augguccuaugagauaagu

SEQ ID NO: 679979 - RNA, 19 nt, Artificial Sequence
  Description of Artificial Sequence: Synthetic oligonucleotide
ggacugacggugcagcaac

SEQ ID NO: 679980 - RNA, 19 nt, Artificial Sequence
  Description of Artificial Sequence: Synthetic oligonucleotide
agacgcucugagugggucu

SEQ ID NO: 679981 - RNA, 19 nt, Artificial Sequence
  Description of Artificial Sequence: Synthetic oligonucleotide
gagagacaagaccaacacu

SEQ ID NO: 679982 - RNA, 19 nt, Artificial Sequence
  Description of Artificial Sequence: Synthetic oligonucleotide
caguagugucauauaacaa

SEQ ID NO: 679983 - RNA, 19 nt, Artificial Sequence
  Description of Artificial Sequence: Synthetic oligonucleotide
acgucuucaaggaucucgu

SEQ ID NO: 679984 - RNA, 19 nt, Artificial Sequence
  Description of Artificial Sequence: Synthetic oligonucleotide
uccuuacgucuucaaggau

SEQ ID NO: 679985 - RNA, 19 nt, Artificial Sequence
  Description of Artificial Sequence: Synthetic oligonucleotide
agcacuggggcaaguaaga

SEQ ID NO: 679986 - RNA, 19 nt, Artificial Sequence
  Description of Artificial Sequence: Synthetic oligonucleotide
gaccccaaauuucuccgaa

SEQ ID NO: 679987 - RNA, 19 nt, Artificial Sequence
  Description of Artificial Sequence: Synthetic oligonucleotide
gaacaaaggagaacucgcu

SEQ ID NO: 679988 - RNA, 19 nt, Artificial Sequence
  Description of Artificial Sequence: Synthetic oligonucleotide
aaacagcagcuagcgaaaa

SEQ ID NO: 679989 - RNA, 19 nt, Artificial Sequence
  Description of Artificial Sequence: Synthetic oligonucleotide
ggauaggcucgauguaagc

SEQ ID NO: 679990 - RNA, 19 nt, Artificial Sequence
  Description of Artificial Sequence: Synthetic oligonucleotide
guccgcagcuuuccuuacg

SEQ ID NO: 679991 - RNA, 19 nt, Artificial Sequence
  Description of Artificial Sequence: Synthetic oligonucleotide
cucucgagaugaugcccgc

SEQ ID NO: 679992 - RNA, 19 nt, Artificial Sequence
  Description of Artificial Sequence: Synthetic oligonucleotide
gacuccuuugacugauuua

SEQ ID NO: 679993 - RNA, 19 nt, Artificial Sequence
  Description of Artificial Sequence: Synthetic oligonucleotide
uugaaucucggggcuuugu

SEQ ID NO: 679994 - RNA, 19 nt, Artificial Sequence
  Description of Artificial Sequence: Synthetic oligonucleotide
ggcacugcccaugaggaac

SEQ ID NO: 679995 - RNA, 19 nt, Artificial Sequence
  Description of Artificial Sequence: Synthetic oligonucleotide
uucccgcuuugugauauuc

SEQ ID NO: 679996 - RNA, 19 nt, Artificial Sequence
  Description of Artificial Sequence: Synthetic oligonucleotide
ccauagagacguccaacag

SEQ ID NO: 679997 - RNA, 19 nt, Artificial Sequence
  Description of Artificial Sequence: Synthetic oligonucleotide
acucaugggcugaugaauu

SEQ ID NO: 679998 - RNA, 19 nt, Artificial Sequence
  Description of Artificial Sequence: Synthetic oligonucleotide
acaucgugggcaauccuau

SEQ ID NO: 679999 - RNA, 19 nt, Artificial Sequence
  Description of Artificial Sequence: Synthetic oligonucleotide
uuccuauggucacgauguc

SEQ ID NO: 680000 - RNA, 19 nt, Artificial Sequence
  Description of Artificial Sequence: Synthetic oligonucleotide
aguauccgcaguacuucca

SEQ ID NO: 680001 - RNA, 19 nt, Artificial Sequence
  Description of Artificial Sequence: Synthetic oligonucleotide
caggcccgcugauacaauc

SEQ ID NO: 680002 - RNA, 19 nt, Artificial Sequence
  Description of Artificial Sequence: Synthetic oligonucleotide
gauccgcaggagguguccc

SEQ ID NO: 680003 - RNA, 19 nt, Artificial Sequence
  Description of Artificial Sequence: Synthetic oligonucleotide
caggggugugcuugauaag

SEQ ID NO: 680004 - RNA, 19 nt, Artificial Sequence
  Description of Artificial Sequence: Synthetic oligonucleotide
uccgcaggaggugucccca

SEQ ID NO: 680005 - RNA, 19 nt, Artificial Sequence
  Description of Artificial Sequence: Synthetic oligonucleotide
gugucaaaacucuguacau

SEQ ID NO: 680006 - RNA, 19 nt, Artificial Sequence
  Description of Artificial Sequence: Synthetic oligonucleotide
cuuuaucacccgggcacug

SEQ ID NO: 680007 - RNA, 19 nt, Artificial Sequence
  Description of Artificial Sequence: Synthetic oligonucleotide
gcaauccuauuguuguaca

SEQ ID NO: 680008 - RNA, 19 nt, Artificial Sequence
  Description of Artificial Sequence: Synthetic oligonucleotide
uggaugcgaagaagauaau

SEQ ID NO: 680009 - RNA, 19 nt, Artificial Sequence
  Description of Artificial Sequence: Synthetic oligonucleotide
cauaaucaacugacugcaa

SEQ ID NO: 680010 - RNA, 19 nt, Artificial Sequence
  Description of Artificial Sequence: Synthetic oligonucleotide
uggacaccaggggugugcu

SEQ ID NO: 680011 - RNA, 19 nt, Artificial Sequence
  Description of Artificial Sequence: Synthetic oligonucleotide
ccauaauguuuaauaacaa

SEQ ID NO: 680012 - RNA, 19 nt, Artificial Sequence
  Description of Artificial Sequence: Synthetic oligonucleotide
cagacagggugaggaauac

SEQ ID NO: 680013 - RNA, 19 nt, Artificial Sequence
  Description of Artificial Sequence: Synthetic oligonucleotide
ggauagacucuuguuuuga

SEQ ID NO: 680014 - RNA, 19 nt, Artificial Sequence
  Description of Artificial Sequence: Synthetic oligonucleotide
ucucgagaugaugcccgcu

SEQ ID NO: 680015 - RNA, 19 nt, Artificial Sequence
  Description of Artificial Sequence: Synthetic oligonucleotide
ccucucucgagaugaugcc

SEQ ID NO: 680016 - RNA, 19 nt, Artificial Sequence
  Description of Artificial Sequence: Synthetic oligonucleotide
cugugaccgucaacaucag

SEQ ID NO: 680017 - RNA, 19 nt, Artificial Sequence
  Description of Artificial Sequence: Synthetic oligonucleotide
aaccaucugaggacuccaa

SEQ ID NO: 680018 - RNA, 19 nt, Artificial Sequence
  Description of Artificial Sequence: Synthetic oligonucleotide
aagucacggauaggcucga

SEQ ID NO: 680019 - RNA, 19 nt, Artificial Sequence
  Description of Artificial Sequence: Synthetic oligonucleotide
uagagacguccaacagcuc

SEQ ID NO: 680020 - RNA, 19 nt, Artificial Sequence
  Description of Artificial Sequence: Synthetic oligonucleotide
acugacggugcagcaacaa

SEQ ID NO: 680021 - RNA, 19 nt, Artificial Sequence
  Description of Artificial Sequence: Synthetic oligonucleotide
cuaugagauaagucuuuau

SEQ ID NO: 680022 - RNA, 19 nt, Artificial Sequence
  Description of Artificial Sequence: Synthetic oligonucleotide
ggugacuguaaaaugcagu

SEQ ID NO: 680023 - RNA, 19 nt, Artificial Sequence
  Description of Artificial Sequence: Synthetic oligonucleotide
cacagucaacucguagauc

SEQ ID NO: 680024 - RNA, 19 nt, Artificial Sequence
  Description of Artificial Sequence: Synthetic oligonucleotide
gaagcccuauggaugcgaa

SEQ ID NO: 680025 - RNA, 19 nt, Artificial Sequence
  Description of Artificial Sequence: Synthetic oligonucleotide
uugacuccuuugacugauu

SEQ ID NO: 680026 - RNA, 19 nt, Artificial Sequence
  Description of Artificial Sequence: Synthetic oligonucleotide
cucaugggcugaugaauua

SEQ ID NO: 680027 - RNA, 19 nt, Artificial Sequence
  Description of Artificial Sequence: Synthetic oligonucleotide
cgcaguacuuccaugacaa

SEQ ID NO: 680028 - RNA, 19 nt, Artificial Sequence
  Description of Artificial Sequence: Synthetic oligonucleotide
cugacggugcagcaacaaa

SEQ ID NO: 680029 - RNA, 19 nt, Artificial Sequence
  Description of Artificial Sequence: Synthetic oligonucleotide
guauccgcaguacuuccau

SEQ ID NO: 680030 - RNA, 19 nt, Artificial Sequence
  Description of Artificial Sequence: Synthetic oligonucleotide
gcggauaauccaaggauaa

SEQ ID NO: 680031 - RNA, 19 nt, Artificial Sequence
  Description of Artificial Sequence: Synthetic oligonucleotide
ccuuugacugauuuauugu

SEQ ID NO: 680032 - RNA, 19 nt, Artificial Sequence
  Description of Artificial Sequence: Synthetic oligonucleotide
acgguccgcagcuuuccuu

SEQ ID NO: 680033 - RNA, 19 nt, Artificial Sequence
  Description of Artificial Sequence: Synthetic oligonucleotide
gcagcacugugcuguaguc

SEQ ID NO: 680034 - RNA, 19 nt, Artificial Sequence
  Description of Artificial Sequence: Synthetic oligonucleotide
caucgaaggcaugcuccuc

SEQ ID NO: 680035 - RNA, 19 nt, Artificial Sequence
  Description of Artificial Sequence: Synthetic oligonucleotide
guccuaugagauaagucuu

SEQ ID NO: 680036 - RNA, 19 nt, Artificial Sequence
  Description of Artificial Sequence: Synthetic oligonucleotide
cccuauggaugcgaagaag

SEQ ID NO: 680037 - RNA, 19 nt, Artificial Sequence
  Description of Artificial Sequence: Synthetic oligonucleotide
gggcaaguaagaggcucag

SEQ ID NO: 680038 - RNA, 19 nt, Artificial Sequence
  Description of Artificial Sequence: Synthetic oligonucleotide
cagcuuucggugauauggu

SEQ ID NO: 680039 - RNA, 19 nt, Artificial Sequence
  Description of Artificial Sequence: Synthetic oligonucleotide
cucgacuccccagaacaaa

SEQ ID NO: 680040 - RNA, 19 nt, Artificial Sequence
  Description of Artificial Sequence: Synthetic oligonucleotide
acgcagcuuucggugauau

SEQ ID NO: 680041 - RNA, 19 nt, Artificial Sequence
  Description of Artificial Sequence: Synthetic oligonucleotide
gacugacggugcagcaaca

SEQ ID NO: 680042 - RNA, 19 nt, Artificial Sequence
  Description of Artificial Sequence: Synthetic oligonucleotide
gguacaccucucucgagau

SEQ ID NO: 680043 - RNA, 19 nt, Artificial Sequence
  Description of Artificial Sequence: Synthetic oligonucleotide
gcacagucaacucguagau

SEQ ID NO: 680044 - RNA, 19 nt, Artificial Sequence
  Description of Artificial Sequence: Synthetic oligonucleotide
uuucggugauaugguccua

SEQ ID NO: 680045 - RNA, 19 nt, Artificial Sequence
  Description of Artificial Sequence: Synthetic oligonucleotide
cagcucugugaccgucaac

SEQ ID NO: 680046 - RNA, 19 nt, Artificial Sequence
  Description of Artificial Sequence: Synthetic oligonucleotide
cacggauaggcucgaugua

SEQ ID NO: 680047 - RNA, 19 nt, Artificial Sequence
  Description of Artificial Sequence: Synthetic oligonucleotide
cucgucaagcauggauaga

SEQ ID NO: 680048 - RNA, 19 nt, Artificial Sequence
  Description of Artificial Sequence: Synthetic oligonucleotide
cuccgugcucgacucccca

SEQ ID NO: 680049 - RNA, 19 nt, Artificial Sequence
  Description of Artificial Sequence: Synthetic oligonucleotide
gguccgcagcuuuccuuac

SEQ ID NO: 680050 - RNA, 19 nt, Artificial Sequence
  Description of Artificial Sequence: Synthetic oligonucleotide
cagcuagcgaaaagagaau

SEQ ID NO: 680051 - RNA, 19 nt, Artificial Sequence
  Description of Artificial Sequence: Synthetic oligonucleotide
gcucugagugggucugauc

SEQ ID NO: 680052 - RNA, 19 nt, Artificial Sequence
  Description of Artificial Sequence: Synthetic oligonucleotide
gcccuauggaugcgaagaa

SEQ ID NO: 680053 - RNA, 19 nt, Artificial Sequence
  Description of Artificial Sequence: Synthetic oligonucleotide
gucugcacgugggauaguu

SEQ ID NO: 680054 - RNA, 19 nt, Artificial Sequence
  Description of Artificial Sequence: Synthetic oligonucleotide
gaagacgcucugagugggu

SEQ ID NO: 680055 - RNA, 19 nt, Artificial Sequence
  Description of Artificial Sequence: Synthetic oligonucleotide
gcuagcgaaaagagaauuu

SEQ ID NO: 680056 - RNA, 19 nt, Artificial Sequence
  Description of Artificial Sequence: Synthetic oligonucleotide
gggcaauccuauuguugua

SEQ ID NO: 680057 - RNA, 19 nt, Artificial Sequence
  Description of Artificial Sequence: Synthetic oligonucleotide
cggugauaugguccuauga

SEQ ID NO: 680058 - RNA, 19 nt, Artificial Sequence
  Description of Artificial Sequence: Synthetic oligonucleotide
cauugucaucuggugcugu

SEQ ID NO: 680059 - RNA, 19 nt, Artificial Sequence
  Description of Artificial Sequence: Synthetic oligonucleotide
cacuuuguaauggccgcuu

SEQ ID NO: 680060 - RNA, 19 nt, Artificial Sequence
  Description of Artificial Sequence: Synthetic oligonucleotide
gugcagcaacaaaccaucu

SEQ ID NO: 680061 - RNA, 19 nt, Artificial Sequence
  Description of Artificial Sequence: Synthetic oligonucleotide
cacuuagaaugaggaggua

SEQ ID NO: 680062 - RNA, 19 nt, Artificial Sequence
  Description of Artificial Sequence: Synthetic oligonucleotide
cgcucuccgugcucgacuc

SEQ ID NO: 680063 - RNA, 19 nt, Artificial Sequence
  Description of Artificial Sequence: Synthetic oligonucleotide
gcccgcugauacaauccac

SEQ ID NO: 680064 - RNA, 19 nt, Artificial Sequence
  Description of Artificial Sequence: Synthetic oligonucleotide
gguggucugcacgugggau

SEQ ID NO: 680065 - RNA, 19 nt, Artificial Sequence
  Description of Artificial Sequence: Synthetic oligonucleotide
acgcucugagugggucuga

SEQ ID NO: 680066 - RNA, 19 nt, Artificial Sequence
  Description of Artificial Sequence: Synthetic oligonucleotide
cacuucccgcuuugugaua

SEQ ID NO: 680067 - RNA, 19 nt, Artificial Sequence
  Description of Artificial Sequence: Synthetic oligonucleotide
ccacuucccgcuuugugau

SEQ ID NO: 680068 - RNA, 19 nt, Artificial Sequence
  Description of Artificial Sequence: Synthetic oligonucleotide
caagaccaacacugccaau

SEQ ID NO: 680069 - RNA, 19 nt, Artificial Sequence
  Description of Artificial Sequence: Synthetic oligonucleotide
ccgcagcuuuccuuacguc

SEQ ID NO: 680070 - RNA, 19 nt, Artificial Sequence
  Description of Artificial Sequence: Synthetic oligonucleotide
cugccucuuuguugacacu

SEQ ID NO: 680071 - RNA, 19 nt, Artificial Sequence
  Description of Artificial Sequence: Synthetic oligonucleotide
gcacgugggauaguugaau

SEQ ID NO: 680072 - RNA, 19 nt, Artificial Sequence
  Description of Artificial Sequence: Synthetic oligonucleotide
caucgugggcaauccuauu

SEQ ID NO: 680073 - RNA, 19 nt, Artificial Sequence
  Description of Artificial Sequence: Synthetic oligonucleotide
gcucgacuccccagaacaa

SEQ ID NO: 680074 - RNA, 19 nt, Artificial Sequence
  Description of Artificial Sequence: Synthetic oligonucleotide
ggcaaguaagaggcucagu

SEQ ID NO: 680075 - RNA, 19 nt, Artificial Sequence
  Description of Artificial Sequence: Synthetic oligonucleotide
ggaucucgucaagcaugga

SEQ ID NO: 680076 - RNA, 19 nt, Artificial Sequence
  Description of Artificial Sequence: Synthetic oligonucleotide
cgucaacaucaggaagaug

SEQ ID NO: 680077 - RNA, 19 nt, Artificial Sequence
  Description of Artificial Sequence: Synthetic oligonucleotide
ccgcaggagguguccccac

SEQ ID NO: 680078 - RNA, 19 nt, Artificial Sequence
  Description of Artificial Sequence: Synthetic oligonucleotide
gcucgauguaagccaugau

SEQ ID NO: 680079 - RNA, 19 nt, Artificial Sequence
  Description of Artificial Sequence: Synthetic oligonucleotide
cgguccgcagcuuuccuua

SEQ ID NO: 680080 - RNA, 19 nt, Artificial Sequence
  Description of Artificial Sequence: Synthetic oligonucleotide
cacgcagcuuucggugaua

SEQ ID NO: 680081 - RNA, 19 nt, Artificial Sequence
  Description of Artificial Sequence: Synthetic oligonucleotide
cgucaagcauggauagacu

SEQ ID NO: 680082 - RNA, 19 nt, Artificial Sequence
  Description of Artificial Sequence: Synthetic oligonucleotide
ccaaacgguccgcagcuuu

SEQ ID NO: 680083 - RNA, 19 nt, Artificial Sequence
  Description of Artificial Sequence: Synthetic oligonucleotide
ccgcugauacaauccacuu

SEQ ID NO: 680084 - RNA, 19 nt, Artificial Sequence
  Description of Artificial Sequence: Synthetic oligonucleotide
cuucccgcuuugugauauu

SEQ ID NO: 680085 - RNA, 19 nt, Artificial Sequence
  Description of Artificial Sequence: Synthetic oligonucleotide
cccgcucuccgugcucgac

SEQ ID NO: 680086 - RNA, 19 nt, Artificial Sequence
  Description of Artificial Sequence: Synthetic oligonucleotide
ccgucaacaucaggaagau

SEQ ID NO: 680087 - RNA, 19 nt, Artificial Sequence
  Description of Artificial Sequence: Synthetic oligonucleotide
gggagucgauaagcaugcu

SEQ ID NO: 680088 - RNA, 19 nt, Artificial Sequence
  Description of Artificial Sequence: Synthetic oligonucleotide
cgugggcaauccuauuguu

SEQ ID NO: 680089 - RNA, 19 nt, Artificial Sequence
  Description of Artificial Sequence: Synthetic oligonucleotide
caccaggggugugcuugau

SEQ ID NO: 680090 - RNA, 19 nt, Artificial Sequence
  Description of Artificial Sequence: Synthetic oligonucleotide
ccaggcccgcugauacaau

SEQ ID NO: 680091 - RNA, 19 nt, Artificial Sequence
  Description of Artificial Sequence: Synthetic oligonucleotide
aguaauaagaauuagaccc

SEQ ID NO: 680092 - RNA, 19 nt, Artificial Sequence
  Description of Artificial Sequence: Synthetic oligonucleotide
aauacuagauacuauaucc

SEQ ID NO: 680093 - RNA, 19 nt, Artificial Sequence
  Description of Artificial Sequence: Synthetic oligonucleotide
ucuaauaaaucaaagauac

SEQ ID NO: 680094 - RNA, 19 nt, Artificial Sequence
  Description of Artificial Sequence: Synthetic oligonucleotide
aagaauauuaguuacuuca

SEQ ID NO: 680095 - RNA, 19 nt, Artificial Sequence
  Description of Artificial Sequence: Synthetic oligonucleotide
aaaauaggguuauagcccc

SEQ ID NO: 680096 - RNA, 19 nt, Artificial Sequence
  Description of Artificial Sequence: Synthetic oligonucleotide
aaaguagccuaucaguacc

SEQ ID NO: 680097 - RNA, 19 nt, Artificial Sequence
  Description of Artificial Sequence: Synthetic oligonucleotide
uauauuuuagaccaauugc

SEQ ID NO: 680098 - RNA, 19 nt, Artificial Sequence
  Description of Artificial Sequence: Synthetic oligonucleotide
aauauuaguuacuucauca

SEQ ID NO: 680099 - RNA, 19 nt, Artificial Sequence
  Description of Artificial Sequence: Synthetic oligonucleotide
aaaggugugauauauaaaa

SEQ ID NO: 680100 - RNA, 19 nt, Artificial Sequence
  Description of Artificial Sequence: Synthetic oligonucleotide
aauaggguagaacuguuuc

SEQ ID NO: 680101 - RNA, 19 nt, Artificial Sequence
  Description of Artificial Sequence: Synthetic oligonucleotide
uguaacuuaauccugcagc

SEQ ID NO: 680102 - RNA, 19 nt, Artificial Sequence
  Description of Artificial Sequence: Synthetic oligonucleotide
ucuaaaagcaacccuacag

SEQ ID NO: 680103 - RNA, 19 nt, Artificial Sequence
  Description of Artificial Sequence: Synthetic oligonucleotide
ugccauuuagcccaaaugg

SEQ ID NO: 680104 - RNA, 19 nt, Artificial Sequence
  Description of Artificial Sequence: Synthetic oligonucleotide
aagacgauuacauauauuu

SEQ ID NO: 680105 - RNA, 19 nt, Artificial Sequence
  Description of Artificial Sequence: Synthetic oligonucleotide
ugucuaauaaaucaaagau

SEQ ID NO: 680106 - RNA, 19 nt, Artificial Sequence
  Description of Artificial Sequence: Synthetic oligonucleotide
ugugauauauaaaaugcug

SEQ ID NO: 680107 - RNA, 19 nt, Artificial Sequence
  Description of Artificial Sequence: Synthetic oligonucleotide
aagguauacagguugaugu

SEQ ID NO: 680108 - RNA, 19 nt, Artificial Sequence
  Description of Artificial Sequence: Synthetic oligonucleotide
ugaauaaucagucaucauc

SEQ ID NO: 680109 - RNA, 19 nt, Artificial Sequence
  Description of Artificial Sequence: Synthetic oligonucleotide
caaaguacggcauucauag

SEQ ID NO: 680110 - RNA, 19 nt, Artificial Sequence
  Description of Artificial Sequence: Synthetic oligonucleotide
uguacauugagacaauaca

SEQ ID NO: 680111 - RNA, 19 nt, Artificial Sequence
  Description of Artificial Sequence: Synthetic oligonucleotide
uauauugccaucauguuaa

SEQ ID NO: 680112 - RNA, 19 nt, Artificial Sequence
  Description of Artificial Sequence: Synthetic oligonucleotide
agcaauaucacauauguau

SEQ ID NO: 680113 - RNA, 19 nt, Artificial Sequence
  Description of Artificial Sequence: Synthetic oligonucleotide
uuauaauacguuuugaaua

SEQ ID NO: 680114 - RNA, 19 nt, Artificial Sequence
  Description of Artificial Sequence: Synthetic oligonucleotide
aguuauauaacugauucag

SEQ ID NO: 680115 - RNA, 19 nt, Artificial Sequence
  Description of Artificial Sequence: Synthetic oligonucleotide
acgaaaauguuauaauacg

SEQ ID NO: 680116 - RNA, 19 nt, Artificial Sequence
  Description of Artificial Sequence: Synthetic oligonucleotide
uacgaaaauguuauaauac

SEQ ID NO: 680117 - RNA, 19 nt, Artificial Sequence
  Description of Artificial Sequence: Synthetic oligonucleotide
uaagaauuagaccccauca

SEQ ID NO: 680118 - RNA, 19 nt, Artificial Sequence
  Description of Artificial Sequence: Synthetic oligonucleotide
uuaaacaccucuccaacag

SEQ ID NO: 680119 - RNA, 19 nt, Artificial Sequence
  Description of Artificial Sequence: Synthetic oligonucleotide
ugaaguaauaagaauuaga

SEQ ID NO: 680120 - RNA, 19 nt, Artificial Sequence
  Description of Artificial Sequence: Synthetic oligonucleotide
agacaauacaaauuuacug

SEQ ID NO: 680121 - RNA, 19 nt, Artificial Sequence
  Description of Artificial Sequence: Synthetic oligonucleotide
aagccauucucccauacuc

SEQ ID NO: 680122 - RNA, 19 nt, Artificial Sequence
  Description of Artificial Sequence: Synthetic oligonucleotide
ugagacaauacaaauuuac

SEQ ID NO: 680123 - RNA, 19 nt, Artificial Sequence
  Description of Artificial Sequence: Synthetic oligonucleotide
ugauaaaguuauauaacug

SEQ ID NO: 680124 - RNA, 19 nt, Artificial Sequence
  Description of Artificial Sequence: Synthetic oligonucleotide
ugagaagguauacagguug

SEQ ID NO: 680125 - RNA, 19 nt, Artificial Sequence
  Description of Artificial Sequence: Synthetic oligonucleotide
augauaaaguuauauaacu

SEQ ID NO: 680126 - RNA, 19 nt, Artificial Sequence
  Description of Artificial Sequence: Synthetic oligonucleotide
uauaauacguuuugaauaa

SEQ ID NO: 680127 - RNA, 19 nt, Artificial Sequence
  Description of Artificial Sequence: Synthetic oligonucleotide
uucauuacuguacauguac

SEQ ID NO: 680128 - RNA, 19 nt, Artificial Sequence
  Description of Artificial Sequence: Synthetic oligonucleotide
ugugucuaauaaaucaaag

SEQ ID NO: 680129 - RNA, 19 nt, Artificial Sequence
  Description of Artificial Sequence: Synthetic oligonucleotide
aaugaauugggagacacga

SEQ ID NO: 680130 - RNA, 19 nt, Artificial Sequence
  Description of Artificial Sequence: Synthetic oligonucleotide
gaagcaguucgucagauug

SEQ ID NO: 680131 - RNA, 19 nt, Artificial Sequence
  Description of Artificial Sequence: Synthetic oligonucleotide
acaucuuaaaugccugucc

SEQ ID NO: 680132 - RNA, 19 nt, Artificial Sequence
  Description of Artificial Sequence: Synthetic oligonucleotide
uuagcuguaaaucuuccac

SEQ ID NO: 680133 - RNA, 19 nt, Artificial Sequence
  Description of Artificial Sequence: Synthetic oligonucleotide
aaguacggcauucauagga

SEQ ID NO: 680134 - RNA, 19 nt, Artificial Sequence
  Description of Artificial Sequence: Synthetic oligonucleotide
cugauuugagucaaguggg

SEQ ID NO: 680135 - RNA, 19 nt, Artificial Sequence
  Description of Artificial Sequence: Synthetic oligonucleotide
aguguuauggcauucggca

SEQ ID NO: 680136 - RNA, 19 nt, Artificial Sequence
  Description of Artificial Sequence: Synthetic oligonucleotide
gauacuaaugauaucagga

SEQ ID NO: 680137 - RNA, 19 nt, Artificial Sequence
  Description of Artificial Sequence: Synthetic oligonucleotide
uuuuaauuaagacgauuac

SEQ ID NO: 680138 - RNA, 19 nt, Artificial Sequence
  Description of Artificial Sequence: Synthetic oligonucleotide
uauuaguuacuucaucaug

SEQ ID NO: 680139 - RNA, 19 nt, Artificial Sequence
  Description of Artificial Sequence: Synthetic oligonucleotide
agguuaagaaauauaagac

SEQ ID NO: 680140 - RNA, 19 nt, Artificial Sequence
  Description of Artificial Sequence: Synthetic oligonucleotide
uaucacauauguauauugc

SEQ ID NO: 680141 - RNA, 19 nt, Artificial Sequence
  Description of Artificial Sequence: Synthetic oligonucleotide
uucaucaugagauuccugu

SEQ ID NO: 680142 - RNA, 19 nt, Artificial Sequence
  Description of Artificial Sequence: Synthetic oligonucleotide
uggacuuaagauaacuuga

SEQ ID NO: 680143 - RNA, 19 nt, Artificial Sequence
  Description of Artificial Sequence: Synthetic oligonucleotide
uaaucagucaucauccuaa

SEQ ID NO: 680144 - RNA, 19 nt, Artificial Sequence
  Description of Artificial Sequence: Synthetic oligonucleotide
auaucacauauguauauug

SEQ ID NO: 680145 - RNA, 19 nt, Artificial Sequence
  Description of Artificial Sequence: Synthetic oligonucleotide
aagagguuaagaaauauaa

SEQ ID NO: 680146 - RNA, 19 nt, Artificial Sequence
  Description of Artificial Sequence: Synthetic oligonucleotide
uguugguuaauuuccacac

SEQ ID NO: 680147 - RNA, 19 nt, Artificial Sequence
  Description of Artificial Sequence: Synthetic oligonucleotide
cauuacuuuucacaaauac

SEQ ID NO: 680148 - RNA, 19 nt, Artificial Sequence
  Description of Artificial Sequence: Synthetic oligonucleotide
uauuagacuguugagcaag

SEQ ID NO: 680149 - RNA, 19 nt, Artificial Sequence
  Description of Artificial Sequence: Synthetic oligonucleotide
uauauaacugauucagcac

SEQ ID NO: 680150 - RNA, 19 nt, Artificial Sequence
  Description of Artificial Sequence: Synthetic oligonucleotide
gagaauguacaggagaugc

SEQ ID NO: 680151 - RNA, 19 nt, Artificial Sequence
  Description of Artificial Sequence: Synthetic oligonucleotide
uuuaacaugaauggguacu

SEQ ID NO: 680152 - RNA, 19 nt, Artificial Sequence
  Description of Artificial Sequence: Synthetic oligonucleotide
auaaaaugcuguaagacca

SEQ ID NO: 680153 - RNA, 19 nt, Artificial Sequence
  Description of Artificial Sequence: Synthetic oligonucleotide
uugaauacuagauacuaua

SEQ ID NO: 680154 - RNA, 19 nt, Artificial Sequence
  Description of Artificial Sequence: Synthetic oligonucleotide
aaagcaaaguacggcauuc

SEQ ID NO: 680155 - RNA, 19 nt, Artificial Sequence
  Description of Artificial Sequence: Synthetic oligonucleotide
auacguuuugaauaaucag

SEQ ID NO: 680156 - RNA, 19 nt, Artificial Sequence
  Description of Artificial Sequence: Synthetic oligonucleotide
ugauucagcaccacgaaau

SEQ ID NO: 680157 - RNA, 19 nt, Artificial Sequence
  Description of Artificial Sequence: Synthetic oligonucleotide
guuaggauuaauaggguag

SEQ ID NO: 680158 - RNA, 19 nt, Artificial Sequence
  Description of Artificial Sequence: Synthetic oligonucleotide
aacuccaucaaacgaagau

SEQ ID NO: 680159 - RNA, 19 nt, Artificial Sequence
  Description of Artificial Sequence: Synthetic oligonucleotide
agggucacagguuagccac

SEQ ID NO: 680160 - RNA, 19 nt, Artificial Sequence
  Description of Artificial Sequence: Synthetic oligonucleotide
aguuacuucaucaugagau

SEQ ID NO: 680161 - RNA, 19 nt, Artificial Sequence
  Description of Artificial Sequence: Synthetic oligonucleotide
ugcgaaacuccaucaaacg

SEQ ID NO: 680162 - RNA, 19 nt, Artificial Sequence
  Description of Artificial Sequence: Synthetic oligonucleotide
auucauaggaaagccauuc

SEQ ID NO: 680163 - RNA, 19 nt, Artificial Sequence
  Description of Artificial Sequence: Synthetic oligonucleotide
caaauuuacuguccaaccc

SEQ ID NO: 680164 - RNA, 19 nt, Artificial Sequence
  Description of Artificial Sequence: Synthetic oligonucleotide
aaguuauauaacugauuca

SEQ ID NO: 680165 - RNA, 19 nt, Artificial Sequence
  Description of Artificial Sequence: Synthetic oligonucleotide
uauguauauugccaucaug

SEQ ID NO: 680166 - RNA, 19 nt, Artificial Sequence
  Description of Artificial Sequence: Synthetic oligonucleotide
ccuaucaguaccuugaccc

SEQ ID NO: 680167 - RNA, 19 nt, Artificial Sequence
  Description of Artificial Sequence: Synthetic oligonucleotide
uuaguuacuucaucaugag

SEQ ID NO: 680168 - RNA, 19 nt, Artificial Sequence
  Description of Artificial Sequence: Synthetic oligonucleotide
uaguguuuguuccuuauuc

SEQ ID NO: 680169 - RNA, 19 nt, Artificial Sequence
  Description of Artificial Sequence: Synthetic oligonucleotide
ugguuaauuuccacacugg

SEQ ID NO: 680170 - RNA, 19 nt, Artificial Sequence
  Description of Artificial Sequence: Synthetic oligonucleotide
agcaccacgaaaugaauug

SEQ ID NO: 680171 - RNA, 19 nt, Artificial Sequence
  Description of Artificial Sequence: Synthetic oligonucleotide
uacucuaaaagcaacccua

SEQ ID NO: 680172 - RNA, 19 nt, Artificial Sequence
  Description of Artificial Sequence: Synthetic oligonucleotide
agauacuauauccaauaca

SEQ ID NO: 680173 - RNA, 19 nt, Artificial Sequence
  Description of Artificial Sequence: Synthetic oligonucleotide
cugaagucugauuugaguc

SEQ ID NO: 680174 - RNA, 19 nt, Artificial Sequence
  Description of Artificial Sequence: Synthetic oligonucleotide
aaugccuguccugugagag

SEQ ID NO: 680175 - RNA, 19 nt, Artificial Sequence
  Description of Artificial Sequence: Synthetic oligonucleotide
uuuugcuacgaaaauguua

SEQ ID NO: 680176 - RNA, 19 nt, Artificial Sequence
  Description of Artificial Sequence: Synthetic oligonucleotide
aagagcucaguauagucaa

SEQ ID NO: 680177 - RNA, 19 nt, Artificial Sequence
  Description of Artificial Sequence: Synthetic oligonucleotide
guacaggagaugcaguugg

SEQ ID NO: 680178 - RNA, 19 nt, Artificial Sequence
  Description of Artificial Sequence: Synthetic oligonucleotide
ugaauacuagauacuauau

SEQ ID NO: 680179 - RNA, 19 nt, Artificial Sequence
  Description of Artificial Sequence: Synthetic oligonucleotide
auguauauugccaucaugu

SEQ ID NO: 680180 - RNA, 19 nt, Artificial Sequence
  Description of Artificial Sequence: Synthetic oligonucleotide
auuaauaggguagaacugu

SEQ ID NO: 680181 - RNA, 19 nt, Artificial Sequence
  Description of Artificial Sequence: Synthetic oligonucleotide
uguugaaaguagccuauca

SEQ ID NO: 680182 - RNA, 19 nt, Artificial Sequence
  Description of Artificial Sequence: Synthetic oligonucleotide
aguauaaaccuucuaggaa

SEQ ID NO: 680183 - RNA, 19 nt, Artificial Sequence
  Description of Artificial Sequence: Synthetic oligonucleotide
ugaagucugauuugaguca

SEQ ID NO: 680184 - RNA, 19 nt, Artificial Sequence
  Description of Artificial Sequence: Synthetic oligonucleotide
uacggcauucauaggaaag

SEQ ID NO: 680185 - RNA, 19 nt, Artificial Sequence
  Description of Artificial Sequence: Synthetic oligonucleotide
aauaggguuauagccccac

SEQ ID NO: 680186 - RNA, 19 nt, Artificial Sequence
  Description of Artificial Sequence: Synthetic oligonucleotide
uugaaacgggcuauuagac

SEQ ID NO: 680187 - RNA, 19 nt, Artificial Sequence
  Description of Artificial Sequence: Synthetic oligonucleotide
aaccugaggacaucugaag

SEQ ID NO: 680188 - RNA, 19 nt, Artificial Sequence
  Description of Artificial Sequence: Synthetic oligonucleotide
guugauacaaaguauccaa

SEQ ID NO: 680189 - RNA, 19 nt, Artificial Sequence
  Description of Artificial Sequence: Synthetic oligonucleotide
uuagaccccaucacaaaug

SEQ ID NO: 680190 - RNA, 19 nt, Artificial Sequence
  Description of Artificial Sequence: Synthetic oligonucleotide
aauaguguuuguuccuuau

SEQ ID NO: 680191 - RNA, 19 nt, Artificial Sequence
  Description of Artificial Sequence: Synthetic oligonucleotide
ucccuguuaaaacuguaca

SEQ ID NO: 680192 - RNA, 19 nt, Artificial Sequence
  Description of Artificial Sequence: Synthetic oligonucleotide
gauuaauaggguagaacug

SEQ ID NO: 680193 - RNA, 19 nt, Artificial Sequence
  Description of Artificial Sequence: Synthetic oligonucleotide
ugguauggacauuauuucc

SEQ ID NO: 680194 - RNA, 19 nt, Artificial Sequence
  Description of Artificial Sequence: Synthetic oligonucleotide
cacagguuagccacgagag

SEQ ID NO: 680195 - RNA, 19 nt, Artificial Sequence
  Description of Artificial Sequence: Synthetic oligonucleotide
auacuaaugauaucaggau

SEQ ID NO: 680196 - RNA, 19 nt, Artificial Sequence
  Description of Artificial Sequence: Synthetic oligonucleotide
acuugaaacgggcuauuag

SEQ ID NO: 680197 - RNA, 19 nt, Artificial Sequence
  Description of Artificial Sequence: Synthetic oligonucleotide
uagccuaucaguaccuuga

SEQ ID NO: 680198 - RNA, 19 nt, Artificial Sequence
  Description of Artificial Sequence: Synthetic oligonucleotide
aaccagucagguaauggac

SEQ ID NO: 680199 - RNA, 19 nt, Artificial Sequence
  Description of Artificial Sequence: Synthetic oligonucleotide
uaggguuauagccccaccc

SEQ ID NO: 680200 - RNA, 19 nt, Artificial Sequence
  Description of Artificial Sequence: Synthetic oligonucleotide
uugcgaaacuccaucaaac

SEQ ID NO: 680201 - RNA, 19 nt, Artificial Sequence
  Description of Artificial Sequence: Synthetic oligonucleotide
aggauuaauaggguagaac

SEQ ID NO: 680202 - RNA, 19 nt, Artificial Sequence
  Description of Artificial Sequence: Synthetic oligonucleotide
uuaagacgauuacauauau

SEQ ID NO: 680203 - RNA, 19 nt, Artificial Sequence
  Description of Artificial Sequence: Synthetic oligonucleotide
aagggugacaugcucuuca

SEQ ID NO: 680204 - RNA, 19 nt, Artificial Sequence
  Description of Artificial Sequence: Synthetic oligonucleotide
agcauauucaugauaaagu

SEQ ID NO: 680205 - RNA, 19 nt, Artificial Sequence
  Description of Artificial Sequence: Synthetic oligonucleotide
uaaagagcucaguauaguc

SEQ ID NO: 680206 - RNA, 19 nt, Artificial Sequence
  Description of Artificial Sequence: Synthetic oligonucleotide
uggcaguugauacaaagua

SEQ ID NO: 680207 - RNA, 19 nt, Artificial Sequence
  Description of Artificial Sequence: Synthetic oligonucleotide
ggcuuuacaaaccacuugc

SEQ ID NO: 680208 - RNA, 19 nt, Artificial Sequence
  Description of Artificial Sequence: Synthetic oligonucleotide
aaaagagguuaagaaauau

SEQ ID NO: 680209 - RNA, 19 nt, Artificial Sequence
  Description of Artificial Sequence: Synthetic oligonucleotide
acggcauucauaggaaagc

SEQ ID NO: 680210 - RNA, 19 nt, Artificial Sequence
  Description of Artificial Sequence: Synthetic oligonucleotide
cuugaaacgggcuauuaga

SEQ ID NO: 680211 - RNA, 19 nt, Artificial Sequence
  Description of Artificial Sequence: Synthetic oligonucleotide
caguugauacaaaguaucc

SEQ ID NO: 680212 - RNA, 19 nt, Artificial Sequence
  Description of Artificial Sequence: Synthetic oligonucleotide
uacuagauacuauauccaa

SEQ ID NO: 680213 - RNA, 19 nt, Artificial Sequence
  Description of Artificial Sequence: Synthetic oligonucleotide
guaacuuaauccugcagca

SEQ ID NO: 680214 - RNA, 19 nt, Artificial Sequence
  Description of Artificial Sequence: Synthetic oligonucleotide
gaaacuccaucaaacgaag

SEQ ID NO: 680215 - RNA, 19 nt, Artificial Sequence
  Description of Artificial Sequence: Synthetic oligonucleotide
aaacgaagauuacagcaua

SEQ ID NO: 680216 - RNA, 19 nt, Artificial Sequence
  Description of Artificial Sequence: Synthetic oligonucleotide
gugucuaauaaaucaaaga

SEQ ID NO: 680217 - RNA, 19 nt, Artificial Sequence
  Description of Artificial Sequence: Synthetic oligonucleotide
aucacaauuuguacaacuc

SEQ ID NO: 680218 - RNA, 19 nt, Artificial Sequence
  Description of Artificial Sequence: Synthetic oligonucleotide
aaaagcaaaguacggcauu

SEQ ID NO: 680219 - RNA, 19 nt, Artificial Sequence
  Description of Artificial Sequence: Synthetic oligonucleotide
uaauggacccgcuuuggca

SEQ ID NO: 680220 - RNA, 19 nt, Artificial Sequence
  Description of Artificial Sequence: Synthetic oligonucleotide
uuaggauuaauaggguaga

SEQ ID NO: 680221 - RNA, 19 nt, Artificial Sequence
  Description of Artificial Sequence: Synthetic oligonucleotide
uauuagguuucucaucuuu

SEQ ID NO: 680222 - RNA, 19 nt, Artificial Sequence
  Description of Artificial Sequence: Synthetic oligonucleotide
aguucgucagauugcacug

SEQ ID NO: 680223 - RNA, 19 nt, Artificial Sequence
  Description of Artificial Sequence: Synthetic oligonucleotide
auguugguuaauuuccaca

SEQ ID NO: 680224 - RNA, 19 nt, Artificial Sequence
  Description of Artificial Sequence: Synthetic oligonucleotide
cacgaaaugaauugggaga

SEQ ID NO: 680225 - RNA, 19 nt, Artificial Sequence
  Description of Artificial Sequence: Synthetic oligonucleotide
uuuguagcugaaucugaca

SEQ ID NO: 680226 - RNA, 19 nt, Artificial Sequence
  Description of Artificial Sequence: Synthetic oligonucleotide
ugcuacgaaaauguuauaa

SEQ ID NO: 680227 - RNA, 19 nt, Artificial Sequence
  Description of Artificial Sequence: Synthetic oligonucleotide
agacuguugagcaagggug

SEQ ID NO: 680228 - RNA, 19 nt, Artificial Sequence
  Description of Artificial Sequence: Synthetic oligonucleotide
auugugaacugcuuugaaa

SEQ ID NO: 680229 - RNA, 19 nt, Artificial Sequence
  Description of Artificial Sequence: Synthetic oligonucleotide
ggauacuaaugauaucagg

SEQ ID NO: 680230 - RNA, 19 nt, Artificial Sequence
  Description of Artificial Sequence: Synthetic oligonucleotide
cagcauauucaugauaaag

SEQ ID NO: 680231 - RNA, 19 nt, Artificial Sequence
  Description of Artificial Sequence: Synthetic oligonucleotide
uuguugaaguaauaagaau

SEQ ID NO: 680232 - RNA, 19 nt, Artificial Sequence
  Description of Artificial Sequence: Synthetic oligonucleotide
cuguacauugagacaauac

SEQ ID NO: 680233 - RNA, 19 nt, Artificial Sequence
  Description of Artificial Sequence: Synthetic oligonucleotide
auccguacaaaguuucugu

SEQ ID NO: 680234 - RNA, 19 nt, Artificial Sequence
  Description of Artificial Sequence: Synthetic oligonucleotide
ggauuaauaggguagaacu

SEQ ID NO: 680235 - RNA, 19 nt, Artificial Sequence
  Description of Artificial Sequence: Synthetic oligonucleotide
agaaccagucagguaaugg

SEQ ID NO: 680236 - RNA, 19 nt, Artificial Sequence
  Description of Artificial Sequence: Synthetic oligonucleotide
aauaucacauauguauauu

SEQ ID NO: 680237 - RNA, 19 nt, Artificial Sequence
  Description of Artificial Sequence: Synthetic oligonucleotide
auaggguuauagccccacc

SEQ ID NO: 680238 - RNA, 19 nt, Artificial Sequence
  Description of Artificial Sequence: Synthetic oligonucleotide
aacaaaccugaggacaucu

SEQ ID NO: 680239 - RNA, 19 nt, Artificial Sequence
  Description of Artificial Sequence: Synthetic oligonucleotide
uggcuuuacaaaccacuug

SEQ ID NO: 680240 - RNA, 19 nt, Artificial Sequence
  Description of Artificial Sequence: Synthetic oligonucleotide
cacugagaagguauacagg

SEQ ID NO: 680241 - RNA, 19 nt, Artificial Sequence
  Description of Artificial Sequence: Synthetic oligonucleotide
uaauuaagacgauuacaua

SEQ ID NO: 680242 - RNA, 19 nt, Artificial Sequence
  Description of Artificial Sequence: Synthetic oligonucleotide
accagucagguaauggacc

SEQ ID NO: 680243 - RNA, 19 nt, Artificial Sequence
  Description of Artificial Sequence: Synthetic oligonucleotide
acagugaacuucauuacug

SEQ ID NO: 680244 - RNA, 19 nt, Artificial Sequence
  Description of Artificial Sequence: Synthetic oligonucleotide
uggacauuauuuccccucu

SEQ ID NO: 680245 - RNA, 19 nt, Artificial Sequence
  Description of Artificial Sequence: Synthetic oligonucleotide
guuauaauacguuuugaau

SEQ ID NO: 680246 - RNA, 19 nt, Artificial Sequence
  Description of Artificial Sequence: Synthetic oligonucleotide
auacccauuccaucugcuc

SEQ ID NO: 680247 - RNA, 19 nt, Artificial Sequence
  Description of Artificial Sequence: Synthetic oligonucleotide
aguugauacaaaguaucca

SEQ ID NO: 680248 - RNA, 19 nt, Artificial Sequence
  Description of Artificial Sequence: Synthetic oligonucleotide
gauuccuguugaaaguagc

SEQ ID NO: 680249 - RNA, 19 nt, Artificial Sequence
  Description of Artificial Sequence: Synthetic oligonucleotide
gaaggcaguauaaaccuuc

SEQ ID NO: 680250 - RNA, 19 nt, Artificial Sequence
  Description of Artificial Sequence: Synthetic oligonucleotide
cuuuaacaugaauggguac

SEQ ID NO: 680251 - RNA, 19 nt, Artificial Sequence
  Description of Artificial Sequence: Synthetic oligonucleotide
uguugagcaagggugacau

SEQ ID NO: 680252 - RNA, 19 nt, Artificial Sequence
  Description of Artificial Sequence: Synthetic oligonucleotide
uguauauugccaucauguu

SEQ ID NO: 680253 - RNA, 19 nt, Artificial Sequence
  Description of Artificial Sequence: Synthetic oligonucleotide
uaaucugcaaaggugugau

SEQ ID NO: 680254 - RNA, 19 nt, Artificial Sequence
  Description of Artificial Sequence: Synthetic oligonucleotide
ugauuugagucaagugggu

SEQ ID NO: 680255 - RNA, 19 nt, Artificial Sequence
  Description of Artificial Sequence: Synthetic oligonucleotide
uauccaauacaagaacauc

SEQ ID NO: 680256 - RNA, 19 nt, Artificial Sequence
  Description of Artificial Sequence: Synthetic oligonucleotide
uuaauaggguagaacuguu

SEQ ID NO: 680257 - RNA, 19 nt, Artificial Sequence
  Description of Artificial Sequence: Synthetic oligonucleotide
cuacgaaaauguuauaaua

SEQ ID NO: 680258 - RNA, 19 nt, Artificial Sequence
  Description of Artificial Sequence: Synthetic oligonucleotide
gguauggacauuauuuccc

SEQ ID NO: 680259 - RNA, 19 nt, Artificial Sequence
  Description of Artificial Sequence: Synthetic oligonucleotide
aauggacuuaagauaacuu

SEQ ID NO: 680260 - RNA, 19 nt, Artificial Sequence
  Description of Artificial Sequence: Synthetic oligonucleotide
gguacuauggcucauuacu

SEQ ID NO: 680261 - RNA, 19 nt, Artificial Sequence
  Description of Artificial Sequence: Synthetic oligonucleotide
agaaccuggagaauguaca

SEQ ID NO: 680262 - RNA, 19 nt, Artificial Sequence
  Description of Artificial Sequence: Synthetic oligonucleotide
auuuagcccaaauggacuu

SEQ ID NO: 680263 - RNA, 19 nt, Artificial Sequence
  Description of Artificial Sequence: Synthetic oligonucleotide
aucugcaaaggugugauau

SEQ ID NO: 680264 - RNA, 19 nt, Artificial Sequence
  Description of Artificial Sequence: Synthetic oligonucleotide
uguacaggagaugcaguug

SEQ ID NO: 680265 - RNA, 19 nt, Artificial Sequence
  Description of Artificial Sequence: Synthetic oligonucleotide
cauauguauauugccauca

SEQ ID NO: 680266 - RNA, 19 nt, Artificial Sequence
  Description of Artificial Sequence: Synthetic oligonucleotide
acgagagugcauuguacug

SEQ ID NO: 680267 - RNA, 19 nt, Artificial Sequence
  Description of Artificial Sequence: Synthetic oligonucleotide
guauauugccaucauguua

SEQ ID NO: 680268 - RNA, 19 nt, Artificial Sequence
  Description of Artificial Sequence: Synthetic oligonucleotide
aaucagucaucauccuaaa

SEQ ID NO: 680269 - RNA, 19 nt, Artificial Sequence
  Description of Artificial Sequence: Synthetic oligonucleotide
gugccauuuagcccaaaug

SEQ ID NO: 680270 - RNA, 19 nt, Artificial Sequence
  Description of Artificial Sequence: Synthetic oligonucleotide
auacuagauacuauaucca

SEQ ID NO: 680271 - RNA, 19 nt, Artificial Sequence
  Description of Artificial Sequence: Synthetic oligonucleotide
acauauauuuuagaccaau

SEQ ID NO: 680272 - RNA, 19 nt, Artificial Sequence
  Description of Artificial Sequence: Synthetic oligonucleotide
agccauucucccauacucc

SEQ ID NO: 680273 - RNA, 19 nt, Artificial Sequence
  Description of Artificial Sequence: Synthetic oligonucleotide
uggcauucggcagcaauag

SEQ ID NO: 680274 - RNA, 19 nt, Artificial Sequence
  Description of Artificial Sequence: Synthetic oligonucleotide
uuaacaugaauggguacua

SEQ ID NO: 680275 - RNA, 19 nt, Artificial Sequence
  Description of Artificial Sequence: Synthetic oligonucleotide
cacguggaggugcaaagag

SEQ ID NO: 680276 - RNA, 19 nt, Artificial Sequence
  Description of Artificial Sequence: Synthetic oligonucleotide
agguaauggacccgcuuug

SEQ ID NO: 680277 - RNA, 19 nt, Artificial Sequence
  Description of Artificial Sequence: Synthetic oligonucleotide
auuaagacgauuacauaua

SEQ ID NO: 680278 - RNA, 19 nt, Artificial Sequence
  Description of Artificial Sequence: Synthetic oligonucleotide
uccaucaaacgaagauuac

SEQ ID NO: 680279 - RNA, 19 nt, Artificial Sequence
  Description of Artificial Sequence: Synthetic oligonucleotide
gacuuaagauaacuugaaa

SEQ ID NO: 680280 - RNA, 19 nt, Artificial Sequence
  Description of Artificial Sequence: Synthetic oligonucleotide
ccaauugcuuuaaagcaag

SEQ ID NO: 680281 - RNA, 19 nt, Artificial Sequence
  Description of Artificial Sequence: Synthetic oligonucleotide
guagccuaucaguaccuug

SEQ ID NO: 680282 - RNA, 19 nt, Artificial Sequence
  Description of Artificial Sequence: Synthetic oligonucleotide
uaauaggguagaacuguuu

SEQ ID NO: 680283 - RNA, 19 nt, Artificial Sequence
  Description of Artificial Sequence: Synthetic oligonucleotide
agguuagccacgagagugc

SEQ ID NO: 680284 - RNA, 19 nt, Artificial Sequence
  Description of Artificial Sequence: Synthetic oligonucleotide
ugaaggcacguggaggugc

SEQ ID NO: 680285 - RNA, 19 nt, Artificial Sequence
  Description of Artificial Sequence: Synthetic oligonucleotide
cuccaucaaacgaagauua

SEQ ID NO: 680286 - RNA, 19 nt, Artificial Sequence
  Description of Artificial Sequence: Synthetic oligonucleotide
gaauggguacuauggcuca

SEQ ID NO: 680287 - RNA, 19 nt, Artificial Sequence
  Description of Artificial Sequence: Synthetic oligonucleotide
gacaucuuaaaugccuguc

SEQ ID NO: 680288 - RNA, 19 nt, Artificial Sequence
  Description of Artificial Sequence: Synthetic oligonucleotide
agaauauuaguuacuucau

SEQ ID NO: 680289 - RNA, 19 nt, Artificial Sequence
  Description of Artificial Sequence: Synthetic oligonucleotide
gaaggauacuaaugauauc

SEQ ID NO: 680290 - RNA, 19 nt, Artificial Sequence
  Description of Artificial Sequence: Synthetic oligonucleotide
auacaaauuuacuguccaa

SEQ ID NO: 680291 - RNA, 19 nt, Artificial Sequence
  Description of Artificial Sequence: Synthetic oligonucleotide
acugauucagcaccacgaa

SEQ ID NO: 680292 - RNA, 19 nt, Artificial Sequence
  Description of Artificial Sequence: Synthetic oligonucleotide
uugaauaaucagucaucau

SEQ ID NO: 680293 - RNA, 19 nt, Artificial Sequence
  Description of Artificial Sequence: Synthetic oligonucleotide
cuauggcucauuacuuuuc

SEQ ID NO: 680294 - RNA, 19 nt, Artificial Sequence
  Description of Artificial Sequence: Synthetic oligonucleotide
gagcgucuguccuggauug

SEQ ID NO: 680295 - RNA, 19 nt, Artificial Sequence
  Description of Artificial Sequence: Synthetic oligonucleotide
uucggcagcaauaguguuu

SEQ ID NO: 680296 - RNA, 19 nt, Artificial Sequence
  Description of Artificial Sequence: Synthetic oligonucleotide
uucgucagauugcacugaa

SEQ ID NO: 680297 - RNA, 19 nt, Artificial Sequence
  Description of Artificial Sequence: Synthetic oligonucleotide
aauaagagaugcaggcauu

SEQ ID NO: 680298 - RNA, 19 nt, Artificial Sequence
  Description of Artificial Sequence: Synthetic oligonucleotide
agucugauuugagucaagu

SEQ ID NO: 680299 - RNA, 19 nt, Artificial Sequence
  Description of Artificial Sequence: Synthetic oligonucleotide
gggacauugauauugugcu

SEQ ID NO: 680300 - RNA, 19 nt, Artificial Sequence
  Description of Artificial Sequence: Synthetic oligonucleotide
auauggcuuuacaaaccac

SEQ ID NO: 680301 - RNA, 19 nt, Artificial Sequence
  Description of Artificial Sequence: Synthetic oligonucleotide
ccacgaaaugaauugggag

SEQ ID NO: 680302 - RNA, 19 nt, Artificial Sequence
  Description of Artificial Sequence: Synthetic oligonucleotide
guuaaucugcaaaggugug

SEQ ID NO: 680303 - RNA, 19 nt, Artificial Sequence
  Description of Artificial Sequence: Synthetic oligonucleotide
ggugcaaagaggccuuaag

SEQ ID NO: 680304 - RNA, 19 nt, Artificial Sequence
  Description of Artificial Sequence: Synthetic oligonucleotide
ucgucagauugcacugaag

SEQ ID NO: 680305 - RNA, 19 nt, Artificial Sequence
  Description of Artificial Sequence: Synthetic oligonucleotide
ggugggaguguuuacugug

SEQ ID NO: 680306 - RNA, 19 nt, Artificial Sequence
  Description of Artificial Sequence: Synthetic oligonucleotide
cuuagcuguaaaucuucca

SEQ ID NO: 680307 - RNA, 19 nt, Artificial Sequence
  Description of Artificial Sequence: Synthetic oligonucleotide
ugaccagaaccagucaggu

SEQ ID NO: 680308 - RNA, 19 nt, Artificial Sequence
  Description of Artificial Sequence: Synthetic oligonucleotide
agcaaaguacggcauucau

SEQ ID NO: 680309 - RNA, 19 nt, Artificial Sequence
  Description of Artificial Sequence: Synthetic oligonucleotide
auguacucugcaacuacag

SEQ ID NO: 680310 - RNA, 19 nt, Artificial Sequence
  Description of Artificial Sequence: Synthetic oligonucleotide
gaccccaucacaaaugacu

SEQ ID NO: 680311 - RNA, 19 nt, Artificial Sequence
  Description of Artificial Sequence: Synthetic oligonucleotide
cauguuaaucugcaaaggu

SEQ ID NO: 680312 - RNA, 19 nt, Artificial Sequence
  Description of Artificial Sequence: Synthetic oligonucleotide
aauaagaauuagaccccau

SEQ ID NO: 680313 - RNA, 19 nt, Artificial Sequence
  Description of Artificial Sequence: Synthetic oligonucleotide
ggggacauugauauugugc

SEQ ID NO: 680314 - RNA, 19 nt, Artificial Sequence
  Description of Artificial Sequence: Synthetic oligonucleotide
ucaucaugagauuccuguu

SEQ ID NO: 680315 - RNA, 19 nt, Artificial Sequence
  Description of Artificial Sequence: Synthetic oligonucleotide
aacgaagauuacagcauau

SEQ ID NO: 680316 - RNA, 19 nt, Artificial Sequence
  Description of Artificial Sequence: Synthetic oligonucleotide
acuagauacuauauccaau

SEQ ID NO: 680317 - RNA, 19 nt, Artificial Sequence
  Description of Artificial Sequence: Synthetic oligonucleotide
gauugugaacugcuuugaa

SEQ ID NO: 680318 - RNA, 19 nt, Artificial Sequence
  Description of Artificial Sequence: Synthetic oligonucleotide
uccccucuaucccuguuaa

SEQ ID NO: 680319 - RNA, 19 nt, Artificial Sequence
  Description of Artificial Sequence: Synthetic oligonucleotide
agauuccuguugaaaguag

SEQ ID NO: 680320 - RNA, 19 nt, Artificial Sequence
  Description of Artificial Sequence: Synthetic oligonucleotide
agacacgagcgucuguccu

SEQ ID NO: 680321 - RNA, 19 nt, Artificial Sequence
  Description of Artificial Sequence: Synthetic oligonucleotide
uugauguucuaaagccaua

SEQ ID NO: 680322 - RNA, 19 nt, Artificial Sequence
  Description of Artificial Sequence: Synthetic oligonucleotide
gcaguugauacaaaguauc

SEQ ID NO: 680323 - RNA, 19 nt, Artificial Sequence
  Description of Artificial Sequence: Synthetic oligonucleotide
gaugcaggaaggauacuaa

SEQ ID NO: 680324 - RNA, 19 nt, Artificial Sequence
  Description of Artificial Sequence: Synthetic oligonucleotide
aagcaagaaggcaguauaa

SEQ ID NO: 680325 - RNA, 19 nt, Artificial Sequence
  Description of Artificial Sequence: Synthetic oligonucleotide
agcaguucgucagauugca

SEQ ID NO: 680326 - RNA, 19 nt, Artificial Sequence
  Description of Artificial Sequence: Synthetic oligonucleotide
acccuugccagcaucaccu

SEQ ID NO: 680327 - RNA, 19 nt, Artificial Sequence
  Description of Artificial Sequence: Synthetic oligonucleotide
ugggaguguuuacugugaa

SEQ ID NO: 680328 - RNA, 19 nt, Artificial Sequence
  Description of Artificial Sequence: Synthetic oligonucleotide
ucauccuaaagagcucagu

SEQ ID NO: 680329 - RNA, 19 nt, Artificial Sequence
  Description of Artificial Sequence: Synthetic oligonucleotide
uuagcccaaauggacuuaa

SEQ ID NO: 680330 - RNA, 19 nt, Artificial Sequence
  Description of Artificial Sequence: Synthetic oligonucleotide
gaagucugauuugagucaa

SEQ ID NO: 680331 - RNA, 19 nt, Artificial Sequence
  Description of Artificial Sequence: Synthetic oligonucleotide
uaagaccagguaccuuuuc

SEQ ID NO: 680332 - RNA, 19 nt, Artificial Sequence
  Description of Artificial Sequence: Synthetic oligonucleotide
uguuuccauucaccaauua

SEQ ID NO: 680333 - RNA, 19 nt, Artificial Sequence
  Description of Artificial Sequence: Synthetic oligonucleotide
uggguacuauggcucauua

SEQ ID NO: 680334 - RNA, 19 nt, Artificial Sequence
  Description of Artificial Sequence: Synthetic oligonucleotide
cuugcgaaacuccaucaaa

SEQ ID NO: 680335 - RNA, 19 nt, Artificial Sequence
  Description of Artificial Sequence: Synthetic oligonucleotide
gagaagguauacagguuga

SEQ ID NO: 680336 - RNA, 19 nt, Artificial Sequence
  Description of Artificial Sequence: Synthetic oligonucleotide
ugguacaaacauugcuguc

SEQ ID NO: 680337 - RNA, 19 nt, Artificial Sequence
  Description of Artificial Sequence: Synthetic oligonucleotide
cauuuagcccaaauggacu

SEQ ID NO: 680338 - RNA, 19 nt, Artificial Sequence
  Description of Artificial Sequence: Synthetic oligonucleotide
ucccauacuccaucuuccu

SEQ ID NO: 680339 - RNA, 19 nt, Artificial Sequence
  Description of Artificial Sequence: Synthetic oligonucleotide
acaaauacugugacuggaa

SEQ ID NO: 680340 - RNA, 19 nt, Artificial Sequence
  Description of Artificial Sequence: Synthetic oligonucleotide
ugacuuccacugagaacug

SEQ ID NO: 680341 - RNA, 19 nt, Artificial Sequence
  Description of Artificial Sequence: Synthetic oligonucleotide
uaacuuaauccugcagcaa

SEQ ID NO: 680342 - RNA, 19 nt, Artificial Sequence
  Description of Artificial Sequence: Synthetic oligonucleotide
augaauugggagacacgag

SEQ ID NO: 680343 - RNA, 19 nt, Artificial Sequence
  Description of Artificial Sequence: Synthetic oligonucleotide
acguggaggugcaaagagg

SEQ ID NO: 680344 - RNA, 19 nt, Artificial Sequence
  Description of Artificial Sequence: Synthetic oligonucleotide
caucauccuaaagagcuca

SEQ ID NO: 680345 - RNA, 19 nt, Artificial Sequence
  Description of Artificial Sequence: Synthetic oligonucleotide
acacgagcgucuguccugg

SEQ ID NO: 680346 - RNA, 19 nt, Artificial Sequence
  Description of Artificial Sequence: Synthetic oligonucleotide
caauaucacauauguauau

SEQ ID NO: 680347 - RNA, 19 nt, Artificial Sequence
  Description of Artificial Sequence: Synthetic oligonucleotide
ucaguaccuugacccuugc

SEQ ID NO: 680348 - RNA, 19 nt, Artificial Sequence
  Description of Artificial Sequence: Synthetic oligonucleotide
ucaugagauuccuguugaa

SEQ ID NO: 680349 - RNA, 19 nt, Artificial Sequence
  Description of Artificial Sequence: Synthetic oligonucleotide
uccugugagagugccauuu

SEQ ID NO: 680350 - RNA, 19 nt, Artificial Sequence
  Description of Artificial Sequence: Synthetic oligonucleotide
acucaguguuauggcauuc

SEQ ID NO: 680351 - RNA, 19 nt, Artificial Sequence
  Description of Artificial Sequence: Synthetic oligonucleotide
agcaagggugacaugcucu

SEQ ID NO: 680352 - RNA, 19 nt, Artificial Sequence
  Description of Artificial Sequence: Synthetic oligonucleotide
uaggauuaauaggguagaa

SEQ ID NO: 680353 - RNA, 19 nt, Artificial Sequence
  Description of Artificial Sequence: Synthetic oligonucleotide
gguaauggacccgcuuugg

SEQ ID NO: 680354 - RNA, 19 nt, Artificial Sequence
  Description of Artificial Sequence: Synthetic oligonucleotide
ggaaggauacuaaugauau

SEQ ID NO: 680355 - RNA, 19 nt, Artificial Sequence
  Description of Artificial Sequence: Synthetic oligonucleotide
uauugccaucauguuaauc

SEQ ID NO: 680356 - RNA, 19 nt, Artificial Sequence
  Description of Artificial Sequence: Synthetic oligonucleotide
uuccccucuaucccuguua

SEQ ID NO: 680357 - RNA, 19 nt, Artificial Sequence
  Description of Artificial Sequence: Synthetic oligonucleotide
aaucugcaaaggugugaua

SEQ ID NO: 680358 - RNA, 19 nt, Artificial Sequence
  Description of Artificial Sequence: Synthetic oligonucleotide
agauuacagcauauucaug

SEQ ID NO: 680359 - RNA, 19 nt, Artificial Sequence
  Description of Artificial Sequence: Synthetic oligonucleotide
cacaaauacugugacugga

SEQ ID NO: 680360 - RNA, 19 nt, Artificial Sequence
  Description of Artificial Sequence: Synthetic oligonucleotide
uuauuagguuucucaucuu

SEQ ID NO: 680361 - RNA, 19 nt, Artificial Sequence
  Description of Artificial Sequence: Synthetic oligonucleotide
caucugaagucugauuuga

SEQ ID NO: 680362 - RNA, 19 nt, Artificial Sequence
  Description of Artificial Sequence: Synthetic oligonucleotide
caguucgucagauugcacu

SEQ ID NO: 680363 - RNA, 19 nt, Artificial Sequence
  Description of Artificial Sequence: Synthetic oligonucleotide
ccugaggacaucugaaguc

SEQ ID NO: 680364 - RNA, 19 nt, Artificial Sequence
  Description of Artificial Sequence: Synthetic oligonucleotide
aguacggcauucauaggaa

SEQ ID NO: 680365 - RNA, 19 nt, Artificial Sequence
  Description of Artificial Sequence: Synthetic oligonucleotide
cugguacaaacauugcugu

SEQ ID NO: 680366 - RNA, 19 nt, Artificial Sequence
  Description of Artificial Sequence: Synthetic oligonucleotide
ccaauccguacaaaguuuc

SEQ ID NO: 680367 - RNA, 19 nt, Artificial Sequence
  Description of Artificial Sequence: Synthetic oligonucleotide
ggcacguggaggugcaaag

SEQ ID NO: 680368 - RNA, 19 nt, Artificial Sequence
  Description of Artificial Sequence: Synthetic oligonucleotide
gcgaaacuccaucaaacga

SEQ ID NO: 680369 - RNA, 19 nt, Artificial Sequence
  Description of Artificial Sequence: Synthetic oligonucleotide
caugagauuccuguugaaa

SEQ ID NO: 680370 - RNA, 19 nt, Artificial Sequence
  Description of Artificial Sequence: Synthetic oligonucleotide
aagucugauuugagucaag

SEQ ID NO: 680371 - RNA, 19 nt, Artificial Sequence
  Description of Artificial Sequence: Synthetic oligonucleotide
uucccuugcgaaacuccau

SEQ ID NO: 680372 - RNA, 19 nt, Artificial Sequence
  Description of Artificial Sequence: Synthetic oligonucleotide
aaauaggguuauagcccca

SEQ ID NO: 680373 - RNA, 19 nt, Artificial Sequence
  Description of Artificial Sequence: Synthetic oligonucleotide
cauucggcagcaauagugu

SEQ ID NO: 680374 - RNA, 19 nt, Artificial Sequence
  Description of Artificial Sequence: Synthetic oligonucleotide
ccucuaucccuguuaaaac

SEQ ID NO: 680375 - RNA, 19 nt, Artificial Sequence
  Description of Artificial Sequence: Synthetic oligonucleotide
uaucaguaccuugacccuu

SEQ ID NO: 680376 - RNA, 19 nt, Artificial Sequence
  Description of Artificial Sequence: Synthetic oligonucleotide
augguuguugaagaauauu

SEQ ID NO: 680377 - RNA, 19 nt, Artificial Sequence
  Description of Artificial Sequence: Synthetic oligonucleotide
gguuaauuuccacacuggu

SEQ ID NO: 680378 - RNA, 19 nt, Artificial Sequence
  Description of Artificial Sequence: Synthetic oligonucleotide
auaauacguuuugaauaau

SEQ ID NO: 680379 - RNA, 19 nt, Artificial Sequence
  Description of Artificial Sequence: Synthetic oligonucleotide
aauggguacuauggcucau

SEQ ID NO: 680380 - RNA, 19 nt, Artificial Sequence
  Description of Artificial Sequence: Synthetic oligonucleotide
acgaagauuacagcauauu

SEQ ID NO: 680381 - RNA, 19 nt, Artificial Sequence
  Description of Artificial Sequence: Synthetic oligonucleotide
uuuagcccaaauggacuua

SEQ ID NO: 680382 - RNA, 19 nt, Artificial Sequence
  Description of Artificial Sequence: Synthetic oligonucleotide
uagccacgagagugcauug

SEQ ID NO: 680383 - RNA, 19 nt, Artificial Sequence
  Description of Artificial Sequence: Synthetic oligonucleotide
auucggcagcaauaguguu

SEQ ID NO: 680384 - RNA, 19 nt, Artificial Sequence
  Description of Artificial Sequence: Synthetic oligonucleotide
gcaccacgaaaugaauugg

SEQ ID NO: 680385 - RNA, 19 nt, Artificial Sequence
  Description of Artificial Sequence: Synthetic oligonucleotide
uauugugcuugaggacaug

SEQ ID NO: 680386 - RNA, 19 nt, Artificial Sequence
  Description of Artificial Sequence: Synthetic oligonucleotide
ggccaaugguuguugaaga

SEQ ID NO: 680387 - RNA, 19 nt, Artificial Sequence
  Description of Artificial Sequence: Synthetic oligonucleotide
aucauccuaaagagcucag

SEQ ID NO: 680388 - RNA, 19 nt, Artificial Sequence
  Description of Artificial Sequence: Synthetic oligonucleotide
agaccccaucacaaaugac

SEQ ID NO: 680389 - RNA, 19 nt, Artificial Sequence
  Description of Artificial Sequence: Synthetic oligonucleotide
auauugugcuugaggacau

SEQ ID NO: 680390 - RNA, 19 nt, Artificial Sequence
  Description of Artificial Sequence: Synthetic oligonucleotide
agauugcacugaaggcacg

SEQ ID NO: 680391 - RNA, 19 nt, Artificial Sequence
  Description of Artificial Sequence: Synthetic oligonucleotide
gcuacgaaaauguuauaau

SEQ ID NO: 680392 - RNA, 19 nt, Artificial Sequence
  Description of Artificial Sequence: Synthetic oligonucleotide
ccaacagauugugaacugc

SEQ ID NO: 680393 - RNA, 19 nt, Artificial Sequence
  Description of Artificial Sequence: Synthetic oligonucleotide
agcgucuguccuggauugc

SEQ ID NO: 680394 - RNA, 19 nt, Artificial Sequence
  Description of Artificial Sequence: Synthetic oligonucleotide
ggagaauguacaggagaug

SEQ ID NO: 680395 - RNA, 19 nt, Artificial Sequence
  Description of Artificial Sequence: Synthetic oligonucleotide
cacagugaacuucauuacu

SEQ ID NO: 680396 - RNA, 19 nt, Artificial Sequence
  Description of Artificial Sequence: Synthetic oligonucleotide
ccguacaaaguuucuguuc

SEQ ID NO: 680397 - RNA, 19 nt, Artificial Sequence
  Description of Artificial Sequence: Synthetic oligonucleotide
ugcugucuccaugcaagaa

SEQ ID NO: 680398 - RNA, 19 nt, Artificial Sequence
  Description of Artificial Sequence: Synthetic oligonucleotide
gcaauaucacauauguaua

SEQ ID NO: 680399 - RNA, 19 nt, Artificial Sequence
  Description of Artificial Sequence: Synthetic oligonucleotide
guacggcauucauaggaaa

SEQ ID NO: 680400 - RNA, 19 nt, Artificial Sequence
  Description of Artificial Sequence: Synthetic oligonucleotide
cagugaacuucauuacugu

SEQ ID NO: 680401 - RNA, 19 nt, Artificial Sequence
  Description of Artificial Sequence: Synthetic oligonucleotide
cuguugaaaguagccuauc

SEQ ID NO: 680402 - RNA, 19 nt, Artificial Sequence
  Description of Artificial Sequence: Synthetic oligonucleotide
cuaucaguaccuugacccu

SEQ ID NO: 680403 - RNA, 19 nt, Artificial Sequence
  Description of Artificial Sequence: Synthetic oligonucleotide
gauugcacugaaggcacgu

SEQ ID NO: 680404 - RNA, 19 nt, Artificial Sequence
  Description of Artificial Sequence: Synthetic oligonucleotide
cauugcugucuccaugcaa

SEQ ID NO: 680405 - RNA, 19 nt, Artificial Sequence
  Description of Artificial Sequence: Synthetic oligonucleotide
acgagcgucuguccuggau

SEQ ID NO: 680406 - RNA, 19 nt, Artificial Sequence
  Description of Artificial Sequence: Synthetic oligonucleotide
uugcuacgaaaauguuaua

SEQ ID NO: 680407 - RNA, 19 nt, Artificial Sequence
  Description of Artificial Sequence: Synthetic oligonucleotide
cuguucuucccuugcgaaa

SEQ ID NO: 680408 - RNA, 19 nt, Artificial Sequence
  Description of Artificial Sequence: Synthetic oligonucleotide
ggguacuauggcucauuac

SEQ ID NO: 680409 - RNA, 19 nt, Artificial Sequence
  Description of Artificial Sequence: Synthetic oligonucleotide
gagucaagugggugggagu

SEQ ID NO: 680410 - RNA, 19 nt, Artificial Sequence
  Description of Artificial Sequence: Synthetic oligonucleotide
aacgggcuauuagacuguu

SEQ ID NO: 680411 - RNA, 19 nt, Artificial Sequence
  Description of Artificial Sequence: Synthetic oligonucleotide
uugagucaaguggguggga

SEQ ID NO: 680412 - RNA, 19 nt, Artificial Sequence
  Description of Artificial Sequence: Synthetic oligonucleotide
gauacccauuccaucugcu

SEQ ID NO: 680413 - RNA, 19 nt, Artificial Sequence
  Description of Artificial Sequence: Synthetic oligonucleotide
ccacgagagugcauuguac

SEQ ID NO: 680414 - RNA, 19 nt, Artificial Sequence
  Description of Artificial Sequence: Synthetic oligonucleotide
auggacccgcuuuggcagu

SEQ ID NO: 680415 - RNA, 19 nt, Artificial Sequence
  Description of Artificial Sequence: Synthetic oligonucleotide
gacccgcuuuggcaguuga

SEQ ID NO: 680416 - RNA, 19 nt, Artificial Sequence
  Description of Artificial Sequence: Synthetic oligonucleotide
gguaccuuuucaauuuaua

SEQ ID NO: 680417 - RNA, 19 nt, Artificial Sequence
  Description of Artificial Sequence: Synthetic oligonucleotide
guucgucagauugcacuga

SEQ ID NO: 680418 - RNA, 19 nt, Artificial Sequence
  Description of Artificial Sequence: Synthetic oligonucleotide
ggauugcagggucacaggu

SEQ ID NO: 680419 - RNA, 19 nt, Artificial Sequence
  Description of Artificial Sequence: Synthetic oligonucleotide
gaccagaaccagucaggua

SEQ ID NO: 680420 - RNA, 19 nt, Artificial Sequence
  Description of Artificial Sequence: Synthetic oligonucleotide
agguaccuuuucaauuuau

SEQ ID NO: 680421 - RNA, 19 nt, Artificial Sequence
  Description of Artificial Sequence: Synthetic oligonucleotide
agccacgagagugcauugu

SEQ ID NO: 680422 - RNA, 19 nt, Artificial Sequence
  Description of Artificial Sequence: Synthetic oligonucleotide
cagaaccagucagguaaug

SEQ ID NO: 680423 - RNA, 19 nt, Artificial Sequence
  Description of Artificial Sequence: Synthetic oligonucleotide
caauccguacaaaguuucu

SEQ ID NO: 680424 - RNA, 19 nt, Artificial Sequence
  Description of Artificial Sequence: Synthetic oligonucleotide
agcaacccuacagcaacuu

SEQ ID NO: 680425 - RNA, 19 nt, Artificial Sequence
  Description of Artificial Sequence: Synthetic oligonucleotide
ccacuugccaauccguaca

SEQ ID NO: 680426 - RNA, 19 nt, Artificial Sequence
  Description of Artificial Sequence: Synthetic oligonucleotide
cugagaacuguaacuuaau

SEQ ID NO: 680427 - RNA, 19 nt, Artificial Sequence
  Description of Artificial Sequence: Synthetic oligonucleotide
gcaaaguacggcauucaua

SEQ ID NO: 680428 - RNA, 19 nt, Artificial Sequence
  Description of Artificial Sequence: Synthetic oligonucleotide
cccucuaucccuguuaaaa

SEQ ID NO: 680429 - RNA, 19 nt, Artificial Sequence
  Description of Artificial Sequence: Synthetic oligonucleotide
guacuauggcucauuacuu

SEQ ID NO: 680430 - RNA, 19 nt, Artificial Sequence
  Description of Artificial Sequence: Synthetic oligonucleotide
gauugcagggucacagguu

SEQ ID NO: 680431 - RNA, 19 nt, Artificial Sequence
  Description of Artificial Sequence: Synthetic oligonucleotide
aggcacguggaggugcaaa

SEQ ID NO: 680432 - RNA, 19 nt, Artificial Sequence
  Description of Artificial Sequence: Synthetic oligonucleotide
aggugcaaagaggccuuaa

SEQ ID NO: 680433 - RNA, 19 nt, Artificial Sequence
  Description of Artificial Sequence: Synthetic oligonucleotide
ccuguucuucccuugcgaa

SEQ ID NO: 680434 - RNA, 19 nt, Artificial Sequence
  Description of Artificial Sequence: Synthetic oligonucleotide
cagcuuagcuguaaaucuu

SEQ ID NO: 680435 - RNA, 19 nt, Artificial Sequence
  Description of Artificial Sequence: Synthetic oligonucleotide
gguuagccacgagagugca

SEQ ID NO: 680436 - RNA, 19 nt, Artificial Sequence
  Description of Artificial Sequence: Synthetic oligonucleotide
acgggcuauuagacuguug

SEQ ID NO: 680437 - RNA, 19 nt, Artificial Sequence
  Description of Artificial Sequence: Synthetic oligonucleotide
cagcaccacgaaaugaauu

SEQ ID NO: 680438 - RNA, 19 nt, Artificial Sequence
  Description of Artificial Sequence: Synthetic oligonucleotide
gccacgagagugcauugua

SEQ ID NO: 680439 - RNA, 19 nt, Artificial Sequence
  Description of Artificial Sequence: Synthetic oligonucleotide
uuauggcauucggcagcaa

SEQ ID NO: 680440 - RNA, 19 nt, Artificial Sequence
  Description of Artificial Sequence: Synthetic oligonucleotide
ggacaaguguucacuuuua

SEQ ID NO: 680441 - RNA, 19 nt, Artificial Sequence
  Description of Artificial Sequence: Synthetic oligonucleotide
gcuguaagaccagguaccu

SEQ ID NO: 680442 - RNA, 19 nt, Artificial Sequence
  Description of Artificial Sequence: Synthetic oligonucleotide
uggacccgcuuuggcaguu

SEQ ID NO: 680443 - RNA, 19 nt, Artificial Sequence
  Description of Artificial Sequence: Synthetic oligonucleotide
gcaagggugacaugcucuu

SEQ ID NO: 680444 - RNA, 19 nt, Artificial Sequence
  Description of Artificial Sequence: Synthetic oligonucleotide
gcacguggaggugcaaaga

SEQ ID NO: 680445 - RNA, 19 nt, Artificial Sequence
  Description of Artificial Sequence: Synthetic oligonucleotide
gcaguucgucagauugcac

SEQ ID NO: 680446 - RNA, 19 nt, Artificial Sequence
  Description of Artificial Sequence: Synthetic oligonucleotide
acccgcuuuggcaguugau

SEQ ID NO: 680447 - RNA, 19 nt, Artificial Sequence
  Description of Artificial Sequence: Synthetic oligonucleotide
gucagguaauggacccgcu

SEQ ID NO: 680448 - RNA, 19 nt, Artificial Sequence
  Description of Artificial Sequence: Synthetic oligonucleotide
gccaauccguacaaaguuu

SEQ ID NO: 680449 - RNA, 19 nt, Artificial Sequence
  Description of Artificial Sequence: Synthetic oligonucleotide
ccugugagagugccauuua

SEQ ID NO: 680450 - RNA, 19 nt, Artificial Sequence
  Description of Artificial Sequence: Synthetic oligonucleotide
guuagccacgagagugcau

SEQ ID NO: 680451 - RNA, 19 nt, Artificial Sequence
  Description of Artificial Sequence: Synthetic oligonucleotide
ggacccgcuuuggcaguug

SEQ ID NO: 680452 - RNA, 19 nt, Artificial Sequence
  Description of Artificial Sequence: Synthetic oligonucleotide
cacgagcgucuguccugga

SEQ ID NO: 680453 - RNA, 19 nt, Artificial Sequence
  Description of Artificial Sequence: Synthetic oligonucleotide
gagugccauuuagcccaaa

SEQ ID NO: 680454 - RNA, 19 nt, Artificial Sequence
  Description of Artificial Sequence: Synthetic oligonucleotide
cuguaagaccagguaccuu

SEQ ID NO: 680455 - RNA, 19 nt, Artificial Sequence
  Description of Artificial Sequence: Synthetic oligonucleotide
cgagcgucuguccuggauu

SEQ ID NO: 680456 - RNA, 19 nt, Artificial Sequence
  Description of Artificial Sequence: Synthetic oligonucleotide
ccccucuaucccuguuaaa

SEQ ID NO: 680457 - RNA, 19 nt, Artificial Sequence
  Description of Artificial Sequence: Synthetic oligonucleotide
aaauuauaguaauucaggg

SEQ ID NO: 680458 - RNA, 19 nt, Artificial Sequence
  Description of Artificial Sequence: Synthetic oligonucleotide
auuauaguaauucagggga

SEQ ID NO: 680459 - RNA, 19 nt, Artificial Sequence
  Description of Artificial Sequence: Synthetic oligonucleotide
guauauggaauuuaaaaug

SEQ ID NO: 680460 - RNA, 19 nt, Artificial Sequence
  Description of Artificial Sequence: Synthetic oligonucleotide
aaagcaguaaggucggagg

SEQ ID NO: 680461 - RNA, 19 nt, Artificial Sequence
  Description of Artificial Sequence: Synthetic oligonucleotide
ucagacauuaggcaucucg

SEQ ID NO: 680462 - RNA, 19 nt, Artificial Sequence
  Description of Artificial Sequence: Synthetic oligonucleotide
aaauuauagauccacuuau

SEQ ID NO: 680463 - RNA, 19 nt, Artificial Sequence
  Description of Artificial Sequence: Synthetic oligonucleotide
ucgauaaagagugauaucc

SEQ ID NO: 680464 - RNA, 19 nt, Artificial Sequence
  Description of Artificial Sequence: Synthetic oligonucleotide
uguauauggaauuuaaaau

SEQ ID NO: 680465 - RNA, 19 nt, Artificial Sequence
  Description of Artificial Sequence: Synthetic oligonucleotide
uuuaauuugggaaguaccu

SEQ ID NO: 680466 - RNA, 19 nt, Artificial Sequence
  Description of Artificial Sequence: Synthetic oligonucleotide
agcagaaucaacccagacc

SEQ ID NO: 680467 - RNA, 19 nt, Artificial Sequence
  Description of Artificial Sequence: Synthetic oligonucleotide
aaguacgagcccuggaugc

SEQ ID NO: 680468 - RNA, 19 nt, Artificial Sequence
  Description of Artificial Sequence: Synthetic oligonucleotide
cuuaugacagcagauaucc

SEQ ID NO: 680469 - RNA, 19 nt, Artificial Sequence
  Description of Artificial Sequence: Synthetic oligonucleotide
uuaugcaguaacuugugag

SEQ ID NO: 680470 - RNA, 19 nt, Artificial Sequence
  Description of Artificial Sequence: Synthetic oligonucleotide
uacauugggagcuguaugg

SEQ ID NO: 680471 - RNA, 19 nt, Artificial Sequence
  Description of Artificial Sequence: Synthetic oligonucleotide
ucuguaucgaacaccaggc

SEQ ID NO: 680472 - RNA, 19 nt, Artificial Sequence
  Description of Artificial Sequence: Synthetic oligonucleotide
ugaaaugaggccgagagcu

SEQ ID NO: 680473 - RNA, 19 nt, Artificial Sequence
  Description of Artificial Sequence: Synthetic oligonucleotide
aagcaguaaggucggaggc

SEQ ID NO: 680474 - RNA, 19 nt, Artificial Sequence
  Description of Artificial Sequence: Synthetic oligonucleotide
aaguuuguggauuccaugu

SEQ ID NO: 680475 - RNA, 19 nt, Artificial Sequence
  Description of Artificial Sequence: Synthetic oligonucleotide
uugagaguaguuuaauuug

SEQ ID NO: 680476 - RNA, 19 nt, Artificial Sequence
  Description of Artificial Sequence: Synthetic oligonucleotide
aaucaacccagaccaaagg

SEQ ID NO: 680477 - RNA, 19 nt, Artificial Sequence
  Description of Artificial Sequence: Synthetic oligonucleotide
uaaguguacagcgugauca

SEQ ID NO: 680478 - RNA, 19 nt, Artificial Sequence
  Description of Artificial Sequence: Synthetic oligonucleotide
accauuucgauaaagagug

SEQ ID NO: 680479 - RNA, 19 nt, Artificial Sequence
  Description of Artificial Sequence: Synthetic oligonucleotide
uguggucucaguuuacccg

SEQ ID NO: 680480 - RNA, 19 nt, Artificial Sequence
  Description of Artificial Sequence: Synthetic oligonucleotide
cucgggaaaauuaaaacug

SEQ ID NO: 680481 - RNA, 19 nt, Artificial Sequence
  Description of Artificial Sequence: Synthetic oligonucleotide
aguaauuauguauauggaa

SEQ ID NO: 680482 - RNA, 19 nt, Artificial Sequence
  Description of Artificial Sequence: Synthetic oligonucleotide
acaaggguaaguaauuagc

SEQ ID NO: 680483 - RNA, 19 nt, Artificial Sequence
  Description of Artificial Sequence: Synthetic oligonucleotide
aaucacuaacaaauuauag

SEQ ID NO: 680484 - RNA, 19 nt, Artificial Sequence
  Description of Artificial Sequence: Synthetic oligonucleotide
uucacugagguacaacaag

SEQ ID NO: 680485 - RNA, 19 nt, Artificial Sequence
  Description of Artificial Sequence: Synthetic oligonucleotide
auuauagauccacuuauga

SEQ ID NO: 680486 - RNA, 19 nt, Artificial Sequence
  Description of Artificial Sequence: Synthetic oligonucleotide
uaguguucaguaauuaugu

SEQ ID NO: 680487 - RNA, 19 nt, Artificial Sequence
  Description of Artificial Sequence: Synthetic oligonucleotide
uucuuaugcaguaacuugu

SEQ ID NO: 680488 - RNA, 19 nt, Artificial Sequence
  Description of Artificial Sequence: Synthetic oligonucleotide
auccugucaaagcagaauc

SEQ ID NO: 680489 - RNA, 19 nt, Artificial Sequence
  Description of Artificial Sequence: Synthetic oligonucleotide
ugguguucagacauuaggc

SEQ ID NO: 680490 - RNA, 19 nt, Artificial Sequence
  Description of Artificial Sequence: Synthetic oligonucleotide
gacuucaucacaccaacug

SEQ ID NO: 680491 - RNA, 19 nt, Artificial Sequence
  Description of Artificial Sequence: Synthetic oligonucleotide
guaaguaauuagcauuagg

SEQ ID NO: 680492 - RNA, 19 nt, Artificial Sequence
  Description of Artificial Sequence: Synthetic oligonucleotide
uguugcuaagguuucaaga

SEQ ID NO: 680493 - RNA, 19 nt, Artificial Sequence
  Description of Artificial Sequence: Synthetic oligonucleotide
gauaaagagugauauccac

SEQ ID NO: 680494 - RNA, 19 nt, Artificial Sequence
  Description of Artificial Sequence: Synthetic oligonucleotide
ggaaguaccuuuaagagcc

SEQ ID NO: 680495 - RNA, 19 nt, Artificial Sequence
  Description of Artificial Sequence: Synthetic oligonucleotide
uuugggaaguaccuuuaag

SEQ ID NO: 680496 - RNA, 19 nt, Artificial Sequence
  Description of Artificial Sequence: Synthetic oligonucleotide
agugauauccacauuaaca

SEQ ID NO: 680497 - RNA, 19 nt, Artificial Sequence
  Description of Artificial Sequence: Synthetic oligonucleotide
aacugagccgaucgcuucc

SEQ ID NO: 680498 - RNA, 19 nt, Artificial Sequence
  Description of Artificial Sequence: Synthetic oligonucleotide
ucaguuuacccguguaccg

SEQ ID NO: 680499 - RNA, 19 nt, Artificial Sequence
  Description of Artificial Sequence: Synthetic oligonucleotide
auagcuucgaacaacugag

SEQ ID NO: 680500 - RNA, 19 nt, Artificial Sequence
  Description of Artificial Sequence: Synthetic oligonucleotide
uauuacaaggcauuccauc

SEQ ID NO: 680501 - RNA, 19 nt, Artificial Sequence
  Description of Artificial Sequence: Synthetic oligonucleotide
uugcaaugcaugcuaagug

SEQ ID NO: 680502 - RNA, 19 nt, Artificial Sequence
  Description of Artificial Sequence: Synthetic oligonucleotide
uuucgauaaagagugauau

SEQ ID NO: 680503 - RNA, 19 nt, Artificial Sequence
  Description of Artificial Sequence: Synthetic oligonucleotide
aaugagaaguggauuuagg

SEQ ID NO: 680504 - RNA, 19 nt, Artificial Sequence
  Description of Artificial Sequence: Synthetic oligonucleotide
uuugggaaauuauaguaau

SEQ ID NO: 680505 - RNA, 19 nt, Artificial Sequence
  Description of Artificial Sequence: Synthetic oligonucleotide
cagacauuaggcaucucgg

SEQ ID NO: 680506 - RNA, 19 nt, Artificial Sequence
  Description of Artificial Sequence: Synthetic oligonucleotide
ucucuuaaagcaguaaggu

SEQ ID NO: 680507 - RNA, 19 nt, Artificial Sequence
  Description of Artificial Sequence: Synthetic oligonucleotide
ugucuuaaaguauguguca

SEQ ID NO: 680508 - RNA, 19 nt, Artificial Sequence
  Description of Artificial Sequence: Synthetic oligonucleotide
uaacuugugaguagcccag

SEQ ID NO: 680509 - RNA, 19 nt, Artificial Sequence
  Description of Artificial Sequence: Synthetic oligonucleotide
uccacauauauaucaauau

SEQ ID NO: 680510 - RNA, 19 nt, Artificial Sequence
  Description of Artificial Sequence: Synthetic oligonucleotide
auaguguucaguaauuaug

SEQ ID NO: 680511 - RNA, 19 nt, Artificial Sequence
  Description of Artificial Sequence: Synthetic oligonucleotide
ugcaaugcaugcuaagugu

SEQ ID NO: 680512 - RNA, 19 nt, Artificial Sequence
  Description of Artificial Sequence: Synthetic oligonucleotide
uucucuagcaagccuacac

SEQ ID NO: 680513 - RNA, 19 nt, Artificial Sequence
  Description of Artificial Sequence: Synthetic oligonucleotide
uguaccgguacccugccca

SEQ ID NO: 680514 - RNA, 19 nt, Artificial Sequence
  Description of Artificial Sequence: Synthetic oligonucleotide
agcagcaauauccaagacu

SEQ ID NO: 680515 - RNA, 19 nt, Artificial Sequence
  Description of Artificial Sequence: Synthetic oligonucleotide
aaggguaaguaauuagcau

SEQ ID NO: 680516 - RNA, 19 nt, Artificial Sequence
  Description of Artificial Sequence: Synthetic oligonucleotide
uuuaaucaucccagcagca

SEQ ID NO: 680517 - RNA, 19 nt, Artificial Sequence
  Description of Artificial Sequence: Synthetic oligonucleotide
ucucauuuagauccccgug

SEQ ID NO: 680518 - RNA, 19 nt, Artificial Sequence
  Description of Artificial Sequence: Synthetic oligonucleotide
ucuuaugcaguaacuugug

SEQ ID NO: 680519 - RNA, 19 nt, Artificial Sequence
  Description of Artificial Sequence: Synthetic oligonucleotide
uaaagcauuccugcgagca

SEQ ID NO: 680520 - RNA, 19 nt, Artificial Sequence
  Description of Artificial Sequence: Synthetic oligonucleotide
uuccgauucagacauuccu

SEQ ID NO: 680521 - RNA, 19 nt, Artificial Sequence
  Description of Artificial Sequence: Synthetic oligonucleotide
agacauuaggcaucucggg

SEQ ID NO: 680522 - RNA, 19 nt, Artificial Sequence
  Description of Artificial Sequence: Synthetic oligonucleotide
aggaauuaaucacuaacaa

SEQ ID NO: 680523 - RNA, 19 nt, Artificial Sequence
  Description of Artificial Sequence: Synthetic oligonucleotide
gcagaaucaacccagacca

SEQ ID NO: 680524 - RNA, 19 nt, Artificial Sequence
  Description of Artificial Sequence: Synthetic oligonucleotide
agcuguauggaaaaguuug

SEQ ID NO: 680525 - RNA, 19 nt, Artificial Sequence
  Description of Artificial Sequence: Synthetic oligonucleotide
ugcuuuaaucaucccagca

SEQ ID NO: 680526 - RNA, 19 nt, Artificial Sequence
  Description of Artificial Sequence: Synthetic oligonucleotide
aaagcggcuggcccuuggc

SEQ ID NO: 680527 - RNA, 19 nt, Artificial Sequence
  Description of Artificial Sequence: Synthetic oligonucleotide
aaggaaguaagcaauguuu

SEQ ID NO: 680528 - RNA, 19 nt, Artificial Sequence
  Description of Artificial Sequence: Synthetic oligonucleotide
gagcuaucgagucuccggg

SEQ ID NO: 680529 - RNA, 19 nt, Artificial Sequence
  Description of Artificial Sequence: Synthetic oligonucleotide
aguggauuuagggucaaag

SEQ ID NO: 680530 - RNA, 19 nt, Artificial Sequence
  Description of Artificial Sequence: Synthetic oligonucleotide
aaaucuggaacaacugugu

SEQ ID NO: 680531 - RNA, 19 nt, Artificial Sequence
  Description of Artificial Sequence: Synthetic oligonucleotide
uucaguugagaguaguuua

SEQ ID NO: 680532 - RNA, 19 nt, Artificial Sequence
  Description of Artificial Sequence: Synthetic oligonucleotide
auagauccacuuaugacag

SEQ ID NO: 680533 - RNA, 19 nt, Artificial Sequence
  Description of Artificial Sequence: Synthetic oligonucleotide
uuagauccccgugauaacc

SEQ ID NO: 680534 - RNA, 19 nt, Artificial Sequence
  Description of Artificial Sequence: Synthetic oligonucleotide
ucauauuacaaggcauucc

SEQ ID NO: 680535 - RNA, 19 nt, Artificial Sequence
  Description of Artificial Sequence: Synthetic oligonucleotide
gaacaaguuuccgagcucc

SEQ ID NO: 680536 - RNA, 19 nt, Artificial Sequence
  Description of Artificial Sequence: Synthetic oligonucleotide
uaauuugggaaguaccuuu

SEQ ID NO: 680537 - RNA, 19 nt, Artificial Sequence
  Description of Artificial Sequence: Synthetic oligonucleotide
caaaagaagcucucgagga

SEQ ID NO: 680538 - RNA, 19 nt, Artificial Sequence
  Description of Artificial Sequence: Synthetic oligonucleotide
ccaacuaggaauuaaucac

SEQ ID NO: 680539 - RNA, 19 nt, Artificial Sequence
  Description of Artificial Sequence: Synthetic oligonucleotide
gaggccgagagcuaucgag

SEQ ID NO: 680540 - RNA, 19 nt, Artificial Sequence
  Description of Artificial Sequence: Synthetic oligonucleotide
ggugugcucaaacugagcc

SEQ ID NO: 680541 - RNA, 19 nt, Artificial Sequence
  Description of Artificial Sequence: Synthetic oligonucleotide
aaacccaguacagcgaacu

SEQ ID NO: 680542 - RNA, 19 nt, Artificial Sequence
  Description of Artificial Sequence: Synthetic oligonucleotide
agcaaugagaaguggauuu

SEQ ID NO: 680543 - RNA, 19 nt, Artificial Sequence
  Description of Artificial Sequence: Synthetic oligonucleotide
aaugcaugcuaaguguaca

SEQ ID NO: 680544 - RNA, 19 nt, Artificial Sequence
  Description of Artificial Sequence: Synthetic oligonucleotide
aggguaaguaauuagcauu

SEQ ID NO: 680545 - RNA, 19 nt, Artificial Sequence
  Description of Artificial Sequence: Synthetic oligonucleotide
ugugcucaaacugagccga

SEQ ID NO: 680546 - RNA, 19 nt, Artificial Sequence
  Description of Artificial Sequence: Synthetic oligonucleotide
ucaguugagaguaguuuaa

SEQ ID NO: 680547 - RNA, 19 nt, Artificial Sequence
  Description of Artificial Sequence: Synthetic oligonucleotide
guaauuagcauuagggcga

SEQ ID NO: 680548 - RNA, 19 nt, Artificial Sequence
  Description of Artificial Sequence: Synthetic oligonucleotide
acacaagucgcaucccuuc

SEQ ID NO: 680549 - RNA, 19 nt, Artificial Sequence
  Description of Artificial Sequence: Synthetic oligonucleotide
ucuguacuuucaauaaaau

SEQ ID NO: 680550 - RNA, 19 nt, Artificial Sequence
  Description of Artificial Sequence: Synthetic oligonucleotide
aguguggucucaguuuacc

SEQ ID NO: 680551 - RNA, 19 nt, Artificial Sequence
  Description of Artificial Sequence: Synthetic oligonucleotide
ucgaacaccaggcuucacu

SEQ ID NO: 680552 - RNA, 19 nt, Artificial Sequence
  Description of Artificial Sequence: Synthetic oligonucleotide
uuacaaggcauuccaucca

SEQ ID NO: 680553 - RNA, 19 nt, Artificial Sequence
  Description of Artificial Sequence: Synthetic oligonucleotide
aguaguuacaccugcuuua

SEQ ID NO: 680554 - RNA, 19 nt, Artificial Sequence
  Description of Artificial Sequence: Synthetic oligonucleotide
ucuagcaagccuacacaca

SEQ ID NO: 680555 - RNA, 19 nt, Artificial Sequence
  Description of Artificial Sequence: Synthetic oligonucleotide
gcaugcuaaguguacagcg

SEQ ID NO: 680556 - RNA, 19 nt, Artificial Sequence
  Description of Artificial Sequence: Synthetic oligonucleotide
agaaguacgagcccuggau

SEQ ID NO: 680557 - RNA, 19 nt, Artificial Sequence
  Description of Artificial Sequence: Synthetic oligonucleotide
ucuuaaaguaugugucacu

SEQ ID NO: 680558 - RNA, 19 nt, Artificial Sequence
  Description of Artificial Sequence: Synthetic oligonucleotide
gaaguacgagcccuggaug

SEQ ID NO: 680559 - RNA, 19 nt, Artificial Sequence
  Description of Artificial Sequence: Synthetic oligonucleotide
auaaagcaaugagaagugg

SEQ ID NO: 680560 - RNA, 19 nt, Artificial Sequence
  Description of Artificial Sequence: Synthetic oligonucleotide
gacauuaggcaucucggga

SEQ ID NO: 680561 - RNA, 19 nt, Artificial Sequence
  Description of Artificial Sequence: Synthetic oligonucleotide
gcagugauaaagcaaugag

SEQ ID NO: 680562 - RNA, 19 nt, Artificial Sequence
  Description of Artificial Sequence: Synthetic oligonucleotide
aggauagcaauuucuugca

SEQ ID NO: 680563 - RNA, 19 nt, Artificial Sequence
  Description of Artificial Sequence: Synthetic oligonucleotide
agcaagccuacacacaagu

SEQ ID NO: 680564 - RNA, 19 nt, Artificial Sequence
  Description of Artificial Sequence: Synthetic oligonucleotide
ucugaacaaguuuccgagc

SEQ ID NO: 680565 - RNA, 19 nt, Artificial Sequence
  Description of Artificial Sequence: Synthetic oligonucleotide
ucuugcaaugcaugcuaag

SEQ ID NO: 680566 - RNA, 19 nt, Artificial Sequence
  Description of Artificial Sequence: Synthetic oligonucleotide
ggauuuagggucaaagugc

SEQ ID NO: 680567 - RNA, 19 nt, Artificial Sequence
  Description of Artificial Sequence: Synthetic oligonucleotide
uccugcgagcagaaguacg

SEQ ID NO: 680568 - RNA, 19 nt, Artificial Sequence
  Description of Artificial Sequence: Synthetic oligonucleotide
ucauuuagauccccgugau

SEQ ID NO: 680569 - RNA, 19 nt, Artificial Sequence
  Description of Artificial Sequence: Synthetic oligonucleotide
uccugucaaagcagaauca

SEQ ID NO: 680570 - RNA, 19 nt, Artificial Sequence
  Description of Artificial Sequence: Synthetic oligonucleotide
cauauguagucugaacaag

SEQ ID NO: 680571 - RNA, 19 nt, Artificial Sequence
  Description of Artificial Sequence: Synthetic oligonucleotide
uacaaggcauuccauccac

SEQ ID NO: 680572 - RNA, 19 nt, Artificial Sequence
  Description of Artificial Sequence: Synthetic oligonucleotide
cucuagcaagccuacacac

SEQ ID NO: 680573 - RNA, 19 nt, Artificial Sequence
  Description of Artificial Sequence: Synthetic oligonucleotide
aagaagcucucgaggacac

SEQ ID NO: 680574 - RNA, 19 nt, Artificial Sequence
  Description of Artificial Sequence: Synthetic oligonucleotide
aaggccgucugucuggaau

SEQ ID NO: 680575 - RNA, 19 nt, Artificial Sequence
  Description of Artificial Sequence: Synthetic oligonucleotide
aggaacauacuucucguuu

SEQ ID NO: 680576 - RNA, 19 nt, Artificial Sequence
  Description of Artificial Sequence: Synthetic oligonucleotide
ccaaaagaagcucucgagg

SEQ ID NO: 680577 - RNA, 19 nt, Artificial Sequence
  Description of Artificial Sequence: Synthetic oligonucleotide
acuuaugacagcagauauc

SEQ ID NO: 680578 - RNA, 19 nt, Artificial Sequence
  Description of Artificial Sequence: Synthetic oligonucleotide
cagugauaaagcaaugaga

SEQ ID NO: 680579 - RNA, 19 nt, Artificial Sequence
  Description of Artificial Sequence: Synthetic oligonucleotide
ucgcaucccuucuauaucu

SEQ ID NO: 680580 - RNA, 19 nt, Artificial Sequence
  Description of Artificial Sequence: Synthetic oligonucleotide
aguaaggucggaggcacuc

SEQ ID NO: 680581 - RNA, 19 nt, Artificial Sequence
  Description of Artificial Sequence: Synthetic oligonucleotide
acucaaucacuuuacuaaa

SEQ ID NO: 680582 - RNA, 19 nt, Artificial Sequence
  Description of Artificial Sequence: Synthetic oligonucleotide
aacuugugaguagcccagc

SEQ ID NO: 680583 - RNA, 19 nt, Artificial Sequence
  Description of Artificial Sequence: Synthetic oligonucleotide
auaguguggucucaguuua

SEQ ID NO: 680584 - RNA, 19 nt, Artificial Sequence
  Description of Artificial Sequence: Synthetic oligonucleotide
uucccaacuaggaauuaau

SEQ ID NO: 680585 - RNA, 19 nt, Artificial Sequence
  Description of Artificial Sequence: Synthetic oligonucleotide
gugugcucaaacugagccg

SEQ ID NO: 680586 - RNA, 19 nt, Artificial Sequence
  Description of Artificial Sequence: Synthetic oligonucleotide
ccuucuacaguccaggaac

SEQ ID NO: 680587 - RNA, 19 nt, Artificial Sequence
  Description of Artificial Sequence: Synthetic oligonucleotide
uucauauuacaaggcauuc

SEQ ID NO: 680588 - RNA, 19 nt, Artificial Sequence
  Description of Artificial Sequence: Synthetic oligonucleotide
uccgauucagacauuccua

SEQ ID NO: 680589 - RNA, 19 nt, Artificial Sequence
  Description of Artificial Sequence: Synthetic oligonucleotide
acauggcccgacuucauca

SEQ ID NO: 680590 - RNA, 19 nt, Artificial Sequence
  Description of Artificial Sequence: Synthetic oligonucleotide
uucaguaguuacaccugcu

SEQ ID NO: 680591 - RNA, 19 nt, Artificial Sequence
  Description of Artificial Sequence: Synthetic oligonucleotide
uguggauuccauguccaca

SEQ ID NO: 680592 - RNA, 19 nt, Artificial Sequence
  Description of Artificial Sequence: Synthetic oligonucleotide
ugcgagcagaaguacgagc

SEQ ID NO: 680593 - RNA, 19 nt, Artificial Sequence
  Description of Artificial Sequence: Synthetic oligonucleotide
ucccaacuaggaauuaauc

SEQ ID NO: 680594 - RNA, 19 nt, Artificial Sequence
  Description of Artificial Sequence: Synthetic oligonucleotide
uucgauaaagagugauauc

SEQ ID NO: 680595 - RNA, 19 nt, Artificial Sequence
  Description of Artificial Sequence: Synthetic oligonucleotide
gggaaguaccuuuaagagc

SEQ ID NO: 680596 - RNA, 19 nt, Artificial Sequence
  Description of Artificial Sequence: Synthetic oligonucleotide
uuuagauccccgugauaac

SEQ ID NO: 680597 - RNA, 19 nt, Artificial Sequence
  Description of Artificial Sequence: Synthetic oligonucleotide
uaaacacauggcccgacuu

SEQ ID NO: 680598 - RNA, 19 nt, Artificial Sequence
  Description of Artificial Sequence: Synthetic oligonucleotide
guguccgugaccagcaggg

SEQ ID NO: 680599 - RNA, 19 nt, Artificial Sequence
  Description of Artificial Sequence: Synthetic oligonucleotide
agauauccugucaaagcag

SEQ ID NO: 680600 - RNA, 19 nt, Artificial Sequence
  Description of Artificial Sequence: Synthetic oligonucleotide
aguacgagcccuggaugcc

SEQ ID NO: 680601 - RNA, 19 nt, Artificial Sequence
  Description of Artificial Sequence: Synthetic oligonucleotide
uuaaucaucccagcagcaa

SEQ ID NO: 680602 - RNA, 19 nt, Artificial Sequence
  Description of Artificial Sequence: Synthetic oligonucleotide
uuggcggcuggucuguggc

SEQ ID NO: 680603 - RNA, 19 nt, Artificial Sequence
  Description of Artificial Sequence: Synthetic oligonucleotide
uuacccguguaccgguacc

SEQ ID NO: 680604 - RNA, 19 nt, Artificial Sequence
  Description of Artificial Sequence: Synthetic oligonucleotide
ggaauuaaucacuaacaaa

SEQ ID NO: 680605 - RNA, 19 nt, Artificial Sequence
  Description of Artificial Sequence: Synthetic oligonucleotide
uuuacccguguaccgguac

SEQ ID NO: 680606 - RNA, 19 nt, Artificial Sequence
  Description of Artificial Sequence: Synthetic oligonucleotide
agcuucgaacaacugagaa

SEQ ID NO: 680607 - RNA, 19 nt, Artificial Sequence
  Description of Artificial Sequence: Synthetic oligonucleotide
aacccaguacagcgaacug

SEQ ID NO: 680608 - RNA, 19 nt, Artificial Sequence
  Description of Artificial Sequence: Synthetic oligonucleotide
uuaauuugggaaguaccuu

SEQ ID NO: 680609 - RNA, 19 nt, Artificial Sequence
  Description of Artificial Sequence: Synthetic oligonucleotide
ucuucaguugagaguaguu

SEQ ID NO: 680610 - RNA, 19 nt, Artificial Sequence
  Description of Artificial Sequence: Synthetic oligonucleotide
ugaacaaguuuccgagcuc

SEQ ID NO: 680611 - RNA, 19 nt, Artificial Sequence
  Description of Artificial Sequence: Synthetic oligonucleotide
gggaaauuauaguaauuca

SEQ ID NO: 680612 - RNA, 19 nt, Artificial Sequence
  Description of Artificial Sequence: Synthetic oligonucleotide
cuagcaagccuacacacaa

SEQ ID NO: 680613 - RNA, 19 nt, Artificial Sequence
  Description of Artificial Sequence: Synthetic oligonucleotide
guaucgaacaccaggcuuc

SEQ ID NO: 680614 - RNA, 19 nt, Artificial Sequence
  Description of Artificial Sequence: Synthetic oligonucleotide
agcauuccccuggaaagcg

SEQ ID NO: 680615 - RNA, 19 nt, Artificial Sequence
  Description of Artificial Sequence: Synthetic oligonucleotide
agcauuagggcgagaagag

SEQ ID NO: 680616 - RNA, 19 nt, Artificial Sequence
  Description of Artificial Sequence: Synthetic oligonucleotide
caguaauuauguauaugga

SEQ ID NO: 680617 - RNA, 19 nt, Artificial Sequence
  Description of Artificial Sequence: Synthetic oligonucleotide
uugggaaauuauaguaauu

SEQ ID NO: 680618 - RNA, 19 nt, Artificial Sequence
  Description of Artificial Sequence: Synthetic oligonucleotide
caaauauuacaguuugaua

SEQ ID NO: 680619 - RNA, 19 nt, Artificial Sequence
  Description of Artificial Sequence: Synthetic oligonucleotide
cuugcaaaggccgucuguc

SEQ ID NO: 680620 - RNA, 19 nt, Artificial Sequence
  Description of Artificial Sequence: Synthetic oligonucleotide
ugcaugcuaaguguacagc

SEQ ID NO: 680621 - RNA, 19 nt, Artificial Sequence
  Description of Artificial Sequence: Synthetic oligonucleotide
acacauacaaggguaagua

SEQ ID NO: 680622 - RNA, 19 nt, Artificial Sequence
  Description of Artificial Sequence: Synthetic oligonucleotide
agccgaucgcuucccgucc

SEQ ID NO: 680623 - RNA, 19 nt, Artificial Sequence
  Description of Artificial Sequence: Synthetic oligonucleotide
gacuuugggaaauuauagu

SEQ ID NO: 680624 - RNA, 19 nt, Artificial Sequence
  Description of Artificial Sequence: Synthetic oligonucleotide
accgguacccugcccacgg

SEQ ID NO: 680625 - RNA, 19 nt, Artificial Sequence
  Description of Artificial Sequence: Synthetic oligonucleotide
caaaggucauauaguguuc

SEQ ID NO: 680626 - RNA, 19 nt, Artificial Sequence
  Description of Artificial Sequence: Synthetic oligonucleotide
ggcauucauauguagucug

SEQ ID NO: 680627 - RNA, 19 nt, Artificial Sequence
  Description of Artificial Sequence: Synthetic oligonucleotide
agggacugaaggaaguaag

SEQ ID NO: 680628 - RNA, 19 nt, Artificial Sequence
  Description of Artificial Sequence: Synthetic oligonucleotide
aacuaggaauuaaucacua

SEQ ID NO: 680629 - RNA, 19 nt, Artificial Sequence
  Description of Artificial Sequence: Synthetic oligonucleotide
acuaggaauuaaucacuaa

SEQ ID NO: 680630 - RNA, 19 nt, Artificial Sequence
  Description of Artificial Sequence: Synthetic oligonucleotide
ugggcauguuucugaauga

SEQ ID NO: 680631 - RNA, 19 nt, Artificial Sequence
  Description of Artificial Sequence: Synthetic oligonucleotide
gguguucagacauuaggca

SEQ ID NO: 680632 - RNA, 19 nt, Artificial Sequence
  Description of Artificial Sequence: Synthetic oligonucleotide
aaguaccuuuaagagccug

SEQ ID NO: 680633 - RNA, 19 nt, Artificial Sequence
  Description of Artificial Sequence: Synthetic oligonucleotide
aucaguggauagugugguc

SEQ ID NO: 680634 - RNA, 19 nt, Artificial Sequence
  Description of Artificial Sequence: Synthetic oligonucleotide
caucucgggaaaauuaaaa

SEQ ID NO: 680635 - RNA, 19 nt, Artificial Sequence
  Description of Artificial Sequence: Synthetic oligonucleotide
gaugguguucagacauuag

SEQ ID NO: 680636 - RNA, 19 nt, Artificial Sequence
  Description of Artificial Sequence: Synthetic oligonucleotide
acugcagaagucuucccua

SEQ ID NO: 680637 - RNA, 19 nt, Artificial Sequence
  Description of Artificial Sequence: Synthetic oligonucleotide
gaacaccaggcuucacugc

SEQ ID NO: 680638 - RNA, 19 nt, Artificial Sequence
  Description of Artificial Sequence: Synthetic oligonucleotide
uagcaagccuacacacaag

SEQ ID NO: 680639 - RNA, 19 nt, Artificial Sequence
  Description of Artificial Sequence: Synthetic oligonucleotide
caguuuacccguguaccgg

SEQ ID NO: 680640 - RNA, 19 nt, Artificial Sequence
  Description of Artificial Sequence: Synthetic oligonucleotide
uccgggugagaauuucaca

SEQ ID NO: 680641 - RNA, 19 nt, Artificial Sequence
  Description of Artificial Sequence: Synthetic oligonucleotide
cuccacauauauaucaaua

SEQ ID NO: 680642 - RNA, 19 nt, Artificial Sequence
  Description of Artificial Sequence: Synthetic oligonucleotide
acgcauacacacccagaag

SEQ ID NO: 680643 - RNA, 19 nt, Artificial Sequence
  Description of Artificial Sequence: Synthetic oligonucleotide
uuaagagccuguuccgauu

SEQ ID NO: 680644 - RNA, 19 nt, Artificial Sequence
  Description of Artificial Sequence: Synthetic oligonucleotide
uuacaccugcuuuaaucau

SEQ ID NO: 680645 - RNA, 19 nt, Artificial Sequence
  Description of Artificial Sequence: Synthetic oligonucleotide
ggccucugaauguaacugg

SEQ ID NO: 680646 - RNA, 19 nt, Artificial Sequence
  Description of Artificial Sequence: Synthetic oligonucleotide
aauuugggaaguaccuuua

SEQ ID NO: 680647 - RNA, 19 nt, Artificial Sequence
  Description of Artificial Sequence: Synthetic oligonucleotide
cuuuaaucucccuuuacau

SEQ ID NO: 680648 - RNA, 19 nt, Artificial Sequence
  Description of Artificial Sequence: Synthetic oligonucleotide
augaggccgagagcuaucg

SEQ ID NO: 680649 - RNA, 19 nt, Artificial Sequence
  Description of Artificial Sequence: Synthetic oligonucleotide
gcgagaagaggccaauucc

SEQ ID NO: 680650 - RNA, 19 nt, Artificial Sequence
  Description of Artificial Sequence: Synthetic oligonucleotide
gagaaggauagcaauuucu

SEQ ID NO: 680651 - RNA, 19 nt, Artificial Sequence
  Description of Artificial Sequence: Synthetic oligonucleotide
uaucgagucuccgggugag

SEQ ID NO: 680652 - RNA, 19 nt, Artificial Sequence
  Description of Artificial Sequence: Synthetic oligonucleotide
uagcuucgaacaacugaga

SEQ ID NO: 680653 - RNA, 19 nt, Artificial Sequence
  Description of Artificial Sequence: Synthetic oligonucleotide
ucuacaguccaggaacaua

SEQ ID NO: 680654 - RNA, 19 nt, Artificial Sequence
  Description of Artificial Sequence: Synthetic oligonucleotide
acugagccgaucgcuuccc

SEQ ID NO: 680655 - RNA, 19 nt, Artificial Sequence
  Description of Artificial Sequence: Synthetic oligonucleotide
uuagggcgagaagaggcca

SEQ ID NO: 680656 - RNA, 19 nt, Artificial Sequence
  Description of Artificial Sequence: Synthetic oligonucleotide
gucggaggcacucuggaaa

SEQ ID NO: 680657 - RNA, 19 nt, Artificial Sequence
  Description of Artificial Sequence: Synthetic oligonucleotide
uucccgucccuuguuacug

SEQ ID NO: 680658 - RNA, 19 nt, Artificial Sequence
  Description of Artificial Sequence: Synthetic oligonucleotide
aguguucaguaauuaugua

SEQ ID NO: 680659 - RNA, 19 nt, Artificial Sequence
  Description of Artificial Sequence: Synthetic oligonucleotide
gaucgcuucccgucccuug

SEQ ID NO: 680660 - RNA, 19 nt, Artificial Sequence
  Description of Artificial Sequence: Synthetic oligonucleotide
gggaaaauuaaaacuggga

SEQ ID NO: 680661 - RNA, 19 nt, Artificial Sequence
  Description of Artificial Sequence: Synthetic oligonucleotide
aguaccuuuaagagccugu

SEQ ID NO: 680662 - RNA, 19 nt, Artificial Sequence
  Description of Artificial Sequence: Synthetic oligonucleotide
guuacugcaguccaaccau

SEQ ID NO: 680663 - RNA, 19 nt, Artificial Sequence
  Description of Artificial Sequence: Synthetic oligonucleotide
cccaaaagaagcucucgag

SEQ ID NO: 680664 - RNA, 19 nt, Artificial Sequence
  Description of Artificial Sequence: Synthetic oligonucleotide
cccaacuaggaauuaauca

SEQ ID NO: 680665 - RNA, 19 nt, Artificial Sequence
  Description of Artificial Sequence: Synthetic oligonucleotide
caacuaggaauuaaucacu

SEQ ID NO: 680666 - RNA, 19 nt, Artificial Sequence
  Description of Artificial Sequence: Synthetic oligonucleotide
cuaaguguacagcgugauc

SEQ ID NO: 680667 - RNA, 19 nt, Artificial Sequence
  Description of Artificial Sequence: Synthetic oligonucleotide
auuucgauaaagagugaua

SEQ ID NO: 680668 - RNA, 19 nt, Artificial Sequence
  Description of Artificial Sequence: Synthetic oligonucleotide
accuucuacaguccaggaa

SEQ ID NO: 680669 - RNA, 19 nt, Artificial Sequence
  Description of Artificial Sequence: Synthetic oligonucleotide
cuuaugcaguaacuuguga

SEQ ID NO: 680670 - RNA, 19 nt, Artificial Sequence
  Description of Artificial Sequence: Synthetic oligonucleotide
ccgauucagacauuccuag

SEQ ID NO: 680671 - RNA, 19 nt, Artificial Sequence
  Description of Artificial Sequence: Synthetic oligonucleotide
auagugugguacauuggga

SEQ ID NO: 680672 - RNA, 19 nt, Artificial Sequence
  Description of Artificial Sequence: Synthetic oligonucleotide
cugaacaaguuuccgagcu

SEQ ID NO: 680673 - RNA, 19 nt, Artificial Sequence
  Description of Artificial Sequence: Synthetic oligonucleotide
cacgcauacacacccagaa

SEQ ID NO: 680674 - RNA, 19 nt, Artificial Sequence
  Description of Artificial Sequence: Synthetic oligonucleotide
acaguacaagaugguguuc

SEQ ID NO: 680675 - RNA, 19 nt, Artificial Sequence
  Description of Artificial Sequence: Synthetic oligonucleotide
gcaguaacuugugaguagc

SEQ ID NO: 680676 - RNA, 19 nt, Artificial Sequence
  Description of Artificial Sequence: Synthetic oligonucleotide
ccaagacuucucuagcaag

SEQ ID NO: 680677 - RNA, 19 nt, Artificial Sequence
  Description of Artificial Sequence: Synthetic oligonucleotide
gagccgaucgcuucccguc

SEQ ID NO: 680678 - RNA, 19 nt, Artificial Sequence
  Description of Artificial Sequence: Synthetic oligonucleotide
ugauaaccauuucgauaaa

SEQ ID NO: 680679 - RNA, 19 nt, Artificial Sequence
  Description of Artificial Sequence: Synthetic oligonucleotide
uggucagcguagucuggcc

SEQ ID NO: 680680 - RNA, 19 nt, Artificial Sequence
  Description of Artificial Sequence: Synthetic oligonucleotide
cauggcccgacuucaucac

SEQ ID NO: 680681 - RNA, 19 nt, Artificial Sequence
  Description of Artificial Sequence: Synthetic oligonucleotide
aucgcuucccgucccuugu

SEQ ID NO: 680682 - RNA, 19 nt, Artificial Sequence
  Description of Artificial Sequence: Synthetic oligonucleotide
gucgcaucccuucuauauc

SEQ ID NO: 680683 - RNA, 19 nt, Artificial Sequence
  Description of Artificial Sequence: Synthetic oligonucleotide
agcaguaaggucggaggca

SEQ ID NO: 680684 - RNA, 19 nt, Artificial Sequence
  Description of Artificial Sequence: Synthetic oligonucleotide
acccaguacagcgaacuga

SEQ ID NO: 680685 - RNA, 19 nt, Artificial Sequence
  Description of Artificial Sequence: Synthetic oligonucleotide
guuuccgagcuccuucauc

SEQ ID NO: 680686 - RNA, 19 nt, Artificial Sequence
  Description of Artificial Sequence: Synthetic oligonucleotide
guggauaguguggucucag

SEQ ID NO: 680687 - RNA, 19 nt, Artificial Sequence
  Description of Artificial Sequence: Synthetic oligonucleotide
acacaccaagugcuggagu

SEQ ID NO: 680688 - RNA, 19 nt, Artificial Sequence
  Description of Artificial Sequence: Synthetic oligonucleotide
cgggaaaauuaaaacuggg

SEQ ID NO: 680689 - RNA, 19 nt, Artificial Sequence
  Description of Artificial Sequence: Synthetic oligonucleotide
caguggauaguguggucuc

SEQ ID NO: 680690 - RNA, 19 nt, Artificial Sequence
  Description of Artificial Sequence: Synthetic oligonucleotide
ccccgugauaaccauuucg

SEQ ID NO: 680691 - RNA, 19 nt, Artificial Sequence
  Description of Artificial Sequence: Synthetic oligonucleotide
ggacaagaaagaaaaccca

SEQ ID NO: 680692 - RNA, 19 nt, Artificial Sequence
  Description of Artificial Sequence: Synthetic oligonucleotide
uggucucaguuuacccgug

SEQ ID NO: 680693 - RNA, 19 nt, Artificial Sequence
  Description of Artificial Sequence: Synthetic oligonucleotide
aggucggaggcacucugga

SEQ ID NO: 680694 - RNA, 19 nt, Artificial Sequence
  Description of Artificial Sequence: Synthetic oligonucleotide
uacccguguaccgguaccc

SEQ ID NO: 680695 - RNA, 19 nt, Artificial Sequence
  Description of Artificial Sequence: Synthetic oligonucleotide
agggugugcucaaacugag

SEQ ID NO: 680696 - RNA, 19 nt, Artificial Sequence
  Description of Artificial Sequence: Synthetic oligonucleotide
augcaguaacuugugagua

SEQ ID NO: 680697 - RNA, 19 nt, Artificial Sequence
  Description of Artificial Sequence: Synthetic oligonucleotide
gcuaucgagucuccgggug

SEQ ID NO: 680698 - RNA, 19 nt, Artificial Sequence
  Description of Artificial Sequence: Synthetic oligonucleotide
ggcgagaagaggccaauuc

SEQ ID NO: 680699 - RNA, 19 nt, Artificial Sequence
  Description of Artificial Sequence: Synthetic oligonucleotide
uaguguggucucaguuuac

SEQ ID NO: 680700 - RNA, 19 nt, Artificial Sequence
  Description of Artificial Sequence: Synthetic oligonucleotide
agcuaucgagucuccgggu

SEQ ID NO: 680701 - RNA, 19 nt, Artificial Sequence
  Description of Artificial Sequence: Synthetic oligonucleotide
guuccgauucagacauucc

SEQ ID NO: 680702 - RNA, 19 nt, Artificial Sequence
  Description of Artificial Sequence: Synthetic oligonucleotide
guaguuacaccugcuuuaa

SEQ ID NO: 680703 - RNA, 19 nt, Artificial Sequence
  Description of Artificial Sequence: Synthetic oligonucleotide
cauauaguguucaguaauu

SEQ ID NO: 680704 - RNA, 19 nt, Artificial Sequence
  Description of Artificial Sequence: Synthetic oligonucleotide
auauuacaaggcauuccau

SEQ ID NO: 680705 - RNA, 19 nt, Artificial Sequence
  Description of Artificial Sequence: Synthetic oligonucleotide
cuugcaaugcaugcuaagu

SEQ ID NO: 680706 - RNA, 19 nt, Artificial Sequence
  Description of Artificial Sequence: Synthetic oligonucleotide
uucauucacugagguacaa

SEQ ID NO: 680707 - RNA, 19 nt, Artificial Sequence
  Description of Artificial Sequence: Synthetic oligonucleotide
auacacacccagaagucua

SEQ ID NO: 680708 - RNA, 19 nt, Artificial Sequence
  Description of Artificial Sequence: Synthetic oligonucleotide
cagcgugaucaauuucuuc

SEQ ID NO: 680709 - RNA, 19 nt, Artificial Sequence
  Description of Artificial Sequence: Synthetic oligonucleotide
ugaggccgagagcuaucga

SEQ ID NO: 680710 - RNA, 19 nt, Artificial Sequence
  Description of Artificial Sequence: Synthetic oligonucleotide
cugaauguaacugggcacu

SEQ ID NO: 680711 - RNA, 19 nt, Artificial Sequence
  Description of Artificial Sequence: Synthetic oligonucleotide
acaagucgcaucccuucua

SEQ ID NO: 680712 - RNA, 19 nt, Artificial Sequence
  Description of Artificial Sequence: Synthetic oligonucleotide
cccgugauaaccauuucga

SEQ ID NO: 680713 - RNA, 19 nt, Artificial Sequence
  Description of Artificial Sequence: Synthetic oligonucleotide
guggucucaguuuacccgu

SEQ ID NO: 680714 - RNA, 19 nt, Artificial Sequence
  Description of Artificial Sequence: Synthetic oligonucleotide
uuaaagcaguaaggucgga

SEQ ID NO: 680715 - RNA, 19 nt, Artificial Sequence
  Description of Artificial Sequence: Synthetic oligonucleotide
acaugaaaugaggccgaga

SEQ ID NO: 680716 - RNA, 19 nt, Artificial Sequence
  Description of Artificial Sequence: Synthetic oligonucleotide
cuaucgagucuccggguga

SEQ ID NO: 680717 - RNA, 19 nt, Artificial Sequence
  Description of Artificial Sequence: Synthetic oligonucleotide
ggguaaguaauuagcauua

SEQ ID NO: 680718 - RNA, 19 nt, Artificial Sequence
  Description of Artificial Sequence: Synthetic oligonucleotide
aguggauaguguggucuca

SEQ ID NO: 680719 - RNA, 19 nt, Artificial Sequence
  Description of Artificial Sequence: Synthetic oligonucleotide
guacaagaugguguucaga

SEQ ID NO: 680720 - RNA, 19 nt, Artificial Sequence
  Description of Artificial Sequence: Synthetic oligonucleotide
agcguagucuggccucuga

SEQ ID NO: 680721 - RNA, 19 nt, Artificial Sequence
  Description of Artificial Sequence: Synthetic oligonucleotide
uucuacaguccaggaacau

SEQ ID NO: 680722 - RNA, 19 nt, Artificial Sequence
  Description of Artificial Sequence: Synthetic oligonucleotide
ccgacuucaucacaccaac

SEQ ID NO: 680723 - RNA, 19 nt, Artificial Sequence
  Description of Artificial Sequence: Synthetic oligonucleotide
auccccgugauaaccauuu

SEQ ID NO: 680724 - RNA, 19 nt, Artificial Sequence
  Description of Artificial Sequence: Synthetic oligonucleotide
guaucacagugcacacugc

SEQ ID NO: 680725 - RNA, 19 nt, Artificial Sequence
  Description of Artificial Sequence: Synthetic oligonucleotide
guaaacacauggcccgacu

SEQ ID NO: 680726 - RNA, 19 nt, Artificial Sequence
  Description of Artificial Sequence: Synthetic oligonucleotide
uaccgguacccugcccacg

SEQ ID NO: 680727 - RNA, 19 nt, Artificial Sequence
  Description of Artificial Sequence: Synthetic oligonucleotide
ccaaaggucauauaguguu

SEQ ID NO: 680728 - RNA, 19 nt, Artificial Sequence
  Description of Artificial Sequence: Synthetic oligonucleotide
uuccugcgagcagaaguac

SEQ ID NO: 680729 - RNA, 19 nt, Artificial Sequence
  Description of Artificial Sequence: Synthetic oligonucleotide
guacgagcccuggaugccc

SEQ ID NO: 680730 - RNA, 19 nt, Artificial Sequence
  Description of Artificial Sequence: Synthetic oligonucleotide
cagcaauauccaagacuuc

SEQ ID NO: 680731 - RNA, 19 nt, Artificial Sequence
  Description of Artificial Sequence: Synthetic oligonucleotide
aggccgagagcuaucgagu

SEQ ID NO: 680732 - RNA, 19 nt, Artificial Sequence
  Description of Artificial Sequence: Synthetic oligonucleotide
cugcgagcagaaguacgag

SEQ ID NO: 680733 - RNA, 19 nt, Artificial Sequence
  Description of Artificial Sequence: Synthetic oligonucleotide
gcaguaaggucggaggcac

SEQ ID NO: 680734 - RNA, 19 nt, Artificial Sequence
  Description of Artificial Sequence: Synthetic oligonucleotide
cacugguaucacagugcac

SEQ ID NO: 680735 - RNA, 19 nt, Artificial Sequence
  Description of Artificial Sequence: Synthetic oligonucleotide
ccguguaccgguacccugc

SEQ ID NO: 680736 - RNA, 19 nt, Artificial Sequence
  Description of Artificial Sequence: Synthetic oligonucleotide
ccuacacacaagucgcauc

SEQ ID NO: 680737 - RNA, 19 nt, Artificial Sequence
  Description of Artificial Sequence: Synthetic oligonucleotide
caauucccaacuaggaauu

SEQ ID NO: 680738 - RNA, 19 nt, Artificial Sequence
  Description of Artificial Sequence: Synthetic oligonucleotide
uacccugcccacgggucag

SEQ ID NO: 680739 - RNA, 19 nt, Artificial Sequence
  Description of Artificial Sequence: Synthetic oligonucleotide
aguuuccgagcuccuucau

SEQ ID NO: 680740 - RNA, 19 nt, Artificial Sequence
  Description of Artificial Sequence: Synthetic oligonucleotide
guaacugggcacuggccgu

SEQ ID NO: 680741 - RNA, 19 nt, Artificial Sequence
  Description of Artificial Sequence: Synthetic oligonucleotide
cugagccgaucgcuucccg

SEQ ID NO: 680742 - RNA, 19 nt, Artificial Sequence
  Description of Artificial Sequence: Synthetic oligonucleotide
auauccugucaaagcagaa

SEQ ID NO: 680743 - RNA, 19 nt, Artificial Sequence
  Description of Artificial Sequence: Synthetic oligonucleotide
cgauucagacauuccuagg

SEQ ID NO: 680744 - RNA, 19 nt, Artificial Sequence
  Description of Artificial Sequence: Synthetic oligonucleotide
guaccgguacccugcccac

SEQ ID NO: 680745 - RNA, 19 nt, Artificial Sequence
  Description of Artificial Sequence: Synthetic oligonucleotide
guacccugcccacggguca

SEQ ID NO: 680746 - RNA, 19 nt, Artificial Sequence
  Description of Artificial Sequence: Synthetic oligonucleotide
aacccagaccaaaggucau

SEQ ID NO: 680747 - RNA, 19 nt, Artificial Sequence
  Description of Artificial Sequence: Synthetic oligonucleotide
ccugcgagcagaaguacga

SEQ ID NO: 680748 - RNA, 19 nt, Artificial Sequence
  Description of Artificial Sequence: Synthetic oligonucleotide
uccccgugauaaccauuuc

SEQ ID NO: 680749 - RNA, 19 nt, Artificial Sequence
  Description of Artificial Sequence: Synthetic oligonucleotide
aaaggccgucugucuggaa

SEQ ID NO: 680750 - RNA, 19 nt, Artificial Sequence
  Description of Artificial Sequence: Synthetic oligonucleotide
gucucaguuuacccgugua

SEQ ID NO: 680751 - RNA, 19 nt, Artificial Sequence
  Description of Artificial Sequence: Synthetic oligonucleotide
cgugauaaccauuucgaua

SEQ ID NO: 680752 - RNA, 19 nt, Artificial Sequence
  Description of Artificial Sequence: Synthetic oligonucleotide
caucaguggauaguguggu

SEQ ID NO: 680753 - RNA, 19 nt, Artificial Sequence
  Description of Artificial Sequence: Synthetic oligonucleotide
cgauaaagagugauaucca

SEQ ID NO: 680754 - RNA, 19 nt, Artificial Sequence
  Description of Artificial Sequence: Synthetic oligonucleotide
cagcagauauccugucaaa

SEQ ID NO: 680755 - RNA, 19 nt, Artificial Sequence
  Description of Artificial Sequence: Synthetic oligonucleotide
aacugggcacuggccgugu

SEQ ID NO: 680756 - RNA, 19 nt, Artificial Sequence
  Description of Artificial Sequence: Synthetic oligonucleotide
cacagccaguguccgugac

SEQ ID NO: 680757 - RNA, 19 nt, Artificial Sequence
  Description of Artificial Sequence: Synthetic oligonucleotide
uggcauagugugguacauu

SEQ ID NO: 680758 - RNA, 19 nt, Artificial Sequence
  Description of Artificial Sequence: Synthetic oligonucleotide
ggccgagagcuaucgaguc

SEQ ID NO: 680759 - RNA, 19 nt, Artificial Sequence
  Description of Artificial Sequence: Synthetic oligonucleotide
aucucccuuuacauauuau

SEQ ID NO: 680760 - RNA, 19 nt, Artificial Sequence
  Description of Artificial Sequence: Synthetic oligonucleotide
cauuuagauccccgugaua

SEQ ID NO: 680761 - RNA, 19 nt, Artificial Sequence
  Description of Artificial Sequence: Synthetic oligonucleotide
uggaaagcggcuggcccuu

SEQ ID NO: 680762 - RNA, 19 nt, Artificial Sequence
  Description of Artificial Sequence: Synthetic oligonucleotide
ccgagagcuaucgagucuc

SEQ ID NO: 680763 - RNA, 19 nt, Artificial Sequence
  Description of Artificial Sequence: Synthetic oligonucleotide
ccuacacacauacaagggu

SEQ ID NO: 680764 - RNA, 19 nt, Artificial Sequence
  Description of Artificial Sequence: Synthetic oligonucleotide
guguaccgguacccugccc

SEQ ID NO: 680765 - RNA, 19 nt, Artificial Sequence
  Description of Artificial Sequence: Synthetic oligonucleotide
ggauaguguggucucaguu

SEQ ID NO: 680766 - RNA, 19 nt, Artificial Sequence
  Description of Artificial Sequence: Synthetic oligonucleotide
auuccccuggaaagcggcu

SEQ ID NO: 680767 - RNA, 19 nt, Artificial Sequence
  Description of Artificial Sequence: Synthetic oligonucleotide
ggcggcuggucuguggcag

SEQ ID NO: 680768 - RNA, 19 nt, Artificial Sequence
  Description of Artificial Sequence: Synthetic oligonucleotide
gucuccgggugagaauuuc

SEQ ID NO: 680769 - RNA, 19 nt, Artificial Sequence
  Description of Artificial Sequence: Synthetic oligonucleotide
caagucgcaucccuucuau

SEQ ID NO: 680770 - RNA, 19 nt, Artificial Sequence
  Description of Artificial Sequence: Synthetic oligonucleotide
cuugugaguagcccagcuu

SEQ ID NO: 680771 - RNA, 19 nt, Artificial Sequence
  Description of Artificial Sequence: Synthetic oligonucleotide
cacaagucgcaucccuucu

SEQ ID NO: 680772 - RNA, 19 nt, Artificial Sequence
  Description of Artificial Sequence: Synthetic oligonucleotide
ucgcuucccgucccuuguu

SEQ ID NO: 680773 - RNA, 19 nt, Artificial Sequence
  Description of Artificial Sequence: Synthetic oligonucleotide
guaccuuuaagagccuguu

SEQ ID NO: 680774 - RNA, 19 nt, Artificial Sequence
  Description of Artificial Sequence: Synthetic oligonucleotide
caacaagacuuugggaaau

SEQ ID NO: 680775 - RNA, 19 nt, Artificial Sequence
  Description of Artificial Sequence: Synthetic oligonucleotide
gcaagccuacacacaaguc

SEQ ID NO: 680776 - RNA, 19 nt, Artificial Sequence
  Description of Artificial Sequence: Synthetic oligonucleotide
agggcgagaagaggccaau

SEQ ID NO: 680777 - RNA, 19 nt, Artificial Sequence
  Description of Artificial Sequence: Synthetic oligonucleotide
gugggcaucaguggauagu

SEQ ID NO: 680778 - RNA, 19 nt, Artificial Sequence
  Description of Artificial Sequence: Synthetic oligonucleotide
gaaguaccuuuaagagccu

SEQ ID NO: 680779 - RNA, 19 nt, Artificial Sequence
  Description of Artificial Sequence: Synthetic oligonucleotide
cacuggagcuuggccucgc

SEQ ID NO: 680780 - RNA, 19 nt, Artificial Sequence
  Description of Artificial Sequence: Synthetic oligonucleotide
cacccgcgucuccaccgcc

SEQ ID NO: 680781 - RNA, 19 nt, Artificial Sequence
  Description of Artificial Sequence: Synthetic oligonucleotide
cacacaagucgcaucccuu

SEQ ID NO: 680782 - RNA, 19 nt, Artificial Sequence
  Description of Artificial Sequence: Synthetic oligonucleotide
cccguguaccgguacccug

SEQ ID NO: 680783 - RNA, 19 nt, Artificial Sequence
  Description of Artificial Sequence: Synthetic oligonucleotide
guaaggucggaggcacucu

SEQ ID NO: 680784 - RNA, 19 nt, Artificial Sequence
  Description of Artificial Sequence: Synthetic oligonucleotide
gcaucucgggaaaauuaaa

SEQ ID NO: 680785 - RNA, 19 nt, Artificial Sequence
  Description of Artificial Sequence: Synthetic oligonucleotide
aucgagucuccgggugaga

SEQ ID NO: 680786 - RNA, 19 nt, Artificial Sequence
  Description of Artificial Sequence: Synthetic oligonucleotide
gccgaucgcuucccguccc

SEQ ID NO: 680787 - RNA, 19 nt, Artificial Sequence
  Description of Artificial Sequence: Synthetic oligonucleotide
ccgucccuuguuacugcag

SEQ ID NO: 680788 - RNA, 19 nt, Artificial Sequence
  Description of Artificial Sequence: Synthetic oligonucleotide
gcguagucuggccucugaa

SEQ ID NO: 680789 - RNA, 19 nt, Artificial Sequence
  Description of Artificial Sequence: Synthetic oligonucleotide
guuuacccguguaccggua

SEQ ID NO: 680790 - RNA, 19 nt, Artificial Sequence
  Description of Artificial Sequence: Synthetic oligonucleotide
gcuaaguguacagcgugau

SEQ ID NO: 680791 - RNA, 19 nt, Artificial Sequence
  Description of Artificial Sequence: Synthetic oligonucleotide
cgagagcuaucgagucucc

SEQ ID NO: 680792 - RNA, 19 nt, Artificial Sequence
  Description of Artificial Sequence: Synthetic oligonucleotide
caguugagaguaguuuaau

SEQ ID NO: 680793 - RNA, 19 nt, Artificial Sequence
  Description of Artificial Sequence: Synthetic oligonucleotide
cguguaccgguacccugcc

SEQ ID NO: 680794 - RNA, 19 nt, Artificial Sequence
  Description of Artificial Sequence: Synthetic oligonucleotide
ggucucaguuuacccgugu

SEQ ID NO: 680795 - RNA, 19 nt, Artificial Sequence
  Description of Artificial Sequence: Synthetic oligonucleotide
agucuccgggugagaauuu

SEQ ID NO: 680796 - RNA, 19 nt, Artificial Sequence
  Description of Artificial Sequence: Synthetic oligonucleotide
ccacgggucaguguucaca

SEQ ID NO: 680797 - RNA, 19 nt, Artificial Sequence
  Description of Artificial Sequence: Synthetic oligonucleotide
agucuacaccagacucaau

SEQ ID NO: 680798 - RNA, 19 nt, Artificial Sequence
  Description of Artificial Sequence: Synthetic oligonucleotide
ggggagaaggauagcaauu

SEQ ID NO: 680799 - RNA, 19 nt, Artificial Sequence
  Description of Artificial Sequence: Synthetic oligonucleotide
gccgagagcuaucgagucu

SEQ ID NO: 680800 - RNA, 19 nt, Artificial Sequence
  Description of Artificial Sequence: Synthetic oligonucleotide
caguaaggucggaggcacu

SEQ ID NO: 680801 - RNA, 19 nt, Artificial Sequence
  Description of Artificial Sequence: Synthetic oligonucleotide
gcccacgggucaguguuca

SEQ ID NO: 680802 - RNA, 19 nt, Artificial Sequence
  Description of Artificial Sequence: Synthetic oligonucleotide
ccgugauaaccauuucgau

SEQ ID NO: 680803 - RNA, 19 nt, Artificial Sequence
  Description of Artificial Sequence: Synthetic oligonucleotide
cgucccuuguuacugcagu

SEQ ID NO: 680804 - RNA, 19 nt, Artificial Sequence
  Description of Artificial Sequence: Synthetic oligonucleotide
cguagucuggccucugaau

SEQ ID NO: 680805 - RNA, 19 nt, Artificial Sequence
  Description of Artificial Sequence: Synthetic oligonucleotide
cgucucgcacacccgcguc

SEQ ID NO: 680806 - RNA, 19 nt, Artificial Sequence
  Description of Artificial Sequence: Synthetic oligonucleotide
cccacgggucaguguucac

SEQ ID NO: 680807 - RNA, 19 nt, Artificial Sequence
  Description of Artificial Sequence: Synthetic oligonucleotide
ccgugaccagcagggugug

SEQ ID NO: 680808 - RNA, 19 nt, Artificial Sequence
  Description of Artificial Sequence: Synthetic oligonucleotide
cgugaccagcagggugugc

SEQ ID NO: 680809 - RNA, 19 nt, Artificial Sequence
  Description of Artificial Sequence: Synthetic oligonucleotide
cuguuccgauucagacauu

SEQ ID NO: 680810 - RNA, 19 nt, Artificial Sequence
  Description of Artificial Sequence: Synthetic oligonucleotide
cgguacccugcccacgggu

SEQ ID NO: 680811 - RNA, 19 nt, Artificial Sequence
  Description of Artificial Sequence: Synthetic oligonucleotide
ccgaucgcuucccgucccu

SEQ ID NO: 680812 - RNA, 19 nt, Artificial Sequence
  Description of Artificial Sequence: Synthetic oligonucleotide
gcccuccgucucgcacacc

SEQ ID NO: 680813 - RNA, 19 nt, Artificial Sequence
  Description of Artificial Sequence: Synthetic oligonucleotide
cgaucgcuucccgucccuu

SEQ ID NO: 680814 - RNA, 19 nt, Artificial Sequence
  Description of Artificial Sequence: Synthetic oligonucleotide
aggauugccguuuugaucc

SEQ ID NO: 680815 - RNA, 19 nt, Artificial Sequence
  Description of Artificial Sequence: Synthetic oligonucleotide
ugacaaucauacaugaacg

SEQ ID NO: 680816 - RNA, 19 nt, Artificial Sequence
  Description of Artificial Sequence: Synthetic oligonucleotide
uuaagagacaagcugagca

SEQ ID NO: 680817 - RNA, 19 nt, Artificial Sequence
  Description of Artificial Sequence: Synthetic oligonucleotide
aauacaucgacccagggua

SEQ ID NO: 680818 - RNA, 19 nt, Artificial Sequence
  Description of Artificial Sequence: Synthetic oligonucleotide
ucuuauauucuucuggccc

SEQ ID NO: 680819 - RNA, 19 nt, Artificial Sequence
  Description of Artificial Sequence: Synthetic oligonucleotide
auucuaacaggucauaaag

SEQ ID NO: 680820 - RNA, 19 nt, Artificial Sequence
  Description of Artificial Sequence: Synthetic oligonucleotide
uuuagaagaagaagccugg

SEQ ID NO: 680821 - RNA, 19 nt, Artificial Sequence
  Description of Artificial Sequence: Synthetic oligonucleotide
ucuaacaggucauaaagca

SEQ ID NO: 680822 - RNA, 19 nt, Artificial Sequence
  Description of Artificial Sequence: Synthetic oligonucleotide
aguauauuugugcaugggg

SEQ ID NO: 680823 - RNA, 19 nt, Artificial Sequence
  Description of Artificial Sequence: Synthetic oligonucleotide
uuugauuaagaugucauca

SEQ ID NO: 680824 - RNA, 19 nt, Artificial Sequence
  Description of Artificial Sequence: Synthetic oligonucleotide
ugucguuccuuuaaaauca

SEQ ID NO: 680825 - RNA, 19 nt, Artificial Sequence
  Description of Artificial Sequence: Synthetic oligonucleotide
ucuaaaugcucacugcacc

SEQ ID NO: 680826 - RNA, 19 nt, Artificial Sequence
  Description of Artificial Sequence: Synthetic oligonucleotide
aggugcaagauucugauug

SEQ ID NO: 680827 - RNA, 19 nt, Artificial Sequence
  Description of Artificial Sequence: Synthetic oligonucleotide
acaucucgaacaugaaucc

SEQ ID NO: 680828 - RNA, 19 nt, Artificial Sequence
  Description of Artificial Sequence: Synthetic oligonucleotide
ucggaaaggaaucagguuc

SEQ ID NO: 680829 - RNA, 19 nt, Artificial Sequence
  Description of Artificial Sequence: Synthetic oligonucleotide
uauaauaauucugaauaca

SEQ ID NO: 680830 - RNA, 19 nt, Artificial Sequence
  Description of Artificial Sequence: Synthetic oligonucleotide
ugugauacugcucagcaau

SEQ ID NO: 680831 - RNA, 19 nt, Artificial Sequence
  Description of Artificial Sequence: Synthetic oligonucleotide
cuuucaagaguuuccaggc

SEQ ID NO: 680832 - RNA, 19 nt, Artificial Sequence
  Description of Artificial Sequence: Synthetic oligonucleotide
acaaucauacaugaacggc

SEQ ID NO: 680833 - RNA, 19 nt, Artificial Sequence
  Description of Artificial Sequence: Synthetic oligonucleotide
ugauuuugucgcaaggcag

SEQ ID NO: 680834 - RNA, 19 nt, Artificial Sequence
  Description of Artificial Sequence: Synthetic oligonucleotide
uaguuuagcuguaacuucc

SEQ ID NO: 680835 - RNA, 19 nt, Artificial Sequence
  Description of Artificial Sequence: Synthetic oligonucleotide
ugcaauagaguuucuagcu

SEQ ID NO: 680836 - RNA, 19 nt, Artificial Sequence
  Description of Artificial Sequence: Synthetic oligonucleotide
gaacacacgagucaacuug

SEQ ID NO: 680837 - RNA, 19 nt, Artificial Sequence
  Description of Artificial Sequence: Synthetic oligonucleotide
acaugaauccaguugaggu

SEQ ID NO: 680838 - RNA, 19 nt, Artificial Sequence
  Description of Artificial Sequence: Synthetic oligonucleotide
aaucucagagcaucaagca

SEQ ID NO: 680839 - RNA, 19 nt, Artificial Sequence
  Description of Artificial Sequence: Synthetic oligonucleotide
ucuaccaucucauugcaaa

SEQ ID NO: 680840 - RNA, 19 nt, Artificial Sequence
  Description of Artificial Sequence: Synthetic oligonucleotide
uguauaagggccacugucu

SEQ ID NO: 680841 - RNA, 19 nt, Artificial Sequence
  Description of Artificial Sequence: Synthetic oligonucleotide
uaagagacaagcugagcag

SEQ ID NO: 680842 - RNA, 19 nt, Artificial Sequence
  Description of Artificial Sequence: Synthetic oligonucleotide
auugcaaauuuccucccgg

SEQ ID NO: 680843 - RNA, 19 nt, Artificial Sequence
  Description of Artificial Sequence: Synthetic oligonucleotide
uugauccucacacagccgc

SEQ ID NO: 680844 - RNA, 19 nt, Artificial Sequence
  Description of Artificial Sequence: Synthetic oligonucleotide
agauccguguauaagggcc

SEQ ID NO: 680845 - RNA, 19 nt, Artificial Sequence
  Description of Artificial Sequence: Synthetic oligonucleotide
ucgacuagaguucugguuc

SEQ ID NO: 680846 - RNA, 19 nt, Artificial Sequence
  Description of Artificial Sequence: Synthetic oligonucleotide
agugacaguucacugaucu

SEQ ID NO: 680847 - RNA, 19 nt, Artificial Sequence
  Description of Artificial Sequence: Synthetic oligonucleotide
uacaugaacggccucgacc

SEQ ID NO: 680848 - RNA, 19 nt, Artificial Sequence
  Description of Artificial Sequence: Synthetic oligonucleotide
agacccugacuguugagcc

SEQ ID NO: 680849 - RNA, 19 nt, Artificial Sequence
  Description of Artificial Sequence: Synthetic oligonucleotide
uucaguauauuugugcaug

SEQ ID NO: 680850 - RNA, 19 nt, Artificial Sequence
  Description of Artificial Sequence: Synthetic oligonucleotide
aacacacgagucaacuugc

SEQ ID NO: 680851 - RNA, 19 nt, Artificial Sequence
  Description of Artificial Sequence: Synthetic oligonucleotide
uuuuggagcuuuagcacag

SEQ ID NO: 680852 - RNA, 19 nt, Artificial Sequence
  Description of Artificial Sequence: Synthetic oligonucleotide
aacaugaauccaguugagg

SEQ ID NO: 680853 - RNA, 19 nt, Artificial Sequence
  Description of Artificial Sequence: Synthetic oligonucleotide
acaugaacggccucgacca

SEQ ID NO: 680854 - RNA, 19 nt, Artificial Sequence
  Description of Artificial Sequence: Synthetic oligonucleotide
uugucguuccuuuaaaauc

SEQ ID NO: 680855 - RNA, 19 nt, Artificial Sequence
  Description of Artificial Sequence: Synthetic oligonucleotide
acacgagucaacuugcugu

SEQ ID NO: 680856 - RNA, 19 nt, Artificial Sequence
  Description of Artificial Sequence: Synthetic oligonucleotide
ugucugucgaacuuuggca

SEQ ID NO: 680857 - RNA, 19 nt, Artificial Sequence
  Description of Artificial Sequence: Synthetic oligonucleotide
ugaaggugcaagauucuga

SEQ ID NO: 680858 - RNA, 19 nt, Artificial Sequence
  Description of Artificial Sequence: Synthetic oligonucleotide
ucucggaaaggaaucaggu

SEQ ID NO: 680859 - RNA, 19 nt, Artificial Sequence
  Description of Artificial Sequence: Synthetic oligonucleotide
gguauuauaauaauucuga

SEQ ID NO: 680860 - RNA, 19 nt, Artificial Sequence
  Description of Artificial Sequence: Synthetic oligonucleotide
uuagcaaagcucugguucu

SEQ ID NO: 680861 - RNA, 19 nt, Artificial Sequence
  Description of Artificial Sequence: Synthetic oligonucleotide
uuguaauagcuccuccuug

SEQ ID NO: 680862 - RNA, 19 nt, Artificial Sequence
  Description of Artificial Sequence: Synthetic oligonucleotide
cugcaauagaguuucuagc

SEQ ID NO: 680863 - RNA, 19 nt, Artificial Sequence
  Description of Artificial Sequence: Synthetic oligonucleotide
ugaugaaugaaugcaggga

SEQ ID NO: 680864 - RNA, 19 nt, Artificial Sequence
  Description of Artificial Sequence: Synthetic oligonucleotide
cuugguagaaacuugucaa

SEQ ID NO: 680865 - RNA, 19 nt, Artificial Sequence
  Description of Artificial Sequence: Synthetic oligonucleotide
ggagcuuuagcacagugug

SEQ ID NO: 680866 - RNA, 19 nt, Artificial Sequence
  Description of Artificial Sequence: Synthetic oligonucleotide
gaagcgaaugucugcuggg

SEQ ID NO: 680867 - RNA, 19 nt, Artificial Sequence
  Description of Artificial Sequence: Synthetic oligonucleotide
cagcugaccaaucucagag

SEQ ID NO: 680868 - RNA, 19 nt, Artificial Sequence
  Description of Artificial Sequence: Synthetic oligonucleotide
gauuuugucgcaaggcagc

SEQ ID NO: 680869 - RNA, 19 nt, Artificial Sequence
  Description of Artificial Sequence: Synthetic oligonucleotide
aagcucugguucuuacgac

SEQ ID NO: 680870 - RNA, 19 nt, Artificial Sequence
  Description of Artificial Sequence: Synthetic oligonucleotide
augggauucccaaauguac

SEQ ID NO: 680871 - RNA, 19 nt, Artificial Sequence
  Description of Artificial Sequence: Synthetic oligonucleotide
ugcaagauucugauugaga

SEQ ID NO: 680872 - RNA, 19 nt, Artificial Sequence
  Description of Artificial Sequence: Synthetic oligonucleotide
uguccuaauuucugaagcu

SEQ ID NO: 680873 - RNA, 19 nt, Artificial Sequence
  Description of Artificial Sequence: Synthetic oligonucleotide
aaucacacagugacaguuc

SEQ ID NO: 680874 - RNA, 19 nt, Artificial Sequence
  Description of Artificial Sequence: Synthetic oligonucleotide
ucucuuaugcugauggcua

SEQ ID NO: 680875 - RNA, 19 nt, Artificial Sequence
  Description of Artificial Sequence: Synthetic oligonucleotide
uucuaacauuugcugauac

SEQ ID NO: 680876 - RNA, 19 nt, Artificial Sequence
  Description of Artificial Sequence: Synthetic oligonucleotide
ugguucuaacauuugcuga

SEQ ID NO: 680877 - RNA, 19 nt, Artificial Sequence
  Description of Artificial Sequence: Synthetic oligonucleotide
agguauuauaauaauucug

SEQ ID NO: 680878 - RNA, 19 nt, Artificial Sequence
  Description of Artificial Sequence: Synthetic oligonucleotide
ggcuaggugauucuaacag

SEQ ID NO: 680879 - RNA, 19 nt, Artificial Sequence
  Description of Artificial Sequence: Synthetic oligonucleotide
gugguucuaacauuugcug

SEQ ID NO: 680880 - RNA, 19 nt, Artificial Sequence
  Description of Artificial Sequence: Synthetic oligonucleotide
ucuaacauuugcugauacu

SEQ ID NO: 680881 - RNA, 19 nt, Artificial Sequence
  Description of Artificial Sequence: Synthetic oligonucleotide
cuaguuuagcuguaacuuc

SEQ ID NO: 680882 - RNA, 19 nt, Artificial Sequence
  Description of Artificial Sequence: Synthetic oligonucleotide
guauauuugugcaugggga

SEQ ID NO: 680883 - RNA, 19 nt, Artificial Sequence
  Description of Artificial Sequence: Synthetic oligonucleotide
agauuauauagguauuaua

SEQ ID NO: 680884 - RNA, 19 nt, Artificial Sequence
  Description of Artificial Sequence: Synthetic oligonucleotide
cauaaagcaauucauugua

SEQ ID NO: 680885 - RNA, 19 nt, Artificial Sequence
  Description of Artificial Sequence: Synthetic oligonucleotide
cugccaaccuuugugaccg

SEQ ID NO: 680886 - RNA, 19 nt, Artificial Sequence
  Description of Artificial Sequence: Synthetic oligonucleotide
aucuacaucaauggugaag

SEQ ID NO: 680887 - RNA, 19 nt, Artificial Sequence
  Description of Artificial Sequence: Synthetic oligonucleotide
aguuucccugccccggugc

SEQ ID NO: 680888 - RNA, 19 nt, Artificial Sequence
  Description of Artificial Sequence: Synthetic oligonucleotide
gagucaacuugcugucucg

SEQ ID NO: 680889 - RNA, 19 nt, Artificial Sequence
  Description of Artificial Sequence: Synthetic oligonucleotide
auaaggauugccguuuuga

SEQ ID NO: 680890 - RNA, 19 nt, Artificial Sequence
  Description of Artificial Sequence: Synthetic oligonucleotide
uaauagcuccuccuugcca

SEQ ID NO: 680891 - RNA, 19 nt, Artificial Sequence
  Description of Artificial Sequence: Synthetic oligonucleotide
uggagcuuuagcacagugu

SEQ ID NO: 680892 - RNA, 19 nt, Artificial Sequence
  Description of Artificial Sequence: Synthetic oligonucleotide
cuuccugcaauagaguuuc

SEQ ID NO: 680893 - RNA, 19 nt, Artificial Sequence
  Description of Artificial Sequence: Synthetic oligonucleotide
uuuagcacagugugauacu

SEQ ID NO: 680894 - RNA, 19 nt, Artificial Sequence
  Description of Artificial Sequence: Synthetic oligonucleotide
uucggggaaguaaguuucg

SEQ ID NO: 680895 - RNA, 19 nt, Artificial Sequence
  Description of Artificial Sequence: Synthetic oligonucleotide
cugagcaaaggagagugcc

SEQ ID NO: 680896 - RNA, 19 nt, Artificial Sequence
  Description of Artificial Sequence: Synthetic oligonucleotide
guguauaagggccacuguc

SEQ ID NO: 680897 - RNA, 19 nt, Artificial Sequence
  Description of Artificial Sequence: Synthetic oligonucleotide
aucucgaacaugaauccag

SEQ ID NO: 680898 - RNA, 19 nt, Artificial Sequence
  Description of Artificial Sequence: Synthetic oligonucleotide
ucgguggugguucuaacau

SEQ ID NO: 680899 - RNA, 19 nt, Artificial Sequence
  Description of Artificial Sequence: Synthetic oligonucleotide
ucucgaacaugaauccagu

SEQ ID NO: 680900 - RNA, 19 nt, Artificial Sequence
  Description of Artificial Sequence: Synthetic oligonucleotide
gagaucugagcaaaggaga

SEQ ID NO: 680901 - RNA, 19 nt, Artificial Sequence
  Description of Artificial Sequence: Synthetic oligonucleotide
augcagagaaguguuaaug

SEQ ID NO: 680902 - RNA, 19 nt, Artificial Sequence
  Description of Artificial Sequence: Synthetic oligonucleotide
guauaagggccacugucug

SEQ ID NO: 680903 - RNA, 19 nt, Artificial Sequence
  Description of Artificial Sequence: Synthetic oligonucleotide
uuuaagccaggggauaccu

SEQ ID NO: 680904 - RNA, 19 nt, Artificial Sequence
  Description of Artificial Sequence: Synthetic oligonucleotide
uaaggauugccguuuugau

SEQ ID NO: 680905 - RNA, 19 nt, Artificial Sequence
  Description of Artificial Sequence: Synthetic oligonucleotide
aaggcuugccgaaguuucc

SEQ ID NO: 680906 - RNA, 19 nt, Artificial Sequence
  Description of Artificial Sequence: Synthetic oligonucleotide
ucuuaugcugauggcuagg

SEQ ID NO: 680907 - RNA, 19 nt, Artificial Sequence
  Description of Artificial Sequence: Synthetic oligonucleotide
gucgaacuuuggcaggugg

SEQ ID NO: 680908 - RNA, 19 nt, Artificial Sequence
  Description of Artificial Sequence: Synthetic oligonucleotide
gagagacuguccuaauuuc

SEQ ID NO: 680909 - RNA, 19 nt, Artificial Sequence
  Description of Artificial Sequence: Synthetic oligonucleotide
uuaugcugauggcuaggug

SEQ ID NO: 680910 - RNA, 19 nt, Artificial Sequence
  Description of Artificial Sequence: Synthetic oligonucleotide
aagggcuuggcugucggug

SEQ ID NO: 680911 - RNA, 19 nt, Artificial Sequence
  Description of Artificial Sequence: Synthetic oligonucleotide
gaguuuaacucugcuuugc

SEQ ID NO: 680912 - RNA, 19 nt, Artificial Sequence
  Description of Artificial Sequence: Synthetic oligonucleotide
acauauaugcugaagcuua

SEQ ID NO: 680913 - RNA, 19 nt, Artificial Sequence
  Description of Artificial Sequence: Synthetic oligonucleotide
ucuuuaagccaggggauac

SEQ ID NO: 680914 - RNA, 19 nt, Artificial Sequence
  Description of Artificial Sequence: Synthetic oligonucleotide
ucuugucguuccuuuaaaa

SEQ ID NO: 680915 - RNA, 19 nt, Artificial Sequence
  Description of Artificial Sequence: Synthetic oligonucleotide
cuaaaugcucacugcacca

SEQ ID NO: 680916 - RNA, 19 nt, Artificial Sequence
  Description of Artificial Sequence: Synthetic oligonucleotide
gcuaggugauucuaacagg

SEQ ID NO: 680917 - RNA, 19 nt, Artificial Sequence
  Description of Artificial Sequence: Synthetic oligonucleotide
gaaaggaaucagguucugc

SEQ ID NO: 680918 - RNA, 19 nt, Artificial Sequence
  Description of Artificial Sequence: Synthetic oligonucleotide
uacgacccacuuucaagag

SEQ ID NO: 680919 - RNA, 19 nt, Artificial Sequence
  Description of Artificial Sequence: Synthetic oligonucleotide
gcaucauguuauuuuguag

SEQ ID NO: 680920 - RNA, 19 nt, Artificial Sequence
  Description of Artificial Sequence: Synthetic oligonucleotide
uucgacuagaguucugguu

SEQ ID NO: 680921 - RNA, 19 nt, Artificial Sequence
  Description of Artificial Sequence: Synthetic oligonucleotide
uugaucuuugcagcgcucu

SEQ ID NO: 680922 - RNA, 19 nt, Artificial Sequence
  Description of Artificial Sequence: Synthetic oligonucleotide
uucuugucguuccuuuaaa

SEQ ID NO: 680923 - RNA, 19 nt, Artificial Sequence
  Description of Artificial Sequence: Synthetic oligonucleotide
guuuugauccucacacagc

SEQ ID NO: 680924 - RNA, 19 nt, Artificial Sequence
  Description of Artificial Sequence: Synthetic oligonucleotide
cucuuaugcugauggcuag

SEQ ID NO: 680925 - RNA, 19 nt, Artificial Sequence
  Description of Artificial Sequence: Synthetic oligonucleotide
cagcaauacaucgacccag

SEQ ID NO: 680926 - RNA, 19 nt, Artificial Sequence
  Description of Artificial Sequence: Synthetic oligonucleotide
acuagaguucugguucagg

SEQ ID NO: 680927 - RNA, 19 nt, Artificial Sequence
  Description of Artificial Sequence: Synthetic oligonucleotide
ucuuugacauaaggauugc

SEQ ID NO: 680928 - RNA, 19 nt, Artificial Sequence
  Description of Artificial Sequence: Synthetic oligonucleotide
ggaaguaaguuucgaagga

SEQ ID NO: 680929 - RNA, 19 nt, Artificial Sequence
  Description of Artificial Sequence: Synthetic oligonucleotide
agcaauacaucgacccagg

SEQ ID NO: 680930 - RNA, 19 nt, Artificial Sequence
  Description of Artificial Sequence: Synthetic oligonucleotide
caucacaguuggucaaggc

SEQ ID NO: 680931 - RNA, 19 nt, Artificial Sequence
  Description of Artificial Sequence: Synthetic oligonucleotide
ugucgcaaggcagcaauac

SEQ ID NO: 680932 - RNA, 19 nt, Artificial Sequence
  Description of Artificial Sequence: Synthetic oligonucleotide
ucgacccaggguaugcaga

SEQ ID NO: 680933 - RNA, 19 nt, Artificial Sequence
  Description of Artificial Sequence: Synthetic oligonucleotide
cuaggugauucuaacaggu

SEQ ID NO: 680934 - RNA, 19 nt, Artificial Sequence
  Description of Artificial Sequence: Synthetic oligonucleotide
uauauccccuucucccuga

SEQ ID NO: 680935 - RNA, 19 nt, Artificial Sequence
  Description of Artificial Sequence: Synthetic oligonucleotide
uuagaagaagaagccuggu

SEQ ID NO: 680936 - RNA, 19 nt, Artificial Sequence
  Description of Artificial Sequence: Synthetic oligonucleotide
uccuuucuuuaagccaggg

SEQ ID NO: 680937 - RNA, 19 nt, Artificial Sequence
  Description of Artificial Sequence: Synthetic oligonucleotide
aggcuugccgaaguuuccc

SEQ ID NO: 680938 - RNA, 19 nt, Artificial Sequence
  Description of Artificial Sequence: Synthetic oligonucleotide
gugacuucgacuagaguuc

SEQ ID NO: 680939 - RNA, 19 nt, Artificial Sequence
  Description of Artificial Sequence: Synthetic oligonucleotide
ggucuaaaugcucacugca

SEQ ID NO: 680940 - RNA, 19 nt, Artificial Sequence
  Description of Artificial Sequence: Synthetic oligonucleotide
agauccagacagagaagcg

SEQ ID NO: 680941 - RNA, 19 nt, Artificial Sequence
  Description of Artificial Sequence: Synthetic oligonucleotide
auccaguugaggucuuuga

SEQ ID NO: 680942 - RNA, 19 nt, Artificial Sequence
  Description of Artificial Sequence: Synthetic oligonucleotide
uucagguggguguuagcaa

SEQ ID NO: 680943 - RNA, 19 nt, Artificial Sequence
  Description of Artificial Sequence: Synthetic oligonucleotide
gcaucaagcaugcauuuuc

SEQ ID NO: 680944 - RNA, 19 nt, Artificial Sequence
  Description of Artificial Sequence: Synthetic oligonucleotide
aucgacccaggguaugcag

SEQ ID NO: 680945 - RNA, 19 nt, Artificial Sequence
  Description of Artificial Sequence: Synthetic oligonucleotide
guuggucaaggcuugccga

SEQ ID NO: 680946 - RNA, 19 nt, Artificial Sequence
  Description of Artificial Sequence: Synthetic oligonucleotide
uuugaucuuugcagcgcuc

SEQ ID NO: 680947 - RNA, 19 nt, Artificial Sequence
  Description of Artificial Sequence: Synthetic oligonucleotide
cagacccugacuguugagc

SEQ ID NO: 680948 - RNA, 19 nt, Artificial Sequence
  Description of Artificial Sequence: Synthetic oligonucleotide
uuggucaaggcuugccgaa

SEQ ID NO: 680949 - RNA, 19 nt, Artificial Sequence
  Description of Artificial Sequence: Synthetic oligonucleotide
ucgaccagugaagaagccu

SEQ ID NO: 680950 - RNA, 19 nt, Artificial Sequence
  Description of Artificial Sequence: Synthetic oligonucleotide
aggucauaaagcaauucau

SEQ ID NO: 680951 - RNA, 19 nt, Artificial Sequence
  Description of Artificial Sequence: Synthetic oligonucleotide
guucggggaaguaaguuuc

SEQ ID NO: 680952 - RNA, 19 nt, Artificial Sequence
  Description of Artificial Sequence: Synthetic oligonucleotide
caaaaggagaucugagcaa

SEQ ID NO: 680953 - RNA, 19 nt, Artificial Sequence
  Description of Artificial Sequence: Synthetic oligonucleotide
caucguaaguggaugcaca

SEQ ID NO: 680954 - RNA, 19 nt, Artificial Sequence
  Description of Artificial Sequence: Synthetic oligonucleotide
aagagagauuauauaggua

SEQ ID NO: 680955 - RNA, 19 nt, Artificial Sequence
  Description of Artificial Sequence: Synthetic oligonucleotide
cuuuaagccaggggauacc

SEQ ID NO: 680956 - RNA, 19 nt, Artificial Sequence
  Description of Artificial Sequence: Synthetic oligonucleotide
agagacuguccuaauuucu

SEQ ID NO: 680957 - RNA, 19 nt, Artificial Sequence
  Description of Artificial Sequence: Synthetic oligonucleotide
aaguuucccugccccggug

SEQ ID NO: 680958 - RNA, 19 nt, Artificial Sequence
  Description of Artificial Sequence: Synthetic oligonucleotide
gaagcuuaagagacaagcu

SEQ ID NO: 680959 - RNA, 19 nt, Artificial Sequence
  Description of Artificial Sequence: Synthetic oligonucleotide
guucacugaucuugggcac

SEQ ID NO: 680960 - RNA, 19 nt, Artificial Sequence
  Description of Artificial Sequence: Synthetic oligonucleotide
uguuagcaaagcucugguu

SEQ ID NO: 680961 - RNA, 19 nt, Artificial Sequence
  Description of Artificial Sequence: Synthetic oligonucleotide
gucucaucguaaguggaug

SEQ ID NO: 680962 - RNA, 19 nt, Artificial Sequence
  Description of Artificial Sequence: Synthetic oligonucleotide
uugugaccgccguagggac

SEQ ID NO: 680963 - RNA, 19 nt, Artificial Sequence
  Description of Artificial Sequence: Synthetic oligonucleotide
aagcgaaugucugcuggga

SEQ ID NO: 680964 - RNA, 19 nt, Artificial Sequence
  Description of Artificial Sequence: Synthetic oligonucleotide
aguuucgaaggaaugguuu

SEQ ID NO: 680965 - RNA, 19 nt, Artificial Sequence
  Description of Artificial Sequence: Synthetic oligonucleotide
gauccucacacagccgcag

SEQ ID NO: 680966 - RNA, 19 nt, Artificial Sequence
  Description of Artificial Sequence: Synthetic oligonucleotide
cuaacauuugcugauacuu

SEQ ID NO: 680967 - RNA, 19 nt, Artificial Sequence
  Description of Artificial Sequence: Synthetic oligonucleotide
cuuugaccgguucugcuga

SEQ ID NO: 680968 - RNA, 19 nt, Artificial Sequence
  Description of Artificial Sequence: Synthetic oligonucleotide
gacacuuacuggggcagug

SEQ ID NO: 680969 - RNA, 19 nt, Artificial Sequence
  Description of Artificial Sequence: Synthetic oligonucleotide
caucuccacaacuuuagua

SEQ ID NO: 680970 - RNA, 19 nt, Artificial Sequence
  Description of Artificial Sequence: Synthetic oligonucleotide
cacacgagucaacuugcug

SEQ ID NO: 680971 - RNA, 19 nt, Artificial Sequence
  Description of Artificial Sequence: Synthetic oligonucleotide
uccguagcauucuuauauu

SEQ ID NO: 680972 - RNA, 19 nt, Artificial Sequence
  Description of Artificial Sequence: Synthetic oligonucleotide
uucuuuaagccaggggaua

SEQ ID NO: 680973 - RNA, 19 nt, Artificial Sequence
  Description of Artificial Sequence: Synthetic oligonucleotide
agugccgugagcgcaagau

SEQ ID NO: 680974 - RNA, 19 nt, Artificial Sequence
  Description of Artificial Sequence: Synthetic oligonucleotide
ugacuucgacuagaguucu

SEQ ID NO: 680975 - RNA, 19 nt, Artificial Sequence
  Description of Artificial Sequence: Synthetic oligonucleotide
uucuaccaucucauugcaa

SEQ ID NO: 680976 - RNA, 19 nt, Artificial Sequence
  Description of Artificial Sequence: Synthetic oligonucleotide
uagccguucaccacuucuu

SEQ ID NO: 680977 - RNA, 19 nt, Artificial Sequence
  Description of Artificial Sequence: Synthetic oligonucleotide
acgacccacuuucaagagu

SEQ ID NO: 680978 - RNA, 19 nt, Artificial Sequence
  Description of Artificial Sequence: Synthetic oligonucleotide
ugguucuuacgacccacuu

SEQ ID NO: 680979 - RNA, 19 nt, Artificial Sequence
  Description of Artificial Sequence: Synthetic oligonucleotide
ccuuucuuuaagccagggg

SEQ ID NO: 680980 - RNA, 19 nt, Artificial Sequence
  Description of Artificial Sequence: Synthetic oligonucleotide
gcaauagaguuucuagcuc

SEQ ID NO: 680981 - RNA, 19 nt, Artificial Sequence
  Description of Artificial Sequence: Synthetic oligonucleotide
uccacaacuuuaguauuuu

SEQ ID NO: 680982 - RNA, 19 nt, Artificial Sequence
  Description of Artificial Sequence: Synthetic oligonucleotide
uggguguucggggaaguaa

SEQ ID NO: 680983 - RNA, 19 nt, Artificial Sequence
  Description of Artificial Sequence: Synthetic oligonucleotide
ugguggucuaaaugcucac

SEQ ID NO: 680984 - RNA, 19 nt, Artificial Sequence
  Description of Artificial Sequence: Synthetic oligonucleotide
gucgguguggucuccuuuc

SEQ ID NO: 680985 - RNA, 19 nt, Artificial Sequence
  Description of Artificial Sequence: Synthetic oligonucleotide
ugugaccgccguagggaca

SEQ ID NO: 680986 - RNA, 19 nt, Artificial Sequence
  Description of Artificial Sequence: Synthetic oligonucleotide
cucgaccagugaagaagcc

SEQ ID NO: 680987 - RNA, 19 nt, Artificial Sequence
  Description of Artificial Sequence: Synthetic oligonucleotide
uuggcagguggguguucgg

SEQ ID NO: 680988 - RNA, 19 nt, Artificial Sequence
  Description of Artificial Sequence: Synthetic oligonucleotide
gauccguguauaagggcca

SEQ ID NO: 680989 - RNA, 19 nt, Artificial Sequence
  Description of Artificial Sequence: Synthetic oligonucleotide
gugaccgccguagggacag

SEQ ID NO: 680990 - RNA, 19 nt, Artificial Sequence
  Description of Artificial Sequence: Synthetic oligonucleotide
ccucgaccagugaagaagc

SEQ ID NO: 680991 - RNA, 19 nt, Artificial Sequence
  Description of Artificial Sequence: Synthetic oligonucleotide
gcaauacaucgacccaggg

SEQ ID NO: 680992 - RNA, 19 nt, Artificial Sequence
  Description of Artificial Sequence: Synthetic oligonucleotide
cuguuugauuaagauguca

SEQ ID NO: 680993 - RNA, 19 nt, Artificial Sequence
  Description of Artificial Sequence: Synthetic oligonucleotide
ugagcgcaagauccgugua

SEQ ID NO: 680994 - RNA, 19 nt, Artificial Sequence
  Description of Artificial Sequence: Synthetic oligonucleotide
ggcacuauauccccuucuc

SEQ ID NO: 680995 - RNA, 19 nt, Artificial Sequence
  Description of Artificial Sequence: Synthetic oligonucleotide
ccaaccuuugugaccgccg

SEQ ID NO: 680996 - RNA, 19 nt, Artificial Sequence
  Description of Artificial Sequence: Synthetic oligonucleotide
aguucagacccugacuguu

SEQ ID NO: 680997 - RNA, 19 nt, Artificial Sequence
  Description of Artificial Sequence: Synthetic oligonucleotide
caauacaucgacccagggu

SEQ ID NO: 680998 - RNA, 19 nt, Artificial Sequence
  Description of Artificial Sequence: Synthetic oligonucleotide
accacuuguaauagcuccu

SEQ ID NO: 680999 - RNA, 19 nt, Artificial Sequence
  Description of Artificial Sequence: Synthetic oligonucleotide
uaucuacaucaauggugaa

SEQ ID NO: 681000 - RNA, 19 nt, Artificial Sequence
  Description of Artificial Sequence: Synthetic oligonucleotide
cugaucuugggcacuauau

SEQ ID NO: 681001 - RNA, 19 nt, Artificial Sequence
  Description of Artificial Sequence: Synthetic oligonucleotide
cguagggacaguucagacc

SEQ ID NO: 681002 - RNA, 19 nt, Artificial Sequence
  Description of Artificial Sequence: Synthetic oligonucleotide
ucggggaaguaaguuucga

SEQ ID NO: 681003 - RNA, 19 nt, Artificial Sequence
  Description of Artificial Sequence: Synthetic oligonucleotide
ggguguucggggaaguaag

SEQ ID NO: 681004 - RNA, 19 nt, Artificial Sequence
  Description of Artificial Sequence: Synthetic oligonucleotide
uuuagccguucaccacuuc

SEQ ID NO: 681005 - RNA, 19 nt, Artificial Sequence
  Description of Artificial Sequence: Synthetic oligonucleotide
agucucaucguaaguggau

SEQ ID NO: 681006 - RNA, 19 nt, Artificial Sequence
  Description of Artificial Sequence: Synthetic oligonucleotide
aaccuuugugaccgccgua

SEQ ID NO: 681007 - RNA, 19 nt, Artificial Sequence
  Description of Artificial Sequence: Synthetic oligonucleotide
ugggcacuauauccccuuc

SEQ ID NO: 681008 - RNA, 19 nt, Artificial Sequence
  Description of Artificial Sequence: Synthetic oligonucleotide
gucucuuaugcugauggcu

SEQ ID NO: 681009 - RNA, 19 nt, Artificial Sequence
  Description of Artificial Sequence: Synthetic oligonucleotide
uugucgcaaggcagcaaua

SEQ ID NO: 681010 - RNA, 19 nt, Artificial Sequence
  Description of Artificial Sequence: Synthetic oligonucleotide
ugauggcuaggugauucua

SEQ ID NO: 681011 - RNA, 19 nt, Artificial Sequence
  Description of Artificial Sequence: Synthetic oligonucleotide
cuguugcaucuguucuacc

SEQ ID NO: 681012 - RNA, 19 nt, Artificial Sequence
  Description of Artificial Sequence: Synthetic oligonucleotide
ugucgaacuuuggcaggug

SEQ ID NO: 681013 - RNA, 19 nt, Artificial Sequence
  Description of Artificial Sequence: Synthetic oligonucleotide
uuuugucgcaaggcagcaa

SEQ ID NO: 681014 - RNA, 19 nt, Artificial Sequence
  Description of Artificial Sequence: Synthetic oligonucleotide
ucacuagcaucauguuauu

SEQ ID NO: 681015 - RNA, 19 nt, Artificial Sequence
  Description of Artificial Sequence: Synthetic oligonucleotide
cauacaugaacggccucga

SEQ ID NO: 681016 - RNA, 19 nt, Artificial Sequence
  Description of Artificial Sequence: Synthetic oligonucleotide
augaacggccucgaccagu

SEQ ID NO: 681017 - RNA, 19 nt, Artificial Sequence
  Description of Artificial Sequence: Synthetic oligonucleotide
agccguucaccacuucuuu

SEQ ID NO: 681018 - RNA, 19 nt, Artificial Sequence
  Description of Artificial Sequence: Synthetic oligonucleotide
acaguucaggauauauaua

SEQ ID NO: 681019 - RNA, 19 nt, Artificial Sequence
  Description of Artificial Sequence: Synthetic oligonucleotide
cucaucguaaguggaugca

SEQ ID NO: 681020 - RNA, 19 nt, Artificial Sequence
  Description of Artificial Sequence: Synthetic oligonucleotide
agcgcaagauccguguaua

SEQ ID NO: 681021 - RNA, 19 nt, Artificial Sequence
  Description of Artificial Sequence: Synthetic oligonucleotide
ccagacagagaagcgaaug

SEQ ID NO: 681022 - RNA, 19 nt, Artificial Sequence
  Description of Artificial Sequence: Synthetic oligonucleotide
cagacagagaagcgaaugu

SEQ ID NO: 681023 - RNA, 19 nt, Artificial Sequence
  Description of Artificial Sequence: Synthetic oligonucleotide
augcugauggcuaggugau

SEQ ID NO: 681024 - RNA, 19 nt, Artificial Sequence
  Description of Artificial Sequence: Synthetic oligonucleotide
acacuuacuggggcagugu

SEQ ID NO: 681025 - RNA, 19 nt, Artificial Sequence
  Description of Artificial Sequence: Synthetic oligonucleotide
caugaacggccucgaccag

SEQ ID NO: 681026 - RNA, 19 nt, Artificial Sequence
  Description of Artificial Sequence: Synthetic oligonucleotide
agucgguguggucuccuuu

SEQ ID NO: 681027 - RNA, 19 nt, Artificial Sequence
  Description of Artificial Sequence: Synthetic oligonucleotide
ugaauccaguugaggucuu

SEQ ID NO: 681028 - RNA, 19 nt, Artificial Sequence
  Description of Artificial Sequence: Synthetic oligonucleotide
ccguagcauucuuauauuc

SEQ ID NO: 681029 - RNA, 19 nt, Artificial Sequence
  Description of Artificial Sequence: Synthetic oligonucleotide
gggacacuuacuggggcag

SEQ ID NO: 681030 - RNA, 19 nt, Artificial Sequence
  Description of Artificial Sequence: Synthetic oligonucleotide
uuugaccgguucugcugau

SEQ ID NO: 681031 - RNA, 19 nt, Artificial Sequence
  Description of Artificial Sequence: Synthetic oligonucleotide
gcagcaauacaucgaccca

SEQ ID NO: 681032 - RNA, 19 nt, Artificial Sequence
  Description of Artificial Sequence: Synthetic oligonucleotide
uggcugucgguggugguuc

SEQ ID NO: 681033 - RNA, 19 nt, Artificial Sequence
  Description of Artificial Sequence: Synthetic oligonucleotide
accgccguagggacaguuc

SEQ ID NO: 681034 - RNA, 19 nt, Artificial Sequence
  Description of Artificial Sequence: Synthetic oligonucleotide
gcuugccgaaguuucccug

SEQ ID NO: 681035 - RNA, 19 nt, Artificial Sequence
  Description of Artificial Sequence: Synthetic oligonucleotide
gugagcgcaagauccgugu

SEQ ID NO: 681036 - RNA, 19 nt, Artificial Sequence
  Description of Artificial Sequence: Synthetic oligonucleotide
caucucgaacaugaaucca

SEQ ID NO: 681037 - RNA, 19 nt, Artificial Sequence
  Description of Artificial Sequence: Synthetic oligonucleotide
gugccgugagcgcaagauc

SEQ ID NO: 681038 - RNA, 19 nt, Artificial Sequence
  Description of Artificial Sequence: Synthetic oligonucleotide
gggccgagaacuuggccac

SEQ ID NO: 681039 - RNA, 19 nt, Artificial Sequence
  Description of Artificial Sequence: Synthetic oligonucleotide
agcaucaagcaugcauuuu

SEQ ID NO: 681040 - RNA, 19 nt, Artificial Sequence
  Description of Artificial Sequence: Synthetic oligonucleotide
gccguucaccacuucuuug

SEQ ID NO: 681041 - RNA, 19 nt, Artificial Sequence
  Description of Artificial Sequence: Synthetic oligonucleotide
cugucucggaaaggaauca

SEQ ID NO: 681042 - RNA, 19 nt, Artificial Sequence
  Description of Artificial Sequence: Synthetic oligonucleotide
uccguguauaagggccacu

SEQ ID NO: 681043 - RNA, 19 nt, Artificial Sequence
  Description of Artificial Sequence: Synthetic oligonucleotide
gcaaaggagagugccguga

SEQ ID NO: 681044 - RNA, 19 nt, Artificial Sequence
  Description of Artificial Sequence: Synthetic oligonucleotide
ccguguauaagggccacug

SEQ ID NO: 681045 - RNA, 19 nt, Artificial Sequence
  Description of Artificial Sequence: Synthetic oligonucleotide
cuuaugcugauggcuaggu

SEQ ID NO: 681046 - RNA, 19 nt, Artificial Sequence
  Description of Artificial Sequence: Synthetic oligonucleotide
gagcgcaagauccguguau

SEQ ID NO: 681047 - RNA, 19 nt, Artificial Sequence
  Description of Artificial Sequence: Synthetic oligonucleotide
auauccccuucucccugaa

SEQ ID NO: 681048 - RNA, 19 nt, Artificial Sequence
  Description of Artificial Sequence: Synthetic oligonucleotide
ggaugcacagggauucaca

SEQ ID NO: 681049 - RNA, 19 nt, Artificial Sequence
  Description of Artificial Sequence: Synthetic oligonucleotide
acgagucaacuugcugucu

SEQ ID NO: 681050 - RNA, 19 nt, Artificial Sequence
  Description of Artificial Sequence: Synthetic oligonucleotide
ggagagugccgugagcgca

SEQ ID NO: 681051 - RNA, 19 nt, Artificial Sequence
  Description of Artificial Sequence: Synthetic oligonucleotide
auacaucgacccaggguau

SEQ ID NO: 681052 - RNA, 19 nt, Artificial Sequence
  Description of Artificial Sequence: Synthetic oligonucleotide
cuaccaucucauugcaaau

SEQ ID NO: 681053 - RNA, 19 nt, Artificial Sequence
  Description of Artificial Sequence: Synthetic oligonucleotide
cuucgacuagaguucuggu

SEQ ID NO: 681054 - RNA, 19 nt, Artificial Sequence
  Description of Artificial Sequence: Synthetic oligonucleotide
cuccacaacuuuaguauuu

SEQ ID NO: 681055 - RNA, 19 nt, Artificial Sequence
  Description of Artificial Sequence: Synthetic oligonucleotide
ccguagggacaguucagac

SEQ ID NO: 681056 - RNA, 19 nt, Artificial Sequence
  Description of Artificial Sequence: Synthetic oligonucleotide
agagugccgugagcgcaag

SEQ ID NO: 681057 - RNA, 19 nt, Artificial Sequence
  Description of Artificial Sequence: Synthetic oligonucleotide
gagagugccgugagcgcaa

SEQ ID NO: 681058 - RNA, 19 nt, Artificial Sequence
  Description of Artificial Sequence: Synthetic oligonucleotide
gcauugcucuaguuuagcu

SEQ ID NO: 681059 - RNA, 19 nt, Artificial Sequence
  Description of Artificial Sequence: Synthetic oligonucleotide
cacagccgcagugucuguc

SEQ ID NO: 681060 - RNA, 19 nt, Artificial Sequence
  Description of Artificial Sequence: Synthetic oligonucleotide
cucggaaaggaaucagguu

SEQ ID NO: 681061 - RNA, 19 nt, Artificial Sequence
  Description of Artificial Sequence: Synthetic oligonucleotide
caaccuuugugaccgccgu

SEQ ID NO: 681062 - RNA, 19 nt, Artificial Sequence
  Description of Artificial Sequence: Synthetic oligonucleotide
uagcaaagcucugguucuu

SEQ ID NO: 681063 - RNA, 19 nt, Artificial Sequence
  Description of Artificial Sequence: Synthetic oligonucleotide
gguucuuacgacccacuuu

SEQ ID NO: 681064 - RNA, 19 nt, Artificial Sequence
  Description of Artificial Sequence: Synthetic oligonucleotide
cugauggcuaggugauucu

SEQ ID NO: 681065 - RNA, 19 nt, Artificial Sequence
  Description of Artificial Sequence: Synthetic oligonucleotide
ggucuuugacauaaggauu

SEQ ID NO: 681066 - RNA, 19 nt, Artificial Sequence
  Description of Artificial Sequence: Synthetic oligonucleotide
caucgacccaggguaugca

SEQ ID NO: 681067 - RNA, 19 nt, Artificial Sequence
  Description of Artificial Sequence: Synthetic oligonucleotide
guuucccugccccggugcu

SEQ ID NO: 681068 - RNA, 19 nt, Artificial Sequence
  Description of Artificial Sequence: Synthetic oligonucleotide
cugucgguggugguucuaa

SEQ ID NO: 681069 - RNA, 19 nt, Artificial Sequence
  Description of Artificial Sequence: Synthetic oligonucleotide
ggucaaggcuugccgaagu

SEQ ID NO: 681070 - RNA, 19 nt, Artificial Sequence
  Description of Artificial Sequence: Synthetic oligonucleotide
cucgaacaugaauccaguu

SEQ ID NO: 681071 - RNA, 19 nt, Artificial Sequence
  Description of Artificial Sequence: Synthetic oligonucleotide
gaacggccucgaccaguga

SEQ ID NO: 681072 - RNA, 19 nt, Artificial Sequence
  Description of Artificial Sequence: Synthetic oligonucleotide
guugagccacaggcugcug

SEQ ID NO: 681073 - RNA, 19 nt, Artificial Sequence
  Description of Artificial Sequence: Synthetic oligonucleotide
ggguguuagcaaagcucug

SEQ ID NO: 681074 - RNA, 19 nt, Artificial Sequence
  Description of Artificial Sequence: Synthetic oligonucleotide
cugucgaacuuuggcaggu

SEQ ID NO: 681075 - RNA, 19 nt, Artificial Sequence
  Description of Artificial Sequence: Synthetic oligonucleotide
cuuuagccguucaccacuu

SEQ ID NO: 681076 - RNA, 19 nt, Artificial Sequence
  Description of Artificial Sequence: Synthetic oligonucleotide
gugacaguucacugaucuu

SEQ ID NO: 681077 - RNA, 19 nt, Artificial Sequence
  Description of Artificial Sequence: Synthetic oligonucleotide
ccguuuugauccucacaca

SEQ ID NO: 681078 - RNA, 19 nt, Artificial Sequence
  Description of Artificial Sequence: Synthetic oligonucleotide
gggcacuauauccccuucu

SEQ ID NO: 681079 - RNA, 19 nt, Artificial Sequence
  Description of Artificial Sequence: Synthetic oligonucleotide
augauuccuucaggaucuu

SEQ ID NO: 681080 - RNA, 19 nt, Artificial Sequence
  Description of Artificial Sequence: Synthetic oligonucleotide
cgacuagaguucugguuca

SEQ ID NO: 681081 - RNA, 19 nt, Artificial Sequence
  Description of Artificial Sequence: Synthetic oligonucleotide
ggcuugccgaaguuucccu

SEQ ID NO: 681082 - RNA, 19 nt, Artificial Sequence
  Description of Artificial Sequence: Synthetic oligonucleotide
gcgcaagauccguguauaa

SEQ ID NO: 681083 - RNA, 19 nt, Artificial Sequence
  Description of Artificial Sequence: Synthetic oligonucleotide
ccgagaacuuggccacaug

SEQ ID NO: 681084 - RNA, 19 nt, Artificial Sequence
  Description of Artificial Sequence: Synthetic oligonucleotide
caucaaggccugagucggu

SEQ ID NO: 681085 - RNA, 19 nt, Artificial Sequence
  Description of Artificial Sequence: Synthetic oligonucleotide
cuggagagacuguccuaau

SEQ ID NO: 681086 - RNA, 19 nt, Artificial Sequence
  Description of Artificial Sequence: Synthetic oligonucleotide
gagucgguguggucuccuu

SEQ ID NO: 681087 - RNA, 19 nt, Artificial Sequence
  Description of Artificial Sequence: Synthetic oligonucleotide
ggccucgaccagugaagaa

SEQ ID NO: 681088 - RNA, 19 nt, Artificial Sequence
  Description of Artificial Sequence: Synthetic oligonucleotide
guggguguucggggaagua

SEQ ID NO: 681089 - RNA, 19 nt, Artificial Sequence
  Description of Artificial Sequence: Synthetic oligonucleotide
cagcgcucugagccagcca

SEQ ID NO: 681090 - RNA, 19 nt, Artificial Sequence
  Description of Artificial Sequence: Synthetic oligonucleotide
cacuagcaucauguuauuu

SEQ ID NO: 681091 - RNA, 19 nt, Artificial Sequence
  Description of Artificial Sequence: Synthetic oligonucleotide
cgaccagugaagaagccuu

SEQ ID NO: 681092 - RNA, 19 nt, Artificial Sequence
  Description of Artificial Sequence: Synthetic oligonucleotide
ggauugccguuuugauccu

SEQ ID NO: 681093 - RNA, 19 nt, Artificial Sequence
  Description of Artificial Sequence: Synthetic oligonucleotide
ugaccgccguagggacagu

SEQ ID NO: 681094 - RNA, 19 nt, Artificial Sequence
  Description of Artificial Sequence: Synthetic oligonucleotide
ggacacuuacuggggcagu

SEQ ID NO: 681095 - RNA, 19 nt, Artificial Sequence
  Description of Artificial Sequence: Synthetic oligonucleotide
ccgguucugcugauuuugu

SEQ ID NO: 681096 - RNA, 19 nt, Artificial Sequence
  Description of Artificial Sequence: Synthetic oligonucleotide
cguguauaagggccacugu

SEQ ID NO: 681097 - RNA, 19 nt, Artificial Sequence
  Description of Artificial Sequence: Synthetic oligonucleotide
ggcugucgguggugguucu

SEQ ID NO: 681098 - RNA, 19 nt, Artificial Sequence
  Description of Artificial Sequence: Synthetic oligonucleotide
gccgagaacuuggccacau

SEQ ID NO: 681099 - RNA, 19 nt, Artificial Sequence
  Description of Artificial Sequence: Synthetic oligonucleotide
gcugucgguggugguucua

SEQ ID NO: 681100 - RNA, 19 nt, Artificial Sequence
  Description of Artificial Sequence: Synthetic oligonucleotide
gcgcucugagccagccaaa

SEQ ID NO: 681101 - RNA, 19 nt, Artificial Sequence
  Description of Artificial Sequence: Synthetic oligonucleotide
cggccucgaccagugaaga

SEQ ID NO: 681102 - RNA, 19 nt, Artificial Sequence
  Description of Artificial Sequence: Synthetic oligonucleotide
ccgugagcgcaagauccgu

SEQ ID NO: 681103 - RNA, 19 nt, Artificial Sequence
  Description of Artificial Sequence: Synthetic oligonucleotide
cgguggugguucuaacauu

SEQ ID NO: 681104 - RNA, 19 nt, Artificial Sequence
  Description of Artificial Sequence: Synthetic oligonucleotide
cuguggcaacaggcccuuu

SEQ ID NO: 681105 - RNA, 19 nt, Artificial Sequence
  Description of Artificial Sequence: Synthetic oligonucleotide
auuggaaaugcauucaggc

SEQ ID NO: 681106 - RNA, 19 nt, Artificial Sequence
  Description of Artificial Sequence: Synthetic oligonucleotide
aaugcauucaggcgaaucg

SEQ ID NO: 681107 - RNA, 19 nt, Artificial Sequence
  Description of Artificial Sequence: Synthetic oligonucleotide
aauaacagcaagucuacag

SEQ ID NO: 681108 - RNA, 19 nt, Artificial Sequence
  Description of Artificial Sequence: Synthetic oligonucleotide
aagagauugugagagauac

SEQ ID NO: 681109 - RNA, 19 nt, Artificial Sequence
  Description of Artificial Sequence: Synthetic oligonucleotide
aauacaagguguaaguggg

SEQ ID NO: 681110 - RNA, 19 nt, Artificial Sequence
  Description of Artificial Sequence: Synthetic oligonucleotide
uuguuagugguccugaacc

SEQ ID NO: 681111 - RNA, 19 nt, Artificial Sequence
  Description of Artificial Sequence: Synthetic oligonucleotide
auccuuaacagguugcagc

SEQ ID NO: 681112 - RNA, 19 nt, Artificial Sequence
  Description of Artificial Sequence: Synthetic oligonucleotide
aaagugauugugcaggggu

SEQ ID NO: 681113 - RNA, 19 nt, Artificial Sequence
  Description of Artificial Sequence: Synthetic oligonucleotide
agagauacagcaaagcggg

SEQ ID NO: 681114 - RNA, 19 nt, Artificial Sequence
  Description of Artificial Sequence: Synthetic oligonucleotide
ggaaauguuagcuucuugg

SEQ ID NO: 681115 - RNA, 19 nt, Artificial Sequence
  Description of Artificial Sequence: Synthetic oligonucleotide
ugaguaauggugccgguag

SEQ ID NO: 681116 - RNA, 19 nt, Artificial Sequence
  Description of Artificial Sequence: Synthetic oligonucleotide
aagaguccacugcuaagcc

SEQ ID NO: 681117 - RNA, 19 nt, Artificial Sequence
  Description of Artificial Sequence: Synthetic oligonucleotide
aaucgggaggauuacaaga

SEQ ID NO: 681118 - RNA, 19 nt, Artificial Sequence
  Description of Artificial Sequence: Synthetic oligonucleotide
aauuaaccaaucaauaaau

SEQ ID NO: 681119 - RNA, 19 nt, Artificial Sequence
  Description of Artificial Sequence: Synthetic oligonucleotide
uggacuguauuuuauccag

SEQ ID NO: 681120 - RNA, 19 nt, Artificial Sequence
  Description of Artificial Sequence: Synthetic oligonucleotide
aguaguuagacccgcuccg

SEQ ID NO: 681121 - RNA, 19 nt, Artificial Sequence
  Description of Artificial Sequence: Synthetic oligonucleotide
gaagauccgaaucuuguug

SEQ ID NO: 681122 - RNA, 19 nt, Artificial Sequence
  Description of Artificial Sequence: Synthetic oligonucleotide
aauagaagugagcacccgu

SEQ ID NO: 681123 - RNA, 19 nt, Artificial Sequence
  Description of Artificial Sequence: Synthetic oligonucleotide
gacguuguacucaaagucg

SEQ ID NO: 681124 - RNA, 19 nt, Artificial Sequence
  Description of Artificial Sequence: Synthetic oligonucleotide
aagauccgaaucuuguuga

SEQ ID NO: 681125 - RNA, 19 nt, Artificial Sequence
  Description of Artificial Sequence: Synthetic oligonucleotide
acggaagguaaucacacag

SEQ ID NO: 681126 - RNA, 19 nt, Artificial Sequence
  Description of Artificial Sequence: Synthetic oligonucleotide
aguuagacccgcuccgacc

SEQ ID NO: 681127 - RNA, 19 nt, Artificial Sequence
  Description of Artificial Sequence: Synthetic oligonucleotide
aggaaauagaagugagcac

SEQ ID NO: 681128 - RNA, 19 nt, Artificial Sequence
  Description of Artificial Sequence: Synthetic oligonucleotide
agcgagauccugaugaggc

SEQ ID NO: 681129 - RNA, 19 nt, Artificial Sequence
  Description of Artificial Sequence: Synthetic oligonucleotide
uaagaguccacugcuaagc

SEQ ID NO: 681130 - RNA, 19 nt, Artificial Sequence
  Description of Artificial Sequence: Synthetic oligonucleotide
ugucaaauagaugcuacca

SEQ ID NO: 681131 - RNA, 19 nt, Artificial Sequence
  Description of Artificial Sequence: Synthetic oligonucleotide
auucaggcgaaucgggagg

SEQ ID NO: 681132 - RNA, 19 nt, Artificial Sequence
  Description of Artificial Sequence: Synthetic oligonucleotide
ugcauucaggcgaaucggg

SEQ ID NO: 681133 - RNA, 19 nt, Artificial Sequence
  Description of Artificial Sequence: Synthetic oligonucleotide
uccugaacccaauagucug

SEQ ID NO: 681134 - RNA, 19 nt, Artificial Sequence
  Description of Artificial Sequence: Synthetic oligonucleotide
uuaagaguccacugcuaag

SEQ ID NO: 681135 - RNA, 19 nt, Artificial Sequence
  Description of Artificial Sequence: Synthetic oligonucleotide
agggcuaaagugauugugc

SEQ ID NO: 681136 - RNA, 19 nt, Artificial Sequence
  Description of Artificial Sequence: Synthetic oligonucleotide
gaccaugcugacuccaacg

SEQ ID NO: 681137 - RNA, 19 nt, Artificial Sequence
  Description of Artificial Sequence: Synthetic oligonucleotide
uugucaaauagaugcuacc

SEQ ID NO: 681138 - RNA, 19 nt, Artificial Sequence
  Description of Artificial Sequence: Synthetic oligonucleotide
ccaaucaauaaauaacagc

SEQ ID NO: 681139 - RNA, 19 nt, Artificial Sequence
  Description of Artificial Sequence: Synthetic oligonucleotide
ugauggguaccgcccaugg

SEQ ID NO: 681140 - RNA, 19 nt, Artificial Sequence
  Description of Artificial Sequence: Synthetic oligonucleotide
cggacgacaaccuagaagg

SEQ ID NO: 681141 - RNA, 19 nt, Artificial Sequence
  Description of Artificial Sequence: Synthetic oligonucleotide
agguguaagugggugacgc

SEQ ID NO: 681142 - RNA, 19 nt, Artificial Sequence
  Description of Artificial Sequence: Synthetic oligonucleotide
gaaauagaagugagcaccc

SEQ ID NO: 681143 - RNA, 19 nt, Artificial Sequence
  Description of Artificial Sequence: Synthetic oligonucleotide
agucggacaacuuugucaa

SEQ ID NO: 681144 - RNA, 19 nt, Artificial Sequence
  Description of Artificial Sequence: Synthetic oligonucleotide
caugcugacuccaacguuc

SEQ ID NO: 681145 - RNA, 19 nt, Artificial Sequence
  Description of Artificial Sequence: Synthetic oligonucleotide
agaugcgguguguccaucc

SEQ ID NO: 681146 - RNA, 19 nt, Artificial Sequence
  Description of Artificial Sequence: Synthetic oligonucleotide
ggugccauggggcagaccc

SEQ ID NO: 681147 - RNA, 19 nt, Artificial Sequence
  Description of Artificial Sequence: Synthetic oligonucleotide
gagucggacaacuuuguca

SEQ ID NO: 681148 - RNA, 19 nt, Artificial Sequence
  Description of Artificial Sequence: Synthetic oligonucleotide
aagggcuaaagugauugug

SEQ ID NO: 681149 - RNA, 19 nt, Artificial Sequence
  Description of Artificial Sequence: Synthetic oligonucleotide
agauggguuguuuucccag

SEQ ID NO: 681150 - RNA, 19 nt, Artificial Sequence
  Description of Artificial Sequence: Synthetic oligonucleotide
gaaucgggaggauuacaag

SEQ ID NO: 681151 - RNA, 19 nt, Artificial Sequence
  Description of Artificial Sequence: Synthetic oligonucleotide
uagaagugagcacccgucc

SEQ ID NO: 681152 - RNA, 19 nt, Artificial Sequence
  Description of Artificial Sequence: Synthetic oligonucleotide
acggacgacaaccuagaag

SEQ ID NO: 681153 - RNA, 19 nt, Artificial Sequence
  Description of Artificial Sequence: Synthetic oligonucleotide
uuuauccaguuaagagucc

SEQ ID NO: 681154 - RNA, 19 nt, Artificial Sequence
  Description of Artificial Sequence: Synthetic oligonucleotide
aacccaauagucugaggaa

SEQ ID NO: 681155 - RNA, 19 nt, Artificial Sequence
  Description of Artificial Sequence: Synthetic oligonucleotide
aaggcagacccgcuaacgu

SEQ ID NO: 681156 - RNA, 19 nt, Artificial Sequence
  Description of Artificial Sequence: Synthetic oligonucleotide
caccacgcgaaacaguucc

SEQ ID NO: 681157 - RNA, 19 nt, Artificial Sequence
  Description of Artificial Sequence: Synthetic oligonucleotide
gagaauacaagguguaagu

SEQ ID NO: 681158 - RNA, 19 nt, Artificial Sequence
  Description of Artificial Sequence: Synthetic oligonucleotide
cauucaggcgaaucgggag

SEQ ID NO: 681159 - RNA, 19 nt, Artificial Sequence
  Description of Artificial Sequence: Synthetic oligonucleotide
agguacaugcuuuucaguu

SEQ ID NO: 681160 - RNA, 19 nt, Artificial Sequence
  Description of Artificial Sequence: Synthetic oligonucleotide
auagaagugagcacccguc

SEQ ID NO: 681161 - RNA, 19 nt, Artificial Sequence
  Description of Artificial Sequence: Synthetic oligonucleotide
agaauacaagguguaagug

SEQ ID NO: 681162 - RNA, 19 nt, Artificial Sequence
  Description of Artificial Sequence: Synthetic oligonucleotide
acagguugcagcgucaucu

SEQ ID NO: 681163 - RNA, 19 nt, Artificial Sequence
  Description of Artificial Sequence: Synthetic oligonucleotide
gaggaugccgguugauggg

SEQ ID NO: 681164 - RNA, 19 nt, Artificial Sequence
  Description of Artificial Sequence: Synthetic oligonucleotide
uaaagugauugugcagggg

SEQ ID NO: 681165 - RNA, 19 nt, Artificial Sequence
  Description of Artificial Sequence: Synthetic oligonucleotide
gaugacggagaggaugccg

SEQ ID NO: 681166 - RNA, 19 nt, Artificial Sequence
  Description of Artificial Sequence: Synthetic oligonucleotide
uuauccaguuaagagucca

SEQ ID NO: 681167 - RNA, 19 nt, Artificial Sequence
  Description of Artificial Sequence: Synthetic oligonucleotide
aaaacaaagcaggggcuga

SEQ ID NO: 681168 - RNA, 19 nt, Artificial Sequence
  Description of Artificial Sequence: Synthetic oligonucleotide
gugcacuuaauucuggcca

SEQ ID NO: 681169 - RNA, 19 nt, Artificial Sequence
  Description of Artificial Sequence: Synthetic oligonucleotide
ugcaaguugagagcgagau

SEQ ID NO: 681170 - RNA, 19 nt, Artificial Sequence
  Description of Artificial Sequence: Synthetic oligonucleotide
auacagcaaagcgggacgc

SEQ ID NO: 681171 - RNA, 19 nt, Artificial Sequence
  Description of Artificial Sequence: Synthetic oligonucleotide
aaccuagaagggcaagcga

SEQ ID NO: 681172 - RNA, 19 nt, Artificial Sequence
  Description of Artificial Sequence: Synthetic oligonucleotide
accaaaaugagggcgcaag

SEQ ID NO: 681173 - RNA, 19 nt, Artificial Sequence
  Description of Artificial Sequence: Synthetic oligonucleotide
ggcacguggaaguaguuag

SEQ ID NO: 681174 - RNA, 19 nt, Artificial Sequence
  Description of Artificial Sequence: Synthetic oligonucleotide
aacaaagcaggggcugagg

SEQ ID NO: 681175 - RNA, 19 nt, Artificial Sequence
  Description of Artificial Sequence: Synthetic oligonucleotide
agauugugagagauacagc

SEQ ID NO: 681176 - RNA, 19 nt, Artificial Sequence
  Description of Artificial Sequence: Synthetic oligonucleotide
gaaguaguuagacccgcuc

SEQ ID NO: 681177 - RNA, 19 nt, Artificial Sequence
  Description of Artificial Sequence: Synthetic oligonucleotide
uaaacuaauuggugcacuu

SEQ ID NO: 681178 - RNA, 19 nt, Artificial Sequence
  Description of Artificial Sequence: Synthetic oligonucleotide
aacgucauuggaaaugcau

SEQ ID NO: 681179 - RNA, 19 nt, Artificial Sequence
  Description of Artificial Sequence: Synthetic oligonucleotide
gguguguccauccuuaaca

SEQ ID NO: 681180 - RNA, 19 nt, Artificial Sequence
  Description of Artificial Sequence: Synthetic oligonucleotide
ugcacuuaauucuggccac

SEQ ID NO: 681181 - RNA, 19 nt, Artificial Sequence
  Description of Artificial Sequence: Synthetic oligonucleotide
ucacacagccccaggcuag

SEQ ID NO: 681182 - RNA, 19 nt, Artificial Sequence
  Description of Artificial Sequence: Synthetic oligonucleotide
gcagcucgagaauacaagg

SEQ ID NO: 681183 - RNA, 19 nt, Artificial Sequence
  Description of Artificial Sequence: Synthetic oligonucleotide
gaagguaaucacacagccc

SEQ ID NO: 681184 - RNA, 19 nt, Artificial Sequence
  Description of Artificial Sequence: Synthetic oligonucleotide
accuagaagggcaagcgag

SEQ ID NO: 681185 - RNA, 19 nt, Artificial Sequence
  Description of Artificial Sequence: Synthetic oligonucleotide
gcaagcgagauccugauga

SEQ ID NO: 681186 - RNA, 19 nt, Artificial Sequence
  Description of Artificial Sequence: Synthetic oligonucleotide
aaacaaagcaggggcugag

SEQ ID NO: 681187 - RNA, 19 nt, Artificial Sequence
  Description of Artificial Sequence: Synthetic oligonucleotide
gacgacaaccuagaagggc

SEQ ID NO: 681188 - RNA, 19 nt, Artificial Sequence
  Description of Artificial Sequence: Synthetic oligonucleotide
aagcgagauccugaugagg

SEQ ID NO: 681189 - RNA, 19 nt, Artificial Sequence
  Description of Artificial Sequence: Synthetic oligonucleotide
gauugugcaggggucuggg

SEQ ID NO: 681190 - RNA, 19 nt, Artificial Sequence
  Description of Artificial Sequence: Synthetic oligonucleotide
accuacuagagugagcuga

SEQ ID NO: 681191 - RNA, 19 nt, Artificial Sequence
  Description of Artificial Sequence: Synthetic oligonucleotide
gugugaguaauggugccgg

SEQ ID NO: 681192 - RNA, 19 nt, Artificial Sequence
  Description of Artificial Sequence: Synthetic oligonucleotide
ucauguaccccggucuucc

SEQ ID NO: 681193 - RNA, 19 nt, Artificial Sequence
  Description of Artificial Sequence: Synthetic oligonucleotide
guaaucacacagccccagg

SEQ ID NO: 681194 - RNA, 19 nt, Artificial Sequence
  Description of Artificial Sequence: Synthetic oligonucleotide
acguuguacucaaagucgg

SEQ ID NO: 681195 - RNA, 19 nt, Artificial Sequence
  Description of Artificial Sequence: Synthetic oligonucleotide
ggacaacuuugucaaauag

SEQ ID NO: 681196 - RNA, 19 nt, Artificial Sequence
  Description of Artificial Sequence: Synthetic oligonucleotide
augcauucaggcgaaucgg

SEQ ID NO: 681197 - RNA, 19 nt, Artificial Sequence
  Description of Artificial Sequence: Synthetic oligonucleotide
acaagguguaaguggguga

SEQ ID NO: 681198 - RNA, 19 nt, Artificial Sequence
  Description of Artificial Sequence: Synthetic oligonucleotide
guuguuagugguccugaac

SEQ ID NO: 681199 - RNA, 19 nt, Artificial Sequence
  Description of Artificial Sequence: Synthetic oligonucleotide
agagucggacaacuuuguc

SEQ ID NO: 681200 - RNA, 19 nt, Artificial Sequence
  Description of Artificial Sequence: Synthetic oligonucleotide
uaauggugccgguaguggu

SEQ ID NO: 681201 - RNA, 19 nt, Artificial Sequence
  Description of Artificial Sequence: Synthetic oligonucleotide
cagacaugaauggagaaga

SEQ ID NO: 681202 - RNA, 19 nt, Artificial Sequence
  Description of Artificial Sequence: Synthetic oligonucleotide
uauccaguuaagaguccac

SEQ ID NO: 681203 - RNA, 19 nt, Artificial Sequence
  Description of Artificial Sequence: Synthetic oligonucleotide
aggcagacccgcuaacguc

SEQ ID NO: 681204 - RNA, 19 nt, Artificial Sequence
  Description of Artificial Sequence: Synthetic oligonucleotide
agagcgaguggggaaguac

SEQ ID NO: 681205 - RNA, 19 nt, Artificial Sequence
  Description of Artificial Sequence: Synthetic oligonucleotide
augacggagaggaugccgg

SEQ ID NO: 681206 - RNA, 19 nt, Artificial Sequence
  Description of Artificial Sequence: Synthetic oligonucleotide
ggaaugcgcccgcagaugg

SEQ ID NO: 681207 - RNA, 19 nt, Artificial Sequence
  Description of Artificial Sequence: Synthetic oligonucleotide
ucgggaggauuacaagaug

SEQ ID NO: 681208 - RNA, 19 nt, Artificial Sequence
  Description of Artificial Sequence: Synthetic oligonucleotide
uggugcacuuaauucuggc

SEQ ID NO: 681209 - RNA, 19 nt, Artificial Sequence
  Description of Artificial Sequence: Synthetic oligonucleotide
accgacguccaccuacuag

SEQ ID NO: 681210 - RNA, 19 nt, Artificial Sequence
  Description of Artificial Sequence: Synthetic oligonucleotide
gaaucuuguugauggcuuc

SEQ ID NO: 681211 - RNA, 19 nt, Artificial Sequence
  Description of Artificial Sequence: Synthetic oligonucleotide
uguaccccggucuuccgga

SEQ ID NO: 681212 - RNA, 19 nt, Artificial Sequence
  Description of Artificial Sequence: Synthetic oligonucleotide
aaguugagagcgagaugcg

SEQ ID NO: 681213 - RNA, 19 nt, Artificial Sequence
  Description of Artificial Sequence: Synthetic oligonucleotide
gugagagauacagcaaagc

SEQ ID NO: 681214 - RNA, 19 nt, Artificial Sequence
  Description of Artificial Sequence: Synthetic oligonucleotide
agacccgcuaacgucauug

SEQ ID NO: 681215 - RNA, 19 nt, Artificial Sequence
  Description of Artificial Sequence: Synthetic oligonucleotide
aaaagcucuugggaggcaa

SEQ ID NO: 681216 - RNA, 19 nt, Artificial Sequence
  Description of Artificial Sequence: Synthetic oligonucleotide
acgacaaccuagaagggca

SEQ ID NO: 681217 - RNA, 19 nt, Artificial Sequence
  Description of Artificial Sequence: Synthetic oligonucleotide
guggacuguauuuuaucca

SEQ ID NO: 681218 - RNA, 19 nt, Artificial Sequence
  Description of Artificial Sequence: Synthetic oligonucleotide
ggugcacuuaauucuggcc

SEQ ID NO: 681219 - RNA, 19 nt, Artificial Sequence
  Description of Artificial Sequence: Synthetic oligonucleotide
aaacuaauuggugcacuua

SEQ ID NO: 681220 - RNA, 19 nt, Artificial Sequence
  Description of Artificial Sequence: Synthetic oligonucleotide
ucggacaacuuugucaaau

SEQ ID NO: 681221 - RNA, 19 nt, Artificial Sequence
  Description of Artificial Sequence: Synthetic oligonucleotide
gacccgcuaacgucauugg

SEQ ID NO: 681222 - RNA, 19 nt, Artificial Sequence
  Description of Artificial Sequence: Synthetic oligonucleotide
cagccaaugcaugcaaucc

SEQ ID NO: 681223 - RNA, 19 nt, Artificial Sequence
  Description of Artificial Sequence: Synthetic oligonucleotide
aaugcgcccgcagaugggu

SEQ ID NO: 681224 - RNA, 19 nt, Artificial Sequence
  Description of Artificial Sequence: Synthetic oligonucleotide
uagggacucagcccagugu

SEQ ID NO: 681225 - RNA, 19 nt, Artificial Sequence
  Description of Artificial Sequence: Synthetic oligonucleotide
caagcgagauccugaugag

SEQ ID NO: 681226 - RNA, 19 nt, Artificial Sequence
  Description of Artificial Sequence: Synthetic oligonucleotide
guugcagcgucaucucccc

SEQ ID NO: 681227 - RNA, 19 nt, Artificial Sequence
  Description of Artificial Sequence: Synthetic oligonucleotide
gcuaacgucauuggaaaug

SEQ ID NO: 681228 - RNA, 19 nt, Artificial Sequence
  Description of Artificial Sequence: Synthetic oligonucleotide
gauggggucagcagccagc

SEQ ID NO: 681229 - RNA, 19 nt, Artificial Sequence
  Description of Artificial Sequence: Synthetic oligonucleotide
ggagggacggacgacaacc

SEQ ID NO: 681230 - RNA, 19 nt, Artificial Sequence
  Description of Artificial Sequence: Synthetic oligonucleotide
caggcuaggggagagcgag

SEQ ID NO: 681231 - RNA, 19 nt, Artificial Sequence
  Description of Artificial Sequence: Synthetic oligonucleotide
uaguuagacccgcuccgac

SEQ ID NO: 681232 - RNA, 19 nt, Artificial Sequence
  Description of Artificial Sequence: Synthetic oligonucleotide
uccaccuacuagagugagc

SEQ ID NO: 681233 - RNA, 19 nt, Artificial Sequence
  Description of Artificial Sequence: Synthetic oligonucleotide
ucaccacggaagguaauca

SEQ ID NO: 681234 - RNA, 19 nt, Artificial Sequence
  Description of Artificial Sequence: Synthetic oligonucleotide
augcugacuccaacguucc

SEQ ID NO: 681235 - RNA, 19 nt, Artificial Sequence
  Description of Artificial Sequence: Synthetic oligonucleotide
uggguuguuuucccaguaa

SEQ ID NO: 681236 - RNA, 19 nt, Artificial Sequence
  Description of Artificial Sequence: Synthetic oligonucleotide
ucaaagucggcgucaugua

SEQ ID NO: 681237 - RNA, 19 nt, Artificial Sequence
  Description of Artificial Sequence: Synthetic oligonucleotide
aguuguggcccuaggaugu

SEQ ID NO: 681238 - RNA, 19 nt, Artificial Sequence
  Description of Artificial Sequence: Synthetic oligonucleotide
uccaguuggggaccuugcu

SEQ ID NO: 681239 - RNA, 19 nt, Artificial Sequence
  Description of Artificial Sequence: Synthetic oligonucleotide
ugccgguugauggguaccg

SEQ ID NO: 681240 - RNA, 19 nt, Artificial Sequence
  Description of Artificial Sequence: Synthetic oligonucleotide
guacucccaccuuggagag

SEQ ID NO: 681241 - RNA, 19 nt, Artificial Sequence
  Description of Artificial Sequence: Synthetic oligonucleotide
ggaaguacucccaccuugg

SEQ ID NO: 681242 - RNA, 19 nt, Artificial Sequence
  Description of Artificial Sequence: Synthetic oligonucleotide
gggaaguacucccaccuug

SEQ ID NO: 681243 - RNA, 19 nt, Artificial Sequence
  Description of Artificial Sequence: Synthetic oligonucleotide
cacgcgaaacaguuccuug

SEQ ID NO: 681244 - RNA, 19 nt, Artificial Sequence
  Description of Artificial Sequence: Synthetic oligonucleotide
caguggacuguauuuuauc

SEQ ID NO: 681245 - RNA, 19 nt, Artificial Sequence
  Description of Artificial Sequence: Synthetic oligonucleotide
agacacuggggcugcaagu

SEQ ID NO: 681246 - RNA, 19 nt, Artificial Sequence
  Description of Artificial Sequence: Synthetic oligonucleotide
gaugccgguugauggguac

SEQ ID NO: 681247 - RNA, 19 nt, Artificial Sequence
  Description of Artificial Sequence: Synthetic oligonucleotide
cuagagugagcugagcaga

SEQ ID NO: 681248 - RNA, 19 nt, Artificial Sequence
  Description of Artificial Sequence: Synthetic oligonucleotide
ugcucgguacccugggaga

SEQ ID NO: 681249 - RNA, 19 nt, Artificial Sequence
  Description of Artificial Sequence: Synthetic oligonucleotide
uccgaccaucccuaucacc

SEQ ID NO: 681250 - RNA, 19 nt, Artificial Sequence
  Description of Artificial Sequence: Synthetic oligonucleotide
ggagagucggacaacuuug

SEQ ID NO: 681251 - RNA, 19 nt, Artificial Sequence
  Description of Artificial Sequence: Synthetic oligonucleotide
cacguggaaguaguuagac

SEQ ID NO: 681252 - RNA, 19 nt, Artificial Sequence
  Description of Artificial Sequence: Synthetic oligonucleotide
auccaguuaagaguccacu

SEQ ID NO: 681253 - RNA, 19 nt, Artificial Sequence
  Description of Artificial Sequence: Synthetic oligonucleotide
gagggcgcaagagacugcc

SEQ ID NO: 681254 - RNA, 19 nt, Artificial Sequence
  Description of Artificial Sequence: Synthetic oligonucleotide
ucgagguccccguuuucca

SEQ ID NO: 681255 - RNA, 19 nt, Artificial Sequence
  Description of Artificial Sequence: Synthetic oligonucleotide
ugguuguuagugguccuga

SEQ ID NO: 681256 - RNA, 19 nt, Artificial Sequence
  Description of Artificial Sequence: Synthetic oligonucleotide
gggcgcaagagacugccgg

SEQ ID NO: 681257 - RNA, 19 nt, Artificial Sequence
  Description of Artificial Sequence: Synthetic oligonucleotide
ucgagaauacaagguguaa

SEQ ID NO: 681258 - RNA, 19 nt, Artificial Sequence
  Description of Artificial Sequence: Synthetic oligonucleotide
cacuuaauucuggccacag

SEQ ID NO: 681259 - RNA, 19 nt, Artificial Sequence
  Description of Artificial Sequence: Synthetic oligonucleotide
gguacccugggagagucgg

SEQ ID NO: 681260 - RNA, 19 nt, Artificial Sequence
  Description of Artificial Sequence: Synthetic oligonucleotide
gacuugcucgguacccugg

SEQ ID NO: 681261 - RNA, 19 nt, Artificial Sequence
  Description of Artificial Sequence: Synthetic oligonucleotide
agggacguaggugugagua

SEQ ID NO: 681262 - RNA, 19 nt, Artificial Sequence
  Description of Artificial Sequence: Synthetic oligonucleotide
ggugugaguaauggugccg

SEQ ID NO: 681263 - RNA, 19 nt, Artificial Sequence
  Description of Artificial Sequence: Synthetic oligonucleotide
ugugaguaauggugccggu

SEQ ID NO: 681264 - RNA, 19 nt, Artificial Sequence
  Description of Artificial Sequence: Synthetic oligonucleotide
gaggguuaugggaaaggga

SEQ ID NO: 681265 - RNA, 19 nt, Artificial Sequence
  Description of Artificial Sequence: Synthetic oligonucleotide
uuccggaaugcgcccgcag

SEQ ID NO: 681266 - RNA, 19 nt, Artificial Sequence
  Description of Artificial Sequence: Synthetic oligonucleotide
agcuaagugagcagagaga

SEQ ID NO: 681267 - RNA, 19 nt, Artificial Sequence
  Description of Artificial Sequence: Synthetic oligonucleotide
aucgggaggauuacaagau

SEQ ID NO: 681268 - RNA, 19 nt, Artificial Sequence
  Description of Artificial Sequence: Synthetic oligonucleotide
augccgguugauggguacc

SEQ ID NO: 681269 - RNA, 19 nt, Artificial Sequence
  Description of Artificial Sequence: Synthetic oligonucleotide
agaggcaaagaaggggagu

SEQ ID NO: 681270 - RNA, 19 nt, Artificial Sequence
  Description of Artificial Sequence: Synthetic oligonucleotide
cuagggacucagcccagug

SEQ ID NO: 681271 - RNA, 19 nt, Artificial Sequence
  Description of Artificial Sequence: Synthetic oligonucleotide
gguccugaacccaauaguc

SEQ ID NO: 681272 - RNA, 19 nt, Artificial Sequence
  Description of Artificial Sequence: Synthetic oligonucleotide
gcuccgaccaucccuauca

SEQ ID NO: 681273 - RNA, 19 nt, Artificial Sequence
  Description of Artificial Sequence: Synthetic oligonucleotide
agauccgaaucuuguugau

SEQ ID NO: 681274 - RNA, 19 nt, Artificial Sequence
  Description of Artificial Sequence: Synthetic oligonucleotide
accccggucuuccggaaug

SEQ ID NO: 681275 - RNA, 19 nt, Artificial Sequence
  Description of Artificial Sequence: Synthetic oligonucleotide
uucccgggcaccacgcgaa

SEQ ID NO: 681276 - RNA, 19 nt, Artificial Sequence
  Description of Artificial Sequence: Synthetic oligonucleotide
ugacugaugcagagugcau

SEQ ID NO: 681277 - RNA, 19 nt, Artificial Sequence
  Description of Artificial Sequence: Synthetic oligonucleotide
agacccgcuccgaccaucc

SEQ ID NO: 681278 - RNA, 19 nt, Artificial Sequence
  Description of Artificial Sequence: Synthetic oligonucleotide
cucgagaauacaaggugua

SEQ ID NO: 681279 - RNA, 19 nt, Artificial Sequence
  Description of Artificial Sequence: Synthetic oligonucleotide
acgucauuggaaaugcauu

SEQ ID NO: 681280 - RNA, 19 nt, Artificial Sequence
  Description of Artificial Sequence: Synthetic oligonucleotide
ccguuuuccaguuggggac

SEQ ID NO: 681281 - RNA, 19 nt, Artificial Sequence
  Description of Artificial Sequence: Synthetic oligonucleotide
gguugcagcgucaucuccc

SEQ ID NO: 681282 - RNA, 19 nt, Artificial Sequence
  Description of Artificial Sequence: Synthetic oligonucleotide
cauguaccccggucuuccg

SEQ ID NO: 681283 - RNA, 19 nt, Artificial Sequence
  Description of Artificial Sequence: Synthetic oligonucleotide
gaaugcgcccgcagauggg

SEQ ID NO: 681284 - RNA, 19 nt, Artificial Sequence
  Description of Artificial Sequence: Synthetic oligonucleotide
gggacggacgacaaccuag

SEQ ID NO: 681285 - RNA, 19 nt, Artificial Sequence
  Description of Artificial Sequence: Synthetic oligonucleotide
guggucuugaaggggacca

SEQ ID NO: 681286 - RNA, 19 nt, Artificial Sequence
  Description of Artificial Sequence: Synthetic oligonucleotide
ucccacgccuggcacacuc

SEQ ID NO: 681287 - RNA, 19 nt, Artificial Sequence
  Description of Artificial Sequence: Synthetic oligonucleotide
agcgaguggggaaguacuc

SEQ ID NO: 681288 - RNA, 19 nt, Artificial Sequence
  Description of Artificial Sequence: Synthetic oligonucleotide
uccaacguucccgggcacc

SEQ ID NO: 681289 - RNA, 19 nt, Artificial Sequence
  Description of Artificial Sequence: Synthetic oligonucleotide
gggcugcaaguugagagcg

SEQ ID NO: 681290 - RNA, 19 nt, Artificial Sequence
  Description of Artificial Sequence: Synthetic oligonucleotide
ccgaccaucccuaucacca

SEQ ID NO: 681291 - RNA, 19 nt, Artificial Sequence
  Description of Artificial Sequence: Synthetic oligonucleotide
gcugaauuaaccaaucaau

SEQ ID NO: 681292 - RNA, 19 nt, Artificial Sequence
  Description of Artificial Sequence: Synthetic oligonucleotide
gggcuaaagugauugugca

SEQ ID NO: 681293 - RNA, 19 nt, Artificial Sequence
  Description of Artificial Sequence: Synthetic oligonucleotide
ugcaggagggaccgacguc

SEQ ID NO: 681294 - RNA, 19 nt, Artificial Sequence
  Description of Artificial Sequence: Synthetic oligonucleotide
acuaauuggugcacuuaau

SEQ ID NO: 681295 - RNA, 19 nt, Artificial Sequence
  Description of Artificial Sequence: Synthetic oligonucleotide
cuuugucaaauagaugcua

SEQ ID NO: 681296 - RNA, 19 nt, Artificial Sequence
  Description of Artificial Sequence: Synthetic oligonucleotide
gggaccgacguccaccuac

SEQ ID NO: 681297 - RNA, 19 nt, Artificial Sequence
  Description of Artificial Sequence: Synthetic oligonucleotide
ccugagacuugcucgguac

SEQ ID NO: 681298 - RNA, 19 nt, Artificial Sequence
  Description of Artificial Sequence: Synthetic oligonucleotide
caauuccccuugcugucug

SEQ ID NO: 681299 - RNA, 19 nt, Artificial Sequence
  Description of Artificial Sequence: Synthetic oligonucleotide
cgagaauacaagguguaag

SEQ ID NO: 681300 - RNA, 19 nt, Artificial Sequence
  Description of Artificial Sequence: Synthetic oligonucleotide
agugguccugaacccaaua

SEQ ID NO: 681301 - RNA, 19 nt, Artificial Sequence
  Description of Artificial Sequence: Synthetic oligonucleotide
uggucgagguccccguuuu

SEQ ID NO: 681302 - RNA, 19 nt, Artificial Sequence
  Description of Artificial Sequence: Synthetic oligonucleotide
acccgcuaacgucauugga

SEQ ID NO: 681303 - RNA, 19 nt, Artificial Sequence
  Description of Artificial Sequence: Synthetic oligonucleotide
ugacggagaggaugccggu

SEQ ID NO: 681304 - RNA, 19 nt, Artificial Sequence
  Description of Artificial Sequence: Synthetic oligonucleotide
uaacagguugcagcgucau

SEQ ID NO: 681305 - RNA, 19 nt, Artificial Sequence
  Description of Artificial Sequence: Synthetic oligonucleotide
acaguggacuguauuuuau

SEQ ID NO: 681306 - RNA, 19 nt, Artificial Sequence
  Description of Artificial Sequence: Synthetic oligonucleotide
uacagcaaagcgggacgcu

SEQ ID NO: 681307 - RNA, 19 nt, Artificial Sequence
  Description of Artificial Sequence: Synthetic oligonucleotide
agggcaagcgagauccuga

SEQ ID NO: 681308 - RNA, 19 nt, Artificial Sequence
  Description of Artificial Sequence: Synthetic oligonucleotide
aggacgccaggaagguggc

SEQ ID NO: 681309 - RNA, 19 nt, Artificial Sequence
  Description of Artificial Sequence: Synthetic oligonucleotide
guccaccuacuagagugag

SEQ ID NO: 681310 - RNA, 19 nt, Artificial Sequence
  Description of Artificial Sequence: Synthetic oligonucleotide
acguucccgggcaccacgc

SEQ ID NO: 681311 - RNA, 19 nt, Artificial Sequence
  Description of Artificial Sequence: Synthetic oligonucleotide
agagauugugagagauaca

SEQ ID NO: 681312 - RNA, 19 nt, Artificial Sequence
  Description of Artificial Sequence: Synthetic oligonucleotide
agcgggacgcuggucgagg

SEQ ID NO: 681313 - RNA, 19 nt, Artificial Sequence
  Description of Artificial Sequence: Synthetic oligonucleotide
aggaugccgguugaugggu

SEQ ID NO: 681314 - RNA, 19 nt, Artificial Sequence
  Description of Artificial Sequence: Synthetic oligonucleotide
gaggaaggcagacccgcua

SEQ ID NO: 681315 - RNA, 19 nt, Artificial Sequence
  Description of Artificial Sequence: Synthetic oligonucleotide
gcaaguugagagcgagaug

SEQ ID NO: 681316 - RNA, 19 nt, Artificial Sequence
  Description of Artificial Sequence: Synthetic oligonucleotide
gcuaagugagcagagagau

SEQ ID NO: 681317 - RNA, 19 nt, Artificial Sequence
  Description of Artificial Sequence: Synthetic oligonucleotide
cugaugcagagugcauuug

SEQ ID NO: 681318 - RNA, 19 nt, Artificial Sequence
  Description of Artificial Sequence: Synthetic oligonucleotide
cacaguggacuguauuuua

SEQ ID NO: 681319 - RNA, 19 nt, Artificial Sequence
  Description of Artificial Sequence: Synthetic oligonucleotide
ccgacguccaccuacuaga

SEQ ID NO: 681320 - RNA, 19 nt, Artificial Sequence
  Description of Artificial Sequence: Synthetic oligonucleotide
guaguuagacccgcuccga

SEQ ID NO: 681321 - RNA, 19 nt, Artificial Sequence
  Description of Artificial Sequence: Synthetic oligonucleotide
ggcacugaucacccacugc

SEQ ID NO: 681322 - RNA, 19 nt, Artificial Sequence
  Description of Artificial Sequence: Synthetic oligonucleotide
uagugguccugaacccaau

SEQ ID NO: 681323 - RNA, 19 nt, Artificial Sequence
  Description of Artificial Sequence: Synthetic oligonucleotide
aagcgggacgcuggucgag

SEQ ID NO: 681324 - RNA, 19 nt, Artificial Sequence
  Description of Artificial Sequence: Synthetic oligonucleotide
cacggaagguaaucacaca

SEQ ID NO: 681325 - RNA, 19 nt, Artificial Sequence
  Description of Artificial Sequence: Synthetic oligonucleotide
auacaagguguaagugggu

SEQ ID NO: 681326 - RNA, 19 nt, Artificial Sequence
  Description of Artificial Sequence: Synthetic oligonucleotide
gaugcgguguguccauccu

SEQ ID NO: 681327 - RNA, 19 nt, Artificial Sequence
  Description of Artificial Sequence: Synthetic oligonucleotide
caucccuaucaccacggaa

SEQ ID NO: 681328 - RNA, 19 nt, Artificial Sequence
  Description of Artificial Sequence: Synthetic oligonucleotide
gcaagucuacagagggagg

SEQ ID NO: 681329 - RNA, 19 nt, Artificial Sequence
  Description of Artificial Sequence: Synthetic oligonucleotide
guucccgggcaccacgcga

SEQ ID NO: 681330 - RNA, 19 nt, Artificial Sequence
  Description of Artificial Sequence: Synthetic oligonucleotide
gugcaggagggacggacga

SEQ ID NO: 681331 - RNA, 19 nt, Artificial Sequence
  Description of Artificial Sequence: Synthetic oligonucleotide
aggcgaaucgggaggauua

SEQ ID NO: 681332 - RNA, 19 nt, Artificial Sequence
  Description of Artificial Sequence: Synthetic oligonucleotide
ccgguugauggguaccgcc

SEQ ID NO: 681333 - RNA, 19 nt, Artificial Sequence
  Description of Artificial Sequence: Synthetic oligonucleotide
cagcucgagaauacaaggu

SEQ ID NO: 681334 - RNA, 19 nt, Artificial Sequence
  Description of Artificial Sequence: Synthetic oligonucleotide
ggacgacaaccuagaaggg

SEQ ID NO: 681335 - RNA, 19 nt, Artificial Sequence
  Description of Artificial Sequence: Synthetic oligonucleotide
augucccuauugagacccc

SEQ ID NO: 681336 - RNA, 19 nt, Artificial Sequence
  Description of Artificial Sequence: Synthetic oligonucleotide
uaccaaaaugagggcgcaa

SEQ ID NO: 681337 - RNA, 19 nt, Artificial Sequence
  Description of Artificial Sequence: Synthetic oligonucleotide
caccuacuagagugagcug

SEQ ID NO: 681338 - RNA, 19 nt, Artificial Sequence
  Description of Artificial Sequence: Synthetic oligonucleotide
ggugcaggagggaccgacg

SEQ ID NO: 681339 - RNA, 19 nt, Artificial Sequence
  Description of Artificial Sequence: Synthetic oligonucleotide
cccguuuuccaguugggga

SEQ ID NO: 681340 - RNA, 19 nt, Artificial Sequence
  Description of Artificial Sequence: Synthetic oligonucleotide
ggcaagccugggaacaccc

SEQ ID NO: 681341 - RNA, 19 nt, Artificial Sequence
  Description of Artificial Sequence: Synthetic oligonucleotide
uuagacccgcuccgaccau

SEQ ID NO: 681342 - RNA, 19 nt, Artificial Sequence
  Description of Artificial Sequence: Synthetic oligonucleotide
ggcagacccgcuaacguca

SEQ ID NO: 681343 - RNA, 19 nt, Artificial Sequence
  Description of Artificial Sequence: Synthetic oligonucleotide
ccggucuuccggaaugcgc

SEQ ID NO: 681344 - RNA, 19 nt, Artificial Sequence
  Description of Artificial Sequence: Synthetic oligonucleotide
ccaaugcaugcaauccuuc

SEQ ID NO: 681345 - RNA, 19 nt, Artificial Sequence
  Description of Artificial Sequence: Synthetic oligonucleotide
ggaccaugcugacuccaac

SEQ ID NO: 681346 - RNA, 19 nt, Artificial Sequence
  Description of Artificial Sequence: Synthetic oligonucleotide
cccgcuaacgucauuggaa

SEQ ID NO: 681347 - RNA, 19 nt, Artificial Sequence
  Description of Artificial Sequence: Synthetic oligonucleotide
gagcgaguggggaaguacu

SEQ ID NO: 681348 - RNA, 19 nt, Artificial Sequence
  Description of Artificial Sequence: Synthetic oligonucleotide
ugccggcaagccugggaac

SEQ ID NO: 681349 - RNA, 19 nt, Artificial Sequence
  Description of Artificial Sequence: Synthetic oligonucleotide
gacugaugcagagugcauu

SEQ ID NO: 681350 - RNA, 19 nt, Artificial Sequence
  Description of Artificial Sequence: Synthetic oligonucleotide
aggcacguggaaguaguua

SEQ ID NO: 681351 - RNA, 19 nt, Artificial Sequence
  Description of Artificial Sequence: Synthetic oligonucleotide
cuccgaccaucccuaucac

SEQ ID NO: 681352 - RNA, 19 nt, Artificial Sequence
  Description of Artificial Sequence: Synthetic oligonucleotide
agggacggacgacaaccua

SEQ ID NO: 681353 - RNA, 19 nt, Artificial Sequence
  Description of Artificial Sequence: Synthetic oligonucleotide
uaccccggucuuccggaau

SEQ ID NO: 681354 - RNA, 19 nt, Artificial Sequence
  Description of Artificial Sequence: Synthetic oligonucleotide
gcgaguggggaaguacucc

SEQ ID NO: 681355 - RNA, 19 nt, Artificial Sequence
  Description of Artificial Sequence: Synthetic oligonucleotide
gugggugacgcugggccac

SEQ ID NO: 681356 - RNA, 19 nt, Artificial Sequence
  Description of Artificial Sequence: Synthetic oligonucleotide
gagagucggacaacuuugu

SEQ ID NO: 681357 - RNA, 19 nt, Artificial Sequence
  Description of Artificial Sequence: Synthetic oligonucleotide
cugccccgaagccauacaa

SEQ ID NO: 681358 - RNA, 19 nt, Artificial Sequence
  Description of Artificial Sequence: Synthetic oligonucleotide
gugaguaauggugccggua

SEQ ID NO: 681359 - RNA, 19 nt, Artificial Sequence
  Description of Artificial Sequence: Synthetic oligonucleotide
agacugccggcaagccugg

SEQ ID NO: 681360 - RNA, 19 nt, Artificial Sequence
  Description of Artificial Sequence: Synthetic oligonucleotide
ggacucagcccaguguuca

SEQ ID NO: 681361 - RNA, 19 nt, Artificial Sequence
  Description of Artificial Sequence: Synthetic oligonucleotide
agguccccguuuuccaguu

SEQ ID NO: 681362 - RNA, 19 nt, Artificial Sequence
  Description of Artificial Sequence: Synthetic oligonucleotide
gagacuugcucgguacccu

SEQ ID NO: 681363 - RNA, 19 nt, Artificial Sequence
  Description of Artificial Sequence: Synthetic oligonucleotide
cuugcucgguacccuggga

SEQ ID NO: 681364 - RNA, 19 nt, Artificial Sequence
  Description of Artificial Sequence: Synthetic oligonucleotide
ggcaagcgagauccugaug

SEQ ID NO: 681365 - RNA, 19 nt, Artificial Sequence
  Description of Artificial Sequence: Synthetic oligonucleotide
gucauguaccccggucuuc

SEQ ID NO: 681366 - RNA, 19 nt, Artificial Sequence
  Description of Artificial Sequence: Synthetic oligonucleotide
acccgucccacgccuggca

SEQ ID NO: 681367 - RNA, 19 nt, Artificial Sequence
  Description of Artificial Sequence: Synthetic oligonucleotide
uggcccuaggaugucccua

SEQ ID NO: 681368 - RNA, 19 nt, Artificial Sequence
  Description of Artificial Sequence: Synthetic oligonucleotide
aaggcacguggaaguaguu

SEQ ID NO: 681369 - RNA, 19 nt, Artificial Sequence
  Description of Artificial Sequence: Synthetic oligonucleotide
ccaccuacuagagugagcu

SEQ ID NO: 681370 - RNA, 19 nt, Artificial Sequence
  Description of Artificial Sequence: Synthetic oligonucleotide
gacguccaccuacuagagu

SEQ ID NO: 681371 - RNA, 19 nt, Artificial Sequence
  Description of Artificial Sequence: Synthetic oligonucleotide
gguuguuagugguccugaa

SEQ ID NO: 681372 - RNA, 19 nt, Artificial Sequence
  Description of Artificial Sequence: Synthetic oligonucleotide
gacccgcuccgaccauccc

SEQ ID NO: 681373 - RNA, 19 nt, Artificial Sequence
  Description of Artificial Sequence: Synthetic oligonucleotide
cgcagauggguuguuuucc

SEQ ID NO: 681374 - RNA, 19 nt, Artificial Sequence
  Description of Artificial Sequence: Synthetic oligonucleotide
ggguuguuuucccaguaau

SEQ ID NO: 681375 - RNA, 19 nt, Artificial Sequence
  Description of Artificial Sequence: Synthetic oligonucleotide
gcacccgucccacgccugg

SEQ ID NO: 681376 - RNA, 19 nt, Artificial Sequence
  Description of Artificial Sequence: Synthetic oligonucleotide
cgaaucgggaggauuacaa

SEQ ID NO: 681377 - RNA, 19 nt, Artificial Sequence
  Description of Artificial Sequence: Synthetic oligonucleotide
agggcgcaagagacugccg

SEQ ID NO: 681378 - RNA, 19 nt, Artificial Sequence
  Description of Artificial Sequence: Synthetic oligonucleotide
gcucgagaauacaaggugu

SEQ ID NO: 681379 - RNA, 19 nt, Artificial Sequence
  Description of Artificial Sequence: Synthetic oligonucleotide
gugcaggagggaccgacgu

SEQ ID NO: 681380 - RNA, 19 nt, Artificial Sequence
  Description of Artificial Sequence: Synthetic oligonucleotide
gcauucaggcgaaucggga

SEQ ID NO: 681381 - RNA, 19 nt, Artificial Sequence
  Description of Artificial Sequence: Synthetic oligonucleotide
cagccccggaagcuuccag

SEQ ID NO: 681382 - RNA, 19 nt, Artificial Sequence
  Description of Artificial Sequence: Synthetic oligonucleotide
ccgcuaacgucauuggaaa

SEQ ID NO: 681383 - RNA, 19 nt, Artificial Sequence
  Description of Artificial Sequence: Synthetic oligonucleotide
cacgccuggcacacucuga

SEQ ID NO: 681384 - RNA, 19 nt, Artificial Sequence
  Description of Artificial Sequence: Synthetic oligonucleotide
ccgcagauggguuguuuuc

SEQ ID NO: 681385 - RNA, 19 nt, Artificial Sequence
  Description of Artificial Sequence: Synthetic oligonucleotide
accacgcgaaacaguuccu

SEQ ID NO: 681386 - RNA, 19 nt, Artificial Sequence
  Description of Artificial Sequence: Synthetic oligonucleotide
ccccgaagccauacaaguc

SEQ ID NO: 681387 - RNA, 19 nt, Artificial Sequence
  Description of Artificial Sequence: Synthetic oligonucleotide
cuccaacguucccgggcac

SEQ ID NO: 681388 - RNA, 19 nt, Artificial Sequence
  Description of Artificial Sequence: Synthetic oligonucleotide
ugggugacgcugggccaca

SEQ ID NO: 681389 - RNA, 19 nt, Artificial Sequence
  Description of Artificial Sequence: Synthetic oligonucleotide
guuguggcccuaggauguc

SEQ ID NO: 681390 - RNA, 19 nt, Artificial Sequence
  Description of Artificial Sequence: Synthetic oligonucleotide
gggugcaggagggaccgac

SEQ ID NO: 681391 - RNA, 19 nt, Artificial Sequence
  Description of Artificial Sequence: Synthetic oligonucleotide
ucccgggcaccacgcgaaa

SEQ ID NO: 681392 - RNA, 19 nt, Artificial Sequence
  Description of Artificial Sequence: Synthetic oligonucleotide
gagggacggacgacaaccu

SEQ ID NO: 681393 - RNA, 19 nt, Artificial Sequence
  Description of Artificial Sequence: Synthetic oligonucleotide
ggcgaaucgggaggauuac

SEQ ID NO: 681394 - RNA, 19 nt, Artificial Sequence
  Description of Artificial Sequence: Synthetic oligonucleotide
ccauccuuaacagguugca

SEQ ID NO: 681395 - RNA, 19 nt, Artificial Sequence
  Description of Artificial Sequence: Synthetic oligonucleotide
ggguuaugggaaagggaaa

SEQ ID NO: 681396 - RNA, 19 nt, Artificial Sequence
  Description of Artificial Sequence: Synthetic oligonucleotide
caacguucccgggcaccac

SEQ ID NO: 681397 - RNA, 19 nt, Artificial Sequence
  Description of Artificial Sequence: Synthetic oligonucleotide
ggcaccacgcgaaacaguu

SEQ ID NO: 681398 - RNA, 19 nt, Artificial Sequence
  Description of Artificial Sequence: Synthetic oligonucleotide
gguaccgcccauggcccug

SEQ ID NO: 681399 - RNA, 19 nt, Artificial Sequence
  Description of Artificial Sequence: Synthetic oligonucleotide
gccccggaagcuuccagaa

SEQ ID NO: 681400 - RNA, 19 nt, Artificial Sequence
  Description of Artificial Sequence: Synthetic oligonucleotide
gccggcaagccugggaaca

SEQ ID NO: 681401 - RNA, 19 nt, Artificial Sequence
  Description of Artificial Sequence: Synthetic oligonucleotide
cacccgucccacgccuggc

SEQ ID NO: 681402 - RNA, 19 nt, Artificial Sequence
  Description of Artificial Sequence: Synthetic oligonucleotide
ggacguaggugugaguaau

SEQ ID NO: 681403 - RNA, 19 nt, Artificial Sequence
  Description of Artificial Sequence: Synthetic oligonucleotide
gggcagcucgagaauacaa

SEQ ID NO: 681404 - RNA, 19 nt, Artificial Sequence
  Description of Artificial Sequence: Synthetic oligonucleotide
guaccccggucuuccggaa

SEQ ID NO: 681405 - RNA, 19 nt, Artificial Sequence
  Description of Artificial Sequence: Synthetic oligonucleotide
gcacguggaaguaguuaga

SEQ ID NO: 681406 - RNA, 19 nt, Artificial Sequence
  Description of Artificial Sequence: Synthetic oligonucleotide
ccgggcaccacgcgaaaca

SEQ ID NO: 681407 - RNA, 19 nt, Artificial Sequence
  Description of Artificial Sequence: Synthetic oligonucleotide
guacccugggagagucgga

SEQ ID NO: 681408 - RNA, 19 nt, Artificial Sequence
  Description of Artificial Sequence: Synthetic oligonucleotide
ggugccgguagugguggca

SEQ ID NO: 681409 - RNA, 19 nt, Artificial Sequence
  Description of Artificial Sequence: Synthetic oligonucleotide
agcacccgucccacgccug

SEQ ID NO: 681410 - RNA, 19 nt, Artificial Sequence
  Description of Artificial Sequence: Synthetic oligonucleotide
gaccgacguccaccuacua

SEQ ID NO: 681411 - RNA, 19 nt, Artificial Sequence
  Description of Artificial Sequence: Synthetic oligonucleotide
gcgaaucgggaggauuaca

SEQ ID NO: 681412 - RNA, 19 nt, Artificial Sequence
  Description of Artificial Sequence: Synthetic oligonucleotide
cuuuucaguuguggcccua

SEQ ID NO: 681413 - RNA, 19 nt, Artificial Sequence
  Description of Artificial Sequence: Synthetic oligonucleotide
cacuuugauucagaucauu

SEQ ID NO: 681414 - RNA, 19 nt, Artificial Sequence
  Description of Artificial Sequence: Synthetic oligonucleotide
aggcuaggggagagcgagu

SEQ ID NO: 681415 - RNA, 19 nt, Artificial Sequence
  Description of Artificial Sequence: Synthetic oligonucleotide
ggucgagguccccguuuuc

SEQ ID NO: 681416 - RNA, 19 nt, Artificial Sequence
  Description of Artificial Sequence: Synthetic oligonucleotide
cgguguguccauccuuaac

SEQ ID NO: 681417 - RNA, 19 nt, Artificial Sequence
  Description of Artificial Sequence: Synthetic oligonucleotide
ggcccuaggaugucccuau

SEQ ID NO: 681418 - RNA, 19 nt, Artificial Sequence
  Description of Artificial Sequence: Synthetic oligonucleotide
cccggucuuccggaaugcg

SEQ ID NO: 681419 - RNA, 19 nt, Artificial Sequence
  Description of Artificial Sequence: Synthetic oligonucleotide
gacggagaggaugccgguu

SEQ ID NO: 681420 - RNA, 19 nt, Artificial Sequence
  Description of Artificial Sequence: Synthetic oligonucleotide
gcgagauccugaugaggcu

SEQ ID NO: 681421 - RNA, 19 nt, Artificial Sequence
  Description of Artificial Sequence: Synthetic oligonucleotide
guaccgcccauggcccuga

SEQ ID NO: 681422 - RNA, 19 nt, Artificial Sequence
  Description of Artificial Sequence: Synthetic oligonucleotide
ccugggagagucggacaac

SEQ ID NO: 681423 - RNA, 19 nt, Artificial Sequence
  Description of Artificial Sequence: Synthetic oligonucleotide
uaccgcccauggcccugaa

SEQ ID NO: 681424 - RNA, 19 nt, Artificial Sequence
  Description of Artificial Sequence: Synthetic oligonucleotide
ccgaaucuuguugauggcu

SEQ ID NO: 681425 - RNA, 19 nt, Artificial Sequence
  Description of Artificial Sequence: Synthetic oligonucleotide
gcccagucuuguugggaaa

SEQ ID NO: 681426 - RNA, 19 nt, Artificial Sequence
  Description of Artificial Sequence: Synthetic oligonucleotide
gggcaagcgagauccugau

SEQ ID NO: 681427 - RNA, 19 nt, Artificial Sequence
  Description of Artificial Sequence: Synthetic oligonucleotide
cccgucccacgccuggcac

SEQ ID NO: 681428 - RNA, 19 nt, Artificial Sequence
  Description of Artificial Sequence: Synthetic oligonucleotide
cguccaccuacuagaguga

SEQ ID NO: 681429 - RNA, 19 nt, Artificial Sequence
  Description of Artificial Sequence: Synthetic oligonucleotide
cuggucgagguccccguuu

SEQ ID NO: 681430 - RNA, 19 nt, Artificial Sequence
  Description of Artificial Sequence: Synthetic oligonucleotide
cguucccgggcaccacgcg

SEQ ID NO: 681431 - RNA, 19 nt, Artificial Sequence
  Description of Artificial Sequence: Synthetic oligonucleotide
cgggcaccacgcgaaacag

SEQ ID NO: 681432 - RNA, 19 nt, Artificial Sequence
  Description of Artificial Sequence: Synthetic oligonucleotide
ccggcaagccugggaacac

SEQ ID NO: 681433 - RNA, 19 nt, Artificial Sequence
  Description of Artificial Sequence: Synthetic oligonucleotide
cggaaugcgcccgcagaug

SEQ ID NO: 681434 - RNA, 19 nt, Artificial Sequence
  Description of Artificial Sequence: Synthetic oligonucleotide
ggaccgacguccaccuacu

SEQ ID NO: 681435 - RNA, 19 nt, Artificial Sequence
  Description of Artificial Sequence: Synthetic oligonucleotide
cucgguacccugggagagu

SEQ ID NO: 681436 - RNA, 19 nt, Artificial Sequence
  Description of Artificial Sequence: Synthetic oligonucleotide
cgguacccugggagagucg

SEQ ID NO: 681437 - RNA, 19 nt, Artificial Sequence
  Description of Artificial Sequence: Synthetic oligonucleotide
augcgcccgcagauggguu

SEQ ID NO: 681438 - RNA, 19 nt, Artificial Sequence
  Description of Artificial Sequence: Synthetic oligonucleotide
cagggacguaggugugagu

SEQ ID NO: 681439 - RNA, 19 nt, Artificial Sequence
  Description of Artificial Sequence: Synthetic oligonucleotide
ggaugccgguugaugggua

SEQ ID NO: 681440 - RNA, 19 nt, Artificial Sequence
  Description of Artificial Sequence: Synthetic oligonucleotide
ccgucccacgccuggcaca

SEQ ID NO: 681441 - RNA, 19 nt, Artificial Sequence
  Description of Artificial Sequence: Synthetic oligonucleotide
cccgggcaccacgcgaaac

SEQ ID NO: 681442 - RNA, 19 nt, Artificial Sequence
  Description of Artificial Sequence: Synthetic oligonucleotide
cccgcagauggguuguuuu

SEQ ID NO: 681443 - RNA, 19 nt, Artificial Sequence
  Description of Artificial Sequence: Synthetic oligonucleotide
ccggaaugcgcccgcagau

SEQ ID NO: 681444 - RNA, 19 nt, Artificial Sequence
  Description of Artificial Sequence: Synthetic oligonucleotide
gcuagggacucagcccagu

SEQ ID NO: 681445 - RNA, 19 nt, Artificial Sequence
  Description of Artificial Sequence: Synthetic oligonucleotide
ccaauuccccuugcugucu

SEQ ID NO: 681446 - RNA, 19 nt, Artificial Sequence
  Description of Artificial Sequence: Synthetic oligonucleotide
cgcuccgaccaucccuauc

SEQ ID NO: 681447 - RNA, 19 nt, Artificial Sequence
  Description of Artificial Sequence: Synthetic oligonucleotide
ggguaccgcccauggcccu

SEQ ID NO: 681448 - RNA, 19 nt, Artificial Sequence
  Description of Artificial Sequence: Synthetic oligonucleotide
gggcaccacgcgaaacagu

SEQ ID NO: 681449 - RNA, 19 nt, Artificial Sequence
  Description of Artificial Sequence: Synthetic oligonucleotide
gcuggucgagguccccguu

SEQ ID NO: 681450 - RNA, 19 nt, Artificial Sequence
  Description of Artificial Sequence: Synthetic oligonucleotide
cgucauguaccccggucuu

SEQ ID NO: 681451 - RNA, 19 nt, Artificial Sequence
  Description of Artificial Sequence: Synthetic oligonucleotide
cgcuaacgucauuggaaau

SEQ ID NO: 681452 - RNA, 19 nt, Artificial Sequence
  Description of Artificial Sequence: Synthetic oligonucleotide
cagacccgcuaacgucauu

SEQ ID NO: 681453 - RNA, 19 nt, Artificial Sequence
  Description of Artificial Sequence: Synthetic oligonucleotide
gcccgcagauggguuguuu

SEQ ID NO: 681454 - RNA, 19 nt, Artificial Sequence
  Description of Artificial Sequence: Synthetic oligonucleotide
cgcccgcagauggguuguu

SEQ ID NO: 681455 - RNA, 19 nt, Artificial Sequence
  Description of Artificial Sequence: Synthetic oligonucleotide
aaauugaacuuguugaggg

SEQ ID NO: 681456 - RNA, 19 nt, Artificial Sequence
  Description of Artificial Sequence: Synthetic oligonucleotide
aaaaguaguucucuggcug

SEQ ID NO: 681457 - RNA, 19 nt, Artificial Sequence
  Description of Artificial Sequence: Synthetic oligonucleotide
aauugaaugagauuaucaa

SEQ ID NO: 681458 - RNA, 19 nt, Artificial Sequence
  Description of Artificial Sequence: Synthetic oligonucleotide
agaaggguaauacugacug

SEQ ID NO: 681459 - RNA, 19 nt, Artificial Sequence
  Description of Artificial Sequence: Synthetic oligonucleotide
aacuuaacgauguuaagau

SEQ ID NO: 681460 - RNA, 19 nt, Artificial Sequence
  Description of Artificial Sequence: Synthetic oligonucleotide
uucacaugauuguugauag

SEQ ID NO: 681461 - RNA, 19 nt, Artificial Sequence
  Description of Artificial Sequence: Synthetic oligonucleotide
aaggguaauacugacuggg

SEQ ID NO: 681462 - RNA, 19 nt, Artificial Sequence
  Description of Artificial Sequence: Synthetic oligonucleotide
uuugaauaaacucccucug

SEQ ID NO: 681463 - RNA, 19 nt, Artificial Sequence
  Description of Artificial Sequence: Synthetic oligonucleotide
aagaaguuugagugagggc

SEQ ID NO: 681464 - RNA, 19 nt, Artificial Sequence
  Description of Artificial Sequence: Synthetic oligonucleotide
ugguacauuacgcugauuc

SEQ ID NO: 681465 - RNA, 19 nt, Artificial Sequence
  Description of Artificial Sequence: Synthetic oligonucleotide
aguacaaagucugaacugg

SEQ ID NO: 681466 - RNA, 19 nt, Artificial Sequence
  Description of Artificial Sequence: Synthetic oligonucleotide
uguuaagauguuccaauug

SEQ ID NO: 681467 - RNA, 19 nt, Artificial Sequence
  Description of Artificial Sequence: Synthetic oligonucleotide
ucagccucacuaaugaagc

SEQ ID NO: 681468 - RNA, 19 nt, Artificial Sequence
  Description of Artificial Sequence: Synthetic oligonucleotide
ucuaauagcuggauggcac

SEQ ID NO: 681469 - RNA, 19 nt, Artificial Sequence
  Description of Artificial Sequence: Synthetic oligonucleotide
agauguuccaauugaauga

SEQ ID NO: 681470 - RNA, 19 nt, Artificial Sequence
  Description of Artificial Sequence: Synthetic oligonucleotide
gaauaaacucccucuguag

SEQ ID NO: 681471 - RNA, 19 nt, Artificial Sequence
  Description of Artificial Sequence: Synthetic oligonucleotide
acugaggcgauucgaaugg

SEQ ID NO: 681472 - RNA, 19 nt, Artificial Sequence
  Description of Artificial Sequence: Synthetic oligonucleotide
acugauucgauguugcacu

SEQ ID NO: 681473 - RNA, 19 nt, Artificial Sequence
  Description of Artificial Sequence: Synthetic oligonucleotide
ucuguagugagucuucuaa

SEQ ID NO: 681474 - RNA, 19 nt, Artificial Sequence
  Description of Artificial Sequence: Synthetic oligonucleotide
aacugaggcgauucgaaug

SEQ ID NO: 681475 - RNA, 19 nt, Artificial Sequence
  Description of Artificial Sequence: Synthetic oligonucleotide
uugugaaacuuaacgaugu

SEQ ID NO: 681476 - RNA, 19 nt, Artificial Sequence
  Description of Artificial Sequence: Synthetic oligonucleotide
agaggguagaucccauucc

SEQ ID NO: 681477 - RNA, 19 nt, Artificial Sequence
  Description of Artificial Sequence: Synthetic oligonucleotide
aguagacuuuauuacagca

SEQ ID NO: 681478 - RNA, 19 nt, Artificial Sequence
  Description of Artificial Sequence: Synthetic oligonucleotide
ucagcuacuagccccagcu

SEQ ID NO: 681479 - RNA, 19 nt, Artificial Sequence
  Description of Artificial Sequence: Synthetic oligonucleotide
gguagcuuagggcagauag

SEQ ID NO: 681480 - RNA, 19 nt, Artificial Sequence
  Description of Artificial Sequence: Synthetic oligonucleotide
auuacgcugauucaccucu

SEQ ID NO: 681481 - RNA, 19 nt, Artificial Sequence
  Description of Artificial Sequence: Synthetic oligonucleotide
aacugcuuaaggcuuccag

SEQ ID NO: 681482 - RNA, 19 nt, Artificial Sequence
  Description of Artificial Sequence: Synthetic oligonucleotide
aggauucuaccuuuggguc

SEQ ID NO: 681483 - RNA, 19 nt, Artificial Sequence
  Description of Artificial Sequence: Synthetic oligonucleotide
guuaagauguuccaauuga

SEQ ID NO: 681484 - RNA, 19 nt, Artificial Sequence
  Description of Artificial Sequence: Synthetic oligonucleotide
augaggacucuccauugcc

SEQ ID NO: 681485 - RNA, 19 nt, Artificial Sequence
  Description of Artificial Sequence: Synthetic oligonucleotide
ucuucgagcaggcucagac

SEQ ID NO: 681486 - RNA, 19 nt, Artificial Sequence
  Description of Artificial Sequence: Synthetic oligonucleotide
uacauuacgcugauucacc

SEQ ID NO: 681487 - RNA, 19 nt, Artificial Sequence
  Description of Artificial Sequence: Synthetic oligonucleotide
guuagaugguguuugacuc

SEQ ID NO: 681488 - RNA, 19 nt, Artificial Sequence
  Description of Artificial Sequence: Synthetic oligonucleotide
guagugagucuucuaauag

SEQ ID NO: 681489 - RNA, 19 nt, Artificial Sequence
  Description of Artificial Sequence: Synthetic oligonucleotide
aauagugcuggguggaaaa

SEQ ID NO: 681490 - RNA, 19 nt, Artificial Sequence
  Description of Artificial Sequence: Synthetic oligonucleotide
ugaauaaacucccucugua

SEQ ID NO: 681491 - RNA, 19 nt, Artificial Sequence
  Description of Artificial Sequence: Synthetic oligonucleotide
uccucuguauccauggcca

SEQ ID NO: 681492 - RNA, 19 nt, Artificial Sequence
  Description of Artificial Sequence: Synthetic oligonucleotide
uguugucacauuaguaacu

SEQ ID NO: 681493 - RNA, 19 nt, Artificial Sequence
  Description of Artificial Sequence: Synthetic oligonucleotide
gaugacauguauucuguga

SEQ ID NO: 681494 - RNA, 19 nt, Artificial Sequence
  Description of Artificial Sequence: Synthetic oligonucleotide
uuaagauguuccaauugaa

SEQ ID NO: 681495 - RNA, 19 nt, Artificial Sequence
  Description of Artificial Sequence: Synthetic oligonucleotide
augguguuugacucccucc

SEQ ID NO: 681496 - RNA, 19 nt, Artificial Sequence
  Description of Artificial Sequence: Synthetic oligonucleotide
augagauuaucaaacacug

SEQ ID NO: 681497 - RNA, 19 nt, Artificial Sequence
  Description of Artificial Sequence: Synthetic oligonucleotide
guugauagugucaggagcc

SEQ ID NO: 681498 - RNA, 19 nt, Artificial Sequence
  Description of Artificial Sequence: Synthetic oligonucleotide
uagugagucuucuaauagc

SEQ ID NO: 681499 - RNA, 19 nt, Artificial Sequence
  Description of Artificial Sequence: Synthetic oligonucleotide
cacaugauuguugauagug

SEQ ID NO: 681500 - RNA, 19 nt, Artificial Sequence
  Description of Artificial Sequence: Synthetic oligonucleotide
ugauucaccucuucucucc

SEQ ID NO: 681501 - RNA, 19 nt, Artificial Sequence
  Description of Artificial Sequence: Synthetic oligonucleotide
ugagauuaucaaacacugc

SEQ ID NO: 681502 - RNA, 19 nt, Artificial Sequence
  Description of Artificial Sequence: Synthetic oligonucleotide
uuagaugguguuugacucc

SEQ ID NO: 681503 - RNA, 19 nt, Artificial Sequence
  Description of Artificial Sequence: Synthetic oligonucleotide
ucccacaauacagugagca

SEQ ID NO: 681504 - RNA, 19 nt, Artificial Sequence
  Description of Artificial Sequence: Synthetic oligonucleotide
acuacuguuugggauuccc

SEQ ID NO: 681505 - RNA, 19 nt, Artificial Sequence
  Description of Artificial Sequence: Synthetic oligonucleotide
agcuacuagccccagcuag

SEQ ID NO: 681506 - RNA, 19 nt, Artificial Sequence
  Description of Artificial Sequence: Synthetic oligonucleotide
uuugggauuccccuuccga

SEQ ID NO: 681507 - RNA, 19 nt, Artificial Sequence
  Description of Artificial Sequence: Synthetic oligonucleotide
caugauuguugauaguguc

SEQ ID NO: 681508 - RNA, 19 nt, Artificial Sequence
  Description of Artificial Sequence: Synthetic oligonucleotide
uugucuaauuccagggcug

SEQ ID NO: 681509 - RNA, 19 nt, Artificial Sequence
  Description of Artificial Sequence: Synthetic oligonucleotide
guaauacugacuggggagg

SEQ ID NO: 681510 - RNA, 19 nt, Artificial Sequence
  Description of Artificial Sequence: Synthetic oligonucleotide
caauugaaugagauuauca

SEQ ID NO: 681511 - RNA, 19 nt, Artificial Sequence
  Description of Artificial Sequence: Synthetic oligonucleotide
ggcaaaauugaacuuguug

SEQ ID NO: 681512 - RNA, 19 nt, Artificial Sequence
  Description of Artificial Sequence: Synthetic oligonucleotide
caagugagcucuaugagga

SEQ ID NO: 681513 - RNA, 19 nt, Artificial Sequence
  Description of Artificial Sequence: Synthetic oligonucleotide
uguagugagucuucuaaua

SEQ ID NO: 681514 - RNA, 19 nt, Artificial Sequence
  Description of Artificial Sequence: Synthetic oligonucleotide
cugugcaaaacaaguaaac

SEQ ID NO: 681515 - RNA, 19 nt, Artificial Sequence
  Description of Artificial Sequence: Synthetic oligonucleotide
gugagggcacuucaaauag

SEQ ID NO: 681516 - RNA, 19 nt, Artificial Sequence
  Description of Artificial Sequence: Synthetic oligonucleotide
agcaagaaguuugagugag

SEQ ID NO: 681517 - RNA, 19 nt, Artificial Sequence
  Description of Artificial Sequence: Synthetic oligonucleotide
acugcugacuacuguuugg

SEQ ID NO: 681518 - RNA, 19 nt, Artificial Sequence
  Description of Artificial Sequence: Synthetic oligonucleotide
uacuguuugggauuccccu

SEQ ID NO: 681519 - RNA, 19 nt, Artificial Sequence
  Description of Artificial Sequence: Synthetic oligonucleotide
ucagcagaaggguuagaug

SEQ ID NO: 681520 - RNA, 19 nt, Artificial Sequence
  Description of Artificial Sequence: Synthetic oligonucleotide
ucuaauuccagggcuggug

SEQ ID NO: 681521 - RNA, 19 nt, Artificial Sequence
  Description of Artificial Sequence: Synthetic oligonucleotide
uuucgugucuccaccucag

SEQ ID NO: 681522 - RNA, 19 nt, Artificial Sequence
  Description of Artificial Sequence: Synthetic oligonucleotide
aggcgauucgaauggcccc

SEQ ID NO: 681523 - RNA, 19 nt, Artificial Sequence
  Description of Artificial Sequence: Synthetic oligonucleotide
aguagauguccacugcugu

SEQ ID NO: 681524 - RNA, 19 nt, Artificial Sequence
  Description of Artificial Sequence: Synthetic oligonucleotide
uguggcacauaugaggacu

SEQ ID NO: 681525 - RNA, 19 nt, Artificial Sequence
  Description of Artificial Sequence: Synthetic oligonucleotide
aguaacuucuccauacucu

SEQ ID NO: 681526 - RNA, 19 nt, Artificial Sequence
  Description of Artificial Sequence: Synthetic oligonucleotide
uguccacacaggcagggca

SEQ ID NO: 681527 - RNA, 19 nt, Artificial Sequence
  Description of Artificial Sequence: Synthetic oligonucleotide
ugguguuugacucccuccu

SEQ ID NO: 681528 - RNA, 19 nt, Artificial Sequence
  Description of Artificial Sequence: Synthetic oligonucleotide
agcguuuccaagccuuuuc

SEQ ID NO: 681529 - RNA, 19 nt, Artificial Sequence
  Description of Artificial Sequence: Synthetic oligonucleotide
ucuaccuuugggucugagc

SEQ ID NO: 681530 - RNA, 19 nt, Artificial Sequence
  Description of Artificial Sequence: Synthetic oligonucleotide
acuuaacgauguuaagaug

SEQ ID NO: 681531 - RNA, 19 nt, Artificial Sequence
  Description of Artificial Sequence: Synthetic oligonucleotide
gauguuaagauguuccaau

SEQ ID NO: 681532 - RNA, 19 nt, Artificial Sequence
  Description of Artificial Sequence: Synthetic oligonucleotide
ucaaauagugcugggugga

SEQ ID NO: 681533 - RNA, 19 nt, Artificial Sequence
  Description of Artificial Sequence: Synthetic oligonucleotide
aggaugaugcucaaccagg

SEQ ID NO: 681534 - RNA, 19 nt, Artificial Sequence
  Description of Artificial Sequence: Synthetic oligonucleotide
ugacauguauucugugaug

SEQ ID NO: 681535 - RNA, 19 nt, Artificial Sequence
  Description of Artificial Sequence: Synthetic oligonucleotide
cugaaucuccaguacugcc

SEQ ID NO: 681536 - RNA, 19 nt, Artificial Sequence
  Description of Artificial Sequence: Synthetic oligonucleotide
acuguaccucauuccacac

SEQ ID NO: 681537 - RNA, 19 nt, Artificial Sequence
  Description of Artificial Sequence: Synthetic oligonucleotide
gagcucuaugaggagacgg

SEQ ID NO: 681538 - RNA, 19 nt, Artificial Sequence
  Description of Artificial Sequence: Synthetic oligonucleotide
ugaggcgauucgaauggcc

SEQ ID NO: 681539 - RNA, 19 nt, Artificial Sequence
  Description of Artificial Sequence: Synthetic oligonucleotide
agugagggcacuucaaaua

SEQ ID NO: 681540 - RNA, 19 nt, Artificial Sequence
  Description of Artificial Sequence: Synthetic oligonucleotide
aguccguugugcuggauga

SEQ ID NO: 681541 - RNA, 19 nt, Artificial Sequence
  Description of Artificial Sequence: Synthetic oligonucleotide
cuuccgacaugcuggaaug

SEQ ID NO: 681542 - RNA, 19 nt, Artificial Sequence
  Description of Artificial Sequence: Synthetic oligonucleotide
caggaugaugcucaaccag

SEQ ID NO: 681543 - RNA, 19 nt, Artificial Sequence
  Description of Artificial Sequence: Synthetic oligonucleotide
gauucuaccuuugggucug

SEQ ID NO: 681544 - RNA, 19 nt, Artificial Sequence
  Description of Artificial Sequence: Synthetic oligonucleotide
aggaggauucuaccuuugg

SEQ ID NO: 681545 - RNA, 19 nt, Artificial Sequence
  Description of Artificial Sequence: Synthetic oligonucleotide
uugaugaguccguugugcu

SEQ ID NO: 681546 - RNA, 19 nt, Artificial Sequence
  Description of Artificial Sequence: Synthetic oligonucleotide
agcccaaaggcugucagag

SEQ ID NO: 681547 - RNA, 19 nt, Artificial Sequence
  Description of Artificial Sequence: Synthetic oligonucleotide
uccaauugaaugagauuau

SEQ ID NO: 681548 - RNA, 19 nt, Artificial Sequence
  Description of Artificial Sequence: Synthetic oligonucleotide
gcagauaggaucugugugc

SEQ ID NO: 681549 - RNA, 19 nt, Artificial Sequence
  Description of Artificial Sequence: Synthetic oligonucleotide
ugagaguacaaagucugaa

SEQ ID NO: 681550 - RNA, 19 nt, Artificial Sequence
  Description of Artificial Sequence: Synthetic oligonucleotide
uguuggugucccacaauac

SEQ ID NO: 681551 - RNA, 19 nt, Artificial Sequence
  Description of Artificial Sequence: Synthetic oligonucleotide
uagaugguguuugacuccc

SEQ ID NO: 681552 - RNA, 19 nt, Artificial Sequence
  Description of Artificial Sequence: Synthetic oligonucleotide
gagccaaucuugaugaguc

SEQ ID NO: 681553 - RNA, 19 nt, Artificial Sequence
  Description of Artificial Sequence: Synthetic oligonucleotide
aguuuguaguucuugcguu

SEQ ID NO: 681554 - RNA, 19 nt, Artificial Sequence
  Description of Artificial Sequence: Synthetic oligonucleotide
acgauguuaagauguucca

SEQ ID NO: 681555 - RNA, 19 nt, Artificial Sequence
  Description of Artificial Sequence: Synthetic oligonucleotide
cacugcacggaccuuuucc

SEQ ID NO: 681556 - RNA, 19 nt, Artificial Sequence
  Description of Artificial Sequence: Synthetic oligonucleotide
cuucuaauagcuggauggc

SEQ ID NO: 681557 - RNA, 19 nt, Artificial Sequence
  Description of Artificial Sequence: Synthetic oligonucleotide
guacauuacgcugauucac

SEQ ID NO: 681558 - RNA, 19 nt, Artificial Sequence
  Description of Artificial Sequence: Synthetic oligonucleotide
gcaguuuguaguucuugcg

SEQ ID NO: 681559 - RNA, 19 nt, Artificial Sequence
  Description of Artificial Sequence: Synthetic oligonucleotide
gaggcgauucgaauggccc

SEQ ID NO: 681560 - RNA, 19 nt, Artificial Sequence
  Description of Artificial Sequence: Synthetic oligonucleotide
uggcgcaaagaaguguagg

SEQ ID NO: 681561 - RNA, 19 nt, Artificial Sequence
  Description of Artificial Sequence: Synthetic oligonucleotide
uucuaauagcuggauggca

SEQ ID NO: 681562 - RNA, 19 nt, Artificial Sequence
  Description of Artificial Sequence: Synthetic oligonucleotide
aucagcccaauacuuguga

SEQ ID NO: 681563 - RNA, 19 nt, Artificial Sequence
  Description of Artificial Sequence: Synthetic oligonucleotide
acauuacgcugauucaccu

SEQ ID NO: 681564 - RNA, 19 nt, Artificial Sequence
  Description of Artificial Sequence: Synthetic oligonucleotide
uguuugggauuccccuucc

SEQ ID NO: 681565 - RNA, 19 nt, Artificial Sequence
  Description of Artificial Sequence: Synthetic oligonucleotide
gaguccguugugcuggaug

SEQ ID NO: 681566 - RNA, 19 nt, Artificial Sequence
  Description of Artificial Sequence: Synthetic oligonucleotide
gauuccccuuccgacaugc

SEQ ID NO: 681567 - RNA, 19 nt, Artificial Sequence
  Description of Artificial Sequence: Synthetic oligonucleotide
uucuccgggaucauguguu

SEQ ID NO: 681568 - RNA, 19 nt, Artificial Sequence
  Description of Artificial Sequence: Synthetic oligonucleotide
guagcuuagggcagauagg

SEQ ID NO: 681569 - RNA, 19 nt, Artificial Sequence
  Description of Artificial Sequence: Synthetic oligonucleotide
ugcguucagagaacuguac

SEQ ID NO: 681570 - RNA, 19 nt, Artificial Sequence
  Description of Artificial Sequence: Synthetic oligonucleotide
acuucaaauagugcugggu

SEQ ID NO: 681571 - RNA, 19 nt, Artificial Sequence
  Description of Artificial Sequence: Synthetic oligonucleotide
ggcagauaggaucugugug

SEQ ID NO: 681572 - RNA, 19 nt, Artificial Sequence
  Description of Artificial Sequence: Synthetic oligonucleotide
gaugaaaaucacccgggcu

SEQ ID NO: 681573 - RNA, 19 nt, Artificial Sequence
  Description of Artificial Sequence: Synthetic oligonucleotide
cuguuggucuucgagcagg

SEQ ID NO: 681574 - RNA, 19 nt, Artificial Sequence
  Description of Artificial Sequence: Synthetic oligonucleotide
ucccauggaugaugggagg

SEQ ID NO: 681575 - RNA, 19 nt, Artificial Sequence
  Description of Artificial Sequence: Synthetic oligonucleotide
ucuugcguucagagaacug

SEQ ID NO: 681576 - RNA, 19 nt, Artificial Sequence
  Description of Artificial Sequence: Synthetic oligonucleotide
gucuucuaauagcuggaug

SEQ ID NO: 681577 - RNA, 19 nt, Artificial Sequence
  Description of Artificial Sequence: Synthetic oligonucleotide
gaggcgacacugaagucag

SEQ ID NO: 681578 - RNA, 19 nt, Artificial Sequence
  Description of Artificial Sequence: Synthetic oligonucleotide
uccauacucuggcgcaaag

SEQ ID NO: 681579 - RNA, 19 nt, Artificial Sequence
  Description of Artificial Sequence: Synthetic oligonucleotide
gaugcucaaccagggagcc

SEQ ID NO: 681580 - RNA, 19 nt, Artificial Sequence
  Description of Artificial Sequence: Synthetic oligonucleotide
acauaugaggacucuccau

SEQ ID NO: 681581 - RNA, 19 nt, Artificial Sequence
  Description of Artificial Sequence: Synthetic oligonucleotide
uaauagcuggauggcacug

SEQ ID NO: 681582 - RNA, 19 nt, Artificial Sequence
  Description of Artificial Sequence: Synthetic oligonucleotide
acgucugugcaaaacaagu

SEQ ID NO: 681583 - RNA, 19 nt, Artificial Sequence
  Description of Artificial Sequence: Synthetic oligonucleotide
agagcguucuccgggauca

SEQ ID NO: 681584 - RNA, 19 nt, Artificial Sequence
  Description of Artificial Sequence: Synthetic oligonucleotide
aaauagugcuggguggaaa

SEQ ID NO: 681585 - RNA, 19 nt, Artificial Sequence
  Description of Artificial Sequence: Synthetic oligonucleotide
cacuaaugaagcccagcug

SEQ ID NO: 681586 - RNA, 19 nt, Artificial Sequence
  Description of Artificial Sequence: Synthetic oligonucleotide
cacugauucgauguugcac

SEQ ID NO: 681587 - RNA, 19 nt, Artificial Sequence
  Description of Artificial Sequence: Synthetic oligonucleotide
gaaacugcuuaaggcuucc

SEQ ID NO: 681588 - RNA, 19 nt, Artificial Sequence
  Description of Artificial Sequence: Synthetic oligonucleotide
uccccagcgggauuguaga

SEQ ID NO: 681589 - RNA, 19 nt, Artificial Sequence
  Description of Artificial Sequence: Synthetic oligonucleotide
ugagggcacuucaaauagu

SEQ ID NO: 681590 - RNA, 19 nt, Artificial Sequence
  Description of Artificial Sequence: Synthetic oligonucleotide
ugugaaacuuaacgauguu

SEQ ID NO: 681591 - RNA, 19 nt, Artificial Sequence
  Description of Artificial Sequence: Synthetic oligonucleotide
ucagcccaauacuugugaa

SEQ ID NO: 681592 - RNA, 19 nt, Artificial Sequence
  Description of Artificial Sequence: Synthetic oligonucleotide
uccgggaucauguguuggu

SEQ ID NO: 681593 - RNA, 19 nt, Artificial Sequence
  Description of Artificial Sequence: Synthetic oligonucleotide
cacaacaggugaugucacc

SEQ ID NO: 681594 - RNA, 19 nt, Artificial Sequence
  Description of Artificial Sequence: Synthetic oligonucleotide
cacugucaauaccugguac

SEQ ID NO: 681595 - RNA, 19 nt, Artificial Sequence
  Description of Artificial Sequence: Synthetic oligonucleotide
uucugcucuucccggcaag

SEQ ID NO: 681596 - RNA, 19 nt, Artificial Sequence
  Description of Artificial Sequence: Synthetic oligonucleotide
gcaagucuucacaugauug

SEQ ID NO: 681597 - RNA, 19 nt, Artificial Sequence
  Description of Artificial Sequence: Synthetic oligonucleotide
gaggagacggugacagcgg

SEQ ID NO: 681598 - RNA, 19 nt, Artificial Sequence
  Description of Artificial Sequence: Synthetic oligonucleotide
uugcguucagagaacugua

SEQ ID NO: 681599 - RNA, 19 nt, Artificial Sequence
  Description of Artificial Sequence: Synthetic oligonucleotide
agcccuccugaauaauaag

SEQ ID NO: 681600 - RNA, 19 nt, Artificial Sequence
  Description of Artificial Sequence: Synthetic oligonucleotide
auaggggccuggcucaagu

SEQ ID NO: 681601 - RNA, 19 nt, Artificial Sequence
  Description of Artificial Sequence: Synthetic oligonucleotide
aggguaauacugacugggg

SEQ ID NO: 681602 - RNA, 19 nt, Artificial Sequence
  Description of Artificial Sequence: Synthetic oligonucleotide
cuucacaugauuguugaua

SEQ ID NO: 681603 - RNA, 19 nt, Artificial Sequence
  Description of Artificial Sequence: Synthetic oligonucleotide
caccuuucgugucuccacc

SEQ ID NO: 681604 - RNA, 19 nt, Artificial Sequence
  Description of Artificial Sequence: Synthetic oligonucleotide
ugauucgauguugcacugc

SEQ ID NO: 681605 - RNA, 19 nt, Artificial Sequence
  Description of Artificial Sequence: Synthetic oligonucleotide
uuguagaacucagcucccc

SEQ ID NO: 681606 - RNA, 19 nt, Artificial Sequence
  Description of Artificial Sequence: Synthetic oligonucleotide
aaagcccuccugaauaaua

SEQ ID NO: 681607 - RNA, 19 nt, Artificial Sequence
  Description of Artificial Sequence: Synthetic oligonucleotide
aagcccuccugaauaauaa

SEQ ID NO: 681608 - RNA, 19 nt, Artificial Sequence
  Description of Artificial Sequence: Synthetic oligonucleotide
aaaggcugucagaggguag

SEQ ID NO: 681609 - RNA, 19 nt, Artificial Sequence
  Description of Artificial Sequence: Synthetic oligonucleotide
cauuacgcugauucaccuc

SEQ ID NO: 681610 - RNA, 19 nt, Artificial Sequence
  Description of Artificial Sequence: Synthetic oligonucleotide
ucgagcaggcucagacugc

SEQ ID NO: 681611 - RNA, 19 nt, Artificial Sequence
  Description of Artificial Sequence: Synthetic oligonucleotide
cuccccagcgggauuguag

SEQ ID NO: 681612 - RNA, 19 nt, Artificial Sequence
  Description of Artificial Sequence: Synthetic oligonucleotide
ggauuguagaacucagcuc

SEQ ID NO: 681613 - RNA, 19 nt, Artificial Sequence
  Description of Artificial Sequence: Synthetic oligonucleotide
ucacaugauuguugauagu

SEQ ID NO: 681614 - RNA, 19 nt, Artificial Sequence
  Description of Artificial Sequence: Synthetic oligonucleotide
ggaugaugcucaaccaggg

SEQ ID NO: 681615 - RNA, 19 nt, Artificial Sequence
  Description of Artificial Sequence: Synthetic oligonucleotide
gguaugcacugucaauacc

SEQ ID NO: 681616 - RNA, 19 nt, Artificial Sequence
  Description of Artificial Sequence: Synthetic oligonucleotide
gguacauuacgcugauuca

SEQ ID NO: 681617 - RNA, 19 nt, Artificial Sequence
  Description of Artificial Sequence: Synthetic oligonucleotide
uccagagcguucuccggga

SEQ ID NO: 681618 - RNA, 19 nt, Artificial Sequence
  Description of Artificial Sequence: Synthetic oligonucleotide
gcccuccugaauaauaagg

SEQ ID NO: 681619 - RNA, 19 nt, Artificial Sequence
  Description of Artificial Sequence: Synthetic oligonucleotide
gggauuguagaacucagcu

SEQ ID NO: 681620 - RNA, 19 nt, Artificial Sequence
  Description of Artificial Sequence: Synthetic oligonucleotide
uucuugcguucagagaacu

SEQ ID NO: 681621 - RNA, 19 nt, Artificial Sequence
  Description of Artificial Sequence: Synthetic oligonucleotide
cugauucgauguugcacug

SEQ ID NO: 681622 - RNA, 19 nt, Artificial Sequence
  Description of Artificial Sequence: Synthetic oligonucleotide
acgcugauucaccucuucu

SEQ ID NO: 681623 - RNA, 19 nt, Artificial Sequence
  Description of Artificial Sequence: Synthetic oligonucleotide
caucagcccaauacuugug

SEQ ID NO: 681624 - RNA, 19 nt, Artificial Sequence
  Description of Artificial Sequence: Synthetic oligonucleotide
guguuggugucccacaaua

SEQ ID NO: 681625 - RNA, 19 nt, Artificial Sequence
  Description of Artificial Sequence: Synthetic oligonucleotide
cacugcugacuacuguuug

SEQ ID NO: 681626 - RNA, 19 nt, Artificial Sequence
  Description of Artificial Sequence: Synthetic oligonucleotide
cucgagcagagaagucagg

SEQ ID NO: 681627 - RNA, 19 nt, Artificial Sequence
  Description of Artificial Sequence: Synthetic oligonucleotide
uacgcugauucaccucuuc

SEQ ID NO: 681628 - RNA, 19 nt, Artificial Sequence
  Description of Artificial Sequence: Synthetic oligonucleotide
ggcacaacaggugauguca

SEQ ID NO: 681629 - RNA, 19 nt, Artificial Sequence
  Description of Artificial Sequence: Synthetic oligonucleotide
gguuagaugguguuugacu

SEQ ID NO: 681630 - RNA, 19 nt, Artificial Sequence
  Description of Artificial Sequence: Synthetic oligonucleotide
cacauaugaggacucucca

SEQ ID NO: 681631 - RNA, 19 nt, Artificial Sequence
  Description of Artificial Sequence: Synthetic oligonucleotide
caggcggcucugaucagcc

SEQ ID NO: 681632 - RNA, 19 nt, Artificial Sequence
  Description of Artificial Sequence: Synthetic oligonucleotide
caggaguuggagucuugac

SEQ ID NO: 681633 - RNA, 19 nt, Artificial Sequence
  Description of Artificial Sequence: Synthetic oligonucleotide
gcacauaugaggacucucc

SEQ ID NO: 681634 - RNA, 19 nt, Artificial Sequence
  Description of Artificial Sequence: Synthetic oligonucleotide
ugacuacuguuugggauuc

SEQ ID NO: 681635 - RNA, 19 nt, Artificial Sequence
  Description of Artificial Sequence: Synthetic oligonucleotide
gguagaucccauuccugac

SEQ ID NO: 681636 - RNA, 19 nt, Artificial Sequence
  Description of Artificial Sequence: Synthetic oligonucleotide
ucuccgggaucauguguug

SEQ ID NO: 681637 - RNA, 19 nt, Artificial Sequence
  Description of Artificial Sequence: Synthetic oligonucleotide
gcguucagagaacuguacc

SEQ ID NO: 681638 - RNA, 19 nt, Artificial Sequence
  Description of Artificial Sequence: Synthetic oligonucleotide
acagccacacucagauagg

SEQ ID NO: 681639 - RNA, 19 nt, Artificial Sequence
  Description of Artificial Sequence: Synthetic oligonucleotide
cagccacacucagauaggg

SEQ ID NO: 681640 - RNA, 19 nt, Artificial Sequence
  Description of Artificial Sequence: Synthetic oligonucleotide
cuggcgcaaagaaguguag

SEQ ID NO: 681641 - RNA, 19 nt, Artificial Sequence
  Description of Artificial Sequence: Synthetic oligonucleotide
cuuucgugucuccaccuca

SEQ ID NO: 681642 - RNA, 19 nt, Artificial Sequence
  Description of Artificial Sequence: Synthetic oligonucleotide
cagccucacuaaugaagcc

SEQ ID NO: 681643 - RNA, 19 nt, Artificial Sequence
  Description of Artificial Sequence: Synthetic oligonucleotide
gacugcaggcacuuuugaa

SEQ ID NO: 681644 - RNA, 19 nt, Artificial Sequence
  Description of Artificial Sequence: Synthetic oligonucleotide
accuuucgugucuccaccu

SEQ ID NO: 681645 - RNA, 19 nt, Artificial Sequence
  Description of Artificial Sequence: Synthetic oligonucleotide
aggguuagaugguguuuga

SEQ ID NO: 681646 - RNA, 19 nt, Artificial Sequence
  Description of Artificial Sequence: Synthetic oligonucleotide
cuugcguucagagaacugu

SEQ ID NO: 681647 - RNA, 19 nt, Artificial Sequence
  Description of Artificial Sequence: Synthetic oligonucleotide
ggcgacacugaagucaggc

SEQ ID NO: 681648 - RNA, 19 nt, Artificial Sequence
  Description of Artificial Sequence: Synthetic oligonucleotide
gacugagaguacaaagucu

SEQ ID NO: 681649 - RNA, 19 nt, Artificial Sequence
  Description of Artificial Sequence: Synthetic oligonucleotide
aggucacaggaggcgacac

SEQ ID NO: 681650 - RNA, 19 nt, Artificial Sequence
  Description of Artificial Sequence: Synthetic oligonucleotide
agcucuaugaggagacggu

SEQ ID NO: 681651 - RNA, 19 nt, Artificial Sequence
  Description of Artificial Sequence: Synthetic oligonucleotide
ggaggcgacacugaaguca

SEQ ID NO: 681652 - RNA, 19 nt, Artificial Sequence
  Description of Artificial Sequence: Synthetic oligonucleotide
cauuaguaacuucuccaua

SEQ ID NO: 681653 - RNA, 19 nt, Artificial Sequence
  Description of Artificial Sequence: Synthetic oligonucleotide
cagggaucucagcuaguac

SEQ ID NO: 681654 - RNA, 19 nt, Artificial Sequence
  Description of Artificial Sequence: Synthetic oligonucleotide
caguuuguaguucuugcgu

SEQ ID NO: 681655 - RNA, 19 nt, Artificial Sequence
  Description of Artificial Sequence: Synthetic oligonucleotide
gucugaacuggcucucguc

SEQ ID NO: 681656 - RNA, 19 nt, Artificial Sequence
  Description of Artificial Sequence: Synthetic oligonucleotide
cugagaguacaaagucuga

SEQ ID NO: 681657 - RNA, 19 nt, Artificial Sequence
  Description of Artificial Sequence: Synthetic oligonucleotide
gaggaggauucuaccuuug

SEQ ID NO: 681658 - RNA, 19 nt, Artificial Sequence
  Description of Artificial Sequence: Synthetic oligonucleotide
gggaucauguguugguguc

SEQ ID NO: 681659 - RNA, 19 nt, Artificial Sequence
  Description of Artificial Sequence: Synthetic oligonucleotide
agucuucuaauagcuggau

SEQ ID NO: 681660 - RNA, 19 nt, Artificial Sequence
  Description of Artificial Sequence: Synthetic oligonucleotide
gcuagaagguggcugcuga

SEQ ID NO: 681661 - RNA, 19 nt, Artificial Sequence
  Description of Artificial Sequence: Synthetic oligonucleotide
cauugcccugaaucuccag

SEQ ID NO: 681662 - RNA, 19 nt, Artificial Sequence
  Description of Artificial Sequence: Synthetic oligonucleotide
cuaauagcuggauggcacu

SEQ ID NO: 681663 - RNA, 19 nt, Artificial Sequence
  Description of Artificial Sequence: Synthetic oligonucleotide
aaguaguucucuggcuguu

SEQ ID NO: 681664 - RNA, 19 nt, Artificial Sequence
  Description of Artificial Sequence: Synthetic oligonucleotide
cuccgggaucauguguugg

SEQ ID NO: 681665 - RNA, 19 nt, Artificial Sequence
  Description of Artificial Sequence: Synthetic oligonucleotide
ugccaaguccgggauguuc

SEQ ID NO: 681666 - RNA, 19 nt, Artificial Sequence
  Description of Artificial Sequence: Synthetic oligonucleotide
auggaugaugggaggguca

SEQ ID NO: 681667 - RNA, 19 nt, Artificial Sequence
  Description of Artificial Sequence: Synthetic oligonucleotide
ggcucaagugagcucuaug

SEQ ID NO: 681668 - RNA, 19 nt, Artificial Sequence
  Description of Artificial Sequence: Synthetic oligonucleotide
uggcaucaggucacagcuc

SEQ ID NO: 681669 - RNA, 19 nt, Artificial Sequence
  Description of Artificial Sequence: Synthetic oligonucleotide
gcgacacugaagucaggcc

SEQ ID NO: 681670 - RNA, 19 nt, Artificial Sequence
  Description of Artificial Sequence: Synthetic oligonucleotide
gucagcuacuagccccagc

SEQ ID NO: 681671 - RNA, 19 nt, Artificial Sequence
  Description of Artificial Sequence: Synthetic oligonucleotide
accaccuuucgugucucca

SEQ ID NO: 681672 - RNA, 19 nt, Artificial Sequence
  Description of Artificial Sequence: Synthetic oligonucleotide
gagggucacaggagugcag

SEQ ID NO: 681673 - RNA, 19 nt, Artificial Sequence
  Description of Artificial Sequence: Synthetic oligonucleotide
cuguaccucauuccacaca

SEQ ID NO: 681674 - RNA, 19 nt, Artificial Sequence
  Description of Artificial Sequence: Synthetic oligonucleotide
aggguagaucccauuccug

SEQ ID NO: 681675 - RNA, 19 nt, Artificial Sequence
  Description of Artificial Sequence: Synthetic oligonucleotide
gggcuuuauucucuuuaac

SEQ ID NO: 681676 - RNA, 19 nt, Artificial Sequence
  Description of Artificial Sequence: Synthetic oligonucleotide
uuccgacaugcuggaauga

SEQ ID NO: 681677 - RNA, 19 nt, Artificial Sequence
  Description of Artificial Sequence: Synthetic oligonucleotide
agcugccaaguccgggaug

SEQ ID NO: 681678 - RNA, 19 nt, Artificial Sequence
  Description of Artificial Sequence: Synthetic oligonucleotide
ggacaggaggacugcagca

SEQ ID NO: 681679 - RNA, 19 nt, Artificial Sequence
  Description of Artificial Sequence: Synthetic oligonucleotide
cugacuacuguuugggauu

SEQ ID NO: 681680 - RNA, 19 nt, Artificial Sequence
  Description of Artificial Sequence: Synthetic oligonucleotide
uggcucucguccuggcccu

SEQ ID NO: 681681 - RNA, 19 nt, Artificial Sequence
  Description of Artificial Sequence: Synthetic oligonucleotide
uuacgcugauucaccucuu

SEQ ID NO: 681682 - RNA, 19 nt, Artificial Sequence
  Description of Artificial Sequence: Synthetic oligonucleotide
gauaggggccuggcucaag

SEQ ID NO: 681683 - RNA, 19 nt, Artificial Sequence
  Description of Artificial Sequence: Synthetic oligonucleotide
uggcacauaugaggacucu

SEQ ID NO: 681684 - RNA, 19 nt, Artificial Sequence
  Description of Artificial Sequence: Synthetic oligonucleotide
ccaauugaaugagauuauc

SEQ ID NO: 681685 - RNA, 19 nt, Artificial Sequence
  Description of Artificial Sequence: Synthetic oligonucleotide
gguucccauggaugauggg

SEQ ID NO: 681686 - RNA, 19 nt, Artificial Sequence
  Description of Artificial Sequence: Synthetic oligonucleotide
ggauucuaccuuugggucu

SEQ ID NO: 681687 - RNA, 19 nt, Artificial Sequence
  Description of Artificial Sequence: Synthetic oligonucleotide
cagagcguucuccgggauc

SEQ ID NO: 681688 - RNA, 19 nt, Artificial Sequence
  Description of Artificial Sequence: Synthetic oligonucleotide
ccgacaugcuggaaugaac

SEQ ID NO: 681689 - RNA, 19 nt, Artificial Sequence
  Description of Artificial Sequence: Synthetic oligonucleotide
gcguuuccaagccuuuuca

SEQ ID NO: 681690 - RNA, 19 nt, Artificial Sequence
  Description of Artificial Sequence: Synthetic oligonucleotide
cugaggcgauucgaauggc

SEQ ID NO: 681691 - RNA, 19 nt, Artificial Sequence
  Description of Artificial Sequence: Synthetic oligonucleotide
ggcggcucugaucagccuc

SEQ ID NO: 681692 - RNA, 19 nt, Artificial Sequence
  Description of Artificial Sequence: Synthetic oligonucleotide
guggcacauaugaggacuc

SEQ ID NO: 681693 - RNA, 19 nt, Artificial Sequence
  Description of Artificial Sequence: Synthetic oligonucleotide
gacuacuguuugggauucc

SEQ ID NO: 681694 - RNA, 19 nt, Artificial Sequence
  Description of Artificial Sequence: Synthetic oligonucleotide
agcguucuccgggaucaug

SEQ ID NO: 681695 - RNA, 19 nt, Artificial Sequence
  Description of Artificial Sequence: Synthetic oligonucleotide
gguguuugacucccuccuc

SEQ ID NO: 681696 - RNA, 19 nt, Artificial Sequence
  Description of Artificial Sequence: Synthetic oligonucleotide
gcgggauuguagaacucag

SEQ ID NO: 681697 - RNA, 19 nt, Artificial Sequence
  Description of Artificial Sequence: Synthetic oligonucleotide
augaguccguugugcugga

SEQ ID NO: 681698 - RNA, 19 nt, Artificial Sequence
  Description of Artificial Sequence: Synthetic oligonucleotide
cuccucgagcagagaaguc

SEQ ID NO: 681699 - RNA, 19 nt, Artificial Sequence
  Description of Artificial Sequence: Synthetic oligonucleotide
gaucugugugcaccagcgu

SEQ ID NO: 681700 - RNA, 19 nt, Artificial Sequence
  Description of Artificial Sequence: Synthetic oligonucleotide
ccaccuuucgugucuccac

SEQ ID NO: 681701 - RNA, 19 nt, Artificial Sequence
  Description of Artificial Sequence: Synthetic oligonucleotide
cgacacugaagucaggcca

SEQ ID NO: 681702 - RNA, 19 nt, Artificial Sequence
  Description of Artificial Sequence: Synthetic oligonucleotide
aggcccacgucugugcaaa

SEQ ID NO: 681703 - RNA, 19 nt, Artificial Sequence
  Description of Artificial Sequence: Synthetic oligonucleotide
gacaggaggacugcagcau

SEQ ID NO: 681704 - RNA, 19 nt, Artificial Sequence
  Description of Artificial Sequence: Synthetic oligonucleotide
cgcugauucaccucuucuc

SEQ ID NO: 681705 - RNA, 19 nt, Artificial Sequence
  Description of Artificial Sequence: Synthetic oligonucleotide
ggcacauaugaggacucuc

SEQ ID NO: 681706 - RNA, 19 nt, Artificial Sequence
  Description of Artificial Sequence: Synthetic oligonucleotide
caccaccuuucgugucucc

SEQ ID NO: 681707 - RNA, 19 nt, Artificial Sequence
  Description of Artificial Sequence: Synthetic oligonucleotide
cuucgagcaggcucagacu

SEQ ID NO: 681708 - RNA, 19 nt, Artificial Sequence
  Description of Artificial Sequence: Synthetic oligonucleotide
gcaacugaggcgauucgaa

SEQ ID NO: 681709 - RNA, 19 nt, Artificial Sequence
  Description of Artificial Sequence: Synthetic oligonucleotide
cagcgggauuguagaacuc

SEQ ID NO: 681710 - RNA, 19 nt, Artificial Sequence
  Description of Artificial Sequence: Synthetic oligonucleotide
cuacuagccccagcuagaa

SEQ ID NO: 681711 - RNA, 19 nt, Artificial Sequence
  Description of Artificial Sequence: Synthetic oligonucleotide
caaguccgggauguucuca

SEQ ID NO: 681712 - RNA, 19 nt, Artificial Sequence
  Description of Artificial Sequence: Synthetic oligonucleotide
gcuacuagccccagcuaga

SEQ ID NO: 681713 - RNA, 19 nt, Artificial Sequence
  Description of Artificial Sequence: Synthetic oligonucleotide
caaauagugcuggguggaa

SEQ ID NO: 681714 - RNA, 19 nt, Artificial Sequence
  Description of Artificial Sequence: Synthetic oligonucleotide
guaccucauuccacacaac

SEQ ID NO: 681715 - RNA, 19 nt, Artificial Sequence
  Description of Artificial Sequence: Synthetic oligonucleotide
caggucagguucccaugga

SEQ ID NO: 681716 - RNA, 19 nt, Artificial Sequence
  Description of Artificial Sequence: Synthetic oligonucleotide
caacugaggcgauucgaau

SEQ ID NO: 681717 - RNA, 19 nt, Artificial Sequence
  Description of Artificial Sequence: Synthetic oligonucleotide
caggaggacugcagcaugu

SEQ ID NO: 681718 - RNA, 19 nt, Artificial Sequence
  Description of Artificial Sequence: Synthetic oligonucleotide
uggcucaagugagcucuau

SEQ ID NO: 681719 - RNA, 19 nt, Artificial Sequence
  Description of Artificial Sequence: Synthetic oligonucleotide
guccgggauguucucauuu

SEQ ID NO: 681720 - RNA, 19 nt, Artificial Sequence
  Description of Artificial Sequence: Synthetic oligonucleotide
cccagcgggauuguagaac

SEQ ID NO: 681721 - RNA, 19 nt, Artificial Sequence
  Description of Artificial Sequence: Synthetic oligonucleotide
cguucagagaacuguaccu

SEQ ID NO: 681722 - RNA, 19 nt, Artificial Sequence
  Description of Artificial Sequence: Synthetic oligonucleotide
cccucuguagugagucuuc

SEQ ID NO: 681723 - RNA, 19 nt, Artificial Sequence
  Description of Artificial Sequence: Synthetic oligonucleotide
ccuuucgugucuccaccuc

SEQ ID NO: 681724 - RNA, 19 nt, Artificial Sequence
  Description of Artificial Sequence: Synthetic oligonucleotide
cccggcaagucuucacaug

SEQ ID NO: 681725 - RNA, 19 nt, Artificial Sequence
  Description of Artificial Sequence: Synthetic oligonucleotide
agcagcaacugaggcgauu

SEQ ID NO: 681726 - RNA, 19 nt, Artificial Sequence
  Description of Artificial Sequence: Synthetic oligonucleotide
gcuuccuguggcacauaug

SEQ ID NO: 681727 - RNA, 19 nt, Artificial Sequence
  Description of Artificial Sequence: Synthetic oligonucleotide
agauaggggccuggcucaa

SEQ ID NO: 681728 - RNA, 19 nt, Artificial Sequence
  Description of Artificial Sequence: Synthetic oligonucleotide
ccaaguccgggauguucuc

SEQ ID NO: 681729 - RNA, 19 nt, Artificial Sequence
  Description of Artificial Sequence: Synthetic oligonucleotide
cacccgggcuuuauucucu

SEQ ID NO: 681730 - RNA, 19 nt, Artificial Sequence
  Description of Artificial Sequence: Synthetic oligonucleotide
cucuggcgcaaagaagugu

SEQ ID NO: 681731 - RNA, 19 nt, Artificial Sequence
  Description of Artificial Sequence: Synthetic oligonucleotide
ccgggcuuuauucucuuua

SEQ ID NO: 681732 - RNA, 19 nt, Artificial Sequence
  Description of Artificial Sequence: Synthetic oligonucleotide
ugaguccguugugcuggau

SEQ ID NO: 681733 - RNA, 19 nt, Artificial Sequence
  Description of Artificial Sequence: Synthetic oligonucleotide
ccgggaucauguguuggug

SEQ ID NO: 681734 - RNA, 19 nt, Artificial Sequence
  Description of Artificial Sequence: Synthetic oligonucleotide
ccauacucuggcgcaaaga

SEQ ID NO: 681735 - RNA, 19 nt, Artificial Sequence
  Description of Artificial Sequence: Synthetic oligonucleotide
gcccaauacuugugaaacu

SEQ ID NO: 681736 - RNA, 19 nt, Artificial Sequence
  Description of Artificial Sequence: Synthetic oligonucleotide
ggccagguaugcacuguca

SEQ ID NO: 681737 - RNA, 19 nt, Artificial Sequence
  Description of Artificial Sequence: Synthetic oligonucleotide
ccacugauucgauguugca

SEQ ID NO: 681738 - RNA, 19 nt, Artificial Sequence
  Description of Artificial Sequence: Synthetic oligonucleotide
caaucuugaugaguccguu

SEQ ID NO: 681739 - RNA, 19 nt, Artificial Sequence
  Description of Artificial Sequence: Synthetic oligonucleotide
cccaauacuugugaaacuu

SEQ ID NO: 681740 - RNA, 19 nt, Artificial Sequence
  Description of Artificial Sequence: Synthetic oligonucleotide
agguagcuuagggcagaua

SEQ ID NO: 681741 - RNA, 19 nt, Artificial Sequence
  Description of Artificial Sequence: Synthetic oligonucleotide
cagcuacuagccccagcua

SEQ ID NO: 681742 - RNA, 19 nt, Artificial Sequence
  Description of Artificial Sequence: Synthetic oligonucleotide
ggucagcuacuagccccag

SEQ ID NO: 681743 - RNA, 19 nt, Artificial Sequence
  Description of Artificial Sequence: Synthetic oligonucleotide
cgggcuuuauucucuuuaa

SEQ ID NO: 681744 - RNA, 19 nt, Artificial Sequence
  Description of Artificial Sequence: Synthetic oligonucleotide
ggaugaugggagggucaca

SEQ ID NO: 681745 - RNA, 19 nt, Artificial Sequence
  Description of Artificial Sequence: Synthetic oligonucleotide
ccauugcccugaaucucca

SEQ ID NO: 681746 - RNA, 19 nt, Artificial Sequence
  Description of Artificial Sequence: Synthetic oligonucleotide
guuggucuucgagcaggcu

SEQ ID NO: 681747 - RNA, 19 nt, Artificial Sequence
  Description of Artificial Sequence: Synthetic oligonucleotide
gucagaggguagaucccau

SEQ ID NO: 681748 - RNA, 19 nt, Artificial Sequence
  Description of Artificial Sequence: Synthetic oligonucleotide
ccaagccuuuucauucaua

SEQ ID NO: 681749 - RNA, 19 nt, Artificial Sequence
  Description of Artificial Sequence: Synthetic oligonucleotide
gggucacaggagugcaggu

SEQ ID NO: 681750 - RNA, 19 nt, Artificial Sequence
  Description of Artificial Sequence: Synthetic oligonucleotide
caaagcccuccugaauaau

SEQ ID NO: 681751 - RNA, 19 nt, Artificial Sequence
  Description of Artificial Sequence: Synthetic oligonucleotide
ccuccugcaguuuguaguu

SEQ ID NO: 681752 - RNA, 19 nt, Artificial Sequence
  Description of Artificial Sequence: Synthetic oligonucleotide
caccagcguuuccaagccu

SEQ ID NO: 681753 - RNA, 19 nt, Artificial Sequence
  Description of Artificial Sequence: Synthetic oligonucleotide
cguugugcuggaugaagau

SEQ ID NO: 681754 - RNA, 19 nt, Artificial Sequence
  Description of Artificial Sequence: Synthetic oligonucleotide
ccugguacauuacgcugau

SEQ ID NO: 681755 - RNA, 19 nt, Artificial Sequence
  Description of Artificial Sequence: Synthetic oligonucleotide
cgggaucauguguuggugu

SEQ ID NO: 681756 - RNA, 19 nt, Artificial Sequence
  Description of Artificial Sequence: Synthetic oligonucleotide
cuggcccugcagggaucuc

SEQ ID NO: 681757 - RNA, 19 nt, Artificial Sequence
  Description of Artificial Sequence: Synthetic oligonucleotide
cagguagcuuagggcagau

SEQ ID NO: 681758 - RNA, 19 nt, Artificial Sequence
  Description of Artificial Sequence: Synthetic oligonucleotide
cagcguuuccaagccuuuu

SEQ ID NO: 681759 - RNA, 19 nt, Artificial Sequence
  Description of Artificial Sequence: Synthetic oligonucleotide
ccccagcgggauuguagaa

SEQ ID NO: 681760 - RNA, 19 nt, Artificial Sequence
  Description of Artificial Sequence: Synthetic oligonucleotide
cauccuccccagcgggauu

SEQ ID NO: 681761 - RNA, 19 nt, Artificial Sequence
  Description of Artificial Sequence: Synthetic oligonucleotide
gcucaggaguuggagucuu

SEQ ID NO: 681762 - RNA, 19 nt, Artificial Sequence
  Description of Artificial Sequence: Synthetic oligonucleotide
gagcguucuccgggaucau

SEQ ID NO: 681763 - RNA, 19 nt, Artificial Sequence
  Description of Artificial Sequence: Synthetic oligonucleotide
ccagcguuuccaagccuuu

SEQ ID NO: 681764 - RNA, 19 nt, Artificial Sequence
  Description of Artificial Sequence: Synthetic oligonucleotide
ccagagcguucuccgggau

SEQ ID NO: 681765 - RNA, 19 nt, Artificial Sequence
  Description of Artificial Sequence: Synthetic oligonucleotide
cugccaaguccgggauguu

SEQ ID NO: 681766 - RNA, 19 nt, Artificial Sequence
  Description of Artificial Sequence: Synthetic oligonucleotide
cccgggcuuuauucucuuu

SEQ ID NO: 681767 - RNA, 19 nt, Artificial Sequence
  Description of Artificial Sequence: Synthetic oligonucleotide
ucaauaucaagucagcagg

SEQ ID NO: 681768 - RNA, 19 nt, Artificial Sequence
  Description of Artificial Sequence: Synthetic oligonucleotide
aauuugagaggcuuaaggg

SEQ ID NO: 681769 - RNA, 19 nt, Artificial Sequence
  Description of Artificial Sequence: Synthetic oligonucleotide
augauaguaaaauacuacc

SEQ ID NO: 681770 - RNA, 19 nt, Artificial Sequence
  Description of Artificial Sequence: Synthetic oligonucleotide
aauuagacaguuuguauuc

SEQ ID NO: 681771 - RNA, 19 nt, Artificial Sequence
  Description of Artificial Sequence: Synthetic oligonucleotide
aagacguucagucucauag

SEQ ID NO: 681772 - RNA, 19 nt, Artificial Sequence
  Description of Artificial Sequence: Synthetic oligonucleotide
aagacgaaauuugagaggc

SEQ ID NO: 681773 - RNA, 19 nt, Artificial Sequence
  Description of Artificial Sequence: Synthetic oligonucleotide
auaguauggcaccagaugg

SEQ ID NO: 681774 - RNA, 19 nt, Artificial Sequence
  Description of Artificial Sequence: Synthetic oligonucleotide
uguaguauguucuauaguc

SEQ ID NO: 681775 - RNA, 19 nt, Artificial Sequence
  Description of Artificial Sequence: Synthetic oligonucleotide
acaaagaggaguuuagaac

SEQ ID NO: 681776 - RNA, 19 nt, Artificial Sequence
  Description of Artificial Sequence: Synthetic oligonucleotide
uuuucgacaaaucaauaca

SEQ ID NO: 681777 - RNA, 19 nt, Artificial Sequence
  Description of Artificial Sequence: Synthetic oligonucleotide
ucaacggucaauaucaagu

SEQ ID NO: 681778 - RNA, 19 nt, Artificial Sequence
  Description of Artificial Sequence: Synthetic oligonucleotide
uugucaacggucaauauca

SEQ ID NO: 681779 - RNA, 19 nt, Artificial Sequence
  Description of Artificial Sequence: Synthetic oligonucleotide
acagaugauaguaaaauac

SEQ ID NO: 681780 - RNA, 19 nt, Artificial Sequence
  Description of Artificial Sequence: Synthetic oligonucleotide
aaaccaucgaagucuuugc

SEQ ID NO: 681781 - RNA, 19 nt, Artificial Sequence
  Description of Artificial Sequence: Synthetic oligonucleotide
agaagacgaaauuugagag

SEQ ID NO: 681782 - RNA, 19 nt, Artificial Sequence
  Description of Artificial Sequence: Synthetic oligonucleotide
agauuauauacucacacga

SEQ ID NO: 681783 - RNA, 19 nt, Artificial Sequence
  Description of Artificial Sequence: Synthetic oligonucleotide
aaugcagcuggucagcauc

SEQ ID NO: 681784 - RNA, 19 nt, Artificial Sequence
  Description of Artificial Sequence: Synthetic oligonucleotide
auauguuuguaguauguuc

SEQ ID NO: 681785 - RNA, 19 nt, Artificial Sequence
  Description of Artificial Sequence: Synthetic oligonucleotide
ugauaguaaaauacuacca

SEQ ID NO: 681786 - RNA, 19 nt, Artificial Sequence
  Description of Artificial Sequence: Synthetic oligonucleotide
cuuucaacuagaauucucc

SEQ ID NO: 681787 - RNA, 19 nt, Artificial Sequence
  Description of Artificial Sequence: Synthetic oligonucleotide
uuauauacucacacgaaac

SEQ ID NO: 681788 - RNA, 19 nt, Artificial Sequence
  Description of Artificial Sequence: Synthetic oligonucleotide
uauacucacacgaaacaag

SEQ ID NO: 681789 - RNA, 19 nt, Artificial Sequence
  Description of Artificial Sequence: Synthetic oligonucleotide
gagauuauauacucacacg

SEQ ID NO: 681790 - RNA, 19 nt, Artificial Sequence
  Description of Artificial Sequence: Synthetic oligonucleotide
uauauacucacacgaaaca

SEQ ID NO: 681791 - RNA, 19 nt, Artificial Sequence
  Description of Artificial Sequence: Synthetic oligonucleotide
auugucaacggucaauauc

SEQ ID NO: 681792 - RNA, 19 nt, Artificial Sequence
  Description of Artificial Sequence: Synthetic oligonucleotide
ucuuagauaauaaaauauu

SEQ ID NO: 681793 - RNA, 19 nt, Artificial Sequence
  Description of Artificial Sequence: Synthetic oligonucleotide
aaaguuugagucuguggag

SEQ ID NO: 681794 - RNA, 19 nt, Artificial Sequence
  Description of Artificial Sequence: Synthetic oligonucleotide
ucuacaaagaggaguuuag

SEQ ID NO: 681795 - RNA, 19 nt, Artificial Sequence
  Description of Artificial Sequence: Synthetic oligonucleotide
aaaauacuaccaucagcuc

SEQ ID NO: 681796 - RNA, 19 nt, Artificial Sequence
  Description of Artificial Sequence: Synthetic oligonucleotide
agaacaaccugccaaacca

SEQ ID NO: 681797 - RNA, 19 nt, Artificial Sequence
  Description of Artificial Sequence: Synthetic oligonucleotide
aaccaucgaagucuuugcc

SEQ ID NO: 681798 - RNA, 19 nt, Artificial Sequence
  Description of Artificial Sequence: Synthetic oligonucleotide
gaagacgaaauuugagagg

SEQ ID NO: 681799 - RNA, 19 nt, Artificial Sequence
  Description of Artificial Sequence: Synthetic oligonucleotide
ugauuuucgacaaaucaau

SEQ ID NO: 681800 - RNA, 19 nt, Artificial Sequence
  Description of Artificial Sequence: Synthetic oligonucleotide
ucuauagucaccucuccug

SEQ ID NO: 681801 - RNA, 19 nt, Artificial Sequence
  Description of Artificial Sequence: Synthetic oligonucleotide
uaaugagcgcaucugacca

SEQ ID NO: 681802 - RNA, 19 nt, Artificial Sequence
  Description of Artificial Sequence: Synthetic oligonucleotide
uuucaacuagaauucuccg

SEQ ID NO: 681803 - RNA, 19 nt, Artificial Sequence
  Description of Artificial Sequence: Synthetic oligonucleotide
gguuauaaagaacagcgcc

SEQ ID NO: 681804 - RNA, 19 nt, Artificial Sequence
  Description of Artificial Sequence: Synthetic oligonucleotide
aaagguuauagcuguuucu

SEQ ID NO: 681805 - RNA, 19 nt, Artificial Sequence
  Description of Artificial Sequence: Synthetic oligonucleotide
aguaaaauacuaccaucag

SEQ ID NO: 681806 - RNA, 19 nt, Artificial Sequence
  Description of Artificial Sequence: Synthetic oligonucleotide
auuauuacccggcacguca

SEQ ID NO: 681807 - RNA, 19 nt, Artificial Sequence
  Description of Artificial Sequence: Synthetic oligonucleotide
ucgacaaaucaauacauaa

SEQ ID NO: 681808 - RNA, 19 nt, Artificial Sequence
  Description of Artificial Sequence: Synthetic oligonucleotide
uuaaugagcgcaucugacc

SEQ ID NO: 681809 - RNA, 19 nt, Artificial Sequence
  Description of Artificial Sequence: Synthetic oligonucleotide
cucacacgaaacaagagug

SEQ ID NO: 681810 - RNA, 19 nt, Artificial Sequence
  Description of Artificial Sequence: Synthetic oligonucleotide
uuauagcuguuucucagug

SEQ ID NO: 681811 - RNA, 19 nt, Artificial Sequence
  Description of Artificial Sequence: Synthetic oligonucleotide
uaccuugugauuuucgaca

SEQ ID NO: 681812 - RNA, 19 nt, Artificial Sequence
  Description of Artificial Sequence: Synthetic oligonucleotide
ugcaagugaagguccagcg

SEQ ID NO: 681813 - RNA, 19 nt, Artificial Sequence
  Description of Artificial Sequence: Synthetic oligonucleotide
  modified_base (2)..(2): a, c, u, g, unknown or other
anacgguggggacauguag

SEQ ID NO: 681814 - RNA, 19 nt, Artificial Sequence
  Description of Artificial Sequence: Synthetic oligonucleotide
ucacacgaaacaagagugg

SEQ ID NO: 681815 - RNA, 19 nt, Artificial Sequence
  Description of Artificial Sequence: Synthetic oligonucleotide
uccuccaauauguuuguag

SEQ ID NO: 681816 - RNA, 19 nt, Artificial Sequence
  Description of Artificial Sequence: Synthetic oligonucleotide
auucccgucguuuaaugag

SEQ ID NO: 681817 - RNA, 19 nt, Artificial Sequence
  Description of Artificial Sequence: Synthetic oligonucleotide
cugauaacuauccacagga

SEQ ID NO: 681818 - RNA, 19 nt, Artificial Sequence
  Description of Artificial Sequence: Synthetic oligonucleotide
aauaaaguuugagucugug

SEQ ID NO: 681819 - RNA, 19 nt, Artificial Sequence
  Description of Artificial Sequence: Synthetic oligonucleotide
aacaagaguggacagcaaa

SEQ ID NO: 681820 - RNA, 19 nt, Artificial Sequence
  Description of Artificial Sequence: Synthetic oligonucleotide
aggaucuuuauuugaagcu

SEQ ID NO: 681821 - RNA, 19 nt, Artificial Sequence
  Description of Artificial Sequence: Synthetic oligonucleotide
uaguauguucuauagucac

SEQ ID NO: 681822 - RNA, 19 nt, Artificial Sequence
  Description of Artificial Sequence: Synthetic oligonucleotide
cacucaaucuccuuuguug

SEQ ID NO: 681823 - RNA, 19 nt, Artificial Sequence
  Description of Artificial Sequence: Synthetic oligonucleotide
ucucuuacacaguucaagu

SEQ ID NO: 681824 - RNA, 19 nt, Artificial Sequence
  Description of Artificial Sequence: Synthetic oligonucleotide
acucacacgaaacaagagu

SEQ ID NO: 681825 - RNA, 19 nt, Artificial Sequence
  Description of Artificial Sequence: Synthetic oligonucleotide
ugaauuagacaguuuguau

SEQ ID NO: 681826 - RNA, 19 nt, Artificial Sequence
  Description of Artificial Sequence: Synthetic oligonucleotide
uucaacuagaauucuccga

SEQ ID NO: 681827 - RNA, 19 nt, Artificial Sequence
  Description of Artificial Sequence: Synthetic oligonucleotide
ucggugaaugacuucuccg

SEQ ID NO: 681828 - RNA, 19 nt, Artificial Sequence
  Description of Artificial Sequence: Synthetic oligonucleotide
auaguccuuacagugagag

SEQ ID NO: 681829 - RNA, 19 nt, Artificial Sequence
  Description of Artificial Sequence: Synthetic oligonucleotide
agaauguauacugacagaa

SEQ ID NO: 681830 - RNA, 19 nt, Artificial Sequence
  Description of Artificial Sequence: Synthetic oligonucleotide
ucccguaucucccucacca

SEQ ID NO: 681831 - RNA, 19 nt, Artificial Sequence
  Description of Artificial Sequence: Synthetic oligonucleotide
aguccuuacagugagagaa

SEQ ID NO: 681832 - RNA, 19 nt, Artificial Sequence
  Description of Artificial Sequence: Synthetic oligonucleotide
uggcagugagauuauauac

SEQ ID NO: 681833 - RNA, 19 nt, Artificial Sequence
  Description of Artificial Sequence: Synthetic oligonucleotide
caagugaagguccagcgug

SEQ ID NO: 681834 - RNA, 19 nt, Artificial Sequence
  Description of Artificial Sequence: Synthetic oligonucleotide
uaucaagucagcagguauc

SEQ ID NO: 681835 - RNA, 19 nt, Artificial Sequence
  Description of Artificial Sequence: Synthetic oligonucleotide
aacggucaauaucaaguca

SEQ ID NO: 681836 - RNA, 19 nt, Artificial Sequence
  Description of Artificial Sequence: Synthetic oligonucleotide
caucaggucgcuuuguaac

SEQ ID NO: 681837 - RNA, 19 nt, Artificial Sequence
  Description of Artificial Sequence: Synthetic oligonucleotide
auguauacugacagaagac

SEQ ID NO: 681838 - RNA, 19 nt, Artificial Sequence
  Description of Artificial Sequence: Synthetic oligonucleotide
uuaaucuguucaucuaggu

SEQ ID NO: 681839 - RNA, 19 nt, Artificial Sequence
  Description of Artificial Sequence: Synthetic oligonucleotide
gacguucagucucauagug

SEQ ID NO: 681840 - RNA, 19 nt, Artificial Sequence
  Description of Artificial Sequence: Synthetic oligonucleotide
cuuuauuugaagcuggucu

SEQ ID NO: 681841 - RNA, 19 nt, Artificial Sequence
  Description of Artificial Sequence: Synthetic oligonucleotide
ucuccgaagagucauccuc

SEQ ID NO: 681842 - RNA, 19 nt, Artificial Sequence
  Description of Artificial Sequence: Synthetic oligonucleotide
cugaggauagggcagguac

SEQ ID NO: 681843 - RNA, 19 nt, Artificial Sequence
  Description of Artificial Sequence: Synthetic oligonucleotide
auguucuauagucaccucu

SEQ ID NO: 681844 - RNA, 19 nt, Artificial Sequence
  Description of Artificial Sequence: Synthetic oligonucleotide
uccaauauguuuguaguau

SEQ ID NO: 681845 - RNA, 19 nt, Artificial Sequence
  Description of Artificial Sequence: Synthetic oligonucleotide
uccgcugcuguccacaacu

SEQ ID NO: 681846 - RNA, 19 nt, Artificial Sequence
  Description of Artificial Sequence: Synthetic oligonucleotide
aguaccuugugauuuucga

SEQ ID NO: 681847 - RNA, 19 nt, Artificial Sequence
  Description of Artificial Sequence: Synthetic oligonucleotide
gaaccucauucuuagauaa

SEQ ID NO: 681848 - RNA, 19 nt, Artificial Sequence
  Description of Artificial Sequence: Synthetic oligonucleotide
gucgcuuuguaacaaaguc

SEQ ID NO: 681849 - RNA, 19 nt, Artificial Sequence
  Description of Artificial Sequence: Synthetic oligonucleotide
acucaaucuccuuuguuga

SEQ ID NO: 681850 - RNA, 19 nt, Artificial Sequence
  Description of Artificial Sequence: Synthetic oligonucleotide
aaaaguacagcaggcugca

SEQ ID NO: 681851 - RNA, 19 nt, Artificial Sequence
  Description of Artificial Sequence: Synthetic oligonucleotide
aauuauuacccggcacguc

SEQ ID NO: 681852 - RNA, 19 nt, Artificial Sequence
  Description of Artificial Sequence: Synthetic oligonucleotide
  modified_base (7)..(7): a, c, u, g, unknown or other
ucuuuanacgguggggaca

SEQ ID NO: 681853 - RNA, 19 nt, Artificial Sequence
  Description of Artificial Sequence: Synthetic oligonucleotide
uaucagagggcucuccaac

SEQ ID NO: 681854 - RNA, 19 nt, Artificial Sequence
  Description of Artificial Sequence: Synthetic oligonucleotide
uacucacacgaaacaagag

SEQ ID NO: 681855 - RNA, 19 nt, Artificial Sequence
  Description of Artificial Sequence: Synthetic oligonucleotide
uacagugagagaaggucac

SEQ ID NO: 681856 - RNA, 19 nt, Artificial Sequence
  Description of Artificial Sequence: Synthetic oligonucleotide
ucucuuaccaaguggucgu

SEQ ID NO: 681857 - RNA, 19 nt, Artificial Sequence
  Description of Artificial Sequence: Synthetic oligonucleotide
aacuucaaggcucccacuu

SEQ ID NO: 681858 - RNA, 19 nt, Artificial Sequence
  Description of Artificial Sequence: Synthetic oligonucleotide
uuauuacccggcacgucag

SEQ ID NO: 681859 - RNA, 19 nt, Artificial Sequence
  Description of Artificial Sequence: Synthetic oligonucleotide
uccugauaacuauccacag

SEQ ID NO: 681860 - RNA, 19 nt, Artificial Sequence
  Description of Artificial Sequence: Synthetic oligonucleotide
gucucuuaccaaguggucg

SEQ ID NO: 681861 - RNA, 19 nt, Artificial Sequence
  Description of Artificial Sequence: Synthetic oligonucleotide
auaucaagucagcagguau

SEQ ID NO: 681862 - RNA, 19 nt, Artificial Sequence
  Description of Artificial Sequence: Synthetic oligonucleotide
uccuuacagugagagaagg

SEQ ID NO: 681863 - RNA, 19 nt, Artificial Sequence
  Description of Artificial Sequence: Synthetic oligonucleotide
cuuaccaaguggucguggc

SEQ ID NO: 681864 - RNA, 19 nt, Artificial Sequence
  Description of Artificial Sequence: Synthetic oligonucleotide
ucguuuaaugagcgcaucu

SEQ ID NO: 681865 - RNA, 19 nt, Artificial Sequence
  Description of Artificial Sequence: Synthetic oligonucleotide
uuguaguauguucuauagu

SEQ ID NO: 681866 - RNA, 19 nt, Artificial Sequence
  Description of Artificial Sequence: Synthetic oligonucleotide
ugugaaggaaugguccucc

SEQ ID NO: 681867 - RNA, 19 nt, Artificial Sequence
  Description of Artificial Sequence: Synthetic oligonucleotide
acuacacucaaucuccuuu

SEQ ID NO: 681868 - RNA, 19 nt, Artificial Sequence
  Description of Artificial Sequence: Synthetic oligonucleotide
  modified_base (4)..(4): a, c, u, g, unknown or other
uuanacgguggggacaugu

SEQ ID NO: 681869 - RNA, 19 nt, Artificial Sequence
  Description of Artificial Sequence: Synthetic oligonucleotide
acggucaauaucaagucag

SEQ ID NO: 681870 - RNA, 19 nt, Artificial Sequence
  Description of Artificial Sequence: Synthetic oligonucleotide
uggacugcggggaaggcac

SEQ ID NO: 681871 - RNA, 19 nt, Artificial Sequence
  Description of Artificial Sequence: Synthetic oligonucleotide
gugauugucuuauccuucc

SEQ ID NO: 681872 - RNA, 19 nt, Artificial Sequence
  Description of Artificial Sequence: Synthetic oligonucleotide
ccagaauguauacugacag

SEQ ID NO: 681873 - RNA, 19 nt, Artificial Sequence
  Description of Artificial Sequence: Synthetic oligonucleotide
uucccgucguuuaaugagc

SEQ ID NO: 681874 - RNA, 19 nt, Artificial Sequence
  Description of Artificial Sequence: Synthetic oligonucleotide
cuuaaggguagcccaguag

SEQ ID NO: 681875 - RNA, 19 nt, Artificial Sequence
  Description of Artificial Sequence: Synthetic oligonucleotide
uccuguucguucucuaucu

SEQ ID NO: 681876 - RNA, 19 nt, Artificial Sequence
  Description of Artificial Sequence: Synthetic oligonucleotide
cacaguagacucacacugg

SEQ ID NO: 681877 - RNA, 19 nt, Artificial Sequence
  Description of Artificial Sequence: Synthetic oligonucleotide
ucccgucguuuaaugagcg

SEQ ID NO: 681878 - RNA, 19 nt, Artificial Sequence
  Description of Artificial Sequence: Synthetic oligonucleotide
cucucuuacacaguucaag

SEQ ID NO: 681879 - RNA, 19 nt, Artificial Sequence
  Description of Artificial Sequence: Synthetic oligonucleotide
gaauuagacaguuuguauu

SEQ ID NO: 681880 - RNA, 19 nt, Artificial Sequence
  Description of Artificial Sequence: Synthetic oligonucleotide
uaauuauuacccggcacgu

SEQ ID NO: 681881 - RNA, 19 nt, Artificial Sequence
  Description of Artificial Sequence: Synthetic oligonucleotide
uucgacaaaucaauacaua

SEQ ID NO: 681882 - RNA, 19 nt, Artificial Sequence
  Description of Artificial Sequence: Synthetic oligonucleotide
acgaaacaagaguggacag

SEQ ID NO: 681883 - RNA, 19 nt, Artificial Sequence
  Description of Artificial Sequence: Synthetic oligonucleotide
acuuucaacuagaauucuc

SEQ ID NO: 681884 - RNA, 19 nt, Artificial Sequence
  Description of Artificial Sequence: Synthetic oligonucleotide
ugaggauagggcagguacu

SEQ ID NO: 681885 - RNA, 19 nt, Artificial Sequence
  Description of Artificial Sequence: Synthetic oligonucleotide
uauucccgucguuuaauga

SEQ ID NO: 681886 - RNA, 19 nt, Artificial Sequence
  Description of Artificial Sequence: Synthetic oligonucleotide
uccgaagagucauccuccg

SEQ ID NO: 681887 - RNA, 19 nt, Artificial Sequence
  Description of Artificial Sequence: Synthetic oligonucleotide
agucucauagugcuuuggu

SEQ ID NO: 681888 - RNA, 19 nt, Artificial Sequence
  Description of Artificial Sequence: Synthetic oligonucleotide
cuccugauaacuauccaca

SEQ ID NO: 681889 - RNA, 19 nt, Artificial Sequence
  Description of Artificial Sequence: Synthetic oligonucleotide
uucguucucuaucuuggaa

SEQ ID NO: 681890 - RNA, 19 nt, Artificial Sequence
  Description of Artificial Sequence: Synthetic oligonucleotide
caacggucaauaucaaguc

SEQ ID NO: 681891 - RNA, 19 nt, Artificial Sequence
  Description of Artificial Sequence: Synthetic oligonucleotide
auauacucacacgaaacaa

SEQ ID NO: 681892 - RNA, 19 nt, Artificial Sequence
  Description of Artificial Sequence: Synthetic oligonucleotide
cucacuauacacacagaca

SEQ ID NO: 681893 - RNA, 19 nt, Artificial Sequence
  Description of Artificial Sequence: Synthetic oligonucleotide
aauucuccgaagagucauc

SEQ ID NO: 681894 - RNA, 19 nt, Artificial Sequence
  Description of Artificial Sequence: Synthetic oligonucleotide
cugugggagaaguagccac

SEQ ID NO: 681895 - RNA, 19 nt, Artificial Sequence
  Description of Artificial Sequence: Synthetic oligonucleotide
gcucacuauacacacagac

SEQ ID NO: 681896 - RNA, 19 nt, Artificial Sequence
  Description of Artificial Sequence: Synthetic oligonucleotide
gucuuauccuuccccaagc

SEQ ID NO: 681897 - RNA, 19 nt, Artificial Sequence
  Description of Artificial Sequence: Synthetic oligonucleotide
ugauaacuauccacaggaa

SEQ ID NO: 681898 - RNA, 19 nt, Artificial Sequence
  Description of Artificial Sequence: Synthetic oligonucleotide
auacucacacgaaacaaga

SEQ ID NO: 681899 - RNA, 19 nt, Artificial Sequence
  Description of Artificial Sequence: Synthetic oligonucleotide
ucaucuagguauucccguc

SEQ ID NO: 681900 - RNA, 19 nt, Artificial Sequence
  Description of Artificial Sequence: Synthetic oligonucleotide
cuuuaauuauuacccggca

SEQ ID NO: 681901 - RNA, 19 nt, Artificial Sequence
  Description of Artificial Sequence: Synthetic oligonucleotide
aauaucaagucagcaggua

SEQ ID NO: 681902 - RNA, 19 nt, Artificial Sequence
  Description of Artificial Sequence: Synthetic oligonucleotide
cuguucguucucuaucuug

SEQ ID NO: 681903 - RNA, 19 nt, Artificial Sequence
  Description of Artificial Sequence: Synthetic oligonucleotide
gucaacggucaauaucaag

SEQ ID NO: 681904 - RNA, 19 nt, Artificial Sequence
  Description of Artificial Sequence: Synthetic oligonucleotide
gaagagggcagcacguggc

SEQ ID NO: 681905 - RNA, 19 nt, Artificial Sequence
  Description of Artificial Sequence: Synthetic oligonucleotide
gaacucugugaaggaaugg

SEQ ID NO: 681906 - RNA, 19 nt, Artificial Sequence
  Description of Artificial Sequence: Synthetic oligonucleotide
uaucgggcuagguggaaga

SEQ ID NO: 681907 - RNA, 19 nt, Artificial Sequence
  Description of Artificial Sequence: Synthetic oligonucleotide
acguucagucucauagugc

SEQ ID NO: 681908 - RNA, 19 nt, Artificial Sequence
  Description of Artificial Sequence: Synthetic oligonucleotide
guucuauagucaccucucc

SEQ ID NO: 681909 - RNA, 19 nt, Artificial Sequence
  Description of Artificial Sequence: Synthetic oligonucleotide
uuaccaaguggucguggcu

SEQ ID NO: 681910 - RNA, 19 nt, Artificial Sequence
  Description of Artificial Sequence: Synthetic oligonucleotide
ugaaggaaugguccuccaa

SEQ ID NO: 681911 - RNA, 19 nt, Artificial Sequence
  Description of Artificial Sequence: Synthetic oligonucleotide
uacugggcguccuuggacu

SEQ ID NO: 681912 - RNA, 19 nt, Artificial Sequence
  Description of Artificial Sequence: Synthetic oligonucleotide
uugacucggugaaugacuu

SEQ ID NO: 681913 - RNA, 19 nt, Artificial Sequence
  Description of Artificial Sequence: Synthetic oligonucleotide
acacgaaacaagaguggac

SEQ ID NO: 681914 - RNA, 19 nt, Artificial Sequence
  Description of Artificial Sequence: Synthetic oligonucleotide
cacgaaacaagaguggaca

SEQ ID NO: 681915 - RNA, 19 nt, Artificial Sequence
  Description of Artificial Sequence: Synthetic oligonucleotide
gaaugguccuccaauaugu

SEQ ID NO: 681916 - RNA, 19 nt, Artificial Sequence
  Description of Artificial Sequence: Synthetic oligonucleotide
gaggauagggcagguacug

SEQ ID NO: 681917 - RNA, 19 nt, Artificial Sequence
  Description of Artificial Sequence: Synthetic oligonucleotide
gguagaucccuccuaucag

SEQ ID NO: 681918 - RNA, 19 nt, Artificial Sequence
  Description of Artificial Sequence: Synthetic oligonucleotide
ucaucaggucgcuuuguaa

SEQ ID NO: 681919 - RNA, 19 nt, Artificial Sequence
  Description of Artificial Sequence: Synthetic oligonucleotide
aggauaguauggcaccaga

SEQ ID NO: 681920 - RNA, 19 nt, Artificial Sequence
  Description of Artificial Sequence: Synthetic oligonucleotide
guauucccgucguuuaaug

SEQ ID NO: 681921 - RNA, 19 nt, Artificial Sequence
  Description of Artificial Sequence: Synthetic oligonucleotide
guagggucggugaagcugc

SEQ ID NO: 681922 - RNA, 19 nt, Artificial Sequence
  Description of Artificial Sequence: Synthetic oligonucleotide
caguaccuugugauuuucg

SEQ ID NO: 681923 - RNA, 19 nt, Artificial Sequence
  Description of Artificial Sequence: Synthetic oligonucleotide
uacacucaaucuccuuugu

SEQ ID NO: 681924 - RNA, 19 nt, Artificial Sequence
  Description of Artificial Sequence: Synthetic oligonucleotide
aaugagcgcaucugaccau

SEQ ID NO: 681925 - RNA, 19 nt, Artificial Sequence
  Description of Artificial Sequence: Synthetic oligonucleotide
augucagacagaguggcgu

SEQ ID NO: 681926 - RNA, 19 nt, Artificial Sequence
  Description of Artificial Sequence: Synthetic oligonucleotide
gagucugcaguaagaacug

SEQ ID NO: 681927 - RNA, 19 nt, Artificial Sequence
  Description of Artificial Sequence: Synthetic oligonucleotide
uccgagcugucgcuggaag

SEQ ID NO: 681928 - RNA, 19 nt, Artificial Sequence
  Description of Artificial Sequence: Synthetic oligonucleotide
agaguggcguuggaggcac

SEQ ID NO: 681929 - RNA, 19 nt, Artificial Sequence
  Description of Artificial Sequence: Synthetic oligonucleotide
aaccugccaaaccaucgaa

SEQ ID NO: 681930 - RNA, 19 nt, Artificial Sequence
  Description of Artificial Sequence: Synthetic oligonucleotide
guagaucccuccuaucaga

SEQ ID NO: 681931 - RNA, 19 nt, Artificial Sequence
  Description of Artificial Sequence: Synthetic oligonucleotide
uggcguuggaggcacugug

SEQ ID NO: 681932 - RNA, 19 nt, Artificial Sequence
  Description of Artificial Sequence: Synthetic oligonucleotide
uaccaucagcucacuauac

SEQ ID NO: 681933 - RNA, 19 nt, Artificial Sequence
  Description of Artificial Sequence: Synthetic oligonucleotide
  modified_base (8)..(8): a, c, u, g, unknown or other
gucuuuanacgguggggac

SEQ ID NO: 681934 - RNA, 19 nt, Artificial Sequence
  Description of Artificial Sequence: Synthetic oligonucleotide
guuauaaagaacagcgccu

SEQ ID NO: 681935 - RNA, 19 nt, Artificial Sequence
  Description of Artificial Sequence: Synthetic oligonucleotide
ucuugacucggugaaugac

SEQ ID NO: 681936 - RNA, 19 nt, Artificial Sequence
  Description of Artificial Sequence: Synthetic oligonucleotide
ccuuuguugagauggcuag

SEQ ID NO: 681937 - RNA, 19 nt, Artificial Sequence
  Description of Artificial Sequence: Synthetic oligonucleotide
ccucuuuaauuauuacccg

SEQ ID NO: 681938 - RNA, 19 nt, Artificial Sequence
  Description of Artificial Sequence: Synthetic oligonucleotide
gaaggaaugguccuccaau

SEQ ID NO: 681939 - RNA, 19 nt, Artificial Sequence
  Description of Artificial Sequence: Synthetic oligonucleotide
guaguauguucuauaguca

SEQ ID NO: 681940 - RNA, 19 nt, Artificial Sequence
  Description of Artificial Sequence: Synthetic oligonucleotide
ccaaggauaguauggcacc

SEQ ID NO: 681941 - RNA, 19 nt, Artificial Sequence
  Description of Artificial Sequence: Synthetic oligonucleotide
uguguacugggcguccuug

SEQ ID NO: 681942 - RNA, 19 nt, Artificial Sequence
  Description of Artificial Sequence: Synthetic oligonucleotide
ggugguagggcuccaauca

SEQ ID NO: 681943 - RNA, 19 nt, Artificial Sequence
  Description of Artificial Sequence: Synthetic oligonucleotide
ugguugucucuuaccaagu

SEQ ID NO: 681944 - RNA, 19 nt, Artificial Sequence
  Description of Artificial Sequence: Synthetic oligonucleotide
agacguucagucucauagu

SEQ ID NO: 681945 - RNA, 19 nt, Artificial Sequence
  Description of Artificial Sequence: Synthetic oligonucleotide
guaggaaugcuggucugag

SEQ ID NO: 681946 - RNA, 19 nt, Artificial Sequence
  Description of Artificial Sequence: Synthetic oligonucleotide
gguagccaaggauaguaug

SEQ ID NO: 681947 - RNA, 19 nt, Artificial Sequence
  Description of Artificial Sequence: Synthetic oligonucleotide
uccuccugauaacuaucca

SEQ ID NO: 681948 - RNA, 19 nt, Artificial Sequence
  Description of Artificial Sequence: Synthetic oligonucleotide
guggacagcaaagacguuc

SEQ ID NO: 681949 - RNA, 19 nt, Artificial Sequence
  Description of Artificial Sequence: Synthetic oligonucleotide
ucacuacacucaaucuccu

SEQ ID NO: 681950 - RNA, 19 nt, Artificial Sequence
  Description of Artificial Sequence: Synthetic oligonucleotide
  modified_base (3)..(3): a, c, u, g, unknown or other
uanacgguggggacaugua

SEQ ID NO: 681951 - RNA, 19 nt, Artificial Sequence
  Description of Artificial Sequence: Synthetic oligonucleotide
ccacuuucaacuagaauuc

SEQ ID NO: 681952 - RNA, 19 nt, Artificial Sequence
  Description of Artificial Sequence: Synthetic oligonucleotide
uauuacccggcacgucagc

SEQ ID NO: 681953 - RNA, 19 nt, Artificial Sequence
  Description of Artificial Sequence: Synthetic oligonucleotide
ucaagucagcagguaucgg

SEQ ID NO: 681954 - RNA, 19 nt, Artificial Sequence
  Description of Artificial Sequence: Synthetic oligonucleotide
auuagacaguuuguauucu

SEQ ID NO: 681955 - RNA, 19 nt, Artificial Sequence
  Description of Artificial Sequence: Synthetic oligonucleotide
agacacacccaugaacucu

SEQ ID NO: 681956 - RNA, 19 nt, Artificial Sequence
  Description of Artificial Sequence: Synthetic oligonucleotide
aaguggucguggcuuccug

SEQ ID NO: 681957 - RNA, 19 nt, Artificial Sequence
  Description of Artificial Sequence: Synthetic oligonucleotide
uggggugaugcacuccccu

SEQ ID NO: 681958 - RNA, 19 nt, Artificial Sequence
  Description of Artificial Sequence: Synthetic oligonucleotide
ggugaugcacuccccuugg

SEQ ID NO: 681959 - RNA, 19 nt, Artificial Sequence
  Description of Artificial Sequence: Synthetic oligonucleotide
accucauucuuagauaaua

SEQ ID NO: 681960 - RNA, 19 nt, Artificial Sequence
  Description of Artificial Sequence: Synthetic oligonucleotide
aaagacguucagucucaua

SEQ ID NO: 681961 - RNA, 19 nt, Artificial Sequence
  Description of Artificial Sequence: Synthetic oligonucleotide
aacuauccacaggaacucu

SEQ ID NO: 681962 - RNA, 19 nt, Artificial Sequence
  Description of Artificial Sequence: Synthetic oligonucleotide
augagcgcaucugaccauc

SEQ ID NO: 681963 - RNA, 19 nt, Artificial Sequence
  Description of Artificial Sequence: Synthetic oligonucleotide
gugugcuuaggagaugggc

SEQ ID NO: 681964 - RNA, 19 nt, Artificial Sequence
  Description of Artificial Sequence: Synthetic oligonucleotide
gcagguaucgggcuaggug

SEQ ID NO: 681965 - RNA, 19 nt, Artificial Sequence
  Description of Artificial Sequence: Synthetic oligonucleotide
gugguagggcuccaaucag

SEQ ID NO: 681966 - RNA, 19 nt, Artificial Sequence
  Description of Artificial Sequence: Synthetic oligonucleotide
uauguucuauagucaccuc

SEQ ID NO: 681967 - RNA, 19 nt, Artificial Sequence
  Description of Artificial Sequence: Synthetic oligonucleotide
ccaucagcucacuauacac

SEQ ID NO: 681968 - RNA, 19 nt, Artificial Sequence
  Description of Artificial Sequence: Synthetic oligonucleotide
agccaaggauaguauggca

SEQ ID NO: 681969 - RNA, 19 nt, Artificial Sequence
  Description of Artificial Sequence: Synthetic oligonucleotide
guaacaaaguccaguaccu

SEQ ID NO: 681970 - RNA, 19 nt, Artificial Sequence
  Description of Artificial Sequence: Synthetic oligonucleotide
cuguaggaucuuuauuuga

SEQ ID NO: 681971 - RNA, 19 nt, Artificial Sequence
  Description of Artificial Sequence: Synthetic oligonucleotide
aggcacaucuggguccacc

SEQ ID NO: 681972 - RNA, 19 nt, Artificial Sequence
  Description of Artificial Sequence: Synthetic oligonucleotide
uaguccuuacagugagaga

SEQ ID NO: 681973 - RNA, 19 nt, Artificial Sequence
  Description of Artificial Sequence: Synthetic oligonucleotide
uacccggcacgucagcuuc

SEQ ID NO: 681974 - RNA, 19 nt, Artificial Sequence
  Description of Artificial Sequence: Synthetic oligonucleotide
cagcgugcucacuacacuc

SEQ ID NO: 681975 - RNA, 19 nt, Artificial Sequence
  Description of Artificial Sequence: Synthetic oligonucleotide
gauuuucgacaaaucaaua

SEQ ID NO: 681976 - RNA, 19 nt, Artificial Sequence
  Description of Artificial Sequence: Synthetic oligonucleotide
  modified_base (9)..(9): a, c, u, g, unknown or other
ggucuuuanacggugggga

SEQ ID NO: 681977 - RNA, 19 nt, Artificial Sequence
  Description of Artificial Sequence: Synthetic oligonucleotide
gacucggugaaugacuucu

SEQ ID NO: 681978 - RNA, 19 nt, Artificial Sequence
  Description of Artificial Sequence: Synthetic oligonucleotide
ugucaacggucaauaucaa

SEQ ID NO: 681979 - RNA, 19 nt, Artificial Sequence
  Description of Artificial Sequence: Synthetic oligonucleotide
cuugacucggugaaugacu

SEQ ID NO: 681980 - RNA, 19 nt, Artificial Sequence
  Description of Artificial Sequence: Synthetic oligonucleotide
cuggucccagaauguauac

SEQ ID NO: 681981 - RNA, 19 nt, Artificial Sequence
  Description of Artificial Sequence: Synthetic oligonucleotide
aggucgcuuuguaacaaag

SEQ ID NO: 681982 - RNA, 19 nt, Artificial Sequence
  Description of Artificial Sequence: Synthetic oligonucleotide
ggcaccagauggcagugag

SEQ ID NO: 681983 - RNA, 19 nt, Artificial Sequence
  Description of Artificial Sequence: Synthetic oligonucleotide
gguagggucggugaagcug

SEQ ID NO: 681984 - RNA, 19 nt, Artificial Sequence
  Description of Artificial Sequence: Synthetic oligonucleotide
uaccaaguggucguggcuu

SEQ ID NO: 681985 - RNA, 19 nt, Artificial Sequence
  Description of Artificial Sequence: Synthetic oligonucleotide
uucuccgaagagucauccu

SEQ ID NO: 681986 - RNA, 19 nt, Artificial Sequence
  Description of Artificial Sequence: Synthetic oligonucleotide
guacugggcguccuuggac

SEQ ID NO: 681987 - RNA, 19 nt, Artificial Sequence
  Description of Artificial Sequence: Synthetic oligonucleotide
ucgggcuagguggaagacc

SEQ ID NO: 681988 - RNA, 19 nt, Artificial Sequence
  Description of Artificial Sequence: Synthetic oligonucleotide
cuagaauucuccgaagagu

SEQ ID NO: 681989 - RNA, 19 nt, Artificial Sequence
  Description of Artificial Sequence: Synthetic oligonucleotide
cacacgaaacaagagugga

SEQ ID NO: 681990 - RNA, 19 nt, Artificial Sequence
  Description of Artificial Sequence: Synthetic oligonucleotide
ucaggucgcuuuguaacaa

SEQ ID NO: 681991 - RNA, 19 nt, Artificial Sequence
  Description of Artificial Sequence: Synthetic oligonucleotide
  modified_base (19)..(19): a, c, u, g, unknown or other
agucuguggaggucuuuan

SEQ ID NO: 681992 - RNA, 19 nt, Artificial Sequence
  Description of Artificial Sequence: Synthetic oligonucleotide
agcacguggcuggguagcc

SEQ ID NO: 681993 - RNA, 19 nt, Artificial Sequence
  Description of Artificial Sequence: Synthetic oligonucleotide
cuugugucaaagcagucau

SEQ ID NO: 681994 - RNA, 19 nt, Artificial Sequence
  Description of Artificial Sequence: Synthetic oligonucleotide
  modified_base (12)..(12): a, c, u, g, unknown or other
ggaggucuuuanacggugg

SEQ ID NO: 681995 - RNA, 19 nt, Artificial Sequence
  Description of Artificial Sequence: Synthetic oligonucleotide
auuacccggcacgucagcu

SEQ ID NO: 681996 - RNA, 19 nt, Artificial Sequence
  Description of Artificial Sequence: Synthetic oligonucleotide
gcguuggaggcacuguggg

SEQ ID NO: 681997 - RNA, 19 nt, Artificial Sequence
  Description of Artificial Sequence: Synthetic oligonucleotide
cacccaugaacucugugaa

SEQ ID NO: 681998 - RNA, 19 nt, Artificial Sequence
  Description of Artificial Sequence: Synthetic oligonucleotide
ugcuugugucaaagcaguc

SEQ ID NO: 681999 - RNA, 19 nt, Artificial Sequence
  Description of Artificial Sequence: Synthetic oligonucleotide
guaucgggcuagguggaag

SEQ ID NO: 682000 - RNA, 19 nt, Artificial Sequence
  Description of Artificial Sequence: Synthetic oligonucleotide
uugguagaucccuccuauc

SEQ ID NO: 682001 - RNA, 19 nt, Artificial Sequence
  Description of Artificial Sequence: Synthetic oligonucleotide
cgaagagucauccuccgac

SEQ ID NO: 682002 - RNA, 19 nt, Artificial Sequence
  Description of Artificial Sequence: Synthetic oligonucleotide
ugcggggaaggcacaucug

SEQ ID NO: 682003 - RNA, 19 nt, Artificial Sequence
  Description of Artificial Sequence: Synthetic oligonucleotide
augcacuccccuuggguaa

SEQ ID NO: 682004 - RNA, 19 nt, Artificial Sequence
  Description of Artificial Sequence: Synthetic oligonucleotide
aucgggcuagguggaagac

SEQ ID NO: 682005 - RNA, 19 nt, Artificial Sequence
  Description of Artificial Sequence: Synthetic oligonucleotide
uccgacacgcgcucuggaa

SEQ ID NO: 682006 - RNA, 19 nt, Artificial Sequence
  Description of Artificial Sequence: Synthetic oligonucleotide
guccuuacagugagagaag

SEQ ID NO: 682007 - RNA, 19 nt, Artificial Sequence
  Description of Artificial Sequence: Synthetic oligonucleotide
cauagugcuuugguuauaa

SEQ ID NO: 682008 - RNA, 19 nt, Artificial Sequence
  Description of Artificial Sequence: Synthetic oligonucleotide
gccaaggauaguauggcac

SEQ ID NO: 682009 - RNA, 19 nt, Artificial Sequence
  Description of Artificial Sequence: Synthetic oligonucleotide
acacucaaucuccuuuguu

SEQ ID NO: 682010 - RNA, 19 nt, Artificial Sequence
  Description of Artificial Sequence: Synthetic oligonucleotide
acugggcguccuuggacug

SEQ ID NO: 682011 - RNA, 19 nt, Artificial Sequence
  Description of Artificial Sequence: Synthetic oligonucleotide
uccuaucagagggcucucc

SEQ ID NO: 682012 - RNA, 19 nt, Artificial Sequence
  Description of Artificial Sequence: Synthetic oligonucleotide
auagugcuuugguuauaaa

SEQ ID NO: 682013 - RNA, 19 nt, Artificial Sequence
  Description of Artificial Sequence: Synthetic oligonucleotide
caugguugucucuuaccaa

SEQ ID NO: 682014 - RNA, 19 nt, Artificial Sequence
  Description of Artificial Sequence: Synthetic oligonucleotide
uacuaccaucagcucacua

SEQ ID NO: 682015 - RNA, 19 nt, Artificial Sequence
  Description of Artificial Sequence: Synthetic oligonucleotide
cuccaauauguuuguagua

SEQ ID NO: 682016 - RNA, 19 nt, Artificial Sequence
  Description of Artificial Sequence: Synthetic oligonucleotide
aggucgaggugggucacag

SEQ ID NO: 682017 - RNA, 19 nt, Artificial Sequence
  Description of Artificial Sequence: Synthetic oligonucleotide
aggugggucacagcugucu

SEQ ID NO: 682018 - RNA, 19 nt, Artificial Sequence
  Description of Artificial Sequence: Synthetic oligonucleotide
uggucguggcuuccuguuc

SEQ ID NO: 682019 - RNA, 19 nt, Artificial Sequence
  Description of Artificial Sequence: Synthetic oligonucleotide
aguggcguuggaggcacug

SEQ ID NO: 682020 - RNA, 19 nt, Artificial Sequence
  Description of Artificial Sequence: Synthetic oligonucleotide
cuaucagagggcucuccaa

SEQ ID NO: 682021 - RNA, 19 nt, Artificial Sequence
  Description of Artificial Sequence: Synthetic oligonucleotide
aaacaagaguggacagcaa

SEQ ID NO: 682022 - RNA, 19 nt, Artificial Sequence
  Description of Artificial Sequence: Synthetic oligonucleotide
gcagaugcaugguugucuc

SEQ ID NO: 682023 - RNA, 19 nt, Artificial Sequence
  Description of Artificial Sequence: Synthetic oligonucleotide
aggcuuaaggguagcccag

SEQ ID NO: 682024 - RNA, 19 nt, Artificial Sequence
  Description of Artificial Sequence: Synthetic oligonucleotide
uuacccggcacgucagcuu

SEQ ID NO: 682025 - RNA, 19 nt, Artificial Sequence
  Description of Artificial Sequence: Synthetic oligonucleotide
gcguccuuggacugcgggg

SEQ ID NO: 682026 - RNA, 19 nt, Artificial Sequence
  Description of Artificial Sequence: Synthetic oligonucleotide
aaccucauucuuagauaau

SEQ ID NO: 682027 - RNA, 19 nt, Artificial Sequence
  Description of Artificial Sequence: Synthetic oligonucleotide
ggcguccuuggacugcggg

SEQ ID NO: 682028 - RNA, 19 nt, Artificial Sequence
  Description of Artificial Sequence: Synthetic oligonucleotide
ugacucggugaaugacuuc

SEQ ID NO: 682029 - RNA, 19 nt, Artificial Sequence
  Description of Artificial Sequence: Synthetic oligonucleotide
  modified_base (5)..(5): a, c, u, g, unknown or other
uuuanacgguggggacaug

SEQ ID NO: 682030 - RNA, 19 nt, Artificial Sequence
  Description of Artificial Sequence: Synthetic oligonucleotide
cuuauccuuccccaagccu

SEQ ID NO: 682031 - RNA, 19 nt, Artificial Sequence
  Description of Artificial Sequence: Synthetic oligonucleotide
agcgugcucacuacacuca

SEQ ID NO: 682032 - RNA, 19 nt, Artificial Sequence
  Description of Artificial Sequence: Synthetic oligonucleotide
ggugaagcugccaagcugu

SEQ ID NO: 682033 - RNA, 19 nt, Artificial Sequence
  Description of Artificial Sequence: Synthetic oligonucleotide
cauaguccuuacagugaga

SEQ ID NO: 682034 - RNA, 19 nt, Artificial Sequence
  Description of Artificial Sequence: Synthetic oligonucleotide
acgaaauuugagaggcuua

SEQ ID NO: 682035 - RNA, 19 nt, Artificial Sequence
  Description of Artificial Sequence: Synthetic oligonucleotide
ggcguuggaggcacugugg

SEQ ID NO: 682036 - RNA, 19 nt, Artificial Sequence
  Description of Artificial Sequence: Synthetic oligonucleotide
  modified_base (6)..(6): a, c, u, g, unknown or other
cuuuanacgguggggacau

SEQ ID NO: 682037 - RNA, 19 nt, Artificial Sequence
  Description of Artificial Sequence: Synthetic oligonucleotide
guuugagucuguggagguc

SEQ ID NO: 682038 - RNA, 19 nt, Artificial Sequence
  Description of Artificial Sequence: Synthetic oligonucleotide
ucuccgcugcuguccacaa

SEQ ID NO: 682039 - RNA, 19 nt, Artificial Sequence
  Description of Artificial Sequence: Synthetic oligonucleotide
uagggucggugaagcugcc

SEQ ID NO: 682040 - RNA, 19 nt, Artificial Sequence
  Description of Artificial Sequence: Synthetic oligonucleotide
cuuggacugcggggaaggc

SEQ ID NO: 682041 - RNA, 19 nt, Artificial Sequence
  Description of Artificial Sequence: Synthetic oligonucleotide
aucuguucaucuagguauu

SEQ ID NO: 682042 - RNA, 19 nt, Artificial Sequence
  Description of Artificial Sequence: Synthetic oligonucleotide
cauuugguagaucccuccu

SEQ ID NO: 682043 - RNA, 19 nt, Artificial Sequence
  Description of Artificial Sequence: Synthetic oligonucleotide
gugaaggaaugguccucca

SEQ ID NO: 682044 - RNA, 19 nt, Artificial Sequence
  Description of Artificial Sequence: Synthetic oligonucleotide
  modified_base (14)..(14): a, c, u, g, unknown or other
guggaggucuuuanacggu

SEQ ID NO: 682045 - RNA, 19 nt, Artificial Sequence
  Description of Artificial Sequence: Synthetic oligonucleotide
ggugaaugacuucuccgcu

SEQ ID NO: 682046 - RNA, 19 nt, Artificial Sequence
  Description of Artificial Sequence: Synthetic oligonucleotide
cguuuaaugagcgcaucug

SEQ ID NO: 682047 - RNA, 19 nt, Artificial Sequence
  Description of Artificial Sequence: Synthetic oligonucleotide
caguaagaacugguuaaaa

SEQ ID NO: 682048 - RNA, 19 nt, Artificial Sequence
  Description of Artificial Sequence: Synthetic oligonucleotide
gggacacuuucauggucug

SEQ ID NO: 682049 - RNA, 19 nt, Artificial Sequence
  Description of Artificial Sequence: Synthetic oligonucleotide
cucccucaccaaugcuaag

SEQ ID NO: 682050 - RNA, 19 nt, Artificial Sequence
  Description of Artificial Sequence: Synthetic oligonucleotide
ucccaggguagggucggug

SEQ ID NO: 682051 - RNA, 19 nt, Artificial Sequence
  Description of Artificial Sequence: Synthetic oligonucleotide
cucuuaccaaguggucgug

SEQ ID NO: 682052 - RNA, 19 nt, Artificial Sequence
  Description of Artificial Sequence: Synthetic oligonucleotide
ccuccaauauguuuguagu

SEQ ID NO: 682053 - RNA, 19 nt, Artificial Sequence
  Description of Artificial Sequence: Synthetic oligonucleotide
agguaucgggcuaggugga

SEQ ID NO: 682054 - RNA, 19 nt, Artificial Sequence
  Description of Artificial Sequence: Synthetic oligonucleotide
ccaagccucuuucuacuuc

SEQ ID NO: 682055 - RNA, 19 nt, Artificial Sequence
  Description of Artificial Sequence: Synthetic oligonucleotide
ccgucguuuaaugagcgca

SEQ ID NO: 682056 - RNA, 19 nt, Artificial Sequence
  Description of Artificial Sequence: Synthetic oligonucleotide
cucccacuuucaacuagaa

SEQ ID NO: 682057 - RNA, 19 nt, Artificial Sequence
  Description of Artificial Sequence: Synthetic oligonucleotide
gaacaaccugccaaaccau

SEQ ID NO: 682058 - RNA, 19 nt, Artificial Sequence
  Description of Artificial Sequence: Synthetic oligonucleotide
agcagguaucgggcuaggu

SEQ ID NO: 682059 - RNA, 19 nt, Artificial Sequence
  Description of Artificial Sequence: Synthetic oligonucleotide
auacuaccaucagcucacu

SEQ ID NO: 682060 - RNA, 19 nt, Artificial Sequence
  Description of Artificial Sequence: Synthetic oligonucleotide
cugcggggaaggcacaucu

SEQ ID NO: 682061 - RNA, 19 nt, Artificial Sequence
  Description of Artificial Sequence: Synthetic oligonucleotide
cugguccgagcugucgcug

SEQ ID NO: 682062 - RNA, 19 nt, Artificial Sequence
  Description of Artificial Sequence: Synthetic oligonucleotide
caggucgcuuuguaacaaa

SEQ ID NO: 682063 - RNA, 19 nt, Artificial Sequence
  Description of Artificial Sequence: Synthetic oligonucleotide
ugagucuguggaggucuuu

SEQ ID NO: 682064 - RNA, 19 nt, Artificial Sequence
  Description of Artificial Sequence: Synthetic oligonucleotide
cauugucaacggucaauau

SEQ ID NO: 682065 - RNA, 19 nt, Artificial Sequence
  Description of Artificial Sequence: Synthetic oligonucleotide
cccgucguuuaaugagcgc

SEQ ID NO: 682066 - RNA, 19 nt, Artificial Sequence
  Description of Artificial Sequence: Synthetic oligonucleotide
agauggcagugagauuaua

SEQ ID NO: 682067 - RNA, 19 nt, Artificial Sequence
  Description of Artificial Sequence: Synthetic oligonucleotide
ggcagcacguggcugggua

SEQ ID NO: 682068 - RNA, 19 nt, Artificial Sequence
  Description of Artificial Sequence: Synthetic oligonucleotide
cuccauugucaacggucaa

SEQ ID NO: 682069 - RNA, 19 nt, Artificial Sequence
  Description of Artificial Sequence: Synthetic oligonucleotide
gcuuaaggguagcccagua

SEQ ID NO: 682070 - RNA, 19 nt, Artificial Sequence
  Description of Artificial Sequence: Synthetic oligonucleotide
ggauaguauggcaccagau

SEQ ID NO: 682071 - RNA, 19 nt, Artificial Sequence
  Description of Artificial Sequence: Synthetic oligonucleotide
ggucgcuuuguaacaaagu

SEQ ID NO: 682072 - RNA, 19 nt, Artificial Sequence
  Description of Artificial Sequence: Synthetic oligonucleotide
gggcucuccaacagaacaa

SEQ ID NO: 682073 - RNA, 19 nt, Artificial Sequence
  Description of Artificial Sequence: Synthetic oligonucleotide
guggucguggcuuccuguu

SEQ ID NO: 682074 - RNA, 19 nt, Artificial Sequence
  Description of Artificial Sequence: Synthetic oligonucleotide
cuccuaucagagggcucuc

SEQ ID NO: 682075 - RNA, 19 nt, Artificial Sequence
  Description of Artificial Sequence: Synthetic oligonucleotide
cuccgacacgcgcucugga

SEQ ID NO: 682076 - RNA, 19 nt, Artificial Sequence
  Description of Artificial Sequence: Synthetic oligonucleotide
ccuccgacacgcgcucugg

SEQ ID NO: 682077 - RNA, 19 nt, Artificial Sequence
  Description of Artificial Sequence: Synthetic oligonucleotide
ccuccuaucagagggcucu

SEQ ID NO: 682078 - RNA, 19 nt, Artificial Sequence
  Description of Artificial Sequence: Synthetic oligonucleotide
gcgugcucacuacacucaa

SEQ ID NO: 682079 - RNA, 19 nt, Artificial Sequence
  Description of Artificial Sequence: Synthetic oligonucleotide
agcagucaucaggucgcuu

SEQ ID NO: 682080 - RNA, 19 nt, Artificial Sequence
  Description of Artificial Sequence: Synthetic oligonucleotide
cacuacacucaaucuccuu

SEQ ID NO: 682081 - RNA, 19 nt, Artificial Sequence
  Description of Artificial Sequence: Synthetic oligonucleotide
ccccggggaucccacugcc

SEQ ID NO: 682082 - RNA, 19 nt, Artificial Sequence
  Description of Artificial Sequence: Synthetic oligonucleotide
caaguggucguggcuuccu

SEQ ID NO: 682083 - RNA, 19 nt, Artificial Sequence
  Description of Artificial Sequence: Synthetic oligonucleotide
gcugguccgagcugucgcu

SEQ ID NO: 682084 - RNA, 19 nt, Artificial Sequence
  Description of Artificial Sequence: Synthetic oligonucleotide
gcacuccccuuggguaagg

SEQ ID NO: 682085 - RNA, 19 nt, Artificial Sequence
  Description of Artificial Sequence: Synthetic oligonucleotide
gguaucgggcuagguggaa

SEQ ID NO: 682086 - RNA, 19 nt, Artificial Sequence
  Description of Artificial Sequence: Synthetic oligonucleotide
guccuccaauauguuugua

SEQ ID NO: 682087 - RNA, 19 nt, Artificial Sequence
  Description of Artificial Sequence: Synthetic oligonucleotide
ccgaagagucauccuccga

SEQ ID NO: 682088 - RNA, 19 nt, Artificial Sequence
  Description of Artificial Sequence: Synthetic oligonucleotide
ccccaagccucuuucuacu

SEQ ID NO: 682089 - RNA, 19 nt, Artificial Sequence
  Description of Artificial Sequence: Synthetic oligonucleotide
ggcuuaaggguagcccagu

SEQ ID NO: 682090 - RNA, 19 nt, Artificial Sequence
  Description of Artificial Sequence: Synthetic oligonucleotide
caaagacguucagucucau

SEQ ID NO: 682091 - RNA, 19 nt, Artificial Sequence
  Description of Artificial Sequence: Synthetic oligonucleotide
ggggugaugcacuccccuu

SEQ ID NO: 682092 - RNA, 19 nt, Artificial Sequence
  Description of Artificial Sequence: Synthetic oligonucleotide
gcugucgcuggaagggacu

SEQ ID NO: 682093 - RNA, 19 nt, Artificial Sequence
  Description of Artificial Sequence: Synthetic oligonucleotide
cccguaucucccucaccaa

SEQ ID NO: 682094 - RNA, 19 nt, Artificial Sequence
  Description of Artificial Sequence: Synthetic oligonucleotide
ggguagggucggugaagcu

SEQ ID NO: 682095 - RNA, 19 nt, Artificial Sequence
  Description of Artificial Sequence: Synthetic oligonucleotide
cgucguuuaaugagcgcau

SEQ ID NO: 682096 - RNA, 19 nt, Artificial Sequence
  Description of Artificial Sequence: Synthetic oligonucleotide
ccggcacgucagcuucuug

SEQ ID NO: 682097 - RNA, 19 nt, Artificial Sequence
  Description of Artificial Sequence: Synthetic oligonucleotide
ggacugcggggaaggcaca

SEQ ID NO: 682098 - RNA, 19 nt, Artificial Sequence
  Description of Artificial Sequence: Synthetic oligonucleotide
cgggaagagggcagcacgu

SEQ ID NO: 682099 - RNA, 19 nt, Artificial Sequence
  Description of Artificial Sequence: Synthetic oligonucleotide
gaguggcguuggaggcacu

SEQ ID NO: 682100 - RNA, 19 nt, Artificial Sequence
  Description of Artificial Sequence: Synthetic oligonucleotide
cgugcucacuacacucaau

SEQ ID NO: 682101 - RNA, 19 nt, Artificial Sequence
  Description of Artificial Sequence: Synthetic oligonucleotide
caccagcacggcguuccuu

SEQ ID NO: 682102 - RNA, 19 nt, Artificial Sequence
  Description of Artificial Sequence: Synthetic oligonucleotide
cgguggggacauguaggaa

SEQ ID NO: 682103 - RNA, 19 nt, Artificial Sequence
  Description of Artificial Sequence: Synthetic oligonucleotide
cccggcacgucagcuucuu

SEQ ID NO: 682104 - RNA, 19 nt, Artificial Sequence
  Description of Artificial Sequence: Synthetic oligonucleotide
  modified_base (1)..(1): a, c, u, g, unknown or other
nacgguggggacauguagg

SEQ ID NO: 682105 - RNA, 19 nt, Artificial Sequence
  Description of Artificial Sequence: Synthetic oligonucleotide
aaauauuugacccugauua

SEQ ID NO: 682106 - RNA, 19 nt, Artificial Sequence
  Description of Artificial Sequence: Synthetic oligonucleotide
uauagugucaaacagaccu

SEQ ID NO: 682107 - RNA, 19 nt, Artificial Sequence
  Description of Artificial Sequence: Synthetic oligonucleotide
aauuauuuaccuuugacau

SEQ ID NO: 682108 - RNA, 19 nt, Artificial Sequence
  Description of Artificial Sequence: Synthetic oligonucleotide
acuuuguuacuuuugaagc

SEQ ID NO: 682109 - RNA, 19 nt, Artificial Sequence
  Description of Artificial Sequence: Synthetic oligonucleotide
agcuucaaauauuugaccc

SEQ ID NO: 682110 - RNA, 19 nt, Artificial Sequence
  Description of Artificial Sequence: Synthetic oligonucleotide
uuguguauaaacaggauug

SEQ ID NO: 682111 - RNA, 19 nt, Artificial Sequence
  Description of Artificial Sequence: Synthetic oligonucleotide
uguaacaucaaccaugauc

SEQ ID NO: 682112 - RNA, 19 nt, Artificial Sequence
  Description of Artificial Sequence: Synthetic oligonucleotide
aacuacaaggagcggaugc

SEQ ID NO: 682113 - RNA, 19 nt, Artificial Sequence
  Description of Artificial Sequence: Synthetic oligonucleotide
aagguaaauuucuaaauca

SEQ ID NO: 682114 - RNA, 19 nt, Artificial Sequence
  Description of Artificial Sequence: Synthetic oligonucleotide
aauucuucaacacuugcga

SEQ ID NO: 682115 - RNA, 19 nt, Artificial Sequence
  Description of Artificial Sequence: Synthetic oligonucleotide
auuacgggaagcuauuagc

SEQ ID NO: 682116 - RNA, 19 nt, Artificial Sequence
  Description of Artificial Sequence: Synthetic oligonucleotide
ucagacuacgguaagagug

SEQ ID NO: 682117 - RNA, 19 nt, Artificial Sequence
  Description of Artificial Sequence: Synthetic oligonucleotide
uuuaugguuauacaguacu

SEQ ID NO: 682118 - RNA, 19 nt, Artificial Sequence
  Description of Artificial Sequence: Synthetic oligonucleotide
agagaauacgcaaauaccc

SEQ ID NO: 682119 - RNA, 19 nt, Artificial Sequence
  Description of Artificial Sequence: Synthetic oligonucleotide
auuguauguaacaucaacc

SEQ ID NO: 682120 - RNA, 19 nt, Artificial Sequence
  Description of Artificial Sequence: Synthetic oligonucleotide
uuuuguaguaaucuguacu

SEQ ID NO: 682121 - RNA, 19 nt, Artificial Sequence
  Description of Artificial Sequence: Synthetic oligonucleotide
aucauuugcaaauuacggg

SEQ ID NO: 682122 - RNA, 19 nt, Artificial Sequence
  Description of Artificial Sequence: Synthetic oligonucleotide
uauuguaagcuucaaauau

SEQ ID NO: 682123 - RNA, 19 nt, Artificial Sequence
  Description of Artificial Sequence: Synthetic oligonucleotide
auagcgguuauuuucacag

SEQ ID NO: 682124 - RNA, 19 nt, Artificial Sequence
  Description of Artificial Sequence: Synthetic oligonucleotide
ucauuugcaaauuacggga

SEQ ID NO: 682125 - RNA, 19 nt, Artificial Sequence
  Description of Artificial Sequence: Synthetic oligonucleotide
aauacgcaaauacccuacc

SEQ ID NO: 682126 - RNA, 19 nt, Artificial Sequence
  Description of Artificial Sequence: Synthetic oligonucleotide
uucagauuguugaagagga

SEQ ID NO: 682127 - RNA, 19 nt, Artificial Sequence
  Description of Artificial Sequence: Synthetic oligonucleotide
uaacguugaaagcacaaag

SEQ ID NO: 682128 - RNA, 19 nt, Artificial Sequence
  Description of Artificial Sequence: Synthetic oligonucleotide
aacgauaagucuguaacuc

SEQ ID NO: 682129 - RNA, 19 nt, Artificial Sequence
  Description of Artificial Sequence: Synthetic oligonucleotide
auucuauuuggauacauca

SEQ ID NO: 682130 - RNA, 19 nt, Artificial Sequence
  Description of Artificial Sequence: Synthetic oligonucleotide
caucauuugcaaauuacgg

SEQ ID NO: 682131 - RNA, 19 nt, Artificial Sequence
  Description of Artificial Sequence: Synthetic oligonucleotide
uuguauguaacaucaacca

SEQ ID NO: 682132 - RNA, 19 nt, Artificial Sequence
  Description of Artificial Sequence: Synthetic oligonucleotide
guaacgauaagucuguaac

SEQ ID NO: 682133 - RNA, 19 nt, Artificial Sequence
  Description of Artificial Sequence: Synthetic oligonucleotide
uuaacugacugacuuaaac

SEQ ID NO: 682134 - RNA, 19 nt, Artificial Sequence
  Description of Artificial Sequence: Synthetic oligonucleotide
aacgcaggaguccucacac

SEQ ID NO: 682135 - RNA, 19 nt, Artificial Sequence
  Description of Artificial Sequence: Synthetic oligonucleotide
aauuacgggaagcuauuag

SEQ ID NO: 682136 - RNA, 19 nt, Artificial Sequence
  Description of Artificial Sequence: Synthetic oligonucleotide
caugguaacgauaagucug

SEQ ID NO: 682137 - RNA, 19 nt, Artificial Sequence
  Description of Artificial Sequence: Synthetic oligonucleotide
gaagccaugcgcucgauag

SEQ ID NO: 682138 - RNA, 19 nt, Artificial Sequence
  Description of Artificial Sequence: Synthetic oligonucleotide
acgcaaauacccuaccugc

SEQ ID NO: 682139 - RNA, 19 nt, Artificial Sequence
  Description of Artificial Sequence: Synthetic oligonucleotide
aagacaaacgcaggagucc

SEQ ID NO: 682140 - RNA, 19 nt, Artificial Sequence
  Description of Artificial Sequence: Synthetic oligonucleotide
aaggagcggaugcaaauac

SEQ ID NO: 682141 - RNA, 19 nt, Artificial Sequence
  Description of Artificial Sequence: Synthetic oligonucleotide
caugauacuguugaaaagc

SEQ ID NO: 682142 - RNA, 19 nt, Artificial Sequence
  Description of Artificial Sequence: Synthetic oligonucleotide
uuucagauuguugaagagg

SEQ ID NO: 682143 - RNA, 19 nt, Artificial Sequence
  Description of Artificial Sequence: Synthetic oligonucleotide
aauagggucgcucuuacuu

SEQ ID NO: 682144 - RNA, 19 nt, Artificial Sequence
  Description of Artificial Sequence: Synthetic oligonucleotide
guugcaacuacaaggagcg

SEQ ID NO: 682145 - RNA, 19 nt, Artificial Sequence
  Description of Artificial Sequence: Synthetic oligonucleotide
uuugacaugcaacucacuc

SEQ ID NO: 682146 - RNA, 19 nt, Artificial Sequence
  Description of Artificial Sequence: Synthetic oligonucleotide
gauuguauguaacaucaac

SEQ ID NO: 682147 - RNA, 19 nt, Artificial Sequence
  Description of Artificial Sequence: Synthetic oligonucleotide
acaugcaacucacucuucc

SEQ ID NO: 682148 - RNA, 19 nt, Artificial Sequence
  Description of Artificial Sequence: Synthetic oligonucleotide
aaacuugauccacugguug

SEQ ID NO: 682149 - RNA, 19 nt, Artificial Sequence
  Description of Artificial Sequence: Synthetic oligonucleotide
uauuugacccugauuagca

SEQ ID NO: 682150 - RNA, 19 nt, Artificial Sequence
  Description of Artificial Sequence: Synthetic oligonucleotide
caguuuuaugguuauacag

SEQ ID NO: 682151 - RNA, 19 nt, Artificial Sequence
  Description of Artificial Sequence: Synthetic oligonucleotide
guuuaugccagccuccagg

SEQ ID NO: 682152 - RNA, 19 nt, Artificial Sequence
  Description of Artificial Sequence: Synthetic oligonucleotide
uacaguacuauacaauaaa

SEQ ID NO: 682153 - RNA, 19 nt, Artificial Sequence
  Description of Artificial Sequence: Synthetic oligonucleotide
uugacccugauuagcagcg

SEQ ID NO: 682154 - RNA, 19 nt, Artificial Sequence
  Description of Artificial Sequence: Synthetic oligonucleotide
uguaguaaucuguacuggc

SEQ ID NO: 682155 - RNA, 19 nt, Artificial Sequence
  Description of Artificial Sequence: Synthetic oligonucleotide
uaccagaccuacaauaggc

SEQ ID NO: 682156 - RNA, 19 nt, Artificial Sequence
  Description of Artificial Sequence: Synthetic oligonucleotide
acgauaagucuguaacucc

SEQ ID NO: 682157 - RNA, 19 nt, Artificial Sequence
  Description of Artificial Sequence: Synthetic oligonucleotide
agaagcauaauagggucgc

SEQ ID NO: 682158 - RNA, 19 nt, Artificial Sequence
  Description of Artificial Sequence: Synthetic oligonucleotide
uucaacacuugcgagauug

SEQ ID NO: 682159 - RNA, 19 nt, Artificial Sequence
  Description of Artificial Sequence: Synthetic oligonucleotide
acagacagagagcuuauag

SEQ ID NO: 682160 - RNA, 19 nt, Artificial Sequence
  Description of Artificial Sequence: Synthetic oligonucleotide
guacagagaauccaguacc

SEQ ID NO: 682161 - RNA, 19 nt, Artificial Sequence
  Description of Artificial Sequence: Synthetic oligonucleotide
cauacuauguccaugguaa

SEQ ID NO: 682162 - RNA, 19 nt, Artificial Sequence
  Description of Artificial Sequence: Synthetic oligonucleotide
uacgcaaauacccuaccug

SEQ ID NO: 682163 - RNA, 19 nt, Artificial Sequence
  Description of Artificial Sequence: Synthetic oligonucleotide
uaacugacugacuuaaacu

SEQ ID NO: 682164 - RNA, 19 nt, Artificial Sequence
  Description of Artificial Sequence: Synthetic oligonucleotide
gcuauuagcacucugcuug

SEQ ID NO: 682165 - RNA, 19 nt, Artificial Sequence
  Description of Artificial Sequence: Synthetic oligonucleotide
ugggaauacaaguucacgu

SEQ ID NO: 682166 - RNA, 19 nt, Artificial Sequence
  Description of Artificial Sequence: Synthetic oligonucleotide
uuacgggaagcuauuagca

SEQ ID NO: 682167 - RNA, 19 nt, Artificial Sequence
  Description of Artificial Sequence: Synthetic oligonucleotide
ucacguuuguuaaaugucu

SEQ ID NO: 682168 - RNA, 19 nt, Artificial Sequence
  Description of Artificial Sequence: Synthetic oligonucleotide
ucacuuaauucaagcaugc

SEQ ID NO: 682169 - RNA, 19 nt, Artificial Sequence
  Description of Artificial Sequence: Synthetic oligonucleotide
acaagugacagaaaccacg

SEQ ID NO: 682170 - RNA, 19 nt, Artificial Sequence
  Description of Artificial Sequence: Synthetic oligonucleotide
uggauacaucauuacaucc

SEQ ID NO: 682171 - RNA, 19 nt, Artificial Sequence
  Description of Artificial Sequence: Synthetic oligonucleotide
auaauagggucgcucuuac

SEQ ID NO: 682172 - RNA, 19 nt, Artificial Sequence
  Description of Artificial Sequence: Synthetic oligonucleotide
aaugggaauacaaguucac

SEQ ID NO: 682173 - RNA, 19 nt, Artificial Sequence
  Description of Artificial Sequence: Synthetic oligonucleotide
auauucucaaugauauuac

SEQ ID NO: 682174 - RNA, 19 nt, Artificial Sequence
  Description of Artificial Sequence: Synthetic oligonucleotide
uuauagacugguugcaacu

SEQ ID NO: 682175 - RNA, 19 nt, Artificial Sequence
  Description of Artificial Sequence: Synthetic oligonucleotide
uucacguuuguuaaauguc

SEQ ID NO: 682176 - RNA, 19 nt, Artificial Sequence
  Description of Artificial Sequence: Synthetic oligonucleotide
uuaauucaagcaugcauaa

SEQ ID NO: 682177 - RNA, 19 nt, Artificial Sequence
  Description of Artificial Sequence: Synthetic oligonucleotide
uuugacccugauuagcagc

SEQ ID NO: 682178 - RNA, 19 nt, Artificial Sequence
  Description of Artificial Sequence: Synthetic oligonucleotide
agugacagaaaccacgaau

SEQ ID NO: 682179 - RNA, 19 nt, Artificial Sequence
  Description of Artificial Sequence: Synthetic oligonucleotide
uacaucauuacauccacuu

SEQ ID NO: 682180 - RNA, 19 nt, Artificial Sequence
  Description of Artificial Sequence: Synthetic oligonucleotide
caugaucuaaaagugugcc

SEQ ID NO: 682181 - RNA, 19 nt, Artificial Sequence
  Description of Artificial Sequence: Synthetic oligonucleotide
caaccaugaucuaaaagug

SEQ ID NO: 682182 - RNA, 19 nt, Artificial Sequence
  Description of Artificial Sequence: Synthetic oligonucleotide
acuuaaacuugauccacug

SEQ ID NO: 682183 - RNA, 19 nt, Artificial Sequence
  Description of Artificial Sequence: Synthetic oligonucleotide
cacuucaaagggaggaucg

SEQ ID NO: 682184 - RNA, 19 nt, Artificial Sequence
  Description of Artificial Sequence: Synthetic oligonucleotide
uuuaugccagccuccaggc

SEQ ID NO: 682185 - RNA, 19 nt, Artificial Sequence
  Description of Artificial Sequence: Synthetic oligonucleotide
uuuagcuccauucgccgca

SEQ ID NO: 682186 - RNA, 19 nt, Artificial Sequence
  Description of Artificial Sequence: Synthetic oligonucleotide
uuuauacaacugaucugcc

SEQ ID NO: 682187 - RNA, 19 nt, Artificial Sequence
  Description of Artificial Sequence: Synthetic oligonucleotide
ggagagaauacgcaaauac

SEQ ID NO: 682188 - RNA, 19 nt, Artificial Sequence
  Description of Artificial Sequence: Synthetic oligonucleotide
ugcgguaacugacuccagg

SEQ ID NO: 682189 - RNA, 19 nt, Artificial Sequence
  Description of Artificial Sequence: Synthetic oligonucleotide
cagacuacgguaagagugg

SEQ ID NO: 682190 - RNA, 19 nt, Artificial Sequence
  Description of Artificial Sequence: Synthetic oligonucleotide
auaagucuguaacuccauc

SEQ ID NO: 682191 - RNA, 19 nt, Artificial Sequence
  Description of Artificial Sequence: Synthetic oligonucleotide
uacuauguccaugguaacg

SEQ ID NO: 682192 - RNA, 19 nt, Artificial Sequence
  Description of Artificial Sequence: Synthetic oligonucleotide
uuuuaugguuauacaguac

SEQ ID NO: 682193 - RNA, 19 nt, Artificial Sequence
  Description of Artificial Sequence: Synthetic oligonucleotide
uguauguaacaucaaccau

SEQ ID NO: 682194 - RNA, 19 nt, Artificial Sequence
  Description of Artificial Sequence: Synthetic oligonucleotide
accccuguucacuuaauuc

SEQ ID NO: 682195 - RNA, 19 nt, Artificial Sequence
  Description of Artificial Sequence: Synthetic oligonucleotide
cuuauagacugguugcaac

SEQ ID NO: 682196 - RNA, 19 nt, Artificial Sequence
  Description of Artificial Sequence: Synthetic oligonucleotide
aagcauaauagggucgcuc

SEQ ID NO: 682197 - RNA, 19 nt, Artificial Sequence
  Description of Artificial Sequence: Synthetic oligonucleotide
ugaagcaguuuuaugguua

SEQ ID NO: 682198 - RNA, 19 nt, Artificial Sequence
  Description of Artificial Sequence: Synthetic oligonucleotide
uugacaugcaacucacucu

SEQ ID NO: 682199 - RNA, 19 nt, Artificial Sequence
  Description of Artificial Sequence: Synthetic oligonucleotide
aacuuuguugccucucgga

SEQ ID NO: 682200 - RNA, 19 nt, Artificial Sequence
  Description of Artificial Sequence: Synthetic oligonucleotide
uaauuuaggucauccuugu

SEQ ID NO: 682201 - RNA, 19 nt, Artificial Sequence
  Description of Artificial Sequence: Synthetic oligonucleotide
agcauaauagggucgcucu

SEQ ID NO: 682202 - RNA, 19 nt, Artificial Sequence
  Description of Artificial Sequence: Synthetic oligonucleotide
uccuuaauuuacauguuuu

SEQ ID NO: 682203 - RNA, 19 nt, Artificial Sequence
  Description of Artificial Sequence: Synthetic oligonucleotide
uguagacucuggcaugcag

SEQ ID NO: 682204 - RNA, 19 nt, Artificial Sequence
  Description of Artificial Sequence: Synthetic oligonucleotide
ucggacacacaagauaucc

SEQ ID NO: 682205 - RNA, 19 nt, Artificial Sequence
  Description of Artificial Sequence: Synthetic oligonucleotide
cauccuguaguacuugagc

SEQ ID NO: 682206 - RNA, 19 nt, Artificial Sequence
  Description of Artificial Sequence: Synthetic oligonucleotide
uaaggugccucagacuacg

SEQ ID NO: 682207 - RNA, 19 nt, Artificial Sequence
  Description of Artificial Sequence: Synthetic oligonucleotide
uaacgauaagucuguaacu

SEQ ID NO: 682208 - RNA, 19 nt, Artificial Sequence
  Description of Artificial Sequence: Synthetic oligonucleotide
auagggucgcucuuacuuc

SEQ ID NO: 682209 - RNA, 19 nt, Artificial Sequence
  Description of Artificial Sequence: Synthetic oligonucleotide
ugaucuaaaagugugccuu

SEQ ID NO: 682210 - RNA, 19 nt, Artificial Sequence
  Description of Artificial Sequence: Synthetic oligonucleotide
uuauacaacugaucugccu

SEQ ID NO: 682211 - RNA, 19 nt, Artificial Sequence
  Description of Artificial Sequence: Synthetic oligonucleotide
ugacaugcaacucacucuu

SEQ ID NO: 682212 - RNA, 19 nt, Artificial Sequence
  Description of Artificial Sequence: Synthetic oligonucleotide
uuauggaaacuccuguuuu

SEQ ID NO: 682213 - RNA, 19 nt, Artificial Sequence
  Description of Artificial Sequence: Synthetic oligonucleotide
uagccuaguuccuccaagg

SEQ ID NO: 682214 - RNA, 19 nt, Artificial Sequence
  Description of Artificial Sequence: Synthetic oligonucleotide
acuacgguaagaguggcug

SEQ ID NO: 682215 - RNA, 19 nt, Artificial Sequence
  Description of Artificial Sequence: Synthetic oligonucleotide
ucauacuauguccauggua

SEQ ID NO: 682216 - RNA, 19 nt, Artificial Sequence
  Description of Artificial Sequence: Synthetic oligonucleotide
acacaagauauccauucca

SEQ ID NO: 682217 - RNA, 19 nt, Artificial Sequence
  Description of Artificial Sequence: Synthetic oligonucleotide
ucaccauauagugucaaac

SEQ ID NO: 682218 - RNA, 19 nt, Artificial Sequence
  Description of Artificial Sequence: Synthetic oligonucleotide
uucuauuuggauacaucau

SEQ ID NO: 682219 - RNA, 19 nt, Artificial Sequence
  Description of Artificial Sequence: Synthetic oligonucleotide
acuugauccacugguuggc

SEQ ID NO: 682220 - RNA, 19 nt, Artificial Sequence
  Description of Artificial Sequence: Synthetic oligonucleotide
uucccauuaacugacugac

SEQ ID NO: 682221 - RNA, 19 nt, Artificial Sequence
  Description of Artificial Sequence: Synthetic oligonucleotide
uccuuaacguugaaagcac

SEQ ID NO: 682222 - RNA, 19 nt, Artificial Sequence
  Description of Artificial Sequence: Synthetic oligonucleotide
cagaccuacaauaggcagc

SEQ ID NO: 682223 - RNA, 19 nt, Artificial Sequence
  Description of Artificial Sequence: Synthetic oligonucleotide
ugaagugggaacagacaga

SEQ ID NO: 682224 - RNA, 19 nt, Artificial Sequence
  Description of Artificial Sequence: Synthetic oligonucleotide
uccgccuuucccuuuagca

SEQ ID NO: 682225 - RNA, 19 nt, Artificial Sequence
  Description of Artificial Sequence: Synthetic oligonucleotide
accuuugacaugcaacuca

SEQ ID NO: 682226 - RNA, 19 nt, Artificial Sequence
  Description of Artificial Sequence: Synthetic oligonucleotide
gagaagcauaauagggucg

SEQ ID NO: 682227 - RNA, 19 nt, Artificial Sequence
  Description of Artificial Sequence: Synthetic oligonucleotide
acgaauaauuuucuguuua

SEQ ID NO: 682228 - RNA, 19 nt, Artificial Sequence
  Description of Artificial Sequence: Synthetic oligonucleotide
ugcaacuacaaggagcgga

SEQ ID NO: 682229 - RNA, 19 nt, Artificial Sequence
  Description of Artificial Sequence: Synthetic oligonucleotide
aguaccuccugaugaagug

SEQ ID NO: 682230 - RNA, 19 nt, Artificial Sequence
  Description of Artificial Sequence: Synthetic oligonucleotide
gaucuaaaagugugccuug

SEQ ID NO: 682231 - RNA, 19 nt, Artificial Sequence
  Description of Artificial Sequence: Synthetic oligonucleotide
agcugcaaacuuuguugcc

SEQ ID NO: 682232 - RNA, 19 nt, Artificial Sequence
  Description of Artificial Sequence: Synthetic oligonucleotide
uaugguuauacaguacuau

SEQ ID NO: 682233 - RNA, 19 nt, Artificial Sequence
  Description of Artificial Sequence: Synthetic oligonucleotide
cucugcaagaauugcucgg

SEQ ID NO: 682234 - RNA, 19 nt, Artificial Sequence
  Description of Artificial Sequence: Synthetic oligonucleotide
accaugaucuaaaagugug

SEQ ID NO: 682235 - RNA, 19 nt, Artificial Sequence
  Description of Artificial Sequence: Synthetic oligonucleotide
auagccuaguuccuccaag

SEQ ID NO: 682236 - RNA, 19 nt, Artificial Sequence
  Description of Artificial Sequence: Synthetic oligonucleotide
ugauccacugguuggcacc

SEQ ID NO: 682237 - RNA, 19 nt, Artificial Sequence
  Description of Artificial Sequence: Synthetic oligonucleotide
acuauguccaugguaacga

SEQ ID NO: 682238 - RNA, 19 nt, Artificial Sequence
  Description of Artificial Sequence: Synthetic oligonucleotide
uuaugguuauacaguacua

SEQ ID NO: 682239 - RNA, 19 nt, Artificial Sequence
  Description of Artificial Sequence: Synthetic oligonucleotide
auacccuaccugcuuauug

SEQ ID NO: 682240 - RNA, 19 nt, Artificial Sequence
  Description of Artificial Sequence: Synthetic oligonucleotide
uuccuuaauuuacauguuu

SEQ ID NO: 682241 - RNA, 19 nt, Artificial Sequence
  Description of Artificial Sequence: Synthetic oligonucleotide
ugauauuacuaaggaagac

SEQ ID NO: 682242 - RNA, 19 nt, Artificial Sequence
  Description of Artificial Sequence: Synthetic oligonucleotide
aaacgcaggaguccucaca

SEQ ID NO: 682243 - RNA, 19 nt, Artificial Sequence
  Description of Artificial Sequence: Synthetic oligonucleotide
uagacugguugcaacuaca

SEQ ID NO: 682244 - RNA, 19 nt, Artificial Sequence
  Description of Artificial Sequence: Synthetic oligonucleotide
uugaaagcacaaaggguuc

SEQ ID NO: 682245 - RNA, 19 nt, Artificial Sequence
  Description of Artificial Sequence: Synthetic oligonucleotide
acgggaagcuauuagcacu

SEQ ID NO: 682246 - RNA, 19 nt, Artificial Sequence
  Description of Artificial Sequence: Synthetic oligonucleotide
aaguucacguuuguuaaau

SEQ ID NO: 682247 - RNA, 19 nt, Artificial Sequence
  Description of Artificial Sequence: Synthetic oligonucleotide
uuagcucugcaagaauugc

SEQ ID NO: 682248 - RNA, 19 nt, Artificial Sequence
  Description of Artificial Sequence: Synthetic oligonucleotide
uguguauaaacaggauugu

SEQ ID NO: 682249 - RNA, 19 nt, Artificial Sequence
  Description of Artificial Sequence: Synthetic oligonucleotide
gaauacgcaaauacccuac

SEQ ID NO: 682250 - RNA, 19 nt, Artificial Sequence
  Description of Artificial Sequence: Synthetic oligonucleotide
ugacuuaaacuugauccac

SEQ ID NO: 682251 - RNA, 19 nt, Artificial Sequence
  Description of Artificial Sequence: Synthetic oligonucleotide
uccugcauuuacacagaag

SEQ ID NO: 682252 - RNA, 19 nt, Artificial Sequence
  Description of Artificial Sequence: Synthetic oligonucleotide
auccuugagaagcauaaua

SEQ ID NO: 682253 - RNA, 19 nt, Artificial Sequence
  Description of Artificial Sequence: Synthetic oligonucleotide
agcgguuauuuucacagau

SEQ ID NO: 682254 - RNA, 19 nt, Artificial Sequence
  Description of Artificial Sequence: Synthetic oligonucleotide
uuaacguugaaagcacaaa

SEQ ID NO: 682255 - RNA, 19 nt, Artificial Sequence
  Description of Artificial Sequence: Synthetic oligonucleotide
cagcugcaaacuuuguugc

SEQ ID NO: 682256 - RNA, 19 nt, Artificial Sequence
  Description of Artificial Sequence: Synthetic oligonucleotide
agugcgguaacugacucca

SEQ ID NO: 682257 - RNA, 19 nt, Artificial Sequence
  Description of Artificial Sequence: Synthetic oligonucleotide
caccacgcacuucaaaggg

SEQ ID NO: 682258 - RNA, 19 nt, Artificial Sequence
  Description of Artificial Sequence: Synthetic oligonucleotide
augauauuacuaaggaaga

SEQ ID NO: 682259 - RNA, 19 nt, Artificial Sequence
  Description of Artificial Sequence: Synthetic oligonucleotide
ucuuauggaaacuccuguu

SEQ ID NO: 682260 - RNA, 19 nt, Artificial Sequence
  Description of Artificial Sequence: Synthetic oligonucleotide
aaauacccuaccugcuuau

SEQ ID NO: 682261 - RNA, 19 nt, Artificial Sequence
  Description of Artificial Sequence: Synthetic oligonucleotide
agaauacgcaaauacccua

SEQ ID NO: 682262 - RNA, 19 nt, Artificial Sequence
  Description of Artificial Sequence: Synthetic oligonucleotide
cuauuagcacucugcuugc

SEQ ID NO: 682263 - RNA, 19 nt, Artificial Sequence
  Description of Artificial Sequence: Synthetic oligonucleotide
augguuauacaguacuaua

SEQ ID NO: 682264 - RNA, 19 nt, Artificial Sequence
  Description of Artificial Sequence: Synthetic oligonucleotide
cugacuuaaacuugaucca

SEQ ID NO: 682265 - RNA, 19 nt, Artificial Sequence
  Description of Artificial Sequence: Synthetic oligonucleotide
agaaaccacgaauaauuuu

SEQ ID NO: 682266 - RNA, 19 nt, Artificial Sequence
  Description of Artificial Sequence: Synthetic oligonucleotide
auacgcaaauacccuaccu

SEQ ID NO: 682267 - RNA, 19 nt, Artificial Sequence
  Description of Artificial Sequence: Synthetic oligonucleotide
uacgggaagcuauuagcac

SEQ ID NO: 682268 - RNA, 19 nt, Artificial Sequence
  Description of Artificial Sequence: Synthetic oligonucleotide
cuuuagcuccauucgccgc

SEQ ID NO: 682269 - RNA, 19 nt, Artificial Sequence
  Description of Artificial Sequence: Synthetic oligonucleotide
agaccuacaauaggcagcu

SEQ ID NO: 682270 - RNA, 19 nt, Artificial Sequence
  Description of Artificial Sequence: Synthetic oligonucleotide
gguugcaacuacaaggagc

SEQ ID NO: 682271 - RNA, 19 nt, Artificial Sequence
  Description of Artificial Sequence: Synthetic oligonucleotide
caccauauagugucaaaca

SEQ ID NO: 682272 - RNA, 19 nt, Artificial Sequence
  Description of Artificial Sequence: Synthetic oligonucleotide
ugaacacccaacacccauc

SEQ ID NO: 682273 - RNA, 19 nt, Artificial Sequence
  Description of Artificial Sequence: Synthetic oligonucleotide
aguucacguuuguuaaaug

SEQ ID NO: 682274 - RNA, 19 nt, Artificial Sequence
  Description of Artificial Sequence: Synthetic oligonucleotide
augaacacccaacacccau

SEQ ID NO: 682275 - RNA, 19 nt, Artificial Sequence
  Description of Artificial Sequence: Synthetic oligonucleotide
ggaaucauaggugguacag

SEQ ID NO: 682276 - RNA, 19 nt, Artificial Sequence
  Description of Artificial Sequence: Synthetic oligonucleotide
uuccaucuacccucagucc

SEQ ID NO: 682277 - RNA, 19 nt, Artificial Sequence
  Description of Artificial Sequence: Synthetic oligonucleotide
ucucgagugcgguaacuga

SEQ ID NO: 682278 - RNA, 19 nt, Artificial Sequence
  Description of Artificial Sequence: Synthetic oligonucleotide
cucgagugcgguaacugac

SEQ ID NO: 682279 - RNA, 19 nt, Artificial Sequence
  Description of Artificial Sequence: Synthetic oligonucleotide
gaugaagugggaacagaca

SEQ ID NO: 682280 - RNA, 19 nt, Artificial Sequence
  Description of Artificial Sequence: Synthetic oligonucleotide
gcuguagcaaacugggcag

SEQ ID NO: 682281 - RNA, 19 nt, Artificial Sequence
  Description of Artificial Sequence: Synthetic oligonucleotide
uuuugcagcgguggugucc

SEQ ID NO: 682282 - RNA, 19 nt, Artificial Sequence
  Description of Artificial Sequence: Synthetic oligonucleotide
ucucucgacagaugucccc

SEQ ID NO: 682283 - RNA, 19 nt, Artificial Sequence
  Description of Artificial Sequence: Synthetic oligonucleotide
acaacugaucugccuuuag

SEQ ID NO: 682284 - RNA, 19 nt, Artificial Sequence
  Description of Artificial Sequence: Synthetic oligonucleotide
aagaccuaaggugccucag

SEQ ID NO: 682285 - RNA, 19 nt, Artificial Sequence
  Description of Artificial Sequence: Synthetic oligonucleotide
agcgccaucaccauauagu

SEQ ID NO: 682286 - RNA, 19 nt, Artificial Sequence
  Description of Artificial Sequence: Synthetic oligonucleotide
cuuaacguugaaagcacaa

SEQ ID NO: 682287 - RNA, 19 nt, Artificial Sequence
  Description of Artificial Sequence: Synthetic oligonucleotide
acaaggagcggaugcaaau

SEQ ID NO: 682288 - RNA, 19 nt, Artificial Sequence
  Description of Artificial Sequence: Synthetic oligonucleotide
ucgagugcgguaacugacu

SEQ ID NO: 682289 - RNA, 19 nt, Artificial Sequence
  Description of Artificial Sequence: Synthetic oligonucleotide
agauuguugaagaggauua

SEQ ID NO: 682290 - RNA, 19 nt, Artificial Sequence
  Description of Artificial Sequence: Synthetic oligonucleotide
uguuuggguauuuccuguc

SEQ ID NO: 682291 - RNA, 19 nt, Artificial Sequence
  Description of Artificial Sequence: Synthetic oligonucleotide
ugcuguucaccauucuauc

SEQ ID NO: 682292 - RNA, 19 nt, Artificial Sequence
  Description of Artificial Sequence: Synthetic oligonucleotide
ugugauagccuaguuccuc

SEQ ID NO: 682293 - RNA, 19 nt, Artificial Sequence
  Description of Artificial Sequence: Synthetic oligonucleotide
guaguaaucuguacuggca

SEQ ID NO: 682294 - RNA, 19 nt, Artificial Sequence
  Description of Artificial Sequence: Synthetic oligonucleotide
uuugcagcggugguguccu

SEQ ID NO: 682295 - RNA, 19 nt, Artificial Sequence
  Description of Artificial Sequence: Synthetic oligonucleotide
uucucgagugcgguaacug

SEQ ID NO: 682296 - RNA, 19 nt, Artificial Sequence
  Description of Artificial Sequence: Synthetic oligonucleotide
agacuacgguaagaguggc

SEQ ID NO: 682297 - RNA, 19 nt, Artificial Sequence
  Description of Artificial Sequence: Synthetic oligonucleotide
gguaacugacuccaggguc

SEQ ID NO: 682298 - RNA, 19 nt, Artificial Sequence
  Description of Artificial Sequence: Synthetic oligonucleotide
gcgguaacugacuccaggg

SEQ ID NO: 682299 - RNA, 19 nt, Artificial Sequence
  Description of Artificial Sequence: Synthetic oligonucleotide
uccucuucguccuguuagc

SEQ ID NO: 682300 - RNA, 19 nt, Artificial Sequence
  Description of Artificial Sequence: Synthetic oligonucleotide
agcuccauucgccgcacag

SEQ ID NO: 682301 - RNA, 19 nt, Artificial Sequence
  Description of Artificial Sequence: Synthetic oligonucleotide
uugaagcaguuuuaugguu

SEQ ID NO: 682302 - RNA, 19 nt, Artificial Sequence
  Description of Artificial Sequence: Synthetic oligonucleotide
ucgcucuuacuucuuacuu

SEQ ID NO: 682303 - RNA, 19 nt, Artificial Sequence
  Description of Artificial Sequence: Synthetic oligonucleotide
cauaauuuaggucauccuu

SEQ ID NO: 682304 - RNA, 19 nt, Artificial Sequence
  Description of Artificial Sequence: Synthetic oligonucleotide
aggacccucuucuagccga

SEQ ID NO: 682305 - RNA, 19 nt, Artificial Sequence
  Description of Artificial Sequence: Synthetic oligonucleotide
uauagacugguugcaacua

SEQ ID NO: 682306 - RNA, 19 nt, Artificial Sequence
  Description of Artificial Sequence: Synthetic oligonucleotide
gcggaugcaaauacaauag

SEQ ID NO: 682307 - RNA, 19 nt, Artificial Sequence
  Description of Artificial Sequence: Synthetic oligonucleotide
gucacucauacuaugucca

SEQ ID NO: 682308 - RNA, 19 nt, Artificial Sequence
  Description of Artificial Sequence: Synthetic oligonucleotide
uagggucgcucuuacuucu

SEQ ID NO: 682309 - RNA, 19 nt, Artificial Sequence
  Description of Artificial Sequence: Synthetic oligonucleotide
cauuaacugacugacuuaa

SEQ ID NO: 682310 - RNA, 19 nt, Artificial Sequence
  Description of Artificial Sequence: Synthetic oligonucleotide
cacaagugacagaaaccac

SEQ ID NO: 682311 - RNA, 19 nt, Artificial Sequence
  Description of Artificial Sequence: Synthetic oligonucleotide
acuacaaggagcggaugca

SEQ ID NO: 682312 - RNA, 19 nt, Artificial Sequence
  Description of Artificial Sequence: Synthetic oligonucleotide
ucgauaggcugugaugaga

SEQ ID NO: 682313 - RNA, 19 nt, Artificial Sequence
  Description of Artificial Sequence: Synthetic oligonucleotide
gagugcgguaacugacucc

SEQ ID NO: 682314 - RNA, 19 nt, Artificial Sequence
  Description of Artificial Sequence: Synthetic oligonucleotide
uugauccacugguuggcac

SEQ ID NO: 682315 - RNA, 19 nt, Artificial Sequence
  Description of Artificial Sequence: Synthetic oligonucleotide
gcuguucaccauucuaucc

SEQ ID NO: 682316 - RNA, 19 nt, Artificial Sequence
  Description of Artificial Sequence: Synthetic oligonucleotide
gaaucauaggugguacaga

SEQ ID NO: 682317 - RNA, 19 nt, Artificial Sequence
  Description of Artificial Sequence: Synthetic oligonucleotide
uaaucuguacuggcagcug

SEQ ID NO: 682318 - RNA, 19 nt, Artificial Sequence
  Description of Artificial Sequence: Synthetic oligonucleotide
uagcaucauuugcaaauua

SEQ ID NO: 682319 - RNA, 19 nt, Artificial Sequence
  Description of Artificial Sequence: Synthetic oligonucleotide
cuugcgagauugcuguuca

SEQ ID NO: 682320 - RNA, 19 nt, Artificial Sequence
  Description of Artificial Sequence: Synthetic oligonucleotide
augguaacgauaagucugu

SEQ ID NO: 682321 - RNA, 19 nt, Artificial Sequence
  Description of Artificial Sequence: Synthetic oligonucleotide
gauguccccaugccauagc

SEQ ID NO: 682322 - RNA, 19 nt, Artificial Sequence
  Description of Artificial Sequence: Synthetic oligonucleotide
agacaaacgcaggaguccu

SEQ ID NO: 682323 - RNA, 19 nt, Artificial Sequence
  Description of Artificial Sequence: Synthetic oligonucleotide
uuagcacaaccuccucuuc

SEQ ID NO: 682324 - RNA, 19 nt, Artificial Sequence
  Description of Artificial Sequence: Synthetic oligonucleotide
ugcaaauuacgggaagcua

SEQ ID NO: 682325 - RNA, 19 nt, Artificial Sequence
  Description of Artificial Sequence: Synthetic oligonucleotide
uacauguuuucaagacuuu

SEQ ID NO: 682326 - RNA, 19 nt, Artificial Sequence
  Description of Artificial Sequence: Synthetic oligonucleotide
aaauuacgggaagcuauua

SEQ ID NO: 682327 - RNA, 19 nt, Artificial Sequence
  Description of Artificial Sequence: Synthetic oligonucleotide
uagaaguucuuggcguaca

SEQ ID NO: 682328 - RNA, 19 nt, Artificial Sequence
  Description of Artificial Sequence: Synthetic oligonucleotide
aacacccaucuauuuccau

SEQ ID NO: 682329 - RNA, 19 nt, Artificial Sequence
  Description of Artificial Sequence: Synthetic oligonucleotide
aucgcugcuguagauguga

SEQ ID NO: 682330 - RNA, 19 nt, Artificial Sequence
  Description of Artificial Sequence: Synthetic oligonucleotide
ggugguguccucuguagac

SEQ ID NO: 682331 - RNA, 19 nt, Artificial Sequence
  Description of Artificial Sequence: Synthetic oligonucleotide
cuaaggugccucagacuac

SEQ ID NO: 682332 - RNA, 19 nt, Artificial Sequence
  Description of Artificial Sequence: Synthetic oligonucleotide
gagaauacgcaaauacccu

SEQ ID NO: 682333 - RNA, 19 nt, Artificial Sequence
  Description of Artificial Sequence: Synthetic oligonucleotide
agaccuaaggugccucaga

SEQ ID NO: 682334 - RNA, 19 nt, Artificial Sequence
  Description of Artificial Sequence: Synthetic oligonucleotide
ccuuuagcuccauucgccg

SEQ ID NO: 682335 - RNA, 19 nt, Artificial Sequence
  Description of Artificial Sequence: Synthetic oligonucleotide
ccaacgaugccauugccuc

SEQ ID NO: 682336 - RNA, 19 nt, Artificial Sequence
  Description of Artificial Sequence: Synthetic oligonucleotide
caacgaugccauugccucc

SEQ ID NO: 682337 - RNA, 19 nt, Artificial Sequence
  Description of Artificial Sequence: Synthetic oligonucleotide
cucgauaggcugugaugag

SEQ ID NO: 682338 - RNA, 19 nt, Artificial Sequence
  Description of Artificial Sequence: Synthetic oligonucleotide
ugccucagacuacgguaag

SEQ ID NO: 682339 - RNA, 19 nt, Artificial Sequence
  Description of Artificial Sequence: Synthetic oligonucleotide
acgcacuucaaagggagga

SEQ ID NO: 682340 - RNA, 19 nt, Artificial Sequence
  Description of Artificial Sequence: Synthetic oligonucleotide
auacuguugaaaagcugcu

SEQ ID NO: 682341 - RNA, 19 nt, Artificial Sequence
  Description of Artificial Sequence: Synthetic oligonucleotide
ggaugcaaauacaauagaa

SEQ ID NO: 682342 - RNA, 19 nt, Artificial Sequence
  Description of Artificial Sequence: Synthetic oligonucleotide
ccaugauacuguugaaaag

SEQ ID NO: 682343 - RNA, 19 nt, Artificial Sequence
  Description of Artificial Sequence: Synthetic oligonucleotide
uaauagggucgcucuuacu

SEQ ID NO: 682344 - RNA, 19 nt, Artificial Sequence
  Description of Artificial Sequence: Synthetic oligonucleotide
agauguccccaugccauag

SEQ ID NO: 682345 - RNA, 19 nt, Artificial Sequence
  Description of Artificial Sequence: Synthetic oligonucleotide
cauagcgguuauuuucaca

SEQ ID NO: 682346 - RNA, 19 nt, Artificial Sequence
  Description of Artificial Sequence: Synthetic oligonucleotide
uagcgguuauuuucacaga

SEQ ID NO: 682347 - RNA, 19 nt, Artificial Sequence
  Description of Artificial Sequence: Synthetic oligonucleotide
uauuagcacucugcuugcc

SEQ ID NO: 682348 - RNA, 19 nt, Artificial Sequence
  Description of Artificial Sequence: Synthetic oligonucleotide
ugccuugcaaugggaauac

SEQ ID NO: 682349 - RNA, 19 nt, Artificial Sequence
  Description of Artificial Sequence: Synthetic oligonucleotide
aggugguacagagaaucca

SEQ ID NO: 682350 - RNA, 19 nt, Artificial Sequence
  Description of Artificial Sequence: Synthetic oligonucleotide
cugagcuccaacgaugcca

SEQ ID NO: 682351 - RNA, 19 nt, Artificial Sequence
  Description of Artificial Sequence: Synthetic oligonucleotide
gcgccaucaccauauagug

SEQ ID NO: 682352 - RNA, 19 nt, Artificial Sequence
  Description of Artificial Sequence: Synthetic oligonucleotide
gaacacccaacacccaucu

SEQ ID NO: 682353 - RNA, 19 nt, Artificial Sequence
  Description of Artificial Sequence: Synthetic oligonucleotide
gcaguuuuaugguuauaca

SEQ ID NO: 682354 - RNA, 19 nt, Artificial Sequence
  Description of Artificial Sequence: Synthetic oligonucleotide
cuugcaggccagagcaauc

SEQ ID NO: 682355 - RNA, 19 nt, Artificial Sequence
  Description of Artificial Sequence: Synthetic oligonucleotide
cacucauacuauguccaug

SEQ ID NO: 682356 - RNA, 19 nt, Artificial Sequence
  Description of Artificial Sequence: Synthetic oligonucleotide
augggccccuuaccagacc

SEQ ID NO: 682357 - RNA, 19 nt, Artificial Sequence
  Description of Artificial Sequence: Synthetic oligonucleotide
guaacuccaucaggauggg

SEQ ID NO: 682358 - RNA, 19 nt, Artificial Sequence
  Description of Artificial Sequence: Synthetic oligonucleotide
gauagccuaguuccuccaa

SEQ ID NO: 682359 - RNA, 19 nt, Artificial Sequence
  Description of Artificial Sequence: Synthetic oligonucleotide
auguagcaucauuugcaaa

SEQ ID NO: 682360 - RNA, 19 nt, Artificial Sequence
  Description of Artificial Sequence: Synthetic oligonucleotide
gguaacgauaagucuguaa

SEQ ID NO: 682361 - RNA, 19 nt, Artificial Sequence
  Description of Artificial Sequence: Synthetic oligonucleotide
gcucgauaggcugugauga

SEQ ID NO: 682362 - RNA, 19 nt, Artificial Sequence
  Description of Artificial Sequence: Synthetic oligonucleotide
aggugccucagacuacggu

SEQ ID NO: 682363 - RNA, 19 nt, Artificial Sequence
  Description of Artificial Sequence: Synthetic oligonucleotide
gguaagaguggcuguuuuc

SEQ ID NO: 682364 - RNA, 19 nt, Artificial Sequence
  Description of Artificial Sequence: Synthetic oligonucleotide
uacccucaguccaggaaua

SEQ ID NO: 682365 - RNA, 19 nt, Artificial Sequence
  Description of Artificial Sequence: Synthetic oligonucleotide
cugcaagaauugcucggac

SEQ ID NO: 682366 - RNA, 19 nt, Artificial Sequence
  Description of Artificial Sequence: Synthetic oligonucleotide
gcuccaacgaugccauugc

SEQ ID NO: 682367 - RNA, 19 nt, Artificial Sequence
  Description of Artificial Sequence: Synthetic oligonucleotide
cacgcagcaggcuuccuga

SEQ ID NO: 682368 - RNA, 19 nt, Artificial Sequence
  Description of Artificial Sequence: Synthetic oligonucleotide
ccucagacuacgguaagag

SEQ ID NO: 682369 - RNA, 19 nt, Artificial Sequence
  Description of Artificial Sequence: Synthetic oligonucleotide
ucguccuguuagcucugca

SEQ ID NO: 682370 - RNA, 19 nt, Artificial Sequence
  Description of Artificial Sequence: Synthetic oligonucleotide
ucuagccgaugaaggucac

SEQ ID NO: 682371 - RNA, 19 nt, Artificial Sequence
  Description of Artificial Sequence: Synthetic oligonucleotide
gggaggaucgcugcuguag

SEQ ID NO: 682372 - RNA, 19 nt, Artificial Sequence
  Description of Artificial Sequence: Synthetic oligonucleotide
uggagagaauacgcaaaua

SEQ ID NO: 682373 - RNA, 19 nt, Artificial Sequence
  Description of Artificial Sequence: Synthetic oligonucleotide
cuuauggaaacuccuguuu

SEQ ID NO: 682374 - RNA, 19 nt, Artificial Sequence
  Description of Artificial Sequence: Synthetic oligonucleotide
guaaucuguacuggcagcu

SEQ ID NO: 682375 - RNA, 19 nt, Artificial Sequence
  Description of Artificial Sequence: Synthetic oligonucleotide
uacgguaagaguggcuguu

SEQ ID NO: 682376 - RNA, 19 nt, Artificial Sequence
  Description of Artificial Sequence: Synthetic oligonucleotide
aauacccuaccugcuuauu

SEQ ID NO: 682377 - RNA, 19 nt, Artificial Sequence
  Description of Artificial Sequence: Synthetic oligonucleotide
ggugccucagacuacggua

SEQ ID NO: 682378 - RNA, 19 nt, Artificial Sequence
  Description of Artificial Sequence: Synthetic oligonucleotide
cagcgccaucaccauauag

SEQ ID NO: 682379 - RNA, 19 nt, Artificial Sequence
  Description of Artificial Sequence: Synthetic oligonucleotide
gacuuaaacuugauccacu

SEQ ID NO: 682380 - RNA, 19 nt, Artificial Sequence
  Description of Artificial Sequence: Synthetic oligonucleotide
aaggugccucagacuacgg

SEQ ID NO: 682381 - RNA, 19 nt, Artificial Sequence
  Description of Artificial Sequence: Synthetic oligonucleotide
cucggacacacaagauauc

SEQ ID NO: 682382 - RNA, 19 nt, Artificial Sequence
  Description of Artificial Sequence: Synthetic oligonucleotide
ccuacaauaggcagcugca

SEQ ID NO: 682383 - RNA, 19 nt, Artificial Sequence
  Description of Artificial Sequence: Synthetic oligonucleotide
cucgacagauguccccaug

SEQ ID NO: 682384 - RNA, 19 nt, Artificial Sequence
  Description of Artificial Sequence: Synthetic oligonucleotide
guagaugugauagccuagu

SEQ ID NO: 682385 - RNA, 19 nt, Artificial Sequence
  Description of Artificial Sequence: Synthetic oligonucleotide
caaacgcaggaguccucac

SEQ ID NO: 682386 - RNA, 19 nt, Artificial Sequence
  Description of Artificial Sequence: Synthetic oligonucleotide
gaugggccccuuaccagac

SEQ ID NO: 682387 - RNA, 19 nt, Artificial Sequence
  Description of Artificial Sequence: Synthetic oligonucleotide
uucuauccuugagaagcau

SEQ ID NO: 682388 - RNA, 19 nt, Artificial Sequence
  Description of Artificial Sequence: Synthetic oligonucleotide
cacguuuguuaaaugucua

SEQ ID NO: 682389 - RNA, 19 nt, Artificial Sequence
  Description of Artificial Sequence: Synthetic oligonucleotide
ccuuaccagaccuacaaua

SEQ ID NO: 682390 - RNA, 19 nt, Artificial Sequence
  Description of Artificial Sequence: Synthetic oligonucleotide
uuagcuccauucgccgcac

SEQ ID NO: 682391 - RNA, 19 nt, Artificial Sequence
  Description of Artificial Sequence: Synthetic oligonucleotide
augccauagcgguuauuuu

SEQ ID NO: 682392 - RNA, 19 nt, Artificial Sequence
  Description of Artificial Sequence: Synthetic oligonucleotide
guaguacuugagcccaucu

SEQ ID NO: 682393 - RNA, 19 nt, Artificial Sequence
  Description of Artificial Sequence: Synthetic oligonucleotide
uaacuccaucaggaugggc

SEQ ID NO: 682394 - RNA, 19 nt, Artificial Sequence
  Description of Artificial Sequence: Synthetic oligonucleotide
cuuaucucauacacugaau

SEQ ID NO: 682395 - RNA, 19 nt, Artificial Sequence
  Description of Artificial Sequence: Synthetic oligonucleotide
ggagcggaugcaaauacaa

SEQ ID NO: 682396 - RNA, 19 nt, Artificial Sequence
  Description of Artificial Sequence: Synthetic oligonucleotide
aacacccaacacccaucua

SEQ ID NO: 682397 - RNA, 19 nt, Artificial Sequence
  Description of Artificial Sequence: Synthetic oligonucleotide
cucucgacagaugucccca

SEQ ID NO: 682398 - RNA, 19 nt, Artificial Sequence
  Description of Artificial Sequence: Synthetic oligonucleotide
caacacccaucuauuucca

SEQ ID NO: 682399 - RNA, 19 nt, Artificial Sequence
  Description of Artificial Sequence: Synthetic oligonucleotide
ccaagggcggcucuggauc

SEQ ID NO: 682400 - RNA, 19 nt, Artificial Sequence
  Description of Artificial Sequence: Synthetic oligonucleotide
cucaguccaggaauaaaau

SEQ ID NO: 682401 - RNA, 19 nt, Artificial Sequence
  Description of Artificial Sequence: Synthetic oligonucleotide
gucgcucuuacuucuuacu

SEQ ID NO: 682402 - RNA, 19 nt, Artificial Sequence
  Description of Artificial Sequence: Synthetic oligonucleotide
ggaugggccccuuaccaga

SEQ ID NO: 682403 - RNA, 19 nt, Artificial Sequence
  Description of Artificial Sequence: Synthetic oligonucleotide
aucuacccucaguccagga

SEQ ID NO: 682404 - RNA, 19 nt, Artificial Sequence
  Description of Artificial Sequence: Synthetic oligonucleotide
auuaacugacugacuuaaa

SEQ ID NO: 682405 - RNA, 19 nt, Artificial Sequence
  Description of Artificial Sequence: Synthetic oligonucleotide
ugacccugauuagcagcgc

SEQ ID NO: 682406 - RNA, 19 nt, Artificial Sequence
  Description of Artificial Sequence: Synthetic oligonucleotide
ccauucuauccuugagaag

SEQ ID NO: 682407 - RNA, 19 nt, Artificial Sequence
  Description of Artificial Sequence: Synthetic oligonucleotide
gcaaauuacgggaagcuau

SEQ ID NO: 682408 - RNA, 19 nt, Artificial Sequence
  Description of Artificial Sequence: Synthetic oligonucleotide
gccauagcgguuauuuuca

SEQ ID NO: 682409 - RNA, 19 nt, Artificial Sequence
  Description of Artificial Sequence: Synthetic oligonucleotide
gauaagucuguaacuccau

SEQ ID NO: 682410 - RNA, 19 nt, Artificial Sequence
  Description of Artificial Sequence: Synthetic oligonucleotide
gcguacaugugcauggauc

SEQ ID NO: 682411 - RNA, 19 nt, Artificial Sequence
  Description of Artificial Sequence: Synthetic oligonucleotide
ucucgacagauguccccau

SEQ ID NO: 682412 - RNA, 19 nt, Artificial Sequence
  Description of Artificial Sequence: Synthetic oligonucleotide
caaauuacgggaagcuauu

SEQ ID NO: 682413 - RNA, 19 nt, Artificial Sequence
  Description of Artificial Sequence: Synthetic oligonucleotide
ggaggaucgcugcuguaga

SEQ ID NO: 682414 - RNA, 19 nt, Artificial Sequence
  Description of Artificial Sequence: Synthetic oligonucleotide
gggaauacaaguucacguu

SEQ ID NO: 682415 - RNA, 19 nt, Artificial Sequence
  Description of Artificial Sequence: Synthetic oligonucleotide
aggagcggaugcaaauaca

SEQ ID NO: 682416 - RNA, 19 nt, Artificial Sequence
  Description of Artificial Sequence: Synthetic oligonucleotide
caugcaacucacucuuccu

SEQ ID NO: 682417 - RNA, 19 nt, Artificial Sequence
  Description of Artificial Sequence: Synthetic oligonucleotide
ggaauacaaguucacguuu

SEQ ID NO: 682418 - RNA, 19 nt, Artificial Sequence
  Description of Artificial Sequence: Synthetic oligonucleotide
acccugauuagcagcgcca

SEQ ID NO: 682419 - RNA, 19 nt, Artificial Sequence
  Description of Artificial Sequence: Synthetic oligonucleotide
uugcgagauugcuguucac

SEQ ID NO: 682420 - RNA, 19 nt, Artificial Sequence
  Description of Artificial Sequence: Synthetic oligonucleotide
caacuacaaggagcggaug

SEQ ID NO: 682421 - RNA, 19 nt, Artificial Sequence
  Description of Artificial Sequence: Synthetic oligonucleotide
gcgguuauuuucacagaug

SEQ ID NO: 682422 - RNA, 19 nt, Artificial Sequence
  Description of Artificial Sequence: Synthetic oligonucleotide
caagggcggcucuggauca

SEQ ID NO: 682423 - RNA, 19 nt, Artificial Sequence
  Description of Artificial Sequence: Synthetic oligonucleotide
acgcaggaguccucacacu

SEQ ID NO: 682424 - RNA, 19 nt, Artificial Sequence
  Description of Artificial Sequence: Synthetic oligonucleotide
cacugguuggcaccacgca

SEQ ID NO: 682425 - RNA, 19 nt, Artificial Sequence
  Description of Artificial Sequence: Synthetic oligonucleotide
gccgaugaaggucacauuu

SEQ ID NO: 682426 - RNA, 19 nt, Artificial Sequence
  Description of Artificial Sequence: Synthetic oligonucleotide
cuacaauaggcagcugcaa

SEQ ID NO: 682427 - RNA, 19 nt, Artificial Sequence
  Description of Artificial Sequence: Synthetic oligonucleotide
uucgccgcacagucugcau

SEQ ID NO: 682428 - RNA, 19 nt, Artificial Sequence
  Description of Artificial Sequence: Synthetic oligonucleotide
cagaaaccacgaauaauuu

SEQ ID NO: 682429 - RNA, 19 nt, Artificial Sequence
  Description of Artificial Sequence: Synthetic oligonucleotide
cgcucuuacuucuuacuuc

SEQ ID NO: 682430 - RNA, 19 nt, Artificial Sequence
  Description of Artificial Sequence: Synthetic oligonucleotide
gacaaacgcaggaguccuc

SEQ ID NO: 682431 - RNA, 19 nt, Artificial Sequence
  Description of Artificial Sequence: Synthetic oligonucleotide
cacgaauaauuuucuguuu

SEQ ID NO: 682432 - RNA, 19 nt, Artificial Sequence
  Description of Artificial Sequence: Synthetic oligonucleotide
cucagacuacgguaagagu

SEQ ID NO: 682433 - RNA, 19 nt, Artificial Sequence
  Description of Artificial Sequence: Synthetic oligonucleotide
gcuggagagaauacgcaaa

SEQ ID NO: 682434 - RNA, 19 nt, Artificial Sequence
  Description of Artificial Sequence: Synthetic oligonucleotide
caaggagcggaugcaaaua

SEQ ID NO: 682435 - RNA, 19 nt, Artificial Sequence
  Description of Artificial Sequence: Synthetic oligonucleotide
uccccaugccauagcgguu

SEQ ID NO: 682436 - RNA, 19 nt, Artificial Sequence
  Description of Artificial Sequence: Synthetic oligonucleotide
caucaccauauagugucaa

SEQ ID NO: 682437 - RNA, 19 nt, Artificial Sequence
  Description of Artificial Sequence: Synthetic oligonucleotide
caugcgcucgauaggcugu

SEQ ID NO: 682438 - RNA, 19 nt, Artificial Sequence
  Description of Artificial Sequence: Synthetic oligonucleotide
aucccugcuccuaggggca

SEQ ID NO: 682439 - RNA, 19 nt, Artificial Sequence
  Description of Artificial Sequence: Synthetic oligonucleotide
uccuguccuuaacguugaa

SEQ ID NO: 682440 - RNA, 19 nt, Artificial Sequence
  Description of Artificial Sequence: Synthetic oligonucleotide
gcacuucaaagggaggauc

SEQ ID NO: 682441 - RNA, 19 nt, Artificial Sequence
  Description of Artificial Sequence: Synthetic oligonucleotide
augcgcucgauaggcugug

SEQ ID NO: 682442 - RNA, 19 nt, Artificial Sequence
  Description of Artificial Sequence: Synthetic oligonucleotide
guagcaucauuugcaaauu

SEQ ID NO: 682443 - RNA, 19 nt, Artificial Sequence
  Description of Artificial Sequence: Synthetic oligonucleotide
uagcuccauucgccgcaca

SEQ ID NO: 682444 - RNA, 19 nt, Artificial Sequence
  Description of Artificial Sequence: Synthetic oligonucleotide
ccacgaauaauuuucuguu

SEQ ID NO: 682445 - RNA, 19 nt, Artificial Sequence
  Description of Artificial Sequence: Synthetic oligonucleotide
agaauugcucggacaggua

SEQ ID NO: 682446 - RNA, 19 nt, Artificial Sequence
  Description of Artificial Sequence: Synthetic oligonucleotide
ugguaacgauaagucugua

SEQ ID NO: 682447 - RNA, 19 nt, Artificial Sequence
  Description of Artificial Sequence: Synthetic oligonucleotide
ccuuaacguugaaagcaca

SEQ ID NO: 682448 - RNA, 19 nt, Artificial Sequence
  Description of Artificial Sequence: Synthetic oligonucleotide
cgggaagcuauuagcacuc

SEQ ID NO: 682449 - RNA, 19 nt, Artificial Sequence
  Description of Artificial Sequence: Synthetic oligonucleotide
cgacagauguccccaugcc

SEQ ID NO: 682450 - RNA, 19 nt, Artificial Sequence
  Description of Artificial Sequence: Synthetic oligonucleotide
gcuuauagacugguugcaa

SEQ ID NO: 682451 - RNA, 19 nt, Artificial Sequence
  Description of Artificial Sequence: Synthetic oligonucleotide
gaccccuguucacuuaauu

SEQ ID NO: 682452 - RNA, 19 nt, Artificial Sequence
  Description of Artificial Sequence: Synthetic oligonucleotide
gaagcauaauagggucgcu

SEQ ID NO: 682453 - RNA, 19 nt, Artificial Sequence
  Description of Artificial Sequence: Synthetic oligonucleotide
cuacgguaagaguggcugu

SEQ ID NO: 682454 - RNA, 19 nt, Artificial Sequence
  Description of Artificial Sequence: Synthetic oligonucleotide
gaggaucgcugcuguagau

SEQ ID NO: 682455 - RNA, 19 nt, Artificial Sequence
  Description of Artificial Sequence: Synthetic oligonucleotide
acgguaagaguggcuguuu

SEQ ID NO: 682456 - RNA, 19 nt, Artificial Sequence
  Description of Artificial Sequence: Synthetic oligonucleotide
ccauagcgguuauuuucac

SEQ ID NO: 682457 - RNA, 19 nt, Artificial Sequence
  Description of Artificial Sequence: Synthetic oligonucleotide
caacacuugcgagauugcu

SEQ ID NO: 682458 - RNA, 19 nt, Artificial Sequence
  Description of Artificial Sequence: Synthetic oligonucleotide
agguaggccccgagugaag

SEQ ID NO: 682459 - RNA, 19 nt, Artificial Sequence
  Description of Artificial Sequence: Synthetic oligonucleotide
cucggacagguaggccccg

SEQ ID NO: 682460 - RNA, 19 nt, Artificial Sequence
  Description of Artificial Sequence: Synthetic oligonucleotide
gaagaggauuauacacuuu

SEQ ID NO: 682461 - RNA, 19 nt, Artificial Sequence
  Description of Artificial Sequence: Synthetic oligonucleotide
cgcucgauaggcugugaug

SEQ ID NO: 682462 - RNA, 19 nt, Artificial Sequence
  Description of Artificial Sequence: Synthetic oligonucleotide
ggccccuuaccagaccuac

SEQ ID NO: 682463 - RNA, 19 nt, Artificial Sequence
  Description of Artificial Sequence: Synthetic oligonucleotide
ccaugguaacgauaagucu

SEQ ID NO: 682464 - RNA, 19 nt, Artificial Sequence
  Description of Artificial Sequence: Synthetic oligonucleotide
ccccuuaccagaccuacaa

SEQ ID NO: 682465 - RNA, 19 nt, Artificial Sequence
  Description of Artificial Sequence: Synthetic oligonucleotide
gacuacgguaagaguggcu

SEQ ID NO: 682466 - RNA, 19 nt, Artificial Sequence
  Description of Artificial Sequence: Synthetic oligonucleotide
cucauacuauguccauggu

SEQ ID NO: 682467 - RNA, 19 nt, Artificial Sequence
  Description of Artificial Sequence: Synthetic oligonucleotide
ugcgcucgauaggcuguga

SEQ ID NO: 682468 - RNA, 19 nt, Artificial Sequence
  Description of Artificial Sequence: Synthetic oligonucleotide
cagauguccccaugccaua

SEQ ID NO: 682469 - RNA, 19 nt, Artificial Sequence
  Description of Artificial Sequence: Synthetic oligonucleotide
gcaugcagucucccagcac

SEQ ID NO: 682470 - RNA, 19 nt, Artificial Sequence
  Description of Artificial Sequence: Synthetic oligonucleotide
ggauuguauguaacaucaa

SEQ ID NO: 682471 - RNA, 19 nt, Artificial Sequence
  Description of Artificial Sequence: Synthetic oligonucleotide
cuagccgaugaaggucaca

SEQ ID NO: 682472 - RNA, 19 nt, Artificial Sequence
  Description of Artificial Sequence: Synthetic oligonucleotide
guaggccccgagugaaggu

SEQ ID NO: 682473 - RNA, 19 nt, Artificial Sequence
  Description of Artificial Sequence: Synthetic oligonucleotide
guugccucucggacacaca

SEQ ID NO: 682474 - RNA, 19 nt, Artificial Sequence
  Description of Artificial Sequence: Synthetic oligonucleotide
gugcauggauccgccuuuc

SEQ ID NO: 682475 - RNA, 19 nt, Artificial Sequence
  Description of Artificial Sequence: Synthetic oligonucleotide
gugcgguaacugacuccag

SEQ ID NO: 682476 - RNA, 19 nt, Artificial Sequence
  Description of Artificial Sequence: Synthetic oligonucleotide
gcuguagaugugauagccu

SEQ ID NO: 682477 - RNA, 19 nt, Artificial Sequence
  Description of Artificial Sequence: Synthetic oligonucleotide
cuccaagggcggcucugga

SEQ ID NO: 682478 - RNA, 19 nt, Artificial Sequence
  Description of Artificial Sequence: Synthetic oligonucleotide
cgagugcgguaacugacuc

SEQ ID NO: 682479 - RNA, 19 nt, Artificial Sequence
  Description of Artificial Sequence: Synthetic oligonucleotide
augguccgugggguuuaug

SEQ ID NO: 682480 - RNA, 19 nt, Artificial Sequence
  Description of Artificial Sequence: Synthetic oligonucleotide
ggauccgccuuucccuuua

SEQ ID NO: 682481 - RNA, 19 nt, Artificial Sequence
  Description of Artificial Sequence: Synthetic oligonucleotide
cggaugcaaauacaauaga

SEQ ID NO: 682482 - RNA, 19 nt, Artificial Sequence
  Description of Artificial Sequence: Synthetic oligonucleotide
cccuaccugcuuauugcca

SEQ ID NO: 682483 - RNA, 19 nt, Artificial Sequence
  Description of Artificial Sequence: Synthetic oligonucleotide
cuguagacucuggcaugca

SEQ ID NO: 682484 - RNA, 19 nt, Artificial Sequence
  Description of Artificial Sequence: Synthetic oligonucleotide
gccucagacuacgguaaga

SEQ ID NO: 682485 - RNA, 19 nt, Artificial Sequence
  Description of Artificial Sequence: Synthetic oligonucleotide
gcauaauagggucgcucuu

SEQ ID NO: 682486 - RNA, 19 nt, Artificial Sequence
  Description of Artificial Sequence: Synthetic oligonucleotide
ccucacacugagccaagcu

SEQ ID NO: 682487 - RNA, 19 nt, Artificial Sequence
  Description of Artificial Sequence: Synthetic oligonucleotide
ggcguacaugugcauggau

SEQ ID NO: 682488 - RNA, 19 nt, Artificial Sequence
  Description of Artificial Sequence: Synthetic oligonucleotide
ccgcacagucugcaucauc

SEQ ID NO: 682489 - RNA, 19 nt, Artificial Sequence
  Description of Artificial Sequence: Synthetic oligonucleotide
gccccgagugaaggugaag

SEQ ID NO: 682490 - RNA, 19 nt, Artificial Sequence
  Description of Artificial Sequence: Synthetic oligonucleotide
gcuccauucgccgcacagu

SEQ ID NO: 682491 - RNA, 19 nt, Artificial Sequence
  Description of Artificial Sequence: Synthetic oligonucleotide
gcccacgcagcaggcuucc

SEQ ID NO: 682492 - RNA, 19 nt, Artificial Sequence
  Description of Artificial Sequence: Synthetic oligonucleotide
ccagggucacucauacuau

SEQ ID NO: 682493 - RNA, 19 nt, Artificial Sequence
  Description of Artificial Sequence: Synthetic oligonucleotide
cugcuccuaggggcaccug

SEQ ID NO: 682494 - RNA, 19 nt, Artificial Sequence
  Description of Artificial Sequence: Synthetic oligonucleotide
gaugguccgugggguuuau

SEQ ID NO: 682495 - RNA, 19 nt, Artificial Sequence
  Description of Artificial Sequence: Synthetic oligonucleotide
gccccuuaccagaccuaca

SEQ ID NO: 682496 - RNA, 19 nt, Artificial Sequence
  Description of Artificial Sequence: Synthetic oligonucleotide
ccucucggacacacaagau

SEQ ID NO: 682497 - RNA, 19 nt, Artificial Sequence
  Description of Artificial Sequence: Synthetic oligonucleotide
cgagauugcuguucaccau

SEQ ID NO: 682498 - RNA, 19 nt, Artificial Sequence
  Description of Artificial Sequence: Synthetic oligonucleotide
ccucuucguccuguuagcu

SEQ ID NO: 682499 - RNA, 19 nt, Artificial Sequence
  Description of Artificial Sequence: Synthetic oligonucleotide
cccuuaccagaccuacaau

SEQ ID NO: 682500 - RNA, 19 nt, Artificial Sequence
  Description of Artificial Sequence: Synthetic oligonucleotide
gccaugcgcucgauaggcu

SEQ ID NO: 682501 - RNA, 19 nt, Artificial Sequence
  Description of Artificial Sequence: Synthetic oligonucleotide
gggccccuuaccagaccua

SEQ ID NO: 682502 - RNA, 19 nt, Artificial Sequence
  Description of Artificial Sequence: Synthetic oligonucleotide
cgguaagaguggcuguuuu

SEQ ID NO: 682503 - RNA, 19 nt, Artificial Sequence
  Description of Artificial Sequence: Synthetic oligonucleotide
aaggagagguauuugaacc

SEQ ID NO: 682504 - RNA, 19 nt, Artificial Sequence
  Description of Artificial Sequence: Synthetic oligonucleotide
aauacaucgaaacugccug

SEQ ID NO: 682505 - RNA, 19 nt, Artificial Sequence
  Description of Artificial Sequence: Synthetic oligonucleotide
aagaccaucacacaguaug

SEQ ID NO: 682506 - RNA, 19 nt, Artificial Sequence
  Description of Artificial Sequence: Synthetic oligonucleotide
aauuccagugcucaggagg

SEQ ID NO: 682507 - RNA, 19 nt, Artificial Sequence
  Description of Artificial Sequence: Synthetic oligonucleotide
aacgcuguacauuggagcc

SEQ ID NO: 682508 - RNA, 19 nt, Artificial Sequence
  Description of Artificial Sequence: Synthetic oligonucleotide
aaacgcuguacauuggagc

SEQ ID NO: 682509 - RNA, 19 nt, Artificial Sequence
  Description of Artificial Sequence: Synthetic oligonucleotide
aucagagaacauuauaccc

SEQ ID NO: 682510 - RNA, 19 nt, Artificial Sequence
  Description of Artificial Sequence: Synthetic oligonucleotide
uaccaaacaaucuugaggc

SEQ ID NO: 682511 - RNA, 19 nt, Artificial Sequence
  Description of Artificial Sequence: Synthetic oligonucleotide
uuugaaccaauuuaaaaug

SEQ ID NO: 682512 - RNA, 19 nt, Artificial Sequence
  Description of Artificial Sequence: Synthetic oligonucleotide
uguuagaaugcccacagcc

SEQ ID NO: 682513 - RNA, 19 nt, Artificial Sequence
  Description of Artificial Sequence: Synthetic oligonucleotide
ugaucagagaacauuauac

SEQ ID NO: 682514 - RNA, 19 nt, Artificial Sequence
  Description of Artificial Sequence: Synthetic oligonucleotide
aacggcaucagcuugguca

SEQ ID NO: 682515 - RNA, 19 nt, Artificial Sequence
  Description of Artificial Sequence: Synthetic oligonucleotide
auuugaaccaauuuaaaau

SEQ ID NO: 682516 - RNA, 19 nt, Artificial Sequence
  Description of Artificial Sequence: Synthetic oligonucleotide
aauaaagacccauggaagu

SEQ ID NO: 682517 - RNA, 19 nt, Artificial Sequence
  Description of Artificial Sequence: Synthetic oligonucleotide
ucaacgggaaaccagaaga

SEQ ID NO: 682518 - RNA, 19 nt, Artificial Sequence
  Description of Artificial Sequence: Synthetic oligonucleotide
auaaauacaucgaaacugc

SEQ ID NO: 682519 - RNA, 19 nt, Artificial Sequence
  Description of Artificial Sequence: Synthetic oligonucleotide
auucuauccaguaaggagc

SEQ ID NO: 682520 - RNA, 19 nt, Artificial Sequence
  Description of Artificial Sequence: Synthetic oligonucleotide
uuugaagcagguaacauuc

SEQ ID NO: 682521 - RNA, 19 nt, Artificial Sequence
  Description of Artificial Sequence: Synthetic oligonucleotide
caucauuuauuccugaugc

SEQ ID NO: 682522 - RNA, 19 nt, Artificial Sequence
  Description of Artificial Sequence: Synthetic oligonucleotide
acccagaaaauaaagaccc

SEQ ID NO: 682523 - RNA, 19 nt, Artificial Sequence
  Description of Artificial Sequence: Synthetic oligonucleotide
uuuggucuagaauaccugg

SEQ ID NO: 682524 - RNA, 19 nt, Artificial Sequence
  Description of Artificial Sequence: Synthetic oligonucleotide
uucaccauuacaagauugg

SEQ ID NO: 682525 - RNA, 19 nt, Artificial Sequence
  Description of Artificial Sequence: Synthetic oligonucleotide
caaucuugaggcuacauag

SEQ ID NO: 682526 - RNA, 19 nt, Artificial Sequence
  Description of Artificial Sequence: Synthetic oligonucleotide
uguguaacagcuauccacc

SEQ ID NO: 682527 - RNA, 19 nt, Artificial Sequence
  Description of Artificial Sequence: Synthetic oligonucleotide
aauaccuggaacacaacgg

SEQ ID NO: 682528 - RNA, 19 nt, Artificial Sequence
  Description of Artificial Sequence: Synthetic oligonucleotide
aaaacaaaacaaaacaaaa

SEQ ID NO: 682529 - RNA, 19 nt, Artificial Sequence
  Description of Artificial Sequence: Synthetic oligonucleotide
auaccuggaacacaacggc

SEQ ID NO: 682530 - RNA, 19 nt, Artificial Sequence
  Description of Artificial Sequence: Synthetic oligonucleotide
uucauugauuucaaacagg

SEQ ID NO: 682531 - RNA, 19 nt, Artificial Sequence
  Description of Artificial Sequence: Synthetic oligonucleotide
aucuguaagaccaucacac

SEQ ID NO: 682532 - RNA, 19 nt, Artificial Sequence
  Description of Artificial Sequence: Synthetic oligonucleotide
uauacccagaaaauaaaga

SEQ ID NO: 682533 - RNA, 19 nt, Artificial Sequence
  Description of Artificial Sequence: Synthetic oligonucleotide
guaacagcuauccaccugg

SEQ ID NO: 682534 - RNA, 19 nt, Artificial Sequence
  Description of Artificial Sequence: Synthetic oligonucleotide
cuugauuugaucaacggga

SEQ ID NO: 682535 - RNA, 19 nt, Artificial Sequence
  Description of Artificial Sequence: Synthetic oligonucleotide
uaauccaaguucuuuagcu

SEQ ID NO: 682536 - RNA, 19 nt, Artificial Sequence
  Description of Artificial Sequence: Synthetic oligonucleotide
cauucuauccaguaaggag

SEQ ID NO: 682537 - RNA, 19 nt, Artificial Sequence
  Description of Artificial Sequence: Synthetic oligonucleotide
aggaauuugaagcagguaa

SEQ ID NO: 682538 - RNA, 19 nt, Artificial Sequence
  Description of Artificial Sequence: Synthetic oligonucleotide
agcagguaacauucuaucc

SEQ ID NO: 682539 - RNA, 19 nt, Artificial Sequence
  Description of Artificial Sequence: Synthetic oligonucleotide
aucaccauucuuugaaugg

SEQ ID NO: 682540 - RNA, 19 nt, Artificial Sequence
  Description of Artificial Sequence: Synthetic oligonucleotide
uauuugaaccaauuuaaaa

SEQ ID NO: 682541 - RNA, 19 nt, Artificial Sequence
  Description of Artificial Sequence: Synthetic oligonucleotide
ucaagguaggaauuugaag

SEQ ID NO: 682542 - RNA, 19 nt, Artificial Sequence
  Description of Artificial Sequence: Synthetic oligonucleotide
aaacgcaucuguaagacca

SEQ ID NO: 682543 - RNA, 19 nt, Artificial Sequence
  Description of Artificial Sequence: Synthetic oligonucleotide
gauuugaucaacgggaaac

SEQ ID NO: 682544 - RNA, 19 nt, Artificial Sequence
  Description of Artificial Sequence: Synthetic oligonucleotide
aagguaggaauuugaagca

SEQ ID NO: 682545 - RNA, 19 nt, Artificial Sequence
  Description of Artificial Sequence: Synthetic oligonucleotide
agcuguguaacagcuaucc

SEQ ID NO: 682546 - RNA, 19 nt, Artificial Sequence
  Description of Artificial Sequence: Synthetic oligonucleotide
uugaaccaauuuaaaauga

SEQ ID NO: 682547 - RNA, 19 nt, Artificial Sequence
  Description of Artificial Sequence: Synthetic oligonucleotide
uguaagaccaucacacagu

SEQ ID NO: 682548 - RNA, 19 nt, Artificial Sequence
  Description of Artificial Sequence: Synthetic oligonucleotide
ugaggcuacauagugaggc

SEQ ID NO: 682549 - RNA, 19 nt, Artificial Sequence
  Description of Artificial Sequence: Synthetic oligonucleotide
guuacaguccaucauuuug

SEQ ID NO: 682550 - RNA, 19 nt, Artificial Sequence
  Description of Artificial Sequence: Synthetic oligonucleotide
ugaauggcucauuuugagg

SEQ ID NO: 682551 - RNA, 19 nt, Artificial Sequence
  Description of Artificial Sequence: Synthetic oligonucleotide
auuugaucaacgggaaacc

SEQ ID NO: 682552 - RNA, 19 nt, Artificial Sequence
  Description of Artificial Sequence: Synthetic oligonucleotide
cauugagucacauuuucac

SEQ ID NO: 682553 - RNA, 19 nt, Artificial Sequence
  Description of Artificial Sequence: Synthetic oligonucleotide
ugaucaacgggaaaccaga

SEQ ID NO: 682554 - RNA, 19 nt, Artificial Sequence
  Description of Artificial Sequence: Synthetic oligonucleotide
uauccaguaaggagcagag

SEQ ID NO: 682555 - RNA, 19 nt, Artificial Sequence
  Description of Artificial Sequence: Synthetic oligonucleotide
uugaucaacgggaaaccag

SEQ ID NO: 682556 - RNA, 19 nt, Artificial Sequence
  Description of Artificial Sequence: Synthetic oligonucleotide
gaaaauaaagacccaugga

SEQ ID NO: 682557 - RNA, 19 nt, Artificial Sequence
  Description of Artificial Sequence: Synthetic oligonucleotide
cuuguuagaaugcccacag

SEQ ID NO: 682558 - RNA, 19 nt, Artificial Sequence
  Description of Artificial Sequence: Synthetic oligonucleotide
auaaccacgggguccgagc

SEQ ID NO: 682559 - RNA, 19 nt, Artificial Sequence
  Description of Artificial Sequence: Synthetic oligonucleotide
uauuccugaugcauuagcu

SEQ ID NO: 682560 - RNA, 19 nt, Artificial Sequence
  Description of Artificial Sequence: Synthetic oligonucleotide
uuuuggucuagaauaccug

SEQ ID NO: 682561 - RNA, 19 nt, Artificial Sequence
  Description of Artificial Sequence: Synthetic oligonucleotide
acaguaugcugucagcuag

SEQ ID NO: 682562 - RNA, 19 nt, Artificial Sequence
  Description of Artificial Sequence: Synthetic oligonucleotide
acauuuucaccauuacaag

SEQ ID NO: 682563 - RNA, 19 nt, Artificial Sequence
  Description of Artificial Sequence: Synthetic oligonucleotide
uacauuggagcccuugaug

SEQ ID NO: 682564 - RNA, 19 nt, Artificial Sequence
  Description of Artificial Sequence: Synthetic oligonucleotide
ucaguucaagguuacaguc

SEQ ID NO: 682565 - RNA, 19 nt, Artificial Sequence
  Description of Artificial Sequence: Synthetic oligonucleotide
ugaaccaauuuaaaaugaa

SEQ ID NO: 682566 - RNA, 19 nt, Artificial Sequence
  Description of Artificial Sequence: Synthetic oligonucleotide
aacauucuauccaguaagg

SEQ ID NO: 682567 - RNA, 19 nt, Artificial Sequence
  Description of Artificial Sequence: Synthetic oligonucleotide
aagguuacaguccaucauu

SEQ ID NO: 682568 - RNA, 19 nt, Artificial Sequence
  Description of Artificial Sequence: Synthetic oligonucleotide
ucacacaguaugcugucag

SEQ ID NO: 682569 - RNA, 19 nt, Artificial Sequence
  Description of Artificial Sequence: Synthetic oligonucleotide
agguauuugaaccaauuua

SEQ ID NO: 682570 - RNA, 19 nt, Artificial Sequence
  Description of Artificial Sequence: Synthetic oligonucleotide
aaauacaucgaaacugccu

SEQ ID NO: 682571 - RNA, 19 nt, Artificial Sequence
  Description of Artificial Sequence: Synthetic oligonucleotide
uaaauacaucgaaacugcc

SEQ ID NO: 682572 - RNA, 19 nt, Artificial Sequence
  Description of Artificial Sequence: Synthetic oligonucleotide
cauuauacccagaaaauaa

SEQ ID NO: 682573 - RNA, 19 nt, Artificial Sequence
  Description of Artificial Sequence: Synthetic oligonucleotide
uacacuuguuagaaugccc

SEQ ID NO: 682574 - RNA, 19 nt, Artificial Sequence
  Description of Artificial Sequence: Synthetic oligonucleotide
auacaucgaaacugccugc

SEQ ID NO: 682575 - RNA, 19 nt, Artificial Sequence
  Description of Artificial Sequence: Synthetic oligonucleotide
uagcuauugcagcagacac

SEQ ID NO: 682576 - RNA, 19 nt, Artificial Sequence
  Description of Artificial Sequence: Synthetic oligonucleotide
aaguacagcuguguaacag

SEQ ID NO: 682577 - RNA, 19 nt, Artificial Sequence
  Description of Artificial Sequence: Synthetic oligonucleotide
aaagccuggucuaccaaac

SEQ ID NO: 682578 - RNA, 19 nt, Artificial Sequence
  Description of Artificial Sequence: Synthetic oligonucleotide
gaaggagagguauuugaac

SEQ ID NO: 682579 - RNA, 19 nt, Artificial Sequence
  Description of Artificial Sequence: Synthetic oligonucleotide
aucuugaggcuacauagug

SEQ ID NO: 682580 - RNA, 19 nt, Artificial Sequence
  Description of Artificial Sequence: Synthetic oligonucleotide
caguccaucauuuugggga

SEQ ID NO: 682581 - RNA, 19 nt, Artificial Sequence
  Description of Artificial Sequence: Synthetic oligonucleotide
gucuagaauaccuggaaca

SEQ ID NO: 682582 - RNA, 19 nt, Artificial Sequence
  Description of Artificial Sequence: Synthetic oligonucleotide
gaauggcucauuuugaggu

SEQ ID NO: 682583 - RNA, 19 nt, Artificial Sequence
  Description of Artificial Sequence: Synthetic oligonucleotide
ugcuuuugcaacagcuugc

SEQ ID NO: 682584 - RNA, 19 nt, Artificial Sequence
  Description of Artificial Sequence: Synthetic oligonucleotide
uggucuaccaaacaaucuu

SEQ ID NO: 682585 - RNA, 19 nt, Artificial Sequence
  Description of Artificial Sequence: Synthetic oligonucleotide
ucuugaggcuacauaguga

SEQ ID NO: 682586 - RNA, 19 nt, Artificial Sequence
  Description of Artificial Sequence: Synthetic oligonucleotide
aauccaaguucuuuagcua

SEQ ID NO: 682587 - RNA, 19 nt, Artificial Sequence
  Description of Artificial Sequence: Synthetic oligonucleotide
caggucaacauccuccagg

SEQ ID NO: 682588 - RNA, 19 nt, Artificial Sequence
  Description of Artificial Sequence: Synthetic oligonucleotide
uccugaugcauuagcuggg

SEQ ID NO: 682589 - RNA, 19 nt, Artificial Sequence
  Description of Artificial Sequence: Synthetic oligonucleotide
cagguaacauucuauccag

SEQ ID NO: 682590 - RNA, 19 nt, Artificial Sequence
  Description of Artificial Sequence: Synthetic oligonucleotide
uguaacagcuauccaccug

SEQ ID NO: 682591 - RNA, 19 nt, Artificial Sequence
  Description of Artificial Sequence: Synthetic oligonucleotide
aaaacgcuguacauuggag

SEQ ID NO: 682592 - RNA, 19 nt, Artificial Sequence
  Description of Artificial Sequence: Synthetic oligonucleotide
uuuagcuauugcagcagac

SEQ ID NO: 682593 - RNA, 19 nt, Artificial Sequence
  Description of Artificial Sequence: Synthetic oligonucleotide
ugcugcgaaggcuucauug

SEQ ID NO: 682594 - RNA, 19 nt, Artificial Sequence
  Description of Artificial Sequence: Synthetic oligonucleotide
auuugaagcagguaacauu

SEQ ID NO: 682595 - RNA, 19 nt, Artificial Sequence
  Description of Artificial Sequence: Synthetic oligonucleotide
auuaaaguacagcugugua

SEQ ID NO: 682596 - RNA, 19 nt, Artificial Sequence
  Description of Artificial Sequence: Synthetic oligonucleotide
uuagcuauugcagcagaca

SEQ ID NO: 682597 - RNA, 19 nt, Artificial Sequence
  Description of Artificial Sequence: Synthetic oligonucleotide
ucauuuauuccugaugcau

SEQ ID NO: 682598 - RNA, 19 nt, Artificial Sequence
  Description of Artificial Sequence: Synthetic oligonucleotide
caucgaaacugccugcugc

SEQ ID NO: 682599 - RNA, 19 nt, Artificial Sequence
  Description of Artificial Sequence: Synthetic oligonucleotide
acagcuauccaccuggguu

SEQ ID NO: 682600 - RNA, 19 nt, Artificial Sequence
  Description of Artificial Sequence: Synthetic oligonucleotide
auuuauuccugaugcauua

SEQ ID NO: 682601 - RNA, 19 nt, Artificial Sequence
  Description of Artificial Sequence: Synthetic oligonucleotide
auggcucauuuugaggucc

SEQ ID NO: 682602 - RNA, 19 nt, Artificial Sequence
  Description of Artificial Sequence: Synthetic oligonucleotide
cauuuucaccauuacaaga

SEQ ID NO: 682603 - RNA, 19 nt, Artificial Sequence
  Description of Artificial Sequence: Synthetic oligonucleotide
ucaccauucuuugaauggc

SEQ ID NO: 682604 - RNA, 19 nt, Artificial Sequence
  Description of Artificial Sequence: Synthetic oligonucleotide
ucuguaagaccaucacaca

SEQ ID NO: 682605 - RNA, 19 nt, Artificial Sequence
  Description of Artificial Sequence: Synthetic oligonucleotide
aucaacgggaaaccagaag

SEQ ID NO: 682606 - RNA, 19 nt, Artificial Sequence
  Description of Artificial Sequence: Synthetic oligonucleotide
uggucuagaauaccuggaa

SEQ ID NO: 682607 - RNA, 19 nt, Artificial Sequence
  Description of Artificial Sequence: Synthetic oligonucleotide
aaaguacagcuguguaaca

SEQ ID NO: 682608 - RNA, 19 nt, Artificial Sequence
  Description of Artificial Sequence: Synthetic oligonucleotide
agacccauggaaguuauga

SEQ ID NO: 682609 - RNA, 19 nt, Artificial Sequence
  Description of Artificial Sequence: Synthetic oligonucleotide
gaagucuuggguaucucac

SEQ ID NO: 682610 - RNA, 19 nt, Artificial Sequence
  Description of Artificial Sequence: Synthetic oligonucleotide
agcuagcggcaucucaccc

SEQ ID NO: 682611 - RNA, 19 nt, Artificial Sequence
  Description of Artificial Sequence: Synthetic oligonucleotide
gaugcauuagcugggguga

SEQ ID NO: 682612 - RNA, 19 nt, Artificial Sequence
  Description of Artificial Sequence: Synthetic oligonucleotide
auccaaguucuuuagcuau

SEQ ID NO: 682613 - RNA, 19 nt, Artificial Sequence
  Description of Artificial Sequence: Synthetic oligonucleotide
uuuauuccugaugcauuag

SEQ ID NO: 682614 - RNA, 19 nt, Artificial Sequence
  Description of Artificial Sequence: Synthetic oligonucleotide
ucucaguguuuaauccaag

SEQ ID NO: 682615 - RNA, 19 nt, Artificial Sequence
  Description of Artificial Sequence: Synthetic oligonucleotide
accagccugcuuuugcaac

SEQ ID NO: 682616 - RNA, 19 nt, Artificial Sequence
  Description of Artificial Sequence: Synthetic oligonucleotide
uuugaucaacgggaaacca

SEQ ID NO: 682617 - RNA, 19 nt, Artificial Sequence
  Description of Artificial Sequence: Synthetic oligonucleotide
aagauuggucuugauuuga

SEQ ID NO: 682618 - RNA, 19 nt, Artificial Sequence
  Description of Artificial Sequence: Synthetic oligonucleotide
cacaacggcaucagcuugg

SEQ ID NO: 682619 - RNA, 19 nt, Artificial Sequence
  Description of Artificial Sequence: Synthetic oligonucleotide
gucauugagucacauuuuc

SEQ ID NO: 682620 - RNA, 19 nt, Artificial Sequence
  Description of Artificial Sequence: Synthetic oligonucleotide
aaggagcagagagaaauaa

SEQ ID NO: 682621 - RNA, 19 nt, Artificial Sequence
  Description of Artificial Sequence: Synthetic oligonucleotide
aggagagguauuugaacca

SEQ ID NO: 682622 - RNA, 19 nt, Artificial Sequence
  Description of Artificial Sequence: Synthetic oligonucleotide
caagauuggucuugauuug

SEQ ID NO: 682623 - RNA, 19 nt, Artificial Sequence
  Description of Artificial Sequence: Synthetic oligonucleotide
aacgggaaaccagaagaca

SEQ ID NO: 682624 - RNA, 19 nt, Artificial Sequence
  Description of Artificial Sequence: Synthetic oligonucleotide
uaacagcuauccaccuggg

SEQ ID NO: 682625 - RNA, 19 nt, Artificial Sequence
  Description of Artificial Sequence: Synthetic oligonucleotide
gaauuugaagcagguaaca

SEQ ID NO: 682626 - RNA, 19 nt, Artificial Sequence
  Description of Artificial Sequence: Synthetic oligonucleotide
guaacauucuauccaguaa

SEQ ID NO: 682627 - RNA, 19 nt, Artificial Sequence
  Description of Artificial Sequence: Synthetic oligonucleotide
uuggucuugauuugaucaa

SEQ ID NO: 682628 - RNA, 19 nt, Artificial Sequence
  Description of Artificial Sequence: Synthetic oligonucleotide
aucauuuauuccugaugca

SEQ ID NO: 682629 - RNA, 19 nt, Artificial Sequence
  Description of Artificial Sequence: Synthetic oligonucleotide
acaaucuugaggcuacaua

SEQ ID NO: 682630 - RNA, 19 nt, Artificial Sequence
  Description of Artificial Sequence: Synthetic oligonucleotide
gguauuugaaccaauuuaa

SEQ ID NO: 682631 - RNA, 19 nt, Artificial Sequence
  Description of Artificial Sequence: Synthetic oligonucleotide
acccauggaaguuaugaaa

SEQ ID NO: 682632 - RNA, 19 nt, Artificial Sequence
  Description of Artificial Sequence: Synthetic oligonucleotide
uugaggcuacauagugagg

SEQ ID NO: 682633 - RNA, 19 nt, Artificial Sequence
  Description of Artificial Sequence: Synthetic oligonucleotide
aguaugcugucagcuagcg

SEQ ID NO: 682634 - RNA, 19 nt, Artificial Sequence
  Description of Artificial Sequence: Synthetic oligonucleotide
ucugccacugagguaaaac

SEQ ID NO: 682635 - RNA, 19 nt, Artificial Sequence
  Description of Artificial Sequence: Synthetic oligonucleotide
ugcucacuuuucuacuccc

SEQ ID NO: 682636 - RNA, 19 nt, Artificial Sequence
  Description of Artificial Sequence: Synthetic oligonucleotide
aaucuugaggcuacauagu

SEQ ID NO: 682637 - RNA, 19 nt, Artificial Sequence
  Description of Artificial Sequence: Synthetic oligonucleotide
caacgggaaaccagaagac

SEQ ID NO: 682638 - RNA, 19 nt, Artificial Sequence
  Description of Artificial Sequence: Synthetic oligonucleotide
uuuucaccauuacaagauu

SEQ ID NO: 682639 - RNA, 19 nt, Artificial Sequence
  Description of Artificial Sequence: Synthetic oligonucleotide
auuauacccagaaaauaaa

SEQ ID NO: 682640 - RNA, 19 nt, Artificial Sequence
  Description of Artificial Sequence: Synthetic oligonucleotide
ugauuugaucaacgggaaa

SEQ ID NO: 682641 - RNA, 19 nt, Artificial Sequence
  Description of Artificial Sequence: Synthetic oligonucleotide
agcggcaucucacccaucu

SEQ ID NO: 682642 - RNA, 19 nt, Artificial Sequence
  Description of Artificial Sequence: Synthetic oligonucleotide
acacuuguuagaaugccca

SEQ ID NO: 682643 - RNA, 19 nt, Artificial Sequence
  Description of Artificial Sequence: Synthetic oligonucleotide
ucuugacuccugcucucag

SEQ ID NO: 682644 - RNA, 19 nt, Artificial Sequence
  Description of Artificial Sequence: Synthetic oligonucleotide
aucccgacgcccugcuucc

SEQ ID NO: 682645 - RNA, 19 nt, Artificial Sequence
  Description of Artificial Sequence: Synthetic oligonucleotide
aucgaaacugccugcugcu

SEQ ID NO: 682646 - RNA, 19 nt, Artificial Sequence
  Description of Artificial Sequence: Synthetic oligonucleotide
uuguuagaaugcccacagc

SEQ ID NO: 682647 - RNA, 19 nt, Artificial Sequence
  Description of Artificial Sequence: Synthetic oligonucleotide
aacagcuauccaccugggu

SEQ ID NO: 682648 - RNA, 19 nt, Artificial Sequence
  Description of Artificial Sequence: Synthetic oligonucleotide
gcagguaacauucuaucca

SEQ ID NO: 682649 - RNA, 19 nt, Artificial Sequence
  Description of Artificial Sequence: Synthetic oligonucleotide
uuagcuggggugacuguuc

SEQ ID NO: 682650 - RNA, 19 nt, Artificial Sequence
  Description of Artificial Sequence: Synthetic oligonucleotide
guacacuuguuagaaugcc

SEQ ID NO: 682651 - RNA, 19 nt, Artificial Sequence
  Description of Artificial Sequence: Synthetic oligonucleotide
acagaagccccaaucacca

SEQ ID NO: 682652 - RNA, 19 nt, Artificial Sequence
  Description of Artificial Sequence: Synthetic oligonucleotide
uaaagacccauggaaguua

SEQ ID NO: 682653 - RNA, 19 nt, Artificial Sequence
  Description of Artificial Sequence: Synthetic oligonucleotide
uugaccuucucaguguuua

SEQ ID NO: 682654 - RNA, 19 nt, Artificial Sequence
  Description of Artificial Sequence: Synthetic oligonucleotide
uaauuccagugcucaggag

SEQ ID NO: 682655 - RNA, 19 nt, Artificial Sequence
  Description of Artificial Sequence: Synthetic oligonucleotide
guaaggagcagagagaaau

SEQ ID NO: 682656 - RNA, 19 nt, Artificial Sequence
  Description of Artificial Sequence: Synthetic oligonucleotide
acuuguuagaaugcccaca

SEQ ID NO: 682657 - RNA, 19 nt, Artificial Sequence
  Description of Artificial Sequence: Synthetic oligonucleotide
uacaucgaaacugccugcu

SEQ ID NO: 682658 - RNA, 19 nt, Artificial Sequence
  Description of Artificial Sequence: Synthetic oligonucleotide
cagccgucagccaggagcc

SEQ ID NO: 682659 - RNA, 19 nt, Artificial Sequence
  Description of Artificial Sequence: Synthetic oligonucleotide
caucagcuuggucauugag

SEQ ID NO: 682660 - RNA, 19 nt, Artificial Sequence
  Description of Artificial Sequence: Synthetic oligonucleotide
aguccaucauuuuggggaa

SEQ ID NO: 682661 - RNA, 19 nt, Artificial Sequence
  Description of Artificial Sequence: Synthetic oligonucleotide
uagcuggggugacuguucc

SEQ ID NO: 682662 - RNA, 19 nt, Artificial Sequence
  Description of Artificial Sequence: Synthetic oligonucleotide
ucaaagccuggucuaccaa

SEQ ID NO: 682663 - RNA, 19 nt, Artificial Sequence
  Description of Artificial Sequence: Synthetic oligonucleotide
guaugcugucagcuagcgg

SEQ ID NO: 682664 - RNA, 19 nt, Artificial Sequence
  Description of Artificial Sequence: Synthetic oligonucleotide
uccaucauuuuggggaagu

SEQ ID NO: 682665 - RNA, 19 nt, Artificial Sequence
  Description of Artificial Sequence: Synthetic oligonucleotide
gaagccccaaucaccauuc

SEQ ID NO: 682666 - RNA, 19 nt, Artificial Sequence
  Description of Artificial Sequence: Synthetic oligonucleotide
agguaggaauuugaagcag

SEQ ID NO: 682667 - RNA, 19 nt, Artificial Sequence
  Description of Artificial Sequence: Synthetic oligonucleotide
accaucauuuauuccugau

SEQ ID NO: 682668 - RNA, 19 nt, Artificial Sequence
  Description of Artificial Sequence: Synthetic oligonucleotide
caucuguaagaccaucaca

SEQ ID NO: 682669 - RNA, 19 nt, Artificial Sequence
  Description of Artificial Sequence: Synthetic oligonucleotide
guaagaccaucacacagua

SEQ ID NO: 682670 - RNA, 19 nt, Artificial Sequence
  Description of Artificial Sequence: Synthetic oligonucleotide
uggucuugauuugaucaac

SEQ ID NO: 682671 - RNA, 19 nt, Artificial Sequence
  Description of Artificial Sequence: Synthetic oligonucleotide
ggaauuugaagcagguaac

SEQ ID NO: 682672 - RNA, 19 nt, Artificial Sequence
  Description of Artificial Sequence: Synthetic oligonucleotide
auaaagacccauggaaguu

SEQ ID NO: 682673 - RNA, 19 nt, Artificial Sequence
  Description of Artificial Sequence: Synthetic oligonucleotide
ggcaugauggcacacaccu

SEQ ID NO: 682674 - RNA, 19 nt, Artificial Sequence
  Description of Artificial Sequence: Synthetic oligonucleotide
acgcuguacauuggagccc

SEQ ID NO: 682675 - RNA, 19 nt, Artificial Sequence
  Description of Artificial Sequence: Synthetic oligonucleotide
agacaacaaggaaggagag

SEQ ID NO: 682676 - RNA, 19 nt, Artificial Sequence
  Description of Artificial Sequence: Synthetic oligonucleotide
caguaugcugucagcuagc

SEQ ID NO: 682677 - RNA, 19 nt, Artificial Sequence
  Description of Artificial Sequence: Synthetic oligonucleotide
ggucuagaauaccuggaac

SEQ ID NO: 682678 - RNA, 19 nt, Artificial Sequence
  Description of Artificial Sequence: Synthetic oligonucleotide
caucccgacgcccugcuuc

SEQ ID NO: 682679 - RNA, 19 nt, Artificial Sequence
  Description of Artificial Sequence: Synthetic oligonucleotide
acaucgaaacugccugcug

SEQ ID NO: 682680 - RNA, 19 nt, Artificial Sequence
  Description of Artificial Sequence: Synthetic oligonucleotide
agccgucugccacugaggu

SEQ ID NO: 682681 - RNA, 19 nt, Artificial Sequence
  Description of Artificial Sequence: Synthetic oligonucleotide
aaagacccauggaaguuau

SEQ ID NO: 682682 - RNA, 19 nt, Artificial Sequence
  Description of Artificial Sequence: Synthetic oligonucleotide
gauaaccacgggguccgag

SEQ ID NO: 682683 - RNA, 19 nt, Artificial Sequence
  Description of Artificial Sequence: Synthetic oligonucleotide
acauuaaaguacagcugug

SEQ ID NO: 682684 - RNA, 19 nt, Artificial Sequence
  Description of Artificial Sequence: Synthetic oligonucleotide
ucuacucccagggguacac

SEQ ID NO: 682685 - RNA, 19 nt, Artificial Sequence
  Description of Artificial Sequence: Synthetic oligonucleotide
ccugcacucaucccgacgc

SEQ ID NO: 682686 - RNA, 19 nt, Artificial Sequence
  Description of Artificial Sequence: Synthetic oligonucleotide
caucauuuuggggaaguca

SEQ ID NO: 682687 - RNA, 19 nt, Artificial Sequence
  Description of Artificial Sequence: Synthetic oligonucleotide
accaaacaaucuugaggcu

SEQ ID NO: 682688 - RNA, 19 nt, Artificial Sequence
  Description of Artificial Sequence: Synthetic oligonucleotide
agggguacacuuguuagaa

SEQ ID NO: 682689 - RNA, 19 nt, Artificial Sequence
  Description of Artificial Sequence: Synthetic oligonucleotide
ugcgaaggcuucauugauu

SEQ ID NO: 682690 - RNA, 19 nt, Artificial Sequence
  Description of Artificial Sequence: Synthetic oligonucleotide
agucaagguaggaauuuga

SEQ ID NO: 682691 - RNA, 19 nt, Artificial Sequence
  Description of Artificial Sequence: Synthetic oligonucleotide
acgggaaaccagaagacaa

SEQ ID NO: 682692 - RNA, 19 nt, Artificial Sequence
  Description of Artificial Sequence: Synthetic oligonucleotide
cuauccaguaaggagcaga

SEQ ID NO: 682693 - RNA, 19 nt, Artificial Sequence
  Description of Artificial Sequence: Synthetic oligonucleotide
gacccauggaaguuaugaa

SEQ ID NO: 682694 - RNA, 19 nt, Artificial Sequence
  Description of Artificial Sequence: Synthetic oligonucleotide
ugcacucaucccgacgccc

SEQ ID NO: 682695 - RNA, 19 nt, Artificial Sequence
  Description of Artificial Sequence: Synthetic oligonucleotide
ggagccgucugccacugag

SEQ ID NO: 682696 - RNA, 19 nt, Artificial Sequence
  Description of Artificial Sequence: Synthetic oligonucleotide
ucucacccaucuugacucc

SEQ ID NO: 682697 - RNA, 19 nt, Artificial Sequence
  Description of Artificial Sequence: Synthetic oligonucleotide
ggucuaccaaacaaucuug

SEQ ID NO: 682698 - RNA, 19 nt, Artificial Sequence
  Description of Artificial Sequence: Synthetic oligonucleotide
agagguauuugaaccaauu

SEQ ID NO: 682699 - RNA, 19 nt, Artificial Sequence
  Description of Artificial Sequence: Synthetic oligonucleotide
acggcaucagcuuggucau

SEQ ID NO: 682700 - RNA, 19 nt, Artificial Sequence
  Description of Artificial Sequence: Synthetic oligonucleotide
uaagaccaucacacaguau

SEQ ID NO: 682701 - RNA, 19 nt, Artificial Sequence
  Description of Artificial Sequence: Synthetic oligonucleotide
aggcaugauggcacacacc

SEQ ID NO: 682702 - RNA, 19 nt, Artificial Sequence
  Description of Artificial Sequence: Synthetic oligonucleotide
uggcucauuuugaggucca

SEQ ID NO: 682703 - RNA, 19 nt, Artificial Sequence
  Description of Artificial Sequence: Synthetic oligonucleotide
ccuggucuaccaaacaauc

SEQ ID NO: 682704 - RNA, 19 nt, Artificial Sequence
  Description of Artificial Sequence: Synthetic oligonucleotide
cagcuagcggcaucucacc

SEQ ID NO: 682705 - RNA, 19 nt, Artificial Sequence
  Description of Artificial Sequence: Synthetic oligonucleotide
augaagucuuggguaucuc

SEQ ID NO: 682706 - RNA, 19 nt, Artificial Sequence
  Description of Artificial Sequence: Synthetic oligonucleotide
caucuugacuccugcucuc

SEQ ID NO: 682707 - RNA, 19 nt, Artificial Sequence
  Description of Artificial Sequence: Synthetic oligonucleotide
auuagcuggggugacuguu

SEQ ID NO: 682708 - RNA, 19 nt, Artificial Sequence
  Description of Artificial Sequence: Synthetic oligonucleotide
uaggaauuugaagcaggua

SEQ ID NO: 682709 - RNA, 19 nt, Artificial Sequence
  Description of Artificial Sequence: Synthetic oligonucleotide
gucuaccaaacaaucuuga

SEQ ID NO: 682710 - RNA, 19 nt, Artificial Sequence
  Description of Artificial Sequence: Synthetic oligonucleotide
gucaagguaggaauuugaa

SEQ ID NO: 682711 - RNA, 19 nt, Artificial Sequence
  Description of Artificial Sequence: Synthetic oligonucleotide
cgagccugcacucaucccg

SEQ ID NO: 682712 - RNA, 19 nt, Artificial Sequence
  Description of Artificial Sequence: Synthetic oligonucleotide
uacucccagggguacacuu

SEQ ID NO: 682713 - RNA, 19 nt, Artificial Sequence
  Description of Artificial Sequence: Synthetic oligonucleotide
ucuauccaguaaggagcag

SEQ ID NO: 682714 - RNA, 19 nt, Artificial Sequence
  Description of Artificial Sequence: Synthetic oligonucleotide
agcuauugcagcagacacu

SEQ ID NO: 682715 - RNA, 19 nt, Artificial Sequence
  Description of Artificial Sequence: Synthetic oligonucleotide
gagccgucugccacugagg

SEQ ID NO: 682716 - RNA, 19 nt, Artificial Sequence
  Description of Artificial Sequence: Synthetic oligonucleotide
cagacacugcugcgaaggc

SEQ ID NO: 682717 - RNA, 19 nt, Artificial Sequence
  Description of Artificial Sequence: Synthetic oligonucleotide
gugcaaugaagucuugggu

SEQ ID NO: 682718 - RNA, 19 nt, Artificial Sequence
  Description of Artificial Sequence: Synthetic oligonucleotide
augcauuagcuggggugac

SEQ ID NO: 682719 - RNA, 19 nt, Artificial Sequence
  Description of Artificial Sequence: Synthetic oligonucleotide
cucaguguuuaauccaagu

SEQ ID NO: 682720 - RNA, 19 nt, Artificial Sequence
  Description of Artificial Sequence: Synthetic oligonucleotide
cuguacauuggagcccuug

SEQ ID NO: 682721 - RNA, 19 nt, Artificial Sequence
  Description of Artificial Sequence: Synthetic oligonucleotide
ugaccuucucaguguuuaa

SEQ ID NO: 682722 - RNA, 19 nt, Artificial Sequence
  Description of Artificial Sequence: Synthetic oligonucleotide
agacacugcugcgaaggcu

SEQ ID NO: 682723 - RNA, 19 nt, Artificial Sequence
  Description of Artificial Sequence: Synthetic oligonucleotide
gcugcgaaggcuucauuga

SEQ ID NO: 682724 - RNA, 19 nt, Artificial Sequence
  Description of Artificial Sequence: Synthetic oligonucleotide
acgcaucuguaagaccauc

SEQ ID NO: 682725 - RNA, 19 nt, Artificial Sequence
  Description of Artificial Sequence: Synthetic oligonucleotide
cauuaaaguacagcugugu

SEQ ID NO: 682726 - RNA, 19 nt, Artificial Sequence
  Description of Artificial Sequence: Synthetic oligonucleotide
cauuuauuccugaugcauu

SEQ ID NO: 682727 - RNA, 19 nt, Artificial Sequence
  Description of Artificial Sequence: Synthetic oligonucleotide
ugcauuagcuggggugacu

SEQ ID NO: 682728 - RNA, 19 nt, Artificial Sequence
  Description of Artificial Sequence: Synthetic oligonucleotide
caccuuuaauuccagugcu

SEQ ID NO: 682729 - RNA, 19 nt, Artificial Sequence
  Description of Artificial Sequence: Synthetic oligonucleotide
gcauuagcuggggugacug

SEQ ID NO: 682730 - RNA, 19 nt, Artificial Sequence
  Description of Artificial Sequence: Synthetic oligonucleotide
agauuggucuugauuugau

SEQ ID NO: 682731 - RNA, 19 nt, Artificial Sequence
  Description of Artificial Sequence: Synthetic oligonucleotide
aacgcaucuguaagaccau

SEQ ID NO: 682732 - RNA, 19 nt, Artificial Sequence
  Description of Artificial Sequence: Synthetic oligonucleotide
gggaaaccagaagacaaca

SEQ ID NO: 682733 - RNA, 19 nt, Artificial Sequence
  Description of Artificial Sequence: Synthetic oligonucleotide
aggagcagagagaaauaaa

SEQ ID NO: 682734 - RNA, 19 nt, Artificial Sequence
  Description of Artificial Sequence: Synthetic oligonucleotide
gguccaggcaugauggcac

SEQ ID NO: 682735 - RNA, 19 nt, Artificial Sequence
  Description of Artificial Sequence: Synthetic oligonucleotide
guaggaauuugaagcaggu

SEQ ID NO: 682736 - RNA, 19 nt, Artificial Sequence
  Description of Artificial Sequence: Synthetic oligonucleotide
gggaguucaaagccugguc

SEQ ID NO: 682737 - RNA, 19 nt, Artificial Sequence
  Description of Artificial Sequence: Synthetic oligonucleotide
gaucaacgggaaaccagaa

SEQ ID NO: 682738 - RNA, 19 nt, Artificial Sequence
  Description of Artificial Sequence: Synthetic oligonucleotide
cuggaacacaacggcauca

SEQ ID NO: 682739 - RNA, 19 nt, Artificial Sequence
  Description of Artificial Sequence: Synthetic oligonucleotide
accacgggguccgagccug

SEQ ID NO: 682740 - RNA, 19 nt, Artificial Sequence
  Description of Artificial Sequence: Synthetic oligonucleotide
uucuacucccagggguaca

SEQ ID NO: 682741 - RNA, 19 nt, Artificial Sequence
  Description of Artificial Sequence: Synthetic oligonucleotide
cacaguaugcugucagcua

SEQ ID NO: 682742 - RNA, 19 nt, Artificial Sequence
  Description of Artificial Sequence: Synthetic oligonucleotide
agccugcacucaucccgac

SEQ ID NO: 682743 - RNA, 19 nt, Artificial Sequence
  Description of Artificial Sequence: Synthetic oligonucleotide
agguuacaguccaucauuu

SEQ ID NO: 682744 - RNA, 19 nt, Artificial Sequence
  Description of Artificial Sequence: Synthetic oligonucleotide
acucccagggguacacuug

SEQ ID NO: 682745 - RNA, 19 nt, Artificial Sequence
  Description of Artificial Sequence: Synthetic oligonucleotide
cuggucuaccaaacaaucu

SEQ ID NO: 682746 - RNA, 19 nt, Artificial Sequence
  Description of Artificial Sequence: Synthetic oligonucleotide
caucucacccaucuugacu

SEQ ID NO: 682747 - RNA, 19 nt, Artificial Sequence
  Description of Artificial Sequence: Synthetic oligonucleotide
agccccaaucaccauucuu

SEQ ID NO: 682748 - RNA, 19 nt, Artificial Sequence
  Description of Artificial Sequence: Synthetic oligonucleotide
cugcacucaucccgacgcc

SEQ ID NO: 682749 - RNA, 19 nt, Artificial Sequence
  Description of Artificial Sequence: Synthetic oligonucleotide
aagacccauggaaguuaug

SEQ ID NO: 682750 - RNA, 19 nt, Artificial Sequence
  Description of Artificial Sequence: Synthetic oligonucleotide
ccuccaucgauguugaccu

SEQ ID NO: 682751 - RNA, 19 nt, Artificial Sequence
  Description of Artificial Sequence: Synthetic oligonucleotide
ucgaaacugccugcugcuc

SEQ ID NO: 682752 - RNA, 19 nt, Artificial Sequence
  Description of Artificial Sequence: Synthetic oligonucleotide
gcaaugaagucuuggguau

SEQ ID NO: 682753 - RNA, 19 nt, Artificial Sequence
  Description of Artificial Sequence: Synthetic oligonucleotide
caagguuacaguccaucau

SEQ ID NO: 682754 - RNA, 19 nt, Artificial Sequence
  Description of Artificial Sequence: Synthetic oligonucleotide
acugcugcgaaggcuucau

SEQ ID NO: 682755 - RNA, 19 nt, Artificial Sequence
  Description of Artificial Sequence: Synthetic oligonucleotide
ccccaaucaccauucuuug

SEQ ID NO: 682756 - RNA, 19 nt, Artificial Sequence
  Description of Artificial Sequence: Synthetic oligonucleotide
acaacggcaucagcuuggu

SEQ ID NO: 682757 - RNA, 19 nt, Artificial Sequence
  Description of Artificial Sequence: Synthetic oligonucleotide
ccuuuuggucuagaauacc

SEQ ID NO: 682758 - RNA, 19 nt, Artificial Sequence
  Description of Artificial Sequence: Synthetic oligonucleotide
gcggcaccaucauuuauuc

SEQ ID NO: 682759 - RNA, 19 nt, Artificial Sequence
  Description of Artificial Sequence: Synthetic oligonucleotide
agguaacauucuauccagu

SEQ ID NO: 682760 - RNA, 19 nt, Artificial Sequence
  Description of Artificial Sequence: Synthetic oligonucleotide
ccaguaaggagcagagaga

SEQ ID NO: 682761 - RNA, 19 nt, Artificial Sequence
  Description of Artificial Sequence: Synthetic oligonucleotide
gcuagcggcaucucaccca

SEQ ID NO: 682762 - RNA, 19 nt, Artificial Sequence
  Description of Artificial Sequence: Synthetic oligonucleotide
gagccugcacucaucccga

SEQ ID NO: 682763 - RNA, 19 nt, Artificial Sequence
  Description of Artificial Sequence: Synthetic oligonucleotide
gccugcacucaucccgacg

SEQ ID NO: 682764 - RNA, 19 nt, Artificial Sequence
  Description of Artificial Sequence: Synthetic oligonucleotide
ggagagguauuugaaccaa

SEQ ID NO: 682765 - RNA, 19 nt, Artificial Sequence
  Description of Artificial Sequence: Synthetic oligonucleotide
ggaaaccagaagacaacaa

SEQ ID NO: 682766 - RNA, 19 nt, Artificial Sequence
  Description of Artificial Sequence: Synthetic oligonucleotide
cacucaucccgacgcccug

SEQ ID NO: 682767 - RNA, 19 nt, Artificial Sequence
  Description of Artificial Sequence: Synthetic oligonucleotide
cgggaaaccagaagacaac

SEQ ID NO: 682768 - RNA, 19 nt, Artificial Sequence
  Description of Artificial Sequence: Synthetic oligonucleotide
agcauccgacucucggcuu

SEQ ID NO: 682769 - RNA, 19 nt, Artificial Sequence
  Description of Artificial Sequence: Synthetic oligonucleotide
gaccuucucaguguuuaau

SEQ ID NO: 682770 - RNA, 19 nt, Artificial Sequence
  Description of Artificial Sequence: Synthetic oligonucleotide
gcaucucacccaucuugac

SEQ ID NO: 682771 - RNA, 19 nt, Artificial Sequence
  Description of Artificial Sequence: Synthetic oligonucleotide
gcgaaggcuucauugauuu

SEQ ID NO: 682772 - RNA, 19 nt, Artificial Sequence
  Description of Artificial Sequence: Synthetic oligonucleotide
ccaaacaaucuugaggcua

SEQ ID NO: 682773 - RNA, 19 nt, Artificial Sequence
  Description of Artificial Sequence: Synthetic oligonucleotide
cuagcggcaucucacccau

SEQ ID NO: 682774 - RNA, 19 nt, Artificial Sequence
  Description of Artificial Sequence: Synthetic oligonucleotide
gagagguauuugaaccaau

SEQ ID NO: 682775 - RNA, 19 nt, Artificial Sequence
  Description of Artificial Sequence: Synthetic oligonucleotide
ugucagcuagcggcaucuc

SEQ ID NO: 682776 - RNA, 19 nt, Artificial Sequence
  Description of Artificial Sequence: Synthetic oligonucleotide
ccagccugcuuuugcaaca

SEQ ID NO: 682777 - RNA, 19 nt, Artificial Sequence
  Description of Artificial Sequence: Synthetic oligonucleotide
cucccagggguacacuugu

SEQ ID NO: 682778 - RNA, 19 nt, Artificial Sequence
  Description of Artificial Sequence: Synthetic oligonucleotide
cccagaaaauaaagaccca

SEQ ID NO: 682779 - RNA, 19 nt, Artificial Sequence
  Description of Artificial Sequence: Synthetic oligonucleotide
ugccagccgucagccagga

SEQ ID NO: 682780 - RNA, 19 nt, Artificial Sequence
  Description of Artificial Sequence: Synthetic oligonucleotide
gacucucggcuucugucuu

SEQ ID NO: 682781 - RNA, 19 nt, Artificial Sequence
  Description of Artificial Sequence: Synthetic oligonucleotide
caggagccgucugccacug

SEQ ID NO: 682782 - RNA, 19 nt, Artificial Sequence
  Description of Artificial Sequence: Synthetic oligonucleotide
cgcaucuguaagaccauca

SEQ ID NO: 682783 - RNA, 19 nt, Artificial Sequence
  Description of Artificial Sequence: Synthetic oligonucleotide
ccaucuugacuccugcucu

SEQ ID NO: 682784 - RNA, 19 nt, Artificial Sequence
  Description of Artificial Sequence: Synthetic oligonucleotide
caacggcaucagcuugguc

SEQ ID NO: 682785 - RNA, 19 nt, Artificial Sequence
  Description of Artificial Sequence: Synthetic oligonucleotide
ccagaaaauaaagacccau

SEQ ID NO: 682786 - RNA, 19 nt, Artificial Sequence
  Description of Artificial Sequence: Synthetic oligonucleotide
cauuagcuggggugacugu

SEQ ID NO: 682787 - RNA, 19 nt, Artificial Sequence
  Description of Artificial Sequence: Synthetic oligonucleotide
ggucaacauccuccaggga

SEQ ID NO: 682788 - RNA, 19 nt, Artificial Sequence
  Description of Artificial Sequence: Synthetic oligonucleotide
cccaaucaccauucuuuga

SEQ ID NO: 682789 - RNA, 19 nt, Artificial Sequence
  Description of Artificial Sequence: Synthetic oligonucleotide
cugcgaaggcuucauugau

SEQ ID NO: 682790 - RNA, 19 nt, Artificial Sequence
  Description of Artificial Sequence: Synthetic oligonucleotide
gcucacuuuucuacuccca

SEQ ID NO: 682791 - RNA, 19 nt, Artificial Sequence
  Description of Artificial Sequence: Synthetic oligonucleotide
ggaagucaagguaggaauu

SEQ ID NO: 682792 - RNA, 19 nt, Artificial Sequence
  Description of Artificial Sequence: Synthetic oligonucleotide
ccaucauuuuggggaaguc

SEQ ID NO: 682793 - RNA, 19 nt, Artificial Sequence
  Description of Artificial Sequence: Synthetic oligonucleotide
gguuacaguccaucauuuu

SEQ ID NO: 682794 - RNA, 19 nt, Artificial Sequence
  Description of Artificial Sequence: Synthetic oligonucleotide
uagcggcaucucacccauc

SEQ ID NO: 682795 - RNA, 19 nt, Artificial Sequence
  Description of Artificial Sequence: Synthetic oligonucleotide
ccgagccugcacucauccc

SEQ ID NO: 682796 - RNA, 19 nt, Artificial Sequence
  Description of Artificial Sequence: Synthetic oligonucleotide
aggagccgucugccacuga

SEQ ID NO: 682797 - RNA, 19 nt, Artificial Sequence
  Description of Artificial Sequence: Synthetic oligonucleotide
ccaggcaugauggcacaca

SEQ ID NO: 682798 - RNA, 19 nt, Artificial Sequence
  Description of Artificial Sequence: Synthetic oligonucleotide
ccgucagccaggagccguc

SEQ ID NO: 682799 - RNA, 19 nt, Artificial Sequence
  Description of Artificial Sequence: Synthetic oligonucleotide
gcuuggucauugagucaca

SEQ ID NO: 682800 - RNA, 19 nt, Artificial Sequence
  Description of Artificial Sequence: Synthetic oligonucleotide
gguccgagccugcacucau

SEQ ID NO: 682801 - RNA, 19 nt, Artificial Sequence
  Description of Artificial Sequence: Synthetic oligonucleotide
cacgggguccgagccugca

SEQ ID NO: 682802 - RNA, 19 nt, Artificial Sequence
  Description of Artificial Sequence: Synthetic oligonucleotide
ggguccgagccugcacuca

SEQ ID NO: 682803 - RNA, 19 nt, Artificial Sequence
  Description of Artificial Sequence: Synthetic oligonucleotide
cagaagccccaaucaccau

SEQ ID NO: 682804 - RNA, 19 nt, Artificial Sequence
  Description of Artificial Sequence: Synthetic oligonucleotide
gcacucaucccgacgcccu

SEQ ID NO: 682805 - RNA, 19 nt, Artificial Sequence
  Description of Artificial Sequence: Synthetic oligonucleotide
cgacucucggcuucugucu

SEQ ID NO: 682806 - RNA, 19 nt, Artificial Sequence
  Description of Artificial Sequence: Synthetic oligonucleotide
cgcccugcuuccugccagc

SEQ ID NO: 682807 - RNA, 19 nt, Artificial Sequence
  Description of Artificial Sequence: Synthetic oligonucleotide
gccgucugccacugaggua

SEQ ID NO: 682808 - RNA, 19 nt, Artificial Sequence
  Description of Artificial Sequence: Synthetic oligonucleotide
ccaggagccgucugccacu

SEQ ID NO: 682809 - RNA, 19 nt, Artificial Sequence
  Description of Artificial Sequence: Synthetic oligonucleotide
gccagccgucagccaggag

SEQ ID NO: 682810 - RNA, 19 nt, Artificial Sequence
  Description of Artificial Sequence: Synthetic oligonucleotide
cuacucccagggguacacu

SEQ ID NO: 682811 - RNA, 19 nt, Artificial Sequence
  Description of Artificial Sequence: Synthetic oligonucleotide
ccacgggguccgagccugc

SEQ ID NO: 682812 - RNA, 19 nt, Artificial Sequence
  Description of Artificial Sequence: Synthetic oligonucleotide
gccgucagccaggagccgu

SEQ ID NO: 682813 - RNA, 19 nt, Artificial Sequence
  Description of Artificial Sequence: Synthetic oligonucleotide
cuccaucgauguugaccuu

SEQ ID NO: 682814 - RNA, 19 nt, Artificial Sequence
  Description of Artificial Sequence: Synthetic oligonucleotide
cgcuguacauuggagcccu

SEQ ID NO: 682815 - RNA, 19 nt, Artificial Sequence
  Description of Artificial Sequence: Synthetic oligonucleotide
cgggguccgagccugcacu

SEQ ID NO: 682816 - RNA, 19 nt, Artificial Sequence
  Description of Artificial Sequence: Synthetic oligonucleotide
cgucugccacugagguaaa

SEQ ID NO: 682817 - RNA, 19 nt, Artificial Sequence
  Description of Artificial Sequence: Synthetic oligonucleotide
gcuguacauuggagcccuu

SEQ ID NO: 682818 - RNA, 19 nt, Artificial Sequence
  Description of Artificial Sequence: Synthetic oligonucleotide
ucauuaaucaguuggggag

SEQ ID NO: 682819 - RNA, 19 nt, Artificial Sequence
  Description of Artificial Sequence: Synthetic oligonucleotide
gaaaucauggaucacaaga

SEQ ID NO: 682820 - RNA, 19 nt, Artificial Sequence
  Description of Artificial Sequence: Synthetic oligonucleotide
uaguacgcaaaauagacca

SEQ ID NO: 682821 - RNA, 19 nt, Artificial Sequence
  Description of Artificial Sequence: Synthetic oligonucleotide
aauucgagacacuuccagg

SEQ ID NO: 682822 - RNA, 19 nt, Artificial Sequence
  Description of Artificial Sequence: Synthetic oligonucleotide
uuguacuccggaaagaggc

SEQ ID NO: 682823 - RNA, 19 nt, Artificial Sequence
  Description of Artificial Sequence: Synthetic oligonucleotide
uguucauaggacgagagcc

SEQ ID NO: 682824 - RNA, 19 nt, Artificial Sequence
  Description of Artificial Sequence: Synthetic oligonucleotide
aagguaaugugugagaacu

SEQ ID NO: 682825 - RNA, 19 nt, Artificial Sequence
  Description of Artificial Sequence: Synthetic oligonucleotide
uguccagcgcccuugaugg

SEQ ID NO: 682826 - RNA, 19 nt, Artificial Sequence
  Description of Artificial Sequence: Synthetic oligonucleotide
guuacacuuguucugagag

SEQ ID NO: 682827 - RNA, 19 nt, Artificial Sequence
  Description of Artificial Sequence: Synthetic oligonucleotide
agugcuuguuauccgaggc

SEQ ID NO: 682828 - RNA, 19 nt, Artificial Sequence
  Description of Artificial Sequence: Synthetic oligonucleotide
aagugauugacaagaaccg

SEQ ID NO: 682829 - RNA, 19 nt, Artificial Sequence
  Description of Artificial Sequence: Synthetic oligonucleotide
ugugagaacuccuucacga

SEQ ID NO: 682830 - RNA, 19 nt, Artificial Sequence
  Description of Artificial Sequence: Synthetic oligonucleotide
cacaauucgagacacuucc

SEQ ID NO: 682831 - RNA, 19 nt, Artificial Sequence
  Description of Artificial Sequence: Synthetic oligonucleotide
gaaacgagagaacauggug

SEQ ID NO: 682832 - RNA, 19 nt, Artificial Sequence
  Description of Artificial Sequence: Synthetic oligonucleotide
ugagccaaagcacuaccgg

SEQ ID NO: 682833 - RNA, 19 nt, Artificial Sequence
  Description of Artificial Sequence: Synthetic oligonucleotide
uaguccacuagccagggcc

SEQ ID NO: 682834 - RNA, 19 nt, Artificial Sequence
  Description of Artificial Sequence: Synthetic oligonucleotide
ggaguucauacuuugauag

SEQ ID NO: 682835 - RNA, 19 nt, Artificial Sequence
  Description of Artificial Sequence: Synthetic oligonucleotide
ugggcauucauuaaucagu

SEQ ID NO: 682836 - RNA, 19 nt, Artificial Sequence
  Description of Artificial Sequence: Synthetic oligonucleotide
gauuacaauccauccaccc

SEQ ID NO: 682837 - RNA, 19 nt, Artificial Sequence
  Description of Artificial Sequence: Synthetic oligonucleotide
uuacaauccauccacccgu

SEQ ID NO: 682838 - RNA, 19 nt, Artificial Sequence
  Description of Artificial Sequence: Synthetic oligonucleotide
uagaaguuacacuuguucu

SEQ ID NO: 682839 - RNA, 19 nt, Artificial Sequence
  Description of Artificial Sequence: Synthetic oligonucleotide
ucgagugaagauguuaccg

SEQ ID NO: 682840 - RNA, 19 nt, Artificial Sequence
  Description of Artificial Sequence: Synthetic oligonucleotide
auaagguaggaucucucuc

SEQ ID NO: 682841 - RNA, 19 nt, Artificial Sequence
  Description of Artificial Sequence: Synthetic oligonucleotide
agaaguuacacuuguucug

SEQ ID NO: 682842 - RNA, 19 nt, Artificial Sequence
  Description of Artificial Sequence: Synthetic oligonucleotide
uguucaggaaacgagagaa

SEQ ID NO: 682843 - RNA, 19 nt, Artificial Sequence
  Description of Artificial Sequence: Synthetic oligonucleotide
ugucauuggucacauacgu

SEQ ID NO: 682844 - RNA, 19 nt, Artificial Sequence
  Description of Artificial Sequence: Synthetic oligonucleotide
ugucucgggaacaaagugc

SEQ ID NO: 682845 - RNA, 19 nt, Artificial Sequence
  Description of Artificial Sequence: Synthetic oligonucleotide
uacuuugauagagacggcg

SEQ ID NO: 682846 - RNA, 19 nt, Artificial Sequence
  Description of Artificial Sequence: Synthetic oligonucleotide
ucugcgacuccacaaacca

SEQ ID NO: 682847 - RNA, 19 nt, Artificial Sequence
  Description of Artificial Sequence: Synthetic oligonucleotide
ugagggaauccacaaacca

SEQ ID NO: 682848 - RNA, 19 nt, Artificial Sequence
  Description of Artificial Sequence: Synthetic oligonucleotide
aacccgucuagagagcugc

SEQ ID NO: 682849 - RNA, 19 nt, Artificial Sequence
  Description of Artificial Sequence: Synthetic oligonucleotide
auuguucugagccaccuca

SEQ ID NO: 682850 - RNA, 19 nt, Artificial Sequence
  Description of Artificial Sequence: Synthetic oligonucleotide
uucaccacgagguugcaca

SEQ ID NO: 682851 - RNA, 19 nt, Artificial Sequence
  Description of Artificial Sequence: Synthetic oligonucleotide
uuugccaaagggcuucgag

SEQ ID NO: 682852 - RNA, 19 nt, Artificial Sequence
  Description of Artificial Sequence: Synthetic oligonucleotide
guaggaaaagcccacuccc

SEQ ID NO: 682853 - RNA, 19 nt, Artificial Sequence
  Description of Artificial Sequence: Synthetic oligonucleotide
aaucgggcugcuuauccag

SEQ ID NO: 682854 - RNA, 19 nt, Artificial Sequence
  Description of Artificial Sequence: Synthetic oligonucleotide
gagaacauggugaaggcug

SEQ ID NO: 682855 - RNA, 19 nt, Artificial Sequence
  Description of Artificial Sequence: Synthetic oligonucleotide
ucguucuguucauaggacg

SEQ ID NO: 682856 - RNA, 19 nt, Artificial Sequence
  Description of Artificial Sequence: Synthetic oligonucleotide
aguaggaucugguauuucu

SEQ ID NO: 682857 - RNA, 19 nt, Artificial Sequence
  Description of Artificial Sequence: Synthetic oligonucleotide
uugacaagaaccguccugc

SEQ ID NO: 682858 - RNA, 19 nt, Artificial Sequence
  Description of Artificial Sequence: Synthetic oligonucleotide
uuauggacuccacuguccc

SEQ ID NO: 682859 - RNA, 19 nt, Artificial Sequence
  Description of Artificial Sequence: Synthetic oligonucleotide
uugagccaaagcacuaccg

SEQ ID NO: 682860 - RNA, 19 nt, Artificial Sequence
  Description of Artificial Sequence: Synthetic oligonucleotide
agauuguuuacgcauucug

SEQ ID NO: 682861 - RNA, 19 nt, Artificial Sequence
  Description of Artificial Sequence: Synthetic oligonucleotide
uacgcaaaauagaccagag

SEQ ID NO: 682862 - RNA, 19 nt, Artificial Sequence
  Description of Artificial Sequence: Synthetic oligonucleotide
gucguuauggacuccacug

SEQ ID NO: 682863 - RNA, 19 nt, Artificial Sequence
  Description of Artificial Sequence: Synthetic oligonucleotide
auucgagacacuuccagga

SEQ ID NO: 682864 - RNA, 19 nt, Artificial Sequence
  Description of Artificial Sequence: Synthetic oligonucleotide
aucgccguuguacaguagg

SEQ ID NO: 682865 - RNA, 19 nt, Artificial Sequence
  Description of Artificial Sequence: Synthetic oligonucleotide
auccuuaagggcuucauaa

SEQ ID NO: 682866 - RNA, 19 nt, Artificial Sequence
  Description of Artificial Sequence: Synthetic oligonucleotide
uguuuacgcauucuggauc

SEQ ID NO: 682867 - RNA, 19 nt, Artificial Sequence
  Description of Artificial Sequence: Synthetic oligonucleotide
acauauggguuguugaggu

SEQ ID NO: 682868 - RNA, 19 nt, Artificial Sequence
  Description of Artificial Sequence: Synthetic oligonucleotide
uguacuccggaaagaggcg

SEQ ID NO: 682869 - RNA, 19 nt, Artificial Sequence
  Description of Artificial Sequence: Synthetic oligonucleotide
gacauauggguuguugagg

SEQ ID NO: 682870 - RNA, 19 nt, Artificial Sequence
  Description of Artificial Sequence: Synthetic oligonucleotide
guugucguucuguucauag

SEQ ID NO: 682871 - RNA, 19 nt, Artificial Sequence
  Description of Artificial Sequence: Synthetic oligonucleotide
agaagaccaugguaguacg

SEQ ID NO: 682872 - RNA, 19 nt, Artificial Sequence
  Description of Artificial Sequence: Synthetic oligonucleotide
auauuuccgcuugaguggc

SEQ ID NO: 682873 - RNA, 19 nt, Artificial Sequence
  Description of Artificial Sequence: Synthetic oligonucleotide
auauggguuguugagguag

SEQ ID NO: 682874 - RNA, 19 nt, Artificial Sequence
  Description of Artificial Sequence: Synthetic oligonucleotide
agucgagugaagauguuac

SEQ ID NO: 682875 - RNA, 19 nt, Artificial Sequence
  Description of Artificial Sequence: Synthetic oligonucleotide
cauagguccccucaguaag

SEQ ID NO: 682876 - RNA, 19 nt, Artificial Sequence
  Description of Artificial Sequence: Synthetic oligonucleotide
uguuauccgaggcucugag

SEQ ID NO: 682877 - RNA, 19 nt, Artificial Sequence
  Description of Artificial Sequence: Synthetic oligonucleotide
ucauaucuaucagugccgg

SEQ ID NO: 682878 - RNA, 19 nt, Artificial Sequence
  Description of Artificial Sequence: Synthetic oligonucleotide
auugacaagaaccguccug

SEQ ID NO: 682879 - RNA, 19 nt, Artificial Sequence
  Description of Artificial Sequence: Synthetic oligonucleotide
aaggguuguacuucagggu

SEQ ID NO: 682880 - RNA, 19 nt, Artificial Sequence
  Description of Artificial Sequence: Synthetic oligonucleotide
ucauaauuguucugagcca

SEQ ID NO: 682881 - RNA, 19 nt, Artificial Sequence
  Description of Artificial Sequence: Synthetic oligonucleotide
ugcgacuccacaaaccagu

SEQ ID NO: 682882 - RNA, 19 nt, Artificial Sequence
  Description of Artificial Sequence: Synthetic oligonucleotide
cagaguugcucacaauucg

SEQ ID NO: 682883 - RNA, 19 nt, Artificial Sequence
  Description of Artificial Sequence: Synthetic oligonucleotide
uuaagggcuucauaauugu

SEQ ID NO: 682884 - RNA, 19 nt, Artificial Sequence
  Description of Artificial Sequence: Synthetic oligonucleotide
uccacaaaccaguaaugga

SEQ ID NO: 682885 - RNA, 19 nt, Artificial Sequence
  Description of Artificial Sequence: Synthetic oligonucleotide
uaauggaagugcuuguuau

SEQ ID NO: 682886 - RNA, 19 nt, Artificial Sequence
  Description of Artificial Sequence: Synthetic oligonucleotide
uauggguuguugagguagg

SEQ ID NO: 682887 - RNA, 19 nt, Artificial Sequence
  Description of Artificial Sequence: Synthetic oligonucleotide
cgcaaaauagaccagagag

SEQ ID NO: 682888 - RNA, 19 nt, Artificial Sequence
  Description of Artificial Sequence: Synthetic oligonucleotide
aaugagugacauucccugu

SEQ ID NO: 682889 - RNA, 19 nt, Artificial Sequence
  Description of Artificial Sequence: Synthetic oligonucleotide
gauguggagggccuuccgg

SEQ ID NO: 682890 - RNA, 19 nt, Artificial Sequence
  Description of Artificial Sequence: Synthetic oligonucleotide
augggcauucauuaaucag

SEQ ID NO: 682891 - RNA, 19 nt, Artificial Sequence
  Description of Artificial Sequence: Synthetic oligonucleotide
acaagaguguccucauauc

SEQ ID NO: 682892 - RNA, 19 nt, Artificial Sequence
  Description of Artificial Sequence: Synthetic oligonucleotide
uugucauccgaguaggaaa

SEQ ID NO: 682893 - RNA, 19 nt, Artificial Sequence
  Description of Artificial Sequence: Synthetic oligonucleotide
uaaucaguuggggagguca

SEQ ID NO: 682894 - RNA, 19 nt, Artificial Sequence
  Description of Artificial Sequence: Synthetic oligonucleotide
gaugauauuuccgcuugag

SEQ ID NO: 682895 - RNA, 19 nt, Artificial Sequence
  Description of Artificial Sequence: Synthetic oligonucleotide
ucgauuucauccuggucag

SEQ ID NO: 682896 - RNA, 19 nt, Artificial Sequence
  Description of Artificial Sequence: Synthetic oligonucleotide
guagaugccagcauaacuc

SEQ ID NO: 682897 - RNA, 19 nt, Artificial Sequence
  Description of Artificial Sequence: Synthetic oligonucleotide
uccaggagauuguuuacgc

SEQ ID NO: 682898 - RNA, 19 nt, Artificial Sequence
  Description of Artificial Sequence: Synthetic oligonucleotide
gcggaagaaauccuuaagg

SEQ ID NO: 682899 - RNA, 19 nt, Artificial Sequence
  Description of Artificial Sequence: Synthetic oligonucleotide
guuaccgaaaucauggauc

SEQ ID NO: 682900 - RNA, 19 nt, Artificial Sequence
  Description of Artificial Sequence: Synthetic oligonucleotide
aagaccaugguaguacgca

SEQ ID NO: 682901 - RNA, 19 nt, Artificial Sequence
  Description of Artificial Sequence: Synthetic oligonucleotide
uucauaggacgagagcccg

SEQ ID NO: 682902 - RNA, 19 nt, Artificial Sequence
  Description of Artificial Sequence: Synthetic oligonucleotide
caauucgagacacuuccag

SEQ ID NO: 682903 - RNA, 19 nt, Artificial Sequence
  Description of Artificial Sequence: Synthetic oligonucleotide
cauuaaucaguuggggagg

SEQ ID NO: 682904 - RNA, 19 nt, Artificial Sequence
  Description of Artificial Sequence: Synthetic oligonucleotide
aguccaaagccuguucccc

SEQ ID NO: 682905 - RNA, 19 nt, Artificial Sequence
  Description of Artificial Sequence: Synthetic oligonucleotide
ugcucugucaggaacccgu

SEQ ID NO: 682906 - RNA, 19 nt, Artificial Sequence
  Description of Artificial Sequence: Synthetic oligonucleotide
uguuaccgaaaucauggau

SEQ ID NO: 682907 - RNA, 19 nt, Artificial Sequence
  Description of Artificial Sequence: Synthetic oligonucleotide
cuucgucccacccagggag

SEQ ID NO: 682908 - RNA, 19 nt, Artificial Sequence
  Description of Artificial Sequence: Synthetic oligonucleotide
ugggaguucauacuuugau

SEQ ID NO: 682909 - RNA, 19 nt, Artificial Sequence
  Description of Artificial Sequence: Synthetic oligonucleotide
uucgagacacuuccaggag

SEQ ID NO: 682910 - RNA, 19 nt, Artificial Sequence
  Description of Artificial Sequence: Synthetic oligonucleotide
cuuuguucaggaaacgaga

SEQ ID NO: 682911 - RNA, 19 nt, Artificial Sequence
  Description of Artificial Sequence: Synthetic oligonucleotide
ugaaauugcaggccauguc

SEQ ID NO: 682912 - RNA, 19 nt, Artificial Sequence
  Description of Artificial Sequence: Synthetic oligonucleotide
auagaccagagaguugucg

SEQ ID NO: 682913 - RNA, 19 nt, Artificial Sequence
  Description of Artificial Sequence: Synthetic oligonucleotide
acuuugauagagacggcgg

SEQ ID NO: 682914 - RNA, 19 nt, Artificial Sequence
  Description of Artificial Sequence: Synthetic oligonucleotide
gguaguacgcaaaauagac

SEQ ID NO: 682915 - RNA, 19 nt, Artificial Sequence
  Description of Artificial Sequence: Synthetic oligonucleotide
gaauaaggguuguacuuca

SEQ ID NO: 682916 - RNA, 19 nt, Artificial Sequence
  Description of Artificial Sequence: Synthetic oligonucleotide
aggaauaaggguuguacuu

SEQ ID NO: 682917 - RNA, 19 nt, Artificial Sequence
  Description of Artificial Sequence: Synthetic oligonucleotide
cacgaagccggcuaccugc

SEQ ID NO: 682918 - RNA, 19 nt, Artificial Sequence
  Description of Artificial Sequence: Synthetic oligonucleotide
acggcgguacuguagguuc

SEQ ID NO: 682919 - RNA, 19 nt, Artificial Sequence
  Description of Artificial Sequence: Synthetic oligonucleotide
ucugaugauauuuccgcuu

SEQ ID NO: 682920 - RNA, 19 nt, Artificial Sequence
  Description of Artificial Sequence: Synthetic oligonucleotide
uccacaucgccguuguaca

SEQ ID NO: 682921 - RNA, 19 nt, Artificial Sequence
  Description of Artificial Sequence: Synthetic oligonucleotide
agccaaagcacuaccgggc

SEQ ID NO: 682922 - RNA, 19 nt, Artificial Sequence
  Description of Artificial Sequence: Synthetic oligonucleotide
uuguucaggaaacgagaga

SEQ ID NO: 682923 - RNA, 19 nt, Artificial Sequence
  Description of Artificial Sequence: Synthetic oligonucleotide
aggaaacgagagaacaugg

SEQ ID NO: 682924 - RNA, 19 nt, Artificial Sequence
  Description of Artificial Sequence: Synthetic oligonucleotide
gaagguaaugugugagaac

SEQ ID NO: 682925 - RNA, 19 nt, Artificial Sequence
  Description of Artificial Sequence: Synthetic oligonucleotide
gauuucauccuggucagga

SEQ ID NO: 682926 - RNA, 19 nt, Artificial Sequence
  Description of Artificial Sequence: Synthetic oligonucleotide
aauccuuaagggcuucaua

SEQ ID NO: 682927 - RNA, 19 nt, Artificial Sequence
  Description of Artificial Sequence: Synthetic oligonucleotide
acauacgucuugucauccg

SEQ ID NO: 682928 - RNA, 19 nt, Artificial Sequence
  Description of Artificial Sequence: Synthetic oligonucleotide
cuuccggacauauggguug

SEQ ID NO: 682929 - RNA, 19 nt, Artificial Sequence
  Description of Artificial Sequence: Synthetic oligonucleotide
augauauuuccgcuugagu

SEQ ID NO: 682930 - RNA, 19 nt, Artificial Sequence
  Description of Artificial Sequence: Synthetic oligonucleotide
ucguuauggacuccacugu

SEQ ID NO: 682931 - RNA, 19 nt, Artificial Sequence
  Description of Artificial Sequence: Synthetic oligonucleotide
accgaaaucauggaucaca

SEQ ID NO: 682932 - RNA, 19 nt, Artificial Sequence
  Description of Artificial Sequence: Synthetic oligonucleotide
cuguagguucaccacgagg

SEQ ID NO: 682933 - RNA, 19 nt, Artificial Sequence
  Description of Artificial Sequence: Synthetic oligonucleotide
uugauagagacggcgguac

SEQ ID NO: 682934 - RNA, 19 nt, Artificial Sequence
  Description of Artificial Sequence: Synthetic oligonucleotide
gauagagacggcgguacug

SEQ ID NO: 682935 - RNA, 19 nt, Artificial Sequence
  Description of Artificial Sequence: Synthetic oligonucleotide
gucaggaacccgucuagag

SEQ ID NO: 682936 - RNA, 19 nt, Artificial Sequence
  Description of Artificial Sequence: Synthetic oligonucleotide
uuguuuacgcauucuggau

SEQ ID NO: 682937 - RNA, 19 nt, Artificial Sequence
  Description of Artificial Sequence: Synthetic oligonucleotide
guaguacgcaaaauagacc

SEQ ID NO: 682938 - RNA, 19 nt, Artificial Sequence
  Description of Artificial Sequence: Synthetic oligonucleotide
gaguugcucacaauucgag

SEQ ID NO: 682939 - RNA, 19 nt, Artificial Sequence
  Description of Artificial Sequence: Synthetic oligonucleotide
uccucauaucuaucagugc

SEQ ID NO: 682940 - RNA, 19 nt, Artificial Sequence
  Description of Artificial Sequence: Synthetic oligonucleotide
ggggacucgauauacagca

SEQ ID NO: 682941 - RNA, 19 nt, Artificial Sequence
  Description of Artificial Sequence: Synthetic oligonucleotide
caggaaacgagagaacaug

SEQ ID NO: 682942 - RNA, 19 nt, Artificial Sequence
  Description of Artificial Sequence: Synthetic oligonucleotide
gaggccuaagcugggaugc

SEQ ID NO: 682943 - RNA, 19 nt, Artificial Sequence
  Description of Artificial Sequence: Synthetic oligonucleotide
ugcccuagcuuuguugggg

SEQ ID NO: 682944 - RNA, 19 nt, Artificial Sequence
  Description of Artificial Sequence: Synthetic oligonucleotide
guaggaucucucuccacug

SEQ ID NO: 682945 - RNA, 19 nt, Artificial Sequence
  Description of Artificial Sequence: Synthetic oligonucleotide
gaaggcaaucgauuucauc

SEQ ID NO: 682946 - RNA, 19 nt, Artificial Sequence
  Description of Artificial Sequence: Synthetic oligonucleotide
ugcuuauccaggccgggaa

SEQ ID NO: 682947 - RNA, 19 nt, Artificial Sequence
  Description of Artificial Sequence: Synthetic oligonucleotide
ugaugauauuuccgcuuga

SEQ ID NO: 682948 - RNA, 19 nt, Artificial Sequence
  Description of Artificial Sequence: Synthetic oligonucleotide
guuauggacuccacugucc

SEQ ID NO: 682949 - RNA, 19 nt, Artificial Sequence
  Description of Artificial Sequence: Synthetic oligonucleotide
uaccgggcuguucuuuggg

SEQ ID NO: 682950 - RNA, 19 nt, Artificial Sequence
  Description of Artificial Sequence: Synthetic oligonucleotide
aagccggcuaccugcucuc

SEQ ID NO: 682951 - RNA, 19 nt, Artificial Sequence
  Description of Artificial Sequence: Synthetic oligonucleotide
cuguucauaggacgagagc

SEQ ID NO: 682952 - RNA, 19 nt, Artificial Sequence
  Description of Artificial Sequence: Synthetic oligonucleotide
ucacauacgucuugucauc

SEQ ID NO: 682953 - RNA, 19 nt, Artificial Sequence
  Description of Artificial Sequence: Synthetic oligonucleotide
uucugguugagggaaucca

SEQ ID NO: 682954 - RNA, 19 nt, Artificial Sequence
  Description of Artificial Sequence: Synthetic oligonucleotide
aauagaccagagaguuguc

SEQ ID NO: 682955 - RNA, 19 nt, Artificial Sequence
  Description of Artificial Sequence: Synthetic oligonucleotide
gaguaggaaaagcccacuc

SEQ ID NO: 682956 - RNA, 19 nt, Artificial Sequence
  Description of Artificial Sequence: Synthetic oligonucleotide
uguucugagccaccucagu

SEQ ID NO: 682957 - RNA, 19 nt, Artificial Sequence
  Description of Artificial Sequence: Synthetic oligonucleotide
cugucucgggaacaaagug

SEQ ID NO: 682958 - RNA, 19 nt, Artificial Sequence
  Description of Artificial Sequence: Synthetic oligonucleotide
guucauaggacgagagccc

SEQ ID NO: 682959 - RNA, 19 nt, Artificial Sequence
  Description of Artificial Sequence: Synthetic oligonucleotide
uccccguaguccacuagcc

SEQ ID NO: 682960 - RNA, 19 nt, Artificial Sequence
  Description of Artificial Sequence: Synthetic oligonucleotide
auaacucucuccagucagg

SEQ ID NO: 682961 - RNA, 19 nt, Artificial Sequence
  Description of Artificial Sequence: Synthetic oligonucleotide
uacgucuugucauccgagu

SEQ ID NO: 682962 - RNA, 19 nt, Artificial Sequence
  Description of Artificial Sequence: Synthetic oligonucleotide
acuaccgggcuguucuuug

SEQ ID NO: 682963 - RNA, 19 nt, Artificial Sequence
  Description of Artificial Sequence: Synthetic oligonucleotide
agugauugacaagaaccgu

SEQ ID NO: 682964 - RNA, 19 nt, Artificial Sequence
  Description of Artificial Sequence: Synthetic oligonucleotide
agguugcacaugucccagc

SEQ ID NO: 682965 - RNA, 19 nt, Artificial Sequence
  Description of Artificial Sequence: Synthetic oligonucleotide
gucgagugaagauguuacc

SEQ ID NO: 682966 - RNA, 19 nt, Artificial Sequence
  Description of Artificial Sequence: Synthetic oligonucleotide
guaggaucugguauuucug

SEQ ID NO: 682967 - RNA, 19 nt, Artificial Sequence
  Description of Artificial Sequence: Synthetic oligonucleotide
cgagagaacauggugaagg

SEQ ID NO: 682968 - RNA, 19 nt, Artificial Sequence
  Description of Artificial Sequence: Synthetic oligonucleotide
aguguuagagcagggccug

SEQ ID NO: 682969 - RNA, 19 nt, Artificial Sequence
  Description of Artificial Sequence: Synthetic oligonucleotide
acgcaaaauagaccagaga

SEQ ID NO: 682970 - RNA, 19 nt, Artificial Sequence
  Description of Artificial Sequence: Synthetic oligonucleotide
guacuccggaaagaggcgg

SEQ ID NO: 682971 - RNA, 19 nt, Artificial Sequence
  Description of Artificial Sequence: Synthetic oligonucleotide
cauggaucacaagaguguc

SEQ ID NO: 682972 - RNA, 19 nt, Artificial Sequence
  Description of Artificial Sequence: Synthetic oligonucleotide
ggaguacugcuggaaaucg

SEQ ID NO: 682973 - RNA, 19 nt, Artificial Sequence
  Description of Artificial Sequence: Synthetic oligonucleotide
auagagacggcgguacugu

SEQ ID NO: 682974 - RNA, 19 nt, Artificial Sequence
  Description of Artificial Sequence: Synthetic oligonucleotide
uggaaaucgggcugcuuau

SEQ ID NO: 682975 - RNA, 19 nt, Artificial Sequence
  Description of Artificial Sequence: Synthetic oligonucleotide
ugacaagaaccguccugcc

SEQ ID NO: 682976 - RNA, 19 nt, Artificial Sequence
  Description of Artificial Sequence: Synthetic oligonucleotide
cuuccauagguccccucag

SEQ ID NO: 682977 - RNA, 19 nt, Artificial Sequence
  Description of Artificial Sequence: Synthetic oligonucleotide
cuccccguaguccacuagc

SEQ ID NO: 682978 - RNA, 19 nt, Artificial Sequence
  Description of Artificial Sequence: Synthetic oligonucleotide
ugauagagacggcgguacu

SEQ ID NO: 682979 - RNA, 19 nt, Artificial Sequence
  Description of Artificial Sequence: Synthetic oligonucleotide
ucugagguagccggaguac

SEQ ID NO: 682980 - RNA, 19 nt, Artificial Sequence
  Description of Artificial Sequence: Synthetic oligonucleotide
auuaaucaguuggggaggu

SEQ ID NO: 682981 - RNA, 19 nt, Artificial Sequence
  Description of Artificial Sequence: Synthetic oligonucleotide
aagaaauccuuaagggcuu

SEQ ID NO: 682982 - RNA, 19 nt, Artificial Sequence
  Description of Artificial Sequence: Synthetic oligonucleotide
auguuaccgaaaucaugga

SEQ ID NO: 682983 - RNA, 19 nt, Artificial Sequence
  Description of Artificial Sequence: Synthetic oligonucleotide
caaaguccaaagccuguuc

SEQ ID NO: 682984 - RNA, 19 nt, Artificial Sequence
  Description of Artificial Sequence: Synthetic oligonucleotide
ggucacauacgucuuguca

SEQ ID NO: 682985 - RNA, 19 nt, Artificial Sequence
  Description of Artificial Sequence: Synthetic oligonucleotide
uacuccggaaagaggcgga

SEQ ID NO: 682986 - RNA, 19 nt, Artificial Sequence
  Description of Artificial Sequence: Synthetic oligonucleotide
guacgcaaaauagaccaga

SEQ ID NO: 682987 - RNA, 19 nt, Artificial Sequence
  Description of Artificial Sequence: Synthetic oligonucleotide
ucgggcugcuuauccaggc

SEQ ID NO: 682988 - RNA, 19 nt, Artificial Sequence
  Description of Artificial Sequence: Synthetic oligonucleotide
cacauacgucuugucaucc

SEQ ID NO: 682989 - RNA, 19 nt, Artificial Sequence
  Description of Artificial Sequence: Synthetic oligonucleotide
gacauucccuguccccugc

SEQ ID NO: 682990 - RNA, 19 nt, Artificial Sequence
  Description of Artificial Sequence: Synthetic oligonucleotide
uuauccaggccgggaaggc

SEQ ID NO: 682991 - RNA, 19 nt, Artificial Sequence
  Description of Artificial Sequence: Synthetic oligonucleotide
aguacgcaaaauagaccag

SEQ ID NO: 682992 - RNA, 19 nt, Artificial Sequence
  Description of Artificial Sequence: Synthetic oligonucleotide
ggaauaaggguuguacuuc

SEQ ID NO: 682993 - RNA, 19 nt, Artificial Sequence
  Description of Artificial Sequence: Synthetic oligonucleotide
cauacgucuugucauccga

SEQ ID NO: 682994 - RNA, 19 nt, Artificial Sequence
  Description of Artificial Sequence: Synthetic oligonucleotide
aguccacuagccagggccg

SEQ ID NO: 682995 - RNA, 19 nt, Artificial Sequence
  Description of Artificial Sequence: Synthetic oligonucleotide
cuuguuauccgaggcucug

SEQ ID NO: 682996 - RNA, 19 nt, Artificial Sequence
  Description of Artificial Sequence: Synthetic oligonucleotide
cuaccgggcuguucuuugg

SEQ ID NO: 682997 - RNA, 19 nt, Artificial Sequence
  Description of Artificial Sequence: Synthetic oligonucleotide
cuuucugcgacuccacaaa

SEQ ID NO: 682998 - RNA, 19 nt, Artificial Sequence
  Description of Artificial Sequence: Synthetic oligonucleotide
agaccaugguaguacgcaa

SEQ ID NO: 682999 - RNA, 19 nt, Artificial Sequence
  Description of Artificial Sequence: Synthetic oligonucleotide
aguaauggaagugcuuguu

SEQ ID NO: 683000 - RNA, 19 nt, Artificial Sequence
  Description of Artificial Sequence: Synthetic oligonucleotide
aagaaccguccugccgucg

SEQ ID NO: 683001 - RNA, 19 nt, Artificial Sequence
  Description of Artificial Sequence: Synthetic oligonucleotide
acgagagcccguugcccac

SEQ ID NO: 683002 - RNA, 19 nt, Artificial Sequence
  Description of Artificial Sequence: Synthetic oligonucleotide
cuggaaaucgggcugcuua

SEQ ID NO: 683003 - RNA, 19 nt, Artificial Sequence
  Description of Artificial Sequence: Synthetic oligonucleotide
agaaccguccugccgucgu

SEQ ID NO: 683004 - RNA, 19 nt, Artificial Sequence
  Description of Artificial Sequence: Synthetic oligonucleotide
uccagcgcccuugauggug

SEQ ID NO: 683005 - RNA, 19 nt, Artificial Sequence
  Description of Artificial Sequence: Synthetic oligonucleotide
auacgucuugucauccgag

SEQ ID NO: 683006 - RNA, 19 nt, Artificial Sequence
  Description of Artificial Sequence: Synthetic oligonucleotide
gaccagagaguugucguuc

SEQ ID NO: 683007 - RNA, 19 nt, Artificial Sequence
  Description of Artificial Sequence: Synthetic oligonucleotide
gcugcuucgccccgggacg

SEQ ID NO: 683008 - RNA, 19 nt, Artificial Sequence
  Description of Artificial Sequence: Synthetic oligonucleotide
cauaagguaggaucucucu

SEQ ID NO: 683009 - RNA, 19 nt, Artificial Sequence
  Description of Artificial Sequence: Synthetic oligonucleotide
agguaaugugugagaacuc

SEQ ID NO: 683010 - RNA, 19 nt, Artificial Sequence
  Description of Artificial Sequence: Synthetic oligonucleotide
gucccagcgaggcagcuuc

SEQ ID NO: 683011 - RNA, 19 nt, Artificial Sequence
  Description of Artificial Sequence: Synthetic oligonucleotide
uagguccccucaguaaggc

SEQ ID NO: 683012 - RNA, 19 nt, Artificial Sequence
  Description of Artificial Sequence: Synthetic oligonucleotide
cccguaguccacuagccag

SEQ ID NO: 683013 - RNA, 19 nt, Artificial Sequence
  Description of Artificial Sequence: Synthetic oligonucleotide
gguacugcagacuuccaua

SEQ ID NO: 683014 - RNA, 19 nt, Artificial Sequence
  Description of Artificial Sequence: Synthetic oligonucleotide
cugcgacuccacaaaccag

SEQ ID NO: 683015 - RNA, 19 nt, Artificial Sequence
  Description of Artificial Sequence: Synthetic oligonucleotide
ugucaggaacccgucuaga

SEQ ID NO: 683016 - RNA, 19 nt, Artificial Sequence
  Description of Artificial Sequence: Synthetic oligonucleotide
acgucuugucauccgagua

SEQ ID NO: 683017 - RNA, 19 nt, Artificial Sequence
  Description of Artificial Sequence: Synthetic oligonucleotide
acacggggcguagagguug

SEQ ID NO: 683018 - RNA, 19 nt, Artificial Sequence
  Description of Artificial Sequence: Synthetic oligonucleotide
gaagccggcuaccugcucu

SEQ ID NO: 683019 - RNA, 19 nt, Artificial Sequence
  Description of Artificial Sequence: Synthetic oligonucleotide
ugcacugucucgggaacaa

SEQ ID NO: 683020 - RNA, 19 nt, Artificial Sequence
  Description of Artificial Sequence: Synthetic oligonucleotide
aagcacuaccgggcuguuc

SEQ ID NO: 683021 - RNA, 19 nt, Artificial Sequence
  Description of Artificial Sequence: Synthetic oligonucleotide
caggccgggaaggcaaucg

SEQ ID NO: 683022 - RNA, 19 nt, Artificial Sequence
  Description of Artificial Sequence: Synthetic oligonucleotide
auaggacgagagcccguug

SEQ ID NO: 683023 - RNA, 19 nt, Artificial Sequence
  Description of Artificial Sequence: Synthetic oligonucleotide
acaucgccguuguacagua

SEQ ID NO: 683024 - RNA, 19 nt, Artificial Sequence
  Description of Artificial Sequence: Synthetic oligonucleotide
gucguucuguucauaggac

SEQ ID NO: 683025 - RNA, 19 nt, Artificial Sequence
  Description of Artificial Sequence: Synthetic oligonucleotide
cugcccuagcuuuguuggg

SEQ ID NO: 683026 - RNA, 19 nt, Artificial Sequence
  Description of Artificial Sequence: Synthetic oligonucleotide
acuuugccaaagggcuucg

SEQ ID NO: 683027 - RNA, 19 nt, Artificial Sequence
  Description of Artificial Sequence: Synthetic oligonucleotide
ggcaaucgauuucauccug

SEQ ID NO: 683028 - RNA, 19 nt, Artificial Sequence
  Description of Artificial Sequence: Synthetic oligonucleotide
cacaagaguguccucauau

SEQ ID NO: 683029 - RNA, 19 nt, Artificial Sequence
  Description of Artificial Sequence: Synthetic oligonucleotide
gguaggaucucucuccacu

SEQ ID NO: 683030 - RNA, 19 nt, Artificial Sequence
  Description of Artificial Sequence: Synthetic oligonucleotide
gaaggcugcucgagguuug

SEQ ID NO: 683031 - RNA, 19 nt, Artificial Sequence
  Description of Artificial Sequence: Synthetic oligonucleotide
ugccgggcaccccaccagc

SEQ ID NO: 683032 - RNA, 19 nt, Artificial Sequence
  Description of Artificial Sequence: Synthetic oligonucleotide
ggggcugaccuccacuuug

SEQ ID NO: 683033 - RNA, 19 nt, Artificial Sequence
  Description of Artificial Sequence: Synthetic oligonucleotide
caggaauaaggguuguacu

SEQ ID NO: 683034 - RNA, 19 nt, Artificial Sequence
  Description of Artificial Sequence: Synthetic oligonucleotide
aaggggccgugcucuguca

SEQ ID NO: 683035 - RNA, 19 nt, Artificial Sequence
  Description of Artificial Sequence: Synthetic oligonucleotide
gggaccauguguccagcgc

SEQ ID NO: 683036 - RNA, 19 nt, Artificial Sequence
  Description of Artificial Sequence: Synthetic oligonucleotide
cuuugauagagacggcggu

SEQ ID NO: 683037 - RNA, 19 nt, Artificial Sequence
  Description of Artificial Sequence: Synthetic oligonucleotide
uuacgcauucuggaucuuu

SEQ ID NO: 683038 - RNA, 19 nt, Artificial Sequence
  Description of Artificial Sequence: Synthetic oligonucleotide
ggauuacaauccauccacc

SEQ ID NO: 683039 - RNA, 19 nt, Artificial Sequence
  Description of Artificial Sequence: Synthetic oligonucleotide
ggaauccacaaaccacuca

SEQ ID NO: 683040 - RNA, 19 nt, Artificial Sequence
  Description of Artificial Sequence: Synthetic oligonucleotide
acaauucgagacacuucca

SEQ ID NO: 683041 - RNA, 19 nt, Artificial Sequence
  Description of Artificial Sequence: Synthetic oligonucleotide
ccgucuagagagcugcagc

SEQ ID NO: 683042 - RNA, 19 nt, Artificial Sequence
  Description of Artificial Sequence: Synthetic oligonucleotide
ggcugcucgagguuuguca

SEQ ID NO: 683043 - RNA, 19 nt, Artificial Sequence
  Description of Artificial Sequence: Synthetic oligonucleotide
gucugaugauauuuccgcu

SEQ ID NO: 683044 - RNA, 19 nt, Artificial Sequence
  Description of Artificial Sequence: Synthetic oligonucleotide
uuaaucaguuggggagguc

SEQ ID NO: 683045 - RNA, 19 nt, Artificial Sequence
  Description of Artificial Sequence: Synthetic oligonucleotide
uuccggacauauggguugu

SEQ ID NO: 683046 - RNA, 19 nt, Artificial Sequence
  Description of Artificial Sequence: Synthetic oligonucleotide
gggaguucauacuuugaua

SEQ ID NO: 683047 - RNA, 19 nt, Artificial Sequence
  Description of Artificial Sequence: Synthetic oligonucleotide
ggacgcccaggacacaagc

SEQ ID NO: 683048 - RNA, 19 nt, Artificial Sequence
  Description of Artificial Sequence: Synthetic oligonucleotide
guacuucagggugauucca

SEQ ID NO: 683049 - RNA, 19 nt, Artificial Sequence
  Description of Artificial Sequence: Synthetic oligonucleotide
cugggaguucauacuuuga

SEQ ID NO: 683050 - RNA, 19 nt, Artificial Sequence
  Description of Artificial Sequence: Synthetic oligonucleotide
cguccugccgucguuaugg

SEQ ID NO: 683051 - RNA, 19 nt, Artificial Sequence
  Description of Artificial Sequence: Synthetic oligonucleotide
guacugggaguucauacuu

SEQ ID NO: 683052 - RNA, 19 nt, Artificial Sequence
  Description of Artificial Sequence: Synthetic oligonucleotide
uccugccgucguuauggac

SEQ ID NO: 683053 - RNA, 19 nt, Artificial Sequence
  Description of Artificial Sequence: Synthetic oligonucleotide
cacugcacugucucgggaa

SEQ ID NO: 683054 - RNA, 19 nt, Artificial Sequence
  Description of Artificial Sequence: Synthetic oligonucleotide
aggccgggaaggcaaucga

SEQ ID NO: 683055 - RNA, 19 nt, Artificial Sequence
  Description of Artificial Sequence: Synthetic oligonucleotide
caagaaccguccugccguc

SEQ ID NO: 683056 - RNA, 19 nt, Artificial Sequence
  Description of Artificial Sequence: Synthetic oligonucleotide
ucagugccgggcaccccac

SEQ ID NO: 683057 - RNA, 19 nt, Artificial Sequence
  Description of Artificial Sequence: Synthetic oligonucleotide
gaacccgucuagagagcug

SEQ ID NO: 683058 - RNA, 19 nt, Artificial Sequence
  Description of Artificial Sequence: Synthetic oligonucleotide
caaucgauuucauccuggu

SEQ ID NO: 683059 - RNA, 19 nt, Artificial Sequence
  Description of Artificial Sequence: Synthetic oligonucleotide
cacccgucuucuugggcug

SEQ ID NO: 683060 - RNA, 19 nt, Artificial Sequence
  Description of Artificial Sequence: Synthetic oligonucleotide
guaguccacuagccagggc

SEQ ID NO: 683061 - RNA, 19 nt, Artificial Sequence
  Description of Artificial Sequence: Synthetic oligonucleotide
ccuguuccccagaagacca

SEQ ID NO: 683062 - RNA, 19 nt, Artificial Sequence
  Description of Artificial Sequence: Synthetic oligonucleotide
ccgaguaggaaaagcccac

SEQ ID NO: 683063 - RNA, 19 nt, Artificial Sequence
  Description of Artificial Sequence: Synthetic oligonucleotide
agcccacucccgcugggga

SEQ ID NO: 683064 - RNA, 19 nt, Artificial Sequence
  Description of Artificial Sequence: Synthetic oligonucleotide
ggcguagagguuguauaug

SEQ ID NO: 683065 - RNA, 19 nt, Artificial Sequence
  Description of Artificial Sequence: Synthetic oligonucleotide
ggggaccauguguccagcg

SEQ ID NO: 683066 - RNA, 19 nt, Artificial Sequence
  Description of Artificial Sequence: Synthetic oligonucleotide
acacuuguucugagagcag

SEQ ID NO: 683067 - RNA, 19 nt, Artificial Sequence
  Description of Artificial Sequence: Synthetic oligonucleotide
gcaagaggaguggggacag

SEQ ID NO: 683068 - RNA, 19 nt, Artificial Sequence
  Description of Artificial Sequence: Synthetic oligonucleotide
gacgcccaggacacaagca

SEQ ID NO: 683069 - RNA, 19 nt, Artificial Sequence
  Description of Artificial Sequence: Synthetic oligonucleotide
acuagccagggccgacgcu

SEQ ID NO: 683070 - RNA, 19 nt, Artificial Sequence
  Description of Artificial Sequence: Synthetic oligonucleotide
uagagacggcgguacugua

SEQ ID NO: 683071 - RNA, 19 nt, Artificial Sequence
  Description of Artificial Sequence: Synthetic oligonucleotide
cccaugaaauugcaggcca

SEQ ID NO: 683072 - RNA, 19 nt, Artificial Sequence
  Description of Artificial Sequence: Synthetic oligonucleotide
caugcgcgccuuguccccg

SEQ ID NO: 683073 - RNA, 19 nt, Artificial Sequence
  Description of Artificial Sequence: Synthetic oligonucleotide
uccacuagccagggccgac

SEQ ID NO: 683074 - RNA, 19 nt, Artificial Sequence
  Description of Artificial Sequence: Synthetic oligonucleotide
agacggcgguacuguaggu

SEQ ID NO: 683075 - RNA, 19 nt, Artificial Sequence
  Description of Artificial Sequence: Synthetic oligonucleotide
accaguaauggaagugcuu

SEQ ID NO: 683076 - RNA, 19 nt, Artificial Sequence
  Description of Artificial Sequence: Synthetic oligonucleotide
caucgccguuguacaguag

SEQ ID NO: 683077 - RNA, 19 nt, Artificial Sequence
  Description of Artificial Sequence: Synthetic oligonucleotide
uggggaccauguguccagc

SEQ ID NO: 683078 - RNA, 19 nt, Artificial Sequence
  Description of Artificial Sequence: Synthetic oligonucleotide
ggaacgcagcagcaguguc

SEQ ID NO: 683079 - RNA, 19 nt, Artificial Sequence
  Description of Artificial Sequence: Synthetic oligonucleotide
agcgcccuugauggugagg

SEQ ID NO: 683080 - RNA, 19 nt, Artificial Sequence
  Description of Artificial Sequence: Synthetic oligonucleotide
caguaauggaagugcuugu

SEQ ID NO: 683081 - RNA, 19 nt, Artificial Sequence
  Description of Artificial Sequence: Synthetic oligonucleotide
cguucuguucauaggacga

SEQ ID NO: 683082 - RNA, 19 nt, Artificial Sequence
  Description of Artificial Sequence: Synthetic oligonucleotide
cgagugaagauguuaccga

SEQ ID NO: 683083 - RNA, 19 nt, Artificial Sequence
  Description of Artificial Sequence: Synthetic oligonucleotide
agccggcuaccugcucucc

SEQ ID NO: 683084 - RNA, 19 nt, Artificial Sequence
  Description of Artificial Sequence: Synthetic oligonucleotide
gcucgagguuugucagugg

SEQ ID NO: 683085 - RNA, 19 nt, Artificial Sequence
  Description of Artificial Sequence: Synthetic oligonucleotide
cgaaaucauggaucacaag

SEQ ID NO: 683086 - RNA, 19 nt, Artificial Sequence
  Description of Artificial Sequence: Synthetic oligonucleotide
cauauggguuguugaggua

SEQ ID NO: 683087 - RNA, 19 nt, Artificial Sequence
  Description of Artificial Sequence: Synthetic oligonucleotide
ggggcguagagguuguaua

SEQ ID NO: 683088 - RNA, 19 nt, Artificial Sequence
  Description of Artificial Sequence: Synthetic oligonucleotide
ccgaaaucauggaucacaa

SEQ ID NO: 683089 - RNA, 19 nt, Artificial Sequence
  Description of Artificial Sequence: Synthetic oligonucleotide
ggcuucgagaagugauuga

SEQ ID NO: 683090 - RNA, 19 nt, Artificial Sequence
  Description of Artificial Sequence: Synthetic oligonucleotide
ccugccgucguuauggacu

SEQ ID NO: 683091 - RNA, 19 nt, Artificial Sequence
  Description of Artificial Sequence: Synthetic oligonucleotide
ggcuguaguguuggugcag

SEQ ID NO: 683092 - RNA, 19 nt, Artificial Sequence
  Description of Artificial Sequence: Synthetic oligonucleotide
gggaugggcauucauuaau

SEQ ID NO: 683093 - RNA, 19 nt, Artificial Sequence
  Description of Artificial Sequence: Synthetic oligonucleotide
cagucgagugaagauguua

SEQ ID NO: 683094 - RNA, 19 nt, Artificial Sequence
  Description of Artificial Sequence: Synthetic oligonucleotide
accguccugccgucguuau

SEQ ID NO: 683095 - RNA, 19 nt, Artificial Sequence
  Description of Artificial Sequence: Synthetic oligonucleotide
ggcaaucagguuccaggaa

SEQ ID NO: 683096 - RNA, 19 nt, Artificial Sequence
  Description of Artificial Sequence: Synthetic oligonucleotide
ggcagucgagugaagaugu

SEQ ID NO: 683097 - RNA, 19 nt, Artificial Sequence
  Description of Artificial Sequence: Synthetic oligonucleotide
cuccgcucuccccguaguc

SEQ ID NO: 683098 - RNA, 19 nt, Artificial Sequence
  Description of Artificial Sequence: Synthetic oligonucleotide
uuuacgcauucuggaucuu

SEQ ID NO: 683099 - RNA, 19 nt, Artificial Sequence
  Description of Artificial Sequence: Synthetic oligonucleotide
ggaaacgagagaacauggu

SEQ ID NO: 683100 - RNA, 19 nt, Artificial Sequence
  Description of Artificial Sequence: Synthetic oligonucleotide
cugcuucgccccgggacgc

SEQ ID NO: 683101 - RNA, 19 nt, Artificial Sequence
  Description of Artificial Sequence: Synthetic oligonucleotide
ccacaucgccguuguacag

SEQ ID NO: 683102 - RNA, 19 nt, Artificial Sequence
  Description of Artificial Sequence: Synthetic oligonucleotide
aguugucguucuguucaua

SEQ ID NO: 683103 - RNA, 19 nt, Artificial Sequence
  Description of Artificial Sequence: Synthetic oligonucleotide
gggaauccacaaaccacuc

SEQ ID NO: 683104 - RNA, 19 nt, Artificial Sequence
  Description of Artificial Sequence: Synthetic oligonucleotide
gaguugucguucuguucau

SEQ ID NO: 683105 - RNA, 19 nt, Artificial Sequence
  Description of Artificial Sequence: Synthetic oligonucleotide
ggguuguacuucaggguga

SEQ ID NO: 683106 - RNA, 19 nt, Artificial Sequence
  Description of Artificial Sequence: Synthetic oligonucleotide
ccggacauauggguuguug

SEQ ID NO: 683107 - RNA, 19 nt, Artificial Sequence
  Description of Artificial Sequence: Synthetic oligonucleotide
agggccuuccggacauaug

SEQ ID NO: 683108 - RNA, 19 nt, Artificial Sequence
  Description of Artificial Sequence: Synthetic oligonucleotide
gcagugucugaugauauuu

SEQ ID NO: 683109 - RNA, 19 nt, Artificial Sequence
  Description of Artificial Sequence: Synthetic oligonucleotide
gccggaguacugcuggaaa

SEQ ID NO: 683110 - RNA, 19 nt, Artificial Sequence
  Description of Artificial Sequence: Synthetic oligonucleotide
ccaugcgcgccuugucccc

SEQ ID NO: 683111 - RNA, 19 nt, Artificial Sequence
  Description of Artificial Sequence: Synthetic oligonucleotide
gggcguagagguuguauau

SEQ ID NO: 683112 - RNA, 19 nt, Artificial Sequence
  Description of Artificial Sequence: Synthetic oligonucleotide
ugcuucgccccgggacgcc

SEQ ID NO: 683113 - RNA, 19 nt, Artificial Sequence
  Description of Artificial Sequence: Synthetic oligonucleotide
ccacuagccagggccgacg

SEQ ID NO: 683114 - RNA, 19 nt, Artificial Sequence
  Description of Artificial Sequence: Synthetic oligonucleotide
cagugccgggcaccccacc

SEQ ID NO: 683115 - RNA, 19 nt, Artificial Sequence
  Description of Artificial Sequence: Synthetic oligonucleotide
cgagguuugucagugggga

SEQ ID NO: 683116 - RNA, 19 nt, Artificial Sequence
  Description of Artificial Sequence: Synthetic oligonucleotide
aggccuaagcugggaugca

SEQ ID NO: 683117 - RNA, 19 nt, Artificial Sequence
  Description of Artificial Sequence: Synthetic oligonucleotide
cugagguagccggaguacu

SEQ ID NO: 683118 - RNA, 19 nt, Artificial Sequence
  Description of Artificial Sequence: Synthetic oligonucleotide
cacaucgccguuguacagu

SEQ ID NO: 683119 - RNA, 19 nt, Artificial Sequence
  Description of Artificial Sequence: Synthetic oligonucleotide
ggccuaagcugggaugcac

SEQ ID NO: 683120 - RNA, 19 nt, Artificial Sequence
  Description of Artificial Sequence: Synthetic oligonucleotide
guccugccgucguuaugga

SEQ ID NO: 683121 - RNA, 19 nt, Artificial Sequence
  Description of Artificial Sequence: Synthetic oligonucleotide
gccgucguuauggacucca

SEQ ID NO: 683122 - RNA, 19 nt, Artificial Sequence
  Description of Artificial Sequence: Synthetic oligonucleotide
cccgucuagagagcugcag

SEQ ID NO: 683123 - RNA, 19 nt, Artificial Sequence
  Description of Artificial Sequence: Synthetic oligonucleotide
cggaguacugcuggaaauc

SEQ ID NO: 683124 - RNA, 19 nt, Artificial Sequence
  Description of Artificial Sequence: Synthetic oligonucleotide
cccguugagccaaagcacu

SEQ ID NO: 683125 - RNA, 19 nt, Artificial Sequence
  Description of Artificial Sequence: Synthetic oligonucleotide
gacggcgguacuguagguu

SEQ ID NO: 683126 - RNA, 19 nt, Artificial Sequence
  Description of Artificial Sequence: Synthetic oligonucleotide
cuuugccaaagggcuucga

SEQ ID NO: 683127 - RNA, 19 nt, Artificial Sequence
  Description of Artificial Sequence: Synthetic oligonucleotide
ggcgguacuguagguucac

SEQ ID NO: 683128 - RNA, 19 nt, Artificial Sequence
  Description of Artificial Sequence: Synthetic oligonucleotide
cauaggacgagagcccguu

SEQ ID NO: 683129 - RNA, 19 nt, Artificial Sequence
  Description of Artificial Sequence: Synthetic oligonucleotide
ccacccgucuucuugggcu

SEQ ID NO: 683130 - RNA, 19 nt, Artificial Sequence
  Description of Artificial Sequence: Synthetic oligonucleotide
gggacgcccaggacacaag

SEQ ID NO: 683131 - RNA, 19 nt, Artificial Sequence
  Description of Artificial Sequence: Synthetic oligonucleotide
cuucgccccgggacgccca

SEQ ID NO: 683132 - RNA, 19 nt, Artificial Sequence
  Description of Artificial Sequence: Synthetic oligonucleotide
ccagcgcccuugaugguga

SEQ ID NO: 683133 - RNA, 19 nt, Artificial Sequence
  Description of Artificial Sequence: Synthetic oligonucleotide
ccgucguuauggacuccac

SEQ ID NO: 683134 - RNA, 19 nt, Artificial Sequence
  Description of Artificial Sequence: Synthetic oligonucleotide
gcgguacuguagguucacc

SEQ ID NO: 683135 - RNA, 19 nt, Artificial Sequence
  Description of Artificial Sequence: Synthetic oligonucleotide
cccuagcuuuguugggguc

SEQ ID NO: 683136 - RNA, 19 nt, Artificial Sequence
  Description of Artificial Sequence: Synthetic oligonucleotide
cgcuggggacucgauauac

SEQ ID NO: 683137 - RNA, 19 nt, Artificial Sequence
  Description of Artificial Sequence: Synthetic oligonucleotide
cgcuugaguggcagucgag

SEQ ID NO: 683138 - RNA, 19 nt, Artificial Sequence
  Description of Artificial Sequence: Synthetic oligonucleotide
acccgucuagagagcugca

SEQ ID NO: 683139 - RNA, 19 nt, Artificial Sequence
  Description of Artificial Sequence: Synthetic oligonucleotide
uccggacauauggguuguu

SEQ ID NO: 683140 - RNA, 19 nt, Artificial Sequence
  Description of Artificial Sequence: Synthetic oligonucleotide
ccucaguaaggcucuuugu

SEQ ID NO: 683141 - RNA, 19 nt, Artificial Sequence
  Description of Artificial Sequence: Synthetic oligonucleotide
gcuuguuauccgaggcucu

SEQ ID NO: 683142 - RNA, 19 nt, Artificial Sequence
  Description of Artificial Sequence: Synthetic oligonucleotide
ccccguaguccacuagcca

SEQ ID NO: 683143 - RNA, 19 nt, Artificial Sequence
  Description of Artificial Sequence: Synthetic oligonucleotide
ccgacgcugcaccuccauc

SEQ ID NO: 683144 - RNA, 19 nt, Artificial Sequence
  Description of Artificial Sequence: Synthetic oligonucleotide
ccgcuugaguggcagucga

SEQ ID NO: 683145 - RNA, 19 nt, Artificial Sequence
  Description of Artificial Sequence: Synthetic oligonucleotide
ccgaggcucugagguagcc

SEQ ID NO: 683146 - RNA, 19 nt, Artificial Sequence
  Description of Artificial Sequence: Synthetic oligonucleotide
gcuucgccccgggacgccc

SEQ ID NO: 683147 - RNA, 19 nt, Artificial Sequence
  Description of Artificial Sequence: Synthetic oligonucleotide
gccagucccugaagguuca

SEQ ID NO: 683148 - RNA, 19 nt, Artificial Sequence
  Description of Artificial Sequence: Synthetic oligonucleotide
ccggaaagaggcggaagaa

SEQ ID NO: 683149 - RNA, 19 nt, Artificial Sequence
  Description of Artificial Sequence: Synthetic oligonucleotide
ccacgagguugcacauguc

SEQ ID NO: 683150 - RNA, 19 nt, Artificial Sequence
  Description of Artificial Sequence: Synthetic oligonucleotide
ccgggaaggcaaucgauuu

SEQ ID NO: 683151 - RNA, 19 nt, Artificial Sequence
  Description of Artificial Sequence: Synthetic oligonucleotide
ccguugagccaaagcacua

SEQ ID NO: 683152 - RNA, 19 nt, Artificial Sequence
  Description of Artificial Sequence: Synthetic oligonucleotide
ccaugaaauugcaggccau

SEQ ID NO: 683153 - RNA, 19 nt, Artificial Sequence
  Description of Artificial Sequence: Synthetic oligonucleotide
ccggaguacugcuggaaau

SEQ ID NO: 683154 - RNA, 19 nt, Artificial Sequence
  Description of Artificial Sequence: Synthetic oligonucleotide
ccguccugccgucguuaug

SEQ ID NO: 683155 - RNA, 19 nt, Artificial Sequence
  Description of Artificial Sequence: Synthetic oligonucleotide
gccgggaaggcaaucgauu

SEQ ID NO: 683156 - RNA, 19 nt, Artificial Sequence
  Description of Artificial Sequence: Synthetic oligonucleotide
cacacggggcguagagguu

SEQ ID NO: 683157 - RNA, 19 nt, Artificial Sequence
  Description of Artificial Sequence: Synthetic oligonucleotide
cgggcuguucuuugggucu

SEQ ID NO: 683158 - RNA, 19 nt, Artificial Sequence
  Description of Artificial Sequence: Synthetic oligonucleotide
guccagcgcccuugauggu

SEQ ID NO: 683159 - RNA, 19 nt, Artificial Sequence
  Description of Artificial Sequence: Synthetic oligonucleotide
cgucguuauggacuccacu

SEQ ID NO: 683160 - RNA, 19 nt, Artificial Sequence
  Description of Artificial Sequence: Synthetic oligonucleotide
gcacugucucgggaacaaa

SEQ ID NO: 683161 - RNA, 19 nt, Artificial Sequence
  Description of Artificial Sequence: Synthetic oligonucleotide
guuguacuucagggugauu

SEQ ID NO: 683162 - RNA, 19 nt, Artificial Sequence
  Description of Artificial Sequence: Synthetic oligonucleotide
cacuaccgggcuguucuuu

SEQ ID NO: 683163 - RNA, 19 nt, Artificial Sequence
  Description of Artificial Sequence: Synthetic oligonucleotide
ggccgggaaggcaaucgau

SEQ ID NO: 683164 - RNA, 19 nt, Artificial Sequence
  Description of Artificial Sequence: Synthetic oligonucleotide
cggcgguacuguagguuca

SEQ ID NO: 683165 - RNA, 19 nt, Artificial Sequence
  Description of Artificial Sequence: Synthetic oligonucleotide
gggacucgauauacagcau

SEQ ID NO: 683166 - RNA, 19 nt, Artificial Sequence
  Description of Artificial Sequence: Synthetic oligonucleotide
ccaugguaguacgcaaaau

SEQ ID NO: 683167 - RNA, 19 nt, Artificial Sequence
  Description of Artificial Sequence: Synthetic oligonucleotide
guuugucaguggggaccau

SEQ ID NO: 683168 - RNA, 19 nt, Artificial Sequence
  Description of Artificial Sequence: Synthetic oligonucleotide
gccgacgcugcaccuccau

SEQ ID NO: 683169 - RNA, 19 nt, Artificial Sequence
  Description of Artificial Sequence: Synthetic oligonucleotide
ccacucccgcuggggacuc

SEQ ID NO: 683170 - RNA, 19 nt, Artificial Sequence
  Description of Artificial Sequence: Synthetic oligonucleotide
cgggacgcccaggacacaa

SEQ ID NO: 683171 - RNA, 19 nt, Artificial Sequence
  Description of Artificial Sequence: Synthetic oligonucleotide
gcacuaccgggcuguucuu

SEQ ID NO: 683172 - RNA, 19 nt, Artificial Sequence
  Description of Artificial Sequence: Synthetic oligonucleotide
ccgcuggggacucgauaua

SEQ ID NO: 683173 - RNA, 19 nt, Artificial Sequence
  Description of Artificial Sequence: Synthetic oligonucleotide
cacugccccuaggcugucu

SEQ ID NO: 683174 - RNA, 19 nt, Artificial Sequence
  Description of Artificial Sequence: Synthetic oligonucleotide
ccgggacgcccaggacaca

SEQ ID NO: 683175 - RNA, 19 nt, Artificial Sequence
  Description of Artificial Sequence: Synthetic oligonucleotide
uguacaaucuuucuauugg

SEQ ID NO: 683176 - RNA, 19 nt, Artificial Sequence
  Description of Artificial Sequence: Synthetic oligonucleotide
acuguaguaaagcuggucc

SEQ ID NO: 683177 - RNA, 19 nt, Artificial Sequence
  Description of Artificial Sequence: Synthetic oligonucleotide
aguuuauuaucccaggagg

SEQ ID NO: 683178 - RNA, 19 nt, Artificial Sequence
  Description of Artificial Sequence: Synthetic oligonucleotide
aaaagcgaacgauauggcg

SEQ ID NO: 683179 - RNA, 19 nt, Artificial Sequence
  Description of Artificial Sequence: Synthetic oligonucleotide
uguaggaggcgaaauaccg

SEQ ID NO: 683180 - RNA, 19 nt, Artificial Sequence
  Description of Artificial Sequence: Synthetic oligonucleotide
ugguccauaaauaaugccc

SEQ ID NO: 683181 - RNA, 19 nt, Artificial Sequence
  Description of Artificial Sequence: Synthetic oligonucleotide
aaagcgaacgauauggcgg

SEQ ID NO: 683182 - RNA, 19 nt, Artificial Sequence
  Description of Artificial Sequence: Synthetic oligonucleotide
ucacuaaacagcaugagua

SEQ ID NO: 683183 - RNA, 19 nt, Artificial Sequence
  Description of Artificial Sequence: Synthetic oligonucleotide
aucuguucaauagaggggc

SEQ ID NO: 683184 - RNA, 19 nt, Artificial Sequence
  Description of Artificial Sequence: Synthetic oligonucleotide
ucaaaccuucuucaaaucc

SEQ ID NO: 683185 - RNA, 19 nt, Artificial Sequence
  Description of Artificial Sequence: Synthetic oligonucleotide
ucaggcuuaucucagggag

SEQ ID NO: 683186 - RNA, 19 nt, Artificial Sequence
  Description of Artificial Sequence: Synthetic oligonucleotide
uuucgagccacaaaaguca

SEQ ID NO: 683187 - RNA, 19 nt, Artificial Sequence
  Description of Artificial Sequence: Synthetic oligonucleotide
cuaaacagcaugaguaggg

SEQ ID NO: 683188 - RNA, 19 nt, Artificial Sequence
  Description of Artificial Sequence: Synthetic oligonucleotide
acaaaagucacaaggagag

SEQ ID NO: 683189 - RNA, 19 nt, Artificial Sequence
  Description of Artificial Sequence: Synthetic oligonucleotide
aacucgaucucguuuagga

SEQ ID NO: 683190 - RNA, 19 nt, Artificial Sequence
  Description of Artificial Sequence: Synthetic oligonucleotide
cagguuagaaccuaagcag

SEQ ID NO: 683191 - RNA, 19 nt, Artificial Sequence
  Description of Artificial Sequence: Synthetic oligonucleotide
gaguagucaacccacuugc

SEQ ID NO: 683192 - RNA, 19 nt, Artificial Sequence
  Description of Artificial Sequence: Synthetic oligonucleotide
ucuuucuauuggcugacag

SEQ ID NO: 683193 - RNA, 19 nt, Artificial Sequence
  Description of Artificial Sequence: Synthetic oligonucleotide
ucguuuaggaucuucucgc

SEQ ID NO: 683194 - RNA, 19 nt, Artificial Sequence
  Description of Artificial Sequence: Synthetic oligonucleotide
cuuucuauuggcugacagg

SEQ ID NO: 683195 - RNA, 19 nt, Artificial Sequence
  Description of Artificial Sequence: Synthetic oligonucleotide
ccaacuguaguaaagcugg

SEQ ID NO: 683196 - RNA, 19 nt, Artificial Sequence
  Description of Artificial Sequence: Synthetic oligonucleotide
aauggugcgaaaagcgaac

SEQ ID NO: 683197 - RNA, 19 nt, Artificial Sequence
  Description of Artificial Sequence: Synthetic oligonucleotide
uagcccuuuguaaagaagu

SEQ ID NO: 683198 - RNA, 19 nt, Artificial Sequence
  Description of Artificial Sequence: Synthetic oligonucleotide
uguauauguugucagcauc

SEQ ID NO: 683199 - RNA, 19 nt, Artificial Sequence
  Description of Artificial Sequence: Synthetic oligonucleotide
aaucuuucuauuggcugac

SEQ ID NO: 683200 - RNA, 19 nt, Artificial Sequence
  Description of Artificial Sequence: Synthetic oligonucleotide
gaucuguucaauagagggg

SEQ ID NO: 683201 - RNA, 19 nt, Artificial Sequence
  Description of Artificial Sequence: Synthetic oligonucleotide
gacauuaucccguuccuca

SEQ ID NO: 683202 - RNA, 19 nt, Artificial Sequence
  Description of Artificial Sequence: Synthetic oligonucleotide
uagaaccuaagcaggauuc

SEQ ID NO: 683203 - RNA, 19 nt, Artificial Sequence
  Description of Artificial Sequence: Synthetic oligonucleotide
uacaaucuuucuauuggcu

SEQ ID NO: 683204 - RNA, 19 nt, Artificial Sequence
  Description of Artificial Sequence: Synthetic oligonucleotide
ucagaaugguucuuauucu

SEQ ID NO: 683205 - RNA, 19 nt, Artificial Sequence
  Description of Artificial Sequence: Synthetic oligonucleotide
aagagcacggcuacacggc

SEQ ID NO: 683206 - RNA, 19 nt, Artificial Sequence
  Description of Artificial Sequence: Synthetic oligonucleotide
uguaguguacaaucuuucu

SEQ ID NO: 683207 - RNA, 19 nt, Artificial Sequence
  Description of Artificial Sequence: Synthetic oligonucleotide
caguuuauuaucccaggag

SEQ ID NO: 683208 - RNA, 19 nt, Artificial Sequence
  Description of Artificial Sequence: Synthetic oligonucleotide
ugaugcagcgguauguuuc

SEQ ID NO: 683209 - RNA, 19 nt, Artificial Sequence
  Description of Artificial Sequence: Synthetic oligonucleotide
guauauguugucagcaucc

SEQ ID NO: 683210 - RNA, 19 nt, Artificial Sequence
  Description of Artificial Sequence: Synthetic oligonucleotide
ugcaagauaccccucuggu

SEQ ID NO: 683211 - RNA, 19 nt, Artificial Sequence
  Description of Artificial Sequence: Synthetic oligonucleotide
ugaagagcacggcuacacg

SEQ ID NO: 683212 - RNA, 19 nt, Artificial Sequence
  Description of Artificial Sequence: Synthetic oligonucleotide
ucagcgaccacacgucugc

SEQ ID NO: 683213 - RNA, 19 nt, Artificial Sequence
  Description of Artificial Sequence: Synthetic oligonucleotide
ucgaucucguuuaggaucu

SEQ ID NO: 683214 - RNA, 19 nt, Artificial Sequence
  Description of Artificial Sequence: Synthetic oligonucleotide
caugaguagggccugauca

SEQ ID NO: 683215 - RNA, 19 nt, Artificial Sequence
  Description of Artificial Sequence: Synthetic oligonucleotide
cacuaaacagcaugaguag

SEQ ID NO: 683216 - RNA, 19 nt, Artificial Sequence
  Description of Artificial Sequence: Synthetic oligonucleotide
agcauccucgaaauggugc

SEQ ID NO: 683217 - RNA, 19 nt, Artificial Sequence
  Description of Artificial Sequence: Synthetic oligonucleotide
uaggaggcgaaauaccgca

SEQ ID NO: 683218 - RNA, 19 nt, Artificial Sequence
  Description of Artificial Sequence: Synthetic oligonucleotide
ugcgaaaagcgaacgauau

SEQ ID NO: 683219 - RNA, 19 nt, Artificial Sequence
  Description of Artificial Sequence: Synthetic oligonucleotide
acuaaacagcaugaguagg

SEQ ID NO: 683220 - RNA, 19 nt, Artificial Sequence
  Description of Artificial Sequence: Synthetic oligonucleotide
ucuggaugaccgauggaug

SEQ ID NO: 683221 - RNA, 19 nt, Artificial Sequence
  Description of Artificial Sequence: Synthetic oligonucleotide
cuuucggcuacagagcucc

SEQ ID NO: 683222 - RNA, 19 nt, Artificial Sequence
  Description of Artificial Sequence: Synthetic oligonucleotide
acauaguugggagugccac

SEQ ID NO: 683223 - RNA, 19 nt, Artificial Sequence
  Description of Artificial Sequence: Synthetic oligonucleotide
cuaccaagcugacaggggc

SEQ ID NO: 683224 - RNA, 19 nt, Artificial Sequence
  Description of Artificial Sequence: Synthetic oligonucleotide
aagcgaacgauauggcggu

SEQ ID NO: 683225 - RNA, 19 nt, Artificial Sequence
  Description of Artificial Sequence: Synthetic oligonucleotide
guacaaucuuucuauuggc

SEQ ID NO: 683226 - RNA, 19 nt, Artificial Sequence
  Description of Artificial Sequence: Synthetic oligonucleotide
acaagggcggggcaggcac

SEQ ID NO: 683227 - RNA, 19 nt, Artificial Sequence
  Description of Artificial Sequence: Synthetic oligonucleotide
ucgaaauggugcgaaaagc

SEQ ID NO: 683228 - RNA, 19 nt, Artificial Sequence
  Description of Artificial Sequence: Synthetic oligonucleotide
ucugccucgggcauggccu

SEQ ID NO: 683229 - RNA, 19 nt, Artificial Sequence
  Description of Artificial Sequence: Synthetic oligonucleotide
ucuguucaauagaggggcg

SEQ ID NO: 683230 - RNA, 19 nt, Artificial Sequence
  Description of Artificial Sequence: Synthetic oligonucleotide
uaacugggagcuaaggcuc

SEQ ID NO: 683231 - RNA, 19 nt, Artificial Sequence
  Description of Artificial Sequence: Synthetic oligonucleotide
gaugcagcgguauguuucc

SEQ ID NO: 683232 - RNA, 19 nt, Artificial Sequence
  Description of Artificial Sequence: Synthetic oligonucleotide
aacaacaagggcggggcag

SEQ ID NO: 683233 - RNA, 19 nt, Artificial Sequence
  Description of Artificial Sequence: Synthetic oligonucleotide
aucuggcgcagguaguagc

SEQ ID NO: 683234 - RNA, 19 nt, Artificial Sequence
  Description of Artificial Sequence: Synthetic oligonucleotide
uuagaaccuaagcaggauu

SEQ ID NO: 683235 - RNA, 19 nt, Artificial Sequence
  Description of Artificial Sequence: Synthetic oligonucleotide
gcuuaucucagggagaagg

SEQ ID NO: 683236 - RNA, 19 nt, Artificial Sequence
  Description of Artificial Sequence: Synthetic oligonucleotide
gaaccuaagcaggauuccg

SEQ ID NO: 683237 - RNA, 19 nt, Artificial Sequence
  Description of Artificial Sequence: Synthetic oligonucleotide
uaaccgagaugccagccca

SEQ ID NO: 683238 - RNA, 19 nt, Artificial Sequence
  Description of Artificial Sequence: Synthetic oligonucleotide
acaguuuauuaucccagga

SEQ ID NO: 683239 - RNA, 19 nt, Artificial Sequence
  Description of Artificial Sequence: Synthetic oligonucleotide
cagcguguaaugaaccugc

SEQ ID NO: 683240 - RNA, 19 nt, Artificial Sequence
  Description of Artificial Sequence: Synthetic oligonucleotide
guguacaaucuuucuauug

SEQ ID NO: 683241 - RNA, 19 nt, Artificial Sequence
  Description of Artificial Sequence: Synthetic oligonucleotide
cauguaggaggcgaaauac

SEQ ID NO: 683242 - RNA, 19 nt, Artificial Sequence
  Description of Artificial Sequence: Synthetic oligonucleotide
ucuucucgcgcugaugcgg

SEQ ID NO: 683243 - RNA, 19 nt, Artificial Sequence
  Description of Artificial Sequence: Synthetic oligonucleotide
ugcaacucgaucucguuua

SEQ ID NO: 683244 - RNA, 19 nt, Artificial Sequence
  Description of Artificial Sequence: Synthetic oligonucleotide
agguuagaaccuaagcagg

SEQ ID NO: 683245 - RNA, 19 nt, Artificial Sequence
  Description of Artificial Sequence: Synthetic oligonucleotide
gguaguagcgaaccucugg

SEQ ID NO: 683246 - RNA, 19 nt, Artificial Sequence
  Description of Artificial Sequence: Synthetic oligonucleotide
cgaaaagcgaacgauaugg

SEQ ID NO: 683247 - RNA, 19 nt, Artificial Sequence
  Description of Artificial Sequence: Synthetic oligonucleotide
auguaggaggcgaaauacc

SEQ ID NO: 683248 - RNA, 19 nt, Artificial Sequence
  Description of Artificial Sequence: Synthetic oligonucleotide
aaauggugcgaaaagcgaa

SEQ ID NO: 683249 - RNA, 19 nt, Artificial Sequence
  Description of Artificial Sequence: Synthetic oligonucleotide
aaagugguccauaaauaau

SEQ ID NO: 683250 - RNA, 19 nt, Artificial Sequence
  Description of Artificial Sequence: Synthetic oligonucleotide
augaccgauggaugugcgc

SEQ ID NO: 683251 - RNA, 19 nt, Artificial Sequence
  Description of Artificial Sequence: Synthetic oligonucleotide
ugugcaagauaccccucug

SEQ ID NO: 683252 - RNA, 19 nt, Artificial Sequence
  Description of Artificial Sequence: Synthetic oligonucleotide
caaucuuucuauuggcuga

SEQ ID NO: 683253 - RNA, 19 nt, Artificial Sequence
  Description of Artificial Sequence: Synthetic oligonucleotide
guagcgaaccucuggcucc

SEQ ID NO: 683254 - RNA, 19 nt, Artificial Sequence
  Description of Artificial Sequence: Synthetic oligonucleotide
gagaugccagcccaaaauc

SEQ ID NO: 683255 - RNA, 19 nt, Artificial Sequence
  Description of Artificial Sequence: Synthetic oligonucleotide
gaaaagcgaacgauauggc

SEQ ID NO: 683256 - RNA, 19 nt, Artificial Sequence
  Description of Artificial Sequence: Synthetic oligonucleotide
gcagguuagaaccuaagca

SEQ ID NO: 683257 - RNA, 19 nt, Artificial Sequence
  Description of Artificial Sequence: Synthetic oligonucleotide
gaucaacuuuguguggucc

SEQ ID NO: 683258 - RNA, 19 nt, Artificial Sequence
  Description of Artificial Sequence: Synthetic oligonucleotide
ucgggcauggccuugucuc

SEQ ID NO: 683259 - RNA, 19 nt, Artificial Sequence
  Description of Artificial Sequence: Synthetic oligonucleotide
agcgguauguuuccuucag

SEQ ID NO: 683260 - RNA, 19 nt, Artificial Sequence
  Description of Artificial Sequence: Synthetic oligonucleotide
guuucgagccacaaaaguc

SEQ ID NO: 683261 - RNA, 19 nt, Artificial Sequence
  Description of Artificial Sequence: Synthetic oligonucleotide
cuaaccgagaugccagccc

SEQ ID NO: 683262 - RNA, 19 nt, Artificial Sequence
  Description of Artificial Sequence: Synthetic oligonucleotide
gaaauggugcgaaaagcga

SEQ ID NO: 683263 - RNA, 19 nt, Artificial Sequence
  Description of Artificial Sequence: Synthetic oligonucleotide
cgaaauggugcgaaaagcg

SEQ ID NO: 683264 - RNA, 19 nt, Artificial Sequence
  Description of Artificial Sequence: Synthetic oligonucleotide
agcacgagguacagaaccc

SEQ ID NO: 683265 - RNA, 19 nt, Artificial Sequence
  Description of Artificial Sequence: Synthetic oligonucleotide
gguccauaaauaaugcccc

SEQ ID NO: 683266 - RNA, 19 nt, Artificial Sequence
  Description of Artificial Sequence: Synthetic oligonucleotide
uggaugugcgcaucaggcc

SEQ ID NO: 683267 - RNA, 19 nt, Artificial Sequence
  Description of Artificial Sequence: Synthetic oligonucleotide
uuuuccugccaaacaggcu

SEQ ID NO: 683268 - RNA, 19 nt, Artificial Sequence
  Description of Artificial Sequence: Synthetic oligonucleotide
auuaucccguuccucagaa

SEQ ID NO: 683269 - RNA, 19 nt, Artificial Sequence
  Description of Artificial Sequence: Synthetic oligonucleotide
agagcacggcuacacggcg

SEQ ID NO: 683270 - RNA, 19 nt, Artificial Sequence
  Description of Artificial Sequence: Synthetic oligonucleotide
ggggcucuaaccgagaugc

SEQ ID NO: 683271 - RNA, 19 nt, Artificial Sequence
  Description of Artificial Sequence: Synthetic oligonucleotide
aucuggaugaccgauggau

SEQ ID NO: 683272 - RNA, 19 nt, Artificial Sequence
  Description of Artificial Sequence: Synthetic oligonucleotide
caucaggccgcucaccaag

SEQ ID NO: 683273 - RNA, 19 nt, Artificial Sequence
  Description of Artificial Sequence: Synthetic oligonucleotide
cagagcacgagguacagaa

SEQ ID NO: 683274 - RNA, 19 nt, Artificial Sequence
  Description of Artificial Sequence: Synthetic oligonucleotide
auguauauguugucagcau

SEQ ID NO: 683275 - RNA, 19 nt, Artificial Sequence
  Description of Artificial Sequence: Synthetic oligonucleotide
gcauccucgaaauggugcg

SEQ ID NO: 683276 - RNA, 19 nt, Artificial Sequence
  Description of Artificial Sequence: Synthetic oligonucleotide
ugcuguaggucucggugca

SEQ ID NO: 683277 - RNA, 19 nt, Artificial Sequence
  Description of Artificial Sequence: Synthetic oligonucleotide
uguucaauagaggggcggu

SEQ ID NO: 683278 - RNA, 19 nt, Artificial Sequence
  Description of Artificial Sequence: Synthetic oligonucleotide
gauuccgaucccugagcag

SEQ ID NO: 683279 - RNA, 19 nt, Artificial Sequence
  Description of Artificial Sequence: Synthetic oligonucleotide
agguaaguacaagcacugc

SEQ ID NO: 683280 - RNA, 19 nt, Artificial Sequence
  Description of Artificial Sequence: Synthetic oligonucleotide
uguagcccuuuguaaagaa

SEQ ID NO: 683281 - RNA, 19 nt, Artificial Sequence
  Description of Artificial Sequence: Synthetic oligonucleotide
cuacacggcggcuggacag

SEQ ID NO: 683282 - RNA, 19 nt, Artificial Sequence
  Description of Artificial Sequence: Synthetic oligonucleotide
gaagcgagguaaguacaag

SEQ ID NO: 683283 - RNA, 19 nt, Artificial Sequence
  Description of Artificial Sequence: Synthetic oligonucleotide
ucucguuuaggaucuucuc

SEQ ID NO: 683284 - RNA, 19 nt, Artificial Sequence
  Description of Artificial Sequence: Synthetic oligonucleotide
ucuaaccgagaugccagcc

SEQ ID NO: 683285 - RNA, 19 nt, Artificial Sequence
  Description of Artificial Sequence: Synthetic oligonucleotide
gugugugccaucguugaag

SEQ ID NO: 683286 - RNA, 19 nt, Artificial Sequence
  Description of Artificial Sequence: Synthetic oligonucleotide
ucugcagguuagaaccuaa

SEQ ID NO: 683287 - RNA, 19 nt, Artificial Sequence
  Description of Artificial Sequence: Synthetic oligonucleotide
ugaucagucuugacccacu

SEQ ID NO: 683288 - RNA, 19 nt, Artificial Sequence
  Description of Artificial Sequence: Synthetic oligonucleotide
aaccuaagcaggauuccga

SEQ ID NO: 683289 - RNA, 19 nt, Artificial Sequence
  Description of Artificial Sequence: Synthetic oligonucleotide
ugcaaguacuugaggccug

SEQ ID NO: 683290 - RNA, 19 nt, Artificial Sequence
  Description of Artificial Sequence: Synthetic oligonucleotide
ugcuccauguaggaggcga

SEQ ID NO: 683291 - RNA, 19 nt, Artificial Sequence
  Description of Artificial Sequence: Synthetic oligonucleotide
cagcuguugacagggagcc

SEQ ID NO: 683292 - RNA, 19 nt, Artificial Sequence
  Description of Artificial Sequence: Synthetic oligonucleotide
aggucuccgcccuucauga

SEQ ID NO: 683293 - RNA, 19 nt, Artificial Sequence
  Description of Artificial Sequence: Synthetic oligonucleotide
cuguucaauagaggggcgg

SEQ ID NO: 683294 - RNA, 19 nt, Artificial Sequence
  Description of Artificial Sequence: Synthetic oligonucleotide
caggcagcguguaaugaac

SEQ ID NO: 683295 - RNA, 19 nt, Artificial Sequence
  Description of Artificial Sequence: Synthetic oligonucleotide
gaugaccgauggaugugcg

SEQ ID NO: 683296 - RNA, 19 nt, Artificial Sequence
  Description of Artificial Sequence: Synthetic oligonucleotide
gaaauaccgcaggaugccc

SEQ ID NO: 683297 - RNA, 19 nt, Artificial Sequence
  Description of Artificial Sequence: Synthetic oligonucleotide
cagugcguagcgcagucgc

SEQ ID NO: 683298 - RNA, 19 nt, Artificial Sequence
  Description of Artificial Sequence: Synthetic oligonucleotide
auggugcgaaaagcgaacg

SEQ ID NO: 683299 - RNA, 19 nt, Artificial Sequence
  Description of Artificial Sequence: Synthetic oligonucleotide
aguagggccugaucagucu

SEQ ID NO: 683300 - RNA, 19 nt, Artificial Sequence
  Description of Artificial Sequence: Synthetic oligonucleotide
cacuugcugacccacacca

SEQ ID NO: 683301 - RNA, 19 nt, Artificial Sequence
  Description of Artificial Sequence: Synthetic oligonucleotide
uggugcgaaaagcgaacga

SEQ ID NO: 683302 - RNA, 19 nt, Artificial Sequence
  Description of Artificial Sequence: Synthetic oligonucleotide
aucuucucgcgcugaugcg

SEQ ID NO: 683303 - RNA, 19 nt, Artificial Sequence
  Description of Artificial Sequence: Synthetic oligonucleotide
gaagcccgaaggauggcag

SEQ ID NO: 683304 - RNA, 19 nt, Artificial Sequence
  Description of Artificial Sequence: Synthetic oligonucleotide
caggauuccgaucccugag

SEQ ID NO: 683305 - RNA, 19 nt, Artificial Sequence
  Description of Artificial Sequence: Synthetic oligonucleotide
gccugaaaggaucuggcgc

SEQ ID NO: 683306 - RNA, 19 nt, Artificial Sequence
  Description of Artificial Sequence: Synthetic oligonucleotide
cagagcuccaagaaaaugu

SEQ ID NO: 683307 - RNA, 19 nt, Artificial Sequence
  Description of Artificial Sequence: Synthetic oligonucleotide
caucacuaaacagcaugag

SEQ ID NO: 683308 - RNA, 19 nt, Artificial Sequence
  Description of Artificial Sequence: Synthetic oligonucleotide
ucaggucagcgaccacacg

SEQ ID NO: 683309 - RNA, 19 nt, Artificial Sequence
  Description of Artificial Sequence: Synthetic oligonucleotide
uuggaguagucaacccacu

SEQ ID NO: 683310 - RNA, 19 nt, Artificial Sequence
  Description of Artificial Sequence: Synthetic oligonucleotide
aacuuugugugguccccau

SEQ ID NO: 683311 - RNA, 19 nt, Artificial Sequence
  Description of Artificial Sequence: Synthetic oligonucleotide
ugaaaggaucuggcgcagg

SEQ ID NO: 683312 - RNA, 19 nt, Artificial Sequence
  Description of Artificial Sequence: Synthetic oligonucleotide
ccuaacugggagcuaaggc

SEQ ID NO: 683313 - RNA, 19 nt, Artificial Sequence
  Description of Artificial Sequence: Synthetic oligonucleotide
aggcagcguguaaugaacc

SEQ ID NO: 683314 - RNA, 19 nt, Artificial Sequence
  Description of Artificial Sequence: Synthetic oligonucleotide
ugaagcccgaaggauggca

SEQ ID NO: 683315 - RNA, 19 nt, Artificial Sequence
  Description of Artificial Sequence: Synthetic oligonucleotide
cuggugcaaguacuugagg

SEQ ID NO: 683316 - RNA, 19 nt, Artificial Sequence
  Description of Artificial Sequence: Synthetic oligonucleotide
cuucucgcgcugaugcggc

SEQ ID NO: 683317 - RNA, 19 nt, Artificial Sequence
  Description of Artificial Sequence: Synthetic oligonucleotide
accuaagcaggauuccgau

SEQ ID NO: 683318 - RNA, 19 nt, Artificial Sequence
  Description of Artificial Sequence: Synthetic oligonucleotide
ugacccacaccagaggcuc

SEQ ID NO: 683319 - RNA, 19 nt, Artificial Sequence
  Description of Artificial Sequence: Synthetic oligonucleotide
uggaguagucaacccacuu

SEQ ID NO: 683320 - RNA, 19 nt, Artificial Sequence
  Description of Artificial Sequence: Synthetic oligonucleotide
guaggaggcgaaauaccgc

SEQ ID NO: 683321 - RNA, 19 nt, Artificial Sequence
  Description of Artificial Sequence: Synthetic oligonucleotide
gucaaaccuucuucaaauc

SEQ ID NO: 683322 - RNA, 19 nt, Artificial Sequence
  Description of Artificial Sequence: Synthetic oligonucleotide
cucuaaccgagaugccagc

SEQ ID NO: 683323 - RNA, 19 nt, Artificial Sequence
  Description of Artificial Sequence: Synthetic oligonucleotide
gacuuucggcuacagagcu

SEQ ID NO: 683324 - RNA, 19 nt, Artificial Sequence
  Description of Artificial Sequence: Synthetic oligonucleotide
cugugcuagaggagcuggg

SEQ ID NO: 683325 - RNA, 19 nt, Artificial Sequence
  Description of Artificial Sequence: Synthetic oligonucleotide
cacgagguacagaacccac

SEQ ID NO: 683326 - RNA, 19 nt, Artificial Sequence
  Description of Artificial Sequence: Synthetic oligonucleotide
ucaauagaggggcggucuu

SEQ ID NO: 683327 - RNA, 19 nt, Artificial Sequence
  Description of Artificial Sequence: Synthetic oligonucleotide
acucgaucucguuuaggau

SEQ ID NO: 683328 - RNA, 19 nt, Artificial Sequence
  Description of Artificial Sequence: Synthetic oligonucleotide
uggaugaccgauggaugug

SEQ ID NO: 683329 - RNA, 19 nt, Artificial Sequence
  Description of Artificial Sequence: Synthetic oligonucleotide
guaguaaagcuggucccug

SEQ ID NO: 683330 - RNA, 19 nt, Artificial Sequence
  Description of Artificial Sequence: Synthetic oligonucleotide
ucgagccacaaaagucaca

SEQ ID NO: 683331 - RNA, 19 nt, Artificial Sequence
  Description of Artificial Sequence: Synthetic oligonucleotide
ugcgguuucgagccacaaa

SEQ ID NO: 683332 - RNA, 19 nt, Artificial Sequence
  Description of Artificial Sequence: Synthetic oligonucleotide
gccaucguugaagagcacg

SEQ ID NO: 683333 - RNA, 19 nt, Artificial Sequence
  Description of Artificial Sequence: Synthetic oligonucleotide
ggucuuggggugaagcccg

SEQ ID NO: 683334 - RNA, 19 nt, Artificial Sequence
  Description of Artificial Sequence: Synthetic oligonucleotide
cuaaggcucaggcuuaucu

SEQ ID NO: 683335 - RNA, 19 nt, Artificial Sequence
  Description of Artificial Sequence: Synthetic oligonucleotide
ucggugcaacucgaucucg

SEQ ID NO: 683336 - RNA, 19 nt, Artificial Sequence
  Description of Artificial Sequence: Synthetic oligonucleotide
cauggccuugucucagcag

SEQ ID NO: 683337 - RNA, 19 nt, Artificial Sequence
  Description of Artificial Sequence: Synthetic oligonucleotide
gcgguuucgagccacaaaa

SEQ ID NO: 683338 - RNA, 19 nt, Artificial Sequence
  Description of Artificial Sequence: Synthetic oligonucleotide
ugacagggccaugugugug

SEQ ID NO: 683339 - RNA, 19 nt, Artificial Sequence
  Description of Artificial Sequence: Synthetic oligonucleotide
gcaagauaccccucuggug

SEQ ID NO: 683340 - RNA, 19 nt, Artificial Sequence
  Description of Artificial Sequence: Synthetic oligonucleotide
ugugguccccauagaaguu

SEQ ID NO: 683341 - RNA, 19 nt, Artificial Sequence
  Description of Artificial Sequence: Synthetic oligonucleotide
aggucagcgaccacacguc

SEQ ID NO: 683342 - RNA, 19 nt, Artificial Sequence
  Description of Artificial Sequence: Synthetic oligonucleotide
cugacgggcuggcagugag

SEQ ID NO: 683343 - RNA, 19 nt, Artificial Sequence
  Description of Artificial Sequence: Synthetic oligonucleotide
ugcagugcguagcgcaguc

SEQ ID NO: 683344 - RNA, 19 nt, Artificial Sequence
  Description of Artificial Sequence: Synthetic oligonucleotide
ggccugaaaggaucuggcg

SEQ ID NO: 683345 - RNA, 19 nt, Artificial Sequence
  Description of Artificial Sequence: Synthetic oligonucleotide
gaugcggcuuggccacgcg

SEQ ID NO: 683346 - RNA, 19 nt, Artificial Sequence
  Description of Artificial Sequence: Synthetic oligonucleotide
gagccgaucagggguguag

SEQ ID NO: 683347 - RNA, 19 nt, Artificial Sequence
  Description of Artificial Sequence: Synthetic oligonucleotide
caucguugaagagcacggc

SEQ ID NO: 683348 - RNA, 19 nt, Artificial Sequence
  Description of Artificial Sequence: Synthetic oligonucleotide
aggcucuugguaacuuugg

SEQ ID NO: 683349 - RNA, 19 nt, Artificial Sequence
  Description of Artificial Sequence: Synthetic oligonucleotide
ucugugcaagauaccccuc

SEQ ID NO: 683350 - RNA, 19 nt, Artificial Sequence
  Description of Artificial Sequence: Synthetic oligonucleotide
ggggugucagaucugggac

SEQ ID NO: 683351 - RNA, 19 nt, Artificial Sequence
  Description of Artificial Sequence: Synthetic oligonucleotide
gcgaaauaccgcaggaugc

SEQ ID NO: 683352 - RNA, 19 nt, Artificial Sequence
  Description of Artificial Sequence: Synthetic oligonucleotide
acggcggcuggacagcuga

SEQ ID NO: 683353 - RNA, 19 nt, Artificial Sequence
  Description of Artificial Sequence: Synthetic oligonucleotide
aaccugcuugaugcagcgg

SEQ ID NO: 683354 - RNA, 19 nt, Artificial Sequence
  Description of Artificial Sequence: Synthetic oligonucleotide
uuccgaucccugagcaggu

SEQ ID NO: 683355 - RNA, 19 nt, Artificial Sequence
  Description of Artificial Sequence: Synthetic oligonucleotide
ccaagcaggagacauuauc

SEQ ID NO: 683356 - RNA, 19 nt, Artificial Sequence
  Description of Artificial Sequence: Synthetic oligonucleotide
gcucuaaccgagaugccag

SEQ ID NO: 683357 - RNA, 19 nt, Artificial Sequence
  Description of Artificial Sequence: Synthetic oligonucleotide
agagcacgagguacagaac

SEQ ID NO: 683358 - RNA, 19 nt, Artificial Sequence
  Description of Artificial Sequence: Synthetic oligonucleotide
cucugugcaagauaccccu

SEQ ID NO: 683359 - RNA, 19 nt, Artificial Sequence
  Description of Artificial Sequence: Synthetic oligonucleotide
cucggugcaacucgaucuc

SEQ ID NO: 683360 - RNA, 19 nt, Artificial Sequence
  Description of Artificial Sequence: Synthetic oligonucleotide
cugaucagucuugacccac

SEQ ID NO: 683361 - RNA, 19 nt, Artificial Sequence
  Description of Artificial Sequence: Synthetic oligonucleotide
guugggagugccacagaug

SEQ ID NO: 683362 - RNA, 19 nt, Artificial Sequence
  Description of Artificial Sequence: Synthetic oligonucleotide
ggagcuaaggcucaggcuu

SEQ ID NO: 683363 - RNA, 19 nt, Artificial Sequence
  Description of Artificial Sequence: Synthetic oligonucleotide
cauaguugggagugccaca

SEQ ID NO: 683364 - RNA, 19 nt, Artificial Sequence
  Description of Artificial Sequence: Synthetic oligonucleotide
gcugacaggggccagaccu

SEQ ID NO: 683365 - RNA, 19 nt, Artificial Sequence
  Description of Artificial Sequence: Synthetic oligonucleotide
gaccacacgucugccucgg

SEQ ID NO: 683366 - RNA, 19 nt, Artificial Sequence
  Description of Artificial Sequence: Synthetic oligonucleotide
aacagacuccuugccgggu

SEQ ID NO: 683367 - RNA, 19 nt, Artificial Sequence
  Description of Artificial Sequence: Synthetic oligonucleotide
cuugacccacugcaacaac

SEQ ID NO: 683368 - RNA, 19 nt, Artificial Sequence
  Description of Artificial Sequence: Synthetic oligonucleotide
acaagcacugcgguuucga

SEQ ID NO: 683369 - RNA, 19 nt, Artificial Sequence
  Description of Artificial Sequence: Synthetic oligonucleotide
agagcuccaagaaaaugua

SEQ ID NO: 683370 - RNA, 19 nt, Artificial Sequence
  Description of Artificial Sequence: Synthetic oligonucleotide
aaaggaucuggcgcaggua

SEQ ID NO: 683371 - RNA, 19 nt, Artificial Sequence
  Description of Artificial Sequence: Synthetic oligonucleotide
cgcaggaucuguucaauag

SEQ ID NO: 683372 - RNA, 19 nt, Artificial Sequence
  Description of Artificial Sequence: Synthetic oligonucleotide
uugaugcagcgguauguuu

SEQ ID NO: 683373 - RNA, 19 nt, Artificial Sequence
  Description of Artificial Sequence: Synthetic oligonucleotide
ggccaugugugugccaucg

SEQ ID NO: 683374 - RNA, 19 nt, Artificial Sequence
  Description of Artificial Sequence: Synthetic oligonucleotide
gcugaugcggcuuggccac

SEQ ID NO: 683375 - RNA, 19 nt, Artificial Sequence
  Description of Artificial Sequence: Synthetic oligonucleotide
cuguuucuaccaagcugac

SEQ ID NO: 683376 - RNA, 19 nt, Artificial Sequence
  Description of Artificial Sequence: Synthetic oligonucleotide
ucccguuccucagaauggu

SEQ ID NO: 683377 - RNA, 19 nt, Artificial Sequence
  Description of Artificial Sequence: Synthetic oligonucleotide
gcgagguaaguacaagcac

SEQ ID NO: 683378 - RNA, 19 nt, Artificial Sequence
  Description of Artificial Sequence: Synthetic oligonucleotide
gagcacggcuacacggcgg

SEQ ID NO: 683379 - RNA, 19 nt, Artificial Sequence
  Description of Artificial Sequence: Synthetic oligonucleotide
agggacuuucggcuacaga

SEQ ID NO: 683380 - RNA, 19 nt, Artificial Sequence
  Description of Artificial Sequence: Synthetic oligonucleotide
ggauucagcccagaucccc

SEQ ID NO: 683381 - RNA, 19 nt, Artificial Sequence
  Description of Artificial Sequence: Synthetic oligonucleotide
ugcuucgugcugguggggu

SEQ ID NO: 683382 - RNA, 19 nt, Artificial Sequence
  Description of Artificial Sequence: Synthetic oligonucleotide
auauggcggugcuguaggu

SEQ ID NO: 683383 - RNA, 19 nt, Artificial Sequence
  Description of Artificial Sequence: Synthetic oligonucleotide
agcgaccacacgucugccu

SEQ ID NO: 683384 - RNA, 19 nt, Artificial Sequence
  Description of Artificial Sequence: Synthetic oligonucleotide
accgauggaugugcgcauc

SEQ ID NO: 683385 - RNA, 19 nt, Artificial Sequence
  Description of Artificial Sequence: Synthetic oligonucleotide
ggaugaccgauggaugugc

SEQ ID NO: 683386 - RNA, 19 nt, Artificial Sequence
  Description of Artificial Sequence: Synthetic oligonucleotide
cuggaugaccgauggaugu

SEQ ID NO: 683387 - RNA, 19 nt, Artificial Sequence
  Description of Artificial Sequence: Synthetic oligonucleotide
gguuucgagccacaaaagu

SEQ ID NO: 683388 - RNA, 19 nt, Artificial Sequence
  Description of Artificial Sequence: Synthetic oligonucleotide
cucaggcuuaucucaggga

SEQ ID NO: 683389 - RNA, 19 nt, Artificial Sequence
  Description of Artificial Sequence: Synthetic oligonucleotide
agcaggauuccgaucccug

SEQ ID NO: 683390 - RNA, 19 nt, Artificial Sequence
  Description of Artificial Sequence: Synthetic oligonucleotide
cugaaaggaucuggcgcag

SEQ ID NO: 683391 - RNA, 19 nt, Artificial Sequence
  Description of Artificial Sequence: Synthetic oligonucleotide
cauuaucccguuccucaga

SEQ ID NO: 683392 - RNA, 19 nt, Artificial Sequence
  Description of Artificial Sequence: Synthetic oligonucleotide
gaacgauauggcggugcug

SEQ ID NO: 683393 - RNA, 19 nt, Artificial Sequence
  Description of Artificial Sequence: Synthetic oligonucleotide
caggccauccccaacugua

SEQ ID NO: 683394 - RNA, 19 nt, Artificial Sequence
  Description of Artificial Sequence: Synthetic oligonucleotide
caacagggugugccgggcc

SEQ ID NO: 683395 - RNA, 19 nt, Artificial Sequence
  Description of Artificial Sequence: Synthetic oligonucleotide
acuuucggcuacagagcuc

SEQ ID NO: 683396 - RNA, 19 nt, Artificial Sequence
  Description of Artificial Sequence: Synthetic oligonucleotide
agacuccuugccggguugg

SEQ ID NO: 683397 - RNA, 19 nt, Artificial Sequence
  Description of Artificial Sequence: Synthetic oligonucleotide
guaggucucggugcaacuc

SEQ ID NO: 683398 - RNA, 19 nt, Artificial Sequence
  Description of Artificial Sequence: Synthetic oligonucleotide
guuguaguguacaaucuuu

SEQ ID NO: 683399 - RNA, 19 nt, Artificial Sequence
  Description of Artificial Sequence: Synthetic oligonucleotide
uccucgaaauggugcgaaa

SEQ ID NO: 683400 - RNA, 19 nt, Artificial Sequence
  Description of Artificial Sequence: Synthetic oligonucleotide
gcgaaaagcgaacgauaug

SEQ ID NO: 683401 - RNA, 19 nt, Artificial Sequence
  Description of Artificial Sequence: Synthetic oligonucleotide
gcgguauguuuccuucagg

SEQ ID NO: 683402 - RNA, 19 nt, Artificial Sequence
  Description of Artificial Sequence: Synthetic oligonucleotide
acagacuccuugccggguu

SEQ ID NO: 683403 - RNA, 19 nt, Artificial Sequence
  Description of Artificial Sequence: Synthetic oligonucleotide
ugacgggcuggcagugaga

SEQ ID NO: 683404 - RNA, 19 nt, Artificial Sequence
  Description of Artificial Sequence: Synthetic oligonucleotide
gugcguagcgcagucgcug

SEQ ID NO: 683405 - RNA, 19 nt, Artificial Sequence
  Description of Artificial Sequence: Synthetic oligonucleotide
aguagucaacccacuugcu

SEQ ID NO: 683406 - RNA, 19 nt, Artificial Sequence
  Description of Artificial Sequence: Synthetic oligonucleotide
cacauaguugggagugcca

SEQ ID NO: 683407 - RNA, 19 nt, Artificial Sequence
  Description of Artificial Sequence: Synthetic oligonucleotide
caggcuuaucucagggaga

SEQ ID NO: 683408 - RNA, 19 nt, Artificial Sequence
  Description of Artificial Sequence: Synthetic oligonucleotide
gcagcgguauguuuccuuc

SEQ ID NO: 683409 - RNA, 19 nt, Artificial Sequence
  Description of Artificial Sequence: Synthetic oligonucleotide
auaccccucuggugcaagu

SEQ ID NO: 683410 - RNA, 19 nt, Artificial Sequence
  Description of Artificial Sequence: Synthetic oligonucleotide
ccguuccucagaaugguuc

SEQ ID NO: 683411 - RNA, 19 nt, Artificial Sequence
  Description of Artificial Sequence: Synthetic oligonucleotide
guacaagcacugcgguuuc

SEQ ID NO: 683412 - RNA, 19 nt, Artificial Sequence
  Description of Artificial Sequence: Synthetic oligonucleotide
uuaucccguuccucagaau

SEQ ID NO: 683413 - RNA, 19 nt, Artificial Sequence
  Description of Artificial Sequence: Synthetic oligonucleotide
ugaugcggcuuggccacgc

SEQ ID NO: 683414 - RNA, 19 nt, Artificial Sequence
  Description of Artificial Sequence: Synthetic oligonucleotide
gcagcguguaaugaaccug

SEQ ID NO: 683415 - RNA, 19 nt, Artificial Sequence
  Description of Artificial Sequence: Synthetic oligonucleotide
cguuuaggaucuucucgcg

SEQ ID NO: 683416 - RNA, 19 nt, Artificial Sequence
  Description of Artificial Sequence: Synthetic oligonucleotide
cagaucugggacugucaca

SEQ ID NO: 683417 - RNA, 19 nt, Artificial Sequence
  Description of Artificial Sequence: Synthetic oligonucleotide
cucgcgcugaugcggcuug

SEQ ID NO: 683418 - RNA, 19 nt, Artificial Sequence
  Description of Artificial Sequence: Synthetic oligonucleotide
gcaacucgaucucguuuag

SEQ ID NO: 683419 - RNA, 19 nt, Artificial Sequence
  Description of Artificial Sequence: Synthetic oligonucleotide
acuuugugugguccccaua

SEQ ID NO: 683420 - RNA, 19 nt, Artificial Sequence
  Description of Artificial Sequence: Synthetic oligonucleotide
acgggcuggcagugagagg

SEQ ID NO: 683421 - RNA, 19 nt, Artificial Sequence
  Description of Artificial Sequence: Synthetic oligonucleotide
cgaaauaccgcaggaugcc

SEQ ID NO: 683422 - RNA, 19 nt, Artificial Sequence
  Description of Artificial Sequence: Synthetic oligonucleotide
aggaggcgaaauaccgcag

SEQ ID NO: 683423 - RNA, 19 nt, Artificial Sequence
  Description of Artificial Sequence: Synthetic oligonucleotide
cagggagccgaucaggggu

SEQ ID NO: 683424 - RNA, 19 nt, Artificial Sequence
  Description of Artificial Sequence: Synthetic oligonucleotide
gguacagaacccacagaga

SEQ ID NO: 683425 - RNA, 19 nt, Artificial Sequence
  Description of Artificial Sequence: Synthetic oligonucleotide
ggcucuaaccgagaugcca

SEQ ID NO: 683426 - RNA, 19 nt, Artificial Sequence
  Description of Artificial Sequence: Synthetic oligonucleotide
agcuguugacagggagccg

SEQ ID NO: 683427 - RNA, 19 nt, Artificial Sequence
  Description of Artificial Sequence: Synthetic oligonucleotide
cacggcuacacggcggcug

SEQ ID NO: 683428 - RNA, 19 nt, Artificial Sequence
  Description of Artificial Sequence: Synthetic oligonucleotide
uagcgaaccucuggcucca

SEQ ID NO: 683429 - RNA, 19 nt, Artificial Sequence
  Description of Artificial Sequence: Synthetic oligonucleotide
ggugugccgggccuuccag

SEQ ID NO: 683430 - RNA, 19 nt, Artificial Sequence
  Description of Artificial Sequence: Synthetic oligonucleotide
acggggugagcuguccuca

SEQ ID NO: 683431 - RNA, 19 nt, Artificial Sequence
  Description of Artificial Sequence: Synthetic oligonucleotide
gugcgaaaagcgaacgaua

SEQ ID NO: 683432 - RNA, 19 nt, Artificial Sequence
  Description of Artificial Sequence: Synthetic oligonucleotide
gugggaagcgagguaagua

SEQ ID NO: 683433 - RNA, 19 nt, Artificial Sequence
  Description of Artificial Sequence: Synthetic oligonucleotide
gggguguagcccuuuguaa

SEQ ID NO: 683434 - RNA, 19 nt, Artificial Sequence
  Description of Artificial Sequence: Synthetic oligonucleotide
aucuuucuauuggcugaca

SEQ ID NO: 683435 - RNA, 19 nt, Artificial Sequence
  Description of Artificial Sequence: Synthetic oligonucleotide
gcgaccacacgucugccuc

SEQ ID NO: 683436 - RNA, 19 nt, Artificial Sequence
  Description of Artificial Sequence: Synthetic oligonucleotide
guuagaaccuaagcaggau

SEQ ID NO: 683437 - RNA, 19 nt, Artificial Sequence
  Description of Artificial Sequence: Synthetic oligonucleotide
gcaggcagcguguaaugaa

SEQ ID NO: 683438 - RNA, 19 nt, Artificial Sequence
  Description of Artificial Sequence: Synthetic oligonucleotide
ggcggucuuggggugaagc

SEQ ID NO: 683439 - RNA, 19 nt, Artificial Sequence
  Description of Artificial Sequence: Synthetic oligonucleotide
uccgaucccugagcaggug

SEQ ID NO: 683440 - RNA, 19 nt, Artificial Sequence
  Description of Artificial Sequence: Synthetic oligonucleotide
gguuguaguguacaaucuu

SEQ ID NO: 683441 - RNA, 19 nt, Artificial Sequence
  Description of Artificial Sequence: Synthetic oligonucleotide
gcgaacgauauggcggugc

SEQ ID NO: 683442 - RNA, 19 nt, Artificial Sequence
  Description of Artificial Sequence: Synthetic oligonucleotide
ccgaucagggguguagccc

SEQ ID NO: 683443 - RNA, 19 nt, Artificial Sequence
  Description of Artificial Sequence: Synthetic oligonucleotide
cacugcgguuucgagccac

SEQ ID NO: 683444 - RNA, 19 nt, Artificial Sequence
  Description of Artificial Sequence: Synthetic oligonucleotide
gcgcagguaguagcgaacc

SEQ ID NO: 683445 - RNA, 19 nt, Artificial Sequence
  Description of Artificial Sequence: Synthetic oligonucleotide
cagcgguauguuuccuuca

SEQ ID NO: 683446 - RNA, 19 nt, Artificial Sequence
  Description of Artificial Sequence: Synthetic oligonucleotide
gagcugacgggcuggcagu

SEQ ID NO: 683447 - RNA, 19 nt, Artificial Sequence
  Description of Artificial Sequence: Synthetic oligonucleotide
uucgugcuggugggguugu

SEQ ID NO: 683448 - RNA, 19 nt, Artificial Sequence
  Description of Artificial Sequence: Synthetic oligonucleotide
ccgaucccugagcaggugc

SEQ ID NO: 683449 - RNA, 19 nt, Artificial Sequence
  Description of Artificial Sequence: Synthetic oligonucleotide
ggugcgaaaagcgaacgau

SEQ ID NO: 683450 - RNA, 19 nt, Artificial Sequence
  Description of Artificial Sequence: Synthetic oligonucleotide
agcguguaaugaaccugcu

SEQ ID NO: 683451 - RNA, 19 nt, Artificial Sequence
  Description of Artificial Sequence: Synthetic oligonucleotide
agcuggucccugauugccu

SEQ ID NO: 683452 - RNA, 19 nt, Artificial Sequence
  Description of Artificial Sequence: Synthetic oligonucleotide
uucucgcgcugaugcggcu

SEQ ID NO: 683453 - RNA, 19 nt, Artificial Sequence
  Description of Artificial Sequence: Synthetic oligonucleotide
gggaagcgagguaaguaca

SEQ ID NO: 683454 - RNA, 19 nt, Artificial Sequence
  Description of Artificial Sequence: Synthetic oligonucleotide
cugcaacaacaagggcggg

SEQ ID NO: 683455 - RNA, 19 nt, Artificial Sequence
  Description of Artificial Sequence: Synthetic oligonucleotide
cccuuuguaaagaagucau

SEQ ID NO: 683456 - RNA, 19 nt, Artificial Sequence
  Description of Artificial Sequence: Synthetic oligonucleotide
ggaagcgagguaaguacaa

SEQ ID NO: 683457 - RNA, 19 nt, Artificial Sequence
  Description of Artificial Sequence: Synthetic oligonucleotide
agcaugaguagggccugau

SEQ ID NO: 683458 - RNA, 19 nt, Artificial Sequence
  Description of Artificial Sequence: Synthetic oligonucleotide
caucuggaugaccgaugga

SEQ ID NO: 683459 - RNA, 19 nt, Artificial Sequence
  Description of Artificial Sequence: Synthetic oligonucleotide
gagcuaaggcucaggcuua

SEQ ID NO: 683460 - RNA, 19 nt, Artificial Sequence
  Description of Artificial Sequence: Synthetic oligonucleotide
accgagaugccagcccaaa

SEQ ID NO: 683461 - RNA, 19 nt, Artificial Sequence
  Description of Artificial Sequence: Synthetic oligonucleotide
ccgcucaccaagcaggaga

SEQ ID NO: 683462 - RNA, 19 nt, Artificial Sequence
  Description of Artificial Sequence: Synthetic oligonucleotide
ccgaaggauggcagccagg

SEQ ID NO: 683463 - RNA, 19 nt, Artificial Sequence
  Description of Artificial Sequence: Synthetic oligonucleotide
cagggacuuucggcuacag

SEQ ID NO: 683464 - RNA, 19 nt, Artificial Sequence
  Description of Artificial Sequence: Synthetic oligonucleotide
acgauauggcggugcugua

SEQ ID NO: 683465 - RNA, 19 nt, Artificial Sequence
  Description of Artificial Sequence: Synthetic oligonucleotide
ucgcgcugaugcggcuugg

SEQ ID NO: 683466 - RNA, 19 nt, Artificial Sequence
  Description of Artificial Sequence: Synthetic oligonucleotide
gugugccgggccuuccaga

SEQ ID NO: 683467 - RNA, 19 nt, Artificial Sequence
  Description of Artificial Sequence: Synthetic oligonucleotide
gugcaacucgaucucguuu

SEQ ID NO: 683468 - RNA, 19 nt, Artificial Sequence
  Description of Artificial Sequence: Synthetic oligonucleotide
cugcuggagccucaggccu

SEQ ID NO: 683469 - RNA, 19 nt, Artificial Sequence
  Description of Artificial Sequence: Synthetic oligonucleotide
ggcagcguguaaugaaccu

SEQ ID NO: 683470 - RNA, 19 nt, Artificial Sequence
  Description of Artificial Sequence: Synthetic oligonucleotide
ucucgcgcugaugcggcuu

SEQ ID NO: 683471 - RNA, 19 nt, Artificial Sequence
  Description of Artificial Sequence: Synthetic oligonucleotide
agccugcucugcagguuag

SEQ ID NO: 683472 - RNA, 19 nt, Artificial Sequence
  Description of Artificial Sequence: Synthetic oligonucleotide
gugcuucgugcuggugggg

SEQ ID NO: 683473 - RNA, 19 nt, Artificial Sequence
  Description of Artificial Sequence: Synthetic oligonucleotide
cauccucgaaauggugcga

SEQ ID NO: 683474 - RNA, 19 nt, Artificial Sequence
  Description of Artificial Sequence: Synthetic oligonucleotide
gcuacacggcggcuggaca

SEQ ID NO: 683475 - RNA, 19 nt, Artificial Sequence
  Description of Artificial Sequence: Synthetic oligonucleotide
gcagugcguagcgcagucg

SEQ ID NO: 683476 - RNA, 19 nt, Artificial Sequence
  Description of Artificial Sequence: Synthetic oligonucleotide
ggucuccgcccuucaugag

SEQ ID NO: 683477 - RNA, 19 nt, Artificial Sequence
  Description of Artificial Sequence: Synthetic oligonucleotide
agcuaaggcucaggcuuau

SEQ ID NO: 683478 - RNA, 19 nt, Artificial Sequence
  Description of Artificial Sequence: Synthetic oligonucleotide
acugcgguuucgagccaca

SEQ ID NO: 683479 - RNA, 19 nt, Artificial Sequence
  Description of Artificial Sequence: Synthetic oligonucleotide
agcgaacgauauggcggug

SEQ ID NO: 683480 - RNA, 19 nt, Artificial Sequence
  Description of Artificial Sequence: Synthetic oligonucleotide
gccauccccaacuguagua

SEQ ID NO: 683481 - RNA, 19 nt, Artificial Sequence
  Description of Artificial Sequence: Synthetic oligonucleotide
ggggcaugaaggccacaca

SEQ ID NO: 683482 - RNA, 19 nt, Artificial Sequence
  Description of Artificial Sequence: Synthetic oligonucleotide
gaccgauggaugugcgcau

SEQ ID NO: 683483 - RNA, 19 nt, Artificial Sequence
  Description of Artificial Sequence: Synthetic oligonucleotide
cugaugcggcuuggccacg

SEQ ID NO: 683484 - RNA, 19 nt, Artificial Sequence
  Description of Artificial Sequence: Synthetic oligonucleotide
cacgucugccucgggcaug

SEQ ID NO: 683485 - RNA, 19 nt, Artificial Sequence
  Description of Artificial Sequence: Synthetic oligonucleotide
cagcgaccacacgucugcc

SEQ ID NO: 683486 - RNA, 19 nt, Artificial Sequence
  Description of Artificial Sequence: Synthetic oligonucleotide
caacuguaguaaagcuggu

SEQ ID NO: 683487 - RNA, 19 nt, Artificial Sequence
  Description of Artificial Sequence: Synthetic oligonucleotide
ggcgcagguaguagcgaac

SEQ ID NO: 683488 - RNA, 19 nt, Artificial Sequence
  Description of Artificial Sequence: Synthetic oligonucleotide
gcaaguacuugaggccuga

SEQ ID NO: 683489 - RNA, 19 nt, Artificial Sequence
  Description of Artificial Sequence: Synthetic oligonucleotide
cacggcggcuggacagcug

SEQ ID NO: 683490 - RNA, 19 nt, Artificial Sequence
  Description of Artificial Sequence: Synthetic oligonucleotide
ccucuggugcaaguacuug

SEQ ID NO: 683491 - RNA, 19 nt, Artificial Sequence
  Description of Artificial Sequence: Synthetic oligonucleotide
cgaccacacgucugccucg

SEQ ID NO: 683492 - RNA, 19 nt, Artificial Sequence
  Description of Artificial Sequence: Synthetic oligonucleotide
cuggcaggcagcguguaau

SEQ ID NO: 683493 - RNA, 19 nt, Artificial Sequence
  Description of Artificial Sequence: Synthetic oligonucleotide
ggcuacacggcggcuggac

SEQ ID NO: 683494 - RNA, 19 nt, Artificial Sequence
  Description of Artificial Sequence: Synthetic oligonucleotide
ccucgaaauggugcgaaaa

SEQ ID NO: 683495 - RNA, 19 nt, Artificial Sequence
  Description of Artificial Sequence: Synthetic oligonucleotide
ugccucgggcauggccuug

SEQ ID NO: 683496 - RNA, 19 nt, Artificial Sequence
  Description of Artificial Sequence: Synthetic oligonucleotide
ggccuugucucagcagcac

SEQ ID NO: 683497 - RNA, 19 nt, Artificial Sequence
  Description of Artificial Sequence: Synthetic oligonucleotide
gcgaaccucuggcuccaac

SEQ ID NO: 683498 - RNA, 19 nt, Artificial Sequence
  Description of Artificial Sequence: Synthetic oligonucleotide
gcuggugggguuguagugu

SEQ ID NO: 683499 - RNA, 19 nt, Artificial Sequence
  Description of Artificial Sequence: Synthetic oligonucleotide
gugucccacggggugagcu

SEQ ID NO: 683500 - RNA, 19 nt, Artificial Sequence
  Description of Artificial Sequence: Synthetic oligonucleotide
ccccuaacugggagcuaag

SEQ ID NO: 683501 - RNA, 19 nt, Artificial Sequence
  Description of Artificial Sequence: Synthetic oligonucleotide
ggucagcgaccacacgucu

SEQ ID NO: 683502 - RNA, 19 nt, Artificial Sequence
  Description of Artificial Sequence: Synthetic oligonucleotide
cggcuggacagcugauacc

SEQ ID NO: 683503 - RNA, 19 nt, Artificial Sequence
  Description of Artificial Sequence: Synthetic oligonucleotide
gcccuucaugaggugcugc

SEQ ID NO: 683504 - RNA, 19 nt, Artificial Sequence
  Description of Artificial Sequence: Synthetic oligonucleotide
gggccugaucagucuugac

SEQ ID NO: 683505 - RNA, 19 nt, Artificial Sequence
  Description of Artificial Sequence: Synthetic oligonucleotide
caaguacuugaggccugaa

SEQ ID NO: 683506 - RNA, 19 nt, Artificial Sequence
  Description of Artificial Sequence: Synthetic oligonucleotide
cagguccggggagcagccc

SEQ ID NO: 683507 - RNA, 19 nt, Artificial Sequence
  Description of Artificial Sequence: Synthetic oligonucleotide
ccgggccuuccagaugugg

SEQ ID NO: 683508 - RNA, 19 nt, Artificial Sequence
  Description of Artificial Sequence: Synthetic oligonucleotide
ggugcaacucgaucucguu

SEQ ID NO: 683509 - RNA, 19 nt, Artificial Sequence
  Description of Artificial Sequence: Synthetic oligonucleotide
cucgggcauggccuugucu

SEQ ID NO: 683510 - RNA, 19 nt, Artificial Sequence
  Description of Artificial Sequence: Synthetic oligonucleotide
cuggggcucacaucccaau

SEQ ID NO: 683511 - RNA, 19 nt, Artificial Sequence
  Description of Artificial Sequence: Synthetic oligonucleotide
ccgauggaugugcgcauca

SEQ ID NO: 683512 - RNA, 19 nt, Artificial Sequence
  Description of Artificial Sequence: Synthetic oligonucleotide
cgaucccugagcaggugca

SEQ ID NO: 683513 - RNA, 19 nt, Artificial Sequence
  Description of Artificial Sequence: Synthetic oligonucleotide
cgagaugccagcccaaaau

SEQ ID NO: 683514 - RNA, 19 nt, Artificial Sequence
  Description of Artificial Sequence: Synthetic oligonucleotide
ggccugacaucuggaugac

SEQ ID NO: 683515 - RNA, 19 nt, Artificial Sequence
  Description of Artificial Sequence: Synthetic oligonucleotide
gccugacaucuggaugacc

SEQ ID NO: 683516 - RNA, 19 nt, Artificial Sequence
  Description of Artificial Sequence: Synthetic oligonucleotide
cugcuugaugcagcgguau

SEQ ID NO: 683517 - RNA, 19 nt, Artificial Sequence
  Description of Artificial Sequence: Synthetic oligonucleotide
gucuuggggugaagcccga

SEQ ID NO: 683518 - RNA, 19 nt, Artificial Sequence
  Description of Artificial Sequence: Synthetic oligonucleotide
ccauguuauccgugaugaa

SEQ ID NO: 683519 - RNA, 19 nt, Artificial Sequence
  Description of Artificial Sequence: Synthetic oligonucleotide
cugcgguuucgagccacaa

SEQ ID NO: 683520 - RNA, 19 nt, Artificial Sequence
  Description of Artificial Sequence: Synthetic oligonucleotide
gcuaaggcucaggcuuauc

SEQ ID NO: 683521 - RNA, 19 nt, Artificial Sequence
  Description of Artificial Sequence: Synthetic oligonucleotide
gcguguaaugaaccugcuu

SEQ ID NO: 683522 - RNA, 19 nt, Artificial Sequence
  Description of Artificial Sequence: Synthetic oligonucleotide
gugcagugcguagcgcagu

SEQ ID NO: 683523 - RNA, 19 nt, Artificial Sequence
  Description of Artificial Sequence: Synthetic oligonucleotide
cggcuacagagcuccaaga

SEQ ID NO: 683524 - RNA, 19 nt, Artificial Sequence
  Description of Artificial Sequence: Synthetic oligonucleotide
gcccgaaggauggcagcca

SEQ ID NO: 683525 - RNA, 19 nt, Artificial Sequence
  Description of Artificial Sequence: Synthetic oligonucleotide
ccgagaugccagcccaaaa

SEQ ID NO: 683526 - RNA, 19 nt, Artificial Sequence
  Description of Artificial Sequence: Synthetic oligonucleotide
cccuggggcucacauccca

SEQ ID NO: 683527 - RNA, 19 nt, Artificial Sequence
  Description of Artificial Sequence: Synthetic oligonucleotide
gcggggcaggcaccucuac

SEQ ID NO: 683528 - RNA, 19 nt, Artificial Sequence
  Description of Artificial Sequence: Synthetic oligonucleotide
gcucaccaagcaggagaca

SEQ ID NO: 683529 - RNA, 19 nt, Artificial Sequence
  Description of Artificial Sequence: Synthetic oligonucleotide
ggcggcuggacagcugaua

SEQ ID NO: 683530 - RNA, 19 nt, Artificial Sequence
  Description of Artificial Sequence: Synthetic oligonucleotide
cgaacgauauggcggugcu

SEQ ID NO: 683531 - RNA, 19 nt, Artificial Sequence
  Description of Artificial Sequence: Synthetic oligonucleotide
ccucagaaugguucuuauu

SEQ ID NO: 683532 - RNA, 19 nt, Artificial Sequence
  Description of Artificial Sequence: Synthetic oligonucleotide
gcugacgggcuggcaguga

SEQ ID NO: 683533 - RNA, 19 nt, Artificial Sequence
  Description of Artificial Sequence: Synthetic oligonucleotide
ggcgcaggaucuguucaau

SEQ ID NO: 683534 - RNA, 19 nt, Artificial Sequence
  Description of Artificial Sequence: Synthetic oligonucleotide
gcacugcgguuucgagcca

SEQ ID NO: 683535 - RNA, 19 nt, Artificial Sequence
  Description of Artificial Sequence: Synthetic oligonucleotide
gccaugugugugccaucgu

SEQ ID NO: 683536 - RNA, 19 nt, Artificial Sequence
  Description of Artificial Sequence: Synthetic oligonucleotide
ggagaggcucccagccacu

SEQ ID NO: 683537 - RNA, 19 nt, Artificial Sequence
  Description of Artificial Sequence: Synthetic oligonucleotide
cgcgcugaugcggcuuggc

SEQ ID NO: 683538 - RNA, 19 nt, Artificial Sequence
  Description of Artificial Sequence: Synthetic oligonucleotide
ccucgggcauggccuuguc

SEQ ID NO: 683539 - RNA, 19 nt, Artificial Sequence
  Description of Artificial Sequence: Synthetic oligonucleotide
gcaggucuccgcccuucau

SEQ ID NO: 683540 - RNA, 19 nt, Artificial Sequence
  Description of Artificial Sequence: Synthetic oligonucleotide
cccucuggugcaaguacuu

SEQ ID NO: 683541 - RNA, 19 nt, Artificial Sequence
  Description of Artificial Sequence: Synthetic oligonucleotide
ggggcggucuuggggugaa

SEQ ID NO: 683542 - RNA, 19 nt, Artificial Sequence
  Description of Artificial Sequence: Synthetic oligonucleotide
gggcggucuuggggugaag

SEQ ID NO: 683543 - RNA, 19 nt, Artificial Sequence
  Description of Artificial Sequence: Synthetic oligonucleotide
ggagccgaucaggggugua

SEQ ID NO: 683544 - RNA, 19 nt, Artificial Sequence
  Description of Artificial Sequence: Synthetic oligonucleotide
cggugcaacucgaucucgu

SEQ ID NO: 683545 - RNA, 19 nt, Artificial Sequence
  Description of Artificial Sequence: Synthetic oligonucleotide
cgcagguaguagcgaaccu

SEQ ID NO: 683546 - RNA, 19 nt, Artificial Sequence
  Description of Artificial Sequence: Synthetic oligonucleotide
gggagccgaucaggggugu

SEQ ID NO: 683547 - RNA, 19 nt, Artificial Sequence
  Description of Artificial Sequence: Synthetic oligonucleotide
gccucgggcauggccuugu

SEQ ID NO: 683548 - RNA, 19 nt, Artificial Sequence
  Description of Artificial Sequence: Synthetic oligonucleotide
cccguuccucagaaugguu

SEQ ID NO: 683549 - RNA, 19 nt, Artificial Sequence
  Description of Artificial Sequence: Synthetic oligonucleotide
gcacggcuacacggcggcu

SEQ ID NO: 683550 - RNA, 19 nt, Artificial Sequence
  Description of Artificial Sequence: Synthetic oligonucleotide
cgaucucguuuaggaucuu

SEQ ID NO: 683551 - RNA, 19 nt, Artificial Sequence
  Description of Artificial Sequence: Synthetic oligonucleotide
uuuaagagcagaaagguag

SEQ ID NO: 683552 - RNA, 19 nt, Artificial Sequence
  Description of Artificial Sequence: Synthetic oligonucleotide
acucaaauaagcuuugacc

SEQ ID NO: 683553 - RNA, 19 nt, Artificial Sequence
  Description of Artificial Sequence: Synthetic oligonucleotide
acaaugaaaacuuagguug

SEQ ID NO: 683554 - RNA, 19 nt, Artificial Sequence
  Description of Artificial Sequence: Synthetic oligonucleotide
aaaugguuggcacuuuucc

SEQ ID NO: 683555 - RNA, 19 nt, Artificial Sequence
  Description of Artificial Sequence: Synthetic oligonucleotide
uuagcaugcauucugaucu

SEQ ID NO: 683556 - RNA, 19 nt, Artificial Sequence
  Description of Artificial Sequence: Synthetic oligonucleotide
cucaaauaagcuuugaccc

SEQ ID NO: 683557 - RNA, 19 nt, Artificial Sequence
  Description of Artificial Sequence: Synthetic oligonucleotide
auaauguuccaccugcucc

SEQ ID NO: 683558 - RNA, 19 nt, Artificial Sequence
  Description of Artificial Sequence: Synthetic oligonucleotide
uuaaucugugcaaacagug

SEQ ID NO: 683559 - RNA, 19 nt, Artificial Sequence
  Description of Artificial Sequence: Synthetic oligonucleotide
uuugacaucccuacuauug

SEQ ID NO: 683560 - RNA, 19 nt, Artificial Sequence
  Description of Artificial Sequence: Synthetic oligonucleotide
auacagauguaucccaugc

SEQ ID NO: 683561 - RNA, 19 nt, Artificial Sequence
  Description of Artificial Sequence: Synthetic oligonucleotide
aagguuauaacuucuugga

SEQ ID NO: 683562 - RNA, 19 nt, Artificial Sequence
  Description of Artificial Sequence: Synthetic oligonucleotide
uguccauauacucaaauaa

SEQ ID NO: 683563 - RNA, 19 nt, Artificial Sequence
  Description of Artificial Sequence: Synthetic oligonucleotide
gaaaacuuagguugguuag

SEQ ID NO: 683564 - RNA, 19 nt, Artificial Sequence
  Description of Artificial Sequence: Synthetic oligonucleotide
uuaucuacuguaauggagu

SEQ ID NO: 683565 - RNA, 19 nt, Artificial Sequence
  Description of Artificial Sequence: Synthetic oligonucleotide
guuacugcagcugagagag

SEQ ID NO: 683566 - RNA, 19 nt, Artificial Sequence
  Description of Artificial Sequence: Synthetic oligonucleotide
gaagauuuggcacugacaa

SEQ ID NO: 683567 - RNA, 19 nt, Artificial Sequence
  Description of Artificial Sequence: Synthetic oligonucleotide
aagccuacuacuuuguggu

SEQ ID NO: 683568 - RNA, 19 nt, Artificial Sequence
  Description of Artificial Sequence: Synthetic oligonucleotide
ucuuuguacuccuugagga

SEQ ID NO: 683569 - RNA, 19 nt, Artificial Sequence
  Description of Artificial Sequence: Synthetic oligonucleotide
uccgcuaccuccaugcucg

SEQ ID NO: 683570 - RNA, 19 nt, Artificial Sequence
  Description of Artificial Sequence: Synthetic oligonucleotide
cuuauuaccggcuggcugc

SEQ ID NO: 683571 - RNA, 19 nt, Artificial Sequence
  Description of Artificial Sequence: Synthetic oligonucleotide
uaauguuccaccugcuccg

SEQ ID NO: 683572 - RNA, 19 nt, Artificial Sequence
  Description of Artificial Sequence: Synthetic oligonucleotide
acuuguauauguaagccac

SEQ ID NO: 683573 - RNA, 19 nt, Artificial Sequence
  Description of Artificial Sequence: Synthetic oligonucleotide
aaagguagaggaaaucuag

SEQ ID NO: 683574 - RNA, 19 nt, Artificial Sequence
  Description of Artificial Sequence: Synthetic oligonucleotide
auaagcuuugacccacucc

SEQ ID NO: 683575 - RNA, 19 nt, Artificial Sequence
  Description of Artificial Sequence: Synthetic oligonucleotide
agguauauucagugaaggc

SEQ ID NO: 683576 - RNA, 19 nt, Artificial Sequence
  Description of Artificial Sequence: Synthetic oligonucleotide
uguguugacacacuuguau

SEQ ID NO: 683577 - RNA, 19 nt, Artificial Sequence
  Description of Artificial Sequence: Synthetic oligonucleotide
guagaggaaaucuagaaaa

SEQ ID NO: 683578 - RNA, 19 nt, Artificial Sequence
  Description of Artificial Sequence: Synthetic oligonucleotide
uguaaaacauggcagcauc

SEQ ID NO: 683579 - RNA, 19 nt, Artificial Sequence
  Description of Artificial Sequence: Synthetic oligonucleotide
acucguuaaaauccccgcc

SEQ ID NO: 683580 - RNA, 19 nt, Artificial Sequence
  Description of Artificial Sequence: Synthetic oligonucleotide
accgucuccauacagaugu

SEQ ID NO: 683581 - RNA, 19 nt, Artificial Sequence
  Description of Artificial Sequence: Synthetic oligonucleotide
ugugagauuagcaugcauu

SEQ ID NO: 683582 - RNA, 19 nt, Artificial Sequence
  Description of Artificial Sequence: Synthetic oligonucleotide
aagccgaaagcgucagugc

SEQ ID NO: 683583 - RNA, 19 nt, Artificial Sequence
  Description of Artificial Sequence: Synthetic oligonucleotide
aaagccgaaagcgucagug

SEQ ID NO: 683584 - RNA, 19 nt, Artificial Sequence
  Description of Artificial Sequence: Synthetic oligonucleotide
ugauuaucuccacaaugcc

SEQ ID NO: 683585 - RNA, 19 nt, Artificial Sequence
  Description of Artificial Sequence: Synthetic oligonucleotide
aagcuuauuaccggcuggc

SEQ ID NO: 683586 - RNA, 19 nt, Artificial Sequence
  Description of Artificial Sequence: Synthetic oligonucleotide
auccacucaguucuuuugc

SEQ ID NO: 683587 - RNA, 19 nt, Artificial Sequence
  Description of Artificial Sequence: Synthetic oligonucleotide
uaaucugugcaaacagugc

SEQ ID NO: 683588 - RNA, 19 nt, Artificial Sequence
  Description of Artificial Sequence: Synthetic oligonucleotide
uauguaagccaccugcuuc

SEQ ID NO: 683589 - RNA, 19 nt, Artificial Sequence
  Description of Artificial Sequence: Synthetic oligonucleotide
ugaaggacuaucuccauau

SEQ ID NO: 683590 - RNA, 19 nt, Artificial Sequence
  Description of Artificial Sequence: Synthetic oligonucleotide
aaacuuagguugguuagag

SEQ ID NO: 683591 - RNA, 19 nt, Artificial Sequence
  Description of Artificial Sequence: Synthetic oligonucleotide
aaggacuguuuguugguag

SEQ ID NO: 683592 - RNA, 19 nt, Artificial Sequence
  Description of Artificial Sequence: Synthetic oligonucleotide
uauaacuucuuggaucugc

SEQ ID NO: 683593 - RNA, 19 nt, Artificial Sequence
  Description of Artificial Sequence: Synthetic oligonucleotide
agccgaaagcgucagugcc

SEQ ID NO: 683594 - RNA, 19 nt, Artificial Sequence
  Description of Artificial Sequence: Synthetic oligonucleotide
uugguuagagccuuaugga

SEQ ID NO: 683595 - RNA, 19 nt, Artificial Sequence
  Description of Artificial Sequence: Synthetic oligonucleotide
ugguuagagccuuauggag

SEQ ID NO: 683596 - RNA, 19 nt, Artificial Sequence
  Description of Artificial Sequence: Synthetic oligonucleotide
uauccagcaauuuccguca

SEQ ID NO: 683597 - RNA, 19 nt, Artificial Sequence
  Description of Artificial Sequence: Synthetic oligonucleotide
guuaucuacuguaauggag

SEQ ID NO: 683598 - RNA, 19 nt, Artificial Sequence
  Description of Artificial Sequence: Synthetic oligonucleotide
aggacguucaucucagaag

SEQ ID NO: 683599 - RNA, 19 nt, Artificial Sequence
  Description of Artificial Sequence: Synthetic oligonucleotide
ggguuuugcagccagagcc

SEQ ID NO: 683600 - RNA, 19 nt, Artificial Sequence
  Description of Artificial Sequence: Synthetic oligonucleotide
ucuguaggaaugaggacgu

SEQ ID NO: 683601 - RNA, 19 nt, Artificial Sequence
  Description of Artificial Sequence: Synthetic oligonucleotide
uccugacucaucuucaagu

SEQ ID NO: 683602 - RNA, 19 nt, Artificial Sequence
  Description of Artificial Sequence: Synthetic oligonucleotide
uaauggaguuaauuuugcc

SEQ ID NO: 683603 - RNA, 19 nt, Artificial Sequence
  Description of Artificial Sequence: Synthetic oligonucleotide
aagcagcgagucaaaagcc

SEQ ID NO: 683604 - RNA, 19 nt, Artificial Sequence
  Description of Artificial Sequence: Synthetic oligonucleotide
gguuauaacuucuuggauc

SEQ ID NO: 683605 - RNA, 19 nt, Artificial Sequence
  Description of Artificial Sequence: Synthetic oligonucleotide
gcuucuuacaguuaucuac

SEQ ID NO: 683606 - RNA, 19 nt, Artificial Sequence
  Description of Artificial Sequence: Synthetic oligonucleotide
cuacuauugauuaucucca

SEQ ID NO: 683607 - RNA, 19 nt, Artificial Sequence
  Description of Artificial Sequence: Synthetic oligonucleotide
cuugauauaagccugcagu

SEQ ID NO: 683608 - RNA, 19 nt, Artificial Sequence
  Description of Artificial Sequence: Synthetic oligonucleotide
acuggaaacucguuaaaau

SEQ ID NO: 683609 - RNA, 19 nt, Artificial Sequence
  Description of Artificial Sequence: Synthetic oligonucleotide
auuaccggcuggcugcugg

SEQ ID NO: 683610 - RNA, 19 nt, Artificial Sequence
  Description of Artificial Sequence: Synthetic oligonucleotide
uccuugaggacucgguuug

SEQ ID NO: 683611 - RNA, 19 nt, Artificial Sequence
  Description of Artificial Sequence: Synthetic oligonucleotide
uuacaguuaucuacuguaa

SEQ ID NO: 683612 - RNA, 19 nt, Artificial Sequence
  Description of Artificial Sequence: Synthetic oligonucleotide
acucgguuuguguaaaaca

SEQ ID NO: 683613 - RNA, 19 nt, Artificial Sequence
  Description of Artificial Sequence: Synthetic oligonucleotide
uucagggcaugugugaugc

SEQ ID NO: 683614 - RNA, 19 nt, Artificial Sequence
  Description of Artificial Sequence: Synthetic oligonucleotide
ucuuucacaaaggggccgg

SEQ ID NO: 683615 - RNA, 19 nt, Artificial Sequence
  Description of Artificial Sequence: Synthetic oligonucleotide
uugauauaagccugcaguu

SEQ ID NO: 683616 - RNA, 19 nt, Artificial Sequence
  Description of Artificial Sequence: Synthetic oligonucleotide
uuguauauguaagccaccu

SEQ ID NO: 683617 - RNA, 19 nt, Artificial Sequence
  Description of Artificial Sequence: Synthetic oligonucleotide
uggaacuccuugauauaag

SEQ ID NO: 683618 - RNA, 19 nt, Artificial Sequence
  Description of Artificial Sequence: Synthetic oligonucleotide
aauccccgccuucuguagg

SEQ ID NO: 683619 - RNA, 19 nt, Artificial Sequence
  Description of Artificial Sequence: Synthetic oligonucleotide
gugagauuagcaugcauuc

SEQ ID NO: 683620 - RNA, 19 nt, Artificial Sequence
  Description of Artificial Sequence: Synthetic oligonucleotide
aaauccccgccuucuguag

SEQ ID NO: 683621 - RNA, 19 nt, Artificial Sequence
  Description of Artificial Sequence: Synthetic oligonucleotide
acaagauuuugcaugucag

SEQ ID NO: 683622 - RNA, 19 nt, Artificial Sequence
  Description of Artificial Sequence: Synthetic oligonucleotide
caacggacgguccggaugg

SEQ ID NO: 683623 - RNA, 19 nt, Artificial Sequence
  Description of Artificial Sequence: Synthetic oligonucleotide
aguuaucuacuguaaugga

SEQ ID NO: 683624 - RNA, 19 nt, Artificial Sequence
  Description of Artificial Sequence: Synthetic oligonucleotide
aaucacuagguuggaaaca

SEQ ID NO: 683625 - RNA, 19 nt, Artificial Sequence
  Description of Artificial Sequence: Synthetic oligonucleotide
agccggaacugguagggac

SEQ ID NO: 683626 - RNA, 19 nt, Artificial Sequence
  Description of Artificial Sequence: Synthetic oligonucleotide
aaaggggccggguuuugca

SEQ ID NO: 683627 - RNA, 19 nt, Artificial Sequence
  Description of Artificial Sequence: Synthetic oligonucleotide
guuguguugacacacuugu

SEQ ID NO: 683628 - RNA, 19 nt, Artificial Sequence
  Description of Artificial Sequence: Synthetic oligonucleotide
cuccgcauguuucugcacg

SEQ ID NO: 683629 - RNA, 19 nt, Artificial Sequence
  Description of Artificial Sequence: Synthetic oligonucleotide
ucgcugugagauuagcaug

SEQ ID NO: 683630 - RNA, 19 nt, Artificial Sequence
  Description of Artificial Sequence: Synthetic oligonucleotide
gacacacuuguauauguaa

SEQ ID NO: 683631 - RNA, 19 nt, Artificial Sequence
  Description of Artificial Sequence: Synthetic oligonucleotide
uccgaacuggaccacucug

SEQ ID NO: 683632 - RNA, 19 nt, Artificial Sequence
  Description of Artificial Sequence: Synthetic oligonucleotide
uucuaacagagguggcucc

SEQ ID NO: 683633 - RNA, 19 nt, Artificial Sequence
  Description of Artificial Sequence: Synthetic oligonucleotide
uggcauucgcuuauccagc

SEQ ID NO: 683634 - RNA, 19 nt, Artificial Sequence
  Description of Artificial Sequence: Synthetic oligonucleotide
ucgcuuauccagcaauuuc

SEQ ID NO: 683635 - RNA, 19 nt, Artificial Sequence
  Description of Artificial Sequence: Synthetic oligonucleotide
ggaacuccuugauauaagc

SEQ ID NO: 683636 - RNA, 19 nt, Artificial Sequence
  Description of Artificial Sequence: Synthetic oligonucleotide
gcacauacggaacugcucc

SEQ ID NO: 683637 - RNA, 19 nt, Artificial Sequence
  Description of Artificial Sequence: Synthetic oligonucleotide
uccaaucuuucuacaagau

SEQ ID NO: 683638 - RNA, 19 nt, Artificial Sequence
  Description of Artificial Sequence: Synthetic oligonucleotide
cauacagauguaucccaug

SEQ ID NO: 683639 - RNA, 19 nt, Artificial Sequence
  Description of Artificial Sequence: Synthetic oligonucleotide
cacgggacuggcaagcagc

SEQ ID NO: 683640 - RNA, 19 nt, Artificial Sequence
  Description of Artificial Sequence: Synthetic oligonucleotide
acaucccuacuauugauua

SEQ ID NO: 683641 - RNA, 19 nt, Artificial Sequence
  Description of Artificial Sequence: Synthetic oligonucleotide
uucuuacaguuaucuacug

SEQ ID NO: 683642 - RNA, 19 nt, Artificial Sequence
  Description of Artificial Sequence: Synthetic oligonucleotide
aguucuaacagagguggcu

SEQ ID NO: 683643 - RNA, 19 nt, Artificial Sequence
  Description of Artificial Sequence: Synthetic oligonucleotide
cuccauacagauguauccc

SEQ ID NO: 683644 - RNA, 19 nt, Artificial Sequence
  Description of Artificial Sequence: Synthetic oligonucleotide
gaaagcgucagugccccag

SEQ ID NO: 683645 - RNA, 19 nt, Artificial Sequence
  Description of Artificial Sequence: Synthetic oligonucleotide
cucgcuccaacuucaggcc

SEQ ID NO: 683646 - RNA, 19 nt, Artificial Sequence
  Description of Artificial Sequence: Synthetic oligonucleotide
uuguugguagaaugacccc

SEQ ID NO: 683647 - RNA, 19 nt, Artificial Sequence
  Description of Artificial Sequence: Synthetic oligonucleotide
auuuggcacugacaaucuc

SEQ ID NO: 683648 - RNA, 19 nt, Artificial Sequence
  Description of Artificial Sequence: Synthetic oligonucleotide
aaggggccggguuuugcag

SEQ ID NO: 683649 - RNA, 19 nt, Artificial Sequence
  Description of Artificial Sequence: Synthetic oligonucleotide
ucccuacuauugauuaucu

SEQ ID NO: 683650 - RNA, 19 nt, Artificial Sequence
  Description of Artificial Sequence: Synthetic oligonucleotide
cauaauguuccaccugcuc

SEQ ID NO: 683651 - RNA, 19 nt, Artificial Sequence
  Description of Artificial Sequence: Synthetic oligonucleotide
aagguagaggaaaucuaga

SEQ ID NO: 683652 - RNA, 19 nt, Artificial Sequence
  Description of Artificial Sequence: Synthetic oligonucleotide
ugacccacuggcauucgcu

SEQ ID NO: 683653 - RNA, 19 nt, Artificial Sequence
  Description of Artificial Sequence: Synthetic oligonucleotide
ggacguucaucucagaaga

SEQ ID NO: 683654 - RNA, 19 nt, Artificial Sequence
  Description of Artificial Sequence: Synthetic oligonucleotide
ucccgccccaaucucagcc

SEQ ID NO: 683655 - RNA, 19 nt, Artificial Sequence
  Description of Artificial Sequence: Synthetic oligonucleotide
caugcugugaagggagagg

SEQ ID NO: 683656 - RNA, 19 nt, Artificial Sequence
  Description of Artificial Sequence: Synthetic oligonucleotide
cgguuuguguaaaacaugg

SEQ ID NO: 683657 - RNA, 19 nt, Artificial Sequence
  Description of Artificial Sequence: Synthetic oligonucleotide
cuccaaucuuucuacaaga

SEQ ID NO: 683658 - RNA, 19 nt, Artificial Sequence
  Description of Artificial Sequence: Synthetic oligonucleotide
ucccggaagguuauaacuu

SEQ ID NO: 683659 - RNA, 19 nt, Artificial Sequence
  Description of Artificial Sequence: Synthetic oligonucleotide
cuguaaccaggagagcucg

SEQ ID NO: 683660 - RNA, 19 nt, Artificial Sequence
  Description of Artificial Sequence: Synthetic oligonucleotide
ugagauuagcaugcauucu

SEQ ID NO: 683661 - RNA, 19 nt, Artificial Sequence
  Description of Artificial Sequence: Synthetic oligonucleotide
uccgucacuguggugacca

SEQ ID NO: 683662 - RNA, 19 nt, Artificial Sequence
  Description of Artificial Sequence: Synthetic oligonucleotide
aagggagagggcacaugac

SEQ ID NO: 683663 - RNA, 19 nt, Artificial Sequence
  Description of Artificial Sequence: Synthetic oligonucleotide
cacuuguauauguaagcca

SEQ ID NO: 683664 - RNA, 19 nt, Artificial Sequence
  Description of Artificial Sequence: Synthetic oligonucleotide
caucaccugaacuuugaca

SEQ ID NO: 683665 - RNA, 19 nt, Artificial Sequence
  Description of Artificial Sequence: Synthetic oligonucleotide
aucacuagguuggaaacau

SEQ ID NO: 683666 - RNA, 19 nt, Artificial Sequence
  Description of Artificial Sequence: Synthetic oligonucleotide
aagcgucagugccccaguc

SEQ ID NO: 683667 - RNA, 19 nt, Artificial Sequence
  Description of Artificial Sequence: Synthetic oligonucleotide
accacgucaucaaacacca

SEQ ID NO: 683668 - RNA, 19 nt, Artificial Sequence
  Description of Artificial Sequence: Synthetic oligonucleotide
uacucugccacgggacugg

SEQ ID NO: 683669 - RNA, 19 nt, Artificial Sequence
  Description of Artificial Sequence: Synthetic oligonucleotide
aggacuguuuguugguaga

SEQ ID NO: 683670 - RNA, 19 nt, Artificial Sequence
  Description of Artificial Sequence: Synthetic oligonucleotide
gauccaacggacgguccgg

SEQ ID NO: 683671 - RNA, 19 nt, Artificial Sequence
  Description of Artificial Sequence: Synthetic oligonucleotide
gaggacguucaucucagaa

SEQ ID NO: 683672 - RNA, 19 nt, Artificial Sequence
  Description of Artificial Sequence: Synthetic oligonucleotide
aauuuccgucacuguggug

SEQ ID NO: 683673 - RNA, 19 nt, Artificial Sequence
  Description of Artificial Sequence: Synthetic oligonucleotide
ugcugucccgccccaaucu

SEQ ID NO: 683674 - RNA, 19 nt, Artificial Sequence
  Description of Artificial Sequence: Synthetic oligonucleotide
acugaccugcugucccgcc

SEQ ID NO: 683675 - RNA, 19 nt, Artificial Sequence
  Description of Artificial Sequence: Synthetic oligonucleotide
auauguaagccaccugcuu

SEQ ID NO: 683676 - RNA, 19 nt, Artificial Sequence
  Description of Artificial Sequence: Synthetic oligonucleotide
ucucccggaagguuauaac

SEQ ID NO: 683677 - RNA, 19 nt, Artificial Sequence
  Description of Artificial Sequence: Synthetic oligonucleotide
agccuuauggagucacaca

SEQ ID NO: 683678 - RNA, 19 nt, Artificial Sequence
  Description of Artificial Sequence: Synthetic oligonucleotide
uauaagccugcaguucugu

SEQ ID NO: 683679 - RNA, 19 nt, Artificial Sequence
  Description of Artificial Sequence: Synthetic oligonucleotide
uugguccaguacaacccug

SEQ ID NO: 683680 - RNA, 19 nt, Artificial Sequence
  Description of Artificial Sequence: Synthetic oligonucleotide
gacucgguuuguguaaaac

SEQ ID NO: 683681 - RNA, 19 nt, Artificial Sequence
  Description of Artificial Sequence: Synthetic oligonucleotide
uguaaccaggagagcucgc

SEQ ID NO: 683682 - RNA, 19 nt, Artificial Sequence
  Description of Artificial Sequence: Synthetic oligonucleotide
cgcuuauccagcaauuucc

SEQ ID NO: 683683 - RNA, 19 nt, Artificial Sequence
  Description of Artificial Sequence: Synthetic oligonucleotide
agaaccgucuccauacaga

SEQ ID NO: 683684 - RNA, 19 nt, Artificial Sequence
  Description of Artificial Sequence: Synthetic oligonucleotide
ucuaacagagguggcuccu

SEQ ID NO: 683685 - RNA, 19 nt, Artificial Sequence
  Description of Artificial Sequence: Synthetic oligonucleotide
agaaaagaaccgucuccau

SEQ ID NO: 683686 - RNA, 19 nt, Artificial Sequence
  Description of Artificial Sequence: Synthetic oligonucleotide
guucuaacagagguggcuc

SEQ ID NO: 683687 - RNA, 19 nt, Artificial Sequence
  Description of Artificial Sequence: Synthetic oligonucleotide
gcuuauuaccggcuggcug

SEQ ID NO: 683688 - RNA, 19 nt, Artificial Sequence
  Description of Artificial Sequence: Synthetic oligonucleotide
cugagagaggaaagccuac

SEQ ID NO: 683689 - RNA, 19 nt, Artificial Sequence
  Description of Artificial Sequence: Synthetic oligonucleotide
gagccuuauggagucacac

SEQ ID NO: 683690 - RNA, 19 nt, Artificial Sequence
  Description of Artificial Sequence: Synthetic oligonucleotide
agucgucggagccggaacu

SEQ ID NO: 683691 - RNA, 19 nt, Artificial Sequence
  Description of Artificial Sequence: Synthetic oligonucleotide
auauucagugaaggcaggu

SEQ ID NO: 683692 - RNA, 19 nt, Artificial Sequence
  Description of Artificial Sequence: Synthetic oligonucleotide
agcucgcuccaacuucagg

SEQ ID NO: 683693 - RNA, 19 nt, Artificial Sequence
  Description of Artificial Sequence: Synthetic oligonucleotide
caggcuagugguguggaac

SEQ ID NO: 683694 - RNA, 19 nt, Artificial Sequence
  Description of Artificial Sequence: Synthetic oligonucleotide
gcuuauccagcaauuuccg

SEQ ID NO: 683695 - RNA, 19 nt, Artificial Sequence
  Description of Artificial Sequence: Synthetic oligonucleotide
ggccugauccaacggacgg

SEQ ID NO: 683696 - RNA, 19 nt, Artificial Sequence
  Description of Artificial Sequence: Synthetic oligonucleotide
gucagugccccagucuggg

SEQ ID NO: 683697 - RNA, 19 nt, Artificial Sequence
  Description of Artificial Sequence: Synthetic oligonucleotide
ggcuccgcuaccuccaugc

SEQ ID NO: 683698 - RNA, 19 nt, Artificial Sequence
  Description of Artificial Sequence: Synthetic oligonucleotide
cucgguuuguguaaaacau

SEQ ID NO: 683699 - RNA, 19 nt, Artificial Sequence
  Description of Artificial Sequence: Synthetic oligonucleotide
gacuggaaacucguuaaaa

SEQ ID NO: 683700 - RNA, 19 nt, Artificial Sequence
  Description of Artificial Sequence: Synthetic oligonucleotide
uccgcauguuucugcacgu

SEQ ID NO: 683701 - RNA, 19 nt, Artificial Sequence
  Description of Artificial Sequence: Synthetic oligonucleotide
gaaggacuaucuccauauc

SEQ ID NO: 683702 - RNA, 19 nt, Artificial Sequence
  Description of Artificial Sequence: Synthetic oligonucleotide
guuaaaauccccgccuucu

SEQ ID NO: 683703 - RNA, 19 nt, Artificial Sequence
  Description of Artificial Sequence: Synthetic oligonucleotide
uacauguuucagggcaugu

SEQ ID NO: 683704 - RNA, 19 nt, Artificial Sequence
  Description of Artificial Sequence: Synthetic oligonucleotide
cauguuucagggcaugugu

SEQ ID NO: 683705 - RNA, 19 nt, Artificial Sequence
  Description of Artificial Sequence: Synthetic oligonucleotide
gagagaggaaagccuacua

SEQ ID NO: 683706 - RNA, 19 nt, Artificial Sequence
  Description of Artificial Sequence: Synthetic oligonucleotide
gaaccgucuccauacagau

SEQ ID NO: 683707 - RNA, 19 nt, Artificial Sequence
  Description of Artificial Sequence: Synthetic oligonucleotide
auacauguuucagggcaug

SEQ ID NO: 683708 - RNA, 19 nt, Artificial Sequence
  Description of Artificial Sequence: Synthetic oligonucleotide
caguucuaacagagguggc

SEQ ID NO: 683709 - RNA, 19 nt, Artificial Sequence
  Description of Artificial Sequence: Synthetic oligonucleotide
ucgucggagccggaacugg

SEQ ID NO: 683710 - RNA, 19 nt, Artificial Sequence
  Description of Artificial Sequence: Synthetic oligonucleotide
ggagccggaacugguaggg

SEQ ID NO: 683711 - RNA, 19 nt, Artificial Sequence
  Description of Artificial Sequence: Synthetic oligonucleotide
uuguguugacacacuugua

SEQ ID NO: 683712 - RNA, 19 nt, Artificial Sequence
  Description of Artificial Sequence: Synthetic oligonucleotide
uggaguuaauuuugcccuu

SEQ ID NO: 683713 - RNA, 19 nt, Artificial Sequence
  Description of Artificial Sequence: Synthetic oligonucleotide
gagucgucggagccggaac

SEQ ID NO: 683714 - RNA, 19 nt, Artificial Sequence
  Description of Artificial Sequence: Synthetic oligonucleotide
cugauccaacggacggucc

SEQ ID NO: 683715 - RNA, 19 nt, Artificial Sequence
  Description of Artificial Sequence: Synthetic oligonucleotide
uucgcuuauccagcaauuu

SEQ ID NO: 683716 - RNA, 19 nt, Artificial Sequence
  Description of Artificial Sequence: Synthetic oligonucleotide
cucguuaaaauccccgccu

SEQ ID NO: 683717 - RNA, 19 nt, Artificial Sequence
  Description of Artificial Sequence: Synthetic oligonucleotide
acgguccggauggcaaucc

SEQ ID NO: 683718 - RNA, 19 nt, Artificial Sequence
  Description of Artificial Sequence: Synthetic oligonucleotide
auauaagccugcaguucug

SEQ ID NO: 683719 - RNA, 19 nt, Artificial Sequence
  Description of Artificial Sequence: Synthetic oligonucleotide
guggaacuccuugauauaa

SEQ ID NO: 683720 - RNA, 19 nt, Artificial Sequence
  Description of Artificial Sequence: Synthetic oligonucleotide
guuuaagagcagaaaggua

SEQ ID NO: 683721 - RNA, 19 nt, Artificial Sequence
  Description of Artificial Sequence: Synthetic oligonucleotide
ugccacgggacuggcaagc

SEQ ID NO: 683722 - RNA, 19 nt, Artificial Sequence
  Description of Artificial Sequence: Synthetic oligonucleotide
acguucaucucagaagauu

SEQ ID NO: 683723 - RNA, 19 nt, Artificial Sequence
  Description of Artificial Sequence: Synthetic oligonucleotide
agcacgaacuguggugcag

SEQ ID NO: 683724 - RNA, 19 nt, Artificial Sequence
  Description of Artificial Sequence: Synthetic oligonucleotide
cucugagauaggugccaac

SEQ ID NO: 683725 - RNA, 19 nt, Artificial Sequence
  Description of Artificial Sequence: Synthetic oligonucleotide
acgggacuggcaagcagcg

SEQ ID NO: 683726 - RNA, 19 nt, Artificial Sequence
  Description of Artificial Sequence: Synthetic oligonucleotide
caaacagugcugagcggga

SEQ ID NO: 683727 - RNA, 19 nt, Artificial Sequence
  Description of Artificial Sequence: Synthetic oligonucleotide
uuuccacucuccacuucuu

SEQ ID NO: 683728 - RNA, 19 nt, Artificial Sequence
  Description of Artificial Sequence: Synthetic oligonucleotide
uuauuaccggcuggcugcu

SEQ ID NO: 683729 - RNA, 19 nt, Artificial Sequence
  Description of Artificial Sequence: Synthetic oligonucleotide
aacggacgguccggauggc

SEQ ID NO: 683730 - RNA, 19 nt, Artificial Sequence
  Description of Artificial Sequence: Synthetic oligonucleotide
cuuucacaaaggggccggg

SEQ ID NO: 683731 - RNA, 19 nt, Artificial Sequence
  Description of Artificial Sequence: Synthetic oligonucleotide
cucccggaagguuauaacu

SEQ ID NO: 683732 - RNA, 19 nt, Artificial Sequence
  Description of Artificial Sequence: Synthetic oligonucleotide
aaccgucuccauacagaug

SEQ ID NO: 683733 - RNA, 19 nt, Artificial Sequence
  Description of Artificial Sequence: Synthetic oligonucleotide
cuucccgccgaagauccac

SEQ ID NO: 683734 - RNA, 19 nt, Artificial Sequence
  Description of Artificial Sequence: Synthetic oligonucleotide
gcgucagugccccagucug

SEQ ID NO: 683735 - RNA, 19 nt, Artificial Sequence
  Description of Artificial Sequence: Synthetic oligonucleotide
auccccgccuucuguagga

SEQ ID NO: 683736 - RNA, 19 nt, Artificial Sequence
  Description of Artificial Sequence: Synthetic oligonucleotide
gguugguuagagccuuaug

SEQ ID NO: 683737 - RNA, 19 nt, Artificial Sequence
  Description of Artificial Sequence: Synthetic oligonucleotide
agcgagucaaaagccugca

SEQ ID NO: 683738 - RNA, 19 nt, Artificial Sequence
  Description of Artificial Sequence: Synthetic oligonucleotide
guuuugcagccagagccac

SEQ ID NO: 683739 - RNA, 19 nt, Artificial Sequence
  Description of Artificial Sequence: Synthetic oligonucleotide
ucuccgcauguuucugcac

SEQ ID NO: 683740 - RNA, 19 nt, Artificial Sequence
  Description of Artificial Sequence: Synthetic oligonucleotide
ggugggccugauccaacgg

SEQ ID NO: 683741 - RNA, 19 nt, Artificial Sequence
  Description of Artificial Sequence: Synthetic oligonucleotide
ccuuuugaaggacuaucuc

SEQ ID NO: 683742 - RNA, 19 nt, Artificial Sequence
  Description of Artificial Sequence: Synthetic oligonucleotide
uggaccacucugagcuuuc

SEQ ID NO: 683743 - RNA, 19 nt, Artificial Sequence
  Description of Artificial Sequence: Synthetic oligonucleotide
ugcucgcugugagauuagc

SEQ ID NO: 683744 - RNA, 19 nt, Artificial Sequence
  Description of Artificial Sequence: Synthetic oligonucleotide
uuagagccuuauggaguca

SEQ ID NO: 683745 - RNA, 19 nt, Artificial Sequence
  Description of Artificial Sequence: Synthetic oligonucleotide
gccuacuacuuugugguug

SEQ ID NO: 683746 - RNA, 19 nt, Artificial Sequence
  Description of Artificial Sequence: Synthetic oligonucleotide
caugcucgcugugagauua

SEQ ID NO: 683747 - RNA, 19 nt, Artificial Sequence
  Description of Artificial Sequence: Synthetic oligonucleotide
gaacuuugacaucccuacu

SEQ ID NO: 683748 - RNA, 19 nt, Artificial Sequence
  Description of Artificial Sequence: Synthetic oligonucleotide
cuccgcuaccuccaugcuc

SEQ ID NO: 683749 - RNA, 19 nt, Artificial Sequence
  Description of Artificial Sequence: Synthetic oligonucleotide
ugaggacguucaucucaga

SEQ ID NO: 683750 - RNA, 19 nt, Artificial Sequence
  Description of Artificial Sequence: Synthetic oligonucleotide
ccgucuugcuccaggacag

SEQ ID NO: 683751 - RNA, 19 nt, Artificial Sequence
  Description of Artificial Sequence: Synthetic oligonucleotide
guacucugccacgggacug

SEQ ID NO: 683752 - RNA, 19 nt, Artificial Sequence
  Description of Artificial Sequence: Synthetic oligonucleotide
gcuagugguguggaacucc

SEQ ID NO: 683753 - RNA, 19 nt, Artificial Sequence
  Description of Artificial Sequence: Synthetic oligonucleotide
agcuuauuaccggcuggcu

SEQ ID NO: 683754 - RNA, 19 nt, Artificial Sequence
  Description of Artificial Sequence: Synthetic oligonucleotide
gucagccauaauguuccac

SEQ ID NO: 683755 - RNA, 19 nt, Artificial Sequence
  Description of Artificial Sequence: Synthetic oligonucleotide
gugugugacacugccucca

SEQ ID NO: 683756 - RNA, 19 nt, Artificial Sequence
  Description of Artificial Sequence: Synthetic oligonucleotide
gcagcgagucaaaagccug

SEQ ID NO: 683757 - RNA, 19 nt, Artificial Sequence
  Description of Artificial Sequence: Synthetic oligonucleotide
cccggaagguuauaacuuc

SEQ ID NO: 683758 - RNA, 19 nt, Artificial Sequence
  Description of Artificial Sequence: Synthetic oligonucleotide
agucaaaagccugcacaua

SEQ ID NO: 683759 - RNA, 19 nt, Artificial Sequence
  Description of Artificial Sequence: Synthetic oligonucleotide
ggugaccaacuucugccca

SEQ ID NO: 683760 - RNA, 19 nt, Artificial Sequence
  Description of Artificial Sequence: Synthetic oligonucleotide
cuagugguguggaacuccu

SEQ ID NO: 683761 - RNA, 19 nt, Artificial Sequence
  Description of Artificial Sequence: Synthetic oligonucleotide
agugcaugucagaggugug

SEQ ID NO: 683762 - RNA, 19 nt, Artificial Sequence
  Description of Artificial Sequence: Synthetic oligonucleotide
ccuacuacuuugugguuga

SEQ ID NO: 683763 - RNA, 19 nt, Artificial Sequence
  Description of Artificial Sequence: Synthetic oligonucleotide
acgaacuguggugcagcug

SEQ ID NO: 683764 - RNA, 19 nt, Artificial Sequence
  Description of Artificial Sequence: Synthetic oligonucleotide
caauuuccgucacuguggu

SEQ ID NO: 683765 - RNA, 19 nt, Artificial Sequence
  Description of Artificial Sequence: Synthetic oligonucleotide
ccaacggacgguccggaug

SEQ ID NO: 683766 - RNA, 19 nt, Artificial Sequence
  Description of Artificial Sequence: Synthetic oligonucleotide
gagcacgaacuguggugca

SEQ ID NO: 683767 - RNA, 19 nt, Artificial Sequence
  Description of Artificial Sequence: Synthetic oligonucleotide
acauacggaacugcuccuu

SEQ ID NO: 683768 - RNA, 19 nt, Artificial Sequence
  Description of Artificial Sequence: Synthetic oligonucleotide
cucacaguccagggaguuc

SEQ ID NO: 683769 - RNA, 19 nt, Artificial Sequence
  Description of Artificial Sequence: Synthetic oligonucleotide
agagucgucggagccggaa

SEQ ID NO: 683770 - RNA, 19 nt, Artificial Sequence
  Description of Artificial Sequence: Synthetic oligonucleotide
ccgaagauccacugaccug

SEQ ID NO: 683771 - RNA, 19 nt, Artificial Sequence
  Description of Artificial Sequence: Synthetic oligonucleotide
cugccacgggacuggcaag

SEQ ID NO: 683772 - RNA, 19 nt, Artificial Sequence
  Description of Artificial Sequence: Synthetic oligonucleotide
gucgucggagccggaacug

SEQ ID NO: 683773 - RNA, 19 nt, Artificial Sequence
  Description of Artificial Sequence: Synthetic oligonucleotide
aggacucgguuuguguaaa

SEQ ID NO: 683774 - RNA, 19 nt, Artificial Sequence
  Description of Artificial Sequence: Synthetic oligonucleotide
guguggaccaucuccgcau

SEQ ID NO: 683775 - RNA, 19 nt, Artificial Sequence
  Description of Artificial Sequence: Synthetic oligonucleotide
uccaacggacgguccggau

SEQ ID NO: 683776 - RNA, 19 nt, Artificial Sequence
  Description of Artificial Sequence: Synthetic oligonucleotide
ccugcacauacggaacugc

SEQ ID NO: 683777 - RNA, 19 nt, Artificial Sequence
  Description of Artificial Sequence: Synthetic oligonucleotide
agagccuuauggagucaca

SEQ ID NO: 683778 - RNA, 19 nt, Artificial Sequence
  Description of Artificial Sequence: Synthetic oligonucleotide
gacgguccggauggcaauc

SEQ ID NO: 683779 - RNA, 19 nt, Artificial Sequence
  Description of Artificial Sequence: Synthetic oligonucleotide
acccacuggcauucgcuua

SEQ ID NO: 683780 - RNA, 19 nt, Artificial Sequence
  Description of Artificial Sequence: Synthetic oligonucleotide
ccgaaagcgucagugcccc

SEQ ID NO: 683781 - RNA, 19 nt, Artificial Sequence
  Description of Artificial Sequence: Synthetic oligonucleotide
caccuucccgccgaagauc

SEQ ID NO: 683782 - RNA, 19 nt, Artificial Sequence
  Description of Artificial Sequence: Synthetic oligonucleotide
uguguguuuccaggacguu

SEQ ID NO: 683783 - RNA, 19 nt, Artificial Sequence
  Description of Artificial Sequence: Synthetic oligonucleotide
gacaucccuacuauugauu

SEQ ID NO: 683784 - RNA, 19 nt, Artificial Sequence
  Description of Artificial Sequence: Synthetic oligonucleotide
cugucccgccccaaucuca

SEQ ID NO: 683785 - RNA, 19 nt, Artificial Sequence
  Description of Artificial Sequence: Synthetic oligonucleotide
cuacuacuuugugguugag

SEQ ID NO: 683786 - RNA, 19 nt, Artificial Sequence
  Description of Artificial Sequence: Synthetic oligonucleotide
ggaucugcucugagauagg

SEQ ID NO: 683787 - RNA, 19 nt, Artificial Sequence
  Description of Artificial Sequence: Synthetic oligonucleotide
ggggccggguuuugcagcc

SEQ ID NO: 683788 - RNA, 19 nt, Artificial Sequence
  Description of Artificial Sequence: Synthetic oligonucleotide
gccgaaagcgucagugccc

SEQ ID NO: 683789 - RNA, 19 nt, Artificial Sequence
  Description of Artificial Sequence: Synthetic oligonucleotide
gcacgaacuguggugcagc

SEQ ID NO: 683790 - RNA, 19 nt, Artificial Sequence
  Description of Artificial Sequence: Synthetic oligonucleotide
gccgaagauccacugaccu

SEQ ID NO: 683791 - RNA, 19 nt, Artificial Sequence
  Description of Artificial Sequence: Synthetic oligonucleotide
uauuaccggcuggcugcug

SEQ ID NO: 683792 - RNA, 19 nt, Artificial Sequence
  Description of Artificial Sequence: Synthetic oligonucleotide
ggccccgucuugcuccagg

SEQ ID NO: 683793 - RNA, 19 nt, Artificial Sequence
  Description of Artificial Sequence: Synthetic oligonucleotide
caaucucagccugagguau

SEQ ID NO: 683794 - RNA, 19 nt, Artificial Sequence
  Description of Artificial Sequence: Synthetic oligonucleotide
uuccgucacuguggugacc

SEQ ID NO: 683795 - RNA, 19 nt, Artificial Sequence
  Description of Artificial Sequence: Synthetic oligonucleotide
cccgucuugcuccaggaca

SEQ ID NO: 683796 - RNA, 19 nt, Artificial Sequence
  Description of Artificial Sequence: Synthetic oligonucleotide
agccuacuacuuugugguu

SEQ ID NO: 683797 - RNA, 19 nt, Artificial Sequence
  Description of Artificial Sequence: Synthetic oligonucleotide
ccggguuuugcagccagag

SEQ ID NO: 683798 - RNA, 19 nt, Artificial Sequence
  Description of Artificial Sequence: Synthetic oligonucleotide
ccaucaccugaacuuugac

SEQ ID NO: 683799 - RNA, 19 nt, Artificial Sequence
  Description of Artificial Sequence: Synthetic oligonucleotide
cccuacuauugauuaucuc

SEQ ID NO: 683800 - RNA, 19 nt, Artificial Sequence
  Description of Artificial Sequence: Synthetic oligonucleotide
gguccggauggcaauccac

SEQ ID NO: 683801 - RNA, 19 nt, Artificial Sequence
  Description of Artificial Sequence: Synthetic oligonucleotide
guccggauggcaauccacu

SEQ ID NO: 683802 - RNA, 19 nt, Artificial Sequence
  Description of Artificial Sequence: Synthetic oligonucleotide
ccgaacuggaccacucuga

SEQ ID NO: 683803 - RNA, 19 nt, Artificial Sequence
  Description of Artificial Sequence: Synthetic oligonucleotide
gcgagucaaaagccugcac

SEQ ID NO: 683804 - RNA, 19 nt, Artificial Sequence
  Description of Artificial Sequence: Synthetic oligonucleotide
cacauacggaacugcuccu

SEQ ID NO: 683805 - RNA, 19 nt, Artificial Sequence
  Description of Artificial Sequence: Synthetic oligonucleotide
augcucgcugugagauuag

SEQ ID NO: 683806 - RNA, 19 nt, Artificial Sequence
  Description of Artificial Sequence: Synthetic oligonucleotide
gguuuggggccacuccgaa

SEQ ID NO: 683807 - RNA, 19 nt, Artificial Sequence
  Description of Artificial Sequence: Synthetic oligonucleotide
acggacgguccggauggca

SEQ ID NO: 683808 - RNA, 19 nt, Artificial Sequence
  Description of Artificial Sequence: Synthetic oligonucleotide
gcaagccuuagccuuuggu

SEQ ID NO: 683809 - RNA, 19 nt, Artificial Sequence
  Description of Artificial Sequence: Synthetic oligonucleotide
cuaccuccaugcucgcugu

SEQ ID NO: 683810 - RNA, 19 nt, Artificial Sequence
  Description of Artificial Sequence: Synthetic oligonucleotide
gccccaaucucagccugag

SEQ ID NO: 683811 - RNA, 19 nt, Artificial Sequence
  Description of Artificial Sequence: Synthetic oligonucleotide
cacucuccacuucuugccu

SEQ ID NO: 683812 - RNA, 19 nt, Artificial Sequence
  Description of Artificial Sequence: Synthetic oligonucleotide
cccaucaccugaacuuuga

SEQ ID NO: 683813 - RNA, 19 nt, Artificial Sequence
  Description of Artificial Sequence: Synthetic oligonucleotide
gguuggcacuuuucccauc

SEQ ID NO: 683814 - RNA, 19 nt, Artificial Sequence
  Description of Artificial Sequence: Synthetic oligonucleotide
ggaaagccuacuacuuugu

SEQ ID NO: 683815 - RNA, 19 nt, Artificial Sequence
  Description of Artificial Sequence: Synthetic oligonucleotide
gcugucccgccccaaucuc

SEQ ID NO: 683816 - RNA, 19 nt, Artificial Sequence
  Description of Artificial Sequence: Synthetic oligonucleotide
cacgaacuguggugcagcu

SEQ ID NO: 683817 - RNA, 19 nt, Artificial Sequence
  Description of Artificial Sequence: Synthetic oligonucleotide
ucucagccugagguauauu

SEQ ID NO: 683818 - RNA, 19 nt, Artificial Sequence
  Description of Artificial Sequence: Synthetic oligonucleotide
ccacgggacuggcaagcag

SEQ ID NO: 683819 - RNA, 19 nt, Artificial Sequence
  Description of Artificial Sequence: Synthetic oligonucleotide
gacguucaucucagaagau

SEQ ID NO: 683820 - RNA, 19 nt, Artificial Sequence
  Description of Artificial Sequence: Synthetic oligonucleotide
cggguuuugcagccagagc

SEQ ID NO: 683821 - RNA, 19 nt, Artificial Sequence
  Description of Artificial Sequence: Synthetic oligonucleotide
cggagccggaacugguagg

SEQ ID NO: 683822 - RNA, 19 nt, Artificial Sequence
  Description of Artificial Sequence: Synthetic oligonucleotide
cuccgaacuggaccacucu

SEQ ID NO: 683823 - RNA, 19 nt, Artificial Sequence
  Description of Artificial Sequence: Synthetic oligonucleotide
cccaaucuccugacucauc

SEQ ID NO: 683824 - RNA, 19 nt, Artificial Sequence
  Description of Artificial Sequence: Synthetic oligonucleotide
gucggagccggaacuggua

SEQ ID NO: 683825 - RNA, 19 nt, Artificial Sequence
  Description of Artificial Sequence: Synthetic oligonucleotide
ggccucacuucucaacaau

SEQ ID NO: 683826 - RNA, 19 nt, Artificial Sequence
  Description of Artificial Sequence: Synthetic oligonucleotide
ccggaagguuauaacuucu

SEQ ID NO: 683827 - RNA, 19 nt, Artificial Sequence
  Description of Artificial Sequence: Synthetic oligonucleotide
caggccccgucuugcucca

SEQ ID NO: 683828 - RNA, 19 nt, Artificial Sequence
  Description of Artificial Sequence: Synthetic oligonucleotide
ccgccccaaucucagccug

SEQ ID NO: 683829 - RNA, 19 nt, Artificial Sequence
  Description of Artificial Sequence: Synthetic oligonucleotide
ggaccacucugagcuuuca

SEQ ID NO: 683830 - RNA, 19 nt, Artificial Sequence
  Description of Artificial Sequence: Synthetic oligonucleotide
ccacccaacccagggccug

SEQ ID NO: 683831 - RNA, 19 nt, Artificial Sequence
  Description of Artificial Sequence: Synthetic oligonucleotide
cccgccgaagauccacuga

SEQ ID NO: 683832 - RNA, 19 nt, Artificial Sequence
  Description of Artificial Sequence: Synthetic oligonucleotide
cagagucgucggagccgga

SEQ ID NO: 683833 - RNA, 19 nt, Artificial Sequence
  Description of Artificial Sequence: Synthetic oligonucleotide
ccgcauguuucugcacguc

SEQ ID NO: 683834 - RNA, 19 nt, Artificial Sequence
  Description of Artificial Sequence: Synthetic oligonucleotide
gccacgggacuggcaagca

SEQ ID NO: 683835 - RNA, 19 nt, Artificial Sequence
  Description of Artificial Sequence: Synthetic oligonucleotide
cuucucccggaagguuaua

SEQ ID NO: 683836 - RNA, 19 nt, Artificial Sequence
  Description of Artificial Sequence: Synthetic oligonucleotide
ccgcuaccuccaugcucgc

SEQ ID NO: 683837 - RNA, 19 nt, Artificial Sequence
  Description of Artificial Sequence: Synthetic oligonucleotide
gcuccgcuaccuccaugcu

SEQ ID NO: 683838 - RNA, 19 nt, Artificial Sequence
  Description of Artificial Sequence: Synthetic oligonucleotide
gccggguuuugcagccaga

SEQ ID NO: 683839 - RNA, 19 nt, Artificial Sequence
  Description of Artificial Sequence: Synthetic oligonucleotide
cuguaggaaugaggacguu

SEQ ID NO: 683840 - RNA, 19 nt, Artificial Sequence
  Description of Artificial Sequence: Synthetic oligonucleotide
ccgucuccauacagaugua

SEQ ID NO: 683841 - RNA, 19 nt, Artificial Sequence
  Description of Artificial Sequence: Synthetic oligonucleotide
cgguccggauggcaaucca

SEQ ID NO: 683842 - RNA, 19 nt, Artificial Sequence
  Description of Artificial Sequence: Synthetic oligonucleotide
gggccggguuuugcagcca

SEQ ID NO: 683843 - RNA, 19 nt, Artificial Sequence
  Description of Artificial Sequence: Synthetic oligonucleotide
cgucuccauacagauguau

SEQ ID NO: 683844 - RNA, 19 nt, Artificial Sequence
  Description of Artificial Sequence: Synthetic oligonucleotide
ccgucacuguggugaccaa

SEQ ID NO: 683845 - RNA, 19 nt, Artificial Sequence
  Description of Artificial Sequence: Synthetic oligonucleotide
cgaaagcgucagugcccca

SEQ ID NO: 683846 - RNA, 19 nt, Artificial Sequence
  Description of Artificial Sequence: Synthetic oligonucleotide
ccaugcucgcugugagauu

SEQ ID NO: 683847 - RNA, 19 nt, Artificial Sequence
  Description of Artificial Sequence: Synthetic oligonucleotide
cccaacccagggccuggau

SEQ ID NO: 683848 - RNA, 19 nt, Artificial Sequence
  Description of Artificial Sequence: Synthetic oligonucleotide
uguuaaugagauaagcagg

SEQ ID NO: 683849 - RNA, 19 nt, Artificial Sequence
  Description of Artificial Sequence: Synthetic oligonucleotide
aauauacggguccucauac

SEQ ID NO: 683850 - RNA, 19 nt, Artificial Sequence
  Description of Artificial Sequence: Synthetic oligonucleotide
aaaguaaguaauccgagca

SEQ ID NO: 683851 - RNA, 19 nt, Artificial Sequence
  Description of Artificial Sequence: Synthetic oligonucleotide
auuccuauaacauacaaaa

SEQ ID NO: 683852 - RNA, 19 nt, Artificial Sequence
  Description of Artificial Sequence: Synthetic oligonucleotide
uugaaugauauuuggagag

SEQ ID NO: 683853 - RNA, 19 nt, Artificial Sequence
  Description of Artificial Sequence: Synthetic oligonucleotide
aacaagaggcacuugaaug

SEQ ID NO: 683854 - RNA, 19 nt, Artificial Sequence
  Description of Artificial Sequence: Synthetic oligonucleotide
ugaaauucagaaaauuaug

SEQ ID NO: 683855 - RNA, 19 nt, Artificial Sequence
  Description of Artificial Sequence: Synthetic oligonucleotide
uccuauaacauacaaaauc

SEQ ID NO: 683856 - RNA, 19 nt, Artificial Sequence
  Description of Artificial Sequence: Synthetic oligonucleotide
aauaaaguaaguaauccga

SEQ ID NO: 683857 - RNA, 19 nt, Artificial Sequence
  Description of Artificial Sequence: Synthetic oligonucleotide
ugauuauuacaagugaggg

SEQ ID NO: 683858 - RNA, 19 nt, Artificial Sequence
  Description of Artificial Sequence: Synthetic oligonucleotide
aaggcuuaaauauacgggu

SEQ ID NO: 683859 - RNA, 19 nt, Artificial Sequence
  Description of Artificial Sequence: Synthetic oligonucleotide
caaaucaacacggagacgg

SEQ ID NO: 683860 - RNA, 19 nt, Artificial Sequence
  Description of Artificial Sequence: Synthetic oligonucleotide
aauacagaccugucgcggc

SEQ ID NO: 683861 - RNA, 19 nt, Artificial Sequence
  Description of Artificial Sequence: Synthetic oligonucleotide
uuaucugaguccaaaacca

SEQ ID NO: 683862 - RNA, 19 nt, Artificial Sequence
  Description of Artificial Sequence: Synthetic oligonucleotide
gauuauuacaagugagggg

SEQ ID NO: 683863 - RNA, 19 nt, Artificial Sequence
  Description of Artificial Sequence: Synthetic oligonucleotide
cagaaaauuaugcaaacag

SEQ ID NO: 683864 - RNA, 19 nt, Artificial Sequence
  Description of Artificial Sequence: Synthetic oligonucleotide
cuguuaaugagauaagcag

SEQ ID NO: 683865 - RNA, 19 nt, Artificial Sequence
  Description of Artificial Sequence: Synthetic oligonucleotide
ucuguaccaggaaacagcg

SEQ ID NO: 683866 - RNA, 19 nt, Artificial Sequence
  Description of Artificial Sequence: Synthetic oligonucleotide
acacuacacgcauacaugc

SEQ ID NO: 683867 - RNA, 19 nt, Artificial Sequence
  Description of Artificial Sequence: Synthetic oligonucleotide
aaacacguccaacagaccu

SEQ ID NO: 683868 - RNA, 19 nt, Artificial Sequence
  Description of Artificial Sequence: Synthetic oligonucleotide
augauauuuggagaguucc

SEQ ID NO: 683869 - RNA, 19 nt, Artificial Sequence
  Description of Artificial Sequence: Synthetic oligonucleotide
ucuaaggauuccuauaaca

SEQ ID NO: 683870 - RNA, 19 nt, Artificial Sequence
  Description of Artificial Sequence: Synthetic oligonucleotide
cugauuauuacaagugagg

SEQ ID NO: 683871 - RNA, 19 nt, Artificial Sequence
  Description of Artificial Sequence: Synthetic oligonucleotide
guuaaugagauaagcaggg

SEQ ID NO: 683872 - RNA, 19 nt, Artificial Sequence
  Description of Artificial Sequence: Synthetic oligonucleotide
guaagggucagccacaggc

SEQ ID NO: 683873 - RNA, 19 nt, Artificial Sequence
  Description of Artificial Sequence: Synthetic oligonucleotide
agcauuucgcuguggaugc

SEQ ID NO: 683874 - RNA, 19 nt, Artificial Sequence
  Description of Artificial Sequence: Synthetic oligonucleotide
agagaaguggggucgacac

SEQ ID NO: 683875 - RNA, 19 nt, Artificial Sequence
  Description of Artificial Sequence: Synthetic oligonucleotide
auguauauacuucagcccu

SEQ ID NO: 683876 - RNA, 19 nt, Artificial Sequence
  Description of Artificial Sequence: Synthetic oligonucleotide
uaaaguaaguaauccgagc

SEQ ID NO: 683877 - RNA, 19 nt, Artificial Sequence
  Description of Artificial Sequence: Synthetic oligonucleotide
aaguaauccgagcagaguu

SEQ ID NO: 683878 - RNA, 19 nt, Artificial Sequence
  Description of Artificial Sequence: Synthetic oligonucleotide
uucuuaacaacccaauuuu

SEQ ID NO: 683879 - RNA, 19 nt, Artificial Sequence
  Description of Artificial Sequence: Synthetic oligonucleotide
cuauaacauacaaaauccc

SEQ ID NO: 683880 - RNA, 19 nt, Artificial Sequence
  Description of Artificial Sequence: Synthetic oligonucleotide
ucuuaucugaguccaaaac

SEQ ID NO: 683881 - RNA, 19 nt, Artificial Sequence
  Description of Artificial Sequence: Synthetic oligonucleotide
uucguucacagcuagauua

SEQ ID NO: 683882 - RNA, 19 nt, Artificial Sequence
  Description of Artificial Sequence: Synthetic oligonucleotide
ugacacuucacgauguugu

SEQ ID NO: 683883 - RNA, 19 nt, Artificial Sequence
  Description of Artificial Sequence: Synthetic oligonucleotide
uuuaguuggaaaccacaca

SEQ ID NO: 683884 - RNA, 19 nt, Artificial Sequence
  Description of Artificial Sequence: Synthetic oligonucleotide
gagacggagaaccagucag

SEQ ID NO: 683885 - RNA, 19 nt, Artificial Sequence
  Description of Artificial Sequence: Synthetic oligonucleotide
uguaccaggaaacagcguu

SEQ ID NO: 683886 - RNA, 19 nt, Artificial Sequence
  Description of Artificial Sequence: Synthetic oligonucleotide
aguuggaaaccacacacug

SEQ ID NO: 683887 - RNA, 19 nt, Artificial Sequence
  Description of Artificial Sequence: Synthetic oligonucleotide
auuuuaaccagugguauug

SEQ ID NO: 683888 - RNA, 19 nt, Artificial Sequence
  Description of Artificial Sequence: Synthetic oligonucleotide
aaugauauuuggagaguuc

SEQ ID NO: 683889 - RNA, 19 nt, Artificial Sequence
  Description of Artificial Sequence: Synthetic oligonucleotide
guuaauguggucuguacca

SEQ ID NO: 683890 - RNA, 19 nt, Artificial Sequence
  Description of Artificial Sequence: Synthetic oligonucleotide
gacauccuauggcauaugg

SEQ ID NO: 683891 - RNA, 19 nt, Artificial Sequence
  Description of Artificial Sequence: Synthetic oligonucleotide
ucuuaacaacccaauuuug

SEQ ID NO: 683892 - RNA, 19 nt, Artificial Sequence
  Description of Artificial Sequence: Synthetic oligonucleotide
acgcauuaucugcugaagc

SEQ ID NO: 683893 - RNA, 19 nt, Artificial Sequence
  Description of Artificial Sequence: Synthetic oligonucleotide
guaaacacguccaacagac

SEQ ID NO: 683894 - RNA, 19 nt, Artificial Sequence
  Description of Artificial Sequence: Synthetic oligonucleotide
ucuuccggucaacagcucg

SEQ ID NO: 683895 - RNA, 19 nt, Artificial Sequence
  Description of Artificial Sequence: Synthetic oligonucleotide
acaagaggcacuugaauga

SEQ ID NO: 683896 - RNA, 19 nt, Artificial Sequence
  Description of Artificial Sequence: Synthetic oligonucleotide
gaaggaaucacauucucua

SEQ ID NO: 683897 - RNA, 19 nt, Artificial Sequence
  Description of Artificial Sequence: Synthetic oligonucleotide
agacaccuugaccuaauac

SEQ ID NO: 683898 - RNA, 19 nt, Artificial Sequence
  Description of Artificial Sequence: Synthetic oligonucleotide
agugguauugucugacauc

SEQ ID NO: 683899 - RNA, 19 nt, Artificial Sequence
  Description of Artificial Sequence: Synthetic oligonucleotide
ugauauuuggagaguuccc

SEQ ID NO: 683900 - RNA, 19 nt, Artificial Sequence
  Description of Artificial Sequence: Synthetic oligonucleotide
ugauccucuuaucugaguc

SEQ ID NO: 683901 - RNA, 19 nt, Artificial Sequence
  Description of Artificial Sequence: Synthetic oligonucleotide
cacaacuucaauaaaguaa

SEQ ID NO: 683902 - RNA, 19 nt, Artificial Sequence
  Description of Artificial Sequence: Synthetic oligonucleotide
gaacugcacacugaggugg

SEQ ID NO: 683903 - RNA, 19 nt, Artificial Sequence
  Description of Artificial Sequence: Synthetic oligonucleotide
ucaucgguaagcuucugac

SEQ ID NO: 683904 - RNA, 19 nt, Artificial Sequence
  Description of Artificial Sequence: Synthetic oligonucleotide
cuaauacagaccugucgcg

SEQ ID NO: 683905 - RNA, 19 nt, Artificial Sequence
  Description of Artificial Sequence: Synthetic oligonucleotide
uaauacagaccugucgcgg

SEQ ID NO: 683906 - RNA, 19 nt, Artificial Sequence
  Description of Artificial Sequence: Synthetic oligonucleotide
gaauuggcuuuucauuucc

SEQ ID NO: 683907 - RNA, 19 nt, Artificial Sequence
  Description of Artificial Sequence: Synthetic oligonucleotide
uggagaguucccaugagaa

SEQ ID NO: 683908 - RNA, 19 nt, Artificial Sequence
  Description of Artificial Sequence: Synthetic oligonucleotide
aaggaacugaacgugguca

SEQ ID NO: 683909 - RNA, 19 nt, Artificial Sequence
  Description of Artificial Sequence: Synthetic oligonucleotide
aaauauacggguccucaua

SEQ ID NO: 683910 - RNA, 19 nt, Artificial Sequence
  Description of Artificial Sequence: Synthetic oligonucleotide
gaucugguagauaaggaac

SEQ ID NO: 683911 - RNA, 19 nt, Artificial Sequence
  Description of Artificial Sequence: Synthetic oligonucleotide
auaaaguaaguaauccgag

SEQ ID NO: 683912 - RNA, 19 nt, Artificial Sequence
  Description of Artificial Sequence: Synthetic oligonucleotide
cauccuauggcauauggga

SEQ ID NO: 683913 - RNA, 19 nt, Artificial Sequence
  Description of Artificial Sequence: Synthetic oligonucleotide
guuggcgccaauaaacacg

SEQ ID NO: 683914 - RNA, 19 nt, Artificial Sequence
  Description of Artificial Sequence: Synthetic oligonucleotide
uucaucguaggucaggcuu

SEQ ID NO: 683915 - RNA, 19 nt, Artificial Sequence
  Description of Artificial Sequence: Synthetic oligonucleotide
cacaucguugaauucuucc

SEQ ID NO: 683916 - RNA, 19 nt, Artificial Sequence
  Description of Artificial Sequence: Synthetic oligonucleotide
ggcauaugggacuacagcc

SEQ ID NO: 683917 - RNA, 19 nt, Artificial Sequence
  Description of Artificial Sequence: Synthetic oligonucleotide
uauuuggagaguucccaug

SEQ ID NO: 683918 - RNA, 19 nt, Artificial Sequence
  Description of Artificial Sequence: Synthetic oligonucleotide
uuaaugagauaagcagggg

SEQ ID NO: 683919 - RNA, 19 nt, Artificial Sequence
  Description of Artificial Sequence: Synthetic oligonucleotide
ggaaucuuucaacaagagg

SEQ ID NO: 683920 - RNA, 19 nt, Artificial Sequence
  Description of Artificial Sequence: Synthetic oligonucleotide
ucguaggucaggcuuuucc

SEQ ID NO: 683921 - RNA, 19 nt, Artificial Sequence
  Description of Artificial Sequence: Synthetic oligonucleotide
ugaccuaauacagaccugu

SEQ ID NO: 683922 - RNA, 19 nt, Artificial Sequence
  Description of Artificial Sequence: Synthetic oligonucleotide
caaaggacuggucguaagg

SEQ ID NO: 683923 - RNA, 19 nt, Artificial Sequence
  Description of Artificial Sequence: Synthetic oligonucleotide
aucucaggagcucgguacc

SEQ ID NO: 683924 - RNA, 19 nt, Artificial Sequence
  Description of Artificial Sequence: Synthetic oligonucleotide
ugcggguguaaacacgucc

SEQ ID NO: 683925 - RNA, 19 nt, Artificial Sequence
  Description of Artificial Sequence: Synthetic oligonucleotide
cuuagcugauuauuacaag

SEQ ID NO: 683926 - RNA, 19 nt, Artificial Sequence
  Description of Artificial Sequence: Synthetic oligonucleotide
auacagaccugucgcggcc

SEQ ID NO: 683927 - RNA, 19 nt, Artificial Sequence
  Description of Artificial Sequence: Synthetic oligonucleotide
agcccaacagaccaaauau

SEQ ID NO: 683928 - RNA, 19 nt, Artificial Sequence
  Description of Artificial Sequence: Synthetic oligonucleotide
uuggcgccaauaaacacgu

SEQ ID NO: 683929 - RNA, 19 nt, Artificial Sequence
  Description of Artificial Sequence: Synthetic oligonucleotide
uccuguuaaugagauaagc

SEQ ID NO: 683930 - RNA, 19 nt, Artificial Sequence
  Description of Artificial Sequence: Synthetic oligonucleotide
acagcuagauuacuaggcu

SEQ ID NO: 683931 - RNA, 19 nt, Artificial Sequence
  Description of Artificial Sequence: Synthetic oligonucleotide
agcuagauuacuaggcuuc

SEQ ID NO: 683932 - RNA, 19 nt, Artificial Sequence
  Description of Artificial Sequence: Synthetic oligonucleotide
accaaauauccacugucug

SEQ ID NO: 683933 - RNA, 19 nt, Artificial Sequence
  Description of Artificial Sequence: Synthetic oligonucleotide
ugagcaugcaugacccugc

SEQ ID NO: 683934 - RNA, 19 nt, Artificial Sequence
  Description of Artificial Sequence: Synthetic oligonucleotide
gugccugaaauucagaaaa

SEQ ID NO: 683935 - RNA, 19 nt, Artificial Sequence
  Description of Artificial Sequence: Synthetic oligonucleotide
uccccaaaucaacacggag

SEQ ID NO: 683936 - RNA, 19 nt, Artificial Sequence
  Description of Artificial Sequence: Synthetic oligonucleotide
auaacauacaaaaucccaa

SEQ ID NO: 683937 - RNA, 19 nt, Artificial Sequence
  Description of Artificial Sequence: Synthetic oligonucleotide
aaucaacacggagacggag

SEQ ID NO: 683938 - RNA, 19 nt, Artificial Sequence
  Description of Artificial Sequence: Synthetic oligonucleotide
uaugucagcugaauguaua

SEQ ID NO: 683939 - RNA, 19 nt, Artificial Sequence
  Description of Artificial Sequence: Synthetic oligonucleotide
ugauuucuccccaaaucaa

SEQ ID NO: 683940 - RNA, 19 nt, Artificial Sequence
  Description of Artificial Sequence: Synthetic oligonucleotide
uuaauguggucuguaccag

SEQ ID NO: 683941 - RNA, 19 nt, Artificial Sequence
  Description of Artificial Sequence: Synthetic oligonucleotide
uuuuccuaaacuggugaca

SEQ ID NO: 683942 - RNA, 19 nt, Artificial Sequence
  Description of Artificial Sequence: Synthetic oligonucleotide
aguaaguaauccgagcaga

SEQ ID NO: 683943 - RNA, 19 nt, Artificial Sequence
  Description of Artificial Sequence: Synthetic oligonucleotide
uccuauggcauaugggacu

SEQ ID NO: 683944 - RNA, 19 nt, Artificial Sequence
  Description of Artificial Sequence: Synthetic oligonucleotide
gcaaaguucaucuucggca

SEQ ID NO: 683945 - RNA, 19 nt, Artificial Sequence
  Description of Artificial Sequence: Synthetic oligonucleotide
cuuuuccuaaacuggugac

SEQ ID NO: 683946 - RNA, 19 nt, Artificial Sequence
  Description of Artificial Sequence: Synthetic oligonucleotide
ccacucaucuauaaggagg

SEQ ID NO: 683947 - RNA, 19 nt, Artificial Sequence
  Description of Artificial Sequence: Synthetic oligonucleotide
uuccuuagcugauuauuac

SEQ ID NO: 683948 - RNA, 19 nt, Artificial Sequence
  Description of Artificial Sequence: Synthetic oligonucleotide
cacguagccugucauuucg

SEQ ID NO: 683949 - RNA, 19 nt, Artificial Sequence
  Description of Artificial Sequence: Synthetic oligonucleotide
uccgagcagaguuuaguug

SEQ ID NO: 683950 - RNA, 19 nt, Artificial Sequence
  Description of Artificial Sequence: Synthetic oligonucleotide
ugacccugcacugauugag

SEQ ID NO: 683951 - RNA, 19 nt, Artificial Sequence
  Description of Artificial Sequence: Synthetic oligonucleotide
auaaacacguuugcaaagu

SEQ ID NO: 683952 - RNA, 19 nt, Artificial Sequence
  Description of Artificial Sequence: Synthetic oligonucleotide
agucccggccucaugagcc

SEQ ID NO: 683953 - RNA, 19 nt, Artificial Sequence
  Description of Artificial Sequence: Synthetic oligonucleotide
aauccgagcagaguuuagu

SEQ ID NO: 683954 - RNA, 19 nt, Artificial Sequence
  Description of Artificial Sequence: Synthetic oligonucleotide
guuuaguuggaaaccacac

SEQ ID NO: 683955 - RNA, 19 nt, Artificial Sequence
  Description of Artificial Sequence: Synthetic oligonucleotide
agaguuuaguuggaaacca

SEQ ID NO: 683956 - RNA, 19 nt, Artificial Sequence
  Description of Artificial Sequence: Synthetic oligonucleotide
uguauauacuucagcccuc

SEQ ID NO: 683957 - RNA, 19 nt, Artificial Sequence
  Description of Artificial Sequence: Synthetic oligonucleotide
uaugggacuacagccaagu

SEQ ID NO: 683958 - RNA, 19 nt, Artificial Sequence
  Description of Artificial Sequence: Synthetic oligonucleotide
gguuaauguggucuguacc

SEQ ID NO: 683959 - RNA, 19 nt, Artificial Sequence
  Description of Artificial Sequence: Synthetic oligonucleotide
cuugaccuaauacagaccu

SEQ ID NO: 683960 - RNA, 19 nt, Artificial Sequence
  Description of Artificial Sequence: Synthetic oligonucleotide
acaaaacagcaguucccuc

SEQ ID NO: 683961 - RNA, 19 nt, Artificial Sequence
  Description of Artificial Sequence: Synthetic oligonucleotide
cacuucacgauguuguuca

SEQ ID NO: 683962 - RNA, 19 nt, Artificial Sequence
  Description of Artificial Sequence: Synthetic oligonucleotide
aucuuucaacaagaggcac

SEQ ID NO: 683963 - RNA, 19 nt, Artificial Sequence
  Description of Artificial Sequence: Synthetic oligonucleotide
acagaccuaugacauucuc

SEQ ID NO: 683964 - RNA, 19 nt, Artificial Sequence
  Description of Artificial Sequence: Synthetic oligonucleotide
cuuccggucaacagcucgg

SEQ ID NO: 683965 - RNA, 19 nt, Artificial Sequence
  Description of Artificial Sequence: Synthetic oligonucleotide
auaaggaggucccugcuuu

SEQ ID NO: 683966 - RNA, 19 nt, Artificial Sequence
  Description of Artificial Sequence: Synthetic oligonucleotide
uaguuggaaaccacacacu

SEQ ID NO: 683967 - RNA, 19 nt, Artificial Sequence
  Description of Artificial Sequence: Synthetic oligonucleotide
uuaggagaggccucuuuuc

SEQ ID NO: 683968 - RNA, 19 nt, Artificial Sequence
  Description of Artificial Sequence: Synthetic oligonucleotide
uuccuauaacauacaaaau

SEQ ID NO: 683969 - RNA, 19 nt, Artificial Sequence
  Description of Artificial Sequence: Synthetic oligonucleotide
uaaauauacggguccucau

SEQ ID NO: 683970 - RNA, 19 nt, Artificial Sequence
  Description of Artificial Sequence: Synthetic oligonucleotide
augaugcagcccaacagac

SEQ ID NO: 683971 - RNA, 19 nt, Artificial Sequence
  Description of Artificial Sequence: Synthetic oligonucleotide
accuugcggguguaaacac

SEQ ID NO: 683972 - RNA, 19 nt, Artificial Sequence
  Description of Artificial Sequence: Synthetic oligonucleotide
ccgagcagaguuuaguugg

SEQ ID NO: 683973 - RNA, 19 nt, Artificial Sequence
  Description of Artificial Sequence: Synthetic oligonucleotide
uaauuugcccugucucccc

SEQ ID NO: 683974 - RNA, 19 nt, Artificial Sequence
  Description of Artificial Sequence: Synthetic oligonucleotide
ucguucacagcuagauuac

SEQ ID NO: 683975 - RNA, 19 nt, Artificial Sequence
  Description of Artificial Sequence: Synthetic oligonucleotide
ucugacauccuauggcaua

SEQ ID NO: 683976 - RNA, 19 nt, Artificial Sequence
  Description of Artificial Sequence: Synthetic oligonucleotide
gcugauuauuacaagugag

SEQ ID NO: 683977 - RNA, 19 nt, Artificial Sequence
  Description of Artificial Sequence: Synthetic oligonucleotide
gauuccuauaacauacaaa

SEQ ID NO: 683978 - RNA, 19 nt, Artificial Sequence
  Description of Artificial Sequence: Synthetic oligonucleotide
cuuacuacacaaaaggcuu

SEQ ID NO: 683979 - RNA, 19 nt, Artificial Sequence
  Description of Artificial Sequence: Synthetic oligonucleotide
agugaggggagcaugauuu

SEQ ID NO: 683980 - RNA, 19 nt, Artificial Sequence
  Description of Artificial Sequence: Synthetic oligonucleotide
uaaacacguccaacagacc

SEQ ID NO: 683981 - RNA, 19 nt, Artificial Sequence
  Description of Artificial Sequence: Synthetic oligonucleotide
cagcauuucgcuguggaug

SEQ ID NO: 683982 - RNA, 19 nt, Artificial Sequence
  Description of Artificial Sequence: Synthetic oligonucleotide
uaaguaauccgagcagagu

SEQ ID NO: 683983 - RNA, 19 nt, Artificial Sequence
  Description of Artificial Sequence: Synthetic oligonucleotide
uugaccuaauacagaccug

SEQ ID NO: 683984 - RNA, 19 nt, Artificial Sequence
  Description of Artificial Sequence: Synthetic oligonucleotide
uuacuacacaaaaggcuua

SEQ ID NO: 683985 - RNA, 19 nt, Artificial Sequence
  Description of Artificial Sequence: Synthetic oligonucleotide
uacaagugaggggagcaug

SEQ ID NO: 683986 - RNA, 19 nt, Artificial Sequence
  Description of Artificial Sequence: Synthetic oligonucleotide
uaguuucuugccucauggc

SEQ ID NO: 683987 - RNA, 19 nt, Artificial Sequence
  Description of Artificial Sequence: Synthetic oligonucleotide
uaauccgagcagaguuuag

SEQ ID NO: 683988 - RNA, 19 nt, Artificial Sequence
  Description of Artificial Sequence: Synthetic oligonucleotide
gauagagaaacugggagau

SEQ ID NO: 683989 - RNA, 19 nt, Artificial Sequence
  Description of Artificial Sequence: Synthetic oligonucleotide
gacgcauuaucugcugaag

SEQ ID NO: 683990 - RNA, 19 nt, Artificial Sequence
  Description of Artificial Sequence: Synthetic oligonucleotide
aggcuuaaauauacggguc

SEQ ID NO: 683991 - RNA, 19 nt, Artificial Sequence
  Description of Artificial Sequence: Synthetic oligonucleotide
ggucguaagggucagccac

SEQ ID NO: 683992 - RNA, 19 nt, Artificial Sequence
  Description of Artificial Sequence: Synthetic oligonucleotide
aucuauaaggaggucccug

SEQ ID NO: 683993 - RNA, 19 nt, Artificial Sequence
  Description of Artificial Sequence: Synthetic oligonucleotide
uccaguuaagcaugaucuc

SEQ ID NO: 683994 - RNA, 19 nt, Artificial Sequence
  Description of Artificial Sequence: Synthetic oligonucleotide
aucuucggcaucugggcca

SEQ ID NO: 683995 - RNA, 19 nt, Artificial Sequence
  Description of Artificial Sequence: Synthetic oligonucleotide
guaggucaggcuuuuccac

SEQ ID NO: 683996 - RNA, 19 nt, Artificial Sequence
  Description of Artificial Sequence: Synthetic oligonucleotide
cuacacgcauacaugcauc

SEQ ID NO: 683997 - RNA, 19 nt, Artificial Sequence
  Description of Artificial Sequence: Synthetic oligonucleotide
gucugguuguagugcaucc

SEQ ID NO: 683998 - RNA, 19 nt, Artificial Sequence
  Description of Artificial Sequence: Synthetic oligonucleotide
gacggagaaccagucagug

SEQ ID NO: 683999 - RNA, 19 nt, Artificial Sequence
  Description of Artificial Sequence: Synthetic oligonucleotide
ugcaugacccugcacugau

SEQ ID NO: 684000 - RNA, 19 nt, Artificial Sequence
  Description of Artificial Sequence: Synthetic oligonucleotide
augucagcugaauguauau

SEQ ID NO: 684001 - RNA, 19 nt, Artificial Sequence
  Description of Artificial Sequence: Synthetic oligonucleotide
caucuucggcaucugggcc

SEQ ID NO: 684002 - RNA, 19 nt, Artificial Sequence
  Description of Artificial Sequence: Synthetic oligonucleotide
acccugcacugauugagag

SEQ ID NO: 684003 - RNA, 19 nt, Artificial Sequence
  Description of Artificial Sequence: Synthetic oligonucleotide
gaaacagcguucuuccggu

SEQ ID NO: 684004 - RNA, 19 nt, Artificial Sequence
  Description of Artificial Sequence: Synthetic oligonucleotide
ucaucguaggucaggcuuu

SEQ ID NO: 684005 - RNA, 19 nt, Artificial Sequence
  Description of Artificial Sequence: Synthetic oligonucleotide
uucuucaccccugaggauu

SEQ ID NO: 684006 - RNA, 19 nt, Artificial Sequence
  Description of Artificial Sequence: Synthetic oligonucleotide
aaggggcgguggcacaaag

SEQ ID NO: 684007 - RNA, 19 nt, Artificial Sequence
  Description of Artificial Sequence: Synthetic oligonucleotide
ucugguuguagugcaucca

SEQ ID NO: 684008 - RNA, 19 nt, Artificial Sequence
  Description of Artificial Sequence: Synthetic oligonucleotide
auaaggaacugaacguggu

SEQ ID NO: 684009 - RNA, 19 nt, Artificial Sequence
  Description of Artificial Sequence: Synthetic oligonucleotide
uuucaaaggacuggucgua

SEQ ID NO: 684010 - RNA, 19 nt, Artificial Sequence
  Description of Artificial Sequence: Synthetic oligonucleotide
cuuaaauauacggguccuc

SEQ ID NO: 684011 - RNA, 19 nt, Artificial Sequence
  Description of Artificial Sequence: Synthetic oligonucleotide
agacgcauuaucugcugaa

SEQ ID NO: 684012 - RNA, 19 nt, Artificial Sequence
  Description of Artificial Sequence: Synthetic oligonucleotide
acugaacguggucaucggu

SEQ ID NO: 684013 - RNA, 19 nt, Artificial Sequence
  Description of Artificial Sequence: Synthetic oligonucleotide
ucgucaucagugugccgag

SEQ ID NO: 684014 - RNA, 19 nt, Artificial Sequence
  Description of Artificial Sequence: Synthetic oligonucleotide
uucccucauucccuugucu

SEQ ID NO: 684015 - RNA, 19 nt, Artificial Sequence
  Description of Artificial Sequence: Synthetic oligonucleotide
ccaauaaacacguuugcaa

SEQ ID NO: 684016 - RNA, 19 nt, Artificial Sequence
  Description of Artificial Sequence: Synthetic oligonucleotide
ugacuucaucguaggucag

SEQ ID NO: 684017 - RNA, 19 nt, Artificial Sequence
  Description of Artificial Sequence: Synthetic oligonucleotide
gaacguggucaucgguaag

SEQ ID NO: 684018 - RNA, 19 nt, Artificial Sequence
  Description of Artificial Sequence: Synthetic oligonucleotide
gaggacccuucugagcacg

SEQ ID NO: 684019 - RNA, 19 nt, Artificial Sequence
  Description of Artificial Sequence: Synthetic oligonucleotide
gggaggacccuucugagca

SEQ ID NO: 684020 - RNA, 19 nt, Artificial Sequence
  Description of Artificial Sequence: Synthetic oligonucleotide
ucuuaggagaggccucuuu

SEQ ID NO: 684021 - RNA, 19 nt, Artificial Sequence
  Description of Artificial Sequence: Synthetic oligonucleotide
aggaacugaacguggucau

SEQ ID NO: 684022 - RNA, 19 nt, Artificial Sequence
  Description of Artificial Sequence: Synthetic oligonucleotide
aaaucaacacggagacgga

SEQ ID NO: 684023 - RNA, 19 nt, Artificial Sequence
  Description of Artificial Sequence: Synthetic oligonucleotide
gaccuugcggguguaaaca

SEQ ID NO: 684024 - RNA, 19 nt, Artificial Sequence
  Description of Artificial Sequence: Synthetic oligonucleotide
uuucgucaucagugugccg

SEQ ID NO: 684025 - RNA, 19 nt, Artificial Sequence
  Description of Artificial Sequence: Synthetic oligonucleotide
gggucgacacagcagaaac

SEQ ID NO: 684026 - RNA, 19 nt, Artificial Sequence
  Description of Artificial Sequence: Synthetic oligonucleotide
cacguuugcaaaguucauc

SEQ ID NO: 684027 - RNA, 19 nt, Artificial Sequence
  Description of Artificial Sequence: Synthetic oligonucleotide
ucccucauucccuugucuu

SEQ ID NO: 684028 - RNA, 19 nt, Artificial Sequence
  Description of Artificial Sequence: Synthetic oligonucleotide
aucaacacggagacggaga

SEQ ID NO: 684029 - RNA, 19 nt, Artificial Sequence
  Description of Artificial Sequence: Synthetic oligonucleotide
uuccccucacagagaagug

SEQ ID NO: 684030 - RNA, 19 nt, Artificial Sequence
  Description of Artificial Sequence: Synthetic oligonucleotide
uacaugcaucccuuuccac

SEQ ID NO: 684031 - RNA, 19 nt, Artificial Sequence
  Description of Artificial Sequence: Synthetic oligonucleotide
ccugucgcggccaacacug

SEQ ID NO: 684032 - RNA, 19 nt, Artificial Sequence
  Description of Artificial Sequence: Synthetic oligonucleotide
auccgagcagaguuuaguu

SEQ ID NO: 684033 - RNA, 19 nt, Artificial Sequence
  Description of Artificial Sequence: Synthetic oligonucleotide
ucguaagggucagccacag

SEQ ID NO: 684034 - RNA, 19 nt, Artificial Sequence
  Description of Artificial Sequence: Synthetic oligonucleotide
acccuucugagcacgggcg

SEQ ID NO: 684035 - RNA, 19 nt, Artificial Sequence
  Description of Artificial Sequence: Synthetic oligonucleotide
cacugauugagagugcaga

SEQ ID NO: 684036 - RNA, 19 nt, Artificial Sequence
  Description of Artificial Sequence: Synthetic oligonucleotide
uucaaaggacuggucguaa

SEQ ID NO: 684037 - RNA, 19 nt, Artificial Sequence
  Description of Artificial Sequence: Synthetic oligonucleotide
acaagugaggggagcauga

SEQ ID NO: 684038 - RNA, 19 nt, Artificial Sequence
  Description of Artificial Sequence: Synthetic oligonucleotide
cugaacguggucaucggua

SEQ ID NO: 684039 - RNA, 19 nt, Artificial Sequence
  Description of Artificial Sequence: Synthetic oligonucleotide
cacucaucuauaaggaggu

SEQ ID NO: 684040 - RNA, 19 nt, Artificial Sequence
  Description of Artificial Sequence: Synthetic oligonucleotide
acggagaaccagucagugu

SEQ ID NO: 684041 - RNA, 19 nt, Artificial Sequence
  Description of Artificial Sequence: Synthetic oligonucleotide
uccggucaacagcucggcc

SEQ ID NO: 684042 - RNA, 19 nt, Artificial Sequence
  Description of Artificial Sequence: Synthetic oligonucleotide
cugacacuucacgauguug

SEQ ID NO: 684043 - RNA, 19 nt, Artificial Sequence
  Description of Artificial Sequence: Synthetic oligonucleotide
gucaucgguaagcuucuga

SEQ ID NO: 684044 - RNA, 19 nt, Artificial Sequence
  Description of Artificial Sequence: Synthetic oligonucleotide
cauaugggacuacagccaa

SEQ ID NO: 684045 - RNA, 19 nt, Artificial Sequence
  Description of Artificial Sequence: Synthetic oligonucleotide
uuccuaaacuggugacaac

SEQ ID NO: 684046 - RNA, 19 nt, Artificial Sequence
  Description of Artificial Sequence: Synthetic oligonucleotide
uggucguaagggucagcca

SEQ ID NO: 684047 - RNA, 19 nt, Artificial Sequence
  Description of Artificial Sequence: Synthetic oligonucleotide
aacacguccaacagaccua

SEQ ID NO: 684048 - RNA, 19 nt, Artificial Sequence
  Description of Artificial Sequence: Synthetic oligonucleotide
caucgguaagcuucugaca

SEQ ID NO: 684049 - RNA, 19 nt, Artificial Sequence
  Description of Artificial Sequence: Synthetic oligonucleotide
cacagucuucguucacagc

SEQ ID NO: 684050 - RNA, 19 nt, Artificial Sequence
  Description of Artificial Sequence: Synthetic oligonucleotide
uucuuggucaaggggcggu

SEQ ID NO: 684051 - RNA, 19 nt, Artificial Sequence
  Description of Artificial Sequence: Synthetic oligonucleotide
agcaguucccucauucccu

SEQ ID NO: 684052 - RNA, 19 nt, Artificial Sequence
  Description of Artificial Sequence: Synthetic oligonucleotide
auagagaaacugggagaug

SEQ ID NO: 684053 - RNA, 19 nt, Artificial Sequence
  Description of Artificial Sequence: Synthetic oligonucleotide
ugguauugucugacauccu

SEQ ID NO: 684054 - RNA, 19 nt, Artificial Sequence
  Description of Artificial Sequence: Synthetic oligonucleotide
ggagcaugauuuccagagc

SEQ ID NO: 684055 - RNA, 19 nt, Artificial Sequence
  Description of Artificial Sequence: Synthetic oligonucleotide
gaaugauauuuggagaguu

SEQ ID NO: 684056 - RNA, 19 nt, Artificial Sequence
  Description of Artificial Sequence: Synthetic oligonucleotide
cauaaccagccauggccuc

SEQ ID NO: 684057 - RNA, 19 nt, Artificial Sequence
  Description of Artificial Sequence: Synthetic oligonucleotide
cuugcggguguaaacacgu

SEQ ID NO: 684058 - RNA, 19 nt, Artificial Sequence
  Description of Artificial Sequence: Synthetic oligonucleotide
gcgccaauaaacacguuug

SEQ ID NO: 684059 - RNA, 19 nt, Artificial Sequence
  Description of Artificial Sequence: Synthetic oligonucleotide
auccuguuaaugagauaag

SEQ ID NO: 684060 - RNA, 19 nt, Artificial Sequence
  Description of Artificial Sequence: Synthetic oligonucleotide
cgucagacgcauuaucugc

SEQ ID NO: 684061 - RNA, 19 nt, Artificial Sequence
  Description of Artificial Sequence: Synthetic oligonucleotide
acgauccagggucuuuccu

SEQ ID NO: 684062 - RNA, 19 nt, Artificial Sequence
  Description of Artificial Sequence: Synthetic oligonucleotide
gccucuuaccacagcaugg

SEQ ID NO: 684063 - RNA, 19 nt, Artificial Sequence
  Description of Artificial Sequence: Synthetic oligonucleotide
ccuuagcugauuauuacaa

SEQ ID NO: 684064 - RNA, 19 nt, Artificial Sequence
  Description of Artificial Sequence: Synthetic oligonucleotide
cccaagacaaaauugauuu

SEQ ID NO: 684065 - RNA, 19 nt, Artificial Sequence
  Description of Artificial Sequence: Synthetic oligonucleotide
aguaauccgagcagaguuu

SEQ ID NO: 684066 - RNA, 19 nt, Artificial Sequence
  Description of Artificial Sequence: Synthetic oligonucleotide
ccuuacuacacaaaaggcu

SEQ ID NO: 684067 - RNA, 19 nt, Artificial Sequence
  Description of Artificial Sequence: Synthetic oligonucleotide
uucaccccugaggauuuca

SEQ ID NO: 684068 - RNA, 19 nt, Artificial Sequence
  Description of Artificial Sequence: Synthetic oligonucleotide
ucgcggccaacacuggaau

SEQ ID NO: 684069 - RNA, 19 nt, Artificial Sequence
  Description of Artificial Sequence: Synthetic oligonucleotide
cuuccccucacagagaagu

SEQ ID NO: 684070 - RNA, 19 nt, Artificial Sequence
  Description of Artificial Sequence: Synthetic oligonucleotide
ucggcaucugggccaggga

SEQ ID NO: 684071 - RNA, 19 nt, Artificial Sequence
  Description of Artificial Sequence: Synthetic oligonucleotide
ugcagcccaacagaccaaa

SEQ ID NO: 684072 - RNA, 19 nt, Artificial Sequence
  Description of Artificial Sequence: Synthetic oligonucleotide
ccuugcggguguaaacacg

SEQ ID NO: 684073 - RNA, 19 nt, Artificial Sequence
  Description of Artificial Sequence: Synthetic oligonucleotide
ccaugagaaggccuucccc

SEQ ID NO: 684074 - RNA, 19 nt, Artificial Sequence
  Description of Artificial Sequence: Synthetic oligonucleotide
acuggucguaagggucagc

SEQ ID NO: 684075 - RNA, 19 nt, Artificial Sequence
  Description of Artificial Sequence: Synthetic oligonucleotide
agucagugucaagcugccg

SEQ ID NO: 684076 - RNA, 19 nt, Artificial Sequence
  Description of Artificial Sequence: Synthetic oligonucleotide
auaugggacuacagccaag

SEQ ID NO: 684077 - RNA, 19 nt, Artificial Sequence
  Description of Artificial Sequence: Synthetic oligonucleotide
aucccaagacaaaauugau

SEQ ID NO: 684078 - RNA, 19 nt, Artificial Sequence
  Description of Artificial Sequence: Synthetic oligonucleotide
uuuccagagcuggggacau

SEQ ID NO: 684079 - RNA, 19 nt, Artificial Sequence
  Description of Artificial Sequence: Synthetic oligonucleotide
cccucggaggaucugguag

SEQ ID NO: 684080 - RNA, 19 nt, Artificial Sequence
  Description of Artificial Sequence: Synthetic oligonucleotide
cucuuaccacagcaugguc

SEQ ID NO: 684081 - RNA, 19 nt, Artificial Sequence
  Description of Artificial Sequence: Synthetic oligonucleotide
ucaaggggcgguggcacaa

SEQ ID NO: 684082 - RNA, 19 nt, Artificial Sequence
  Description of Artificial Sequence: Synthetic oligonucleotide
gcggccaacacuggaauug

SEQ ID NO: 684083 - RNA, 19 nt, Artificial Sequence
  Description of Artificial Sequence: Synthetic oligonucleotide
gaccuaauacagaccuguc

SEQ ID NO: 684084 - RNA, 19 nt, Artificial Sequence
  Description of Artificial Sequence: Synthetic oligonucleotide
cagcauggucacaugugca

SEQ ID NO: 684085 - RNA, 19 nt, Artificial Sequence
  Description of Artificial Sequence: Synthetic oligonucleotide
ugacauccuauggcauaug

SEQ ID NO: 684086 - RNA, 19 nt, Artificial Sequence
  Description of Artificial Sequence: Synthetic oligonucleotide
gacuggucguaagggucag

SEQ ID NO: 684087 - RNA, 19 nt, Artificial Sequence
  Description of Artificial Sequence: Synthetic oligonucleotide
gccaauaaacacguuugca

SEQ ID NO: 684088 - RNA, 19 nt, Artificial Sequence
  Description of Artificial Sequence: Synthetic oligonucleotide
guaauccgagcagaguuua

SEQ ID NO: 684089 - RNA, 19 nt, Artificial Sequence
  Description of Artificial Sequence: Synthetic oligonucleotide
ggaccuugcggguguaaac

SEQ ID NO: 684090 - RNA, 19 nt, Artificial Sequence
  Description of Artificial Sequence: Synthetic oligonucleotide
gcauaugggacuacagcca

SEQ ID NO: 684091 - RNA, 19 nt, Artificial Sequence
  Description of Artificial Sequence: Synthetic oligonucleotide
agacggagaaccagucagu

SEQ ID NO: 684092 - RNA, 19 nt, Artificial Sequence
  Description of Artificial Sequence: Synthetic oligonucleotide
gcguucuuccggucaacag

SEQ ID NO: 684093 - RNA, 19 nt, Artificial Sequence
  Description of Artificial Sequence: Synthetic oligonucleotide
ggucgacacagcagaaacc

SEQ ID NO: 684094 - RNA, 19 nt, Artificial Sequence
  Description of Artificial Sequence: Synthetic oligonucleotide
gagcaugcaugacccugca

SEQ ID NO: 684095 - RNA, 19 nt, Artificial Sequence
  Description of Artificial Sequence: Synthetic oligonucleotide
uugcggguguaaacacguc

SEQ ID NO: 684096 - RNA, 19 nt, Artificial Sequence
  Description of Artificial Sequence: Synthetic oligonucleotide
ccgucagacgcauuaucug

SEQ ID NO: 684097 - RNA, 19 nt, Artificial Sequence
  Description of Artificial Sequence: Synthetic oligonucleotide
aggcaugugcaagggcuug

SEQ ID NO: 684098 - RNA, 19 nt, Artificial Sequence
  Description of Artificial Sequence: Synthetic oligonucleotide
cagacgcauuaucugcuga

SEQ ID NO: 684099 - RNA, 19 nt, Artificial Sequence
  Description of Artificial Sequence: Synthetic oligonucleotide
cuuucaacaagaggcacuu

SEQ ID NO: 684100 - RNA, 19 nt, Artificial Sequence
  Description of Artificial Sequence: Synthetic oligonucleotide
ggagacggagaaccaguca

SEQ ID NO: 684101 - RNA, 19 nt, Artificial Sequence
  Description of Artificial Sequence: Synthetic oligonucleotide
ggggcgguggcacaaagcu

SEQ ID NO: 684102 - RNA, 19 nt, Artificial Sequence
  Description of Artificial Sequence: Synthetic oligonucleotide
gucguaagggucagccaca

SEQ ID NO: 684103 - RNA, 19 nt, Artificial Sequence
  Description of Artificial Sequence: Synthetic oligonucleotide
ggagucccggccucaugag

SEQ ID NO: 684104 - RNA, 19 nt, Artificial Sequence
  Description of Artificial Sequence: Synthetic oligonucleotide
gcacgggcgccacuggucc

SEQ ID NO: 684105 - RNA, 19 nt, Artificial Sequence
  Description of Artificial Sequence: Synthetic oligonucleotide
gguuguagugcauccaguu

SEQ ID NO: 684106 - RNA, 19 nt, Artificial Sequence
  Description of Artificial Sequence: Synthetic oligonucleotide
cuauaaggaggucccugcu

SEQ ID NO: 684107 - RNA, 19 nt, Artificial Sequence
  Description of Artificial Sequence: Synthetic oligonucleotide
aucguaggucaggcuuuuc

SEQ ID NO: 684108 - RNA, 19 nt, Artificial Sequence
  Description of Artificial Sequence: Synthetic oligonucleotide
gccgggaggacccuucuga

SEQ ID NO: 684109 - RNA, 19 nt, Artificial Sequence
  Description of Artificial Sequence: Synthetic oligonucleotide
gcuuuucauuuccuuacua

SEQ ID NO: 684110 - RNA, 19 nt, Artificial Sequence
  Description of Artificial Sequence: Synthetic oligonucleotide
aggacccuucugagcacgg

SEQ ID NO: 684111 - RNA, 19 nt, Artificial Sequence
  Description of Artificial Sequence: Synthetic oligonucleotide
ugguccugccugguuuugu

SEQ ID NO: 684112 - RNA, 19 nt, Artificial Sequence
  Description of Artificial Sequence: Synthetic oligonucleotide
uucccgccugagcaugcau

SEQ ID NO: 684113 - RNA, 19 nt, Artificial Sequence
  Description of Artificial Sequence: Synthetic oligonucleotide
gucagacgcauuaucugcu

SEQ ID NO: 684114 - RNA, 19 nt, Artificial Sequence
  Description of Artificial Sequence: Synthetic oligonucleotide
ggcgccaauaaacacguuu

SEQ ID NO: 684115 - RNA, 19 nt, Artificial Sequence
  Description of Artificial Sequence: Synthetic oligonucleotide
cccucacagagaagugggg

SEQ ID NO: 684116 - RNA, 19 nt, Artificial Sequence
  Description of Artificial Sequence: Synthetic oligonucleotide
ccggucaacagcucggcca

SEQ ID NO: 684117 - RNA, 19 nt, Artificial Sequence
  Description of Artificial Sequence: Synthetic oligonucleotide
cgccaauaaacacguuugc

SEQ ID NO: 684118 - RNA, 19 nt, Artificial Sequence
  Description of Artificial Sequence: Synthetic oligonucleotide
cagagaaguggggucgaca

SEQ ID NO: 684119 - RNA, 19 nt, Artificial Sequence
  Description of Artificial Sequence: Synthetic oligonucleotide
ggacuggucguaaggguca

SEQ ID NO: 684120 - RNA, 19 nt, Artificial Sequence
  Description of Artificial Sequence: Synthetic oligonucleotide
gcuagauuacuaggcuuca

SEQ ID NO: 684121 - RNA, 19 nt, Artificial Sequence
  Description of Artificial Sequence: Synthetic oligonucleotide
acacguuugcaaaguucau

SEQ ID NO: 684122 - RNA, 19 nt, Artificial Sequence
  Description of Artificial Sequence: Synthetic oligonucleotide
acggguccucauacagcac

SEQ ID NO: 684123 - RNA, 19 nt, Artificial Sequence
  Description of Artificial Sequence: Synthetic oligonucleotide
uacuaggcuucaggucccu

SEQ ID NO: 684124 - RNA, 19 nt, Artificial Sequence
  Description of Artificial Sequence: Synthetic oligonucleotide
uucugagcacgggcgccac

SEQ ID NO: 684125 - RNA, 19 nt, Artificial Sequence
  Description of Artificial Sequence: Synthetic oligonucleotide
gcuuaaauauacggguccu

SEQ ID NO: 684126 - RNA, 19 nt, Artificial Sequence
  Description of Artificial Sequence: Synthetic oligonucleotide
gucaaggggcgguggcaca

SEQ ID NO: 684127 - RNA, 19 nt, Artificial Sequence
  Description of Artificial Sequence: Synthetic oligonucleotide
ggacccuucugagcacggg

SEQ ID NO: 684128 - RNA, 19 nt, Artificial Sequence
  Description of Artificial Sequence: Synthetic oligonucleotide
gacagacacuacacgcaua

SEQ ID NO: 684129 - RNA, 19 nt, Artificial Sequence
  Description of Artificial Sequence: Synthetic oligonucleotide
cagcuagauuacuaggcuu

SEQ ID NO: 684130 - RNA, 19 nt, Artificial Sequence
  Description of Artificial Sequence: Synthetic oligonucleotide
caucccuuuccaccaugaa

SEQ ID NO: 684131 - RNA, 19 nt, Artificial Sequence
  Description of Artificial Sequence: Synthetic oligonucleotide
uccccgucagacgcauuau

SEQ ID NO: 684132 - RNA, 19 nt, Artificial Sequence
  Description of Artificial Sequence: Synthetic oligonucleotide
ggaggucccugcuuucaaa

SEQ ID NO: 684133 - RNA, 19 nt, Artificial Sequence
  Description of Artificial Sequence: Synthetic oligonucleotide
cuucaucguaggucaggcu

SEQ ID NO: 684134 - RNA, 19 nt, Artificial Sequence
  Description of Artificial Sequence: Synthetic oligonucleotide
ucggaggaucugguagaua

SEQ ID NO: 684135 - RNA, 19 nt, Artificial Sequence
  Description of Artificial Sequence: Synthetic oligonucleotide
ggaggacccuucugagcac

SEQ ID NO: 684136 - RNA, 19 nt, Artificial Sequence
  Description of Artificial Sequence: Synthetic oligonucleotide
cguagccugucauuucguc

SEQ ID NO: 684137 - RNA, 19 nt, Artificial Sequence
  Description of Artificial Sequence: Synthetic oligonucleotide
cugguccugccugguuuug

SEQ ID NO: 684138 - RNA, 19 nt, Artificial Sequence
  Description of Artificial Sequence: Synthetic oligonucleotide
cagacacuacacgcauaca

SEQ ID NO: 684139 - RNA, 19 nt, Artificial Sequence
  Description of Artificial Sequence: Synthetic oligonucleotide
agcccucggaggaucuggu

SEQ ID NO: 684140 - RNA, 19 nt, Artificial Sequence
  Description of Artificial Sequence: Synthetic oligonucleotide
ccacguagccugucauuuc

SEQ ID NO: 684141 - RNA, 19 nt, Artificial Sequence
  Description of Artificial Sequence: Synthetic oligonucleotide
cccgucagacgcauuaucu

SEQ ID NO: 684142 - RNA, 19 nt, Artificial Sequence
  Description of Artificial Sequence: Synthetic oligonucleotide
cagacaccuugaccuaaua

SEQ ID NO: 684143 - RNA, 19 nt, Artificial Sequence
  Description of Artificial Sequence: Synthetic oligonucleotide
cgagccaguccaaaaucca

SEQ ID NO: 684144 - RNA, 19 nt, Artificial Sequence
  Description of Artificial Sequence: Synthetic oligonucleotide
guucaggacuccauuucuu

SEQ ID NO: 684145 - RNA, 19 nt, Artificial Sequence
  Description of Artificial Sequence: Synthetic oligonucleotide
gguaagcuucugacacuuc

SEQ ID NO: 684146 - RNA, 19 nt, Artificial Sequence
  Description of Artificial Sequence: Synthetic oligonucleotide
cagugucaagcugccggga

SEQ ID NO: 684147 - RNA, 19 nt, Artificial Sequence
  Description of Artificial Sequence: Synthetic oligonucleotide
caucuauaaggaggucccu

SEQ ID NO: 684148 - RNA, 19 nt, Artificial Sequence
  Description of Artificial Sequence: Synthetic oligonucleotide
cuccgggauacauguuccu

SEQ ID NO: 684149 - RNA, 19 nt, Artificial Sequence
  Description of Artificial Sequence: Synthetic oligonucleotide
cuucaccccugaggauuuc

SEQ ID NO: 684150 - RNA, 19 nt, Artificial Sequence
  Description of Artificial Sequence: Synthetic oligonucleotide
uguccccgucagacgcauu

SEQ ID NO: 684151 - RNA, 19 nt, Artificial Sequence
  Description of Artificial Sequence: Synthetic oligonucleotide
uggcgccaauaaacacguu

SEQ ID NO: 684152 - RNA, 19 nt, Artificial Sequence
  Description of Artificial Sequence: Synthetic oligonucleotide
ccccgucagacgcauuauc

SEQ ID NO: 684153 - RNA, 19 nt, Artificial Sequence
  Description of Artificial Sequence: Synthetic oligonucleotide
ggggucgacacagcagaaa

SEQ ID NO: 684154 - RNA, 19 nt, Artificial Sequence
  Description of Artificial Sequence: Synthetic oligonucleotide
ccuauggcauaugggacua

SEQ ID NO: 684155 - RNA, 19 nt, Artificial Sequence
  Description of Artificial Sequence: Synthetic oligonucleotide
gccacguagccugucauuu

SEQ ID NO: 684156 - RNA, 19 nt, Artificial Sequence
  Description of Artificial Sequence: Synthetic oligonucleotide
ccucacagagaaguggggu

SEQ ID NO: 684157 - RNA, 19 nt, Artificial Sequence
  Description of Artificial Sequence: Synthetic oligonucleotide
gucccggccucaugagccu

SEQ ID NO: 684158 - RNA, 19 nt, Artificial Sequence
  Description of Artificial Sequence: Synthetic oligonucleotide
gguguccccgucagacgca

SEQ ID NO: 684159 - RNA, 19 nt, Artificial Sequence
  Description of Artificial Sequence: Synthetic oligonucleotide
gcugccgggaggacccuuc

SEQ ID NO: 684160 - RNA, 19 nt, Artificial Sequence
  Description of Artificial Sequence: Synthetic oligonucleotide
gcugguuaauguggucugu

SEQ ID NO: 684161 - RNA, 19 nt, Artificial Sequence
  Description of Artificial Sequence: Synthetic oligonucleotide
caaggggcgguggcacaaa

SEQ ID NO: 684162 - RNA, 19 nt, Artificial Sequence
  Description of Artificial Sequence: Synthetic oligonucleotide
caucguaggucaggcuuuu

SEQ ID NO: 684163 - RNA, 19 nt, Artificial Sequence
  Description of Artificial Sequence: Synthetic oligonucleotide
cccugcacugauugagagu

SEQ ID NO: 684164 - RNA, 19 nt, Artificial Sequence
  Description of Artificial Sequence: Synthetic oligonucleotide
cugccgggaggacccuucu

SEQ ID NO: 684165 - RNA, 19 nt, Artificial Sequence
  Description of Artificial Sequence: Synthetic oligonucleotide
guguccccgucagacgcau

SEQ ID NO: 684166 - RNA, 19 nt, Artificial Sequence
  Description of Artificial Sequence: Synthetic oligonucleotide
ccaacagaccuaugacauu

SEQ ID NO: 684167 - RNA, 19 nt, Artificial Sequence
  Description of Artificial Sequence: Synthetic oligonucleotide
ccgccugagcaugcaugac

SEQ ID NO: 684168 - RNA, 19 nt, Artificial Sequence
  Description of Artificial Sequence: Synthetic oligonucleotide
gggcgccacugguccugcc

SEQ ID NO: 684169 - RNA, 19 nt, Artificial Sequence
  Description of Artificial Sequence: Synthetic oligonucleotide
gcccucggaggaucuggua

SEQ ID NO: 684170 - RNA, 19 nt, Artificial Sequence
  Description of Artificial Sequence: Synthetic oligonucleotide
cacgggcgccacugguccu

SEQ ID NO: 684171 - RNA, 19 nt, Artificial Sequence
  Description of Artificial Sequence: Synthetic oligonucleotide
gcauuucgcuguggaugcu

SEQ ID NO: 684172 - RNA, 19 nt, Artificial Sequence
  Description of Artificial Sequence: Synthetic oligonucleotide
cguucacagcuagauuacu

SEQ ID NO: 684173 - RNA, 19 nt, Artificial Sequence
  Description of Artificial Sequence: Synthetic oligonucleotide
cgggcgccacugguccugc

SEQ ID NO: 684174 - RNA, 19 nt, Artificial Sequence
  Description of Artificial Sequence: Synthetic oligonucleotide
cccggccucaugagccuuu

SEQ ID NO: 684175 - RNA, 19 nt, Artificial Sequence
  Description of Artificial Sequence: Synthetic oligonucleotide
aggcacauaacuuagaugc

SEQ ID NO: 684176 - RNA, 19 nt, Artificial Sequence
  Description of Artificial Sequence: Synthetic oligonucleotide
auaacuuagaugcuagagc

SEQ ID NO: 684177 - RNA, 19 nt, Artificial Sequence
  Description of Artificial Sequence: Synthetic oligonucleotide
ugugacuuaacucugggug

SEQ ID NO: 684178 - RNA, 19 nt, Artificial Sequence
  Description of Artificial Sequence: Synthetic oligonucleotide
aguaucucggagcacacgc

SEQ ID NO: 684179 - RNA, 19 nt, Artificial Sequence
  Description of Artificial Sequence: Synthetic oligonucleotide
uguauucagauucgaaggg

SEQ ID NO: 684180 - RNA, 19 nt, Artificial Sequence
  Description of Artificial Sequence: Synthetic oligonucleotide
aacgcuaacaccaagguca

SEQ ID NO: 684181 - RNA, 19 nt, Artificial Sequence
  Description of Artificial Sequence: Synthetic oligonucleotide
acuggguguauucagauuc

SEQ ID NO: 684182 - RNA, 19 nt, Artificial Sequence
  Description of Artificial Sequence: Synthetic oligonucleotide
uauuuggauacacucaucu

SEQ ID NO: 684183 - RNA, 19 nt, Artificial Sequence
  Description of Artificial Sequence: Synthetic oligonucleotide
gaagauucgaguaucucgg

SEQ ID NO: 684184 - RNA, 19 nt, Artificial Sequence
  Description of Artificial Sequence: Synthetic oligonucleotide
accaaggucaugcaugccc

SEQ ID NO: 684185 - RNA, 19 nt, Artificial Sequence
  Description of Artificial Sequence: Synthetic oligonucleotide
agaaccugcccacuggucc

SEQ ID NO: 684186 - RNA, 19 nt, Artificial Sequence
  Description of Artificial Sequence: Synthetic oligonucleotide
aagaaugucauuugucccu

SEQ ID NO: 684187 - RNA, 19 nt, Artificial Sequence
  Description of Artificial Sequence: Synthetic oligonucleotide
uuugucccuucaaagaucc

SEQ ID NO: 684188 - RNA, 19 nt, Artificial Sequence
  Description of Artificial Sequence: Synthetic oligonucleotide
aguagcauggucaaccgcc

SEQ ID NO: 684189 - RNA, 19 nt, Artificial Sequence
  Description of Artificial Sequence: Synthetic oligonucleotide
gauucuuuagggcauugcc

SEQ ID NO: 684190 - RNA, 19 nt, Artificial Sequence
  Description of Artificial Sequence: Synthetic oligonucleotide
aacuguucauugacgaucc

SEQ ID NO: 684191 - RNA, 19 nt, Artificial Sequence
  Description of Artificial Sequence: Synthetic oligonucleotide
uuuacuccaucaaaguaca

SEQ ID NO: 684192 - RNA, 19 nt, Artificial Sequence
  Description of Artificial Sequence: Synthetic oligonucleotide
acugggugcgguuaguagc

SEQ ID NO: 684193 - RNA, 19 nt, Artificial Sequence
  Description of Artificial Sequence: Synthetic oligonucleotide
gaagcaucggaggagaggg

SEQ ID NO: 684194 - RNA, 19 nt, Artificial Sequence
  Description of Artificial Sequence: Synthetic oligonucleotide
ucugaugguaccuuuacuc

SEQ ID NO: 684195 - RNA, 19 nt, Artificial Sequence
  Description of Artificial Sequence: Synthetic oligonucleotide
aauacaccagcugucacag

SEQ ID NO: 684196 - RNA, 19 nt, Artificial Sequence
  Description of Artificial Sequence: Synthetic oligonucleotide
gaugcuagagccugacugg

SEQ ID NO: 684197 - RNA, 19 nt, Artificial Sequence
  Description of Artificial Sequence: Synthetic oligonucleotide
gaaaccgaugcucugauga

SEQ ID NO: 684198 - RNA, 19 nt, Artificial Sequence
  Description of Artificial Sequence: Synthetic oligonucleotide
guaugggaacaccugaucg

SEQ ID NO: 684199 - RNA, 19 nt, Artificial Sequence
  Description of Artificial Sequence: Synthetic oligonucleotide
gauucgaguaucucggagc

SEQ ID NO: 684200 - RNA, 19 nt, Artificial Sequence
  Description of Artificial Sequence: Synthetic oligonucleotide
ucaugcaugcccacgaucu

SEQ ID NO: 684201 - RNA, 19 nt, Artificial Sequence
  Description of Artificial Sequence: Synthetic oligonucleotide
ggaagauucgaguaucucg

SEQ ID NO: 684202 - RNA, 19 nt, Artificial Sequence
  Description of Artificial Sequence: Synthetic oligonucleotide
cauacagcccugcagagcc

SEQ ID NO: 684203 - RNA, 19 nt, Artificial Sequence
  Description of Artificial Sequence: Synthetic oligonucleotide
aucuucguuccauugagag

SEQ ID NO: 684204 - RNA, 19 nt, Artificial Sequence
  Description of Artificial Sequence: Synthetic oligonucleotide
cauggacucagucacauac

SEQ ID NO: 684205 - RNA, 19 nt, Artificial Sequence
  Description of Artificial Sequence: Synthetic oligonucleotide
gguguauucagauucgaag

SEQ ID NO: 684206 - RNA, 19 nt, Artificial Sequence
  Description of Artificial Sequence: Synthetic oligonucleotide
accacaaaagcugugaucu

SEQ ID NO: 684207 - RNA, 19 nt, Artificial Sequence
  Description of Artificial Sequence: Synthetic oligonucleotide
uccugaacagccuaggccu

SEQ ID NO: 684208 - RNA, 19 nt, Artificial Sequence
  Description of Artificial Sequence: Synthetic oligonucleotide
uuaguagcauggucaaccg

SEQ ID NO: 684209 - RNA, 19 nt, Artificial Sequence
  Description of Artificial Sequence: Synthetic oligonucleotide
auggguaacaccuccgaag

SEQ ID NO: 684210 - RNA, 19 nt, Artificial Sequence
  Description of Artificial Sequence: Synthetic oligonucleotide
uacuggguauugcagaggc

SEQ ID NO: 684211 - RNA, 19 nt, Artificial Sequence
  Description of Artificial Sequence: Synthetic oligonucleotide
uggguaacaccuccgaagc

SEQ ID NO: 684212 - RNA, 19 nt, Artificial Sequence
  Description of Artificial Sequence: Synthetic oligonucleotide
agagcauuuucucaugcug

SEQ ID NO: 684213 - RNA, 19 nt, Artificial Sequence
  Description of Artificial Sequence: Synthetic oligonucleotide
ugcgaugccuccauuacug

SEQ ID NO: 684214 - RNA, 19 nt, Artificial Sequence
  Description of Artificial Sequence: Synthetic oligonucleotide
aaggcacauaacuuagaug

SEQ ID NO: 684215 - RNA, 19 nt, Artificial Sequence
  Description of Artificial Sequence: Synthetic oligonucleotide
ugucccuucaaagauccgg

SEQ ID NO: 684216 - RNA, 19 nt, Artificial Sequence
  Description of Artificial Sequence: Synthetic oligonucleotide
cauaacuuagaugcuagag

SEQ ID NO: 684217 - RNA, 19 nt, Artificial Sequence
  Description of Artificial Sequence: Synthetic oligonucleotide
uccauuacugauccaaauc

SEQ ID NO: 684218 - RNA, 19 nt, Artificial Sequence
  Description of Artificial Sequence: Synthetic oligonucleotide
aaggacuuagauuccgccu

SEQ ID NO: 684219 - RNA, 19 nt, Artificial Sequence
  Description of Artificial Sequence: Synthetic oligonucleotide
gugacuuaacucugggugg

SEQ ID NO: 684220 - RNA, 19 nt, Artificial Sequence
  Description of Artificial Sequence: Synthetic oligonucleotide
uugagaguauaauauuuuc

SEQ ID NO: 684221 - RNA, 19 nt, Artificial Sequence
  Description of Artificial Sequence: Synthetic oligonucleotide
aguuauccgagccgacugc

SEQ ID NO: 684222 - RNA, 19 nt, Artificial Sequence
  Description of Artificial Sequence: Synthetic oligonucleotide
caucugacccacucgaggg

SEQ ID NO: 684223 - RNA, 19 nt, Artificial Sequence
  Description of Artificial Sequence: Synthetic oligonucleotide
cuggcauaaagucucuggg

SEQ ID NO: 684224 - RNA, 19 nt, Artificial Sequence
  Description of Artificial Sequence: Synthetic oligonucleotide
aagucugugaauccccggu

SEQ ID NO: 684225 - RNA, 19 nt, Artificial Sequence
  Description of Artificial Sequence: Synthetic oligonucleotide
uuggauugcagguuagcca

SEQ ID NO: 684226 - RNA, 19 nt, Artificial Sequence
  Description of Artificial Sequence: Synthetic oligonucleotide
accgccuuugcaaugaugg

SEQ ID NO: 684227 - RNA, 19 nt, Artificial Sequence
  Description of Artificial Sequence: Synthetic oligonucleotide
gauauucacggcaaccuug

SEQ ID NO: 684228 - RNA, 19 nt, Artificial Sequence
  Description of Artificial Sequence: Synthetic oligonucleotide
cagaauugccauccgagcc

SEQ ID NO: 684229 - RNA, 19 nt, Artificial Sequence
  Description of Artificial Sequence: Synthetic oligonucleotide
acuuagauuccgccuuggc

SEQ ID NO: 684230 - RNA, 19 nt, Artificial Sequence
  Description of Artificial Sequence: Synthetic oligonucleotide
acagccuaggccucgcugg

SEQ ID NO: 684231 - RNA, 19 nt, Artificial Sequence
  Description of Artificial Sequence: Synthetic oligonucleotide
cacgccaccacuauccacc

SEQ ID NO: 684232 - RNA, 19 nt, Artificial Sequence
  Description of Artificial Sequence: Synthetic oligonucleotide
caggguaacgcuaacacca

SEQ ID NO: 684233 - RNA, 19 nt, Artificial Sequence
  Description of Artificial Sequence: Synthetic oligonucleotide
gaggguaucuggcuugucc

SEQ ID NO: 684234 - RNA, 19 nt, Artificial Sequence
  Description of Artificial Sequence: Synthetic oligonucleotide
uaggguugcagccauccca

SEQ ID NO: 684235 - RNA, 19 nt, Artificial Sequence
  Description of Artificial Sequence: Synthetic oligonucleotide
uuuagggcauugccaagcc

SEQ ID NO: 684236 - RNA, 19 nt, Artificial Sequence
  Description of Artificial Sequence: Synthetic oligonucleotide
uggauugcagguuagccau

SEQ ID NO: 684237 - RNA, 19 nt, Artificial Sequence
  Description of Artificial Sequence: Synthetic oligonucleotide
uuagccauguuuucucgga

SEQ ID NO: 684238 - RNA, 19 nt, Artificial Sequence
  Description of Artificial Sequence: Synthetic oligonucleotide
uguuuucucggauccgugc

SEQ ID NO: 684239 - RNA, 19 nt, Artificial Sequence
  Description of Artificial Sequence: Synthetic oligonucleotide
agaauugccauccgagcca

SEQ ID NO: 684240 - RNA, 19 nt, Artificial Sequence
  Description of Artificial Sequence: Synthetic oligonucleotide
cuugaagccgcuucccacc

SEQ ID NO: 684241 - RNA, 19 nt, Artificial Sequence
  Description of Artificial Sequence: Synthetic oligonucleotide
auugacgaucccuuucuug

SEQ ID NO: 684242 - RNA, 19 nt, Artificial Sequence
  Description of Artificial Sequence: Synthetic oligonucleotide
ugcagguuagccauguuuu

SEQ ID NO: 684243 - RNA, 19 nt, Artificial Sequence
  Description of Artificial Sequence: Synthetic oligonucleotide
agauucgaguaucucggag

SEQ ID NO: 684244 - RNA, 19 nt, Artificial Sequence
  Description of Artificial Sequence: Synthetic oligonucleotide
auucgaguaucucggagca

SEQ ID NO: 684245 - RNA, 19 nt, Artificial Sequence
  Description of Artificial Sequence: Synthetic oligonucleotide
gaaaauaucugcgaugccu

SEQ ID NO: 684246 - RNA, 19 nt, Artificial Sequence
  Description of Artificial Sequence: Synthetic oligonucleotide
guauucagauucgaagggg

SEQ ID NO: 684247 - RNA, 19 nt, Artificial Sequence
  Description of Artificial Sequence: Synthetic oligonucleotide
uggcauaaagucucugggc

SEQ ID NO: 684248 - RNA, 19 nt, Artificial Sequence
  Description of Artificial Sequence: Synthetic oligonucleotide
agcucuuugagaaauugug

SEQ ID NO: 684249 - RNA, 19 nt, Artificial Sequence
  Description of Artificial Sequence: Synthetic oligonucleotide
uugaggauauucacggcaa

SEQ ID NO: 684250 - RNA, 19 nt, Artificial Sequence
  Description of Artificial Sequence: Synthetic oligonucleotide
accccggagagacucaaac

SEQ ID NO: 684251 - RNA, 19 nt, Artificial Sequence
  Description of Artificial Sequence: Synthetic oligonucleotide
ucuaagcuguggccgaagc

SEQ ID NO: 684252 - RNA, 19 nt, Artificial Sequence
  Description of Artificial Sequence: Synthetic oligonucleotide
gaacuguucauugacgauc

SEQ ID NO: 684253 - RNA, 19 nt, Artificial Sequence
  Description of Artificial Sequence: Synthetic oligonucleotide
cucgcuggcauaaagucuc

SEQ ID NO: 684254 - RNA, 19 nt, Artificial Sequence
  Description of Artificial Sequence: Synthetic oligonucleotide
gaguuauccgagccgacug

SEQ ID NO: 684255 - RNA, 19 nt, Artificial Sequence
  Description of Artificial Sequence: Synthetic oligonucleotide
uggacaaccccggagagac

SEQ ID NO: 684256 - RNA, 19 nt, Artificial Sequence
  Description of Artificial Sequence: Synthetic oligonucleotide
acuuagaugcuagagccug

SEQ ID NO: 684257 - RNA, 19 nt, Artificial Sequence
  Description of Artificial Sequence: Synthetic oligonucleotide
uggucaaccgccuuugcaa

SEQ ID NO: 684258 - RNA, 19 nt, Artificial Sequence
  Description of Artificial Sequence: Synthetic oligonucleotide
ucgaguaucucggagcaca

SEQ ID NO: 684259 - RNA, 19 nt, Artificial Sequence
  Description of Artificial Sequence: Synthetic oligonucleotide
agagguaggccggugcugc

SEQ ID NO: 684260 - RNA, 19 nt, Artificial Sequence
  Description of Artificial Sequence: Synthetic oligonucleotide
uaggucgcgagcuucgggc

SEQ ID NO: 684261 - RNA, 19 nt, Artificial Sequence
  Description of Artificial Sequence: Synthetic oligonucleotide
caaagauuuugcugauggc

SEQ ID NO: 684262 - RNA, 19 nt, Artificial Sequence
  Description of Artificial Sequence: Synthetic oligonucleotide
gcuaacaccaaggucaugc

SEQ ID NO: 684263 - RNA, 19 nt, Artificial Sequence
  Description of Artificial Sequence: Synthetic oligonucleotide
aucugacccacucgagggc

SEQ ID NO: 684264 - RNA, 19 nt, Artificial Sequence
  Description of Artificial Sequence: Synthetic oligonucleotide
caccacgccaccacuaucc

SEQ ID NO: 684265 - RNA, 19 nt, Artificial Sequence
  Description of Artificial Sequence: Synthetic oligonucleotide
agauccggaagauucgagu

SEQ ID NO: 684266 - RNA, 19 nt, Artificial Sequence
  Description of Artificial Sequence: Synthetic oligonucleotide
gguaacgcuaacaccaagg

SEQ ID NO: 684267 - RNA, 19 nt, Artificial Sequence
  Description of Artificial Sequence: Synthetic oligonucleotide
uuuucucggauccgugcug

SEQ ID NO: 684268 - RNA, 19 nt, Artificial Sequence
  Description of Artificial Sequence: Synthetic oligonucleotide
gaauccccgguccauguug

SEQ ID NO: 684269 - RNA, 19 nt, Artificial Sequence
  Description of Artificial Sequence: Synthetic oligonucleotide
cauaagggaaggcacauaa

SEQ ID NO: 684270 - RNA, 19 nt, Artificial Sequence
  Description of Artificial Sequence: Synthetic oligonucleotide
agccauguuuucucggauc

SEQ ID NO: 684271 - RNA, 19 nt, Artificial Sequence
  Description of Artificial Sequence: Synthetic oligonucleotide
caaaggacuuagauuccgc

SEQ ID NO: 684272 - RNA, 19 nt, Artificial Sequence
  Description of Artificial Sequence: Synthetic oligonucleotide
agucugugaauccccgguc

SEQ ID NO: 684273 - RNA, 19 nt, Artificial Sequence
  Description of Artificial Sequence: Synthetic oligonucleotide
guuggauugcagguuagcc

SEQ ID NO: 684274 - RNA, 19 nt, Artificial Sequence
  Description of Artificial Sequence: Synthetic oligonucleotide
gaggauauucacggcaacc

SEQ ID NO: 684275 - RNA, 19 nt, Artificial Sequence
  Description of Artificial Sequence: Synthetic oligonucleotide
uugauacccaucuucuuuu

SEQ ID NO: 684276 - RNA, 19 nt, Artificial Sequence
  Description of Artificial Sequence: Synthetic oligonucleotide
ccaagaggauucuuuaggg

SEQ ID NO: 684277 - RNA, 19 nt, Artificial Sequence
  Description of Artificial Sequence: Synthetic oligonucleotide
uucugauggaggcugcauc

SEQ ID NO: 684278 - RNA, 19 nt, Artificial Sequence
  Description of Artificial Sequence: Synthetic oligonucleotide
uaauuggugucuuggcaaa

SEQ ID NO: 684279 - RNA, 19 nt, Artificial Sequence
  Description of Artificial Sequence: Synthetic oligonucleotide
uaacgcuaacaccaagguc

SEQ ID NO: 684280 - RNA, 19 nt, Artificial Sequence
  Description of Artificial Sequence: Synthetic oligonucleotide
cuggguguauucagauucg

SEQ ID NO: 684281 - RNA, 19 nt, Artificial Sequence
  Description of Artificial Sequence: Synthetic oligonucleotide
aagauucgaguaucucgga

SEQ ID NO: 684282 - RNA, 19 nt, Artificial Sequence
  Description of Artificial Sequence: Synthetic oligonucleotide
cauugccaagcccagugag

SEQ ID NO: 684283 - RNA, 19 nt, Artificial Sequence
  Description of Artificial Sequence: Synthetic oligonucleotide
aggguaucuggcuuguccu

SEQ ID NO: 684284 - RNA, 19 nt, Artificial Sequence
  Description of Artificial Sequence: Synthetic oligonucleotide
uggguggacaaccccggag

SEQ ID NO: 684285 - RNA, 19 nt, Artificial Sequence
  Description of Artificial Sequence: Synthetic oligonucleotide
uccgagccaaagauuuugc

SEQ ID NO: 684286 - RNA, 19 nt, Artificial Sequence
  Description of Artificial Sequence: Synthetic oligonucleotide
agcauguaagccauggacu

SEQ ID NO: 684287 - RNA, 19 nt, Artificial Sequence
  Description of Artificial Sequence: Synthetic oligonucleotide
agagccacaaacaaucgaa

SEQ ID NO: 684288 - RNA, 19 nt, Artificial Sequence
  Description of Artificial Sequence: Synthetic oligonucleotide
gagcauacuggguauugca

SEQ ID NO: 684289 - RNA, 19 nt, Artificial Sequence
  Description of Artificial Sequence: Synthetic oligonucleotide
cucggaguuauccgagccg

SEQ ID NO: 684290 - RNA, 19 nt, Artificial Sequence
  Description of Artificial Sequence: Synthetic oligonucleotide
aggacuuagauuccgccuu

SEQ ID NO: 684291 - RNA, 19 nt, Artificial Sequence
  Description of Artificial Sequence: Synthetic oligonucleotide
cuugaggcccugcaaaguc

SEQ ID NO: 684292 - RNA, 19 nt, Artificial Sequence
  Description of Artificial Sequence: Synthetic oligonucleotide
caaauugcuccagagccug

SEQ ID NO: 684293 - RNA, 19 nt, Artificial Sequence
  Description of Artificial Sequence: Synthetic oligonucleotide
aacaccugaucggugguga

SEQ ID NO: 684294 - RNA, 19 nt, Artificial Sequence
  Description of Artificial Sequence: Synthetic oligonucleotide
agcaaaggacuuagauucc

SEQ ID NO: 684295 - RNA, 19 nt, Artificial Sequence
  Description of Artificial Sequence: Synthetic oligonucleotide
cuggagagaaccaccacca

SEQ ID NO: 684296 - RNA, 19 nt, Artificial Sequence
  Description of Artificial Sequence: Synthetic oligonucleotide
acgaucucugccaagcgag

SEQ ID NO: 684297 - RNA, 19 nt, Artificial Sequence
  Description of Artificial Sequence: Synthetic oligonucleotide
cauccgagccaacuuuucc

SEQ ID NO: 684298 - RNA, 19 nt, Artificial Sequence
  Description of Artificial Sequence: Synthetic oligonucleotide
ggugcgguuaguagcaugg

SEQ ID NO: 684299 - RNA, 19 nt, Artificial Sequence
  Description of Artificial Sequence: Synthetic oligonucleotide
cuucuuuucagggagccca

SEQ ID NO: 684300 - RNA, 19 nt, Artificial Sequence
  Description of Artificial Sequence: Synthetic oligonucleotide
ugaggauauucacggcaac

SEQ ID NO: 684301 - RNA, 19 nt, Artificial Sequence
  Description of Artificial Sequence: Synthetic oligonucleotide
ggauacacucaucuguuac

SEQ ID NO: 684302 - RNA, 19 nt, Artificial Sequence
  Description of Artificial Sequence: Synthetic oligonucleotide
gauccggaagauucgagua

SEQ ID NO: 684303 - RNA, 19 nt, Artificial Sequence
  Description of Artificial Sequence: Synthetic oligonucleotide
ugcaucugacccacucgag

SEQ ID NO: 684304 - RNA, 19 nt, Artificial Sequence
  Description of Artificial Sequence: Synthetic oligonucleotide
aggucgcgagcuucgggcc

SEQ ID NO: 684305 - RNA, 19 nt, Artificial Sequence
  Description of Artificial Sequence: Synthetic oligonucleotide
acuguucauugacgauccc

SEQ ID NO: 684306 - RNA, 19 nt, Artificial Sequence
  Description of Artificial Sequence: Synthetic oligonucleotide
ucggaguuauccgagccga

SEQ ID NO: 684307 - RNA, 19 nt, Artificial Sequence
  Description of Artificial Sequence: Synthetic oligonucleotide
ugcgguuaguagcaugguc

SEQ ID NO: 684308 - RNA, 19 nt, Artificial Sequence
  Description of Artificial Sequence: Synthetic oligonucleotide
uuagaugcuagagccugac

SEQ ID NO: 684309 - RNA, 19 nt, Artificial Sequence
  Description of Artificial Sequence: Synthetic oligonucleotide
cugaucgguggugagcugg

SEQ ID NO: 684310 - RNA, 19 nt, Artificial Sequence
  Description of Artificial Sequence: Synthetic oligonucleotide
ugacuuaacucugggugga

SEQ ID NO: 684311 - RNA, 19 nt, Artificial Sequence
  Description of Artificial Sequence: Synthetic oligonucleotide
acauaacuuagaugcuaga

SEQ ID NO: 684312 - RNA, 19 nt, Artificial Sequence
  Description of Artificial Sequence: Synthetic oligonucleotide
ugacuggguguauucagau

SEQ ID NO: 684313 - RNA, 19 nt, Artificial Sequence
  Description of Artificial Sequence: Synthetic oligonucleotide
aagauccggaagauucgag

SEQ ID NO: 684314 - RNA, 19 nt, Artificial Sequence
  Description of Artificial Sequence: Synthetic oligonucleotide
agcaggaacuguucauuga

SEQ ID NO: 684315 - RNA, 19 nt, Artificial Sequence
  Description of Artificial Sequence: Synthetic oligonucleotide
agcauacuggguauugcag

SEQ ID NO: 684316 - RNA, 19 nt, Artificial Sequence
  Description of Artificial Sequence: Synthetic oligonucleotide
auggucaaccgccuuugca

SEQ ID NO: 684317 - RNA, 19 nt, Artificial Sequence
  Description of Artificial Sequence: Synthetic oligonucleotide
ugacgaucccuuucuugug

SEQ ID NO: 684318 - RNA, 19 nt, Artificial Sequence
  Description of Artificial Sequence: Synthetic oligonucleotide
ugugcuucgggguggcccu

SEQ ID NO: 684319 - RNA, 19 nt, Artificial Sequence
  Description of Artificial Sequence: Synthetic oligonucleotide
aaguacacuucugcugugu

SEQ ID NO: 684320 - RNA, 19 nt, Artificial Sequence
  Description of Artificial Sequence: Synthetic oligonucleotide
aguggcaaauugcuccaga

SEQ ID NO: 684321 - RNA, 19 nt, Artificial Sequence
  Description of Artificial Sequence: Synthetic oligonucleotide
acaguaggucgcgagcuuc

SEQ ID NO: 684322 - RNA, 19 nt, Artificial Sequence
  Description of Artificial Sequence: Synthetic oligonucleotide
agaaauugugucuguucuu

SEQ ID NO: 684323 - RNA, 19 nt, Artificial Sequence
  Description of Artificial Sequence: Synthetic oligonucleotide
guaccuuuacuccaucaaa

SEQ ID NO: 684324 - RNA, 19 nt, Artificial Sequence
  Description of Artificial Sequence: Synthetic oligonucleotide
ucggagcacacgcucuacc

SEQ ID NO: 684325 - RNA, 19 nt, Artificial Sequence
  Description of Artificial Sequence: Synthetic oligonucleotide
gcaucugacccacucgagg

SEQ ID NO: 684326 - RNA, 19 nt, Artificial Sequence
  Description of Artificial Sequence: Synthetic oligonucleotide
gccauguuuucucggaucc

SEQ ID NO: 684327 - RNA, 19 nt, Artificial Sequence
  Description of Artificial Sequence: Synthetic oligonucleotide
cacgcucuaccccagguuc

SEQ ID NO: 684328 - RNA, 19 nt, Artificial Sequence
  Description of Artificial Sequence: Synthetic oligonucleotide
caguaggucgcgagcuucg

SEQ ID NO: 684329 - RNA, 19 nt, Artificial Sequence
  Description of Artificial Sequence: Synthetic oligonucleotide
gacaaccccggagagacuc

SEQ ID NO: 684330 - RNA, 19 nt, Artificial Sequence
  Description of Artificial Sequence: Synthetic oligonucleotide
cacucccaaguccuguccg

SEQ ID NO: 684331 - RNA, 19 nt, Artificial Sequence
  Description of Artificial Sequence: Synthetic oligonucleotide
aucucuaagcuguggccga

SEQ ID NO: 684332 - RNA, 19 nt, Artificial Sequence
  Description of Artificial Sequence: Synthetic oligonucleotide
auauucacggcaaccuuga

SEQ ID NO: 684333 - RNA, 19 nt, Artificial Sequence
  Description of Artificial Sequence: Synthetic oligonucleotide
auccgagccgacugcaucu

SEQ ID NO: 684334 - RNA, 19 nt, Artificial Sequence
  Description of Artificial Sequence: Synthetic oligonucleotide
auaucugcgaugccuccau

SEQ ID NO: 684335 - RNA, 19 nt, Artificial Sequence
  Description of Artificial Sequence: Synthetic oligonucleotide
ugaaaccgaugcucugaug

SEQ ID NO: 684336 - RNA, 19 nt, Artificial Sequence
  Description of Artificial Sequence: Synthetic oligonucleotide
caccacaaaagcugugauc

SEQ ID NO: 684337 - RNA, 19 nt, Artificial Sequence
  Description of Artificial Sequence: Synthetic oligonucleotide
gagaaccaccaccauggca

SEQ ID NO: 684338 - RNA, 19 nt, Artificial Sequence
  Description of Artificial Sequence: Synthetic oligonucleotide
gacuuagauuccgccuugg

SEQ ID NO: 684339 - RNA, 19 nt, Artificial Sequence
  Description of Artificial Sequence: Synthetic oligonucleotide
uugaagccgcuucccaccu

SEQ ID NO: 684340 - RNA, 19 nt, Artificial Sequence
  Description of Artificial Sequence: Synthetic oligonucleotide
gagcacacgcucuacccca

SEQ ID NO: 684341 - RNA, 19 nt, Artificial Sequence
  Description of Artificial Sequence: Synthetic oligonucleotide
cauugagaguauaauauuu

SEQ ID NO: 684342 - RNA, 19 nt, Artificial Sequence
  Description of Artificial Sequence: Synthetic oligonucleotide
caaaccacucccaaguccu

SEQ ID NO: 684343 - RNA, 19 nt, Artificial Sequence
  Description of Artificial Sequence: Synthetic oligonucleotide
augcuagagccugacuggg

SEQ ID NO: 684344 - RNA, 19 nt, Artificial Sequence
  Description of Artificial Sequence: Synthetic oligonucleotide
uggaagcaucggaggagag

SEQ ID NO: 684345 - RNA, 19 nt, Artificial Sequence
  Description of Artificial Sequence: Synthetic oligonucleotide
guaacgcuaacaccaaggu

SEQ ID NO: 684346 - RNA, 19 nt, Artificial Sequence
  Description of Artificial Sequence: Synthetic oligonucleotide
accugaucgguggugagcu

SEQ ID NO: 684347 - RNA, 19 nt, Artificial Sequence
  Description of Artificial Sequence: Synthetic oligonucleotide
uccggaagauucgaguauc

SEQ ID NO: 684348 - RNA, 19 nt, Artificial Sequence
  Description of Artificial Sequence: Synthetic oligonucleotide
guaggucgcgagcuucggg

SEQ ID NO: 684349 - RNA, 19 nt, Artificial Sequence
  Description of Artificial Sequence: Synthetic oligonucleotide
gcauguaagccauggacuc

SEQ ID NO: 684350 - RNA, 19 nt, Artificial Sequence
  Description of Artificial Sequence: Synthetic oligonucleotide
gcagaauugccauccgagc

SEQ ID NO: 684351 - RNA, 19 nt, Artificial Sequence
  Description of Artificial Sequence: Synthetic oligonucleotide
gcauaaagucucugggcag

SEQ ID NO: 684352 - RNA, 19 nt, Artificial Sequence
  Description of Artificial Sequence: Synthetic oligonucleotide
gcaaaggacuuagauuccg

SEQ ID NO: 684353 - RNA, 19 nt, Artificial Sequence
  Description of Artificial Sequence: Synthetic oligonucleotide
uuaacucuggguggacaac

SEQ ID NO: 684354 - RNA, 19 nt, Artificial Sequence
  Description of Artificial Sequence: Synthetic oligonucleotide
cuuagauuccgccuuggcu

SEQ ID NO: 684355 - RNA, 19 nt, Artificial Sequence
  Description of Artificial Sequence: Synthetic oligonucleotide
aucgguggugagcuggccu

SEQ ID NO: 684356 - RNA, 19 nt, Artificial Sequence
  Description of Artificial Sequence: Synthetic oligonucleotide
ucggauccgugcugcagcc

SEQ ID NO: 684357 - RNA, 19 nt, Artificial Sequence
  Description of Artificial Sequence: Synthetic oligonucleotide
gccgacugcaucucuaagc

SEQ ID NO: 684358 - RNA, 19 nt, Artificial Sequence
  Description of Artificial Sequence: Synthetic oligonucleotide
gccacaaacaaucgaagaa

SEQ ID NO: 684359 - RNA, 19 nt, Artificial Sequence
  Description of Artificial Sequence: Synthetic oligonucleotide
cuccgagccaaagauuuug

SEQ ID NO: 684360 - RNA, 19 nt, Artificial Sequence
  Description of Artificial Sequence: Synthetic oligonucleotide
uagaugcuagagccugacu

SEQ ID NO: 684361 - RNA, 19 nt, Artificial Sequence
  Description of Artificial Sequence: Synthetic oligonucleotide
gagcccauggguaacaccu

SEQ ID NO: 684362 - RNA, 19 nt, Artificial Sequence
  Description of Artificial Sequence: Synthetic oligonucleotide
agcauggucaaccgccuuu

SEQ ID NO: 684363 - RNA, 19 nt, Artificial Sequence
  Description of Artificial Sequence: Synthetic oligonucleotide
uuacuccaucaaaguacac

SEQ ID NO: 684364 - RNA, 19 nt, Artificial Sequence
  Description of Artificial Sequence: Synthetic oligonucleotide
aguacacuucugcuguguu

SEQ ID NO: 684365 - RNA, 19 nt, Artificial Sequence
  Description of Artificial Sequence: Synthetic oligonucleotide
aucugcgaugccuccauua

SEQ ID NO: 684366 - RNA, 19 nt, Artificial Sequence
  Description of Artificial Sequence: Synthetic oligonucleotide
auggguaugggaacaccug

SEQ ID NO: 684367 - RNA, 19 nt, Artificial Sequence
  Description of Artificial Sequence: Synthetic oligonucleotide
gauggguaugggaacaccu

SEQ ID NO: 684368 - RNA, 19 nt, Artificial Sequence
  Description of Artificial Sequence: Synthetic oligonucleotide
cucaaaccacucccaaguc

SEQ ID NO: 684369 - RNA, 19 nt, Artificial Sequence
  Description of Artificial Sequence: Synthetic oligonucleotide
aaccacucccaaguccugu

SEQ ID NO: 684370 - RNA, 19 nt, Artificial Sequence
  Description of Artificial Sequence: Synthetic oligonucleotide
cuaacaccaaggucaugca

SEQ ID NO: 684371 - RNA, 19 nt, Artificial Sequence
  Description of Artificial Sequence: Synthetic oligonucleotide
ugccugcuaggguugcagc

SEQ ID NO: 684372 - RNA, 19 nt, Artificial Sequence
  Description of Artificial Sequence: Synthetic oligonucleotide
augagcucccaggguaacg

SEQ ID NO: 684373 - RNA, 19 nt, Artificial Sequence
  Description of Artificial Sequence: Synthetic oligonucleotide
cugcaucugacccacucga

SEQ ID NO: 684374 - RNA, 19 nt, Artificial Sequence
  Description of Artificial Sequence: Synthetic oligonucleotide
cuaggguugcagccauccc

SEQ ID NO: 684375 - RNA, 19 nt, Artificial Sequence
  Description of Artificial Sequence: Synthetic oligonucleotide
cugggugcgguuaguagca

SEQ ID NO: 684376 - RNA, 19 nt, Artificial Sequence
  Description of Artificial Sequence: Synthetic oligonucleotide
uggguguauucagauucga

SEQ ID NO: 684377 - RNA, 19 nt, Artificial Sequence
  Description of Artificial Sequence: Synthetic oligonucleotide
gguaugggaacaccugauc

SEQ ID NO: 684378 - RNA, 19 nt, Artificial Sequence
  Description of Artificial Sequence: Synthetic oligonucleotide
gccaagcgagcauacuggg

SEQ ID NO: 684379 - RNA, 19 nt, Artificial Sequence
  Description of Artificial Sequence: Synthetic oligonucleotide
aggccucgcuggcauaaag

SEQ ID NO: 684380 - RNA, 19 nt, Artificial Sequence
  Description of Artificial Sequence: Synthetic oligonucleotide
ucucggagcacacgcucua

SEQ ID NO: 684381 - RNA, 19 nt, Artificial Sequence
  Description of Artificial Sequence: Synthetic oligonucleotide
ucggaggagaggguaucug

SEQ ID NO: 684382 - RNA, 19 nt, Artificial Sequence
  Description of Artificial Sequence: Synthetic oligonucleotide
auugccaagcccagugagu

SEQ ID NO: 684383 - RNA, 19 nt, Artificial Sequence
  Description of Artificial Sequence: Synthetic oligonucleotide
agccgacugcaucucuaag

SEQ ID NO: 684384 - RNA, 19 nt, Artificial Sequence
  Description of Artificial Sequence: Synthetic oligonucleotide
cacgcucggaguuauccga

SEQ ID NO: 684385 - RNA, 19 nt, Artificial Sequence
  Description of Artificial Sequence: Synthetic oligonucleotide
cuuagaugcuagagccuga

SEQ ID NO: 684386 - RNA, 19 nt, Artificial Sequence
  Description of Artificial Sequence: Synthetic oligonucleotide
cauugagcacagaugggua

SEQ ID NO: 684387 - RNA, 19 nt, Artificial Sequence
  Description of Artificial Sequence: Synthetic oligonucleotide
uccuaucaggaggccaaca

SEQ ID NO: 684388 - RNA, 19 nt, Artificial Sequence
  Description of Artificial Sequence: Synthetic oligonucleotide
ugcuggucaccacgccacc

SEQ ID NO: 684389 - RNA, 19 nt, Artificial Sequence
  Description of Artificial Sequence: Synthetic oligonucleotide
auccccgguccauguuggc

SEQ ID NO: 684390 - RNA, 19 nt, Artificial Sequence
  Description of Artificial Sequence: Synthetic oligonucleotide
ccucaaagaaccugcccac

SEQ ID NO: 684391 - RNA, 19 nt, Artificial Sequence
  Description of Artificial Sequence: Synthetic oligonucleotide
ucugccaagcgagcauacu

SEQ ID NO: 684392 - RNA, 19 nt, Artificial Sequence
  Description of Artificial Sequence: Synthetic oligonucleotide
uucccaccucuccuagaac

SEQ ID NO: 684393 - RNA, 19 nt, Artificial Sequence
  Description of Artificial Sequence: Synthetic oligonucleotide
cugauggcggccucuaucu

SEQ ID NO: 684394 - RNA, 19 nt, Artificial Sequence
  Description of Artificial Sequence: Synthetic oligonucleotide
aaaccacucccaaguccug

SEQ ID NO: 684395 - RNA, 19 nt, Artificial Sequence
  Description of Artificial Sequence: Synthetic oligonucleotide
aaccgccuuugcaaugaug

SEQ ID NO: 684396 - RNA, 19 nt, Artificial Sequence
  Description of Artificial Sequence: Synthetic oligonucleotide
cccggagagacucaaacca

SEQ ID NO: 684397 - RNA, 19 nt, Artificial Sequence
  Description of Artificial Sequence: Synthetic oligonucleotide
guuauccgagccgacugca

SEQ ID NO: 684398 - RNA, 19 nt, Artificial Sequence
  Description of Artificial Sequence: Synthetic oligonucleotide
gccuuugaaaccgaugcuc

SEQ ID NO: 684399 - RNA, 19 nt, Artificial Sequence
  Description of Artificial Sequence: Synthetic oligonucleotide
aagaugccuuugaaaccga

SEQ ID NO: 684400 - RNA, 19 nt, Artificial Sequence
  Description of Artificial Sequence: Synthetic oligonucleotide
ggacuuagauuccgccuug

SEQ ID NO: 684401 - RNA, 19 nt, Artificial Sequence
  Description of Artificial Sequence: Synthetic oligonucleotide
auguuuucucggauccgug

SEQ ID NO: 684402 - RNA, 19 nt, Artificial Sequence
  Description of Artificial Sequence: Synthetic oligonucleotide
ggauucuuuagggcauugc

SEQ ID NO: 684403 - RNA, 19 nt, Artificial Sequence
  Description of Artificial Sequence: Synthetic oligonucleotide
uucguuccauugagaguau

SEQ ID NO: 684404 - RNA, 19 nt, Artificial Sequence
  Description of Artificial Sequence: Synthetic oligonucleotide
gauugcagguuagccaugu

SEQ ID NO: 684405 - RNA, 19 nt, Artificial Sequence
  Description of Artificial Sequence: Synthetic oligonucleotide
gccucaauacaccagcugu

SEQ ID NO: 684406 - RNA, 19 nt, Artificial Sequence
  Description of Artificial Sequence: Synthetic oligonucleotide
gaauugccauccgagccaa

SEQ ID NO: 684407 - RNA, 19 nt, Artificial Sequence
  Description of Artificial Sequence: Synthetic oligonucleotide
ccucaauacaccagcuguc

SEQ ID NO: 684408 - RNA, 19 nt, Artificial Sequence
  Description of Artificial Sequence: Synthetic oligonucleotide
uccccgguccauguuggca

SEQ ID NO: 684409 - RNA, 19 nt, Artificial Sequence
  Description of Artificial Sequence: Synthetic oligonucleotide
uaacaccuccgaagccccu

SEQ ID NO: 684410 - RNA, 19 nt, Artificial Sequence
  Description of Artificial Sequence: Synthetic oligonucleotide
gccugcuaggguugcagcc

SEQ ID NO: 684411 - RNA, 19 nt, Artificial Sequence
  Description of Artificial Sequence: Synthetic oligonucleotide
gcacagauggguaugggaa

SEQ ID NO: 684412 - RNA, 19 nt, Artificial Sequence
  Description of Artificial Sequence: Synthetic oligonucleotide
aaguuacggaagagcugcu

SEQ ID NO: 684413 - RNA, 19 nt, Artificial Sequence
  Description of Artificial Sequence: Synthetic oligonucleotide
aacaccuccgaagccccuu

SEQ ID NO: 684414 - RNA, 19 nt, Artificial Sequence
  Description of Artificial Sequence: Synthetic oligonucleotide
acacgcucuaccccagguu

SEQ ID NO: 684415 - RNA, 19 nt, Artificial Sequence
  Description of Artificial Sequence: Synthetic oligonucleotide
ucgcuggcauaaagucucu

SEQ ID NO: 684416 - RNA, 19 nt, Artificial Sequence
  Description of Artificial Sequence: Synthetic oligonucleotide
gccccuuuccaccacaaaa

SEQ ID NO: 684417 - RNA, 19 nt, Artificial Sequence
  Description of Artificial Sequence: Synthetic oligonucleotide
cauggguaacaccuccgaa

SEQ ID NO: 684418 - RNA, 19 nt, Artificial Sequence
  Description of Artificial Sequence: Synthetic oligonucleotide
acgaucccuuucuuguguu

SEQ ID NO: 684419 - RNA, 19 nt, Artificial Sequence
  Description of Artificial Sequence: Synthetic oligonucleotide
ggguaacgcuaacaccaag

SEQ ID NO: 684420 - RNA, 19 nt, Artificial Sequence
  Description of Artificial Sequence: Synthetic oligonucleotide
aggguugcagccaucccaa

SEQ ID NO: 684421 - RNA, 19 nt, Artificial Sequence
  Description of Artificial Sequence: Synthetic oligonucleotide
uucucggauccgugcugca

SEQ ID NO: 684422 - RNA, 19 nt, Artificial Sequence
  Description of Artificial Sequence: Synthetic oligonucleotide
cacuggguacuugcagacc

SEQ ID NO: 684423 - RNA, 19 nt, Artificial Sequence
  Description of Artificial Sequence: Synthetic oligonucleotide
ggauccgugcugcagccuc

SEQ ID NO: 684424 - RNA, 19 nt, Artificial Sequence
  Description of Artificial Sequence: Synthetic oligonucleotide
caccacuauccaccauggc

SEQ ID NO: 684425 - RNA, 19 nt, Artificial Sequence
  Description of Artificial Sequence: Synthetic oligonucleotide
gacuuaacucuggguggac

SEQ ID NO: 684426 - RNA, 19 nt, Artificial Sequence
  Description of Artificial Sequence: Synthetic oligonucleotide
aucggaggagaggguaucu

SEQ ID NO: 684427 - RNA, 19 nt, Artificial Sequence
  Description of Artificial Sequence: Synthetic oligonucleotide
ugccuccgagccaaagauu

SEQ ID NO: 684428 - RNA, 19 nt, Artificial Sequence
  Description of Artificial Sequence: Synthetic oligonucleotide
uucgaguaucucggagcac

SEQ ID NO: 684429 - RNA, 19 nt, Artificial Sequence
  Description of Artificial Sequence: Synthetic oligonucleotide
ccaaacugggugcgguuag

SEQ ID NO: 684430 - RNA, 19 nt, Artificial Sequence
  Description of Artificial Sequence: Synthetic oligonucleotide
cucuaagcuguggccgaag

SEQ ID NO: 684431 - RNA, 19 nt, Artificial Sequence
  Description of Artificial Sequence: Synthetic oligonucleotide
ucucuaagcuguggccgaa

SEQ ID NO: 684432 - RNA, 19 nt, Artificial Sequence
  Description of Artificial Sequence: Synthetic oligonucleotide
ccacgcucggaguuauccg

SEQ ID NO: 684433 - RNA, 19 nt, Artificial Sequence
  Description of Artificial Sequence: Synthetic oligonucleotide
caucggaggagaggguauc

SEQ ID NO: 684434 - RNA, 19 nt, Artificial Sequence
  Description of Artificial Sequence: Synthetic oligonucleotide
auggcggccucuaucugga

SEQ ID NO: 684435 - RNA, 19 nt, Artificial Sequence
  Description of Artificial Sequence: Synthetic oligonucleotide
uugugccauagagcaagau

SEQ ID NO: 684436 - RNA, 19 nt, Artificial Sequence
  Description of Artificial Sequence: Synthetic oligonucleotide
ccccggagagacucaaacc

SEQ ID NO: 684437 - RNA, 19 nt, Artificial Sequence
  Description of Artificial Sequence: Synthetic oligonucleotide
acgcucggaguuauccgag

SEQ ID NO: 684438 - RNA, 19 nt, Artificial Sequence
  Description of Artificial Sequence: Synthetic oligonucleotide
acgccaccacuauccacca

SEQ ID NO: 684439 - RNA, 19 nt, Artificial Sequence
  Description of Artificial Sequence: Synthetic oligonucleotide
ugaagccgcuucccaccuc

SEQ ID NO: 684440 - RNA, 19 nt, Artificial Sequence
  Description of Artificial Sequence: Synthetic oligonucleotide
gguaucuggcuuguccuga

SEQ ID NO: 684441 - RNA, 19 nt, Artificial Sequence
  Description of Artificial Sequence: Synthetic oligonucleotide
ccacugugacuuaacucug

SEQ ID NO: 684442 - RNA, 19 nt, Artificial Sequence
  Description of Artificial Sequence: Synthetic oligonucleotide
augcuuugauacccaucuu

SEQ ID NO: 684443 - RNA, 19 nt, Artificial Sequence
  Description of Artificial Sequence: Synthetic oligonucleotide
auugcagguuagccauguu

SEQ ID NO: 684444 - RNA, 19 nt, Artificial Sequence
  Description of Artificial Sequence: Synthetic oligonucleotide
cccacgcucggaguuaucc

SEQ ID NO: 684445 - RNA, 19 nt, Artificial Sequence
  Description of Artificial Sequence: Synthetic oligonucleotide
ccacuacaguggcaaauug

SEQ ID NO: 684446 - RNA, 19 nt, Artificial Sequence
  Description of Artificial Sequence: Synthetic oligonucleotide
cggagcacacgcucuaccc

SEQ ID NO: 684447 - RNA, 19 nt, Artificial Sequence
  Description of Artificial Sequence: Synthetic oligonucleotide
agcucacuggguacuugca

SEQ ID NO: 684448 - RNA, 19 nt, Artificial Sequence
  Description of Artificial Sequence: Synthetic oligonucleotide
gcugccuccgagccaaaga

SEQ ID NO: 684449 - RNA, 19 nt, Artificial Sequence
  Description of Artificial Sequence: Synthetic oligonucleotide
gggugcgguuaguagcaug

SEQ ID NO: 684450 - RNA, 19 nt, Artificial Sequence
  Description of Artificial Sequence: Synthetic oligonucleotide
ccccgguccauguuggcac

SEQ ID NO: 684451 - RNA, 19 nt, Artificial Sequence
  Description of Artificial Sequence: Synthetic oligonucleotide
cuaucaggaggccaacauu

SEQ ID NO: 684452 - RNA, 19 nt, Artificial Sequence
  Description of Artificial Sequence: Synthetic oligonucleotide
gauccgugcugcagccuca

SEQ ID NO: 684453 - RNA, 19 nt, Artificial Sequence
  Description of Artificial Sequence: Synthetic oligonucleotide
agcacacgcucuaccccag

SEQ ID NO: 684454 - RNA, 19 nt, Artificial Sequence
  Description of Artificial Sequence: Synthetic oligonucleotide
cucugaugguaccuuuacu

SEQ ID NO: 684455 - RNA, 19 nt, Artificial Sequence
  Description of Artificial Sequence: Synthetic oligonucleotide
aggguaacgcuaacaccaa

SEQ ID NO: 684456 - RNA, 19 nt, Artificial Sequence
  Description of Artificial Sequence: Synthetic oligonucleotide
cugccuccgagccaaagau

SEQ ID NO: 684457 - RNA, 19 nt, Artificial Sequence
  Description of Artificial Sequence: Synthetic oligonucleotide
cuagagccugacugggugu

SEQ ID NO: 684458 - RNA, 19 nt, Artificial Sequence
  Description of Artificial Sequence: Synthetic oligonucleotide
agggagcccauggguaaca

SEQ ID NO: 684459 - RNA, 19 nt, Artificial Sequence
  Description of Artificial Sequence: Synthetic oligonucleotide
gcccagugaguuccuuucc

SEQ ID NO: 684460 - RNA, 19 nt, Artificial Sequence
  Description of Artificial Sequence: Synthetic oligonucleotide
cucggagcacacgcucuac

SEQ ID NO: 684461 - RNA, 19 nt, Artificial Sequence
  Description of Artificial Sequence: Synthetic oligonucleotide
ggucgcgagcuucgggccc

SEQ ID NO: 684462 - RNA, 19 nt, Artificial Sequence
  Description of Artificial Sequence: Synthetic oligonucleotide
ucguuccauugagaguaua

SEQ ID NO: 684463 - RNA, 19 nt, Artificial Sequence
  Description of Artificial Sequence: Synthetic oligonucleotide
gacuggguguauucagauu

SEQ ID NO: 684464 - RNA, 19 nt, Artificial Sequence
  Description of Artificial Sequence: Synthetic oligonucleotide
gccgccucagcuguuugcc

SEQ ID NO: 684465 - RNA, 19 nt, Artificial Sequence
  Description of Artificial Sequence: Synthetic oligonucleotide
ccacucccaaguccugucc

SEQ ID NO: 684466 - RNA, 19 nt, Artificial Sequence
  Description of Artificial Sequence: Synthetic oligonucleotide
uccgagccgacugcaucuc

SEQ ID NO: 684467 - RNA, 19 nt, Artificial Sequence
  Description of Artificial Sequence: Synthetic oligonucleotide
gguuaguagcauggucaac

SEQ ID NO: 684468 - RNA, 19 nt, Artificial Sequence
  Description of Artificial Sequence: Synthetic oligonucleotide
cuggguacuugcagaccaa

SEQ ID NO: 684469 - RNA, 19 nt, Artificial Sequence
  Description of Artificial Sequence: Synthetic oligonucleotide
acgcuaacaccaaggucau

SEQ ID NO: 684470 - RNA, 19 nt, Artificial Sequence
  Description of Artificial Sequence: Synthetic oligonucleotide
ccgccuuugcaaugauggc

SEQ ID NO: 684471 - RNA, 19 nt, Artificial Sequence
  Description of Artificial Sequence: Synthetic oligonucleotide
guagcauggucaaccgccu

SEQ ID NO: 684472 - RNA, 19 nt, Artificial Sequence
  Description of Artificial Sequence: Synthetic oligonucleotide
gucaccacgccaccacuau

SEQ ID NO: 684473 - RNA, 19 nt, Artificial Sequence
  Description of Artificial Sequence: Synthetic oligonucleotide
ccgacugcaucucuaagcu

SEQ ID NO: 684474 - RNA, 19 nt, Artificial Sequence
  Description of Artificial Sequence: Synthetic oligonucleotide
cccagguuccuucaugaaa

SEQ ID NO: 684475 - RNA, 19 nt, Artificial Sequence
  Description of Artificial Sequence: Synthetic oligonucleotide
ggguguauucagauucgaa

SEQ ID NO: 684476 - RNA, 19 nt, Artificial Sequence
  Description of Artificial Sequence: Synthetic oligonucleotide
ccucacucagggaucuuga

SEQ ID NO: 684477 - RNA, 19 nt, Artificial Sequence
  Description of Artificial Sequence: Synthetic oligonucleotide
ccauccgagccaacuuuuc

SEQ ID NO: 684478 - RNA, 19 nt, Artificial Sequence
  Description of Artificial Sequence: Synthetic oligonucleotide
ggaguuauccgagccgacu

SEQ ID NO: 684479 - RNA, 19 nt, Artificial Sequence
  Description of Artificial Sequence: Synthetic oligonucleotide
ggauauucacggcaaccuu

SEQ ID NO: 684480 - RNA, 19 nt, Artificial Sequence
  Description of Artificial Sequence: Synthetic oligonucleotide
cgagcauacuggguauugc

SEQ ID NO: 684481 - RNA, 19 nt, Artificial Sequence
  Description of Artificial Sequence: Synthetic oligonucleotide
ggauugcagguuagccaug

SEQ ID NO: 684482 - RNA, 19 nt, Artificial Sequence
  Description of Artificial Sequence: Synthetic oligonucleotide
uccgugcugcagccucaau

SEQ ID NO: 684483 - RNA, 19 nt, Artificial Sequence
  Description of Artificial Sequence: Synthetic oligonucleotide
caccuccgaagccccuuuc

SEQ ID NO: 684484 - RNA, 19 nt, Artificial Sequence
  Description of Artificial Sequence: Synthetic oligonucleotide
cugcgaugccuccauuacu

SEQ ID NO: 684485 - RNA, 19 nt, Artificial Sequence
  Description of Artificial Sequence: Synthetic oligonucleotide
cacacgcucuaccccaggu

SEQ ID NO: 684486 - RNA, 19 nt, Artificial Sequence
  Description of Artificial Sequence: Synthetic oligonucleotide
ggucaaccgccuuugcaau

SEQ ID NO: 684487 - RNA, 19 nt, Artificial Sequence
  Description of Artificial Sequence: Synthetic oligonucleotide
gaacagccuaggccucgcu

SEQ ID NO: 684488 - RNA, 19 nt, Artificial Sequence
  Description of Artificial Sequence: Synthetic oligonucleotide
ugggugcgguuaguagcau

SEQ ID NO: 684489 - RNA, 19 nt, Artificial Sequence
  Description of Artificial Sequence: Synthetic oligonucleotide
ccugcuaggguugcagcca

SEQ ID NO: 684490 - RNA, 19 nt, Artificial Sequence
  Description of Artificial Sequence: Synthetic oligonucleotide
ccuaucaggaggccaacau

SEQ ID NO: 684491 - RNA, 19 nt, Artificial Sequence
  Description of Artificial Sequence: Synthetic oligonucleotide
ggcacauaacuuagaugcu

SEQ ID NO: 684492 - RNA, 19 nt, Artificial Sequence
  Description of Artificial Sequence: Synthetic oligonucleotide
ggcauaagggaaggcacau

SEQ ID NO: 684493 - RNA, 19 nt, Artificial Sequence
  Description of Artificial Sequence: Synthetic oligonucleotide
cccaaaccacccagcucac

SEQ ID NO: 684494 - RNA, 19 nt, Artificial Sequence
  Description of Artificial Sequence: Synthetic oligonucleotide
uggcggccucuaucuggaa

SEQ ID NO: 684495 - RNA, 19 nt, Artificial Sequence
  Description of Artificial Sequence: Synthetic oligonucleotide
ccucgcuggcauaaagucu

SEQ ID NO: 684496 - RNA, 19 nt, Artificial Sequence
  Description of Artificial Sequence: Synthetic oligonucleotide
ccugaucgguggugagcug

SEQ ID NO: 684497 - RNA, 19 nt, Artificial Sequence
  Description of Artificial Sequence: Synthetic oligonucleotide
cgguuaguagcauggucaa

SEQ ID NO: 684498 - RNA, 19 nt, Artificial Sequence
  Description of Artificial Sequence: Synthetic oligonucleotide
ggucaccacgccaccacua

SEQ ID NO: 684499 - RNA, 19 nt, Artificial Sequence
  Description of Artificial Sequence: Synthetic oligonucleotide
gcauaagggaaggcacaua

SEQ ID NO: 684500 - RNA, 19 nt, Artificial Sequence
  Description of Artificial Sequence: Synthetic oligonucleotide
ccgagccaaagauuuugcu

SEQ ID NO: 684501 - RNA, 19 nt, Artificial Sequence
  Description of Artificial Sequence: Synthetic oligonucleotide
gugcgguuaguagcauggu

SEQ ID NO: 684502 - RNA, 19 nt, Artificial Sequence
  Description of Artificial Sequence: Synthetic oligonucleotide
cacaguaggucgcgagcuu

SEQ ID NO: 684503 - RNA, 19 nt, Artificial Sequence
  Description of Artificial Sequence: Synthetic oligonucleotide
cugugaauccccgguccau

SEQ ID NO: 684504 - RNA, 19 nt, Artificial Sequence
  Description of Artificial Sequence: Synthetic oligonucleotide
ccggaagauucgaguaucu

SEQ ID NO: 684505 - RNA, 19 nt, Artificial Sequence
  Description of Artificial Sequence: Synthetic oligonucleotide
ggugccugcuaggguugca

SEQ ID NO: 684506 - RNA, 19 nt, Artificial Sequence
  Description of Artificial Sequence: Synthetic oligonucleotide
gcaucggaggagaggguau

SEQ ID NO: 684507 - RNA, 19 nt, Artificial Sequence
  Description of Artificial Sequence: Synthetic oligonucleotide
caaccgccuuugcaaugau

SEQ ID NO: 684508 - RNA, 19 nt, Artificial Sequence
  Description of Artificial Sequence: Synthetic oligonucleotide
gugcuucgggguggcccuc

SEQ ID NO: 684509 - RNA, 19 nt, Artificial Sequence
  Description of Artificial Sequence: Synthetic oligonucleotide
ccuugaggcccugcaaagu

SEQ ID NO: 684510 - RNA, 19 nt, Artificial Sequence
  Description of Artificial Sequence: Synthetic oligonucleotide
ggcaaccuugaagccgcuu

SEQ ID NO: 684511 - RNA, 19 nt, Artificial Sequence
  Description of Artificial Sequence: Synthetic oligonucleotide
ccuccgagccaaagauuuu

SEQ ID NO: 684512 - RNA, 19 nt, Artificial Sequence
  Description of Artificial Sequence: Synthetic oligonucleotide
ggacaaccccggagagacu

SEQ ID NO: 684513 - RNA, 19 nt, Artificial Sequence
  Description of Artificial Sequence: Synthetic oligonucleotide
aggcugccuccgagccaaa

SEQ ID NO: 684514 - RNA, 19 nt, Artificial Sequence
  Description of Artificial Sequence: Synthetic oligonucleotide
ccgagccgacugcaucucu

SEQ ID NO: 684515 - RNA, 19 nt, Artificial Sequence
  Description of Artificial Sequence: Synthetic oligonucleotide
cgaucccuuucuuguguuu

SEQ ID NO: 684516 - RNA, 19 nt, Artificial Sequence
  Description of Artificial Sequence: Synthetic oligonucleotide
cccacucgagggcucuguu

SEQ ID NO: 684517 - RNA, 19 nt, Artificial Sequence
  Description of Artificial Sequence: Synthetic oligonucleotide
cgcucuaccccagguuccu

SEQ ID NO: 684518 - RNA, 19 nt, Artificial Sequence
  Description of Artificial Sequence: Synthetic oligonucleotide
cggauccgugcugcagccu

SEQ ID NO: 684519 - RNA, 19 nt, Artificial Sequence
  Description of Artificial Sequence: Synthetic oligonucleotide
aauauauauauauauaugu

SEQ ID NO: 684520 - RNA, 19 nt, Artificial Sequence
  Description of Artificial Sequence: Synthetic oligonucleotide
uauauaauauauaauauac

SEQ ID NO: 684521 - RNA, 19 nt, Artificial Sequence
  Description of Artificial Sequence: Synthetic oligonucleotide
uauauuugcaguaugaaac

SEQ ID NO: 684522 - RNA, 19 nt, Artificial Sequence
  Description of Artificial Sequence: Synthetic oligonucleotide
uauauauauauauauauaa

SEQ ID NO: 684523 - RNA, 19 nt, Artificial Sequence
  Description of Artificial Sequence: Synthetic oligonucleotide
auauauauaauauauaaua

SEQ ID NO: 684524 - RNA, 19 nt, Artificial Sequence
  Description of Artificial Sequence: Synthetic oligonucleotide
aauauacuaauauaucucu

SEQ ID NO: 684525 - RNA, 19 nt, Artificial Sequence
  Description of Artificial Sequence: Synthetic oligonucleotide
uauauauauauauauauau

SEQ ID NO: 684526 - RNA, 19 nt, Artificial Sequence
  Description of Artificial Sequence: Synthetic oligonucleotide
aauuccucgucguuaaagc

SEQ ID NO: 684527 - RNA, 19 nt, Artificial Sequence
  Description of Artificial Sequence: Synthetic oligonucleotide
ugcaguaugaaacacaaac

SEQ ID NO: 684528 - RNA, 19 nt, Artificial Sequence
  Description of Artificial Sequence: Synthetic oligonucleotide
uauucuaggagacaaagcu

SEQ ID NO: 684529 - RNA, 19 nt, Artificial Sequence
  Description of Artificial Sequence: Synthetic oligonucleotide
uguauauauauauauauau

SEQ ID NO: 684530 - RNA, 19 nt, Artificial Sequence
  Description of Artificial Sequence: Synthetic oligonucleotide
auauauauauaauauauaa

SEQ ID NO: 684531 - RNA, 19 nt, Artificial Sequence
  Description of Artificial Sequence: Synthetic oligonucleotide
ucaauauauauauauauau

SEQ ID NO: 684532 - RNA, 19 nt, Artificial Sequence
  Description of Artificial Sequence: Synthetic oligonucleotide
uauauauguauauauauau

SEQ ID NO: 684533 - RNA, 19 nt, Artificial Sequence
  Description of Artificial Sequence: Synthetic oligonucleotide
uauauauauauauauaaua

SEQ ID NO: 684534 - RNA, 19 nt, Artificial Sequence
  Description of Artificial Sequence: Synthetic oligonucleotide
ucuaucuuuauucuaggag

SEQ ID NO: 684535 - RNA, 19 nt, Artificial Sequence
  Description of Artificial Sequence: Synthetic oligonucleotide
uauauauauauguauauau

SEQ ID NO: 684536 - RNA, 19 nt, Artificial Sequence
  Description of Artificial Sequence: Synthetic oligonucleotide
uauauguauauauauauau

SEQ ID NO: 684537 - RNA, 19 nt, Artificial Sequence
  Description of Artificial Sequence: Synthetic oligonucleotide
uauguauauauauauauau

SEQ ID NO: 684538 - RNA, 19 nt, Artificial Sequence
  Description of Artificial Sequence: Synthetic oligonucleotide
acuaauauaucucucucuc

SEQ ID NO: 684539 - RNA, 19 nt, Artificial Sequence
  Description of Artificial Sequence: Synthetic oligonucleotide
uauauauauguauauauau

SEQ ID NO: 684540 - RNA, 19 nt, Artificial Sequence
  Description of Artificial Sequence: Synthetic oligonucleotide
uauauauaauauauaauau

SEQ ID NO: 684541 - RNA, 19 nt, Artificial Sequence
  Description of Artificial Sequence: Synthetic oligonucleotide
uauauauauauauauguau

SEQ ID NO: 684542 - RNA, 19 nt, Artificial Sequence
  Description of Artificial Sequence: Synthetic oligonucleotide
uguagcauaucucaagcag

SEQ ID NO: 684543 - RNA, 19 nt, Artificial Sequence
  Description of Artificial Sequence: Synthetic oligonucleotide
aaacugaggguccuguugg

SEQ ID NO: 684544 - RNA, 19 nt, Artificial Sequence
  Description of Artificial Sequence: Synthetic oligonucleotide
uauauauauaauauauaau

SEQ ID NO: 684545 - RNA, 19 nt, Artificial Sequence
  Description of Artificial Sequence: Synthetic oligonucleotide
caguaugaaacacaaaccc

SEQ ID NO: 684546 - RNA, 19 nt, Artificial Sequence
  Description of Artificial Sequence: Synthetic oligonucleotide
uuuauucuaggagacaaag

SEQ ID NO: 684547 - RNA, 19 nt, Artificial Sequence
  Description of Artificial Sequence: Synthetic oligonucleotide
uauauauauauauguauau

SEQ ID NO: 684548 - RNA, 19 nt, Artificial Sequence
  Description of Artificial Sequence: Synthetic oligonucleotide
uauauauauauauaauaua

SEQ ID NO: 684549 - RNA, 19 nt, Artificial Sequence
  Description of Artificial Sequence: Synthetic oligonucleotide
auauauauauauaauauau

SEQ ID NO: 684550 - RNA, 19 nt, Artificial Sequence
  Description of Artificial Sequence: Synthetic oligonucleotide
caauauauauauauauaug

SEQ ID NO: 684551 - RNA, 19 nt, Artificial Sequence
  Description of Artificial Sequence: Synthetic oligonucleotide
uaauauaucucucucucuc

SEQ ID NO: 684552 - RNA, 19 nt, Artificial Sequence
  Description of Artificial Sequence: Synthetic oligonucleotide
auauauaauauauaauaua

SEQ ID NO: 684553 - RNA, 19 nt, Artificial Sequence
  Description of Artificial Sequence: Synthetic oligonucleotide
uuuaaggagaaggugaugu

SEQ ID NO: 684554 - RNA, 19 nt, Artificial Sequence
  Description of Artificial Sequence: Synthetic oligonucleotide
uauauauauauaauauaua

SEQ ID NO: 684555 - RNA, 19 nt, Artificial Sequence
  Description of Artificial Sequence: Synthetic oligonucleotide
uuugcaguaugaaacacaa

SEQ ID NO: 684556 - RNA, 19 nt, Artificial Sequence
  Description of Artificial Sequence: Synthetic oligonucleotide
aaugcgcuccaccaggcgg

SEQ ID NO: 684557 - RNA, 19 nt, Artificial Sequence
  Description of Artificial Sequence: Synthetic oligonucleotide
auacuaauauaucucucuc

SEQ ID NO: 684558 - RNA, 19 nt, Artificial Sequence
  Description of Artificial Sequence: Synthetic oligonucleotide
auauauauauauauaauau

SEQ ID NO: 684559 - RNA, 19 nt, Artificial Sequence
  Description of Artificial Sequence: Synthetic oligonucleotide
gagagaaugcaggauaugg

SEQ ID NO: 684560 - RNA, 19 nt, Artificial Sequence
  Description of Artificial Sequence: Synthetic oligonucleotide
aaaguggucaaugaaggcu

SEQ ID NO: 684561 - RNA, 19 nt, Artificial Sequence
  Description of Artificial Sequence: Synthetic oligonucleotide
gaaguugaacuccuugagg

SEQ ID NO: 684562 - RNA, 19 nt, Artificial Sequence
  Description of Artificial Sequence: Synthetic oligonucleotide
gucguuaaagccaaagugg

SEQ ID NO: 684563 - RNA, 19 nt, Artificial Sequence
  Description of Artificial Sequence: Synthetic oligonucleotide
aaagggugcauucacacuu

SEQ ID NO: 684564 - RNA, 19 nt, Artificial Sequence
  Description of Artificial Sequence: Synthetic oligonucleotide
ugcaauacagccuccucgg

SEQ ID NO: 684565 - RNA, 19 nt, Artificial Sequence
  Description of Artificial Sequence: Synthetic oligonucleotide
uccuuuggaguccagagga

SEQ ID NO: 684566 - RNA, 19 nt, Artificial Sequence
  Description of Artificial Sequence: Synthetic oligonucleotide
aauauaucucucucucucu

SEQ ID NO: 684567 - RNA, 19 nt, Artificial Sequence
  Description of Artificial Sequence: Synthetic oligonucleotide
auaguuucucuucucagug

SEQ ID NO: 684568 - RNA, 19 nt, Artificial Sequence
  Description of Artificial Sequence: Synthetic oligonucleotide
uaugaaacacaaacccugc

SEQ ID NO: 684569 - RNA, 19 nt, Artificial Sequence
  Description of Artificial Sequence: Synthetic oligonucleotide
cuaucuuuauucuaggaga

SEQ ID NO: 684570 - RNA, 19 nt, Artificial Sequence
  Description of Artificial Sequence: Synthetic oligonucleotide
cuuguagcauaucucaagc

SEQ ID NO: 684571 - RNA, 19 nt, Artificial Sequence
  Description of Artificial Sequence: Synthetic oligonucleotide
aaacccugcacacauacuu

SEQ ID NO: 684572 - RNA, 19 nt, Artificial Sequence
  Description of Artificial Sequence: Synthetic oligonucleotide
ucguucuccucccaggagg

SEQ ID NO: 684573 - RNA, 19 nt, Artificial Sequence
  Description of Artificial Sequence: Synthetic oligonucleotide
cuaaccaaggccuggcagg

SEQ ID NO: 684574 - RNA, 19 nt, Artificial Sequence
  Description of Artificial Sequence: Synthetic oligonucleotide
uccgcaacacuaaccaagg

SEQ ID NO: 684575 - RNA, 19 nt, Artificial Sequence
  Description of Artificial Sequence: Synthetic oligonucleotide
auauaucucucucucucuc

SEQ ID NO: 684576 - RNA, 19 nt, Artificial Sequence
  Description of Artificial Sequence: Synthetic oligonucleotide
ucccucaauauauauauau

SEQ ID NO: 684577 - RNA, 19 nt, Artificial Sequence
  Description of Artificial Sequence: Synthetic oligonucleotide
guaugaaacacaaacccug

SEQ ID NO: 684578 - RNA, 19 nt, Artificial Sequence
  Description of Artificial Sequence: Synthetic oligonucleotide
ucguuaaagccaaaguggu

SEQ ID NO: 684579 - RNA, 19 nt, Artificial Sequence
  Description of Artificial Sequence: Synthetic oligonucleotide
ucgucgucagcguuuaagg

SEQ ID NO: 684580 - RNA, 19 nt, Artificial Sequence
  Description of Artificial Sequence: Synthetic oligonucleotide
auauuugcaguaugaaaca

SEQ ID NO: 684581 - RNA, 19 nt, Artificial Sequence
  Description of Artificial Sequence: Synthetic oligonucleotide
auagccuuuccucgggccc

SEQ ID NO: 684582 - RNA, 19 nt, Artificial Sequence
  Description of Artificial Sequence: Synthetic oligonucleotide
acauccgcaacacuaacca

SEQ ID NO: 684583 - RNA, 19 nt, Artificial Sequence
  Description of Artificial Sequence: Synthetic oligonucleotide
uuuauauuugcaguaugaa

SEQ ID NO: 684584 - RNA, 19 nt, Artificial Sequence
  Description of Artificial Sequence: Synthetic oligonucleotide
uacuaauauaucucucucu

SEQ ID NO: 684585 - RNA, 19 nt, Artificial Sequence
  Description of Artificial Sequence: Synthetic oligonucleotide
ugaguguucaccagaucca

SEQ ID NO: 684586 - RNA, 19 nt, Artificial Sequence
  Description of Artificial Sequence: Synthetic oligonucleotide
auaucucucucucucucuc

SEQ ID NO: 684587 - RNA, 19 nt, Artificial Sequence
  Description of Artificial Sequence: Synthetic oligonucleotide
auacuugcacacucacgcc

SEQ ID NO: 684588 - RNA, 19 nt, Artificial Sequence
  Description of Artificial Sequence: Synthetic oligonucleotide
uaggcacugguucaaaggu

SEQ ID NO: 684589 - RNA, 19 nt, Artificial Sequence
  Description of Artificial Sequence: Synthetic oligonucleotide
auauaauauauaauauacu

SEQ ID NO: 684590 - RNA, 19 nt, Artificial Sequence
  Description of Artificial Sequence: Synthetic oligonucleotide
uccucgucgucacuggagg

SEQ ID NO: 684591 - RNA, 19 nt, Artificial Sequence
  Description of Artificial Sequence: Synthetic oligonucleotide
gucgucagcguuuaaggag

SEQ ID NO: 684592 - RNA, 19 nt, Artificial Sequence
  Description of Artificial Sequence: Synthetic oligonucleotide
aacacuaaccaaggccugg

SEQ ID NO: 684593 - RNA, 19 nt, Artificial Sequence
  Description of Artificial Sequence: Synthetic oligonucleotide
auauauauauauauguaua

SEQ ID NO: 684594 - RNA, 19 nt, Artificial Sequence
  Description of Artificial Sequence: Synthetic oligonucleotide
ucuuacuccucccucaaua

SEQ ID NO: 684595 - RNA, 19 nt, Artificial Sequence
  Description of Artificial Sequence: Synthetic oligonucleotide
auuuauauuugcaguauga

SEQ ID NO: 684596 - RNA, 19 nt, Artificial Sequence
  Description of Artificial Sequence: Synthetic oligonucleotide
gaggcggucguccucgucg

SEQ ID NO: 684597 - RNA, 19 nt, Artificial Sequence
  Description of Artificial Sequence: Synthetic oligonucleotide
acuaaccaaggccuggcag

SEQ ID NO: 684598 - RNA, 19 nt, Artificial Sequence
  Description of Artificial Sequence: Synthetic oligonucleotide
aggagacaaagcuccauag

SEQ ID NO: 684599 - RNA, 19 nt, Artificial Sequence
  Description of Artificial Sequence: Synthetic oligonucleotide
agaauccccgguucuggcc

SEQ ID NO: 684600 - RNA, 19 nt, Artificial Sequence
  Description of Artificial Sequence: Synthetic oligonucleotide
auauauauauauauauaau

SEQ ID NO: 684601 - RNA, 19 nt, Artificial Sequence
  Description of Artificial Sequence: Synthetic oligonucleotide
ucgucagcguuuaaggaga

SEQ ID NO: 684602 - RNA, 19 nt, Artificial Sequence
  Description of Artificial Sequence: Synthetic oligonucleotide
ucgucgaacugcuggaucc

SEQ ID NO: 684603 - RNA, 19 nt, Artificial Sequence
  Description of Artificial Sequence: Synthetic oligonucleotide
ucagaaugcgcuccaccag

SEQ ID NO: 684604 - RNA, 19 nt, Artificial Sequence
  Description of Artificial Sequence: Synthetic oligonucleotide
gacacgaacgcuucccacc

SEQ ID NO: 684605 - RNA, 19 nt, Artificial Sequence
  Description of Artificial Sequence: Synthetic oligonucleotide
auauagccuuuccucgggc

SEQ ID NO: 684606 - RNA, 19 nt, Artificial Sequence
  Description of Artificial Sequence: Synthetic oligonucleotide
ugagugaaaggccgggugu

SEQ ID NO: 684607 - RNA, 19 nt, Artificial Sequence
  Description of Artificial Sequence: Synthetic oligonucleotide
auauacuaauauaucucuc

SEQ ID NO: 684608 - RNA, 19 nt, Artificial Sequence
  Description of Artificial Sequence: Synthetic oligonucleotide
acgaacgcuucccaccgcc

SEQ ID NO: 684609 - RNA, 19 nt, Artificial Sequence
  Description of Artificial Sequence: Synthetic oligonucleotide
caauacagccuccucgggg

SEQ ID NO: 684610 - RNA, 19 nt, Artificial Sequence
  Description of Artificial Sequence: Synthetic oligonucleotide
acacgaacgcuucccaccg

SEQ ID NO: 684611 - RNA, 19 nt, Artificial Sequence
  Description of Artificial Sequence: Synthetic oligonucleotide
gagcacaucccaugcagag

SEQ ID NO: 684612 - RNA, 19 nt, Artificial Sequence
  Description of Artificial Sequence: Synthetic oligonucleotide
auauauauauauauaugua

SEQ ID NO: 684613 - RNA, 19 nt, Artificial Sequence
  Description of Artificial Sequence: Synthetic oligonucleotide
ucgucguuaaagccaaagu

SEQ ID NO: 684614 - RNA, 19 nt, Artificial Sequence
  Description of Artificial Sequence: Synthetic oligonucleotide
auauauauauauauauaua

SEQ ID NO: 684615 - RNA, 19 nt, Artificial Sequence
  Description of Artificial Sequence: Synthetic oligonucleotide
aaggccugcugcaauacag

SEQ ID NO: 684616 - RNA, 19 nt, Artificial Sequence
  Description of Artificial Sequence: Synthetic oligonucleotide
cauauagccuuuccucggg

SEQ ID NO: 684617 - RNA, 19 nt, Artificial Sequence
  Description of Artificial Sequence: Synthetic oligonucleotide
uauagccuuuccucgggcc

SEQ ID NO: 684618 - RNA, 19 nt, Artificial Sequence
  Description of Artificial Sequence: Synthetic oligonucleotide
gcauaucucaagcagguug

SEQ ID NO: 684619 - RNA, 19 nt, Artificial Sequence
  Description of Artificial Sequence: Synthetic oligonucleotide
cucaauauauauauauaua

SEQ ID NO: 684620 - RNA, 19 nt, Artificial Sequence
  Description of Artificial Sequence: Synthetic oligonucleotide
cagaaugcgcuccaccagg

SEQ ID NO: 684621 - RNA, 19 nt, Artificial Sequence
  Description of Artificial Sequence: Synthetic oligonucleotide
uauaucucucucucucucu

SEQ ID NO: 684622 - RNA, 19 nt, Artificial Sequence
  Description of Artificial Sequence: Synthetic oligonucleotide
uuguagcauaucucaagca

SEQ ID NO: 684623 - RNA, 19 nt, Artificial Sequence
  Description of Artificial Sequence: Synthetic oligonucleotide
ucucucuccucucuaugug

SEQ ID NO: 684624 - RNA, 19 nt, Artificial Sequence
  Description of Artificial Sequence: Synthetic oligonucleotide
aguaugaaacacaaacccu

SEQ ID NO: 684625 - RNA, 19 nt, Artificial Sequence
  Description of Artificial Sequence: Synthetic oligonucleotide
auauauauauauguauaua

SEQ ID NO: 684626 - RNA, 19 nt, Artificial Sequence
  Description of Artificial Sequence: Synthetic oligonucleotide
aacugaggguccuguuggg

SEQ ID NO: 684627 - RNA, 19 nt, Artificial Sequence
  Description of Artificial Sequence: Synthetic oligonucleotide
auauauauguauauauaua

SEQ ID NO: 684628 - RNA, 19 nt, Artificial Sequence
  Description of Artificial Sequence: Synthetic oligonucleotide
acauggucguucuccuccc

SEQ ID NO: 684629 - RNA, 19 nt, Artificial Sequence
  Description of Artificial Sequence: Synthetic oligonucleotide
gaauccccgguucuggccc

SEQ ID NO: 684630 - RNA, 19 nt, Artificial Sequence
  Description of Artificial Sequence: Synthetic oligonucleotide
gggauugucgucgucagcg

SEQ ID NO: 684631 - RNA, 19 nt, Artificial Sequence
  Description of Artificial Sequence: Synthetic oligonucleotide
auauauauauguauauaua

SEQ ID NO: 684632 - RNA, 19 nt, Artificial Sequence
  Description of Artificial Sequence: Synthetic oligonucleotide
ugguccugagugaaaggcc

SEQ ID NO: 684633 - RNA, 19 nt, Artificial Sequence
  Description of Artificial Sequence: Synthetic oligonucleotide
aucucucucucucucucuc

SEQ ID NO: 684634 - RNA, 19 nt, Artificial Sequence
  Description of Artificial Sequence: Synthetic oligonucleotide
accaaaggacccauccugc

SEQ ID NO: 684635 - RNA, 19 nt, Artificial Sequence
  Description of Artificial Sequence: Synthetic oligonucleotide
cagagcacaucccaugcag

SEQ ID NO: 684636 - RNA, 19 nt, Artificial Sequence
  Description of Artificial Sequence: Synthetic oligonucleotide
ugggacaaggccacuuggc

SEQ ID NO: 684637 - RNA, 19 nt, Artificial Sequence
  Description of Artificial Sequence: Synthetic oligonucleotide
uugggauugucgucgucag

SEQ ID NO: 684638 - RNA, 19 nt, Artificial Sequence
  Description of Artificial Sequence: Synthetic oligonucleotide
caccaaaggacccauccug

SEQ ID NO: 684639 - RNA, 19 nt, Artificial Sequence
  Description of Artificial Sequence: Synthetic oligonucleotide
acagacgacucccgggagg

SEQ ID NO: 684640 - RNA, 19 nt, Artificial Sequence
  Description of Artificial Sequence: Synthetic oligonucleotide
auccgcaacacuaaccaag

SEQ ID NO: 684641 - RNA, 19 nt, Artificial Sequence
  Description of Artificial Sequence: Synthetic oligonucleotide
guauauauauauauauaua

SEQ ID NO: 684642 - RNA, 19 nt, Artificial Sequence
  Description of Artificial Sequence: Synthetic oligonucleotide
acacuaaccaaggccuggc

SEQ ID NO: 684643 - RNA, 19 nt, Artificial Sequence
  Description of Artificial Sequence: Synthetic oligonucleotide
uggucguucuccucccagg

SEQ ID NO: 684644 - RNA, 19 nt, Artificial Sequence
  Description of Artificial Sequence: Synthetic oligonucleotide
aucgucgaacugcuggauc

SEQ ID NO: 684645 - RNA, 19 nt, Artificial Sequence
  Description of Artificial Sequence: Synthetic oligonucleotide
ugugacuuccugaggugcu

SEQ ID NO: 684646 - RNA, 19 nt, Artificial Sequence
  Description of Artificial Sequence: Synthetic oligonucleotide
auauguauauauauauaua

SEQ ID NO: 684647 - RNA, 19 nt, Artificial Sequence
  Description of Artificial Sequence: Synthetic oligonucleotide
acaucccaugcagaguggc

SEQ ID NO: 684648 - RNA, 19 nt, Artificial Sequence
  Description of Artificial Sequence: Synthetic oligonucleotide
uggacauccgcaacacuaa

SEQ ID NO: 684649 - RNA, 19 nt, Artificial Sequence
  Description of Artificial Sequence: Synthetic oligonucleotide
uuacaccccaagguggucc

SEQ ID NO: 684650 - RNA, 19 nt, Artificial Sequence
  Description of Artificial Sequence: Synthetic oligonucleotide
ucucucucuccucucuaug

SEQ ID NO: 684651 - RNA, 19 nt, Artificial Sequence
  Description of Artificial Sequence: Synthetic oligonucleotide
uccucaucgucgaacugcu

SEQ ID NO: 684652 - RNA, 19 nt, Artificial Sequence
  Description of Artificial Sequence: Synthetic oligonucleotide
agcguuuaaggagaaggug

SEQ ID NO: 684653 - RNA, 19 nt, Artificial Sequence
  Description of Artificial Sequence: Synthetic oligonucleotide
gggguagagccauugggcg

SEQ ID NO: 684654 - RNA, 19 nt, Artificial Sequence
  Description of Artificial Sequence: Synthetic oligonucleotide
ugaaaggccgggugugagc

SEQ ID NO: 684655 - RNA, 19 nt, Artificial Sequence
  Description of Artificial Sequence: Synthetic oligonucleotide
auaucucaagcagguuggc

SEQ ID NO: 684656 - RNA, 19 nt, Artificial Sequence
  Description of Artificial Sequence: Synthetic oligonucleotide
auauauguauauauauaua

SEQ ID NO: 684657 - RNA, 19 nt, Artificial Sequence
  Description of Artificial Sequence: Synthetic oligonucleotide
cccauauagccuuuccucg

SEQ ID NO: 684658 - RNA, 19 nt, Artificial Sequence
  Description of Artificial Sequence: Synthetic oligonucleotide
auguauauauauauauaua

SEQ ID NO: 684659 - RNA, 19 nt, Artificial Sequence
  Description of Artificial Sequence: Synthetic oligonucleotide
uugucaaagggugcauuca

SEQ ID NO: 684660 - RNA, 19 nt, Artificial Sequence
  Description of Artificial Sequence: Synthetic oligonucleotide
gaaugcgcuccaccaggcg

SEQ ID NO: 684661 - RNA, 19 nt, Artificial Sequence
  Description of Artificial Sequence: Synthetic oligonucleotide
auugggcgucucaagggcc

SEQ ID NO: 684662 - RNA, 19 nt, Artificial Sequence
  Description of Artificial Sequence: Synthetic oligonucleotide
gcaguaugaaacacaaacc

SEQ ID NO: 684663 - RNA, 19 nt, Artificial Sequence
  Description of Artificial Sequence: Synthetic oligonucleotide
aaggccgggugugagcauc

SEQ ID NO: 684664 - RNA, 19 nt, Artificial Sequence
  Description of Artificial Sequence: Synthetic oligonucleotide
agaaugcgcuccaccaggc

SEQ ID NO: 684665 - RNA, 19 nt, Artificial Sequence
  Description of Artificial Sequence: Synthetic oligonucleotide
agucuugucaaagggugca

SEQ ID NO: 684666 - RNA, 19 nt, Artificial Sequence
  Description of Artificial Sequence: Synthetic oligonucleotide
uccuuguagcauaucucaa

SEQ ID NO: 684667 - RNA, 19 nt, Artificial Sequence
  Description of Artificial Sequence: Synthetic oligonucleotide
ggguaugggguccugagac

SEQ ID NO: 684668 - RNA, 19 nt, Artificial Sequence
  Description of Artificial Sequence: Synthetic oligonucleotide
cagucuugucaaagggugc

SEQ ID NO: 684669 - RNA, 19 nt, Artificial Sequence
  Description of Artificial Sequence: Synthetic oligonucleotide
gaaaggccgggugugagca

SEQ ID NO: 684670 - RNA, 19 nt, Artificial Sequence
  Description of Artificial Sequence: Synthetic oligonucleotide
uauggggaaaugggcaaga

SEQ ID NO: 684671 - RNA, 19 nt, Artificial Sequence
  Description of Artificial Sequence: Synthetic oligonucleotide
uggauccgguccuuguagc

SEQ ID NO: 684672 - RNA, 19 nt, Artificial Sequence
  Description of Artificial Sequence: Synthetic oligonucleotide
cuagggauguugccagggc

SEQ ID NO: 684673 - RNA, 19 nt, Artificial Sequence
  Description of Artificial Sequence: Synthetic oligonucleotide
cuggacauccgcaacacua

SEQ ID NO: 684674 - RNA, 19 nt, Artificial Sequence
  Description of Artificial Sequence: Synthetic oligonucleotide
ucucucucucucucucucc

SEQ ID NO: 684675 - RNA, 19 nt, Artificial Sequence
  Description of Artificial Sequence: Synthetic oligonucleotide
cacacucacgccagccugg

SEQ ID NO: 684676 - RNA, 19 nt, Artificial Sequence
  Description of Artificial Sequence: Synthetic oligonucleotide
cagaguggccuggacaucc

SEQ ID NO: 684677 - RNA, 19 nt, Artificial Sequence
  Description of Artificial Sequence: Synthetic oligonucleotide
ucggggaaguugaacuccu

SEQ ID NO: 684678 - RNA, 19 nt, Artificial Sequence
  Description of Artificial Sequence: Synthetic oligonucleotide
caagggcucugcuacuuug

SEQ ID NO: 684679 - RNA, 19 nt, Artificial Sequence
  Description of Artificial Sequence: Synthetic oligonucleotide
agcuauuguccuggcuucc

SEQ ID NO: 684680 - RNA, 19 nt, Artificial Sequence
  Description of Artificial Sequence: Synthetic oligonucleotide
auauggggaaaugggcaag

SEQ ID NO: 684681 - RNA, 19 nt, Artificial Sequence
  Description of Artificial Sequence: Synthetic oligonucleotide
uuggucucggccagggguc

SEQ ID NO: 684682 - RNA, 19 nt, Artificial Sequence
  Description of Artificial Sequence: Synthetic oligonucleotide
ggucaugcgcugcaucugg

SEQ ID NO: 684683 - RNA, 19 nt, Artificial Sequence
  Description of Artificial Sequence: Synthetic oligonucleotide
ugagggccuaggcugggga

SEQ ID NO: 684684 - RNA, 19 nt, Artificial Sequence
  Description of Artificial Sequence: Synthetic oligonucleotide
caagagggccaccaaagga

SEQ ID NO: 684685 - RNA, 19 nt, Artificial Sequence
  Description of Artificial Sequence: Synthetic oligonucleotide
uaucucucucucucucucu

SEQ ID NO: 684686 - RNA, 19 nt, Artificial Sequence
  Description of Artificial Sequence: Synthetic oligonucleotide
aaugcaggauauggggaaa

SEQ ID NO: 684687 - RNA, 19 nt, Artificial Sequence
  Description of Artificial Sequence: Synthetic oligonucleotide
caucccaugcagaguggcc

SEQ ID NO: 684688 - RNA, 19 nt, Artificial Sequence
  Description of Artificial Sequence: Synthetic oligonucleotide
gacucucuaucuuuauucu

SEQ ID NO: 684689 - RNA, 19 nt, Artificial Sequence
  Description of Artificial Sequence: Synthetic oligonucleotide
cgucguuaaagccaaagug

SEQ ID NO: 684690 - RNA, 19 nt, Artificial Sequence
  Description of Artificial Sequence: Synthetic oligonucleotide
aaggugauguuggcagucu

SEQ ID NO: 684691 - RNA, 19 nt, Artificial Sequence
  Description of Artificial Sequence: Synthetic oligonucleotide
aggcaccauauucuccauc

SEQ ID NO: 684692 - RNA, 19 nt, Artificial Sequence
  Description of Artificial Sequence: Synthetic oligonucleotide
cucggggaaguugaacucc

SEQ ID NO: 684693 - RNA, 19 nt, Artificial Sequence
  Description of Artificial Sequence: Synthetic oligonucleotide
uauuguccuggcuuccuuu

SEQ ID NO: 684694 - RNA, 19 nt, Artificial Sequence
  Description of Artificial Sequence: Synthetic oligonucleotide
ucggcauugggccccugcu

SEQ ID NO: 684695 - RNA, 19 nt, Artificial Sequence
  Description of Artificial Sequence: Synthetic oligonucleotide
cgcaacacuaaccaaggcc

SEQ ID NO: 684696 - RNA, 19 nt, Artificial Sequence
  Description of Artificial Sequence: Synthetic oligonucleotide
cucuaucuuuauucuagga

SEQ ID NO: 684697 - RNA, 19 nt, Artificial Sequence
  Description of Artificial Sequence: Synthetic oligonucleotide
uugggcgucucaagggccu

SEQ ID NO: 684698 - RNA, 19 nt, Artificial Sequence
  Description of Artificial Sequence: Synthetic oligonucleotide
ccauauagccuuuccucgg

SEQ ID NO: 684699 - RNA, 19 nt, Artificial Sequence
  Description of Artificial Sequence: Synthetic oligonucleotide
uccccaaauuccucgucgu

SEQ ID NO: 684700 - RNA, 19 nt, Artificial Sequence
  Description of Artificial Sequence: Synthetic oligonucleotide
agggugcauucacacuuuc

SEQ ID NO: 684701 - RNA, 19 nt, Artificial Sequence
  Description of Artificial Sequence: Synthetic oligonucleotide
ggugcauucacacuuuccu

SEQ ID NO: 684702 - RNA, 19 nt, Artificial Sequence
  Description of Artificial Sequence: Synthetic oligonucleotide
auccguaggcacugguuca

SEQ ID NO: 684703 - RNA, 19 nt, Artificial Sequence
  Description of Artificial Sequence: Synthetic oligonucleotide
gacccauccugccccacug

SEQ ID NO: 684704 - RNA, 19 nt, Artificial Sequence
  Description of Artificial Sequence: Synthetic oligonucleotide
gucuggaucuggguagagg

SEQ ID NO: 684705 - RNA, 19 nt, Artificial Sequence
  Description of Artificial Sequence: Synthetic oligonucleotide
ucgaacugcuggauccggu

SEQ ID NO: 684706 - RNA, 19 nt, Artificial Sequence
  Description of Artificial Sequence: Synthetic oligonucleotide
uccuguuggggcauccgua

SEQ ID NO: 684707 - RNA, 19 nt, Artificial Sequence
  Description of Artificial Sequence: Synthetic oligonucleotide
ucucaagcagguuggcauu

SEQ ID NO: 684708 - RNA, 19 nt, Artificial Sequence
  Description of Artificial Sequence: Synthetic oligonucleotide
gacagacgacucccgggag

SEQ ID NO: 684709 - RNA, 19 nt, Artificial Sequence
  Description of Artificial Sequence: Synthetic oligonucleotide
gaggucaugcgcugcaucu

SEQ ID NO: 684710 - RNA, 19 nt, Artificial Sequence
  Description of Artificial Sequence: Synthetic oligonucleotide
cagaauccccgguucuggc

SEQ ID NO: 684711 - RNA, 19 nt, Artificial Sequence
  Description of Artificial Sequence: Synthetic oligonucleotide
cagcuauuguccuggcuuc

SEQ ID NO: 684712 - RNA, 19 nt, Artificial Sequence
  Description of Artificial Sequence: Synthetic oligonucleotide
ucggccagggguccugaca

SEQ ID NO: 684713 - RNA, 19 nt, Artificial Sequence
  Description of Artificial Sequence: Synthetic oligonucleotide
acuugcacacucacgccag

SEQ ID NO: 684714 - RNA, 19 nt, Artificial Sequence
  Description of Artificial Sequence: Synthetic oligonucleotide
ucucucucucucucucucu

SEQ ID NO: 684715 - RNA, 19 nt, Artificial Sequence
  Description of Artificial Sequence: Synthetic oligonucleotide
ugggauugucgucgucagc

SEQ ID NO: 684716 - RNA, 19 nt, Artificial Sequence
  Description of Artificial Sequence: Synthetic oligonucleotide
agggguccugacacgaacg

SEQ ID NO: 684717 - RNA, 19 nt, Artificial Sequence
  Description of Artificial Sequence: Synthetic oligonucleotide
ggucaaugaaggcugaggu

SEQ ID NO: 684718 - RNA, 19 nt, Artificial Sequence
  Description of Artificial Sequence: Synthetic oligonucleotide
ccauugggcgucucaaggg

SEQ ID NO: 684719 - RNA, 19 nt, Artificial Sequence
  Description of Artificial Sequence: Synthetic oligonucleotide
cagacgacucccgggaggc

SEQ ID NO: 684720 - RNA, 19 nt, Artificial Sequence
  Description of Artificial Sequence: Synthetic oligonucleotide
ugguugcacuguccaagga

SEQ ID NO: 684721 - RNA, 19 nt, Artificial Sequence
  Description of Artificial Sequence: Synthetic oligonucleotide
cuaauauaucucucucucu

SEQ ID NO: 684722 - RNA, 19 nt, Artificial Sequence
  Description of Artificial Sequence: Synthetic oligonucleotide
ggucagaaugcgcuccacc

SEQ ID NO: 684723 - RNA, 19 nt, Artificial Sequence
  Description of Artificial Sequence: Synthetic oligonucleotide
cacaucccaugcagagugg

SEQ ID NO: 684724 - RNA, 19 nt, Artificial Sequence
  Description of Artificial Sequence: Synthetic oligonucleotide
cucucucucucucucucuc

SEQ ID NO: 684725 - RNA, 19 nt, Artificial Sequence
  Description of Artificial Sequence: Synthetic oligonucleotide
cuguuggggcauccguagg

SEQ ID NO: 684726 - RNA, 19 nt, Artificial Sequence
  Description of Artificial Sequence: Synthetic oligonucleotide
uggcccucuagggauguug

SEQ ID NO: 684727 - RNA, 19 nt, Artificial Sequence
  Description of Artificial Sequence: Synthetic oligonucleotide
agggcucugcuacuuugcu

SEQ ID NO: 684728 - RNA, 19 nt, Artificial Sequence
  Description of Artificial Sequence: Synthetic oligonucleotide
ccucuagggauguugccag

SEQ ID NO: 684729 - RNA, 19 nt, Artificial Sequence
  Description of Artificial Sequence: Synthetic oligonucleotide
ucucucucucuccucucua

SEQ ID NO: 684730 - RNA, 19 nt, Artificial Sequence
  Description of Artificial Sequence: Synthetic oligonucleotide
ccucaauauauauauauau

SEQ ID NO: 684731 - RNA, 19 nt, Artificial Sequence
  Description of Artificial Sequence: Synthetic oligonucleotide
gaggacaugucugucuucu

SEQ ID NO: 684732 - RNA, 19 nt, Artificial Sequence
  Description of Artificial Sequence: Synthetic oligonucleotide
guccccgcuggacagacga

SEQ ID NO: 684733 - RNA, 19 nt, Artificial Sequence
  Description of Artificial Sequence: Synthetic oligonucleotide
gguaugggguccugagacc

SEQ ID NO: 684734 - RNA, 19 nt, Artificial Sequence
  Description of Artificial Sequence: Synthetic oligonucleotide
uagccuuuccucgggcccc

SEQ ID NO: 684735 - RNA, 19 nt, Artificial Sequence
  Description of Artificial Sequence: Synthetic oligonucleotide
gcaacacuaaccaaggccu

SEQ ID NO: 684736 - RNA, 19 nt, Artificial Sequence
  Description of Artificial Sequence: Synthetic oligonucleotide
ccucuguuacaccccaagg

SEQ ID NO: 684737 - RNA, 19 nt, Artificial Sequence
  Description of Artificial Sequence: Synthetic oligonucleotide
cagggguccugacacgaac

SEQ ID NO: 684738 - RNA, 19 nt, Artificial Sequence
  Description of Artificial Sequence: Synthetic oligonucleotide
uucuuacuccucccucaau

SEQ ID NO: 684739 - RNA, 19 nt, Artificial Sequence
  Description of Artificial Sequence: Synthetic oligonucleotide
uuggggcauccguaggcac

SEQ ID NO: 684740 - RNA, 19 nt, Artificial Sequence
  Description of Artificial Sequence: Synthetic oligonucleotide
ucgucgucacuggaggagu

SEQ ID NO: 684741 - RNA, 19 nt, Artificial Sequence
  Description of Artificial Sequence: Synthetic oligonucleotide
uguugccagggcccucugu

SEQ ID NO: 684742 - RNA, 19 nt, Artificial Sequence
  Description of Artificial Sequence: Synthetic oligonucleotide
ccuguuggggcauccguag

SEQ ID NO: 684743 - RNA, 19 nt, Artificial Sequence
  Description of Artificial Sequence: Synthetic oligonucleotide
guccagaggagagaaugca

SEQ ID NO: 684744 - RNA, 19 nt, Artificial Sequence
  Description of Artificial Sequence: Synthetic oligonucleotide
cucggcauugggccccugc

SEQ ID NO: 684745 - RNA, 19 nt, Artificial Sequence
  Description of Artificial Sequence: Synthetic oligonucleotide
gucgaacugcuggauccgg

SEQ ID NO: 684746 - RNA, 19 nt, Artificial Sequence
  Description of Artificial Sequence: Synthetic oligonucleotide
ggacagacgacucccggga

SEQ ID NO: 684747 - RNA, 19 nt, Artificial Sequence
  Description of Artificial Sequence: Synthetic oligonucleotide
uccucucuaugugacucuc

SEQ ID NO: 684748 - RNA, 19 nt, Artificial Sequence
  Description of Artificial Sequence: Synthetic oligonucleotide
uccugagaccugagcugug

SEQ ID NO: 684749 - RNA, 19 nt, Artificial Sequence
  Description of Artificial Sequence: Synthetic oligonucleotide
gcaauacagccuccucggg

SEQ ID NO: 684750 - RNA, 19 nt, Artificial Sequence
  Description of Artificial Sequence: Synthetic oligonucleotide
acacucacgccagccuggg

SEQ ID NO: 684751 - RNA, 19 nt, Artificial Sequence
  Description of Artificial Sequence: Synthetic oligonucleotide
ucucucucucucucuccuc

SEQ ID NO: 684752 - RNA, 19 nt, Artificial Sequence
  Description of Artificial Sequence: Synthetic oligonucleotide
ucucucucucucuccucuc

SEQ ID NO: 684753 - RNA, 19 nt, Artificial Sequence
  Description of Artificial Sequence: Synthetic oligonucleotide
agagcacaucccaugcaga

SEQ ID NO: 684754 - RNA, 19 nt, Artificial Sequence
  Description of Artificial Sequence: Synthetic oligonucleotide
auccgguccuuguagcaua

SEQ ID NO: 684755 - RNA, 19 nt, Artificial Sequence
  Description of Artificial Sequence: Synthetic oligonucleotide
uccgguccuuguagcauau

SEQ ID NO: 684756 - RNA, 19 nt, Artificial Sequence
  Description of Artificial Sequence: Synthetic oligonucleotide
gguagagccauugggcguc

SEQ ID NO: 684757 - RNA, 19 nt, Artificial Sequence
  Description of Artificial Sequence: Synthetic oligonucleotide
ccugacacgaacgcuuccc

SEQ ID NO: 684758 - RNA, 19 nt, Artificial Sequence
  Description of Artificial Sequence: Synthetic oligonucleotide
cuuacuccucccucaauau

SEQ ID NO: 684759 - RNA, 19 nt, Artificial Sequence
  Description of Artificial Sequence: Synthetic oligonucleotide
aaaggccgggugugagcau

SEQ ID NO: 684760 - RNA, 19 nt, Artificial Sequence
  Description of Artificial Sequence: Synthetic oligonucleotide
ucucaagggccugggcacu

SEQ ID NO: 684761 - RNA, 19 nt, Artificial Sequence
  Description of Artificial Sequence: Synthetic oligonucleotide
ugguucaaagguggcuguc

SEQ ID NO: 684762 - RNA, 19 nt, Artificial Sequence
  Description of Artificial Sequence: Synthetic oligonucleotide
guuggggcauccguaggca

SEQ ID NO: 684763 - RNA, 19 nt, Artificial Sequence
  Description of Artificial Sequence: Synthetic oligonucleotide
gauguugccagggcccucu

SEQ ID NO: 684764 - RNA, 19 nt, Artificial Sequence
  Description of Artificial Sequence: Synthetic oligonucleotide
cucucucuccucucuaugu

SEQ ID NO: 684765 - RNA, 19 nt, Artificial Sequence
  Description of Artificial Sequence: Synthetic oligonucleotide
ggacauccgcaacacuaac

SEQ ID NO: 684766 - RNA, 19 nt, Artificial Sequence
  Description of Artificial Sequence: Synthetic oligonucleotide
ggucguucuccucccagga

SEQ ID NO: 684767 - RNA, 19 nt, Artificial Sequence
  Description of Artificial Sequence: Synthetic oligonucleotide
ggagagaaugcaggauaug

SEQ ID NO: 684768 - RNA, 19 nt, Artificial Sequence
  Description of Artificial Sequence: Synthetic oligonucleotide
ggcagcuacugggaacccg

SEQ ID NO: 684769 - RNA, 19 nt, Artificial Sequence
  Description of Artificial Sequence: Synthetic oligonucleotide
gcuggucuggaucugggua

SEQ ID NO: 684770 - RNA, 19 nt, Artificial Sequence
  Description of Artificial Sequence: Synthetic oligonucleotide
acccgaugaaaugggcccu

SEQ ID NO: 684771 - RNA, 19 nt, Artificial Sequence
  Description of Artificial Sequence: Synthetic oligonucleotide
aggcggucguccucgucgu

SEQ ID NO: 684772 - RNA, 19 nt, Artificial Sequence
  Description of Artificial Sequence: Synthetic oligonucleotide
ccaggaggucagaaugcgc

SEQ ID NO: 684773 - RNA, 19 nt, Artificial Sequence
  Description of Artificial Sequence: Synthetic oligonucleotide
gauugucgucgucagcguu

SEQ ID NO: 684774 - RNA, 19 nt, Artificial Sequence
  Description of Artificial Sequence: Synthetic oligonucleotide
cucucucucucucuccucu

SEQ ID NO: 684775 - RNA, 19 nt, Artificial Sequence
  Description of Artificial Sequence: Synthetic oligonucleotide
cacuaaccaaggccuggca

SEQ ID NO: 684776 - RNA, 19 nt, Artificial Sequence
  Description of Artificial Sequence: Synthetic oligonucleotide
cccucaauauauauauaua

SEQ ID NO: 684777 - RNA, 19 nt, Artificial Sequence
  Description of Artificial Sequence: Synthetic oligonucleotide
cacgaacgcuucccaccgc

SEQ ID NO: 684778 - RNA, 19 nt, Artificial Sequence
  Description of Artificial Sequence: Synthetic oligonucleotide
ugaggcggucguccucguc

SEQ ID NO: 684779 - RNA, 19 nt, Artificial Sequence
  Description of Artificial Sequence: Synthetic oligonucleotide
ccgggugugagcaucugca

SEQ ID NO: 684780 - RNA, 19 nt, Artificial Sequence
  Description of Artificial Sequence: Synthetic oligonucleotide
cauccgcaacacuaaccaa

SEQ ID NO: 684781 - RNA, 19 nt, Artificial Sequence
  Description of Artificial Sequence: Synthetic oligonucleotide
ggugaguguucaccagauc

SEQ ID NO: 684782 - RNA, 19 nt, Artificial Sequence
  Description of Artificial Sequence: Synthetic oligonucleotide
uggcccgcaugggaagccc

SEQ ID NO: 684783 - RNA, 19 nt, Artificial Sequence
  Description of Artificial Sequence: Synthetic oligonucleotide
ggcauugggccccugcucu

SEQ ID NO: 684784 - RNA, 19 nt, Artificial Sequence
  Description of Artificial Sequence: Synthetic oligonucleotide
cguuaaagccaaagugguc

SEQ ID NO: 684785 - RNA, 19 nt, Artificial Sequence
  Description of Artificial Sequence: Synthetic oligonucleotide
gugacucucuaucuuuauu

SEQ ID NO: 684786 - RNA, 19 nt, Artificial Sequence
  Description of Artificial Sequence: Synthetic oligonucleotide
agcauaucucaagcagguu

SEQ ID NO: 684787 - RNA, 19 nt, Artificial Sequence
  Description of Artificial Sequence: Synthetic oligonucleotide
cagggcccucuguuacacc

SEQ ID NO: 684788 - RNA, 19 nt, Artificial Sequence
  Description of Artificial Sequence: Synthetic oligonucleotide
cacucacgccagccugggg

SEQ ID NO: 684789 - RNA, 19 nt, Artificial Sequence
  Description of Artificial Sequence: Synthetic oligonucleotide
cucucucucucucucuccu

SEQ ID NO: 684790 - RNA, 19 nt, Artificial Sequence
  Description of Artificial Sequence: Synthetic oligonucleotide
ccucggggaaguugaacuc

SEQ ID NO: 684791 - RNA, 19 nt, Artificial Sequence
  Description of Artificial Sequence: Synthetic oligonucleotide
guuacaccccaaggugguc

SEQ ID NO: 684792 - RNA, 19 nt, Artificial Sequence
  Description of Artificial Sequence: Synthetic oligonucleotide
cucccucaauauauauaua

SEQ ID NO: 684793 - RNA, 19 nt, Artificial Sequence
  Description of Artificial Sequence: Synthetic oligonucleotide
cuggcccgcaugggaagcc

SEQ ID NO: 684794 - RNA, 19 nt, Artificial Sequence
  Description of Artificial Sequence: Synthetic oligonucleotide
ucacugccaccaggcagcu

SEQ ID NO: 684795 - RNA, 19 nt, Artificial Sequence
  Description of Artificial Sequence: Synthetic oligonucleotide
gauccgguccuuguagcau

SEQ ID NO: 684796 - RNA, 19 nt, Artificial Sequence
  Description of Artificial Sequence: Synthetic oligonucleotide
ggcgucucaagggccuggg

SEQ ID NO: 684797 - RNA, 19 nt, Artificial Sequence
  Description of Artificial Sequence: Synthetic oligonucleotide
gccgggugugagcaucugc

SEQ ID NO: 684798 - RNA, 19 nt, Artificial Sequence
  Description of Artificial Sequence: Synthetic oligonucleotide
gggguaugggguccugaga

SEQ ID NO: 684799 - RNA, 19 nt, Artificial Sequence
  Description of Artificial Sequence: Synthetic oligonucleotide
ggcccauauagccuuuccu

SEQ ID NO: 684800 - RNA, 19 nt, Artificial Sequence
  Description of Artificial Sequence: Synthetic oligonucleotide
cgucucaagggccugggca

SEQ ID NO: 684801 - RNA, 19 nt, Artificial Sequence
  Description of Artificial Sequence: Synthetic oligonucleotide
ugucgucgucagcguuuaa

SEQ ID NO: 684802 - RNA, 19 nt, Artificial Sequence
  Description of Artificial Sequence: Synthetic oligonucleotide
gcauucacacuuuccuccu

SEQ ID NO: 684803 - RNA, 19 nt, Artificial Sequence
  Description of Artificial Sequence: Synthetic oligonucleotide
cucaagggccugggcacuc

SEQ ID NO: 684804 - RNA, 19 nt, Artificial Sequence
  Description of Artificial Sequence: Synthetic oligonucleotide
ggcagucuugucaaagggu

SEQ ID NO: 684805 - RNA, 19 nt, Artificial Sequence
  Description of Artificial Sequence: Synthetic oligonucleotide
cucucucucucuccucucu

SEQ ID NO: 684806 - RNA, 19 nt, Artificial Sequence
  Description of Artificial Sequence: Synthetic oligonucleotide
cuccucccucaauauauau

SEQ ID NO: 684807 - RNA, 19 nt, Artificial Sequence
  Description of Artificial Sequence: Synthetic oligonucleotide
cgaacgcuucccaccgccg

SEQ ID NO: 684808 - RNA, 19 nt, Artificial Sequence
  Description of Artificial Sequence: Synthetic oligonucleotide
gcauugggccccugcucug

SEQ ID NO: 684809 - RNA, 19 nt, Artificial Sequence
  Description of Artificial Sequence: Synthetic oligonucleotide
cccgguucuggcccucuag

SEQ ID NO: 684810 - RNA, 19 nt, Artificial Sequence
  Description of Artificial Sequence: Synthetic oligonucleotide
ccgcaacacuaaccaaggc

SEQ ID NO: 684811 - RNA, 19 nt, Artificial Sequence
  Description of Artificial Sequence: Synthetic oligonucleotide
cacugguucaaagguggcu

SEQ ID NO: 684812 - RNA, 19 nt, Artificial Sequence
  Description of Artificial Sequence: Synthetic oligonucleotide
cacggugggcuggagagcu

SEQ ID NO: 684813 - RNA, 19 nt, Artificial Sequence
  Description of Artificial Sequence: Synthetic oligonucleotide
cucucucucuccucucuau

SEQ ID NO: 684814 - RNA, 19 nt, Artificial Sequence
  Description of Artificial Sequence: Synthetic oligonucleotide
cgcuggacagacgacuccc

SEQ ID NO: 684815 - RNA, 19 nt, Artificial Sequence
  Description of Artificial Sequence: Synthetic oligonucleotide
ggguagagccauugggcgu

SEQ ID NO: 684816 - RNA, 19 nt, Artificial Sequence
  Description of Artificial Sequence: Synthetic oligonucleotide
ugggacccucaggguacug

SEQ ID NO: 684817 - RNA, 19 nt, Artificial Sequence
  Description of Artificial Sequence: Synthetic oligonucleotide
gccccaaagguucuggguu

SEQ ID NO: 684818 - RNA, 19 nt, Artificial Sequence
  Description of Artificial Sequence: Synthetic oligonucleotide
cccaaauuccucgucguua

SEQ ID NO: 684819 - RNA, 19 nt, Artificial Sequence
  Description of Artificial Sequence: Synthetic oligonucleotide
ggauugucgucgucagcgu

SEQ ID NO: 684820 - RNA, 19 nt, Artificial Sequence
  Description of Artificial Sequence: Synthetic oligonucleotide
cccgcaugggaagcccucg

SEQ ID NO: 684821 - RNA, 19 nt, Artificial Sequence
  Description of Artificial Sequence: Synthetic oligonucleotide
cgucgaacugcuggauccg

SEQ ID NO: 684822 - RNA, 19 nt, Artificial Sequence
  Description of Artificial Sequence: Synthetic oligonucleotide
gcugagggccuaggcuggg

SEQ ID NO: 684823 - RNA, 19 nt, Artificial Sequence
  Description of Artificial Sequence: Synthetic oligonucleotide
ccgaugaaaugggcccucc

SEQ ID NO: 684824 - RNA, 19 nt, Artificial Sequence
  Description of Artificial Sequence: Synthetic oligonucleotide
cgucgucagcguuuaagga

SEQ ID NO: 684825 - RNA, 19 nt, Artificial Sequence
  Description of Artificial Sequence: Synthetic oligonucleotide
gggcgucucaagggccugg

SEQ ID NO: 684826 - RNA, 19 nt, Artificial Sequence
  Description of Artificial Sequence: Synthetic oligonucleotide
auccccgguucuggcccuc

SEQ ID NO: 684827 - RNA, 19 nt, Artificial Sequence
  Description of Artificial Sequence: Synthetic oligonucleotide
gcgucucaagggccugggc

SEQ ID NO: 684828 - RNA, 19 nt, Artificial Sequence
  Description of Artificial Sequence: Synthetic oligonucleotide
ccgcaugggaagcccucgc

SEQ ID NO: 684829 - RNA, 19 nt, Artificial Sequence
  Description of Artificial Sequence: Synthetic oligonucleotide
gcggucguccucgucguca

SEQ ID NO: 684830 - RNA, 19 nt, Artificial Sequence
  Description of Artificial Sequence: Synthetic oligonucleotide
agacgacucccgggaggcu

SEQ ID NO: 684831 - RNA, 19 nt, Artificial Sequence
  Description of Artificial Sequence: Synthetic oligonucleotide
gggcccucuguuacacccc

SEQ ID NO: 684832 - RNA, 19 nt, Artificial Sequence
  Description of Artificial Sequence: Synthetic oligonucleotide
uccccgguucuggcccucu

SEQ ID NO: 684833 - RNA, 19 nt, Artificial Sequence
  Description of Artificial Sequence: Synthetic oligonucleotide
ccucgcugucugugcuucc

SEQ ID NO: 684834 - RNA, 19 nt, Artificial Sequence
  Description of Artificial Sequence: Synthetic oligonucleotide
ccucgucgucacuggagga

SEQ ID NO: 684835 - RNA, 19 nt, Artificial Sequence
  Description of Artificial Sequence: Synthetic oligonucleotide
cauugggccccugcucugu

SEQ ID NO: 684836 - RNA, 19 nt, Artificial Sequence
  Description of Artificial Sequence: Synthetic oligonucleotide
ucccaccgccgcugcugau

SEQ ID NO: 684837 - RNA, 19 nt, Artificial Sequence
  Description of Artificial Sequence: Synthetic oligonucleotide
cccgaugaaaugggcccuc

SEQ ID NO: 684838 - RNA, 19 nt, Artificial Sequence
  Description of Artificial Sequence: Synthetic oligonucleotide
cccuuccacaggccgccug

SEQ ID NO: 684839 - RNA, 19 nt, Artificial Sequence
  Description of Artificial Sequence: Synthetic oligonucleotide
caucgucgaacugcuggau

SEQ ID NO: 684840 - RNA, 19 nt, Artificial Sequence
  Description of Artificial Sequence: Synthetic oligonucleotide
gcacccagaauccccgguu

SEQ ID NO: 684841 - RNA, 19 nt, Artificial Sequence
  Description of Artificial Sequence: Synthetic oligonucleotide
cggucguccucgucgucac

SEQ ID NO: 684842 - RNA, 19 nt, Artificial Sequence
  Description of Artificial Sequence: Synthetic oligonucleotide
gcagaguggccuggacauc

SEQ ID NO: 684843 - RNA, 19 nt, Artificial Sequence
  Description of Artificial Sequence: Synthetic oligonucleotide
gggauguugccagggcccu

SEQ ID NO: 684844 - RNA, 19 nt, Artificial Sequence
  Description of Artificial Sequence: Synthetic oligonucleotide
guagagccauugggcgucu

SEQ ID NO: 684845 - RNA, 19 nt, Artificial Sequence
  Description of Artificial Sequence: Synthetic oligonucleotide
cggcauugggccccugcuc

SEQ ID NO: 684846 - RNA, 19 nt, Artificial Sequence
  Description of Artificial Sequence: Synthetic oligonucleotide
gggucagagcacaucccau

SEQ ID NO: 684847 - RNA, 19 nt, Artificial Sequence
  Description of Artificial Sequence: Synthetic oligonucleotide
ggccgggugugagcaucug

SEQ ID NO: 684848 - RNA, 19 nt, Artificial Sequence
  Description of Artificial Sequence: Synthetic oligonucleotide
ccugggcacucuggcuuug

SEQ ID NO: 684849 - RNA, 19 nt, Artificial Sequence
  Description of Artificial Sequence: Synthetic oligonucleotide
cagacugcacauggucguu

SEQ ID NO: 684850 - RNA, 19 nt, Artificial Sequence
  Description of Artificial Sequence: Synthetic oligonucleotide
gggguuccauggggaggac

SEQ ID NO: 684851 - RNA, 19 nt, Artificial Sequence
  Description of Artificial Sequence: Synthetic oligonucleotide
gcgccgguccccgcuggac

SEQ ID NO: 684852 - RNA, 19 nt, Artificial Sequence
  Description of Artificial Sequence: Synthetic oligonucleotide
ccgguccuuguagcauauc

SEQ ID NO: 684853 - RNA, 19 nt, Artificial Sequence
  Description of Artificial Sequence: Synthetic oligonucleotide
cgccgguccccgcuggaca

SEQ ID NO: 684854 - RNA, 19 nt, Artificial Sequence
  Description of Artificial Sequence: Synthetic oligonucleotide
gcgcuccaccaggcggcag

SEQ ID NO: 684855 - RNA, 19 nt, Artificial Sequence
  Description of Artificial Sequence: Synthetic oligonucleotide
ccccaaauuccucgucguu

SEQ ID NO: 684856 - RNA, 19 nt, Artificial Sequence
  Description of Artificial Sequence: Synthetic oligonucleotide
ggucucggccagggguccu

SEQ ID NO: 684857 - RNA, 19 nt, Artificial Sequence
  Description of Artificial Sequence: Synthetic oligonucleotide
ccgguccccgcuggacaga

SEQ ID NO: 684858 - RNA, 19 nt, Artificial Sequence
  Description of Artificial Sequence: Synthetic oligonucleotide
gcccuuccacaggccgccu

SEQ ID NO: 684859 - RNA, 19 nt, Artificial Sequence
  Description of Artificial Sequence: Synthetic oligonucleotide
aaguaauugagccuuaucc

SEQ ID NO: 684860 - RNA, 19 nt, Artificial Sequence
  Description of Artificial Sequence: Synthetic oligonucleotide
aaacccgaaauguugaugc

SEQ ID NO: 684861 - RNA, 19 nt, Artificial Sequence
  Description of Artificial Sequence: Synthetic oligonucleotide
ugguauacuaauuacaacg

SEQ ID NO: 684862 - RNA, 19 nt, Artificial Sequence
  Description of Artificial Sequence: Synthetic oligonucleotide
acuggugauauacugaagc

SEQ ID NO: 684863 - RNA, 19 nt, Artificial Sequence
  Description of Artificial Sequence: Synthetic oligonucleotide
uauuucaaguaauugagcc

SEQ ID NO: 684864 - RNA, 19 nt, Artificial Sequence
  Description of Artificial Sequence: Synthetic oligonucleotide
ucuagaacgagacucacug

SEQ ID NO: 684865 - RNA, 19 nt, Artificial Sequence
  Description of Artificial Sequence: Synthetic oligonucleotide
aauauguuacugccaaaac

SEQ ID NO: 684866 - RNA, 19 nt, Artificial Sequence
  Description of Artificial Sequence: Synthetic oligonucleotide
uauacuaauuacaacggga

SEQ ID NO: 684867 - RNA, 19 nt, Artificial Sequence
  Description of Artificial Sequence: Synthetic oligonucleotide
ucuuuuacgacgaauggga

SEQ ID NO: 684868 - RNA, 19 nt, Artificial Sequence
  Description of Artificial Sequence: Synthetic oligonucleotide
aagaccuggaucuuuuacg

SEQ ID NO: 684869 - RNA, 19 nt, Artificial Sequence
  Description of Artificial Sequence: Synthetic oligonucleotide
  modified_base (5)..(5): a, c, u, g, unknown or other
uuuancuucacugcuaggc

SEQ ID NO: 684870 - RNA, 19 nt, Artificial Sequence
  Description of Artificial Sequence: Synthetic oligonucleotide
uugaacguguuugagaacg

SEQ ID NO: 684871 - RNA, 19 nt, Artificial Sequence
  Description of Artificial Sequence: Synthetic oligonucleotide
ucaauuaagccaaaacaac

SEQ ID NO: 684872 - RNA, 19 nt, Artificial Sequence
  Description of Artificial Sequence: Synthetic oligonucleotide
aauaggugcauuguuucac

SEQ ID NO: 684873 - RNA, 19 nt, Artificial Sequence
  Description of Artificial Sequence: Synthetic oligonucleotide
aacgaugugacuuggacuu

SEQ ID NO: 684874 - RNA, 19 nt, Artificial Sequence
  Description of Artificial Sequence: Synthetic oligonucleotide
uuugauacagaccgucucc

SEQ ID NO: 684875 - RNA, 19 nt, Artificial Sequence
  Description of Artificial Sequence: Synthetic oligonucleotide
aaggcuagccaauaacaag

SEQ ID NO: 684876 - RNA, 19 nt, Artificial Sequence
  Description of Artificial Sequence: Synthetic oligonucleotide
cuagccaauaacaaguuuc

SEQ ID NO: 684877 - RNA, 19 nt, Artificial Sequence
  Description of Artificial Sequence: Synthetic oligonucleotide
ucuguuagacguuugggug

SEQ ID NO: 684878 - RNA, 19 nt, Artificial Sequence
  Description of Artificial Sequence: Synthetic oligonucleotide
uaauggccggccauuaucg

SEQ ID NO: 684879 - RNA, 19 nt, Artificial Sequence
  Description of Artificial Sequence: Synthetic oligonucleotide
ucucuucuauuguaggugg

SEQ ID NO: 684880 - RNA, 19 nt, Artificial Sequence
  Description of Artificial Sequence: Synthetic oligonucleotide
auacuaauuacaacgggac

SEQ ID NO: 684881 - RNA, 19 nt, Artificial Sequence
  Description of Artificial Sequence: Synthetic oligonucleotide
cuagacuuagaucuugacc

SEQ ID NO: 684882 - RNA, 19 nt, Artificial Sequence
  Description of Artificial Sequence: Synthetic oligonucleotide
uuuacgacgaaugggagac

SEQ ID NO: 684883 - RNA, 19 nt, Artificial Sequence
  Description of Artificial Sequence: Synthetic oligonucleotide
acuaauuacaacgggacug

SEQ ID NO: 684884 - RNA, 19 nt, Artificial Sequence
  Description of Artificial Sequence: Synthetic oligonucleotide
aaguaaagguccuuccaug

SEQ ID NO: 684885 - RNA, 19 nt, Artificial Sequence
  Description of Artificial Sequence: Synthetic oligonucleotide
  modified_base (4)..(4): a, c, u, g, unknown or other
uuancuucacugcuaggca

SEQ ID NO: 684886 - RNA, 19 nt, Artificial Sequence
  Description of Artificial Sequence: Synthetic oligonucleotide
accuggaucuuuuacgacg

SEQ ID NO: 684887 - RNA, 19 nt, Artificial Sequence
  Description of Artificial Sequence: Synthetic oligonucleotide
aaucuguuagacguuuggg

SEQ ID NO: 684888 - RNA, 19 nt, Artificial Sequence
  Description of Artificial Sequence: Synthetic oligonucleotide
gagaccuuaaugaagaguc

SEQ ID NO: 684889 - RNA, 19 nt, Artificial Sequence
  Description of Artificial Sequence: Synthetic oligonucleotide
uccgagaccuuaaugaaga

SEQ ID NO: 684890 - RNA, 19 nt, Artificial Sequence
  Description of Artificial Sequence: Synthetic oligonucleotide
auaggugcauuguuucacc

SEQ ID NO: 684891 - RNA, 19 nt, Artificial Sequence
  Description of Artificial Sequence: Synthetic oligonucleotide
aacgcuuacuccgagaccu

SEQ ID NO: 684892 - RNA, 19 nt, Artificial Sequence
  Description of Artificial Sequence: Synthetic oligonucleotide
guauacuaauuacaacggg

SEQ ID NO: 684893 - RNA, 19 nt, Artificial Sequence
  Description of Artificial Sequence: Synthetic oligonucleotide
ucugacuggugauauacug

SEQ ID NO: 684894 - RNA, 19 nt, Artificial Sequence
  Description of Artificial Sequence: Synthetic oligonucleotide
aagaacugauaauggccgg

SEQ ID NO: 684895 - RNA, 19 nt, Artificial Sequence
  Description of Artificial Sequence: Synthetic oligonucleotide
auuucuagcgucuucccca

SEQ ID NO: 684896 - RNA, 19 nt, Artificial Sequence
  Description of Artificial Sequence: Synthetic oligonucleotide
aacgagacucacugguacg

SEQ ID NO: 684897 - RNA, 19 nt, Artificial Sequence
  Description of Artificial Sequence: Synthetic oligonucleotide
cucaauuaagccaaaacaa

SEQ ID NO: 684898 - RNA, 19 nt, Artificial Sequence
  Description of Artificial Sequence: Synthetic oligonucleotide
aauuaagccaaaacaacaa

SEQ ID NO: 684899 - RNA, 19 nt, Artificial Sequence
  Description of Artificial Sequence: Synthetic oligonucleotide
uugaugcgaaagaaguucc

SEQ ID NO: 684900 - RNA, 19 nt, Artificial Sequence
  Description of Artificial Sequence: Synthetic oligonucleotide
caagaguguaucaagcaug

SEQ ID NO: 684901 - RNA, 19 nt, Artificial Sequence
  Description of Artificial Sequence: Synthetic oligonucleotide
  modified_base (3)..(3): a, c, u, g, unknown or other
uancuucacugcuaggcag

SEQ ID NO: 684902 - RNA, 19 nt, Artificial Sequence
  Description of Artificial Sequence: Synthetic oligonucleotide
agacguuugggugaucugc

SEQ ID NO: 684903 - RNA, 19 nt, Artificial Sequence
  Description of Artificial Sequence: Synthetic oligonucleotide
aaacccgaaccgcaggaag

SEQ ID NO: 684904 - RNA, 19 nt, Artificial Sequence
  Description of Artificial Sequence: Synthetic oligonucleotide
auuugucgcgcucaacuuc

SEQ ID NO: 684905 - RNA, 19 nt, Artificial Sequence
  Description of Artificial Sequence: Synthetic oligonucleotide
aaugccggcaggauacccc

SEQ ID NO: 684906 - RNA, 19 nt, Artificial Sequence
  Description of Artificial Sequence: Synthetic oligonucleotide
ucgucuucguaccacagac

SEQ ID NO: 684907 - RNA, 19 nt, Artificial Sequence
  Description of Artificial Sequence: Synthetic oligonucleotide
uucuccgucgacuaggcgu

SEQ ID NO: 684908 - RNA, 19 nt, Artificial Sequence
  Description of Artificial Sequence: Synthetic oligonucleotide
ugugacuccuacuccgacg

SEQ ID NO: 684909 - RNA, 19 nt, Artificial Sequence
  Description of Artificial Sequence: Synthetic oligonucleotide
aauggccggccauuaucgc

SEQ ID NO: 684910 - RNA, 19 nt, Artificial Sequence
  Description of Artificial Sequence: Synthetic oligonucleotide
aucuagaccuucuccgucg

SEQ ID NO: 684911 - RNA, 19 nt, Artificial Sequence
  Description of Artificial Sequence: Synthetic oligonucleotide
auuaauuuccaagcuccgg

SEQ ID NO: 684912 - RNA, 19 nt, Artificial Sequence
  Description of Artificial Sequence: Synthetic oligonucleotide
ugcgucuugaacgugaccu

SEQ ID NO: 684913 - RNA, 19 nt, Artificial Sequence
  Description of Artificial Sequence: Synthetic oligonucleotide
uuugucgcgcucaacuuca

SEQ ID NO: 684914 - RNA, 19 nt, Artificial Sequence
  Description of Artificial Sequence: Synthetic oligonucleotide
uucuauuguagguggaggu

SEQ ID NO: 684915 - RNA, 19 nt, Artificial Sequence
  Description of Artificial Sequence: Synthetic oligonucleotide
cauaaggcuagccaauaac

SEQ ID NO: 684916 - RNA, 19 nt, Artificial Sequence
  Description of Artificial Sequence: Synthetic oligonucleotide
guaauggucucacuaaguc

SEQ ID NO: 684917 - RNA, 19 nt, Artificial Sequence
  Description of Artificial Sequence: Synthetic oligonucleotide
agccuuagcacacauggca

SEQ ID NO: 684918 - RNA, 19 nt, Artificial Sequence
  Description of Artificial Sequence: Synthetic oligonucleotide
agaacugauaauggccggc

SEQ ID NO: 684919 - RNA, 19 nt, Artificial Sequence
  Description of Artificial Sequence: Synthetic oligonucleotide
aaaacccgaaauguugaug

SEQ ID NO: 684920 - RNA, 19 nt, Artificial Sequence
  Description of Artificial Sequence: Synthetic oligonucleotide
caaguguguuauuucuugg

SEQ ID NO: 684921 - RNA, 19 nt, Artificial Sequence
  Description of Artificial Sequence: Synthetic oligonucleotide
aacccgaaauguugaugcg

SEQ ID NO: 684922 - RNA, 19 nt, Artificial Sequence
  Description of Artificial Sequence: Synthetic oligonucleotide
uaauuuccaagcuccggug

SEQ ID NO: 684923 - RNA, 19 nt, Artificial Sequence
  Description of Artificial Sequence: Synthetic oligonucleotide
uacuaauuacaacgggacu

SEQ ID NO: 684924 - RNA, 19 nt, Artificial Sequence
  Description of Artificial Sequence: Synthetic oligonucleotide
ucuagcgucuuccccacca

SEQ ID NO: 684925 - RNA, 19 nt, Artificial Sequence
  Description of Artificial Sequence: Synthetic oligonucleotide
cuguaggcgagcuucugcg

SEQ ID NO: 684926 - RNA, 19 nt, Artificial Sequence
  Description of Artificial Sequence: Synthetic oligonucleotide
uguuacugccaaaacccga

SEQ ID NO: 684927 - RNA, 19 nt, Artificial Sequence
  Description of Artificial Sequence: Synthetic oligonucleotide
acaagaguguaucaagcau

SEQ ID NO: 684928 - RNA, 19 nt, Artificial Sequence
  Description of Artificial Sequence: Synthetic oligonucleotide
guugaugcgaaagaaguuc

SEQ ID NO: 684929 - RNA, 19 nt, Artificial Sequence
  Description of Artificial Sequence: Synthetic oligonucleotide
cuucguaccacagaccuug

SEQ ID NO: 684930 - RNA, 19 nt, Artificial Sequence
  Description of Artificial Sequence: Synthetic oligonucleotide
gauaccccacaucagggac

SEQ ID NO: 684931 - RNA, 19 nt, Artificial Sequence
  Description of Artificial Sequence: Synthetic oligonucleotide
gcuuacgugacuuauguuc

SEQ ID NO: 684932 - RNA, 19 nt, Artificial Sequence
  Description of Artificial Sequence: Synthetic oligonucleotide
gaacgagacucacugguac

SEQ ID NO: 684933 - RNA, 19 nt, Artificial Sequence
  Description of Artificial Sequence: Synthetic oligonucleotide
aagaguguaucaagcaugu

SEQ ID NO: 684934 - RNA, 19 nt, Artificial Sequence
  Description of Artificial Sequence: Synthetic oligonucleotide
auaaggcuagccaauaaca

SEQ ID NO: 684935 - RNA, 19 nt, Artificial Sequence
  Description of Artificial Sequence: Synthetic oligonucleotide
uuagacguuugggugaucu

SEQ ID NO: 684936 - RNA, 19 nt, Artificial Sequence
  Description of Artificial Sequence: Synthetic oligonucleotide
aauuugucgcgcucaacuu

SEQ ID NO: 684937 - RNA, 19 nt, Artificial Sequence
  Description of Artificial Sequence: Synthetic oligonucleotide
uacuccgacgacuuggagu

SEQ ID NO: 684938 - RNA, 19 nt, Artificial Sequence
  Description of Artificial Sequence: Synthetic oligonucleotide
ucuauuguagguggaggug

SEQ ID NO: 684939 - RNA, 19 nt, Artificial Sequence
  Description of Artificial Sequence: Synthetic oligonucleotide
ucgacuccgagcucgagcu

SEQ ID NO: 684940 - RNA, 19 nt, Artificial Sequence
  Description of Artificial Sequence: Synthetic oligonucleotide
cuuacgugacuuauguuca

SEQ ID NO: 684941 - RNA, 19 nt, Artificial Sequence
  Description of Artificial Sequence: Synthetic oligonucleotide
uuacuccgagaccuuaaug

SEQ ID NO: 684942 - RNA, 19 nt, Artificial Sequence
  Description of Artificial Sequence: Synthetic oligonucleotide
ugcucuagaacgagacuca

SEQ ID NO: 684943 - RNA, 19 nt, Artificial Sequence
  Description of Artificial Sequence: Synthetic oligonucleotide
cuucuauuguagguggagg

SEQ ID NO: 684944 - RNA, 19 nt, Artificial Sequence
  Description of Artificial Sequence: Synthetic oligonucleotide
gaguucgacuccgagcucg

SEQ ID NO: 684945 - RNA, 19 nt, Artificial Sequence
  Description of Artificial Sequence: Synthetic oligonucleotide
guaucaagcauguaaccaa

SEQ ID NO: 684946 - RNA, 19 nt, Artificial Sequence
  Description of Artificial Sequence: Synthetic oligonucleotide
uuaaucugacuggugauau

SEQ ID NO: 684947 - RNA, 19 nt, Artificial Sequence
  Description of Artificial Sequence: Synthetic oligonucleotide
  modified_base (7)..(7): a, c, u, g, unknown or other
gcuuuancuucacugcuag

SEQ ID NO: 684948 - RNA, 19 nt, Artificial Sequence
  Description of Artificial Sequence: Synthetic oligonucleotide
aagaucauuucugaagauu

SEQ ID NO: 684949 - RNA, 19 nt, Artificial Sequence
  Description of Artificial Sequence: Synthetic oligonucleotide
uucuaaaacucaguuaguu

SEQ ID NO: 684950 - RNA, 19 nt, Artificial Sequence
  Description of Artificial Sequence: Synthetic oligonucleotide
gaccgccuuaaucugacug

SEQ ID NO: 684951 - RNA, 19 nt, Artificial Sequence
  Description of Artificial Sequence: Synthetic oligonucleotide
ucuccgucgacuaggcgug

SEQ ID NO: 684952 - RNA, 19 nt, Artificial Sequence
  Description of Artificial Sequence: Synthetic oligonucleotide
uauuucccggaauuacuga

SEQ ID NO: 684953 - RNA, 19 nt, Artificial Sequence
  Description of Artificial Sequence: Synthetic oligonucleotide
uucgacuccgagcucgagc

SEQ ID NO: 684954 - RNA, 19 nt, Artificial Sequence
  Description of Artificial Sequence: Synthetic oligonucleotide
acgagacucacugguacgc

SEQ ID NO: 684955 - RNA, 19 nt, Artificial Sequence
  Description of Artificial Sequence: Synthetic oligonucleotide
acuaagucggcuucauuaa

SEQ ID NO: 684956 - RNA, 19 nt, Artificial Sequence
  Description of Artificial Sequence: Synthetic oligonucleotide
caugaacacgucgugaaug

SEQ ID NO: 684957 - RNA, 19 nt, Artificial Sequence
  Description of Artificial Sequence: Synthetic oligonucleotide
acuccgacgacuuggaguu

SEQ ID NO: 684958 - RNA, 19 nt, Artificial Sequence
  Description of Artificial Sequence: Synthetic oligonucleotide
agaccgucucccucuagac

SEQ ID NO: 684959 - RNA, 19 nt, Artificial Sequence
  Description of Artificial Sequence: Synthetic oligonucleotide
uccccgaaaagccuuaauu

SEQ ID NO: 684960 - RNA, 19 nt, Artificial Sequence
  Description of Artificial Sequence: Synthetic oligonucleotide
guguugcucacucaacacc

SEQ ID NO: 684961 - RNA, 19 nt, Artificial Sequence
  Description of Artificial Sequence: Synthetic oligonucleotide
acgcuuacgugacuuaugu

SEQ ID NO: 684962 - RNA, 19 nt, Artificial Sequence
  Description of Artificial Sequence: Synthetic oligonucleotide
acugguacgcuuacgugac

SEQ ID NO: 684963 - RNA, 19 nt, Artificial Sequence
  Description of Artificial Sequence: Synthetic oligonucleotide
gauacagaccgucucccuc

SEQ ID NO: 684964 - RNA, 19 nt, Artificial Sequence
  Description of Artificial Sequence: Synthetic oligonucleotide
uuaggaaguaauggucuca

SEQ ID NO: 684965 - RNA, 19 nt, Artificial Sequence
  Description of Artificial Sequence: Synthetic oligonucleotide
uguuuuccgguugucccgg

SEQ ID NO: 684966 - RNA, 19 nt, Artificial Sequence
  Description of Artificial Sequence: Synthetic oligonucleotide
cuagaacgagacucacugg

SEQ ID NO: 684967 - RNA, 19 nt, Artificial Sequence
  Description of Artificial Sequence: Synthetic oligonucleotide
ucuugaccgccuuaaucug

SEQ ID NO: 684968 - RNA, 19 nt, Artificial Sequence
  Description of Artificial Sequence: Synthetic oligonucleotide
  modified_base (6)..(6): a, c, u, g, unknown or other
cuuuancuucacugcuagg

SEQ ID NO: 684969 - RNA, 19 nt, Artificial Sequence
  Description of Artificial Sequence: Synthetic oligonucleotide
auacagaccgucucccucu

SEQ ID NO: 684970 - RNA, 19 nt, Artificial Sequence
  Description of Artificial Sequence: Synthetic oligonucleotide
agaccuuaaugaagagucc

SEQ ID NO: 684971 - RNA, 19 nt, Artificial Sequence
  Description of Artificial Sequence: Synthetic oligonucleotide
cauuaucgccaauggcugg

SEQ ID NO: 684972 - RNA, 19 nt, Artificial Sequence
  Description of Artificial Sequence: Synthetic oligonucleotide
uacgcuuacgugacuuaug

SEQ ID NO: 684973 - RNA, 19 nt, Artificial Sequence
  Description of Artificial Sequence: Synthetic oligonucleotide
aacugauaauggccggcca

SEQ ID NO: 684974 - RNA, 19 nt, Artificial Sequence
  Description of Artificial Sequence: Synthetic oligonucleotide
aaaccaagcuguaggcgag

SEQ ID NO: 684975 - RNA, 19 nt, Artificial Sequence
  Description of Artificial Sequence: Synthetic oligonucleotide
uccgacgacuuggaguucg

SEQ ID NO: 684976 - RNA, 19 nt, Artificial Sequence
  Description of Artificial Sequence: Synthetic oligonucleotide
uuacgugacuuauguucag

SEQ ID NO: 684977 - RNA, 19 nt, Artificial Sequence
  Description of Artificial Sequence: Synthetic oligonucleotide
ggugauauacugaagcuuc

SEQ ID NO: 684978 - RNA, 19 nt, Artificial Sequence
  Description of Artificial Sequence: Synthetic oligonucleotide
uccauucaaacgaaccguu

SEQ ID NO: 684979 - RNA, 19 nt, Artificial Sequence
  Description of Artificial Sequence: Synthetic oligonucleotide
uugaccgccuuaaucugac

SEQ ID NO: 684980 - RNA, 19 nt, Artificial Sequence
  Description of Artificial Sequence: Synthetic oligonucleotide
guucuugaccgccuuaauc

SEQ ID NO: 684981 - RNA, 19 nt, Artificial Sequence
  Description of Artificial Sequence: Synthetic oligonucleotide
agacuuagaucuugaccug

SEQ ID NO: 684982 - RNA, 19 nt, Artificial Sequence
  Description of Artificial Sequence: Synthetic oligonucleotide
ucacugguacgcuuacgug

SEQ ID NO: 684983 - RNA, 19 nt, Artificial Sequence
  Description of Artificial Sequence: Synthetic oligonucleotide
cuccgagaccuuaaugaag

SEQ ID NO: 684984 - RNA, 19 nt, Artificial Sequence
  Description of Artificial Sequence: Synthetic oligonucleotide
ccuccauucaaacgaaccg

SEQ ID NO: 684985 - RNA, 19 nt, Artificial Sequence
  Description of Artificial Sequence: Synthetic oligonucleotide
ugaacguguuugagaacga

SEQ ID NO: 684986 - RNA, 19 nt, Artificial Sequence
  Description of Artificial Sequence: Synthetic oligonucleotide
aaccaagcuguaggcgagc

SEQ ID NO: 684987 - RNA, 19 nt, Artificial Sequence
  Description of Artificial Sequence: Synthetic oligonucleotide
acugauaauggccggccau

SEQ ID NO: 684988 - RNA, 19 nt, Artificial Sequence
  Description of Artificial Sequence: Synthetic oligonucleotide
uugcgcauaugcaguacac

SEQ ID NO: 684989 - RNA, 19 nt, Artificial Sequence
  Description of Artificial Sequence: Synthetic oligonucleotide
ggaacgcuuacuccgagac

SEQ ID NO: 684990 - RNA, 19 nt, Artificial Sequence
  Description of Artificial Sequence: Synthetic oligonucleotide
uagaccuucuccgucgacu

SEQ ID NO: 684991 - RNA, 19 nt, Artificial Sequence
  Description of Artificial Sequence: Synthetic oligonucleotide
cacugguacgcuuacguga

SEQ ID NO: 684992 - RNA, 19 nt, Artificial Sequence
  Description of Artificial Sequence: Synthetic oligonucleotide
uacgacgaaugggagaccu

SEQ ID NO: 684993 - RNA, 19 nt, Artificial Sequence
  Description of Artificial Sequence: Synthetic oligonucleotide
uucaaacgaaccguuccac

SEQ ID NO: 684994 - RNA, 19 nt, Artificial Sequence
  Description of Artificial Sequence: Synthetic oligonucleotide
uuggaacgcuuacuccgag

SEQ ID NO: 684995 - RNA, 19 nt, Artificial Sequence
  Description of Artificial Sequence: Synthetic oligonucleotide
uaggugcauuguuucacca

SEQ ID NO: 684996 - RNA, 19 nt, Artificial Sequence
  Description of Artificial Sequence: Synthetic oligonucleotide
gugacuccuacuccgacga

SEQ ID NO: 684997 - RNA, 19 nt, Artificial Sequence
  Description of Artificial Sequence: Synthetic oligonucleotide
caauauuucuagcgucuuc

SEQ ID NO: 684998 - RNA, 19 nt, Artificial Sequence
  Description of Artificial Sequence: Synthetic oligonucleotide
ucuagaccuucuccgucga

SEQ ID NO: 684999 - RNA, 19 nt, Artificial Sequence
  Description of Artificial Sequence: Synthetic oligonucleotide
agcgucuuccccaccacac

SEQ ID NO: 685000 - RNA, 19 nt, Artificial Sequence
  Description of Artificial Sequence: Synthetic oligonucleotide
acgugacuuauguucagaa

SEQ ID NO: 685001 - RNA, 19 nt, Artificial Sequence
  Description of Artificial Sequence: Synthetic oligonucleotide
acgaaugggagaccuacua

SEQ ID NO: 685002 - RNA, 19 nt, Artificial Sequence
  Description of Artificial Sequence: Synthetic oligonucleotide
gaacgaugugacuuggacu

SEQ ID NO: 685003 - RNA, 19 nt, Artificial Sequence
  Description of Artificial Sequence: Synthetic oligonucleotide
gaacgcuuacuccgagacc

SEQ ID NO: 685004 - RNA, 19 nt, Artificial Sequence
  Description of Artificial Sequence: Synthetic oligonucleotide
caauuugucgcgcucaacu

SEQ ID NO: 685005 - RNA, 19 nt, Artificial Sequence
  Description of Artificial Sequence: Synthetic oligonucleotide
uccuagcagcaauauuucu

SEQ ID NO: 685006 - RNA, 19 nt, Artificial Sequence
  Description of Artificial Sequence: Synthetic oligonucleotide
aggcuuuagguuugguggu

SEQ ID NO: 685007 - RNA, 19 nt, Artificial Sequence
  Description of Artificial Sequence: Synthetic oligonucleotide
gucuucguaccacagaccu

SEQ ID NO: 685008 - RNA, 19 nt, Artificial Sequence
  Description of Artificial Sequence: Synthetic oligonucleotide
cuguuagacguuuggguga

SEQ ID NO: 685009 - RNA, 19 nt, Artificial Sequence
  Description of Artificial Sequence: Synthetic oligonucleotide
ugaggcuugugagacguuc

SEQ ID NO: 685010 - RNA, 19 nt, Artificial Sequence
  Description of Artificial Sequence: Synthetic oligonucleotide
gcuugugagacguuccaug

SEQ ID NO: 685011 - RNA, 19 nt, Artificial Sequence
  Description of Artificial Sequence: Synthetic oligonucleotide
auuaucgccaauggcuggu

SEQ ID NO: 685012 - RNA, 19 nt, Artificial Sequence
  Description of Artificial Sequence: Synthetic oligonucleotide
ugauacagaccgucucccu

SEQ ID NO: 685013 - RNA, 19 nt, Artificial Sequence
  Description of Artificial Sequence: Synthetic oligonucleotide
ggaaaccaagcuguaggcg

SEQ ID NO: 685014 - RNA, 19 nt, Artificial Sequence
  Description of Artificial Sequence: Synthetic oligonucleotide
ucuuugcgcauaugcagua

SEQ ID NO: 685015 - RNA, 19 nt, Artificial Sequence
  Description of Artificial Sequence: Synthetic oligonucleotide
uaaucucaucaaugccggc

SEQ ID NO: 685016 - RNA, 19 nt, Artificial Sequence
  Description of Artificial Sequence: Synthetic oligonucleotide
uagacguuugggugaucug

SEQ ID NO: 685017 - RNA, 19 nt, Artificial Sequence
  Description of Artificial Sequence: Synthetic oligonucleotide
agaccuacuaaaccuucuu

SEQ ID NO: 685018 - RNA, 19 nt, Artificial Sequence
  Description of Artificial Sequence: Synthetic oligonucleotide
uagcagcaauauuucuagc

SEQ ID NO: 685019 - RNA, 19 nt, Artificial Sequence
  Description of Artificial Sequence: Synthetic oligonucleotide
uuuuccgguugucccggga

SEQ ID NO: 685020 - RNA, 19 nt, Artificial Sequence
  Description of Artificial Sequence: Synthetic oligonucleotide
uaauuacaacgggacuggc

SEQ ID NO: 685021 - RNA, 19 nt, Artificial Sequence
  Description of Artificial Sequence: Synthetic oligonucleotide
gcgugugacuccuacuccg

SEQ ID NO: 685022 - RNA, 19 nt, Artificial Sequence
  Description of Artificial Sequence: Synthetic oligonucleotide
uacgugacuuauguucaga

SEQ ID NO: 685023 - RNA, 19 nt, Artificial Sequence
  Description of Artificial Sequence: Synthetic oligonucleotide
aacccgaaccgcaggaaga

SEQ ID NO: 685024 - RNA, 19 nt, Artificial Sequence
  Description of Artificial Sequence: Synthetic oligonucleotide
cccggaauuacugaccacg

SEQ ID NO: 685025 - RNA, 19 nt, Artificial Sequence
  Description of Artificial Sequence: Synthetic oligonucleotide
ugaccacgaaagccuaaaa

SEQ ID NO: 685026 - RNA, 19 nt, Artificial Sequence
  Description of Artificial Sequence: Synthetic oligonucleotide
ugcguguugcucacucaac

SEQ ID NO: 685027 - RNA, 19 nt, Artificial Sequence
  Description of Artificial Sequence: Synthetic oligonucleotide
gaacacgucgugaauggaa

SEQ ID NO: 685028 - RNA, 19 nt, Artificial Sequence
  Description of Artificial Sequence: Synthetic oligonucleotide
uggaacgcuuacuccgaga

SEQ ID NO: 685029 - RNA, 19 nt, Artificial Sequence
  Description of Artificial Sequence: Synthetic oligonucleotide
ugcgcauaugcaguacacu

SEQ ID NO: 685030 - RNA, 19 nt, Artificial Sequence
  Description of Artificial Sequence: Synthetic oligonucleotide
aaaacccgaaccgcaggaa

SEQ ID NO: 685031 - RNA, 19 nt, Artificial Sequence
  Description of Artificial Sequence: Synthetic oligonucleotide
uaccccacaucagggacug

SEQ ID NO: 685032 - RNA, 19 nt, Artificial Sequence
  Description of Artificial Sequence: Synthetic oligonucleotide
cuuggaacgcuuacuccga

SEQ ID NO: 685033 - RNA, 19 nt, Artificial Sequence
  Description of Artificial Sequence: Synthetic oligonucleotide
gaccuggaucuuuuacgac

SEQ ID NO: 685034 - RNA, 19 nt, Artificial Sequence
  Description of Artificial Sequence: Synthetic oligonucleotide
gucucacuaagucggcuuc

SEQ ID NO: 685035 - RNA, 19 nt, Artificial Sequence
  Description of Artificial Sequence: Synthetic oligonucleotide
uaggcgagcuucugcgugu

SEQ ID NO: 685036 - RNA, 19 nt, Artificial Sequence
  Description of Artificial Sequence: Synthetic oligonucleotide
ucucacuaagucggcuuca

SEQ ID NO: 685037 - RNA, 19 nt, Artificial Sequence
  Description of Artificial Sequence: Synthetic oligonucleotide
agaccuucuccgucgacua

SEQ ID NO: 685038 - RNA, 19 nt, Artificial Sequence
  Description of Artificial Sequence: Synthetic oligonucleotide
cucuagacuuagaucuuga

SEQ ID NO: 685039 - RNA, 19 nt, Artificial Sequence
  Description of Artificial Sequence: Synthetic oligonucleotide
cuugugagacguuccaugu

SEQ ID NO: 685040 - RNA, 19 nt, Artificial Sequence
  Description of Artificial Sequence: Synthetic oligonucleotide
cuugaccgccuuaaucuga

SEQ ID NO: 685041 - RNA, 19 nt, Artificial Sequence
  Description of Artificial Sequence: Synthetic oligonucleotide
gacucacugguacgcuuac

SEQ ID NO: 685042 - RNA, 19 nt, Artificial Sequence
  Description of Artificial Sequence: Synthetic oligonucleotide
ugaacacgucgugaaugga

SEQ ID NO: 685043 - RNA, 19 nt, Artificial Sequence
  Description of Artificial Sequence: Synthetic oligonucleotide
augccggcaggauacccca

SEQ ID NO: 685044 - RNA, 19 nt, Artificial Sequence
  Description of Artificial Sequence: Synthetic oligonucleotide
uccgagcucgagcuguuuu

SEQ ID NO: 685045 - RNA, 19 nt, Artificial Sequence
  Description of Artificial Sequence: Synthetic oligonucleotide
cuuuugauacagaccgucu

SEQ ID NO: 685046 - RNA, 19 nt, Artificial Sequence
  Description of Artificial Sequence: Synthetic oligonucleotide
gccauuaucgccaauggcu

SEQ ID NO: 685047 - RNA, 19 nt, Artificial Sequence
  Description of Artificial Sequence: Synthetic oligonucleotide
cucacugguacgcuuacgu

SEQ ID NO: 685048 - RNA, 19 nt, Artificial Sequence
  Description of Artificial Sequence: Synthetic oligonucleotide
uuuucaccuuugucacggu

SEQ ID NO: 685049 - RNA, 19 nt, Artificial Sequence
  Description of Artificial Sequence: Synthetic oligonucleotide
agccaauuugucgcgcuca

SEQ ID NO: 685050 - RNA, 19 nt, Artificial Sequence
  Description of Artificial Sequence: Synthetic oligonucleotide
gccuuaauuucaaaagauc

SEQ ID NO: 685051 - RNA, 19 nt, Artificial Sequence
  Description of Artificial Sequence: Synthetic oligonucleotide
uccguucucucaacuccuc

SEQ ID NO: 685052 - RNA, 19 nt, Artificial Sequence
  Description of Artificial Sequence: Synthetic oligonucleotide
cuuugcgcauaugcaguac

SEQ ID NO: 685053 - RNA, 19 nt, Artificial Sequence
  Description of Artificial Sequence: Synthetic oligonucleotide
ugguacgcuuacgugacuu

SEQ ID NO: 685054 - RNA, 19 nt, Artificial Sequence
  Description of Artificial Sequence: Synthetic oligonucleotide
ggccauuaucgccaauggc

SEQ ID NO: 685055 - RNA, 19 nt, Artificial Sequence
  Description of Artificial Sequence: Synthetic oligonucleotide
caaguaaagguccuuccau

SEQ ID NO: 685056 - RNA, 19 nt, Artificial Sequence
  Description of Artificial Sequence: Synthetic oligonucleotide
acucacugguacgcuuacg

SEQ ID NO: 685057 - RNA, 19 nt, Artificial Sequence
  Description of Artificial Sequence: Synthetic oligonucleotide
ggcggccaugaacacgucg

SEQ ID NO: 685058 - RNA, 19 nt, Artificial Sequence
  Description of Artificial Sequence: Synthetic oligonucleotide
guuuuccgguugucccggg

SEQ ID NO: 685059 - RNA, 19 nt, Artificial Sequence
  Description of Artificial Sequence: Synthetic oligonucleotide
ucguaccacagaccuugau

SEQ ID NO: 685060 - RNA, 19 nt, Artificial Sequence
  Description of Artificial Sequence: Synthetic oligonucleotide
cgugacuuauguucagaag

SEQ ID NO: 685061 - RNA, 19 nt, Artificial Sequence
  Description of Artificial Sequence: Synthetic oligonucleotide
caaugccggcaggauaccc

SEQ ID NO: 685062 - RNA, 19 nt, Artificial Sequence
  Description of Artificial Sequence: Synthetic oligonucleotide
auaccccacaucagggacu

SEQ ID NO: 685063 - RNA, 19 nt, Artificial Sequence
  Description of Artificial Sequence: Synthetic oligonucleotide
cuacuccgacgacuuggag

SEQ ID NO: 685064 - RNA, 19 nt, Artificial Sequence
  Description of Artificial Sequence: Synthetic oligonucleotide
uuacgacgaaugggagacc

SEQ ID NO: 685065 - RNA, 19 nt, Artificial Sequence
  Description of Artificial Sequence: Synthetic oligonucleotide
ggcgugugacuccuacucc

SEQ ID NO: 685066 - RNA, 19 nt, Artificial Sequence
  Description of Artificial Sequence: Synthetic oligonucleotide
ccuagcagcaauauuucua

SEQ ID NO: 685067 - RNA, 19 nt, Artificial Sequence
  Description of Artificial Sequence: Synthetic oligonucleotide
gaaccgcaggaagaacuga

SEQ ID NO: 685068 - RNA, 19 nt, Artificial Sequence
  Description of Artificial Sequence: Synthetic oligonucleotide
gcguguugcucacucaaca

SEQ ID NO: 685069 - RNA, 19 nt, Artificial Sequence
  Description of Artificial Sequence: Synthetic oligonucleotide
cuuggacuuugaugaccuc

SEQ ID NO: 685070 - RNA, 19 nt, Artificial Sequence
  Description of Artificial Sequence: Synthetic oligonucleotide
gaugcgaaagaaguuccuu

SEQ ID NO: 685071 - RNA, 19 nt, Artificial Sequence
  Description of Artificial Sequence: Synthetic oligonucleotide
cugcguguugcucacucaa

SEQ ID NO: 685072 - RNA, 19 nt, Artificial Sequence
  Description of Artificial Sequence: Synthetic oligonucleotide
ugacuccuacuccgacgac

SEQ ID NO: 685073 - RNA, 19 nt, Artificial Sequence
  Description of Artificial Sequence: Synthetic oligonucleotide
uccgcuccguucucucaac

SEQ ID NO: 685074 - RNA, 19 nt, Artificial Sequence
  Description of Artificial Sequence: Synthetic oligonucleotide
cugcgucuugaacgugacc

SEQ ID NO: 685075 - RNA, 19 nt, Artificial Sequence
  Description of Artificial Sequence: Synthetic oligonucleotide
gcaguacacucuuggcggc

SEQ ID NO: 685076 - RNA, 19 nt, Artificial Sequence
  Description of Artificial Sequence: Synthetic oligonucleotide
agaacgagacucacuggua

SEQ ID NO: 685077 - RNA, 19 nt, Artificial Sequence
  Description of Artificial Sequence: Synthetic oligonucleotide
ucccggaauuacugaccac

SEQ ID NO: 685078 - RNA, 19 nt, Artificial Sequence
  Description of Artificial Sequence: Synthetic oligonucleotide
ccauucaaacgaaccguuc

SEQ ID NO: 685079 - RNA, 19 nt, Artificial Sequence
  Description of Artificial Sequence: Synthetic oligonucleotide
cagccaauuugucgcgcuc

SEQ ID NO: 685080 - RNA, 19 nt, Artificial Sequence
  Description of Artificial Sequence: Synthetic oligonucleotide
ugaccgccuuaaucugacu

SEQ ID NO: 685081 - RNA, 19 nt, Artificial Sequence
  Description of Artificial Sequence: Synthetic oligonucleotide
gagaccuacuaaaccuucu

SEQ ID NO: 685082 - RNA, 19 nt, Artificial Sequence
  Description of Artificial Sequence: Synthetic oligonucleotide
uuaucgccaauggcuggua

SEQ ID NO: 685083 - RNA, 19 nt, Artificial Sequence
  Description of Artificial Sequence: Synthetic oligonucleotide
gaccgucucccucuagacu

SEQ ID NO: 685084 - RNA, 19 nt, Artificial Sequence
  Description of Artificial Sequence: Synthetic oligonucleotide
uccccaccacacacacaca

SEQ ID NO: 685085 - RNA, 19 nt, Artificial Sequence
  Description of Artificial Sequence: Synthetic oligonucleotide
cuuggaccugugcuuugga

SEQ ID NO: 685086 - RNA, 19 nt, Artificial Sequence
  Description of Artificial Sequence: Synthetic oligonucleotide
uccgucgacuaggcgugug

SEQ ID NO: 685087 - RNA, 19 nt, Artificial Sequence
  Description of Artificial Sequence: Synthetic oligonucleotide
acccgaaccgcaggaagaa

SEQ ID NO: 685088 - RNA, 19 nt, Artificial Sequence
  Description of Artificial Sequence: Synthetic oligonucleotide
cucuagaacgagacucacu

SEQ ID NO: 685089 - RNA, 19 nt, Artificial Sequence
  Description of Artificial Sequence: Synthetic oligonucleotide
cccgaaauguugaugcgaa

SEQ ID NO: 685090 - RNA, 19 nt, Artificial Sequence
  Description of Artificial Sequence: Synthetic oligonucleotide
ccaccacacacacacaaaa

SEQ ID NO: 685091 - RNA, 19 nt, Artificial Sequence
  Description of Artificial Sequence: Synthetic oligonucleotide
ccggccauuaucgccaaug

SEQ ID NO: 685092 - RNA, 19 nt, Artificial Sequence
  Description of Artificial Sequence: Synthetic oligonucleotide
gcauaaggcuagccaauaa

SEQ ID NO: 685093 - RNA, 19 nt, Artificial Sequence
  Description of Artificial Sequence: Synthetic oligonucleotide
cgaaccgcaggaagaacug

SEQ ID NO: 685094 - RNA, 19 nt, Artificial Sequence
  Description of Artificial Sequence: Synthetic oligonucleotide
cuuacuccgagaccuuaau

SEQ ID NO: 685095 - RNA, 19 nt, Artificial Sequence
  Description of Artificial Sequence: Synthetic oligonucleotide
cuaagucggcuucauuaau

SEQ ID NO: 685096 - RNA, 19 nt, Artificial Sequence
  Description of Artificial Sequence: Synthetic oligonucleotide
cggccauuaucgccaaugg

SEQ ID NO: 685097 - RNA, 19 nt, Artificial Sequence
  Description of Artificial Sequence: Synthetic oligonucleotide
gacuaggcgugugacuccu

SEQ ID NO: 685098 - RNA, 19 nt, Artificial Sequence
  Description of Artificial Sequence: Synthetic oligonucleotide
gucgacuaggcgugugacu

SEQ ID NO: 685099 - RNA, 19 nt, Artificial Sequence
  Description of Artificial Sequence: Synthetic oligonucleotide
ccugcgucuugaacgugac

SEQ ID NO: 685100 - RNA, 19 nt, Artificial Sequence
  Description of Artificial Sequence: Synthetic oligonucleotide
aguucgacuccgagcucga

SEQ ID NO: 685101 - RNA, 19 nt, Artificial Sequence
  Description of Artificial Sequence: Synthetic oligonucleotide
ugccggcaggauaccccac

SEQ ID NO: 685102 - RNA, 19 nt, Artificial Sequence
  Description of Artificial Sequence: Synthetic oligonucleotide
ccgagcucgagcuguuuuc

SEQ ID NO: 685103 - RNA, 19 nt, Artificial Sequence
  Description of Artificial Sequence: Synthetic oligonucleotide
guucgacuccgagcucgag

SEQ ID NO: 685104 - RNA, 19 nt, Artificial Sequence
  Description of Artificial Sequence: Synthetic oligonucleotide
gacgaaugggagaccuacu

SEQ ID NO: 685105 - RNA, 19 nt, Artificial Sequence
  Description of Artificial Sequence: Synthetic oligonucleotide
gguacgcuuacgugacuua

SEQ ID NO: 685106 - RNA, 19 nt, Artificial Sequence
  Description of Artificial Sequence: Synthetic oligonucleotide
acugaccacgaaagccuaa

SEQ ID NO: 685107 - RNA, 19 nt, Artificial Sequence
  Description of Artificial Sequence: Synthetic oligonucleotide
gcucuagaacgagacucac

SEQ ID NO: 685108 - RNA, 19 nt, Artificial Sequence
  Description of Artificial Sequence: Synthetic oligonucleotide
ccggaauuacugaccacga

SEQ ID NO: 685109 - RNA, 19 nt, Artificial Sequence
  Description of Artificial Sequence: Synthetic oligonucleotide
agaguguaucaagcaugua

SEQ ID NO: 685110 - RNA, 19 nt, Artificial Sequence
  Description of Artificial Sequence: Synthetic oligonucleotide
guacgcuuacgugacuuau

SEQ ID NO: 685111 - RNA, 19 nt, Artificial Sequence
  Description of Artificial Sequence: Synthetic oligonucleotide
ggccaugaacacgucguga

SEQ ID NO: 685112 - RNA, 19 nt, Artificial Sequence
  Description of Artificial Sequence: Synthetic oligonucleotide
acgaaccguuccacuccuc

SEQ ID NO: 685113 - RNA, 19 nt, Artificial Sequence
  Description of Artificial Sequence: Synthetic oligonucleotide
ccgaaccgcaggaagaacu

SEQ ID NO: 685114 - RNA, 19 nt, Artificial Sequence
  Description of Artificial Sequence: Synthetic oligonucleotide
ggggugcgacuccuucugc

SEQ ID NO: 685115 - RNA, 19 nt, Artificial Sequence
  Description of Artificial Sequence: Synthetic oligonucleotide
ccccgaaaagccuuaauuu

SEQ ID NO: 685116 - RNA, 19 nt, Artificial Sequence
  Description of Artificial Sequence: Synthetic oligonucleotide
cugcucgaugucggccgcc

SEQ ID NO: 685117 - RNA, 19 nt, Artificial Sequence
  Description of Artificial Sequence: Synthetic oligonucleotide
ggcuggcauaaggcuagcc

SEQ ID NO: 685118 - RNA, 19 nt, Artificial Sequence
  Description of Artificial Sequence: Synthetic oligonucleotide
acgaugugacuuggacuuu

SEQ ID NO: 685119 - RNA, 19 nt, Artificial Sequence
  Description of Artificial Sequence: Synthetic oligonucleotide
cgaaccguuccacuccuca

SEQ ID NO: 685120 - RNA, 19 nt, Artificial Sequence
  Description of Artificial Sequence: Synthetic oligonucleotide
ccaauuugucgcgcucaac

SEQ ID NO: 685121 - RNA, 19 nt, Artificial Sequence
  Description of Artificial Sequence: Synthetic oligonucleotide
gcuuacuccgagaccuuaa

SEQ ID NO: 685122 - RNA, 19 nt, Artificial Sequence
  Description of Artificial Sequence: Synthetic oligonucleotide
ggaguucgacuccgagcuc

SEQ ID NO: 685123 - RNA, 19 nt, Artificial Sequence
  Description of Artificial Sequence: Synthetic oligonucleotide
gcggccaugaacacgucgu

SEQ ID NO: 685124 - RNA, 19 nt, Artificial Sequence
  Description of Artificial Sequence: Synthetic oligonucleotide
cgacuaggcgugugacucc

SEQ ID NO: 685125 - RNA, 19 nt, Artificial Sequence
  Description of Artificial Sequence: Synthetic oligonucleotide
ccccaccacacacacacaa

SEQ ID NO: 685126 - RNA, 19 nt, Artificial Sequence
  Description of Artificial Sequence: Synthetic oligonucleotide
gcagccaauuugucgcgcu

SEQ ID NO: 685127 - RNA, 19 nt, Artificial Sequence
  Description of Artificial Sequence: Synthetic oligonucleotide
guuagacguuugggugauc

SEQ ID NO: 685128 - RNA, 19 nt, Artificial Sequence
  Description of Artificial Sequence: Synthetic oligonucleotide
acgacgaaugggagaccua

SEQ ID NO: 685129 - RNA, 19 nt, Artificial Sequence
  Description of Artificial Sequence: Synthetic oligonucleotide
cuuccccgaaaagccuuaa

SEQ ID NO: 685130 - RNA, 19 nt, Artificial Sequence
  Description of Artificial Sequence: Synthetic oligonucleotide
cccaccacacacacacaaa

SEQ ID NO: 685131 - RNA, 19 nt, Artificial Sequence
  Description of Artificial Sequence: Synthetic oligonucleotide
cgugugacuccuacuccga

SEQ ID NO: 685132 - RNA, 19 nt, Artificial Sequence
  Description of Artificial Sequence: Synthetic oligonucleotide
cgucgacuaggcgugugac

SEQ ID NO: 685133 - RNA, 19 nt, Artificial Sequence
  Description of Artificial Sequence: Synthetic oligonucleotide
ccgguggcaaagaucauuu

SEQ ID NO: 685134 - RNA, 19 nt, Artificial Sequence
  Description of Artificial Sequence: Synthetic oligonucleotide
gguugucccgggagcuuga

SEQ ID NO: 685135 - RNA, 19 nt, Artificial Sequence
  Description of Artificial Sequence: Synthetic oligonucleotide
ccgucgacuaggcguguga

SEQ ID NO: 685136 - RNA, 19 nt, Artificial Sequence
  Description of Artificial Sequence: Synthetic oligonucleotide
cuccgacgacuuggaguuc

SEQ ID NO: 685137 - RNA, 19 nt, Artificial Sequence
  Description of Artificial Sequence: Synthetic oligonucleotide
acgcuuacuccgagaccuu

SEQ ID NO: 685138 - RNA, 19 nt, Artificial Sequence
  Description of Artificial Sequence: Synthetic oligonucleotide
ggcuagccaauaacaaguu

SEQ ID NO: 685139 - RNA, 19 nt, Artificial Sequence
  Description of Artificial Sequence: Synthetic oligonucleotide
ccguuccacuccucaguca

SEQ ID NO: 685140 - RNA, 19 nt, Artificial Sequence
  Description of Artificial Sequence: Synthetic oligonucleotide
cccgaaccgcaggaagaac

SEQ ID NO: 685141 - RNA, 19 nt, Artificial Sequence
  Description of Artificial Sequence: Synthetic oligonucleotide
cugguacgcuuacgugacu

SEQ ID NO: 685142 - RNA, 19 nt, Artificial Sequence
  Description of Artificial Sequence: Synthetic oligonucleotide
gcuuccccgaaaagccuua

SEQ ID NO: 685143 - RNA, 19 nt, Artificial Sequence
  Description of Artificial Sequence: Synthetic oligonucleotide
gcgucuugaacgugaccuu

SEQ ID NO: 685144 - RNA, 19 nt, Artificial Sequence
  Description of Artificial Sequence: Synthetic oligonucleotide
ggccggccauuaucgccaa

SEQ ID NO: 685145 - RNA, 19 nt, Artificial Sequence
  Description of Artificial Sequence: Synthetic oligonucleotide
cgacuccgagcucgagcug

SEQ ID NO: 685146 - RNA, 19 nt, Artificial Sequence
  Description of Artificial Sequence: Synthetic oligonucleotide
ccgucucccucuagacuua

SEQ ID NO: 685147 - RNA, 19 nt, Artificial Sequence
  Description of Artificial Sequence: Synthetic oligonucleotide
ccggcaggauaccccacau

SEQ ID NO: 685148 - RNA, 19 nt, Artificial Sequence
  Description of Artificial Sequence: Synthetic oligonucleotide
cgcuuacuccgagaccuua

SEQ ID NO: 685149 - RNA, 19 nt, Artificial Sequence
  Description of Artificial Sequence: Synthetic oligonucleotide
ccgcuccguucucucaacu

SEQ ID NO: 685150 - RNA, 19 nt, Artificial Sequence
  Description of Artificial Sequence: Synthetic oligonucleotide
cuccgucgacuaggcgugu

SEQ ID NO: 685151 - RNA, 19 nt, Artificial Sequence
  Description of Artificial Sequence: Synthetic oligonucleotide
cuccgagcucgagcuguuu

SEQ ID NO: 685152 - RNA, 19 nt, Artificial Sequence
  Description of Artificial Sequence: Synthetic oligonucleotide
cgcuuacgugacuuauguu

SEQ ID NO: 685153 - RNA, 19 nt, Artificial Sequence
  Description of Artificial Sequence: Synthetic oligonucleotide
ccgguugucccgggagcuu

SEQ ID NO: 685154 - RNA, 19 nt, Artificial Sequence
  Description of Artificial Sequence: Synthetic oligonucleotide
gauauuauugcuuaugccc

SEQ ID NO: 685155 - RNA, 19 nt, Artificial Sequence
  Description of Artificial Sequence: Synthetic oligonucleotide
guuguuauaauucaacuag

SEQ ID NO: 685156 - RNA, 19 nt, Artificial Sequence
  Description of Artificial Sequence: Synthetic oligonucleotide
cuucuagugauuaugaggg

SEQ ID NO: 685157 - RNA, 19 nt, Artificial Sequence
  Description of Artificial Sequence: Synthetic oligonucleotide
aaacuaaacuucccaaagg

SEQ ID NO: 685158 - RNA, 19 nt, Artificial Sequence
  Description of Artificial Sequence: Synthetic oligonucleotide
aggguuauccucuugaauc

SEQ ID NO: 685159 - RNA, 19 nt, Artificial Sequence
  Description of Artificial Sequence: Synthetic oligonucleotide
uuauguuuuggcaagagua

SEQ ID NO: 685160 - RNA, 19 nt, Artificial Sequence
  Description of Artificial Sequence: Synthetic oligonucleotide
auggacaucuuguuuauac

SEQ ID NO: 685161 - RNA, 19 nt, Artificial Sequence
  Description of Artificial Sequence: Synthetic oligonucleotide
aacgucuaggauuuucagg

SEQ ID NO: 685162 - RNA, 19 nt, Artificial Sequence
  Description of Artificial Sequence: Synthetic oligonucleotide
uuguuauaauucaacuagg

SEQ ID NO: 685163 - RNA, 19 nt, Artificial Sequence
  Description of Artificial Sequence: Synthetic oligonucleotide
cugaauuuucccuaggaag

SEQ ID NO: 685164 - RNA, 19 nt, Artificial Sequence
  Description of Artificial Sequence: Synthetic oligonucleotide
uggauauuauugcuuaugc

SEQ ID NO: 685165 - RNA, 19 nt, Artificial Sequence
  Description of Artificial Sequence: Synthetic oligonucleotide
auauuauugcuuaugcccc

SEQ ID NO: 685166 - RNA, 19 nt, Artificial Sequence
  Description of Artificial Sequence: Synthetic oligonucleotide
uccucuugaaucuagacaa

SEQ ID NO: 685167 - RNA, 19 nt, Artificial Sequence
  Description of Artificial Sequence: Synthetic oligonucleotide
ugcccuauuaccaaaguga

SEQ ID NO: 685168 - RNA, 19 nt, Artificial Sequence
  Description of Artificial Sequence: Synthetic oligonucleotide
uguuauaauucaacuagga

SEQ ID NO: 685169 - RNA, 19 nt, Artificial Sequence
  Description of Artificial Sequence: Synthetic oligonucleotide
aauucaacuaggacuacuc

SEQ ID NO: 685170 - RNA, 19 nt, Artificial Sequence
  Description of Artificial Sequence: Synthetic oligonucleotide
uacgagugcaaccaagugc

SEQ ID NO: 685171 - RNA, 19 nt, Artificial Sequence
  Description of Artificial Sequence: Synthetic oligonucleotide
ucaacuaggacuacucacu

SEQ ID NO: 685172 - RNA, 19 nt, Artificial Sequence
  Description of Artificial Sequence: Synthetic oligonucleotide
aguccugacauauacccuc

SEQ ID NO: 685173 - RNA, 19 nt, Artificial Sequence
  Description of Artificial Sequence: Synthetic oligonucleotide
ucgaccuggagauaaaaug

SEQ ID NO: 685174 - RNA, 19 nt, Artificial Sequence
  Description of Artificial Sequence: Synthetic oligonucleotide
uguuuauacugggagaugc

SEQ ID NO: 685175 - RNA, 19 nt, Artificial Sequence
  Description of Artificial Sequence: Synthetic oligonucleotide
acgucuaggauuuucaggu

SEQ ID NO: 685176 - RNA, 19 nt, Artificial Sequence
  Description of Artificial Sequence: Synthetic oligonucleotide
aacuuaaacaguaggauau

SEQ ID NO: 685177 - RNA, 19 nt, Artificial Sequence
  Description of Artificial Sequence: Synthetic oligonucleotide
cuauaugccauuucucccc

SEQ ID NO: 685178 - RNA, 19 nt, Artificial Sequence
  Description of Artificial Sequence: Synthetic oligonucleotide
cuaacugugcccauggcug

SEQ ID NO: 685179 - RNA, 19 nt, Artificial Sequence
  Description of Artificial Sequence: Synthetic oligonucleotide
auagguaauuauaacaaug

SEQ ID NO: 685180 - RNA, 19 nt, Artificial Sequence
  Description of Artificial Sequence: Synthetic oligonucleotide
aauaagcccuucuagugau

SEQ ID NO: 685181 - RNA, 19 nt, Artificial Sequence
  Description of Artificial Sequence: Synthetic oligonucleotide
uugaaucuagacaacuuaa

SEQ ID NO: 685182 - RNA, 19 nt, Artificial Sequence
  Description of Artificial Sequence: Synthetic oligonucleotide
uucaacuaggacuacucac

SEQ ID NO: 685183 - RNA, 19 nt, Artificial Sequence
  Description of Artificial Sequence: Synthetic oligonucleotide
agggcauagggucagaacu

SEQ ID NO: 685184 - RNA, 19 nt, Artificial Sequence
  Description of Artificial Sequence: Synthetic oligonucleotide
uccguuauguuuuggcaag

SEQ ID NO: 685185 - RNA, 19 nt, Artificial Sequence
  Description of Artificial Sequence: Synthetic oligonucleotide
aaacaaaccgccaugguua

SEQ ID NO: 685186 - RNA, 19 nt, Artificial Sequence
  Description of Artificial Sequence: Synthetic oligonucleotide
ugguuaaaggcuauuccgu

SEQ ID NO: 685187 - RNA, 19 nt, Artificial Sequence
  Description of Artificial Sequence: Synthetic oligonucleotide
ucuacgagugcaaccaagu

SEQ ID NO: 685188 - RNA, 19 nt, Artificial Sequence
  Description of Artificial Sequence: Synthetic oligonucleotide
uuaguggugaccugaauuu

SEQ ID NO: 685189 - RNA, 19 nt, Artificial Sequence
  Description of Artificial Sequence: Synthetic oligonucleotide
agucaguauagcccuuagc

SEQ ID NO: 685190 - RNA, 19 nt, Artificial Sequence
  Description of Artificial Sequence: Synthetic oligonucleotide
uaugccauuucuccccgag

SEQ ID NO: 685191 - RNA, 19 nt, Artificial Sequence
  Description of Artificial Sequence: Synthetic oligonucleotide
aaaccgccaugguuaaagg

SEQ ID NO: 685192 - RNA, 19 nt, Artificial Sequence
  Description of Artificial Sequence: Synthetic oligonucleotide
ugacacagucauccaauag

SEQ ID NO: 685193 - RNA, 19 nt, Artificial Sequence
  Description of Artificial Sequence: Synthetic oligonucleotide
cacacaacgaucccguggc

SEQ ID NO: 685194 - RNA, 19 nt, Artificial Sequence
  Description of Artificial Sequence: Synthetic oligonucleotide
ggcaauuaacuccaagggg

SEQ ID NO: 685195 - RNA, 19 nt, Artificial Sequence
  Description of Artificial Sequence: Synthetic oligonucleotide
ucauguauguguccguuau

SEQ ID NO: 685196 - RNA, 19 nt, Artificial Sequence
  Description of Artificial Sequence: Synthetic oligonucleotide
augcauauggcauuuggaa

SEQ ID NO: 685197 - RNA, 19 nt, Artificial Sequence
  Description of Artificial Sequence: Synthetic oligonucleotide
uuagucauuugcccuauua

SEQ ID NO: 685198 - RNA, 19 nt, Artificial Sequence
  Description of Artificial Sequence: Synthetic oligonucleotide
caguauagcccuuagcauc

SEQ ID NO: 685199 - RNA, 19 nt, Artificial Sequence
  Description of Artificial Sequence: Synthetic oligonucleotide
aaaacacaacgucuaggau

SEQ ID NO: 685200 - RNA, 19 nt, Artificial Sequence
  Description of Artificial Sequence: Synthetic oligonucleotide
uguccguuauguuuuggca

SEQ ID NO: 685201 - RNA, 19 nt, Artificial Sequence
  Description of Artificial Sequence: Synthetic oligonucleotide
ugcauauggcauuuggaaa

SEQ ID NO: 685202 - RNA, 19 nt, Artificial Sequence
  Description of Artificial Sequence: Synthetic oligonucleotide
ugacauauacccucucacu

SEQ ID NO: 685203 - RNA, 19 nt, Artificial Sequence
  Description of Artificial Sequence: Synthetic oligonucleotide
uugcccuauuaccaaagug

SEQ ID NO: 685204 - RNA, 19 nt, Artificial Sequence
  Description of Artificial Sequence: Synthetic oligonucleotide
aggcuauuccgugucaacc

SEQ ID NO: 685205 - RNA, 19 nt, Artificial Sequence
  Description of Artificial Sequence: Synthetic oligonucleotide
acauauacccucucacucu

SEQ ID NO: 685206 - RNA, 19 nt, Artificial Sequence
  Description of Artificial Sequence: Synthetic oligonucleotide
ucuagacaacuuaaacagu

SEQ ID NO: 685207 - RNA, 19 nt, Artificial Sequence
  Description of Artificial Sequence: Synthetic oligonucleotide
  modified_base (7)..(7): a, c, u, g, unknown or other
agccagnuuccucuuaugu

SEQ ID NO: 685208 - RNA, 19 nt, Artificial Sequence
  Description of Artificial Sequence: Synthetic oligonucleotide
uuuauacugggagaugcac

SEQ ID NO: 685209 - RNA, 19 nt, Artificial Sequence
  Description of Artificial Sequence: Synthetic oligonucleotide
cugacauauacccucucac

SEQ ID NO: 685210 - RNA, 19 nt, Artificial Sequence
  Description of Artificial Sequence: Synthetic oligonucleotide
gauuaaacacuuccagcga

SEQ ID NO: 685211 - RNA, 19 nt, Artificial Sequence
  Description of Artificial Sequence: Synthetic oligonucleotide
aagguaaacgucacgucug

SEQ ID NO: 685212 - RNA, 19 nt, Artificial Sequence
  Description of Artificial Sequence: Synthetic oligonucleotide
agcccuuagcaucaguaag

SEQ ID NO: 685213 - RNA, 19 nt, Artificial Sequence
  Description of Artificial Sequence: Synthetic oligonucleotide
ugccauuucuccccgaguc

SEQ ID NO: 685214 - RNA, 19 nt, Artificial Sequence
  Description of Artificial Sequence: Synthetic oligonucleotide
ugcucuacgagugcaacca

SEQ ID NO: 685215 - RNA, 19 nt, Artificial Sequence
  Description of Artificial Sequence: Synthetic oligonucleotide
uugggcgacaacugcuugg

SEQ ID NO: 685216 - RNA, 19 nt, Artificial Sequence
  Description of Artificial Sequence: Synthetic oligonucleotide
ucugguauguggccaugcc

SEQ ID NO: 685217 - RNA, 19 nt, Artificial Sequence
  Description of Artificial Sequence: Synthetic oligonucleotide
guuggcgcuuuccacaaag

SEQ ID NO: 685218 - RNA, 19 nt, Artificial Sequence
  Description of Artificial Sequence: Synthetic oligonucleotide
ccuuccauuagucauuugc

SEQ ID NO: 685219 - RNA, 19 nt, Artificial Sequence
  Description of Artificial Sequence: Synthetic oligonucleotide
gauauuugcccucaccaua

SEQ ID NO: 685220 - RNA, 19 nt, Artificial Sequence
  Description of Artificial Sequence: Synthetic oligonucleotide
acucuaucuacccucuccu

SEQ ID NO: 685221 - RNA, 19 nt, Artificial Sequence
  Description of Artificial Sequence: Synthetic oligonucleotide
uguuuugccccugauagua

SEQ ID NO: 685222 - RNA, 19 nt, Artificial Sequence
  Description of Artificial Sequence: Synthetic oligonucleotide
  modified_base (2)..(2): a, c, u, g, unknown or other
gnuuccucuuauguccagg

SEQ ID NO: 685223 - RNA, 19 nt, Artificial Sequence
  Description of Artificial Sequence: Synthetic oligonucleotide
ugggauucggcuccuuuca

SEQ ID NO: 685224 - RNA, 19 nt, Artificial Sequence
  Description of Artificial Sequence: Synthetic oligonucleotide
acccucucacucuaucuac

SEQ ID NO: 685225 - RNA, 19 nt, Artificial Sequence
  Description of Artificial Sequence: Synthetic oligonucleotide
cacucuaucuacccucucc

SEQ ID NO: 685226 - RNA, 19 nt, Artificial Sequence
  Description of Artificial Sequence: Synthetic oligonucleotide
ggauauuauugcuuaugcc

SEQ ID NO: 685227 - RNA, 19 nt, Artificial Sequence
  Description of Artificial Sequence: Synthetic oligonucleotide
auucaacuaggacuacuca

SEQ ID NO: 685228 - RNA, 19 nt, Artificial Sequence
  Description of Artificial Sequence: Synthetic oligonucleotide
uuggcgcuuuccacaaagg

SEQ ID NO: 685229 - RNA, 19 nt, Artificial Sequence
  Description of Artificial Sequence: Synthetic oligonucleotide
acccuaacugugcccaugg

SEQ ID NO: 685230 - RNA, 19 nt, Artificial Sequence
  Description of Artificial Sequence: Synthetic oligonucleotide
uuugcccuauuaccaaagu

SEQ ID NO: 685231 - RNA, 19 nt, Artificial Sequence
  Description of Artificial Sequence: Synthetic oligonucleotide
uuuugccccugauaguacu

SEQ ID NO: 685232 - RNA, 19 nt, Artificial Sequence
  Description of Artificial Sequence: Synthetic oligonucleotide
uauacccucucacucuauc

SEQ ID NO: 685233 - RNA, 19 nt, Artificial Sequence
  Description of Artificial Sequence: Synthetic oligonucleotide
uaauucaacuaggacuacu

SEQ ID NO: 685234 - RNA, 19 nt, Artificial Sequence
  Description of Artificial Sequence: Synthetic oligonucleotide
  modified_base (9)..(9): a, c, u, g, unknown or other
ucagccagnuuccucuuau

SEQ ID NO: 685235 - RNA, 19 nt, Artificial Sequence
  Description of Artificial Sequence: Synthetic oligonucleotide
gacagcgugcugcucuacg

SEQ ID NO: 685236 - RNA, 19 nt, Artificial Sequence
  Description of Artificial Sequence: Synthetic oligonucleotide
ucuagugauuaugaggguu

SEQ ID NO: 685237 - RNA, 19 nt, Artificial Sequence
  Description of Artificial Sequence: Synthetic oligonucleotide
guacugggauuuaauaagc

SEQ ID NO: 685238 - RNA, 19 nt, Artificial Sequence
  Description of Artificial Sequence: Synthetic oligonucleotide
gguuaaaggcuauuccgug

SEQ ID NO: 685239 - RNA, 19 nt, Artificial Sequence
  Description of Artificial Sequence: Synthetic oligonucleotide
aacaaaccgccaugguuaa

SEQ ID NO: 685240 - RNA, 19 nt, Artificial Sequence
  Description of Artificial Sequence: Synthetic oligonucleotide
ucaguaaggugaccuccca

SEQ ID NO: 685241 - RNA, 19 nt, Artificial Sequence
  Description of Artificial Sequence: Synthetic oligonucleotide
auacccucucacucuaucu

SEQ ID NO: 685242 - RNA, 19 nt, Artificial Sequence
  Description of Artificial Sequence: Synthetic oligonucleotide
cucuacgagugcaaccaag

SEQ ID NO: 685243 - RNA, 19 nt, Artificial Sequence
  Description of Artificial Sequence: Synthetic oligonucleotide
caacgucuaggauuuucag

SEQ ID NO: 685244 - RNA, 19 nt, Artificial Sequence
  Description of Artificial Sequence: Synthetic oligonucleotide
cucguggauggauggagag

SEQ ID NO: 685245 - RNA, 19 nt, Artificial Sequence
  Description of Artificial Sequence: Synthetic oligonucleotide
ugaagaucaugaguggaua

SEQ ID NO: 685246 - RNA, 19 nt, Artificial Sequence
  Description of Artificial Sequence: Synthetic oligonucleotide
cugggauuuaauaagcccu

SEQ ID NO: 685247 - RNA, 19 nt, Artificial Sequence
  Description of Artificial Sequence: Synthetic oligonucleotide
ugugugugugugucuugag

SEQ ID NO: 685248 - RNA, 19 nt, Artificial Sequence
  Description of Artificial Sequence: Synthetic oligonucleotide
agaguacaaucagauggag

SEQ ID NO: 685249 - RNA, 19 nt, Artificial Sequence
  Description of Artificial Sequence: Synthetic oligonucleotide
uacccucucacucuaucua

SEQ ID NO: 685250 - RNA, 19 nt, Artificial Sequence
  Description of Artificial Sequence: Synthetic oligonucleotide
cucgcagcuacagaucagc

SEQ ID NO: 685251 - RNA, 19 nt, Artificial Sequence
  Description of Artificial Sequence: Synthetic oligonucleotide
aguaggauauuugcccuca

SEQ ID NO: 685252 - RNA, 19 nt, Artificial Sequence
  Description of Artificial Sequence: Synthetic oligonucleotide
uuucuaagcuuggguaucu

SEQ ID NO: 685253 - RNA, 19 nt, Artificial Sequence
  Description of Artificial Sequence: Synthetic oligonucleotide
cuagugauuaugaggguua

SEQ ID NO: 685254 - RNA, 19 nt, Artificial Sequence
  Description of Artificial Sequence: Synthetic oligonucleotide
ugaggguuauccucuugaa

SEQ ID NO: 685255 - RNA, 19 nt, Artificial Sequence
  Description of Artificial Sequence: Synthetic oligonucleotide
aaguugggcgacaacugcu

SEQ ID NO: 685256 - RNA, 19 nt, Artificial Sequence
  Description of Artificial Sequence: Synthetic oligonucleotide
acaacgucuaggauuuuca

SEQ ID NO: 685257 - RNA, 19 nt, Artificial Sequence
  Description of Artificial Sequence: Synthetic oligonucleotide
cauagggucagaacuccca

SEQ ID NO: 685258 - RNA, 19 nt, Artificial Sequence
  Description of Artificial Sequence: Synthetic oligonucleotide
aaagucaguauagcccuua

SEQ ID NO: 685259 - RNA, 19 nt, Artificial Sequence
  Description of Artificial Sequence: Synthetic oligonucleotide
gagugcaaccaagugcggc

SEQ ID NO: 685260 - RNA, 19 nt, Artificial Sequence
  Description of Artificial Sequence: Synthetic oligonucleotide
guaaggugaccucccaaca

SEQ ID NO: 685261 - RNA, 19 nt, Artificial Sequence
  Description of Artificial Sequence: Synthetic oligonucleotide
uagcccuuagcaucaguaa

SEQ ID NO: 685262 - RNA, 19 nt, Artificial Sequence
  Description of Artificial Sequence: Synthetic oligonucleotide
ugcuucgaccuggagauaa

SEQ ID NO: 685263 - RNA, 19 nt, Artificial Sequence
  Description of Artificial Sequence: Synthetic oligonucleotide
uggugugugcgugugugug

SEQ ID NO: 685264 - RNA, 19 nt, Artificial Sequence
  Description of Artificial Sequence: Synthetic oligonucleotide
ugauaguacugggauuuaa

SEQ ID NO: 685265 - RNA, 19 nt, Artificial Sequence
  Description of Artificial Sequence: Synthetic oligonucleotide
gcacacaacgaucccgugg

SEQ ID NO: 685266 - RNA, 19 nt, Artificial Sequence
  Description of Artificial Sequence: Synthetic oligonucleotide
ucuccccgaguccugacau

SEQ ID NO: 685267 - RNA, 19 nt, Artificial Sequence
  Description of Artificial Sequence: Synthetic oligonucleotide
cugcucuacgagugcaacc

SEQ ID NO: 685268 - RNA, 19 nt, Artificial Sequence
  Description of Artificial Sequence: Synthetic oligonucleotide
aguggauauuauugcuuau

SEQ ID NO: 685269 - RNA, 19 nt, Artificial Sequence
  Description of Artificial Sequence: Synthetic oligonucleotide
uauagcccuuagcaucagu

SEQ ID NO: 685270 - RNA, 19 nt, Artificial Sequence
  Description of Artificial Sequence: Synthetic oligonucleotide
agguaaacgucacgucuga

SEQ ID NO: 685271 - RNA, 19 nt, Artificial Sequence
  Description of Artificial Sequence: Synthetic oligonucleotide
caagguaaacgucacgucu

SEQ ID NO: 685272 - RNA, 19 nt, Artificial Sequence
  Description of Artificial Sequence: Synthetic oligonucleotide
cgugcauugcauuucuggg

SEQ ID NO: 685273 - RNA, 19 nt, Artificial Sequence
  Description of Artificial Sequence: Synthetic oligonucleotide
aaacaccaacccugacaca

SEQ ID NO: 685274 - RNA, 19 nt, Artificial Sequence
  Description of Artificial Sequence: Synthetic oligonucleotide
guuaaaggcuauuccgugu

SEQ ID NO: 685275 - RNA, 19 nt, Artificial Sequence
  Description of Artificial Sequence: Synthetic oligonucleotide
uucuccccgaguccugaca

SEQ ID NO: 685276 - RNA, 19 nt, Artificial Sequence
  Description of Artificial Sequence: Synthetic oligonucleotide
agugccccagacccuaacu

SEQ ID NO: 685277 - RNA, 19 nt, Artificial Sequence
  Description of Artificial Sequence: Synthetic oligonucleotide
ucgcagcuacagaucagca

SEQ ID NO: 685278 - RNA, 19 nt, Artificial Sequence
  Description of Artificial Sequence: Synthetic oligonucleotide
cuucaggcgacagccgggg

SEQ ID NO: 685279 - RNA, 19 nt, Artificial Sequence
  Description of Artificial Sequence: Synthetic oligonucleotide
gugugugugugucuugaga

SEQ ID NO: 685280 - RNA, 19 nt, Artificial Sequence
  Description of Artificial Sequence: Synthetic oligonucleotide
gcaauuaacuccaaggggu

SEQ ID NO: 685281 - RNA, 19 nt, Artificial Sequence
  Description of Artificial Sequence: Synthetic oligonucleotide
ccgccuguggucuacacag

SEQ ID NO: 685282 - RNA, 19 nt, Artificial Sequence
  Description of Artificial Sequence: Synthetic oligonucleotide
agacagcacuucaccaucg

SEQ ID NO: 685283 - RNA, 19 nt, Artificial Sequence
  Description of Artificial Sequence: Synthetic oligonucleotide
cucgcucccucuucacacg

SEQ ID NO: 685284 - RNA, 19 nt, Artificial Sequence
  Description of Artificial Sequence: Synthetic oligonucleotide
cucuaauggugugugcgug

SEQ ID NO: 685285 - RNA, 19 nt, Artificial Sequence
  Description of Artificial Sequence: Synthetic oligonucleotide
cacaacgaucccguggcag

SEQ ID NO: 685286 - RNA, 19 nt, Artificial Sequence
  Description of Artificial Sequence: Synthetic oligonucleotide
auagcccuuagcaucagua

SEQ ID NO: 685287 - RNA, 19 nt, Artificial Sequence
  Description of Artificial Sequence: Synthetic oligonucleotide
ugugcgugugugugugugu

SEQ ID NO: 685288 - RNA, 19 nt, Artificial Sequence
  Description of Artificial Sequence: Synthetic oligonucleotide
agcgugcugcucuacgagu

SEQ ID NO: 685289 - RNA, 19 nt, Artificial Sequence
  Description of Artificial Sequence: Synthetic oligonucleotide
ugggcgacaacugcuuggu

SEQ ID NO: 685290 - RNA, 19 nt, Artificial Sequence
  Description of Artificial Sequence: Synthetic oligonucleotide
cacaacgucuaggauuuuc

SEQ ID NO: 685291 - RNA, 19 nt, Artificial Sequence
  Description of Artificial Sequence: Synthetic oligonucleotide
cacucgcagcuacagauca

SEQ ID NO: 685292 - RNA, 19 nt, Artificial Sequence
  Description of Artificial Sequence: Synthetic oligonucleotide
ggcuauuccgugucaacca

SEQ ID NO: 685293 - RNA, 19 nt, Artificial Sequence
  Description of Artificial Sequence: Synthetic oligonucleotide
guugggcgacaacugcuug

SEQ ID NO: 685294 - RNA, 19 nt, Artificial Sequence
  Description of Artificial Sequence: Synthetic oligonucleotide
uaguagcacucaaacucuu

SEQ ID NO: 685295 - RNA, 19 nt, Artificial Sequence
  Description of Artificial Sequence: Synthetic oligonucleotide
caaaugcccgccugugguc

SEQ ID NO: 685296 - RNA, 19 nt, Artificial Sequence
  Description of Artificial Sequence: Synthetic oligonucleotide
cagcgugcugcucuacgag

SEQ ID NO: 685297 - RNA, 19 nt, Artificial Sequence
  Description of Artificial Sequence: Synthetic oligonucleotide
ugucuacaguaaucagguc

SEQ ID NO: 685298 - RNA, 19 nt, Artificial Sequence
  Description of Artificial Sequence: Synthetic oligonucleotide
uguggcgcuuuugaugcuc

SEQ ID NO: 685299 - RNA, 19 nt, Artificial Sequence
  Description of Artificial Sequence: Synthetic oligonucleotide
acuuaaacaguaggauauu

SEQ ID NO: 685300 - RNA, 19 nt, Artificial Sequence
  Description of Artificial Sequence: Synthetic oligonucleotide
uagugauuaugaggguuau

SEQ ID NO: 685301 - RNA, 19 nt, Artificial Sequence
  Description of Artificial Sequence: Synthetic oligonucleotide
acgaucccguggcaggugu

SEQ ID NO: 685302 - RNA, 19 nt, Artificial Sequence
  Description of Artificial Sequence: Synthetic oligonucleotide
cacagauuuucaaaugcau

SEQ ID NO: 685303 - RNA, 19 nt, Artificial Sequence
  Description of Artificial Sequence: Synthetic oligonucleotide
gugugugcgugugugugug

SEQ ID NO: 685304 - RNA, 19 nt, Artificial Sequence
  Description of Artificial Sequence: Synthetic oligonucleotide
ccucucacucuaucuaccc

SEQ ID NO: 685305 - RNA, 19 nt, Artificial Sequence
  Description of Artificial Sequence: Synthetic oligonucleotide
ugcgugugugugugugucu

SEQ ID NO: 685306 - RNA, 19 nt, Artificial Sequence
  Description of Artificial Sequence: Synthetic oligonucleotide
cuuggccuacuuuaguggu

SEQ ID NO: 685307 - RNA, 19 nt, Artificial Sequence
  Description of Artificial Sequence: Synthetic oligonucleotide
gacccuaacugugcccaug

SEQ ID NO: 685308 - RNA, 19 nt, Artificial Sequence
  Description of Artificial Sequence: Synthetic oligonucleotide
guaggauauuugcccucac

SEQ ID NO: 685309 - RNA, 19 nt, Artificial Sequence
  Description of Artificial Sequence: Synthetic oligonucleotide
gugugcgugugugugugug

SEQ ID NO: 685310 - RNA, 19 nt, Artificial Sequence
  Description of Artificial Sequence: Synthetic oligonucleotide
ucacucuaucuacccucuc

SEQ ID NO: 685311 - RNA, 19 nt, Artificial Sequence
  Description of Artificial Sequence: Synthetic oligonucleotide
gaggguuauccucuugaau

SEQ ID NO: 685312 - RNA, 19 nt, Artificial Sequence
  Description of Artificial Sequence: Synthetic oligonucleotide
cuacaguaaucagguccgc

SEQ ID NO: 685313 - RNA, 19 nt, Artificial Sequence
  Description of Artificial Sequence: Synthetic oligonucleotide
ggcgacaacugcuuggugu

SEQ ID NO: 685314 - RNA, 19 nt, Artificial Sequence
  Description of Artificial Sequence: Synthetic oligonucleotide
gccauuucuccccgagucc

SEQ ID NO: 685315 - RNA, 19 nt, Artificial Sequence
  Description of Artificial Sequence: Synthetic oligonucleotide
gugugugugugugucuuga

SEQ ID NO: 685316 - RNA, 19 nt, Artificial Sequence
  Description of Artificial Sequence: Synthetic oligonucleotide
auguaauuacuagcacuua

SEQ ID NO: 685317 - RNA, 19 nt, Artificial Sequence
  Description of Artificial Sequence: Synthetic oligonucleotide
cccuauuaccaaagugaag

SEQ ID NO: 685318 - RNA, 19 nt, Artificial Sequence
  Description of Artificial Sequence: Synthetic oligonucleotide
  modified_base (8)..(8): a, c, u, g, unknown or other
cagccagnuuccucuuaug

SEQ ID NO: 685319 - RNA, 19 nt, Artificial Sequence
  Description of Artificial Sequence: Synthetic oligonucleotide
ccaagguaaacgucacguc

SEQ ID NO: 685320 - RNA, 19 nt, Artificial Sequence
  Description of Artificial Sequence: Synthetic oligonucleotide
ugugugcgugugugugugu

SEQ ID NO: 685321 - RNA, 19 nt, Artificial Sequence
  Description of Artificial Sequence: Synthetic oligonucleotide
cuauuccgugucaaccaaa

SEQ ID NO: 685322 - RNA, 19 nt, Artificial Sequence
  Description of Artificial Sequence: Synthetic oligonucleotide
cccuucuagugauuaugag

SEQ ID NO: 685323 - RNA, 19 nt, Artificial Sequence
  Description of Artificial Sequence: Synthetic oligonucleotide
uccuuccauuagucauuug

SEQ ID NO: 685324 - RNA, 19 nt, Artificial Sequence
  Description of Artificial Sequence: Synthetic oligonucleotide
uucaggcgacagccgggga

SEQ ID NO: 685325 - RNA, 19 nt, Artificial Sequence
  Description of Artificial Sequence: Synthetic oligonucleotide
gcacagauaaccauguaau

SEQ ID NO: 685326 - RNA, 19 nt, Artificial Sequence
  Description of Artificial Sequence: Synthetic oligonucleotide
gguggcuauaugccauuuc

SEQ ID NO: 685327 - RNA, 19 nt, Artificial Sequence
  Description of Artificial Sequence: Synthetic oligonucleotide
uguuggcgcuuuccacaaa

SEQ ID NO: 685328 - RNA, 19 nt, Artificial Sequence
  Description of Artificial Sequence: Synthetic oligonucleotide
gaucaugaguggauauuau

SEQ ID NO: 685329 - RNA, 19 nt, Artificial Sequence
  Description of Artificial Sequence: Synthetic oligonucleotide
acacaacgaucccguggca

SEQ ID NO: 685330 - RNA, 19 nt, Artificial Sequence
  Description of Artificial Sequence: Synthetic oligonucleotide
ccugaauuuucccuaggaa

SEQ ID NO: 685331 - RNA, 19 nt, Artificial Sequence
  Description of Artificial Sequence: Synthetic oligonucleotide
aguugggcgacaacugcuu

SEQ ID NO: 685332 - RNA, 19 nt, Artificial Sequence
  Description of Artificial Sequence: Synthetic oligonucleotide
gugcguguguguguguguc

SEQ ID NO: 685333 - RNA, 19 nt, Artificial Sequence
  Description of Artificial Sequence: Synthetic oligonucleotide
guaucugguauguggccau

SEQ ID NO: 685334 - RNA, 19 nt, Artificial Sequence
  Description of Artificial Sequence: Synthetic oligonucleotide
gcacucaaacucuugucua

SEQ ID NO: 685335 - RNA, 19 nt, Artificial Sequence
  Description of Artificial Sequence: Synthetic oligonucleotide
gcuauuccgugucaaccaa

SEQ ID NO: 685336 - RNA, 19 nt, Artificial Sequence
  Description of Artificial Sequence: Synthetic oligonucleotide
ccgugucaaccaaaugaac

SEQ ID NO: 685337 - RNA, 19 nt, Artificial Sequence
  Description of Artificial Sequence: Synthetic oligonucleotide
gcgacaacugcuuggugua

SEQ ID NO: 685338 - RNA, 19 nt, Artificial Sequence
  Description of Artificial Sequence: Synthetic oligonucleotide
gggacgagugccagaaaca

SEQ ID NO: 685339 - RNA, 19 nt, Artificial Sequence
  Description of Artificial Sequence: Synthetic oligonucleotide
ggaugagccccagugucca

SEQ ID NO: 685340 - RNA, 19 nt, Artificial Sequence
  Description of Artificial Sequence: Synthetic oligonucleotide
gcccuauuaccaaagugaa

SEQ ID NO: 685341 - RNA, 19 nt, Artificial Sequence
  Description of Artificial Sequence: Synthetic oligonucleotide
agacccuaacugugcccau

SEQ ID NO: 685342 - RNA, 19 nt, Artificial Sequence
  Description of Artificial Sequence: Synthetic oligonucleotide
gcgugcugcucuacgagug

SEQ ID NO: 685343 - RNA, 19 nt, Artificial Sequence
  Description of Artificial Sequence: Synthetic oligonucleotide
cucucacucuaucuacccu

SEQ ID NO: 685344 - RNA, 19 nt, Artificial Sequence
  Description of Artificial Sequence: Synthetic oligonucleotide
gcccuucuagugauuauga

SEQ ID NO: 685345 - RNA, 19 nt, Artificial Sequence
  Description of Artificial Sequence: Synthetic oligonucleotide
gcauagggucagaacuccc

SEQ ID NO: 685346 - RNA, 19 nt, Artificial Sequence
  Description of Artificial Sequence: Synthetic oligonucleotide
auauacccucucacucuau

SEQ ID NO: 685347 - RNA, 19 nt, Artificial Sequence
  Description of Artificial Sequence: Synthetic oligonucleotide
gcucuaauggugugugcgu

SEQ ID NO: 685348 - RNA, 19 nt, Artificial Sequence
  Description of Artificial Sequence: Synthetic oligonucleotide
agguggcuauaugccauuu

SEQ ID NO: 685349 - RNA, 19 nt, Artificial Sequence
  Description of Artificial Sequence: Synthetic oligonucleotide
aggcucguggauggaugga

SEQ ID NO: 685350 - RNA, 19 nt, Artificial Sequence
  Description of Artificial Sequence: Synthetic oligonucleotide
ggcgcuuuugaugcucuaa

SEQ ID NO: 685351 - RNA, 19 nt, Artificial Sequence
  Description of Artificial Sequence: Synthetic oligonucleotide
auaagcccuucuagugauu

SEQ ID NO: 685352 - RNA, 19 nt, Artificial Sequence
  Description of Artificial Sequence: Synthetic oligonucleotide
ggugugugcgugugugugu

SEQ ID NO: 685353 - RNA, 19 nt, Artificial Sequence
  Description of Artificial Sequence: Synthetic oligonucleotide
ggauuuucagguggcuaua

SEQ ID NO: 685354 - RNA, 19 nt, Artificial Sequence
  Description of Artificial Sequence: Synthetic oligonucleotide
acaaaccgccaugguuaaa

SEQ ID NO: 685355 - RNA, 19 nt, Artificial Sequence
  Description of Artificial Sequence: Synthetic oligonucleotide
gguuauccucuugaaucua

SEQ ID NO: 685356 - RNA, 19 nt, Artificial Sequence
  Description of Artificial Sequence: Synthetic oligonucleotide
gcgcuuuugaugcucuaau

SEQ ID NO: 685357 - RNA, 19 nt, Artificial Sequence
  Description of Artificial Sequence: Synthetic oligonucleotide
cauuagucauuugcccuau

SEQ ID NO: 685358 - RNA, 19 nt, Artificial Sequence
  Description of Artificial Sequence: Synthetic oligonucleotide
cugauaguacugggauuua

SEQ ID NO: 685359 - RNA, 19 nt, Artificial Sequence
  Description of Artificial Sequence: Synthetic oligonucleotide
cauggacaucuuguuuaua

SEQ ID NO: 685360 - RNA, 19 nt, Artificial Sequence
  Description of Artificial Sequence: Synthetic oligonucleotide
cgagugcaaccaagugcgg

SEQ ID NO: 685361 - RNA, 19 nt, Artificial Sequence
  Description of Artificial Sequence: Synthetic oligonucleotide
gggcgacaacugcuuggug

SEQ ID NO: 685362 - RNA, 19 nt, Artificial Sequence
  Description of Artificial Sequence: Synthetic oligonucleotide
gcuuaugccccauguucau

SEQ ID NO: 685363 - RNA, 19 nt, Artificial Sequence
  Description of Artificial Sequence: Synthetic oligonucleotide
cgugugugugugugucuug

SEQ ID NO: 685364 - RNA, 19 nt, Artificial Sequence
  Description of Artificial Sequence: Synthetic oligonucleotide
ggccgugcauugcauuucu

SEQ ID NO: 685365 - RNA, 19 nt, Artificial Sequence
  Description of Artificial Sequence: Synthetic oligonucleotide
gcucuacgagugcaaccaa

SEQ ID NO: 685366 - RNA, 19 nt, Artificial Sequence
  Description of Artificial Sequence: Synthetic oligonucleotide
cuccccgaguccugacaua

SEQ ID NO: 685367 - RNA, 19 nt, Artificial Sequence
  Description of Artificial Sequence: Synthetic oligonucleotide
ggcggcuagcugguuggca

SEQ ID NO: 685368 - RNA, 19 nt, Artificial Sequence
  Description of Artificial Sequence: Synthetic oligonucleotide
cccuuagcaucaguaaggu

SEQ ID NO: 685369 - RNA, 19 nt, Artificial Sequence
  Description of Artificial Sequence: Synthetic oligonucleotide
cccgccuguggucuacaca

SEQ ID NO: 685370 - RNA, 19 nt, Artificial Sequence
  Description of Artificial Sequence: Synthetic oligonucleotide
gcuucgaccuggagauaaa

SEQ ID NO: 685371 - RNA, 19 nt, Artificial Sequence
  Description of Artificial Sequence: Synthetic oligonucleotide
acacaacgucuaggauuuu

SEQ ID NO: 685372 - RNA, 19 nt, Artificial Sequence
  Description of Artificial Sequence: Synthetic oligonucleotide
ccguuauguuuuggcaaga

SEQ ID NO: 685373 - RNA, 19 nt, Artificial Sequence
  Description of Artificial Sequence: Synthetic oligonucleotide
gcccgccuguggucuacac

SEQ ID NO: 685374 - RNA, 19 nt, Artificial Sequence
  Description of Artificial Sequence: Synthetic oligonucleotide
ggugaccucccaacaggau

SEQ ID NO: 685375 - RNA, 19 nt, Artificial Sequence
  Description of Artificial Sequence: Synthetic oligonucleotide
gcgugugugugugugucuu

SEQ ID NO: 685376 - RNA, 19 nt, Artificial Sequence
  Description of Artificial Sequence: Synthetic oligonucleotide
gugcuucgaccuggagaua

SEQ ID NO: 685377 - RNA, 19 nt, Artificial Sequence
  Description of Artificial Sequence: Synthetic oligonucleotide
cgccaugguuaaaggcuau

SEQ ID NO: 685378 - RNA, 19 nt, Artificial Sequence
  Description of Artificial Sequence: Synthetic oligonucleotide
aaucacuuaauauagggcg

SEQ ID NO: 685379 - RNA, 19 nt, Artificial Sequence
  Description of Artificial Sequence: Synthetic oligonucleotide
aaauuugcaaauuuugaac

SEQ ID NO: 685380 - RNA, 19 nt, Artificial Sequence
  Description of Artificial Sequence: Synthetic oligonucleotide
uauauguccacacucagag

SEQ ID NO: 685381 - RNA, 19 nt, Artificial Sequence
  Description of Artificial Sequence: Synthetic oligonucleotide
ucgaaaagaauaauugucg

SEQ ID NO: 685382 - RNA, 19 nt, Artificial Sequence
  Description of Artificial Sequence: Synthetic oligonucleotide
acucauaccaauuuggcac

SEQ ID NO: 685383 - RNA, 19 nt, Artificial Sequence
  Description of Artificial Sequence: Synthetic oligonucleotide
acuguuauggccuucaguc

SEQ ID NO: 685384 - RNA, 19 nt, Artificial Sequence
  Description of Artificial Sequence: Synthetic oligonucleotide
aauacugaugaccagagaa

SEQ ID NO: 685385 - RNA, 19 nt, Artificial Sequence
  Description of Artificial Sequence: Synthetic oligonucleotide
auaaauuaggccauaauac

SEQ ID NO: 685386 - RNA, 19 nt, Artificial Sequence
  Description of Artificial Sequence: Synthetic oligonucleotide
ucguaaguaacccauaugc

SEQ ID NO: 685387 - RNA, 19 nt, Artificial Sequence
  Description of Artificial Sequence: Synthetic oligonucleotide
uaagcagacaccaacauga

SEQ ID NO: 685388 - RNA, 19 nt, Artificial Sequence
  Description of Artificial Sequence: Synthetic oligonucleotide
uaaggguuaauaaauuagg

SEQ ID NO: 685389 - RNA, 19 nt, Artificial Sequence
  Description of Artificial Sequence: Synthetic oligonucleotide
aggguuaauaaauuaggcc

SEQ ID NO: 685390 - RNA, 19 nt, Artificial Sequence
  Description of Artificial Sequence: Synthetic oligonucleotide
uguuuaagaaguuacugag

SEQ ID NO: 685391 - RNA, 19 nt, Artificial Sequence
  Description of Artificial Sequence: Synthetic oligonucleotide
ucauacgcaacccaaaugc

SEQ ID NO: 685392 - RNA, 19 nt, Artificial Sequence
  Description of Artificial Sequence: Synthetic oligonucleotide
ucuugguagacccagaucu

SEQ ID NO: 685393 - RNA, 19 nt, Artificial Sequence
  Description of Artificial Sequence: Synthetic oligonucleotide
auaaauucguuucugagca

SEQ ID NO: 685394 - RNA, 19 nt, Artificial Sequence
  Description of Artificial Sequence: Synthetic oligonucleotide
uuuaagaaguuacugagaa

SEQ ID NO: 685395 - RNA, 19 nt, Artificial Sequence
  Description of Artificial Sequence: Synthetic oligonucleotide
cauugguugacauaaacag

SEQ ID NO: 685396 - RNA, 19 nt, Artificial Sequence
  Description of Artificial Sequence: Synthetic oligonucleotide
cuuucgaaaagaauaauug

SEQ ID NO: 685397 - RNA, 19 nt, Artificial Sequence
  Description of Artificial Sequence: Synthetic oligonucleotide
accaauuuggcacuucugc

SEQ ID NO: 685398 - RNA, 19 nt, Artificial Sequence
  Description of Artificial Sequence: Synthetic oligonucleotide
ucaucuaaaaccuuuggac

SEQ ID NO: 685399 - RNA, 19 nt, Artificial Sequence
  Description of Artificial Sequence: Synthetic oligonucleotide
ucuaaguucccauugguug

SEQ ID NO: 685400 - RNA, 19 nt, Artificial Sequence
  Description of Artificial Sequence: Synthetic oligonucleotide
aggauaguggccuucuucc

SEQ ID NO: 685401 - RNA, 19 nt, Artificial Sequence
  Description of Artificial Sequence: Synthetic oligonucleotide
aauaaguuacgaugugguc

SEQ ID NO: 685402 - RNA, 19 nt, Artificial Sequence
  Description of Artificial Sequence: Synthetic oligonucleotide
aaggguuaauaaauuaggc

SEQ ID NO: 685403 - RNA, 19 nt, Artificial Sequence
  Description of Artificial Sequence: Synthetic oligonucleotide
uucguuucugagcaaaggg

SEQ ID NO: 685404 - RNA, 19 nt, Artificial Sequence
  Description of Artificial Sequence: Synthetic oligonucleotide
aaccuauuuggcgacagcc

SEQ ID NO: 685405 - RNA, 19 nt, Artificial Sequence
  Description of Artificial Sequence: Synthetic oligonucleotide
aaagaauaauugucggcuc

SEQ ID NO: 685406 - RNA, 19 nt, Artificial Sequence
  Description of Artificial Sequence: Synthetic oligonucleotide
uaauugucggcucagaaaa

SEQ ID NO: 685407 - RNA, 19 nt, Artificial Sequence
  Description of Artificial Sequence: Synthetic oligonucleotide
ucauaggcuacccauacgc

SEQ ID NO: 685408 - RNA, 19 nt, Artificial Sequence
  Description of Artificial Sequence: Synthetic oligonucleotide
uauggguugaacagaagag

SEQ ID NO: 685409 - RNA, 19 nt, Artificial Sequence
  Description of Artificial Sequence: Synthetic oligonucleotide
uguaaagaucauuucacug

SEQ ID NO: 685410 - RNA, 19 nt, Artificial Sequence
  Description of Artificial Sequence: Synthetic oligonucleotide
ucugaaaacaagugaaucu

SEQ ID NO: 685411 - RNA, 19 nt, Artificial Sequence
  Description of Artificial Sequence: Synthetic oligonucleotide
acaucuauaaagcgaagag

SEQ ID NO: 685412 - RNA, 19 nt, Artificial Sequence
  Description of Artificial Sequence: Synthetic oligonucleotide
uaggccauaauacuguccc

SEQ ID NO: 685413 - RNA, 19 nt, Artificial Sequence
  Description of Artificial Sequence: Synthetic oligonucleotide
uugguugacauaaacaguc

SEQ ID NO: 685414 - RNA, 19 nt, Artificial Sequence
  Description of Artificial Sequence: Synthetic oligonucleotide
gaaaagaauaauugucggc

SEQ ID NO: 685415 - RNA, 19 nt, Artificial Sequence
  Description of Artificial Sequence: Synthetic oligonucleotide
uaaauuaggccauaauacu

SEQ ID NO: 685416 - RNA, 19 nt, Artificial Sequence
  Description of Artificial Sequence: Synthetic oligonucleotide
cuuaauauagggcguaaag

SEQ ID NO: 685417 - RNA, 19 nt, Artificial Sequence
  Description of Artificial Sequence: Synthetic oligonucleotide
aauacugucccaauagcag

SEQ ID NO: 685418 - RNA, 19 nt, Artificial Sequence
  Description of Artificial Sequence: Synthetic oligonucleotide
uccucuaaugcuaaaaguc

SEQ ID NO: 685419 - RNA, 19 nt, Artificial Sequence
  Description of Artificial Sequence: Synthetic oligonucleotide
cuguacauuaucaugugag

SEQ ID NO: 685420 - RNA, 19 nt, Artificial Sequence
  Description of Artificial Sequence: Synthetic oligonucleotide
uguaaggagggcauuaaac

SEQ ID NO: 685421 - RNA, 19 nt, Artificial Sequence
  Description of Artificial Sequence: Synthetic oligonucleotide
uucuagcaaauacugauga

SEQ ID NO: 685422 - RNA, 19 nt, Artificial Sequence
  Description of Artificial Sequence: Synthetic oligonucleotide
auacugucccaauagcagc

SEQ ID NO: 685423 - RNA, 19 nt, Artificial Sequence
  Description of Artificial Sequence: Synthetic oligonucleotide
uuuagagccagacguuacg

SEQ ID NO: 685424 - RNA, 19 nt, Artificial Sequence
  Description of Artificial Sequence: Synthetic oligonucleotide
uugcaaauuuugaacauca

SEQ ID NO: 685425 - RNA, 19 nt, Artificial Sequence
  Description of Artificial Sequence: Synthetic oligonucleotide
ucuuagaacuuucauggac

SEQ ID NO: 685426 - RNA, 19 nt, Artificial Sequence
  Description of Artificial Sequence: Synthetic oligonucleotide
accaacgucuuccaugacc

SEQ ID NO: 685427 - RNA, 19 nt, Artificial Sequence
  Description of Artificial Sequence: Synthetic oligonucleotide
uuagucaaaacgaaucauc

SEQ ID NO: 685428 - RNA, 19 nt, Artificial Sequence
  Description of Artificial Sequence: Synthetic oligonucleotide
uuauccuuuccucuacggg

SEQ ID NO: 685429 - RNA, 19 nt, Artificial Sequence
  Description of Artificial Sequence: Synthetic oligonucleotide
uaaguaacccauaugccac

SEQ ID NO: 685430 - RNA, 19 nt, Artificial Sequence
  Description of Artificial Sequence: Synthetic oligonucleotide
aaaccguuaaggcagugga

SEQ ID NO: 685431 - RNA, 19 nt, Artificial Sequence
  Description of Artificial Sequence: Synthetic oligonucleotide
guagacccagaucugaucg

SEQ ID NO: 685432 - RNA, 19 nt, Artificial Sequence
  Description of Artificial Sequence: Synthetic oligonucleotide
aaauaaguuacgauguggu

SEQ ID NO: 685433 - RNA, 19 nt, Artificial Sequence
  Description of Artificial Sequence: Synthetic oligonucleotide
uauuugcuaaacuccuugg

SEQ ID NO: 685434 - RNA, 19 nt, Artificial Sequence
  Description of Artificial Sequence: Synthetic oligonucleotide
aaguaacccauaugccacc

SEQ ID NO: 685435 - RNA, 19 nt, Artificial Sequence
  Description of Artificial Sequence: Synthetic oligonucleotide
aaauuaggccauaauacug

SEQ ID NO: 685436 - RNA, 19 nt, Artificial Sequence
  Description of Artificial Sequence: Synthetic oligonucleotide
aaacaucuacauccaagag

SEQ ID NO: 685437 - RNA, 19 nt, Artificial Sequence
  Description of Artificial Sequence: Synthetic oligonucleotide
aagaucauuucacuguuau

SEQ ID NO: 685438 - RNA, 19 nt, Artificial Sequence
  Description of Artificial Sequence: Synthetic oligonucleotide
uuggaaaguguauaggacu

SEQ ID NO: 685439 - RNA, 19 nt, Artificial Sequence
  Description of Artificial Sequence: Synthetic oligonucleotide
auauggguugaacagaaga

SEQ ID NO: 685440 - RNA, 19 nt, Artificial Sequence
  Description of Artificial Sequence: Synthetic oligonucleotide
uuuauccuuuccucuacgg

SEQ ID NO: 685441 - RNA, 19 nt, Artificial Sequence
  Description of Artificial Sequence: Synthetic oligonucleotide
uugaucaagggcuaguccu

SEQ ID NO: 685442 - RNA, 19 nt, Artificial Sequence
  Description of Artificial Sequence: Synthetic oligonucleotide
auauuugcuaaacuccuug

SEQ ID NO: 685443 - RNA, 19 nt, Artificial Sequence
  Description of Artificial Sequence: Synthetic oligonucleotide
ucucaucuaaaaccuuugg

SEQ ID NO: 685444 - RNA, 19 nt, Artificial Sequence
  Description of Artificial Sequence: Synthetic oligonucleotide
ucgacauuuugaucaaggg

SEQ ID NO: 685445 - RNA, 19 nt, Artificial Sequence
  Description of Artificial Sequence: Synthetic oligonucleotide
ugcuaaacuccuuggaaag

SEQ ID NO: 685446 - RNA, 19 nt, Artificial Sequence
  Description of Artificial Sequence: Synthetic oligonucleotide
uauccuuuccucuacggga

SEQ ID NO: 685447 - RNA, 19 nt, Artificial Sequence
  Description of Artificial Sequence: Synthetic oligonucleotide
agaacagacuaguggcucc

SEQ ID NO: 685448 - RNA, 19 nt, Artificial Sequence
  Description of Artificial Sequence: Synthetic oligonucleotide
aacucauaccaauuuggca

SEQ ID NO: 685449 - RNA, 19 nt, Artificial Sequence
  Description of Artificial Sequence: Synthetic oligonucleotide
guuacugagaaaauacaag

SEQ ID NO: 685450 - RNA, 19 nt, Artificial Sequence
  Description of Artificial Sequence: Synthetic oligonucleotide
auaaguuacgauguggucu

SEQ ID NO: 685451 - RNA, 19 nt, Artificial Sequence
  Description of Artificial Sequence: Synthetic oligonucleotide
ccuaagaagcuucagaucc

SEQ ID NO: 685452 - RNA, 19 nt, Artificial Sequence
  Description of Artificial Sequence: Synthetic oligonucleotide
guacauuaucaugugagcg

SEQ ID NO: 685453 - RNA, 19 nt, Artificial Sequence
  Description of Artificial Sequence: Synthetic oligonucleotide
ucuuucgaaaagaauaauu

SEQ ID NO: 685454 - RNA, 19 nt, Artificial Sequence
  Description of Artificial Sequence: Synthetic oligonucleotide
aacaagaagaacagacuag

SEQ ID NO: 685455 - RNA, 19 nt, Artificial Sequence
  Description of Artificial Sequence: Synthetic oligonucleotide
guaaguaacccauaugcca

SEQ ID NO: 685456 - RNA, 19 nt, Artificial Sequence
  Description of Artificial Sequence: Synthetic oligonucleotide
uucugcgggagacaguagg

SEQ ID NO: 685457 - RNA, 19 nt, Artificial Sequence
  Description of Artificial Sequence: Synthetic oligonucleotide
uucgaagucugaaauaaau

SEQ ID NO: 685458 - RNA, 19 nt, Artificial Sequence
  Description of Artificial Sequence: Synthetic oligonucleotide
ggguuaauaaauuaggcca

SEQ ID NO: 685459 - RNA, 19 nt, Artificial Sequence
  Description of Artificial Sequence: Synthetic oligonucleotide
auaguggccuucuuccagc

SEQ ID NO: 685460 - RNA, 19 nt, Artificial Sequence
  Description of Artificial Sequence: Synthetic oligonucleotide
acuuagucaaaacgaauca

SEQ ID NO: 685461 - RNA, 19 nt, Artificial Sequence
  Description of Artificial Sequence: Synthetic oligonucleotide
uuagaacuuucauggaccc

SEQ ID NO: 685462 - RNA, 19 nt, Artificial Sequence
  Description of Artificial Sequence: Synthetic oligonucleotide
aauuaggccauaauacugu

SEQ ID NO: 685463 - RNA, 19 nt, Artificial Sequence
  Description of Artificial Sequence: Synthetic oligonucleotide
ucuuggucaggguucagag

SEQ ID NO: 685464 - RNA, 19 nt, Artificial Sequence
  Description of Artificial Sequence: Synthetic oligonucleotide
aagaacagacuaguggcuc

SEQ ID NO: 685465 - RNA, 19 nt, Artificial Sequence
  Description of Artificial Sequence: Synthetic oligonucleotide
agagaagccacacuucuca

SEQ ID NO: 685466 - RNA, 19 nt, Artificial Sequence
  Description of Artificial Sequence: Synthetic oligonucleotide
uggaucagaagucuggcaa

SEQ ID NO: 685467 - RNA, 19 nt, Artificial Sequence
  Description of Artificial Sequence: Synthetic oligonucleotide
uuaaacugugacacucgag

SEQ ID NO: 685468 - RNA, 19 nt, Artificial Sequence
  Description of Artificial Sequence: Synthetic oligonucleotide
uccucuaaguucccauugg

SEQ ID NO: 685469 - RNA, 19 nt, Artificial Sequence
  Description of Artificial Sequence: Synthetic oligonucleotide
uuguuucgaagucugaaau

SEQ ID NO: 685470 - RNA, 19 nt, Artificial Sequence
  Description of Artificial Sequence: Synthetic oligonucleotide
aaauccccuggaaaacucc

SEQ ID NO: 685471 - RNA, 19 nt, Artificial Sequence
  Description of Artificial Sequence: Synthetic oligonucleotide
gagggcauuaaacugugac

SEQ ID NO: 685472 - RNA, 19 nt, Artificial Sequence
  Description of Artificial Sequence: Synthetic oligonucleotide
aaguuuuacuccaucauaa

SEQ ID NO: 685473 - RNA, 19 nt, Artificial Sequence
  Description of Artificial Sequence: Synthetic oligonucleotide
agagaaguuuuacuccauc

SEQ ID NO: 685474 - RNA, 19 nt, Artificial Sequence
  Description of Artificial Sequence: Synthetic oligonucleotide
uacgggaaucuauaugucc

SEQ ID NO: 685475 - RNA, 19 nt, Artificial Sequence
  Description of Artificial Sequence: Synthetic oligonucleotide
uuuguuucgaagucugaaa

SEQ ID NO: 685476 - RNA, 19 nt, Artificial Sequence
  Description of Artificial Sequence: Synthetic oligonucleotide
agagaaccuauuuggcgac

SEQ ID NO: 685477 - RNA, 19 nt, Artificial Sequence
  Description of Artificial Sequence: Synthetic oligonucleotide
gauaguggccuucuuccag

SEQ ID NO: 685478 - RNA, 19 nt, Artificial Sequence
  Description of Artificial Sequence: Synthetic oligonucleotide
agggcguaaagacugaagu

SEQ ID NO: 685479 - RNA, 19 nt, Artificial Sequence
  Description of Artificial Sequence: Synthetic oligonucleotide
gacuuagucaaaacgaauc

SEQ ID NO: 685480 - RNA, 19 nt, Artificial Sequence
  Description of Artificial Sequence: Synthetic oligonucleotide
uacgccacuuagcacauug

SEQ ID NO: 685481 - RNA, 19 nt, Artificial Sequence
  Description of Artificial Sequence: Synthetic oligonucleotide
uaaugcuaaaagucuuuug

SEQ ID NO: 685482 - RNA, 19 nt, Artificial Sequence
  Description of Artificial Sequence: Synthetic oligonucleotide
uauaaagcgaagagacuuc

SEQ ID NO: 685483 - RNA, 19 nt, Artificial Sequence
  Description of Artificial Sequence: Synthetic oligonucleotide
ugaccuggauccuaagaag

SEQ ID NO: 685484 - RNA, 19 nt, Artificial Sequence
  Description of Artificial Sequence: Synthetic oligonucleotide
auaacccaaguucugcuug

SEQ ID NO: 685485 - RNA, 19 nt, Artificial Sequence
  Description of Artificial Sequence: Synthetic oligonucleotide
ugguuauugucucaucuaa

SEQ ID NO: 685486 - RNA, 19 nt, Artificial Sequence
  Description of Artificial Sequence: Synthetic oligonucleotide
uguacaagccuuuguccag

SEQ ID NO: 685487 - RNA, 19 nt, Artificial Sequence
  Description of Artificial Sequence: Synthetic oligonucleotide
gagauugacugucucagca

SEQ ID NO: 685488 - RNA, 19 nt, Artificial Sequence
  Description of Artificial Sequence: Synthetic oligonucleotide
ugucggcucagaaaauucc

SEQ ID NO: 685489 - RNA, 19 nt, Artificial Sequence
  Description of Artificial Sequence: Synthetic oligonucleotide
cuaguuuagagccagacgu

SEQ ID NO: 685490 - RNA, 19 nt, Artificial Sequence
  Description of Artificial Sequence: Synthetic oligonucleotide
cauccucuaaugcuaaaag

SEQ ID NO: 685491 - RNA, 19 nt, Artificial Sequence
  Description of Artificial Sequence: Synthetic oligonucleotide
gagacaguaggaacugucg

SEQ ID NO: 685492 - RNA, 19 nt, Artificial Sequence
  Description of Artificial Sequence: Synthetic oligonucleotide
uuuugaacaucaacugaaa

SEQ ID NO: 685493 - RNA, 19 nt, Artificial Sequence
  Description of Artificial Sequence: Synthetic oligonucleotide
auaauugucggcucagaaa

SEQ ID NO: 685494 - RNA, 19 nt, Artificial Sequence
  Description of Artificial Sequence: Synthetic oligonucleotide
aacuuucauggaccccacc

SEQ ID NO: 685495 - RNA, 19 nt, Artificial Sequence
  Description of Artificial Sequence: Synthetic oligonucleotide
gauccuaagaagcuucaga

SEQ ID NO: 685496 - RNA, 19 nt, Artificial Sequence
  Description of Artificial Sequence: Synthetic oligonucleotide
auuaggccauaauacuguc

SEQ ID NO: 685497 - RNA, 19 nt, Artificial Sequence
  Description of Artificial Sequence: Synthetic oligonucleotide
aguaaggguuaauaaauua

SEQ ID NO: 685498 - RNA, 19 nt, Artificial Sequence
  Description of Artificial Sequence: Synthetic oligonucleotide
gagaaguuuuacuccauca

SEQ ID NO: 685499 - RNA, 19 nt, Artificial Sequence
  Description of Artificial Sequence: Synthetic oligonucleotide
uacugaugaccagagaagc

SEQ ID NO: 685500 - RNA, 19 nt, Artificial Sequence
  Description of Artificial Sequence: Synthetic oligonucleotide
ggagagaaccuauuuggcg

SEQ ID NO: 685501 - RNA, 19 nt, Artificial Sequence
  Description of Artificial Sequence: Synthetic oligonucleotide
uggguugaacagaagagau

SEQ ID NO: 685502 - RNA, 19 nt, Artificial Sequence
  Description of Artificial Sequence: Synthetic oligonucleotide
gaaaccguuaaggcagugg

SEQ ID NO: 685503 - RNA, 19 nt, Artificial Sequence
  Description of Artificial Sequence: Synthetic oligonucleotide
auuaaacugugacacucga

SEQ ID NO: 685504 - RNA, 19 nt, Artificial Sequence
  Description of Artificial Sequence: Synthetic oligonucleotide
augaccuggauccuaagaa

SEQ ID NO: 685505 - RNA, 19 nt, Artificial Sequence
  Description of Artificial Sequence: Synthetic oligonucleotide
uccacuguagccuccccag

SEQ ID NO: 685506 - RNA, 19 nt, Artificial Sequence
  Description of Artificial Sequence: Synthetic oligonucleotide
cuacccacgaucgucaggc

SEQ ID NO: 685507 - RNA, 19 nt, Artificial Sequence
  Description of Artificial Sequence: Synthetic oligonucleotide
aaauuagcaacaauuccua

SEQ ID NO: 685508 - RNA, 19 nt, Artificial Sequence
  Description of Artificial Sequence: Synthetic oligonucleotide
gaccccaccgauguaaagg

SEQ ID NO: 685509 - RNA, 19 nt, Artificial Sequence
  Description of Artificial Sequence: Synthetic oligonucleotide
ugaaaguauccaagcauau

SEQ ID NO: 685510 - RNA, 19 nt, Artificial Sequence
  Description of Artificial Sequence: Synthetic oligonucleotide
aagggcuaguccuaguuua

SEQ ID NO: 685511 - RNA, 19 nt, Artificial Sequence
  Description of Artificial Sequence: Synthetic oligonucleotide
aggguuuucauaggcuacc

SEQ ID NO: 685512 - RNA, 19 nt, Artificial Sequence
  Description of Artificial Sequence: Synthetic oligonucleotide
uuccuaagacaucaauacu

SEQ ID NO: 685513 - RNA, 19 nt, Artificial Sequence
  Description of Artificial Sequence: Synthetic oligonucleotide
gaacucauaccaauuuggc

SEQ ID NO: 685514 - RNA, 19 nt, Artificial Sequence
  Description of Artificial Sequence: Synthetic oligonucleotide
aguaggaacugucggccuc

SEQ ID NO: 685515 - RNA, 19 nt, Artificial Sequence
  Description of Artificial Sequence: Synthetic oligonucleotide
gucgacauuuugaucaagg

SEQ ID NO: 685516 - RNA, 19 nt, Artificial Sequence
  Description of Artificial Sequence: Synthetic oligonucleotide
agccuguuuaagaaguuac

SEQ ID NO: 685517 - RNA, 19 nt, Artificial Sequence
  Description of Artificial Sequence: Synthetic oligonucleotide
aaguuacugagaaaauaca

SEQ ID NO: 685518 - RNA, 19 nt, Artificial Sequence
  Description of Artificial Sequence: Synthetic oligonucleotide
agacuaguggcuccaaacu

SEQ ID NO: 685519 - RNA, 19 nt, Artificial Sequence
  Description of Artificial Sequence: Synthetic oligonucleotide
accccaccgauguaaaggg

SEQ ID NO: 685520 - RNA, 19 nt, Artificial Sequence
  Description of Artificial Sequence: Synthetic oligonucleotide
gcuauccugcauuugaugc

SEQ ID NO: 685521 - RNA, 19 nt, Artificial Sequence
  Description of Artificial Sequence: Synthetic oligonucleotide
ucgaagucugaaauaaauu

SEQ ID NO: 685522 - RNA, 19 nt, Artificial Sequence
  Description of Artificial Sequence: Synthetic oligonucleotide
uaaagcgaagagacuucag

SEQ ID NO: 685523 - RNA, 19 nt, Artificial Sequence
  Description of Artificial Sequence: Synthetic oligonucleotide
ugcuuguaagcagacacca

SEQ ID NO: 685524 - RNA, 19 nt, Artificial Sequence
  Description of Artificial Sequence: Synthetic oligonucleotide
auuaucaugugagcguuug

SEQ ID NO: 685525 - RNA, 19 nt, Artificial Sequence
  Description of Artificial Sequence: Synthetic oligonucleotide
cuacccauacgccacuuag

SEQ ID NO: 685526 - RNA, 19 nt, Artificial Sequence
  Description of Artificial Sequence: Synthetic oligonucleotide
uuugcaaauuuugaacauc

SEQ ID NO: 685527 - RNA, 19 nt, Artificial Sequence
  Description of Artificial Sequence: Synthetic oligonucleotide
cuaaacuccuuggaaagug

SEQ ID NO: 685528 - RNA, 19 nt, Artificial Sequence
  Description of Artificial Sequence: Synthetic oligonucleotide
agggcauuaaacugugaca

SEQ ID NO: 685529 - RNA, 19 nt, Artificial Sequence
  Description of Artificial Sequence: Synthetic oligonucleotide
acugaugaccagagaagcc

SEQ ID NO: 685530 - RNA, 19 nt, Artificial Sequence
  Description of Artificial Sequence: Synthetic oligonucleotide
uauuuggcgacagccacug

SEQ ID NO: 685531 - RNA, 19 nt, Artificial Sequence
  Description of Artificial Sequence: Synthetic oligonucleotide
uacgcaacccaaaugccuc

SEQ ID NO: 685532 - RNA, 19 nt, Artificial Sequence
  Description of Artificial Sequence: Synthetic oligonucleotide
uauaggacuuucccacucu

SEQ ID NO: 685533 - RNA, 19 nt, Artificial Sequence
  Description of Artificial Sequence: Synthetic oligonucleotide
cauacgcaacccaaaugcc

SEQ ID NO: 685534 - RNA, 19 nt, Artificial Sequence
  Description of Artificial Sequence: Synthetic oligonucleotide
uaucaugugagcguuugaa

SEQ ID NO: 685535 - RNA, 19 nt, Artificial Sequence
  Description of Artificial Sequence: Synthetic oligonucleotide
aagacuuagucaaaacgaa

SEQ ID NO: 685536 - RNA, 19 nt, Artificial Sequence
  Description of Artificial Sequence: Synthetic oligonucleotide
aacccaaaugccucuuaga

SEQ ID NO: 685537 - RNA, 19 nt, Artificial Sequence
  Description of Artificial Sequence: Synthetic oligonucleotide
ucucauacgcaacccaaau

SEQ ID NO: 685538 - RNA, 19 nt, Artificial Sequence
  Description of Artificial Sequence: Synthetic oligonucleotide
auucguaaguaacccauau

SEQ ID NO: 685539 - RNA, 19 nt, Artificial Sequence
  Description of Artificial Sequence: Synthetic oligonucleotide
agcacauugauggauugug

SEQ ID NO: 685540 - RNA, 19 nt, Artificial Sequence
  Description of Artificial Sequence: Synthetic oligonucleotide
acccauacgccacuuagca

SEQ ID NO: 685541 - RNA, 19 nt, Artificial Sequence
  Description of Artificial Sequence: Synthetic oligonucleotide
cucuguaguugccauauuc

SEQ ID NO: 685542 - RNA, 19 nt, Artificial Sequence
  Description of Artificial Sequence: Synthetic oligonucleotide
aauucguuucugagcaaag

SEQ ID NO: 685543 - RNA, 19 nt, Artificial Sequence
  Description of Artificial Sequence: Synthetic oligonucleotide
guggucagaaauccccugg

SEQ ID NO: 685544 - RNA, 19 nt, Artificial Sequence
  Description of Artificial Sequence: Synthetic oligonucleotide
ucuagcaaauacugaugac

SEQ ID NO: 685545 - RNA, 19 nt, Artificial Sequence
  Description of Artificial Sequence: Synthetic oligonucleotide
uacgaggcuacccacgauc

SEQ ID NO: 685546 - RNA, 19 nt, Artificial Sequence
  Description of Artificial Sequence: Synthetic oligonucleotide
guuuccuuggaccagugaa

SEQ ID NO: 685547 - RNA, 19 nt, Artificial Sequence
  Description of Artificial Sequence: Synthetic oligonucleotide
cagacuaguggcuccaaac

SEQ ID NO: 685548 - RNA, 19 nt, Artificial Sequence
  Description of Artificial Sequence: Synthetic oligonucleotide
ucgucaggcagcaaucuuc

SEQ ID NO: 685549 - RNA, 19 nt, Artificial Sequence
  Description of Artificial Sequence: Synthetic oligonucleotide
uagggcguaaagacugaag

SEQ ID NO: 685550 - RNA, 19 nt, Artificial Sequence
  Description of Artificial Sequence: Synthetic oligonucleotide
auacugaugaccagagaag

SEQ ID NO: 685551 - RNA, 19 nt, Artificial Sequence
  Description of Artificial Sequence: Synthetic oligonucleotide
agcgaagagacuucagggu

SEQ ID NO: 685552 - RNA, 19 nt, Artificial Sequence
  Description of Artificial Sequence: Synthetic oligonucleotide
aacgaaucaucaauuuggu

SEQ ID NO: 685553 - RNA, 19 nt, Artificial Sequence
  Description of Artificial Sequence: Synthetic oligonucleotide
ugacugucgacauuuugau

SEQ ID NO: 685554 - RNA, 19 nt, Artificial Sequence
  Description of Artificial Sequence: Synthetic oligonucleotide
acccauaugccaccaauga

SEQ ID NO: 685555 - RNA, 19 nt, Artificial Sequence
  Description of Artificial Sequence: Synthetic oligonucleotide
guaaggagggcauuaaacu

SEQ ID NO: 685556 - RNA, 19 nt, Artificial Sequence
  Description of Artificial Sequence: Synthetic oligonucleotide
aauucuuggucaggguuca

SEQ ID NO: 685557 - RNA, 19 nt, Artificial Sequence
  Description of Artificial Sequence: Synthetic oligonucleotide
auauguccacacucagagg

SEQ ID NO: 685558 - RNA, 19 nt, Artificial Sequence
  Description of Artificial Sequence: Synthetic oligonucleotide
aguuacugagaaaauacaa

SEQ ID NO: 685559 - RNA, 19 nt, Artificial Sequence
  Description of Artificial Sequence: Synthetic oligonucleotide
agacguuacgaggcuaccc

SEQ ID NO: 685560 - RNA, 19 nt, Artificial Sequence
  Description of Artificial Sequence: Synthetic oligonucleotide
gaucagaagucuggcaaag

SEQ ID NO: 685561 - RNA, 19 nt, Artificial Sequence
  Description of Artificial Sequence: Synthetic oligonucleotide
gacguuacgaggcuaccca

SEQ ID NO: 685562 - RNA, 19 nt, Artificial Sequence
  Description of Artificial Sequence: Synthetic oligonucleotide
auccucuaaguucccauug

SEQ ID NO: 685563 - RNA, 19 nt, Artificial Sequence
  Description of Artificial Sequence: Synthetic oligonucleotide
ugcaagacuuagucaaaac

SEQ ID NO: 685564 - RNA, 19 nt, Artificial Sequence
  Description of Artificial Sequence: Synthetic oligonucleotide
gaccuggauccuaagaagc

SEQ ID NO: 685565 - RNA, 19 nt, Artificial Sequence
  Description of Artificial Sequence: Synthetic oligonucleotide
accaaugaccuggacagag

SEQ ID NO: 685566 - RNA, 19 nt, Artificial Sequence
  Description of Artificial Sequence: Synthetic oligonucleotide
cuuuuauccuuuccucuac

SEQ ID NO: 685567 - RNA, 19 nt, Artificial Sequence
  Description of Artificial Sequence: Synthetic oligonucleotide
guuucgaagucugaaauaa

SEQ ID NO: 685568 - RNA, 19 nt, Artificial Sequence
  Description of Artificial Sequence: Synthetic oligonucleotide
cauaggcuacccauacgcc

SEQ ID NO: 685569 - RNA, 19 nt, Artificial Sequence
  Description of Artificial Sequence: Synthetic oligonucleotide
uauauuugcuaaacuccuu

SEQ ID NO: 685570 - RNA, 19 nt, Artificial Sequence
  Description of Artificial Sequence: Synthetic oligonucleotide
auauucguaaguaacccau

SEQ ID NO: 685571 - RNA, 19 nt, Artificial Sequence
  Description of Artificial Sequence: Synthetic oligonucleotide
uccagucccuguauucucc

SEQ ID NO: 685572 - RNA, 19 nt, Artificial Sequence
  Description of Artificial Sequence: Synthetic oligonucleotide
ccggagagaaccuauuugg

SEQ ID NO: 685573 - RNA, 19 nt, Artificial Sequence
  Description of Artificial Sequence: Synthetic oligonucleotide
uuucauggaccccaccgau

SEQ ID NO: 685574 - RNA, 19 nt, Artificial Sequence
  Description of Artificial Sequence: Synthetic oligonucleotide
cuguuauggccuucagucc

SEQ ID NO: 685575 - RNA, 19 nt, Artificial Sequence
  Description of Artificial Sequence: Synthetic oligonucleotide
aucggagauugacugucuc

SEQ ID NO: 685576 - RNA, 19 nt, Artificial Sequence
  Description of Artificial Sequence: Synthetic oligonucleotide
ucggagauugacugucuca

SEQ ID NO: 685577 - RNA, 19 nt, Artificial Sequence
  Description of Artificial Sequence: Synthetic oligonucleotide
cgaagucugaaauaaauuc

SEQ ID NO: 685578 - RNA, 19 nt, Artificial Sequence
  Description of Artificial Sequence: Synthetic oligonucleotide
ucaagggcuaguccuaguu

SEQ ID NO: 685579 - RNA, 19 nt, Artificial Sequence
  Description of Artificial Sequence: Synthetic oligonucleotide
uacccauacgccacuuagc

SEQ ID NO: 685580 - RNA, 19 nt, Artificial Sequence
  Description of Artificial Sequence: Synthetic oligonucleotide
uggucagaaauccccugga

SEQ ID NO: 685581 - RNA, 19 nt, Artificial Sequence
  Description of Artificial Sequence: Synthetic oligonucleotide
uuagagccagacguuacga

SEQ ID NO: 685582 - RNA, 19 nt, Artificial Sequence
  Description of Artificial Sequence: Synthetic oligonucleotide
uauagggcguaaagacuga

SEQ ID NO: 685583 - RNA, 19 nt, Artificial Sequence
  Description of Artificial Sequence: Synthetic oligonucleotide
ucggcucagaaaauuccac

SEQ ID NO: 685584 - RNA, 19 nt, Artificial Sequence
  Description of Artificial Sequence: Synthetic oligonucleotide
uuucgaagucugaaauaaa

SEQ ID NO: 685585 - RNA, 19 nt, Artificial Sequence
  Description of Artificial Sequence: Synthetic oligonucleotide
acgaucgucaggcagcaau

SEQ ID NO: 685586 - RNA, 19 nt, Artificial Sequence
  Description of Artificial Sequence: Synthetic oligonucleotide
aacccauaugccaccaaug

SEQ ID NO: 685587 - RNA, 19 nt, Artificial Sequence
  Description of Artificial Sequence: Synthetic oligonucleotide
gagccagacguuacgaggc

SEQ ID NO: 685588 - RNA, 19 nt, Artificial Sequence
  Description of Artificial Sequence: Synthetic oligonucleotide
cucauacgcaacccaaaug

SEQ ID NO: 685589 - RNA, 19 nt, Artificial Sequence
  Description of Artificial Sequence: Synthetic oligonucleotide
auggguugaacagaagaga

SEQ ID NO: 685590 - RNA, 19 nt, Artificial Sequence
  Description of Artificial Sequence: Synthetic oligonucleotide
cauauucguaaguaaccca

SEQ ID NO: 685591 - RNA, 19 nt, Artificial Sequence
  Description of Artificial Sequence: Synthetic oligonucleotide
acguuacgaggcuacccac

SEQ ID NO: 685592 - RNA, 19 nt, Artificial Sequence
  Description of Artificial Sequence: Synthetic oligonucleotide
uauucguaaguaacccaua

SEQ ID NO: 685593 - RNA, 19 nt, Artificial Sequence
  Description of Artificial Sequence: Synthetic oligonucleotide
auaaagcgaagagacuuca

SEQ ID NO: 685594 - RNA, 19 nt, Artificial Sequence
  Description of Artificial Sequence: Synthetic oligonucleotide
uggauccuaagaagcuuca

SEQ ID NO: 685595 - RNA, 19 nt, Artificial Sequence
  Description of Artificial Sequence: Synthetic oligonucleotide
gaagagaucuuacaauuuu

SEQ ID NO: 685596 - RNA, 19 nt, Artificial Sequence
  Description of Artificial Sequence: Synthetic oligonucleotide
ugauuucguuuccuuggac

SEQ ID NO: 685597 - RNA, 19 nt, Artificial Sequence
  Description of Artificial Sequence: Synthetic oligonucleotide
caccaacaugaaaauuugc

SEQ ID NO: 685598 - RNA, 19 nt, Artificial Sequence
  Description of Artificial Sequence: Synthetic oligonucleotide
cacacuucucauacgcaac

SEQ ID NO: 685599 - RNA, 19 nt, Artificial Sequence
  Description of Artificial Sequence: Synthetic oligonucleotide
aucaugugagcguuugaaa

SEQ ID NO: 685600 - RNA, 19 nt, Artificial Sequence
  Description of Artificial Sequence: Synthetic oligonucleotide
ugcaaauuuugaacaucau

SEQ ID NO: 685601 - RNA, 19 nt, Artificial Sequence
  Description of Artificial Sequence: Synthetic oligonucleotide
gccucuuagaacuuucaug

SEQ ID NO: 685602 - RNA, 19 nt, Artificial Sequence
  Description of Artificial Sequence: Synthetic oligonucleotide
uccaugaccuggauccuaa

SEQ ID NO: 685603 - RNA, 19 nt, Artificial Sequence
  Description of Artificial Sequence: Synthetic oligonucleotide
cauuucacuguuauggccu

SEQ ID NO: 685604 - RNA, 19 nt, Artificial Sequence
  Description of Artificial Sequence: Synthetic oligonucleotide
acucugcaagacuuaguca

SEQ ID NO: 685605 - RNA, 19 nt, Artificial Sequence
  Description of Artificial Sequence: Synthetic oligonucleotide
agaaccuauuuggcgacag

SEQ ID NO: 685606 - RNA, 19 nt, Artificial Sequence
  Description of Artificial Sequence: Synthetic oligonucleotide
aucaauacuggagccuuug

SEQ ID NO: 685607 - RNA, 19 nt, Artificial Sequence
  Description of Artificial Sequence: Synthetic oligonucleotide
cuugguagacccagaucug

SEQ ID NO: 685608 - RNA, 19 nt, Artificial Sequence
  Description of Artificial Sequence: Synthetic oligonucleotide
agauugacugucucagcau

SEQ ID NO: 685609 - RNA, 19 nt, Artificial Sequence
  Description of Artificial Sequence: Synthetic oligonucleotide
uugguagacccagaucuga

SEQ ID NO: 685610 - RNA, 19 nt, Artificial Sequence
  Description of Artificial Sequence: Synthetic oligonucleotide
gccagagaaguuuuacucc

SEQ ID NO: 685611 - RNA, 19 nt, Artificial Sequence
  Description of Artificial Sequence: Synthetic oligonucleotide
acgggaaucuauaugucca

SEQ ID NO: 685612 - RNA, 19 nt, Artificial Sequence
  Description of Artificial Sequence: Synthetic oligonucleotide
cuauauguccacacucaga

SEQ ID NO: 685613 - RNA, 19 nt, Artificial Sequence
  Description of Artificial Sequence: Synthetic oligonucleotide
ggcguaaagacugaaguuc

SEQ ID NO: 685614 - RNA, 19 nt, Artificial Sequence
  Description of Artificial Sequence: Synthetic oligonucleotide
ucccauugcugagagacaa

SEQ ID NO: 685615 - RNA, 19 nt, Artificial Sequence
  Description of Artificial Sequence: Synthetic oligonucleotide
guauaggacuuucccacuc

SEQ ID NO: 685616 - RNA, 19 nt, Artificial Sequence
  Description of Artificial Sequence: Synthetic oligonucleotide
aucacuuaauauagggcgu

SEQ ID NO: 685617 - RNA, 19 nt, Artificial Sequence
  Description of Artificial Sequence: Synthetic oligonucleotide
cagacaucccauugcugag

SEQ ID NO: 685618 - RNA, 19 nt, Artificial Sequence
  Description of Artificial Sequence: Synthetic oligonucleotide
cgaaucaucaauuugguua

SEQ ID NO: 685619 - RNA, 19 nt, Artificial Sequence
  Description of Artificial Sequence: Synthetic oligonucleotide
guuacgaggcuacccacga

SEQ ID NO: 685620 - RNA, 19 nt, Artificial Sequence
  Description of Artificial Sequence: Synthetic oligonucleotide
auugugucuucauuccaua

SEQ ID NO: 685621 - RNA, 19 nt, Artificial Sequence
  Description of Artificial Sequence: Synthetic oligonucleotide
uguccacacucagaggucu

SEQ ID NO: 685622 - RNA, 19 nt, Artificial Sequence
  Description of Artificial Sequence: Synthetic oligonucleotide
uuggaccagugaaaguauc

SEQ ID NO: 685623 - RNA, 19 nt, Artificial Sequence
  Description of Artificial Sequence: Synthetic oligonucleotide
uaguuuagagccagacguu

SEQ ID NO: 685624 - RNA, 19 nt, Artificial Sequence
  Description of Artificial Sequence: Synthetic oligonucleotide
cuauccugcauuugaugca

SEQ ID NO: 685625 - RNA, 19 nt, Artificial Sequence
  Description of Artificial Sequence: Synthetic oligonucleotide
guugccauauucguaagua

SEQ ID NO: 685626 - RNA, 19 nt, Artificial Sequence
  Description of Artificial Sequence: Synthetic oligonucleotide
gaaauccccuggaaaacuc

SEQ ID NO: 685627 - RNA, 19 nt, Artificial Sequence
  Description of Artificial Sequence: Synthetic oligonucleotide
gugaaaguauccaagcaua

SEQ ID NO: 685628 - RNA, 19 nt, Artificial Sequence
  Description of Artificial Sequence: Synthetic oligonucleotide
ucacuuaauauagggcgua

SEQ ID NO: 685629 - RNA, 19 nt, Artificial Sequence
  Description of Artificial Sequence: Synthetic oligonucleotide
auacgcaacccaaaugccu

SEQ ID NO: 685630 - RNA, 19 nt, Artificial Sequence
  Description of Artificial Sequence: Synthetic oligonucleotide
acuucugcgggagacagua

SEQ ID NO: 685631 - RNA, 19 nt, Artificial Sequence
  Description of Artificial Sequence: Synthetic oligonucleotide
acgaggcuacccacgaucg

SEQ ID NO: 685632 - RNA, 19 nt, Artificial Sequence
  Description of Artificial Sequence: Synthetic oligonucleotide
gccauauucguaaguaacc

SEQ ID NO: 685633 - RNA, 19 nt, Artificial Sequence
  Description of Artificial Sequence: Synthetic oligonucleotide
cacaucuauaaagcgaaga

SEQ ID NO: 685634 - RNA, 19 nt, Artificial Sequence
  Description of Artificial Sequence: Synthetic oligonucleotide
gaccagugaaaguauccaa

SEQ ID NO: 685635 - RNA, 19 nt, Artificial Sequence
  Description of Artificial Sequence: Synthetic oligonucleotide
cgacauuuugaucaagggc

SEQ ID NO: 685636 - RNA, 19 nt, Artificial Sequence
  Description of Artificial Sequence: Synthetic oligonucleotide
cuaagacaucaauacugga

SEQ ID NO: 685637 - RNA, 19 nt, Artificial Sequence
  Description of Artificial Sequence: Synthetic oligonucleotide
cuacgggaaucuauauguc

SEQ ID NO: 685638 - RNA, 19 nt, Artificial Sequence
  Description of Artificial Sequence: Synthetic oligonucleotide
ccacacuuggguuagcuuc

SEQ ID NO: 685639 - RNA, 19 nt, Artificial Sequence
  Description of Artificial Sequence: Synthetic oligonucleotide
ugguagacccagaucugau

SEQ ID NO: 685640 - RNA, 19 nt, Artificial Sequence
  Description of Artificial Sequence: Synthetic oligonucleotide
uaaauucguuucugagcaa

SEQ ID NO: 685641 - RNA, 19 nt, Artificial Sequence
  Description of Artificial Sequence: Synthetic oligonucleotide
gaggcuacccacgaucguc

SEQ ID NO: 685642 - RNA, 19 nt, Artificial Sequence
  Description of Artificial Sequence: Synthetic oligonucleotide
aguuuagagccagacguua

SEQ ID NO: 685643 - RNA, 19 nt, Artificial Sequence
  Description of Artificial Sequence: Synthetic oligonucleotide
gcaacaauuccuaagacau

SEQ ID NO: 685644 - RNA, 19 nt, Artificial Sequence
  Description of Artificial Sequence: Synthetic oligonucleotide
guugaagcccauggaucgg

SEQ ID NO: 685645 - RNA, 19 nt, Artificial Sequence
  Description of Artificial Sequence: Synthetic oligonucleotide
auugucggcucagaaaauu

SEQ ID NO: 685646 - RNA, 19 nt, Artificial Sequence
  Description of Artificial Sequence: Synthetic oligonucleotide
cauaugccaccaaugaccu

SEQ ID NO: 685647 - RNA, 19 nt, Artificial Sequence
  Description of Artificial Sequence: Synthetic oligonucleotide
caugaccuggauccuaaga

SEQ ID NO: 685648 - RNA, 19 nt, Artificial Sequence
  Description of Artificial Sequence: Synthetic oligonucleotide
guuuagagccagacguuac

SEQ ID NO: 685649 - RNA, 19 nt, Artificial Sequence
  Description of Artificial Sequence: Synthetic oligonucleotide
acuuaauauagggcguaaa

SEQ ID NO: 685650 - RNA, 19 nt, Artificial Sequence
  Description of Artificial Sequence: Synthetic oligonucleotide
cucgagggcagcccacagg

SEQ ID NO: 685651 - RNA, 19 nt, Artificial Sequence
  Description of Artificial Sequence: Synthetic oligonucleotide
ugucgacauuuugaucaag

SEQ ID NO: 685652 - RNA, 19 nt, Artificial Sequence
  Description of Artificial Sequence: Synthetic oligonucleotide
agacuuagucaaaacgaau

SEQ ID NO: 685653 - RNA, 19 nt, Artificial Sequence
  Description of Artificial Sequence: Synthetic oligonucleotide
agcagacaccaacaugaaa

SEQ ID NO: 685654 - RNA, 19 nt, Artificial Sequence
  Description of Artificial Sequence: Synthetic oligonucleotide
ccauugguugacauaaaca

SEQ ID NO: 685655 - RNA, 19 nt, Artificial Sequence
  Description of Artificial Sequence: Synthetic oligonucleotide
gauugacugucucagcauu

SEQ ID NO: 685656 - RNA, 19 nt, Artificial Sequence
  Description of Artificial Sequence: Synthetic oligonucleotide
acgaaucaucaauuugguu

SEQ ID NO: 685657 - RNA, 19 nt, Artificial Sequence
  Description of Artificial Sequence: Synthetic oligonucleotide
gccggagagaaccuauuug

SEQ ID NO: 685658 - RNA, 19 nt, Artificial Sequence
  Description of Artificial Sequence: Synthetic oligonucleotide
auuccauauccagucuccu

SEQ ID NO: 685659 - RNA, 19 nt, Artificial Sequence
  Description of Artificial Sequence: Synthetic oligonucleotide
accgauguaaagggcagau

SEQ ID NO: 685660 - RNA, 19 nt, Artificial Sequence
  Description of Artificial Sequence: Synthetic oligonucleotide
cgaagagacuucagggucg

SEQ ID NO: 685661 - RNA, 19 nt, Artificial Sequence
  Description of Artificial Sequence: Synthetic oligonucleotide
gaagcccauggaucggaga

SEQ ID NO: 685662 - RNA, 19 nt, Artificial Sequence
  Description of Artificial Sequence: Synthetic oligonucleotide
guaaagggcagaugguuau

SEQ ID NO: 685663 - RNA, 19 nt, Artificial Sequence
  Description of Artificial Sequence: Synthetic oligonucleotide
aauugucggcucagaaaau

SEQ ID NO: 685664 - RNA, 19 nt, Artificial Sequence
  Description of Artificial Sequence: Synthetic oligonucleotide
uagcacauugauggauugu

SEQ ID NO: 685665 - RNA, 19 nt, Artificial Sequence
  Description of Artificial Sequence: Synthetic oligonucleotide
cugauuucguuuccuugga

SEQ ID NO: 685666 - RNA, 19 nt, Artificial Sequence
  Description of Artificial Sequence: Synthetic oligonucleotide
accuauuuggcgacagcca

SEQ ID NO: 685667 - RNA, 19 nt, Artificial Sequence
  Description of Artificial Sequence: Synthetic oligonucleotide
acagacuaguggcuccaaa

SEQ ID NO: 685668 - RNA, 19 nt, Artificial Sequence
  Description of Artificial Sequence: Synthetic oligonucleotide
gauugugucuucauuccau

SEQ ID NO: 685669 - RNA, 19 nt, Artificial Sequence
  Description of Artificial Sequence: Synthetic oligonucleotide
cccacgaucgucaggcagc

SEQ ID NO: 685670 - RNA, 19 nt, Artificial Sequence
  Description of Artificial Sequence: Synthetic oligonucleotide
cacuggaaauaaguuacga

SEQ ID NO: 685671 - RNA, 19 nt, Artificial Sequence
  Description of Artificial Sequence: Synthetic oligonucleotide
gacaaggauaguggccuuc

SEQ ID NO: 685672 - RNA, 19 nt, Artificial Sequence
  Description of Artificial Sequence: Synthetic oligonucleotide
ggagauugacugucucagc

SEQ ID NO: 685673 - RNA, 19 nt, Artificial Sequence
  Description of Artificial Sequence: Synthetic oligonucleotide
auggaccccaccgauguaa

SEQ ID NO: 685674 - RNA, 19 nt, Artificial Sequence
  Description of Artificial Sequence: Synthetic oligonucleotide
cauggaucggagauugacu

SEQ ID NO: 685675 - RNA, 19 nt, Artificial Sequence
  Description of Artificial Sequence: Synthetic oligonucleotide
gguggucagaaauccccug

SEQ ID NO: 685676 - RNA, 19 nt, Artificial Sequence
  Description of Artificial Sequence: Synthetic oligonucleotide
cccauugguugacauaaac

SEQ ID NO: 685677 - RNA, 19 nt, Artificial Sequence
  Description of Artificial Sequence: Synthetic oligonucleotide
auuuggcacuucugcggga

SEQ ID NO: 685678 - RNA, 19 nt, Artificial Sequence
  Description of Artificial Sequence: Synthetic oligonucleotide
uggaccccaccgauguaaa

SEQ ID NO: 685679 - RNA, 19 nt, Artificial Sequence
  Description of Artificial Sequence: Synthetic oligonucleotide
gguagacccagaucugauc

SEQ ID NO: 685680 - RNA, 19 nt, Artificial Sequence
  Description of Artificial Sequence: Synthetic oligonucleotide
aucaagggcuaguccuagu

SEQ ID NO: 685681 - RNA, 19 nt, Artificial Sequence
  Description of Artificial Sequence: Synthetic oligonucleotide
agacaucccauugcugaga

SEQ ID NO: 685682 - RNA, 19 nt, Artificial Sequence
  Description of Artificial Sequence: Synthetic oligonucleotide
gucggcucagaaaauucca

SEQ ID NO: 685683 - RNA, 19 nt, Artificial Sequence
  Description of Artificial Sequence: Synthetic oligonucleotide
aaccguuaaggcaguggau

SEQ ID NO: 685684 - RNA, 19 nt, Artificial Sequence
  Description of Artificial Sequence: Synthetic oligonucleotide
aagcauccucuaaugcuaa

SEQ ID NO: 685685 - RNA, 19 nt, Artificial Sequence
  Description of Artificial Sequence: Synthetic oligonucleotide
agggcuaguccuaguuuag

SEQ ID NO: 685686 - RNA, 19 nt, Artificial Sequence
  Description of Artificial Sequence: Synthetic oligonucleotide
auaugccaccaaugaccug

SEQ ID NO: 685687 - RNA, 19 nt, Artificial Sequence
  Description of Artificial Sequence: Synthetic oligonucleotide
uuacgaggcuacccacgau

SEQ ID NO: 685688 - RNA, 19 nt, Artificial Sequence
  Description of Artificial Sequence: Synthetic oligonucleotide
acgcaacccaaaugccucu

SEQ ID NO: 685689 - RNA, 19 nt, Artificial Sequence
  Description of Artificial Sequence: Synthetic oligonucleotide
cugucggccucuguaguug

SEQ ID NO: 685690 - RNA, 19 nt, Artificial Sequence
  Description of Artificial Sequence: Synthetic oligonucleotide
caccagaacugacugucga

SEQ ID NO: 685691 - RNA, 19 nt, Artificial Sequence
  Description of Artificial Sequence: Synthetic oligonucleotide
cucauaccaauuuggcacu

SEQ ID NO: 685692 - RNA, 19 nt, Artificial Sequence
  Description of Artificial Sequence: Synthetic oligonucleotide
ccagacguuacgaggcuac

SEQ ID NO: 685693 - RNA, 19 nt, Artificial Sequence
  Description of Artificial Sequence: Synthetic oligonucleotide
ggucuugucuccucuuguc

SEQ ID NO: 685694 - RNA, 19 nt, Artificial Sequence
  Description of Artificial Sequence: Synthetic oligonucleotide
guuauggccuucaguccac

SEQ ID NO: 685695 - RNA, 19 nt, Artificial Sequence
  Description of Artificial Sequence: Synthetic oligonucleotide
cuaagaagcuucagauccu

SEQ ID NO: 685696 - RNA, 19 nt, Artificial Sequence
  Description of Artificial Sequence: Synthetic oligonucleotide
agccagacguuacgaggcu

SEQ ID NO: 685697 - RNA, 19 nt, Artificial Sequence
  Description of Artificial Sequence: Synthetic oligonucleotide
aagcagacaccaacaugaa

SEQ ID NO: 685698 - RNA, 19 nt, Artificial Sequence
  Description of Artificial Sequence: Synthetic oligonucleotide
cuucugcgggagacaguag

SEQ ID NO: 685699 - RNA, 19 nt, Artificial Sequence
  Description of Artificial Sequence: Synthetic oligonucleotide
ucccauugguugacauaaa

SEQ ID NO: 685700 - RNA, 19 nt, Artificial Sequence
  Description of Artificial Sequence: Synthetic oligonucleotide
cuuagucaaaacgaaucau

SEQ ID NO: 685701 - RNA, 19 nt, Artificial Sequence
  Description of Artificial Sequence: Synthetic oligonucleotide
ccaccgauguaaagggcag

SEQ ID NO: 685702 - RNA, 19 nt, Artificial Sequence
  Description of Artificial Sequence: Synthetic oligonucleotide
ccauggaucggagauugac

SEQ ID NO: 685703 - RNA, 19 nt, Artificial Sequence
  Description of Artificial Sequence: Synthetic oligonucleotide
cguuacgaggcuacccacg

SEQ ID NO: 685704 - RNA, 19 nt, Artificial Sequence
  Description of Artificial Sequence: Synthetic oligonucleotide
gcuacccacgaucgucagg

SEQ ID NO: 685705 - RNA, 19 nt, Artificial Sequence
  Description of Artificial Sequence: Synthetic oligonucleotide
ggauccuaagaagcuucag

SEQ ID NO: 685706 - RNA, 19 nt, Artificial Sequence
  Description of Artificial Sequence: Synthetic oligonucleotide
cagacguuacgaggcuacc

SEQ ID NO: 685707 - RNA, 19 nt, Artificial Sequence
  Description of Artificial Sequence: Synthetic oligonucleotide
cagucagguggucagaaau

SEQ ID NO: 685708 - RNA, 19 nt, Artificial Sequence
  Description of Artificial Sequence: Synthetic oligonucleotide
cuguaaggagggcauuaaa

SEQ ID NO: 685709 - RNA, 19 nt, Artificial Sequence
  Description of Artificial Sequence: Synthetic oligonucleotide
aacagacuaguggcuccaa

SEQ ID NO: 685710 - RNA, 19 nt, Artificial Sequence
  Description of Artificial Sequence: Synthetic oligonucleotide
cggagauugacugucucag

SEQ ID NO: 685711 - RNA, 19 nt, Artificial Sequence
  Description of Artificial Sequence: Synthetic oligonucleotide
auagggcguaaagacugaa

SEQ ID NO: 685712 - RNA, 19 nt, Artificial Sequence
  Description of Artificial Sequence: Synthetic oligonucleotide
cccaccgauguaaagggca

SEQ ID NO: 685713 - RNA, 19 nt, Artificial Sequence
  Description of Artificial Sequence: Synthetic oligonucleotide
aggcuacccacgaucguca

SEQ ID NO: 685714 - RNA, 19 nt, Artificial Sequence
  Description of Artificial Sequence: Synthetic oligonucleotide
caacgucuuccaugaccug

SEQ ID NO: 685715 - RNA, 19 nt, Artificial Sequence
  Description of Artificial Sequence: Synthetic oligonucleotide
ccaacgucuuccaugaccu

SEQ ID NO: 685716 - RNA, 19 nt, Artificial Sequence
  Description of Artificial Sequence: Synthetic oligonucleotide
gguuauugucucaucuaaa

SEQ ID NO: 685717 - RNA, 19 nt, Artificial Sequence
  Description of Artificial Sequence: Synthetic oligonucleotide
agcggaucugaguguugaa

SEQ ID NO: 685718 - RNA, 19 nt, Artificial Sequence
  Description of Artificial Sequence: Synthetic oligonucleotide
gagaaccuauuuggcgaca

SEQ ID NO: 685719 - RNA, 19 nt, Artificial Sequence
  Description of Artificial Sequence: Synthetic oligonucleotide
cugucgacauuuugaucaa

SEQ ID NO: 685720 - RNA, 19 nt, Artificial Sequence
  Description of Artificial Sequence: Synthetic oligonucleotide
ggucgcuccaggcagacau

SEQ ID NO: 685721 - RNA, 19 nt, Artificial Sequence
  Description of Artificial Sequence: Synthetic oligonucleotide
ggccauaauacugucccaa

SEQ ID NO: 685722 - RNA, 19 nt, Artificial Sequence
  Description of Artificial Sequence: Synthetic oligonucleotide
ccaagcauauggguugaac

SEQ ID NO: 685723 - RNA, 19 nt, Artificial Sequence
  Description of Artificial Sequence: Synthetic oligonucleotide
uacccacgaucgucaggca

SEQ ID NO: 685724 - RNA, 19 nt, Artificial Sequence
  Description of Artificial Sequence: Synthetic oligonucleotide
auuuggcgacagccacuga

SEQ ID NO: 685725 - RNA, 19 nt, Artificial Sequence
  Description of Artificial Sequence: Synthetic oligonucleotide
gcaccagaacugacugucg

SEQ ID NO: 685726 - RNA, 19 nt, Artificial Sequence
  Description of Artificial Sequence: Synthetic oligonucleotide
ccagaacugacugucgaca

SEQ ID NO: 685727 - RNA, 19 nt, Artificial Sequence
  Description of Artificial Sequence: Synthetic oligonucleotide
ggaccccaccgauguaaag

SEQ ID NO: 685728 - RNA, 19 nt, Artificial Sequence
  Description of Artificial Sequence: Synthetic oligonucleotide
cacuuaauauagggcguaa

SEQ ID NO: 685729 - RNA, 19 nt, Artificial Sequence
  Description of Artificial Sequence: Synthetic oligonucleotide
ccguuaaggcaguggauca

SEQ ID NO: 685730 - RNA, 19 nt, Artificial Sequence
  Description of Artificial Sequence: Synthetic oligonucleotide
cccagaucugaucgucagc

SEQ ID NO: 685731 - RNA, 19 nt, Artificial Sequence
  Description of Artificial Sequence: Synthetic oligonucleotide
cauuugaugcauccuucuu

SEQ ID NO: 685732 - RNA, 19 nt, Artificial Sequence
  Description of Artificial Sequence: Synthetic oligonucleotide
cacugaacucauaccaauu

SEQ ID NO: 685733 - RNA, 19 nt, Artificial Sequence
  Description of Artificial Sequence: Synthetic oligonucleotide
cccauacgccacuuagcac

SEQ ID NO: 685734 - RNA, 19 nt, Artificial Sequence
  Description of Artificial Sequence: Synthetic oligonucleotide
cccauugcugagagacaag

SEQ ID NO: 685735 - RNA, 19 nt, Artificial Sequence
  Description of Artificial Sequence: Synthetic oligonucleotide
ggcuacccacgaucgucag

SEQ ID NO: 685736 - RNA, 19 nt, Artificial Sequence
  Description of Artificial Sequence: Synthetic oligonucleotide
gucucagcauucaguucga

SEQ ID NO: 685737 - RNA, 19 nt, Artificial Sequence
  Description of Artificial Sequence: Synthetic oligonucleotide
acgccacuuagcacauuga

SEQ ID NO: 685738 - RNA, 19 nt, Artificial Sequence
  Description of Artificial Sequence: Synthetic oligonucleotide
agggccggagagaaccuau

SEQ ID NO: 685739 - RNA, 19 nt, Artificial Sequence
  Description of Artificial Sequence: Synthetic oligonucleotide
ggaaaccguuaaggcagug

SEQ ID NO: 685740 - RNA, 19 nt, Artificial Sequence
  Description of Artificial Sequence: Synthetic oligonucleotide
gucggccucuguaguugcc

SEQ ID NO: 685741 - RNA, 19 nt, Artificial Sequence
  Description of Artificial Sequence: Synthetic oligonucleotide
ggacagagcggaucugagu

SEQ ID NO: 685742 - RNA, 19 nt, Artificial Sequence
  Description of Artificial Sequence: Synthetic oligonucleotide
ccaugaccuggauccuaag

SEQ ID NO: 685743 - RNA, 19 nt, Artificial Sequence
  Description of Artificial Sequence: Synthetic oligonucleotide
cagagaaguuuuacuccau

SEQ ID NO: 685744 - RNA, 19 nt, Artificial Sequence
  Description of Artificial Sequence: Synthetic oligonucleotide
agcccauggaucggagauu

SEQ ID NO: 685745 - RNA, 19 nt, Artificial Sequence
  Description of Artificial Sequence: Synthetic oligonucleotide
cguuaaggcaguggaucag

SEQ ID NO: 685746 - RNA, 19 nt, Artificial Sequence
  Description of Artificial Sequence: Synthetic oligonucleotide
gggcguaaagacugaaguu

SEQ ID NO: 685747 - RNA, 19 nt, Artificial Sequence
  Description of Artificial Sequence: Synthetic oligonucleotide
caccaacgucuuccaugac

SEQ ID NO: 685748 - RNA, 19 nt, Artificial Sequence
  Description of Artificial Sequence: Synthetic oligonucleotide
ccccaccgauguaaagggc

SEQ ID NO: 685749 - RNA, 19 nt, Artificial Sequence
  Description of Artificial Sequence: Synthetic oligonucleotide
caccgauguaaagggcaga

SEQ ID NO: 685750 - RNA, 19 nt, Artificial Sequence
  Description of Artificial Sequence: Synthetic oligonucleotide
cccuggaaaacuccugcaa

SEQ ID NO: 685751 - RNA, 19 nt, Artificial Sequence
  Description of Artificial Sequence: Synthetic oligonucleotide
gcuaaacuccuuggaaagu

SEQ ID NO: 685752 - RNA, 19 nt, Artificial Sequence
  Description of Artificial Sequence: Synthetic oligonucleotide
cacucgagggcagcccaca

SEQ ID NO: 685753 - RNA, 19 nt, Artificial Sequence
  Description of Artificial Sequence: Synthetic oligonucleotide
gccauaauacugucccaau

SEQ ID NO: 685754 - RNA, 19 nt, Artificial Sequence
  Description of Artificial Sequence: Synthetic oligonucleotide
gggcuaguccuaguuuaga

SEQ ID NO: 685755 - RNA, 19 nt, Artificial Sequence
  Description of Artificial Sequence: Synthetic oligonucleotide
ccuuuaaauuagcaacaau

SEQ ID NO: 685756 - RNA, 19 nt, Artificial Sequence
  Description of Artificial Sequence: Synthetic oligonucleotide
ggcacuucugcgggagaca

SEQ ID NO: 685757 - RNA, 19 nt, Artificial Sequence
  Description of Artificial Sequence: Synthetic oligonucleotide
gcaacccaaaugccucuua

SEQ ID NO: 685758 - RNA, 19 nt, Artificial Sequence
  Description of Artificial Sequence: Synthetic oligonucleotide
ccucuaaguucccauuggu

SEQ ID NO: 685759 - RNA, 19 nt, Artificial Sequence
  Description of Artificial Sequence: Synthetic oligonucleotide
gcacauugauggauugugu

SEQ ID NO: 685760 - RNA, 19 nt, Artificial Sequence
  Description of Artificial Sequence: Synthetic oligonucleotide
ccacugaacucauaccaau

SEQ ID NO: 685761 - RNA, 19 nt, Artificial Sequence
  Description of Artificial Sequence: Synthetic oligonucleotide
gcuacccauacgccacuua

SEQ ID NO: 685762 - RNA, 19 nt, Artificial Sequence
  Description of Artificial Sequence: Synthetic oligonucleotide
ggaaaguguauaggacuuu

SEQ ID NO: 685763 - RNA, 19 nt, Artificial Sequence
  Description of Artificial Sequence: Synthetic oligonucleotide
ggccggagagaaccuauuu

SEQ ID NO: 685764 - RNA, 19 nt, Artificial Sequence
  Description of Artificial Sequence: Synthetic oligonucleotide
caaggauaguggccuucuu

SEQ ID NO: 685765 - RNA, 19 nt, Artificial Sequence
  Description of Artificial Sequence: Synthetic oligonucleotide
ccacgaucgucaggcagca

SEQ ID NO: 685766 - RNA, 19 nt, Artificial Sequence
  Description of Artificial Sequence: Synthetic oligonucleotide
gccagacguuacgaggcua

SEQ ID NO: 685767 - RNA, 19 nt, Artificial Sequence
  Description of Artificial Sequence: Synthetic oligonucleotide
cccauggaucggagauuga

SEQ ID NO: 685768 - RNA, 19 nt, Artificial Sequence
  Description of Artificial Sequence: Synthetic oligonucleotide
cgccacuuagcacauugau

SEQ ID NO: 685769 - RNA, 19 nt, Artificial Sequence
  Description of Artificial Sequence: Synthetic oligonucleotide
cacgaucgucaggcagcaa

SEQ ID NO: 685770 - RNA, 19 nt, Artificial Sequence
  Description of Artificial Sequence: Synthetic oligonucleotide
gggucgcuccaggcagaca

SEQ ID NO: 685771 - RNA, 19 nt, Artificial Sequence
  Description of Artificial Sequence: Synthetic oligonucleotide
cccaauccucaaagcuggu

SEQ ID NO: 685772 - RNA, 19 nt, Artificial Sequence
  Description of Artificial Sequence: Synthetic oligonucleotide
ggcuacccauacgccacuu

SEQ ID NO: 685773 - RNA, 19 nt, Artificial Sequence
  Description of Artificial Sequence: Synthetic oligonucleotide
gggccggagagaaccuauu

SEQ ID NO: 685774 - RNA, 19 nt, Artificial Sequence
  Description of Artificial Sequence: Synthetic oligonucleotide
cgaggcuacccacgaucgu

SEQ ID NO: 685775 - RNA, 19 nt, Artificial Sequence
  Description of Artificial Sequence: Synthetic oligonucleotide
aaaacgaugucauaucugc

SEQ ID NO: 685776 - RNA, 19 nt, Artificial Sequence
  Description of Artificial Sequence: Synthetic oligonucleotide
aacgaugucauaucugccc

SEQ ID NO: 685777 - RNA, 19 nt, Artificial Sequence
  Description of Artificial Sequence: Synthetic oligonucleotide
uguauggcccauauaaucg

SEQ ID NO: 685778 - RNA, 19 nt, Artificial Sequence
  Description of Artificial Sequence: Synthetic oligonucleotide
cauauaaucgcucugcggc

SEQ ID NO: 685779 - RNA, 19 nt, Artificial Sequence
  Description of Artificial Sequence: Synthetic oligonucleotide
aguguaagagagcagggac

SEQ ID NO: 685780 - RNA, 19 nt, Artificial Sequence
  Description of Artificial Sequence: Synthetic oligonucleotide
acauguauggcccauauaa

SEQ ID NO: 685781 - RNA, 19 nt, Artificial Sequence
  Description of Artificial Sequence: Synthetic oligonucleotide
acaacggcugaguaggugc

SEQ ID NO: 685782 - RNA, 19 nt, Artificial Sequence
  Description of Artificial Sequence: Synthetic oligonucleotide
agcgcgaaggacuugaggg

SEQ ID NO: 685783 - RNA, 19 nt, Artificial Sequence
  Description of Artificial Sequence: Synthetic oligonucleotide
uugacaacggcugaguagg

SEQ ID NO: 685784 - RNA, 19 nt, Artificial Sequence
  Description of Artificial Sequence: Synthetic oligonucleotide
acgaguagcauuuggacag

SEQ ID NO: 685785 - RNA, 19 nt, Artificial Sequence
  Description of Artificial Sequence: Synthetic oligonucleotide
guagaagaccucuagcgcg

SEQ ID NO: 685786 - RNA, 19 nt, Artificial Sequence
  Description of Artificial Sequence: Synthetic oligonucleotide
auguauggcccauauaauc

SEQ ID NO: 685787 - RNA, 19 nt, Artificial Sequence
  Description of Artificial Sequence: Synthetic oligonucleotide
aagauccuuuuccccaugc

SEQ ID NO: 685788 - RNA, 19 nt, Artificial Sequence
  Description of Artificial Sequence: Synthetic oligonucleotide
aaaggcacaaucguggugu

SEQ ID NO: 685789 - RNA, 19 nt, Artificial Sequence
  Description of Artificial Sequence: Synthetic oligonucleotide
acaaaaggcacaaucgugg

SEQ ID NO: 685790 - RNA, 19 nt, Artificial Sequence
  Description of Artificial Sequence: Synthetic oligonucleotide
aaucccaggaccaugcauc

SEQ ID NO: 685791 - RNA, 19 nt, Artificial Sequence
  Description of Artificial Sequence: Synthetic oligonucleotide
auugacgucccugagagag

SEQ ID NO: 685792 - RNA, 19 nt, Artificial Sequence
  Description of Artificial Sequence: Synthetic oligonucleotide
ucguggaugacaucaauca

SEQ ID NO: 685793 - RNA, 19 nt, Artificial Sequence
  Description of Artificial Sequence: Synthetic oligonucleotide
cuugcuaacuggacuaucc

SEQ ID NO: 685794 - RNA, 19 nt, Artificial Sequence
  Description of Artificial Sequence: Synthetic oligonucleotide
aagaccucuagcgcgaagg

SEQ ID NO: 685795 - RNA, 19 nt, Artificial Sequence
  Description of Artificial Sequence: Synthetic oligonucleotide
ucgagggucagucaccaag

SEQ ID NO: 685796 - RNA, 19 nt, Artificial Sequence
  Description of Artificial Sequence: Synthetic oligonucleotide
aggaaaacgaugucauauc

SEQ ID NO: 685797 - RNA, 19 nt, Artificial Sequence
  Description of Artificial Sequence: Synthetic oligonucleotide
ugaauuuguauuucuccac

SEQ ID NO: 685798 - RNA, 19 nt, Artificial Sequence
  Description of Artificial Sequence: Synthetic oligonucleotide
uggacuauccuccccaaga

SEQ ID NO: 685799 - RNA, 19 nt, Artificial Sequence
  Description of Artificial Sequence: Synthetic oligonucleotide
ugauccauguggaaguggu

SEQ ID NO: 685800 - RNA, 19 nt, Artificial Sequence
  Description of Artificial Sequence: Synthetic oligonucleotide
auuuggacaggcucaucac

SEQ ID NO: 685801 - RNA, 19 nt, Artificial Sequence
  Description of Artificial Sequence: Synthetic oligonucleotide
agcaccuguaccccuaacg

SEQ ID NO: 685802 - RNA, 19 nt, Artificial Sequence
  Description of Artificial Sequence: Synthetic oligonucleotide
cuugacaacggcugaguag

SEQ ID NO: 685803 - RNA, 19 nt, Artificial Sequence
  Description of Artificial Sequence: Synthetic oligonucleotide
uaugagccagcccuggggc

SEQ ID NO: 685804 - RNA, 19 nt, Artificial Sequence
  Description of Artificial Sequence: Synthetic oligonucleotide
uggagaucgggauaguagu

SEQ ID NO: 685805 - RNA, 19 nt, Artificial Sequence
  Description of Artificial Sequence: Synthetic oligonucleotide
acauacacgcuucgugucg

SEQ ID NO: 685806 - RNA, 19 nt, Artificial Sequence
  Description of Artificial Sequence: Synthetic oligonucleotide
ugaccuggagacaauggga

SEQ ID NO: 685807 - RNA, 19 nt, Artificial Sequence
  Description of Artificial Sequence: Synthetic oligonucleotide
guacaugcgugacaucugg

SEQ ID NO: 685808 - RNA, 19 nt, Artificial Sequence
  Description of Artificial Sequence: Synthetic oligonucleotide
aggcuaggcagacacauug

SEQ ID NO: 685809 - RNA, 19 nt, Artificial Sequence
  Description of Artificial Sequence: Synthetic oligonucleotide
agggcauccaggcggaagg

SEQ ID NO: 685810 - RNA, 19 nt, Artificial Sequence
  Description of Artificial Sequence: Synthetic oligonucleotide
gauaguagucauugcggac

SEQ ID NO: 685811 - RNA, 19 nt, Artificial Sequence
  Description of Artificial Sequence: Synthetic oligonucleotide
ucgcaucugccuaugcagg

SEQ ID NO: 685812 - RNA, 19 nt, Artificial Sequence
  Description of Artificial Sequence: Synthetic oligonucleotide
acgucccugagagagaugg

SEQ ID NO: 685813 - RNA, 19 nt, Artificial Sequence
  Description of Artificial Sequence: Synthetic oligonucleotide
aucgggauaguagucauug

SEQ ID NO: 685814 - RNA, 19 nt, Artificial Sequence
  Description of Artificial Sequence: Synthetic oligonucleotide
ucggggaagaagcucaaaa

SEQ ID NO: 685815 - RNA, 19 nt, Artificial Sequence
  Description of Artificial Sequence: Synthetic oligonucleotide
augccccugaccuggagac

SEQ ID NO: 685816 - RNA, 19 nt, Artificial Sequence
  Description of Artificial Sequence: Synthetic oligonucleotide
gacgaguagcauuuggaca

SEQ ID NO: 685817 - RNA, 19 nt, Artificial Sequence
  Description of Artificial Sequence: Synthetic oligonucleotide
cacaaucccaggaccaugc

SEQ ID NO: 685818 - RNA, 19 nt, Artificial Sequence
  Description of Artificial Sequence: Synthetic oligonucleotide
uccccaagaagucgcaucu

SEQ ID NO: 685819 - RNA, 19 nt, Artificial Sequence
  Description of Artificial Sequence: Synthetic oligonucleotide
uguacaugcgugacaucug

SEQ ID NO: 685820 - RNA, 19 nt, Artificial Sequence
  Description of Artificial Sequence: Synthetic oligonucleotide
ucauugcggacgacgaucu

SEQ ID NO: 685821 - RNA, 19 nt, Artificial Sequence
  Description of Artificial Sequence: Synthetic oligonucleotide
gaccuggagacaaugggag

SEQ ID NO: 685822 - RNA, 19 nt, Artificial Sequence
  Description of Artificial Sequence: Synthetic oligonucleotide
uguggaagugguagacgcc

SEQ ID NO: 685823 - RNA, 19 nt, Artificial Sequence
  Description of Artificial Sequence: Synthetic oligonucleotide
acuauccuccccaagaagu

SEQ ID NO: 685824 - RNA, 19 nt, Artificial Sequence
  Description of Artificial Sequence: Synthetic oligonucleotide
guauggcccauauaaucgc

SEQ ID NO: 685825 - RNA, 19 nt, Artificial Sequence
  Description of Artificial Sequence: Synthetic oligonucleotide
accuguaccccuaacgggg

SEQ ID NO: 685826 - RNA, 19 nt, Artificial Sequence
  Description of Artificial Sequence: Synthetic oligonucleotide
uauccuccccaagaagucg

SEQ ID NO: 685827 - RNA, 19 nt, Artificial Sequence
  Description of Artificial Sequence: Synthetic oligonucleotide
auauaaucgcucugcggca

SEQ ID NO: 685828 - RNA, 19 nt, Artificial Sequence
  Description of Artificial Sequence: Synthetic oligonucleotide
ugccccauaggucucugug

SEQ ID NO: 685829 - RNA, 19 nt, Artificial Sequence
  Description of Artificial Sequence: Synthetic oligonucleotide
cuaacuggacuauccuccc

SEQ ID NO: 685830 - RNA, 19 nt, Artificial Sequence
  Description of Artificial Sequence: Synthetic oligonucleotide
uacaggccggguuaggcug

SEQ ID NO: 685831 - RNA, 19 nt, Artificial Sequence
  Description of Artificial Sequence: Synthetic oligonucleotide
uguggcauugagccagcgc

SEQ ID NO: 685832 - RNA, 19 nt, Artificial Sequence
  Description of Artificial Sequence: Synthetic oligonucleotide
gacuauccuccccaagaag

SEQ ID NO: 685833 - RNA, 19 nt, Artificial Sequence
  Description of Artificial Sequence: Synthetic oligonucleotide
gguagaagaccucuagcgc

SEQ ID NO: 685834 - RNA, 19 nt, Artificial Sequence
  Description of Artificial Sequence: Synthetic oligonucleotide
ucuagcgcgaaggacuuga

SEQ ID NO: 685835 - RNA, 19 nt, Artificial Sequence
  Description of Artificial Sequence: Synthetic oligonucleotide
uagcuugacuugcaacuug

SEQ ID NO: 685836 - RNA, 19 nt, Artificial Sequence
  Description of Artificial Sequence: Synthetic oligonucleotide
acggggauccaucuagcag

SEQ ID NO: 685837 - RNA, 19 nt, Artificial Sequence
  Description of Artificial Sequence: Synthetic oligonucleotide
uugcuaacuggacuauccu

SEQ ID NO: 685838 - RNA, 19 nt, Artificial Sequence
  Description of Artificial Sequence: Synthetic oligonucleotide
cugguagaagaccucuagc

SEQ ID NO: 685839 - RNA, 19 nt, Artificial Sequence
  Description of Artificial Sequence: Synthetic oligonucleotide
agggacgaguagcauuugg

SEQ ID NO: 685840 - RNA, 19 nt, Artificial Sequence
  Description of Artificial Sequence: Synthetic oligonucleotide
cacauaggcucggagaaag

SEQ ID NO: 685841 - RNA, 19 nt, Artificial Sequence
  Description of Artificial Sequence: Synthetic oligonucleotide
cacucucaagggauggagg

SEQ ID NO: 685842 - RNA, 19 nt, Artificial Sequence
  Description of Artificial Sequence: Synthetic oligonucleotide
caagucuagcccaggggcc

SEQ ID NO: 685843 - RNA, 19 nt, Artificial Sequence
  Description of Artificial Sequence: Synthetic oligonucleotide
gcaagucuagcccaggggc

SEQ ID NO: 685844 - RNA, 19 nt, Artificial Sequence
  Description of Artificial Sequence: Synthetic oligonucleotide
uugcggacgacgaucugca

SEQ ID NO: 685845 - RNA, 19 nt, Artificial Sequence
  Description of Artificial Sequence: Synthetic oligonucleotide
aacggggauccaucuagca

SEQ ID NO: 685846 - RNA, 19 nt, Artificial Sequence
  Description of Artificial Sequence: Synthetic oligonucleotide
gaugcggcgcugugcauag

SEQ ID NO: 685847 - RNA, 19 nt, Artificial Sequence
  Description of Artificial Sequence: Synthetic oligonucleotide
gaggucgagggucagucac

SEQ ID NO: 685848 - RNA, 19 nt, Artificial Sequence
  Description of Artificial Sequence: Synthetic oligonucleotide
ugggcccaaugucugcugg

SEQ ID NO: 685849 - RNA, 19 nt, Artificial Sequence
  Description of Artificial Sequence: Synthetic oligonucleotide
ucuacaggccggguuaggc

SEQ ID NO: 685850 - RNA, 19 nt, Artificial Sequence
  Description of Artificial Sequence: Synthetic oligonucleotide
cuucgugucgcgcucauca

SEQ ID NO: 685851 - RNA, 19 nt, Artificial Sequence
  Description of Artificial Sequence: Synthetic oligonucleotide
uggcaggaaaacgauguca

SEQ ID NO: 685852 - RNA, 19 nt, Artificial Sequence
  Description of Artificial Sequence: Synthetic oligonucleotide
cacaagggcgacgagguag

SEQ ID NO: 685853 - RNA, 19 nt, Artificial Sequence
  Description of Artificial Sequence: Synthetic oligonucleotide
gugacagcauugccgaacc

SEQ ID NO: 685854 - RNA, 19 nt, Artificial Sequence
  Description of Artificial Sequence: Synthetic oligonucleotide
caccuguaccccuaacggg

SEQ ID NO: 685855 - RNA, 19 nt, Artificial Sequence
  Description of Artificial Sequence: Synthetic oligonucleotide
uaggcucggagaaagucau

SEQ ID NO: 685856 - RNA, 19 nt, Artificial Sequence
  Description of Artificial Sequence: Synthetic oligonucleotide
ugguguacaugcgugacau

SEQ ID NO: 685857 - RNA, 19 nt, Artificial Sequence
  Description of Artificial Sequence: Synthetic oligonucleotide
agcauugccgaaccagcug

SEQ ID NO: 685858 - RNA, 19 nt, Artificial Sequence
  Description of Artificial Sequence: Synthetic oligonucleotide
acaaucguggugucuggga

SEQ ID NO: 685859 - RNA, 19 nt, Artificial Sequence
  Description of Artificial Sequence: Synthetic oligonucleotide
gcaacggggauccaucuag

SEQ ID NO: 685860 - RNA, 19 nt, Artificial Sequence
  Description of Artificial Sequence: Synthetic oligonucleotide
ggacagguaguacacgaag

SEQ ID NO: 685861 - RNA, 19 nt, Artificial Sequence
  Description of Artificial Sequence: Synthetic oligonucleotide
acaacacccgauagcuugc

SEQ ID NO: 685862 - RNA, 19 nt, Artificial Sequence
  Description of Artificial Sequence: Synthetic oligonucleotide
aagggcgacgagguaggcg

SEQ ID NO: 685863 - RNA, 19 nt, Artificial Sequence
  Description of Artificial Sequence: Synthetic oligonucleotide
aggcacggauucuccaugg

SEQ ID NO: 685864 - RNA, 19 nt, Artificial Sequence
  Description of Artificial Sequence: Synthetic oligonucleotide
aguucggggaagaagcuca

SEQ ID NO: 685865 - RNA, 19 nt, Artificial Sequence
  Description of Artificial Sequence: Synthetic oligonucleotide
gacgacgaucugcagccag

SEQ ID NO: 685866 - RNA, 19 nt, Artificial Sequence
  Description of Artificial Sequence: Synthetic oligonucleotide
ucuggguucgugucugccu

SEQ ID NO: 685867 - RNA, 19 nt, Artificial Sequence
  Description of Artificial Sequence: Synthetic oligonucleotide
uacaugcgugacaucuggc

SEQ ID NO: 685868 - RNA, 19 nt, Artificial Sequence
  Description of Artificial Sequence: Synthetic oligonucleotide
uggcccauauaaucgcucu

SEQ ID NO: 685869 - RNA, 19 nt, Artificial Sequence
  Description of Artificial Sequence: Synthetic oligonucleotide
gaugguguacaugcgugac

SEQ ID NO: 685870 - RNA, 19 nt, Artificial Sequence
  Description of Artificial Sequence: Synthetic oligonucleotide
ucgugucgcgcucaucagc

SEQ ID NO: 685871 - RNA, 19 nt, Artificial Sequence
  Description of Artificial Sequence: Synthetic oligonucleotide
ugguucuagcuugacuugc

SEQ ID NO: 685872 - RNA, 19 nt, Artificial Sequence
  Description of Artificial Sequence: Synthetic oligonucleotide
uucugcgcagguugggaug

SEQ ID NO: 685873 - RNA, 19 nt, Artificial Sequence
  Description of Artificial Sequence: Synthetic oligonucleotide
agccacaagggcgacgagg

SEQ ID NO: 685874 - RNA, 19 nt, Artificial Sequence
  Description of Artificial Sequence: Synthetic oligonucleotide
accucuagcgcgaaggacu

SEQ ID NO: 685875 - RNA, 19 nt, Artificial Sequence
  Description of Artificial Sequence: Synthetic oligonucleotide
uauaaucgcucugcggcac

SEQ ID NO: 685876 - RNA, 19 nt, Artificial Sequence
  Description of Artificial Sequence: Synthetic oligonucleotide
caucacucucaagggaugg

SEQ ID NO: 685877 - RNA, 19 nt, Artificial Sequence
  Description of Artificial Sequence: Synthetic oligonucleotide
gagaucgggauaguaguca

SEQ ID NO: 685878 - RNA, 19 nt, Artificial Sequence
  Description of Artificial Sequence: Synthetic oligonucleotide
auccuccccaagaagucgc

SEQ ID NO: 685879 - RNA, 19 nt, Artificial Sequence
  Description of Artificial Sequence: Synthetic oligonucleotide
acgcuggugaauuuguauu

SEQ ID NO: 685880 - RNA, 19 nt, Artificial Sequence
  Description of Artificial Sequence: Synthetic oligonucleotide
auaggcucggagaaaguca

SEQ ID NO: 685881 - RNA, 19 nt, Artificial Sequence
  Description of Artificial Sequence: Synthetic oligonucleotide
ugcggcgcugugcauaggu

SEQ ID NO: 685882 - RNA, 19 nt, Artificial Sequence
  Description of Artificial Sequence: Synthetic oligonucleotide
ugcacuugacggccggugu

SEQ ID NO: 685883 - RNA, 19 nt, Artificial Sequence
  Description of Artificial Sequence: Synthetic oligonucleotide
aacacccgauagcuugcug

SEQ ID NO: 685884 - RNA, 19 nt, Artificial Sequence
  Description of Artificial Sequence: Synthetic oligonucleotide
ggauaguagucauugcgga

SEQ ID NO: 685885 - RNA, 19 nt, Artificial Sequence
  Description of Artificial Sequence: Synthetic oligonucleotide
ggacgaguagcauuuggac

SEQ ID NO: 685886 - RNA, 19 nt, Artificial Sequence
  Description of Artificial Sequence: Synthetic oligonucleotide
cacauacacgcuucguguc

SEQ ID NO: 685887 - RNA, 19 nt, Artificial Sequence
  Description of Artificial Sequence: Synthetic oligonucleotide
ugaggcacggauucuccau

SEQ ID NO: 685888 - RNA, 19 nt, Artificial Sequence
  Description of Artificial Sequence: Synthetic oligonucleotide
ccauauaaucgcucugcgg

SEQ ID NO: 685889 - RNA, 19 nt, Artificial Sequence
  Description of Artificial Sequence: Synthetic oligonucleotide
acaagggcgacgagguagg

SEQ ID NO: 685890 - RNA, 19 nt, Artificial Sequence
  Description of Artificial Sequence: Synthetic oligonucleotide
caguggguucaacacuggg

SEQ ID NO: 685891 - RNA, 19 nt, Artificial Sequence
  Description of Artificial Sequence: Synthetic oligonucleotide
agaucgggauaguagucau

SEQ ID NO: 685892 - RNA, 19 nt, Artificial Sequence
  Description of Artificial Sequence: Synthetic oligonucleotide
uacagcgggaugguguaca

SEQ ID NO: 685893 - RNA, 19 nt, Artificial Sequence
  Description of Artificial Sequence: Synthetic oligonucleotide
aacggcugaguaggugcac

SEQ ID NO: 685894 - RNA, 19 nt, Artificial Sequence
  Description of Artificial Sequence: Synthetic oligonucleotide
uucgugucgcgcucaucag

SEQ ID NO: 685895 - RNA, 19 nt, Artificial Sequence
  Description of Artificial Sequence: Synthetic oligonucleotide
acuugcuaacuggacuauc

SEQ ID NO: 685896 - RNA, 19 nt, Artificial Sequence
  Description of Artificial Sequence: Synthetic oligonucleotide
cuuaugguccugggcagag

SEQ ID NO: 685897 - RNA, 19 nt, Artificial Sequence
  Description of Artificial Sequence: Synthetic oligonucleotide
ucgggauaguagucauugc

SEQ ID NO: 685898 - RNA, 19 nt, Artificial Sequence
  Description of Artificial Sequence: Synthetic oligonucleotide
cacauccuggggcaacggg

SEQ ID NO: 685899 - RNA, 19 nt, Artificial Sequence
  Description of Artificial Sequence: Synthetic oligonucleotide
gggcuuaugguccugggca

SEQ ID NO: 685900 - RNA, 19 nt, Artificial Sequence
  Description of Artificial Sequence: Synthetic oligonucleotide
acgauggggaaggagggug

SEQ ID NO: 685901 - RNA, 19 nt, Artificial Sequence
  Description of Artificial Sequence: Synthetic oligonucleotide
augguguacaugcgugaca

SEQ ID NO: 685902 - RNA, 19 nt, Artificial Sequence
  Description of Artificial Sequence: Synthetic oligonucleotide
cauacacgcuucgugucgc

SEQ ID NO: 685903 - RNA, 19 nt, Artificial Sequence
  Description of Artificial Sequence: Synthetic oligonucleotide
gucauugcggacgacgauc

SEQ ID NO: 685904 - RNA, 19 nt, Artificial Sequence
  Description of Artificial Sequence: Synthetic oligonucleotide
auacacgcuucgugucgcg

SEQ ID NO: 685905 - RNA, 19 nt, Artificial Sequence
  Description of Artificial Sequence: Synthetic oligonucleotide
agcagggacgaguagcauu

SEQ ID NO: 685906 - RNA, 19 nt, Artificial Sequence
  Description of Artificial Sequence: Synthetic oligonucleotide
ggcacaaucguggugucug

SEQ ID NO: 685907 - RNA, 19 nt, Artificial Sequence
  Description of Artificial Sequence: Synthetic oligonucleotide
uugacgucccugagagaga

SEQ ID NO: 685908 - RNA, 19 nt, Artificial Sequence
  Description of Artificial Sequence: Synthetic oligonucleotide
cccgauagcuugcuggugg

SEQ ID NO: 685909 - RNA, 19 nt, Artificial Sequence
  Description of Artificial Sequence: Synthetic oligonucleotide
caacggggauccaucuagc

SEQ ID NO: 685910 - RNA, 19 nt, Artificial Sequence
  Description of Artificial Sequence: Synthetic oligonucleotide
cuggguucgugucugccuc

SEQ ID NO: 685911 - RNA, 19 nt, Artificial Sequence
  Description of Artificial Sequence: Synthetic oligonucleotide
uggaugguucugcgcaggu

SEQ ID NO: 685912 - RNA, 19 nt, Artificial Sequence
  Description of Artificial Sequence: Synthetic oligonucleotide
caucaaagcgcuggggauc

SEQ ID NO: 685913 - RNA, 19 nt, Artificial Sequence
  Description of Artificial Sequence: Synthetic oligonucleotide
acacgcuucgugucgcgcu

SEQ ID NO: 685914 - RNA, 19 nt, Artificial Sequence
  Description of Artificial Sequence: Synthetic oligonucleotide
guaguacacgaagcaguag

SEQ ID NO: 685915 - RNA, 19 nt, Artificial Sequence
  Description of Artificial Sequence: Synthetic oligonucleotide
agaccucuagcgcgaagga

SEQ ID NO: 685916 - RNA, 19 nt, Artificial Sequence
  Description of Artificial Sequence: Synthetic oligonucleotide
gacaacggcugaguaggug

SEQ ID NO: 685917 - RNA, 19 nt, Artificial Sequence
  Description of Artificial Sequence: Synthetic oligonucleotide
gugauccauguggaagugg

SEQ ID NO: 685918 - RNA, 19 nt, Artificial Sequence
  Description of Artificial Sequence: Synthetic oligonucleotide
cuaacggggccuugacaac

SEQ ID NO: 685919 - RNA, 19 nt, Artificial Sequence
  Description of Artificial Sequence: Synthetic oligonucleotide
ccaagaagucgcaucugcc

SEQ ID NO: 685920 - RNA, 19 nt, Artificial Sequence
  Description of Artificial Sequence: Synthetic oligonucleotide
ucucuacaggccggguuag

SEQ ID NO: 685921 - RNA, 19 nt, Artificial Sequence
  Description of Artificial Sequence: Synthetic oligonucleotide
aggucgagggucagucacc

SEQ ID NO: 685922 - RNA, 19 nt, Artificial Sequence
  Description of Artificial Sequence: Synthetic oligonucleotide
ggugaugcggcgcugugca

SEQ ID NO: 685923 - RNA, 19 nt, Artificial Sequence
  Description of Artificial Sequence: Synthetic oligonucleotide
cugccuaugcagggcaucc

SEQ ID NO: 685924 - RNA, 19 nt, Artificial Sequence
  Description of Artificial Sequence: Synthetic oligonucleotide
aggugcacuugacggccgg

SEQ ID NO: 685925 - RNA, 19 nt, Artificial Sequence
  Description of Artificial Sequence: Synthetic oligonucleotide
gaugcggaucucagcauuc

SEQ ID NO: 685926 - RNA, 19 nt, Artificial Sequence
  Description of Artificial Sequence: Synthetic oligonucleotide
ggaaaacgaugucauaucu

SEQ ID NO: 685927 - RNA, 19 nt, Artificial Sequence
  Description of Artificial Sequence: Synthetic oligonucleotide
uguggagaucgggauagua

SEQ ID NO: 685928 - RNA, 19 nt, Artificial Sequence
  Description of Artificial Sequence: Synthetic oligonucleotide
ugacgucccugagagagau

SEQ ID NO: 685929 - RNA, 19 nt, Artificial Sequence
  Description of Artificial Sequence: Synthetic oligonucleotide
auaaucgcucugcggcacu

SEQ ID NO: 685930 - RNA, 19 nt, Artificial Sequence
  Description of Artificial Sequence: Synthetic oligonucleotide
cacaaucguggugucuggg

SEQ ID NO: 685931 - RNA, 19 nt, Artificial Sequence
  Description of Artificial Sequence: Synthetic oligonucleotide
aucguggugucugggaggu

SEQ ID NO: 685932 - RNA, 19 nt, Artificial Sequence
  Description of Artificial Sequence: Synthetic oligonucleotide
cccauauaaucgcucugcg

SEQ ID NO: 685933 - RNA, 19 nt, Artificial Sequence
  Description of Artificial Sequence: Synthetic oligonucleotide
ucgugucugccuccgcacu

SEQ ID NO: 685934 - RNA, 19 nt, Artificial Sequence
  Description of Artificial Sequence: Synthetic oligonucleotide
ccugaccuggagacaaugg

SEQ ID NO: 685935 - RNA, 19 nt, Artificial Sequence
  Description of Artificial Sequence: Synthetic oligonucleotide
ugguagacgccgucuuccu

SEQ ID NO: 685936 - RNA, 19 nt, Artificial Sequence
  Description of Artificial Sequence: Synthetic oligonucleotide
ugcggaucucagcauucau

SEQ ID NO: 685937 - RNA, 19 nt, Artificial Sequence
  Description of Artificial Sequence: Synthetic oligonucleotide
ccuaacggggccuugacaa

SEQ ID NO: 685938 - RNA, 19 nt, Artificial Sequence
  Description of Artificial Sequence: Synthetic oligonucleotide
cggacgacgaucugcagcc

SEQ ID NO: 685939 - RNA, 19 nt, Artificial Sequence
  Description of Artificial Sequence: Synthetic oligonucleotide
caucaaucaccaggaacuc

SEQ ID NO: 685940 - RNA, 19 nt, Artificial Sequence
  Description of Artificial Sequence: Synthetic oligonucleotide
uugacggccgguguaucaa

SEQ ID NO: 685941 - RNA, 19 nt, Artificial Sequence
  Description of Artificial Sequence: Synthetic oligonucleotide
gccggguuaggcuggaccc

SEQ ID NO: 685942 - RNA, 19 nt, Artificial Sequence
  Description of Artificial Sequence: Synthetic oligonucleotide
agucauugcggacgacgau

SEQ ID NO: 685943 - RNA, 19 nt, Artificial Sequence
  Description of Artificial Sequence: Synthetic oligonucleotide
auccaucuagcagccgguc

SEQ ID NO: 685944 - RNA, 19 nt, Artificial Sequence
  Description of Artificial Sequence: Synthetic oligonucleotide
gcccauauaaucgcucugc

SEQ ID NO: 685945 - RNA, 19 nt, Artificial Sequence
  Description of Artificial Sequence: Synthetic oligonucleotide
cauugccgaaccagcugug

SEQ ID NO: 685946 - RNA, 19 nt, Artificial Sequence
  Description of Artificial Sequence: Synthetic oligonucleotide
cuagcgcgaaggacuugag

SEQ ID NO: 685947 - RNA, 19 nt, Artificial Sequence
  Description of Artificial Sequence: Synthetic oligonucleotide
cuggacuauccuccccaag

SEQ ID NO: 685948 - RNA, 19 nt, Artificial Sequence
  Description of Artificial Sequence: Synthetic oligonucleotide
uggugaugcggcgcugugc

SEQ ID NO: 685949 - RNA, 19 nt, Artificial Sequence
  Description of Artificial Sequence: Synthetic oligonucleotide
cuugacggccgguguauca

SEQ ID NO: 685950 - RNA, 19 nt, Artificial Sequence
  Description of Artificial Sequence: Synthetic oligonucleotide
uacacgcuucgugucgcgc

SEQ ID NO: 685951 - RNA, 19 nt, Artificial Sequence
  Description of Artificial Sequence: Synthetic oligonucleotide
gcggacgacgaucugcagc

SEQ ID NO: 685952 - RNA, 19 nt, Artificial Sequence
  Description of Artificial Sequence: Synthetic oligonucleotide
ggcucggagaaagucauca

SEQ ID NO: 685953 - RNA, 19 nt, Artificial Sequence
  Description of Artificial Sequence: Synthetic oligonucleotide
auacagcgggaugguguac

SEQ ID NO: 685954 - RNA, 19 nt, Artificial Sequence
  Description of Artificial Sequence: Synthetic oligonucleotide
aaucgcucugcggcacuca

SEQ ID NO: 685955 - RNA, 19 nt, Artificial Sequence
  Description of Artificial Sequence: Synthetic oligonucleotide
aggcgcagucauggcagcc

SEQ ID NO: 685956 - RNA, 19 nt, Artificial Sequence
  Description of Artificial Sequence: Synthetic oligonucleotide
gaccucuagcgcgaaggac

SEQ ID NO: 685957 - RNA, 19 nt, Artificial Sequence
  Description of Artificial Sequence: Synthetic oligonucleotide
caguguaagagagcaggga

SEQ ID NO: 685958 - RNA, 19 nt, Artificial Sequence
  Description of Artificial Sequence: Synthetic oligonucleotide
uggggccuagccccuggga

SEQ ID NO: 685959 - RNA, 19 nt, Artificial Sequence
  Description of Artificial Sequence: Synthetic oligonucleotide
cuguaccccuaacggggcc

SEQ ID NO: 685960 - RNA, 19 nt, Artificial Sequence
  Description of Artificial Sequence: Synthetic oligonucleotide
ggaugguguacaugcguga

SEQ ID NO: 685961 - RNA, 19 nt, Artificial Sequence
  Description of Artificial Sequence: Synthetic oligonucleotide
acuugacggccgguguauc

SEQ ID NO: 685962 - RNA, 19 nt, Artificial Sequence
  Description of Artificial Sequence: Synthetic oligonucleotide
gacgagguaggcggguaca

SEQ ID NO: 685963 - RNA, 19 nt, Artificial Sequence
  Description of Artificial Sequence: Synthetic oligonucleotide
accacgcuggugaauuugu

SEQ ID NO: 685964 - RNA, 19 nt, Artificial Sequence
  Description of Artificial Sequence: Synthetic oligonucleotide
caggaagcggcggacucug

SEQ ID NO: 685965 - RNA, 19 nt, Artificial Sequence
  Description of Artificial Sequence: Synthetic oligonucleotide
gcacaaucguggugucugg

SEQ ID NO: 685966 - RNA, 19 nt, Artificial Sequence
  Description of Artificial Sequence: Synthetic oligonucleotide
cuagcagccgguccagaaa

SEQ ID NO: 685967 - RNA, 19 nt, Artificial Sequence
  Description of Artificial Sequence: Synthetic oligonucleotide
ugacggccgguguaucaaa

SEQ ID NO: 685968 - RNA, 19 nt, Artificial Sequence
  Description of Artificial Sequence: Synthetic oligonucleotide
ugcggacgacgaucugcag

SEQ ID NO: 685969 - RNA, 19 nt, Artificial Sequence
  Description of Artificial Sequence: Synthetic oligonucleotide
agcggcggacucuguggag

SEQ ID NO: 685970 - RNA, 19 nt, Artificial Sequence
  Description of Artificial Sequence: Synthetic oligonucleotide
agcacaaucccaggaccau

SEQ ID NO: 685971 - RNA, 19 nt, Artificial Sequence
  Description of Artificial Sequence: Synthetic oligonucleotide
cauguauggcccauauaau

SEQ ID NO: 685972 - RNA, 19 nt, Artificial Sequence
  Description of Artificial Sequence: Synthetic oligonucleotide
gcgcgaaggacuugagggc

SEQ ID NO: 685973 - RNA, 19 nt, Artificial Sequence
  Description of Artificial Sequence: Synthetic oligonucleotide
gaccccugagacaggucug

SEQ ID NO: 685974 - RNA, 19 nt, Artificial Sequence
  Description of Artificial Sequence: Synthetic oligonucleotide
uaaucgcucugcggcacuc

SEQ ID NO: 685975 - RNA, 19 nt, Artificial Sequence
  Description of Artificial Sequence: Synthetic oligonucleotide
gguacagggugauccaugu

SEQ ID NO: 685976 - RNA, 19 nt, Artificial Sequence
  Description of Artificial Sequence: Synthetic oligonucleotide
ggucagucaccaaggcuag

SEQ ID NO: 685977 - RNA, 19 nt, Artificial Sequence
  Description of Artificial Sequence: Synthetic oligonucleotide
ggacuauccuccccaagaa

SEQ ID NO: 685978 - RNA, 19 nt, Artificial Sequence
  Description of Artificial Sequence: Synthetic oligonucleotide
acggcugaguaggugcacu

SEQ ID NO: 685979 - RNA, 19 nt, Artificial Sequence
  Description of Artificial Sequence: Synthetic oligonucleotide
caguucggggaagaagcuc

SEQ ID NO: 685980 - RNA, 19 nt, Artificial Sequence
  Description of Artificial Sequence: Synthetic oligonucleotide
gguaguacacgaagcagua

SEQ ID NO: 685981 - RNA, 19 nt, Artificial Sequence
  Description of Artificial Sequence: Synthetic oligonucleotide
ggcccauauaaucgcucug

SEQ ID NO: 685982 - RNA, 19 nt, Artificial Sequence
  Description of Artificial Sequence: Synthetic oligonucleotide
gggugauccauguggaagu

SEQ ID NO: 685983 - RNA, 19 nt, Artificial Sequence
  Description of Artificial Sequence: Synthetic oligonucleotide
accggugcagagguccuca

SEQ ID NO: 685984 - RNA, 19 nt, Artificial Sequence
  Description of Artificial Sequence: Synthetic oligonucleotide
ggauucuccauggccacga

SEQ ID NO: 685985 - RNA, 19 nt, Artificial Sequence
  Description of Artificial Sequence: Synthetic oligonucleotide
cacgcuucgugucgcgcuc

SEQ ID NO: 685986 - RNA, 19 nt, Artificial Sequence
  Description of Artificial Sequence: Synthetic oligonucleotide
acaaugggaggggcuuaug

SEQ ID NO: 685987 - RNA, 19 nt, Artificial Sequence
  Description of Artificial Sequence: Synthetic oligonucleotide
cucuacaggccggguuagg

SEQ ID NO: 685988 - RNA, 19 nt, Artificial Sequence
  Description of Artificial Sequence: Synthetic oligonucleotide
acgccgucuuccuccacau

SEQ ID NO: 685989 - RNA, 19 nt, Artificial Sequence
  Description of Artificial Sequence: Synthetic oligonucleotide
aaggcuaggcagacacauu

SEQ ID NO: 685990 - RNA, 19 nt, Artificial Sequence
  Description of Artificial Sequence: Synthetic oligonucleotide
ccuguaccccuaacggggc

SEQ ID NO: 685991 - RNA, 19 nt, Artificial Sequence
  Description of Artificial Sequence: Synthetic oligonucleotide
ggaggcaugguggguauga

SEQ ID NO: 685992 - RNA, 19 nt, Artificial Sequence
  Description of Artificial Sequence: Synthetic oligonucleotide
uggcgagucuggguucgug

SEQ ID NO: 685993 - RNA, 19 nt, Artificial Sequence
  Description of Artificial Sequence: Synthetic oligonucleotide
gaaccagcugugggccacc

SEQ ID NO: 685994 - RNA, 19 nt, Artificial Sequence
  Description of Artificial Sequence: Synthetic oligonucleotide
ggagaucgggauaguaguc

SEQ ID NO: 685995 - RNA, 19 nt, Artificial Sequence
  Description of Artificial Sequence: Synthetic oligonucleotide
uucggggaagaagcucaaa

SEQ ID NO: 685996 - RNA, 19 nt, Artificial Sequence
  Description of Artificial Sequence: Synthetic oligonucleotide
ugcgugacaucuggcucuc

SEQ ID NO: 685997 - RNA, 19 nt, Artificial Sequence
  Description of Artificial Sequence: Synthetic oligonucleotide
ggcacggauucuccauggc

SEQ ID NO: 685998 - RNA, 19 nt, Artificial Sequence
  Description of Artificial Sequence: Synthetic oligonucleotide
gccgaaccagcugugggcc

SEQ ID NO: 685999 - RNA, 19 nt, Artificial Sequence
  Description of Artificial Sequence: Synthetic oligonucleotide
gcuggcgagucuggguucg

SEQ ID NO: 686000 - RNA, 19 nt, Artificial Sequence
  Description of Artificial Sequence: Synthetic oligonucleotide
gggaggucgagggucaguc

SEQ ID NO: 686001 - RNA, 19 nt, Artificial Sequence
  Description of Artificial Sequence: Synthetic oligonucleotide
ggguacagggugauccaug

SEQ ID NO: 686002 - RNA, 19 nt, Artificial Sequence
  Description of Artificial Sequence: Synthetic oligonucleotide
ggaucucagcauucaugga

SEQ ID NO: 686003 - RNA, 19 nt, Artificial Sequence
  Description of Artificial Sequence: Synthetic oligonucleotide
cauugcggacgacgaucug

SEQ ID NO: 686004 - RNA, 19 nt, Artificial Sequence
  Description of Artificial Sequence: Synthetic oligonucleotide
cuacaggccggguuaggcu

SEQ ID NO: 686005 - RNA, 19 nt, Artificial Sequence
  Description of Artificial Sequence: Synthetic oligonucleotide
cugggauucacuccugguu

SEQ ID NO: 686006 - RNA, 19 nt, Artificial Sequence
  Description of Artificial Sequence: Synthetic oligonucleotide
ccgauagcuugcugguggc

SEQ ID NO: 686007 - RNA, 19 nt, Artificial Sequence
  Description of Artificial Sequence: Synthetic oligonucleotide
guaggcggguacaggguga

SEQ ID NO: 686008 - RNA, 19 nt, Artificial Sequence
  Description of Artificial Sequence: Synthetic oligonucleotide
uaggcggguacagggugau

SEQ ID NO: 686009 - RNA, 19 nt, Artificial Sequence
  Description of Artificial Sequence: Synthetic oligonucleotide
cauugagccagcgcucgaa

SEQ ID NO: 686010 - RNA, 19 nt, Artificial Sequence
  Description of Artificial Sequence: Synthetic oligonucleotide
acccgauagcuugcuggug

SEQ ID NO: 686011 - RNA, 19 nt, Artificial Sequence
  Description of Artificial Sequence: Synthetic oligonucleotide
cagccggcccugugucugg

SEQ ID NO: 686012 - RNA, 19 nt, Artificial Sequence
  Description of Artificial Sequence: Synthetic oligonucleotide
ugggaggucgagggucagu

SEQ ID NO: 686013 - RNA, 19 nt, Artificial Sequence
  Description of Artificial Sequence: Synthetic oligonucleotide
gggcccaaugucugcuggc

SEQ ID NO: 686014 - RNA, 19 nt, Artificial Sequence
  Description of Artificial Sequence: Synthetic oligonucleotide
accccuaacggggccuuga

SEQ ID NO: 686015 - RNA, 19 nt, Artificial Sequence
  Description of Artificial Sequence: Synthetic oligonucleotide
cucuaggcaggugaaggcu

SEQ ID NO: 686016 - RNA, 19 nt, Artificial Sequence
  Description of Artificial Sequence: Synthetic oligonucleotide
cauugacgucccugagaga

SEQ ID NO: 686017 - RNA, 19 nt, Artificial Sequence
  Description of Artificial Sequence: Synthetic oligonucleotide
cacauguauggcccauaua

SEQ ID NO: 686018 - RNA, 19 nt, Artificial Sequence
  Description of Artificial Sequence: Synthetic oligonucleotide
cacccgauagcuugcuggu

SEQ ID NO: 686019 - RNA, 19 nt, Artificial Sequence
  Description of Artificial Sequence: Synthetic oligonucleotide
ggucgagggucagucacca

SEQ ID NO: 686020 - RNA, 19 nt, Artificial Sequence
  Description of Artificial Sequence: Synthetic oligonucleotide
gguucugcgcagguuggga

SEQ ID NO: 686021 - RNA, 19 nt, Artificial Sequence
  Description of Artificial Sequence: Synthetic oligonucleotide
caaucccaggaccaugcau

SEQ ID NO: 686022 - RNA, 19 nt, Artificial Sequence
  Description of Artificial Sequence: Synthetic oligonucleotide
cgugucgcgcucaucagca

SEQ ID NO: 686023 - RNA, 19 nt, Artificial Sequence
  Description of Artificial Sequence: Synthetic oligonucleotide
caagggcgacgagguaggc

SEQ ID NO: 686024 - RNA, 19 nt, Artificial Sequence
  Description of Artificial Sequence: Synthetic oligonucleotide
gacgucccugagagagaug

SEQ ID NO: 686025 - RNA, 19 nt, Artificial Sequence
  Description of Artificial Sequence: Synthetic oligonucleotide
gguguacaugcgugacauc

SEQ ID NO: 686026 - RNA, 19 nt, Artificial Sequence
  Description of Artificial Sequence: Synthetic oligonucleotide
gcucggagaaagucaucaa

SEQ ID NO: 686027 - RNA, 19 nt, Artificial Sequence
  Description of Artificial Sequence: Synthetic oligonucleotide
uaccccuaacggggccuug

SEQ ID NO: 686028 - RNA, 19 nt, Artificial Sequence
  Description of Artificial Sequence: Synthetic oligonucleotide
cuagcuugacuugcaacuu

SEQ ID NO: 686029 - RNA, 19 nt, Artificial Sequence
  Description of Artificial Sequence: Synthetic oligonucleotide
gccacaagggcgacgaggu

SEQ ID NO: 686030 - RNA, 19 nt, Artificial Sequence
  Description of Artificial Sequence: Synthetic oligonucleotide
ggcgcagucauggcagcca

SEQ ID NO: 686031 - RNA, 19 nt, Artificial Sequence
  Description of Artificial Sequence: Synthetic oligonucleotide
cucuagcgcgaaggacuug

SEQ ID NO: 686032 - RNA, 19 nt, Artificial Sequence
  Description of Artificial Sequence: Synthetic oligonucleotide
cagggacgaguagcauuug

SEQ ID NO: 686033 - RNA, 19 nt, Artificial Sequence
  Description of Artificial Sequence: Synthetic oligonucleotide
gcggguacagggugaucca

SEQ ID NO: 686034 - RNA, 19 nt, Artificial Sequence
  Description of Artificial Sequence: Synthetic oligonucleotide
gcgcagguugggaugcagc

SEQ ID NO: 686035 - RNA, 19 nt, Artificial Sequence
  Description of Artificial Sequence: Synthetic oligonucleotide
ggaugcggaucucagcauu

SEQ ID NO: 686036 - RNA, 19 nt, Artificial Sequence
  Description of Artificial Sequence: Synthetic oligonucleotide
guucggggaagaagcucaa

SEQ ID NO: 686037 - RNA, 19 nt, Artificial Sequence
  Description of Artificial Sequence: Synthetic oligonucleotide
aggcggguacagggugauc

SEQ ID NO: 686038 - RNA, 19 nt, Artificial Sequence
  Description of Artificial Sequence: Synthetic oligonucleotide
gggauccaucuagcagccg

SEQ ID NO: 686039 - RNA, 19 nt, Artificial Sequence
  Description of Artificial Sequence: Synthetic oligonucleotide
acgcuucgugucgcgcuca

SEQ ID NO: 686040 - RNA, 19 nt, Artificial Sequence
  Description of Artificial Sequence: Synthetic oligonucleotide
gaucgggauaguagucauu

SEQ ID NO: 686041 - RNA, 19 nt, Artificial Sequence
  Description of Artificial Sequence: Synthetic oligonucleotide
gcacuugacggccggugua

SEQ ID NO: 686042 - RNA, 19 nt, Artificial Sequence
  Description of Artificial Sequence: Synthetic oligonucleotide
cagagccaaggcgcaguca

SEQ ID NO: 686043 - RNA, 19 nt, Artificial Sequence
  Description of Artificial Sequence: Synthetic oligonucleotide
cggccgguguaucaaagca

SEQ ID NO: 686044 - RNA, 19 nt, Artificial Sequence
  Description of Artificial Sequence: Synthetic oligonucleotide
ccggguuaggcuggacccc

SEQ ID NO: 686045 - RNA, 19 nt, Artificial Sequence
  Description of Artificial Sequence: Synthetic oligonucleotide
cgaaggacuugagggcacc

SEQ ID NO: 686046 - RNA, 19 nt, Artificial Sequence
  Description of Artificial Sequence: Synthetic oligonucleotide
ccuugacaacggcugagua

SEQ ID NO: 686047 - RNA, 19 nt, Artificial Sequence
  Description of Artificial Sequence: Synthetic oligonucleotide
gcgcugugcauagguggcc

SEQ ID NO: 686048 - RNA, 19 nt, Artificial Sequence
  Description of Artificial Sequence: Synthetic oligonucleotide
gucgagggucagucaccaa

SEQ ID NO: 686049 - RNA, 19 nt, Artificial Sequence
  Description of Artificial Sequence: Synthetic oligonucleotide
augcggcgcugugcauagg

SEQ ID NO: 686050 - RNA, 19 nt, Artificial Sequence
  Description of Artificial Sequence: Synthetic oligonucleotide
ggggauccccacagagcug

SEQ ID NO: 686051 - RNA, 19 nt, Artificial Sequence
  Description of Artificial Sequence: Synthetic oligonucleotide
ccggcaguccacgcucugc

SEQ ID NO: 686052 - RNA, 19 nt, Artificial Sequence
  Description of Artificial Sequence: Synthetic oligonucleotide
gcggcgcugugcauaggug

SEQ ID NO: 686053 - RNA, 19 nt, Artificial Sequence
  Description of Artificial Sequence: Synthetic oligonucleotide
ccccuaacggggccuugac

SEQ ID NO: 686054 - RNA, 19 nt, Artificial Sequence
  Description of Artificial Sequence: Synthetic oligonucleotide
cggacucuguggagaucgg

SEQ ID NO: 686055 - RNA, 19 nt, Artificial Sequence
  Description of Artificial Sequence: Synthetic oligonucleotide
cacuugacggccgguguau

SEQ ID NO: 686056 - RNA, 19 nt, Artificial Sequence
  Description of Artificial Sequence: Synthetic oligonucleotide
cgaugucauaucugcccca

SEQ ID NO: 686057 - RNA, 19 nt, Artificial Sequence
  Description of Artificial Sequence: Synthetic oligonucleotide
cccuaacggggccuugaca

SEQ ID NO: 686058 - RNA, 19 nt, Artificial Sequence
  Description of Artificial Sequence: Synthetic oligonucleotide
ccagcggaugcggaucuca

SEQ ID NO: 686059 - RNA, 19 nt, Artificial Sequence
  Description of Artificial Sequence: Synthetic oligonucleotide
cgacgagguaggcggguac

SEQ ID NO: 686060 - RNA, 19 nt, Artificial Sequence
  Description of Artificial Sequence: Synthetic oligonucleotide
gcggcacucagccacuguu

SEQ ID NO: 686061 - RNA, 19 nt, Artificial Sequence
  Description of Artificial Sequence: Synthetic oligonucleotide
aggaagcggcggacucugu

SEQ ID NO: 686062 - RNA, 19 nt, Artificial Sequence
  Description of Artificial Sequence: Synthetic oligonucleotide
agccggcccugugucuggu

SEQ ID NO: 686063 - RNA, 19 nt, Artificial Sequence
  Description of Artificial Sequence: Synthetic oligonucleotide
ggguuaggcuggaccccug

SEQ ID NO: 686064 - RNA, 19 nt, Artificial Sequence
  Description of Artificial Sequence: Synthetic oligonucleotide
caacacccgauagcuugcu

SEQ ID NO: 686065 - RNA, 19 nt, Artificial Sequence
  Description of Artificial Sequence: Synthetic oligonucleotide
gccuugacaacggcugagu

SEQ ID NO: 686066 - RNA, 19 nt, Artificial Sequence
  Description of Artificial Sequence: Synthetic oligonucleotide
ccacauguauggcccauau

SEQ ID NO: 686067 - RNA, 19 nt, Artificial Sequence
  Description of Artificial Sequence: Synthetic oligonucleotide
ggcggacucuguggagauc

SEQ ID NO: 686068 - RNA, 19 nt, Artificial Sequence
  Description of Artificial Sequence: Synthetic oligonucleotide
ggacgacgaucugcagcca

SEQ ID NO: 686069 - RNA, 19 nt, Artificial Sequence
  Description of Artificial Sequence: Synthetic oligonucleotide
gcuucgugucgcgcucauc

SEQ ID NO: 686070 - RNA, 19 nt, Artificial Sequence
  Description of Artificial Sequence: Synthetic oligonucleotide
ccgaaccagcugugggcca

SEQ ID NO: 686071 - RNA, 19 nt, Artificial Sequence
  Description of Artificial Sequence: Synthetic oligonucleotide
cccggcaguccacgcucug

SEQ ID NO: 686072 - RNA, 19 nt, Artificial Sequence
  Description of Artificial Sequence: Synthetic oligonucleotide
ggugcacuugacggccggu

SEQ ID NO: 686073 - RNA, 19 nt, Artificial Sequence
  Description of Artificial Sequence: Synthetic oligonucleotide
ggugggccuguggcauuga

SEQ ID NO: 686074 - RNA, 19 nt, Artificial Sequence
  Description of Artificial Sequence: Synthetic oligonucleotide
gcgacgagguaggcgggua

SEQ ID NO: 686075 - RNA, 19 nt, Artificial Sequence
  Description of Artificial Sequence: Synthetic oligonucleotide
gcccaaugucugcuggcuu

SEQ ID NO: 686076 - RNA, 19 nt, Artificial Sequence
  Description of Artificial Sequence: Synthetic oligonucleotide
ccugggcccaaugucugcu

SEQ ID NO: 686077 - RNA, 19 nt, Artificial Sequence
  Description of Artificial Sequence: Synthetic oligonucleotide
ggcgacgagguaggcgggu

SEQ ID NO: 686078 - RNA, 19 nt, Artificial Sequence
  Description of Artificial Sequence: Synthetic oligonucleotide
ccacaagggcgacgaggua

SEQ ID NO: 686079 - RNA, 19 nt, Artificial Sequence
  Description of Artificial Sequence: Synthetic oligonucleotide
cuggcgagucuggguucgu

SEQ ID NO: 686080 - RNA, 19 nt, Artificial Sequence
  Description of Artificial Sequence: Synthetic oligonucleotide
cacggcuccugggcccaau

SEQ ID NO: 686081 - RNA, 19 nt, Artificial Sequence
  Description of Artificial Sequence: Synthetic oligonucleotide
ccggugcagagguccucau

SEQ ID NO: 686082 - RNA, 19 nt, Artificial Sequence
  Description of Artificial Sequence: Synthetic oligonucleotide
ccccugaccuggagacaau

SEQ ID NO: 686083 - RNA, 19 nt, Artificial Sequence
  Description of Artificial Sequence: Synthetic oligonucleotide
cggguacagggugauccau

SEQ ID NO: 686084 - RNA, 19 nt, Artificial Sequence
  Description of Artificial Sequence: Synthetic oligonucleotide
aguuuaaggucauagagcc

SEQ ID NO: 686085 - RNA, 19 nt, Artificial Sequence
  Description of Artificial Sequence: Synthetic oligonucleotide
aagaaacgaaccuucagcc

SEQ ID NO: 686086 - RNA, 19 nt, Artificial Sequence
  Description of Artificial Sequence: Synthetic oligonucleotide
aauaaugacaugaaacuac

SEQ ID NO: 686087 - RNA, 19 nt, Artificial Sequence
  Description of Artificial Sequence: Synthetic oligonucleotide
auuaacauguaugacaagc

SEQ ID NO: 686088 - RNA, 19 nt, Artificial Sequence
  Description of Artificial Sequence: Synthetic oligonucleotide
aaagaaaagucagaguccc

SEQ ID NO: 686089 - RNA, 19 nt, Artificial Sequence
  Description of Artificial Sequence: Synthetic oligonucleotide
ugaaacuacacugagaugc

SEQ ID NO: 686090 - RNA, 19 nt, Artificial Sequence
  Description of Artificial Sequence: Synthetic oligonucleotide
aaugcuuugauaucugaag

SEQ ID NO: 686091 - RNA, 19 nt, Artificial Sequence
  Description of Artificial Sequence: Synthetic oligonucleotide
aaaucugggagagacaccc

SEQ ID NO: 686092 - RNA, 19 nt, Artificial Sequence
  Description of Artificial Sequence: Synthetic oligonucleotide
uuaaguguuaagaacaaga

SEQ ID NO: 686093 - RNA, 19 nt, Artificial Sequence
  Description of Artificial Sequence: Synthetic oligonucleotide
aagucaacaaguuuaaggu

SEQ ID NO: 686094 - RNA, 19 nt, Artificial Sequence
  Description of Artificial Sequence: Synthetic oligonucleotide
aacccuauaagacaaagga

SEQ ID NO: 686095 - RNA, 19 nt, Artificial Sequence
  Description of Artificial Sequence: Synthetic oligonucleotide
aaaaucaaccuuccugccc

SEQ ID NO: 686096 - RNA, 19 nt, Artificial Sequence
  Description of Artificial Sequence: Synthetic oligonucleotide
aauuugaacccuauaagac

SEQ ID NO: 686097 - RNA, 19 nt, Artificial Sequence
  Description of Artificial Sequence: Synthetic oligonucleotide
aauuaggagauucugauua

SEQ ID NO: 686098 - RNA, 19 nt, Artificial Sequence
  Description of Artificial Sequence: Synthetic oligonucleotide
ucaauaaugacaugaaacu

SEQ ID NO: 686099 - RNA, 19 nt, Artificial Sequence
  Description of Artificial Sequence: Synthetic oligonucleotide
aguguuaagaacaagaugu

SEQ ID NO: 686100 - RNA, 19 nt, Artificial Sequence
  Description of Artificial Sequence: Synthetic oligonucleotide
acuauuaacauguaugaca

SEQ ID NO: 686101 - RNA, 19 nt, Artificial Sequence
  Description of Artificial Sequence: Synthetic oligonucleotide
aaaauaauccugaaaauga

SEQ ID NO: 686102 - RNA, 19 nt, Artificial Sequence
  Description of Artificial Sequence: Synthetic oligonucleotide
uucuauaauccauagcagg

SEQ ID NO: 686103 - RNA, 19 nt, Artificial Sequence
  Description of Artificial Sequence: Synthetic oligonucleotide
gaaauuugaacccuauaag

SEQ ID NO: 686104 - RNA, 19 nt, Artificial Sequence
  Description of Artificial Sequence: Synthetic oligonucleotide
uaagaaacgaaccuucagc

SEQ ID NO: 686105 - RNA, 19 nt, Artificial Sequence
  Description of Artificial Sequence: Synthetic oligonucleotide
uuugguaggagccaucucc

SEQ ID NO: 686106 - RNA, 19 nt, Artificial Sequence
  Description of Artificial Sequence: Synthetic oligonucleotide
uuucuguucaauaaugaca

SEQ ID NO: 686107 - RNA, 19 nt, Artificial Sequence
  Description of Artificial Sequence: Synthetic oligonucleotide
aaguuuaaggucauagagc

SEQ ID NO: 686108 - RNA, 19 nt, Artificial Sequence
  Description of Artificial Sequence: Synthetic oligonucleotide
aacauguuugcacauuuag

SEQ ID NO: 686109 - RNA, 19 nt, Artificial Sequence
  Description of Artificial Sequence: Synthetic oligonucleotide
ugagaugccauuuacagaa

SEQ ID NO: 686110 - RNA, 19 nt, Artificial Sequence
  Description of Artificial Sequence: Synthetic oligonucleotide
uucugauuaacucaguaac

SEQ ID NO: 686111 - RNA, 19 nt, Artificial Sequence
  Description of Artificial Sequence: Synthetic oligonucleotide
aguuguuugguccagaagu

SEQ ID NO: 686112 - RNA, 19 nt, Artificial Sequence
  Description of Artificial Sequence: Synthetic oligonucleotide
aauacuuagaagggcacac

SEQ ID NO: 686113 - RNA, 19 nt, Artificial Sequence
  Description of Artificial Sequence: Synthetic oligonucleotide
uuuaaggucauagagccag

SEQ ID NO: 686114 - RNA, 19 nt, Artificial Sequence
  Description of Artificial Sequence: Synthetic oligonucleotide
uuaguuaguuguuuggucc

SEQ ID NO: 686115 - RNA, 19 nt, Artificial Sequence
  Description of Artificial Sequence: Synthetic oligonucleotide
ugcacauuuaguuaguugu

SEQ ID NO: 686116 - RNA, 19 nt, Artificial Sequence
  Description of Artificial Sequence: Synthetic oligonucleotide
auguaugacaagcagguuc

SEQ ID NO: 686117 - RNA, 19 nt, Artificial Sequence
  Description of Artificial Sequence: Synthetic oligonucleotide
agaaauuugaacccuauaa

SEQ ID NO: 686118 - RNA, 19 nt, Artificial Sequence
  Description of Artificial Sequence: Synthetic oligonucleotide
aacaaguuuaaggucauag

SEQ ID NO: 686119 - RNA, 19 nt, Artificial Sequence
  Description of Artificial Sequence: Synthetic oligonucleotide
uguaugacaagcagguucc

SEQ ID NO: 686120 - RNA, 19 nt, Artificial Sequence
  Description of Artificial Sequence: Synthetic oligonucleotide
ucuauaauccauagcagga

SEQ ID NO: 686121 - RNA, 19 nt, Artificial Sequence
  Description of Artificial Sequence: Synthetic oligonucleotide
uguuugcacauuuaguuag

SEQ ID NO: 686122 - RNA, 19 nt, Artificial Sequence
  Description of Artificial Sequence: Synthetic oligonucleotide
agaaguggcuucuauaauc

SEQ ID NO: 686123 - RNA, 19 nt, Artificial Sequence
  Description of Artificial Sequence: Synthetic oligonucleotide
uauuauuaaguguuaagaa

SEQ ID NO: 686124 - RNA, 19 nt, Artificial Sequence
  Description of Artificial Sequence: Synthetic oligonucleotide
acugagaugccauuuacag

SEQ ID NO: 686125 - RNA, 19 nt, Artificial Sequence
  Description of Artificial Sequence: Synthetic oligonucleotide
uccacuauuauuaaguguu

SEQ ID NO: 686126 - RNA, 19 nt, Artificial Sequence
  Description of Artificial Sequence: Synthetic oligonucleotide
aaugucaacaugcauggaa

SEQ ID NO: 686127 - RNA, 19 nt, Artificial Sequence
  Description of Artificial Sequence: Synthetic oligonucleotide
uucaguuacaccuccaaca

SEQ ID NO: 686128 - RNA, 19 nt, Artificial Sequence
  Description of Artificial Sequence: Synthetic oligonucleotide
aaaucaaccuuccugcccu

SEQ ID NO: 686129 - RNA, 19 nt, Artificial Sequence
  Description of Artificial Sequence: Synthetic oligonucleotide
aaguguuaagaacaagaug

SEQ ID NO: 686130 - RNA, 19 nt, Artificial Sequence
  Description of Artificial Sequence: Synthetic oligonucleotide
uacagugcaacuuuucaag

SEQ ID NO: 686131 - RNA, 19 nt, Artificial Sequence
  Description of Artificial Sequence: Synthetic oligonucleotide
acuauuauuaaguguuaag

SEQ ID NO: 686132 - RNA, 19 nt, Artificial Sequence
  Description of Artificial Sequence: Synthetic oligonucleotide
ucugucagcacaagaaacc

SEQ ID NO: 686133 - RNA, 19 nt, Artificial Sequence
  Description of Artificial Sequence: Synthetic oligonucleotide
uuaacauguaugacaagca

SEQ ID NO: 686134 - RNA, 19 nt, Artificial Sequence
  Description of Artificial Sequence: Synthetic oligonucleotide
guuaagaacaagaugugag

SEQ ID NO: 686135 - RNA, 19 nt, Artificial Sequence
  Description of Artificial Sequence: Synthetic oligonucleotide
aacauguaugacaagcagg

SEQ ID NO: 686136 - RNA, 19 nt, Artificial Sequence
  Description of Artificial Sequence: Synthetic oligonucleotide
uaacauguaugacaagcag

SEQ ID NO: 686137 - RNA, 19 nt, Artificial Sequence
  Description of Artificial Sequence: Synthetic oligonucleotide
aaaggaaaaucugggagag

SEQ ID NO: 686138 - RNA, 19 nt, Artificial Sequence
  Description of Artificial Sequence: Synthetic oligonucleotide
ucugauuaacucaguaacc

SEQ ID NO: 686139 - RNA, 19 nt, Artificial Sequence
  Description of Artificial Sequence: Synthetic oligonucleotide
agcacaagaaaccuuuguc

SEQ ID NO: 686140 - RNA, 19 nt, Artificial Sequence
  Description of Artificial Sequence: Synthetic oligonucleotide
uuaagaacaagaugugaga

SEQ ID NO: 686141 - RNA, 19 nt, Artificial Sequence
  Description of Artificial Sequence: Synthetic oligonucleotide
uuuucaagggaaacauucc

SEQ ID NO: 686142 - RNA, 19 nt, Artificial Sequence
  Description of Artificial Sequence: Synthetic oligonucleotide
aacuauuaacauguaugac

SEQ ID NO: 686143 - RNA, 19 nt, Artificial Sequence
  Description of Artificial Sequence: Synthetic oligonucleotide
uuacagaagcucaauaaaa

SEQ ID NO: 686144 - RNA, 19 nt, Artificial Sequence
  Description of Artificial Sequence: Synthetic oligonucleotide
cauuuaguuaguuguuugg

SEQ ID NO: 686145 - RNA, 19 nt, Artificial Sequence
  Description of Artificial Sequence: Synthetic oligonucleotide
gcuucuauaauccauagca

SEQ ID NO: 686146 - RNA, 19 nt, Artificial Sequence
  Description of Artificial Sequence: Synthetic oligonucleotide
agaacaagaugugagaaug

SEQ ID NO: 686147 - RNA, 19 nt, Artificial Sequence
  Description of Artificial Sequence: Synthetic oligonucleotide
auuugaacccuauaagaca

SEQ ID NO: 686148 - RNA, 19 nt, Artificial Sequence
  Description of Artificial Sequence: Synthetic oligonucleotide
uacuuagaagggcacacag

SEQ ID NO: 686149 - RNA, 19 nt, Artificial Sequence
  Description of Artificial Sequence: Synthetic oligonucleotide
gauuaacucaguaaccuug

SEQ ID NO: 686150 - RNA, 19 nt, Artificial Sequence
  Description of Artificial Sequence: Synthetic oligonucleotide
uuucaagggaaacauucca

SEQ ID NO: 686151 - RNA, 19 nt, Artificial Sequence
  Description of Artificial Sequence: Synthetic oligonucleotide
uugaauuaggagauucuga

SEQ ID NO: 686152 - RNA, 19 nt, Artificial Sequence
  Description of Artificial Sequence: Synthetic oligonucleotide
caacaagaaauuugaaccc

SEQ ID NO: 686153 - RNA, 19 nt, Artificial Sequence
  Description of Artificial Sequence: Synthetic oligonucleotide
uaaguguuaagaacaagau

SEQ ID NO: 686154 - RNA, 19 nt, Artificial Sequence
  Description of Artificial Sequence: Synthetic oligonucleotide
uagaagggcacacagcucu

SEQ ID NO: 686155 - RNA, 19 nt, Artificial Sequence
  Description of Artificial Sequence: Synthetic oligonucleotide
gaauagucuacagaagugc

SEQ ID NO: 686156 - RNA, 19 nt, Artificial Sequence
  Description of Artificial Sequence: Synthetic oligonucleotide
uuuggaaguaagcauuggu

SEQ ID NO: 686157 - RNA, 19 nt, Artificial Sequence
  Description of Artificial Sequence: Synthetic oligonucleotide
ugugagaaugagcuguuga

SEQ ID NO: 686158 - RNA, 19 nt, Artificial Sequence
  Description of Artificial Sequence: Synthetic oligonucleotide
aagggaaacauuccacugu

SEQ ID NO: 686159 - RNA, 19 nt, Artificial Sequence
  Description of Artificial Sequence: Synthetic oligonucleotide
uacaacaggagagguaugg

SEQ ID NO: 686160 - RNA, 19 nt, Artificial Sequence
  Description of Artificial Sequence: Synthetic oligonucleotide
aggagaacagaucaaggug

SEQ ID NO: 686161 - RNA, 19 nt, Artificial Sequence
  Description of Artificial Sequence: Synthetic oligonucleotide
ucuacagaagugcuacuug

SEQ ID NO: 686162 - RNA, 19 nt, Artificial Sequence
  Description of Artificial Sequence: Synthetic oligonucleotide
uuuccaggguaaaacaugu

SEQ ID NO: 686163 - RNA, 19 nt, Artificial Sequence
  Description of Artificial Sequence: Synthetic oligonucleotide
augacuuuucuuugguagg

SEQ ID NO: 686164 - RNA, 19 nt, Artificial Sequence
  Description of Artificial Sequence: Synthetic oligonucleotide
aacagcaacuacaacagga

SEQ ID NO: 686165 - RNA, 19 nt, Artificial Sequence
  Description of Artificial Sequence: Synthetic oligonucleotide
gagauucugauuaacucag

SEQ ID NO: 686166 - RNA, 19 nt, Artificial Sequence
  Description of Artificial Sequence: Synthetic oligonucleotide
aaggugagucaguaaaugu

SEQ ID NO: 686167 - RNA, 19 nt, Artificial Sequence
  Description of Artificial Sequence: Synthetic oligonucleotide
cucaguaaccuugagaaac

SEQ ID NO: 686168 - RNA, 19 nt, Artificial Sequence
  Description of Artificial Sequence: Synthetic oligonucleotide
ucagcaauccaaaggggug

SEQ ID NO: 686169 - RNA, 19 nt, Artificial Sequence
  Description of Artificial Sequence: Synthetic oligonucleotide
uccccuuaagaaacgaacc

SEQ ID NO: 686170 - RNA, 19 nt, Artificial Sequence
  Description of Artificial Sequence: Synthetic oligonucleotide
gaacagaucaaggugaguc

SEQ ID NO: 686171 - RNA, 19 nt, Artificial Sequence
  Description of Artificial Sequence: Synthetic oligonucleotide
aacagaucaaggugaguca

SEQ ID NO: 686172 - RNA, 19 nt, Artificial Sequence
  Description of Artificial Sequence: Synthetic oligonucleotide
ucaagggaaacauuccacu

SEQ ID NO: 686173 - RNA, 19 nt, Artificial Sequence
  Description of Artificial Sequence: Synthetic oligonucleotide
uaacucaguaaccuugaga

SEQ ID NO: 686174 - RNA, 19 nt, Artificial Sequence
  Description of Artificial Sequence: Synthetic oligonucleotide
uuuaguuaguuguuugguc

SEQ ID NO: 686175 - RNA, 19 nt, Artificial Sequence
  Description of Artificial Sequence: Synthetic oligonucleotide
uuucaugugucucuccacu

SEQ ID NO: 686176 - RNA, 19 nt, Artificial Sequence
  Description of Artificial Sequence: Synthetic oligonucleotide
uauaauccauagcaggaaa

SEQ ID NO: 686177 - RNA, 19 nt, Artificial Sequence
  Description of Artificial Sequence: Synthetic oligonucleotide
uuugauaucugaaguuuau

SEQ ID NO: 686178 - RNA, 19 nt, Artificial Sequence
  Description of Artificial Sequence: Synthetic oligonucleotide
cuauuauuaaguguuaaga

SEQ ID NO: 686179 - RNA, 19 nt, Artificial Sequence
  Description of Artificial Sequence: Synthetic oligonucleotide
uuccacuguacucugucag

SEQ ID NO: 686180 - RNA, 19 nt, Artificial Sequence
  Description of Artificial Sequence: Synthetic oligonucleotide
caagaugugagaaugagcu

SEQ ID NO: 686181 - RNA, 19 nt, Artificial Sequence
  Description of Artificial Sequence: Synthetic oligonucleotide
uuccccuuaagaaacgaac

SEQ ID NO: 686182 - RNA, 19 nt, Artificial Sequence
  Description of Artificial Sequence: Synthetic oligonucleotide
cuucuauaauccauagcag

SEQ ID NO: 686183 - RNA, 19 nt, Artificial Sequence
  Description of Artificial Sequence: Synthetic oligonucleotide
aacaagaaauuugaacccu

SEQ ID NO: 686184 - RNA, 19 nt, Artificial Sequence
  Description of Artificial Sequence: Synthetic oligonucleotide
uucaagggaaacauuccac

SEQ ID NO: 686185 - RNA, 19 nt, Artificial Sequence
  Description of Artificial Sequence: Synthetic oligonucleotide
uguugaauuaggagauucu

SEQ ID NO: 686186 - RNA, 19 nt, Artificial Sequence
  Description of Artificial Sequence: Synthetic oligonucleotide
gaaguggcuucuauaaucc

SEQ ID NO: 686187 - RNA, 19 nt, Artificial Sequence
  Description of Artificial Sequence: Synthetic oligonucleotide
acagugcaacuuuucaagg

SEQ ID NO: 686188 - RNA, 19 nt, Artificial Sequence
  Description of Artificial Sequence: Synthetic oligonucleotide
uaggagauucugauuaacu

SEQ ID NO: 686189 - RNA, 19 nt, Artificial Sequence
  Description of Artificial Sequence: Synthetic oligonucleotide
cuucccauggaacagugac

SEQ ID NO: 686190 - RNA, 19 nt, Artificial Sequence
  Description of Artificial Sequence: Synthetic oligonucleotide
uuggaaguaagcauugguu

SEQ ID NO: 686191 - RNA, 19 nt, Artificial Sequence
  Description of Artificial Sequence: Synthetic oligonucleotide
ugucagcaauccaaagggg

SEQ ID NO: 686192 - RNA, 19 nt, Artificial Sequence
  Description of Artificial Sequence: Synthetic oligonucleotide
ucaguaaccuugagaaaca

SEQ ID NO: 686193 - RNA, 19 nt, Artificial Sequence
  Description of Artificial Sequence: Synthetic oligonucleotide
agcaacuacaacaggagag

SEQ ID NO: 686194 - RNA, 19 nt, Artificial Sequence
  Description of Artificial Sequence: Synthetic oligonucleotide
caggguaaaacauguuugc

SEQ ID NO: 686195 - RNA, 19 nt, Artificial Sequence
  Description of Artificial Sequence: Synthetic oligonucleotide
gaaacgaaccuucagccaa

SEQ ID NO: 686196 - RNA, 19 nt, Artificial Sequence
  Description of Artificial Sequence: Synthetic oligonucleotide
gaaaaucaaccuuccugcc

SEQ ID NO: 686197 - RNA, 19 nt, Artificial Sequence
  Description of Artificial Sequence: Synthetic oligonucleotide
acaaguuuaaggucauaga

SEQ ID NO: 686198 - RNA, 19 nt, Artificial Sequence
  Description of Artificial Sequence: Synthetic oligonucleotide
acacugagaugccauuuac

SEQ ID NO: 686199 - RNA, 19 nt, Artificial Sequence
  Description of Artificial Sequence: Synthetic oligonucleotide
aauagucuacagaagugcu

SEQ ID NO: 686200 - RNA, 19 nt, Artificial Sequence
  Description of Artificial Sequence: Synthetic oligonucleotide
augcuucaaguauucuacc

SEQ ID NO: 686201 - RNA, 19 nt, Artificial Sequence
  Description of Artificial Sequence: Synthetic oligonucleotide
auucugauuaacucaguaa

SEQ ID NO: 686202 - RNA, 19 nt, Artificial Sequence
  Description of Artificial Sequence: Synthetic oligonucleotide
augucaacaugcauggaac

SEQ ID NO: 686203 - RNA, 19 nt, Artificial Sequence
  Description of Artificial Sequence: Synthetic oligonucleotide
uguuaagaacaagauguga

SEQ ID NO: 686204 - RNA, 19 nt, Artificial Sequence
  Description of Artificial Sequence: Synthetic oligonucleotide
aguuacaccuccaacaaga

SEQ ID NO: 686205 - RNA, 19 nt, Artificial Sequence
  Description of Artificial Sequence: Synthetic oligonucleotide
acuacaacaggagagguau

SEQ ID NO: 686206 - RNA, 19 nt, Artificial Sequence
  Description of Artificial Sequence: Synthetic oligonucleotide
uccaggguaaaacauguuu

SEQ ID NO: 686207 - RNA, 19 nt, Artificial Sequence
  Description of Artificial Sequence: Synthetic oligonucleotide
aaucuugauuccugaaaau

SEQ ID NO: 686208 - RNA, 19 nt, Artificial Sequence
  Description of Artificial Sequence: Synthetic oligonucleotide
ucuacaugccagcccagcc

SEQ ID NO: 686209 - RNA, 19 nt, Artificial Sequence
  Description of Artificial Sequence: Synthetic oligonucleotide
gagucaguaaaugucagga

SEQ ID NO: 686210 - RNA, 19 nt, Artificial Sequence
  Description of Artificial Sequence: Synthetic oligonucleotide
ugugucucuccacuggcug

SEQ ID NO: 686211 - RNA, 19 nt, Artificial Sequence
  Description of Artificial Sequence: Synthetic oligonucleotide
aacaggagagguaugggca

SEQ ID NO: 686212 - RNA, 19 nt, Artificial Sequence
  Description of Artificial Sequence: Synthetic oligonucleotide
gguaugggcacgcauacag

SEQ ID NO: 686213 - RNA, 19 nt, Artificial Sequence
  Description of Artificial Sequence: Synthetic oligonucleotide
uuacagugcaacuuuucaa

SEQ ID NO: 686214 - RNA, 19 nt, Artificial Sequence
  Description of Artificial Sequence: Synthetic oligonucleotide
aaugagcuguugaauuagg

SEQ ID NO: 686215 - RNA, 19 nt, Artificial Sequence
  Description of Artificial Sequence: Synthetic oligonucleotide
acaaacuauuaacauguau

SEQ ID NO: 686216 - RNA, 19 nt, Artificial Sequence
  Description of Artificial Sequence: Synthetic oligonucleotide
aaauacuuagaagggcaca

SEQ ID NO: 686217 - RNA, 19 nt, Artificial Sequence
  Description of Artificial Sequence: Synthetic oligonucleotide
cagugcaacuuuucaaggg

SEQ ID NO: 686218 - RNA, 19 nt, Artificial Sequence
  Description of Artificial Sequence: Synthetic oligonucleotide
caauccaaaggggugaggc

SEQ ID NO: 686219 - RNA, 19 nt, Artificial Sequence
  Description of Artificial Sequence: Synthetic oligonucleotide
aauccaaaggggugaggcu

SEQ ID NO: 686220 - RNA, 19 nt, Artificial Sequence
  Description of Artificial Sequence: Synthetic oligonucleotide
guaagcauugguuucuguc

SEQ ID NO: 686221 - RNA, 19 nt, Artificial Sequence
  Description of Artificial Sequence: Synthetic oligonucleotide
uaauccauagcaggaaaac

SEQ ID NO: 686222 - RNA, 19 nt, Artificial Sequence
  Description of Artificial Sequence: Synthetic oligonucleotide
uguuuccaggguaaaacau

SEQ ID NO: 686223 - RNA, 19 nt, Artificial Sequence
  Description of Artificial Sequence: Synthetic oligonucleotide
uagucuacagaagugcuac

SEQ ID NO: 686224 - RNA, 19 nt, Artificial Sequence
  Description of Artificial Sequence: Synthetic oligonucleotide
gaacccuauaagacaaagg

SEQ ID NO: 686225 - RNA, 19 nt, Artificial Sequence
  Description of Artificial Sequence: Synthetic oligonucleotide
agugcacacuuucagaaaa

SEQ ID NO: 686226 - RNA, 19 nt, Artificial Sequence
  Description of Artificial Sequence: Synthetic oligonucleotide
uuaacucaguaaccuugag

SEQ ID NO: 686227 - RNA, 19 nt, Artificial Sequence
  Description of Artificial Sequence: Synthetic oligonucleotide
caaaggaaaaucugggaga

SEQ ID NO: 686228 - RNA, 19 nt, Artificial Sequence
  Description of Artificial Sequence: Synthetic oligonucleotide
uucaagagcagaagucaac

SEQ ID NO: 686229 - RNA, 19 nt, Artificial Sequence
  Description of Artificial Sequence: Synthetic oligonucleotide
ccagauucaguuuuggaag

SEQ ID NO: 686230 - RNA, 19 nt, Artificial Sequence
  Description of Artificial Sequence: Synthetic oligonucleotide
uacaugccagcccagcccc

SEQ ID NO: 686231 - RNA, 19 nt, Artificial Sequence
  Description of Artificial Sequence: Synthetic oligonucleotide
ugcauggaacucagcaucc

SEQ ID NO: 686232 - RNA, 19 nt, Artificial Sequence
  Description of Artificial Sequence: Synthetic oligonucleotide
ucugaaguuuauuuugguu

SEQ ID NO: 686233 - RNA, 19 nt, Artificial Sequence
  Description of Artificial Sequence: Synthetic oligonucleotide
aggauuagcugugugagcu

SEQ ID NO: 686234 - RNA, 19 nt, Artificial Sequence
  Description of Artificial Sequence: Synthetic oligonucleotide
uuaaggucauagagccagg

SEQ ID NO: 686235 - RNA, 19 nt, Artificial Sequence
  Description of Artificial Sequence: Synthetic oligonucleotide
uccauagcaggaaaacaaa

SEQ ID NO: 686236 - RNA, 19 nt, Artificial Sequence
  Description of Artificial Sequence: Synthetic oligonucleotide
uugcacauuuaguuaguug

SEQ ID NO: 686237 - RNA, 19 nt, Artificial Sequence
  Description of Artificial Sequence: Synthetic oligonucleotide
auuuaguuaguuguuuggu

SEQ ID NO: 686238 - RNA, 19 nt, Artificial Sequence
  Description of Artificial Sequence: Synthetic oligonucleotide
caugaaacuacacugagau

SEQ ID NO: 686239 - RNA, 19 nt, Artificial Sequence
  Description of Artificial Sequence: Synthetic oligonucleotide
aagaaauuugaacccuaua

SEQ ID NO: 686240 - RNA, 19 nt, Artificial Sequence
  Description of Artificial Sequence: Synthetic oligonucleotide
ucaaugcuuugauaucuga

SEQ ID NO: 686241 - RNA, 19 nt, Artificial Sequence
  Description of Artificial Sequence: Synthetic oligonucleotide
gaaaagucagaguccccug

SEQ ID NO: 686242 - RNA, 19 nt, Artificial Sequence
  Description of Artificial Sequence: Synthetic oligonucleotide
agucagaguccccugccgg

SEQ ID NO: 686243 - RNA, 19 nt, Artificial Sequence
  Description of Artificial Sequence: Synthetic oligonucleotide
agcagguuccccuuaagaa

SEQ ID NO: 686244 - RNA, 19 nt, Artificial Sequence
  Description of Artificial Sequence: Synthetic oligonucleotide
uaguuaguuguuuggucca

SEQ ID NO: 686245 - RNA, 19 nt, Artificial Sequence
  Description of Artificial Sequence: Synthetic oligonucleotide
caagggaaacauuccacug

SEQ ID NO: 686246 - RNA, 19 nt, Artificial Sequence
  Description of Artificial Sequence: Synthetic oligonucleotide
uuaguuguuugguccagaa

SEQ ID NO: 686247 - RNA, 19 nt, Artificial Sequence
  Description of Artificial Sequence: Synthetic oligonucleotide
agaauagucuacagaagug

SEQ ID NO: 686248 - RNA, 19 nt, Artificial Sequence
  Description of Artificial Sequence: Synthetic oligonucleotide
gauuccugaaaaucaaccu

SEQ ID NO: 686249 - RNA, 19 nt, Artificial Sequence
  Description of Artificial Sequence: Synthetic oligonucleotide
ggagauucugauuaacuca

SEQ ID NO: 686250 - RNA, 19 nt, Artificial Sequence
  Description of Artificial Sequence: Synthetic oligonucleotide
auccacuauuauuaagugu

SEQ ID NO: 686251 - RNA, 19 nt, Artificial Sequence
  Description of Artificial Sequence: Synthetic oligonucleotide
aucugggagagacacccag

SEQ ID NO: 686252 - RNA, 19 nt, Artificial Sequence
  Description of Artificial Sequence: Synthetic oligonucleotide
ucugaagacuucccuggcu

SEQ ID NO: 686253 - RNA, 19 nt, Artificial Sequence
  Description of Artificial Sequence: Synthetic oligonucleotide
aaaggggugaggcuuugua

SEQ ID NO: 686254 - RNA, 19 nt, Artificial Sequence
  Description of Artificial Sequence: Synthetic oligonucleotide
agugcuacuuguggcuucc

SEQ ID NO: 686255 - RNA, 19 nt, Artificial Sequence
  Description of Artificial Sequence: Synthetic oligonucleotide
agaaacgaaccuucagcca

SEQ ID NO: 686256 - RNA, 19 nt, Artificial Sequence
  Description of Artificial Sequence: Synthetic oligonucleotide
gauaucugaaguuuauuuu

SEQ ID NO: 686257 - RNA, 19 nt, Artificial Sequence
  Description of Artificial Sequence: Synthetic oligonucleotide
aggggugaggcuuuguaga

SEQ ID NO: 686258 - RNA, 19 nt, Artificial Sequence
  Description of Artificial Sequence: Synthetic oligonucleotide
ucaaggugagucaguaaau

SEQ ID NO: 686259 - RNA, 19 nt, Artificial Sequence
  Description of Artificial Sequence: Synthetic oligonucleotide
ugugugagcuccaguuuca

SEQ ID NO: 686260 - RNA, 19 nt, Artificial Sequence
  Description of Artificial Sequence: Synthetic oligonucleotide
uggaugucucagcugggcc

SEQ ID NO: 686261 - RNA, 19 nt, Artificial Sequence
  Description of Artificial Sequence: Synthetic oligonucleotide
gaaacuacacugagaugcc

SEQ ID NO: 686262 - RNA, 19 nt, Artificial Sequence
  Description of Artificial Sequence: Synthetic oligonucleotide
ugucaacaugcauggaacu

SEQ ID NO: 686263 - RNA, 19 nt, Artificial Sequence
  Description of Artificial Sequence: Synthetic oligonucleotide
uggcuucuauaauccauag

SEQ ID NO: 686264 - RNA, 19 nt, Artificial Sequence
  Description of Artificial Sequence: Synthetic oligonucleotide
cuuugucagcaauccaaag

SEQ ID NO: 686265 - RNA, 19 nt, Artificial Sequence
  Description of Artificial Sequence: Synthetic oligonucleotide
uugguaggagccaucuccu

SEQ ID NO: 686266 - RNA, 19 nt, Artificial Sequence
  Description of Artificial Sequence: Synthetic oligonucleotide
cuacaugccagcccagccc

SEQ ID NO: 686267 - RNA, 19 nt, Artificial Sequence
  Description of Artificial Sequence: Synthetic oligonucleotide
guuuccaggguaaaacaug

SEQ ID NO: 686268 - RNA, 19 nt, Artificial Sequence
  Description of Artificial Sequence: Synthetic oligonucleotide
uucaaguauucuaccuuaa

SEQ ID NO: 686269 - RNA, 19 nt, Artificial Sequence
  Description of Artificial Sequence: Synthetic oligonucleotide
aguaaccuugagaaacagg

SEQ ID NO: 686270 - RNA, 19 nt, Artificial Sequence
  Description of Artificial Sequence: Synthetic oligonucleotide
ucaacaaguuuaaggucau

SEQ ID NO: 686271 - RNA, 19 nt, Artificial Sequence
  Description of Artificial Sequence: Synthetic oligonucleotide
ucuuugguaggagccaucu

SEQ ID NO: 686272 - RNA, 19 nt, Artificial Sequence
  Description of Artificial Sequence: Synthetic oligonucleotide
uccacuguacucugucagc

SEQ ID NO: 686273 - RNA, 19 nt, Artificial Sequence
  Description of Artificial Sequence: Synthetic oligonucleotide
uguggaugucucagcuggg

SEQ ID NO: 686274 - RNA, 19 nt, Artificial Sequence
  Description of Artificial Sequence: Synthetic oligonucleotide
gagagcaagcgcagaauag

SEQ ID NO: 686275 - RNA, 19 nt, Artificial Sequence
  Description of Artificial Sequence: Synthetic oligonucleotide
aagacuucccuggcucugg

SEQ ID NO: 686276 - RNA, 19 nt, Artificial Sequence
  Description of Artificial Sequence: Synthetic oligonucleotide
gagaaacaggaggagaaca

SEQ ID NO: 686277 - RNA, 19 nt, Artificial Sequence
  Description of Artificial Sequence: Synthetic oligonucleotide
ugagaaugagcuguugaau

SEQ ID NO: 686278 - RNA, 19 nt, Artificial Sequence
  Description of Artificial Sequence: Synthetic oligonucleotide
gagguaugggcacgcauac

SEQ ID NO: 686279 - RNA, 19 nt, Artificial Sequence
  Description of Artificial Sequence: Synthetic oligonucleotide
ugauuaacucaguaaccuu

SEQ ID NO: 686280 - RNA, 19 nt, Artificial Sequence
  Description of Artificial Sequence: Synthetic oligonucleotide
gagaacagaucaaggugag

SEQ ID NO: 686281 - RNA, 19 nt, Artificial Sequence
  Description of Artificial Sequence: Synthetic oligonucleotide
uuaggagauucugauuaac

SEQ ID NO: 686282 - RNA, 19 nt, Artificial Sequence
  Description of Artificial Sequence: Synthetic oligonucleotide
caacaugcauggaacucag

SEQ ID NO: 686283 - RNA, 19 nt, Artificial Sequence
  Description of Artificial Sequence: Synthetic oligonucleotide
gcaacuacaacaggagagg

SEQ ID NO: 686284 - RNA, 19 nt, Artificial Sequence
  Description of Artificial Sequence: Synthetic oligonucleotide
uuacaccuccaacaagaaa

SEQ ID NO: 686285 - RNA, 19 nt, Artificial Sequence
  Description of Artificial Sequence: Synthetic oligonucleotide
agcgcagaauagucuacag

SEQ ID NO: 686286 - RNA, 19 nt, Artificial Sequence
  Description of Artificial Sequence: Synthetic oligonucleotide
acaacaggagagguauggg

SEQ ID NO: 686287 - RNA, 19 nt, Artificial Sequence
  Description of Artificial Sequence: Synthetic oligonucleotide
agagcaagcgcagaauagu

SEQ ID NO: 686288 - RNA, 19 nt, Artificial Sequence
  Description of Artificial Sequence: Synthetic oligonucleotide
auuaacucaguaaccuuga

SEQ ID NO: 686289 - RNA, 19 nt, Artificial Sequence
  Description of Artificial Sequence: Synthetic oligonucleotide
ucugggagagacacccaga

SEQ ID NO: 686290 - RNA, 19 nt, Artificial Sequence
  Description of Artificial Sequence: Synthetic oligonucleotide
guuguuugguccagaagug

SEQ ID NO: 686291 - RNA, 19 nt, Artificial Sequence
  Description of Artificial Sequence: Synthetic oligonucleotide
aaguggcuucuauaaucca

SEQ ID NO: 686292 - RNA, 19 nt, Artificial Sequence
  Description of Artificial Sequence: Synthetic oligonucleotide
cuguugaauuaggagauuc

SEQ ID NO: 686293 - RNA, 19 nt, Artificial Sequence
  Description of Artificial Sequence: Synthetic oligonucleotide
auuaggagauucugauuaa

SEQ ID NO: 686294 - RNA, 19 nt, Artificial Sequence
  Description of Artificial Sequence: Synthetic oligonucleotide
gaggcuuuguagacucugg

SEQ ID NO: 686295 - RNA, 19 nt, Artificial Sequence
  Description of Artificial Sequence: Synthetic oligonucleotide
ccaggguaaaacauguuug

SEQ ID NO: 686296 - RNA, 19 nt, Artificial Sequence
  Description of Artificial Sequence: Synthetic oligonucleotide
augaaacuacacugagaug

SEQ ID NO: 686297 - RNA, 19 nt, Artificial Sequence
  Description of Artificial Sequence: Synthetic oligonucleotide
gcauacaggcuucccaugg

SEQ ID NO: 686298 - RNA, 19 nt, Artificial Sequence
  Description of Artificial Sequence: Synthetic oligonucleotide
gcacaagaaaccuuuguca

SEQ ID NO: 686299 - RNA, 19 nt, Artificial Sequence
  Description of Artificial Sequence: Synthetic oligonucleotide
ggaaguaagcauugguuuc

SEQ ID NO: 686300 - RNA, 19 nt, Artificial Sequence
  Description of Artificial Sequence: Synthetic oligonucleotide
cagaauagucuacagaagu

SEQ ID NO: 686301 - RNA, 19 nt, Artificial Sequence
  Description of Artificial Sequence: Synthetic oligonucleotide
cagaagcucaauaaaauau

SEQ ID NO: 686302 - RNA, 19 nt, Artificial Sequence
  Description of Artificial Sequence: Synthetic oligonucleotide
agagacacccagaauguca

SEQ ID NO: 686303 - RNA, 19 nt, Artificial Sequence
  Description of Artificial Sequence: Synthetic oligonucleotide
uuagaagggcacacagcuc

SEQ ID NO: 686304 - RNA, 19 nt, Artificial Sequence
  Description of Artificial Sequence: Synthetic oligonucleotide
gugagaaugagcuguugaa

SEQ ID NO: 686305 - RNA, 19 nt, Artificial Sequence
  Description of Artificial Sequence: Synthetic oligonucleotide
agucaguaaaugucaggaa

SEQ ID NO: 686306 - RNA, 19 nt, Artificial Sequence
  Description of Artificial Sequence: Synthetic oligonucleotide
accuugagaaacaggagga

SEQ ID NO: 686307 - RNA, 19 nt, Artificial Sequence
  Description of Artificial Sequence: Synthetic oligonucleotide
cccuauaagacaaaggaaa

SEQ ID NO: 686308 - RNA, 19 nt, Artificial Sequence
  Description of Artificial Sequence: Synthetic oligonucleotide
ucuguucaauaaugacaug

SEQ ID NO: 686309 - RNA, 19 nt, Artificial Sequence
  Description of Artificial Sequence: Synthetic oligonucleotide
aacuacacugagaugccau

SEQ ID NO: 686310 - RNA, 19 nt, Artificial Sequence
  Description of Artificial Sequence: Synthetic oligonucleotide
agggaaacauuccacugua

SEQ ID NO: 686311 - RNA, 19 nt, Artificial Sequence
  Description of Artificial Sequence: Synthetic oligonucleotide
ugccaaucuugauuccuga

SEQ ID NO: 686312 - RNA, 19 nt, Artificial Sequence
  Description of Artificial Sequence: Synthetic oligonucleotide
uccagaaguggcuucuaua

SEQ ID NO: 686313 - RNA, 19 nt, Artificial Sequence
  Description of Artificial Sequence: Synthetic oligonucleotide
acauguuugcacauuuagu

SEQ ID NO: 686314 - RNA, 19 nt, Artificial Sequence
  Description of Artificial Sequence: Synthetic oligonucleotide
acacccagaaugucaacau

SEQ ID NO: 686315 - RNA, 19 nt, Artificial Sequence
  Description of Artificial Sequence: Synthetic oligonucleotide
gagaaugagcuguugaauu

SEQ ID NO: 686316 - RNA, 19 nt, Artificial Sequence
  Description of Artificial Sequence: Synthetic oligonucleotide
uuucuacaugccagcccag

SEQ ID NO: 686317 - RNA, 19 nt, Artificial Sequence
  Description of Artificial Sequence: Synthetic oligonucleotide
aagcgcagaauagucuaca

SEQ ID NO: 686318 - RNA, 19 nt, Artificial Sequence
  Description of Artificial Sequence: Synthetic oligonucleotide
ucucuccccagauucaguu

SEQ ID NO: 686319 - RNA, 19 nt, Artificial Sequence
  Description of Artificial Sequence: Synthetic oligonucleotide
ggagaacagaucaagguga

SEQ ID NO: 686320 - RNA, 19 nt, Artificial Sequence
  Description of Artificial Sequence: Synthetic oligonucleotide
auuccacuguacucuguca

SEQ ID NO: 686321 - RNA, 19 nt, Artificial Sequence
  Description of Artificial Sequence: Synthetic oligonucleotide
cugccaaucuugauuccug

SEQ ID NO: 686322 - RNA, 19 nt, Artificial Sequence
  Description of Artificial Sequence: Synthetic oligonucleotide
aagaggaggcaaggcaaug

SEQ ID NO: 686323 - RNA, 19 nt, Artificial Sequence
  Description of Artificial Sequence: Synthetic oligonucleotide
gaggaggcaaggcaaugga

SEQ ID NO: 686324 - RNA, 19 nt, Artificial Sequence
  Description of Artificial Sequence: Synthetic oligonucleotide
cuguuuccaggguaaaaca

SEQ ID NO: 686325 - RNA, 19 nt, Artificial Sequence
  Description of Artificial Sequence: Synthetic oligonucleotide
cuuugauaucugaaguuua

SEQ ID NO: 686326 - RNA, 19 nt, Artificial Sequence
  Description of Artificial Sequence: Synthetic oligonucleotide
gauucaguuuuggaaguaa

SEQ ID NO: 686327 - RNA, 19 nt, Artificial Sequence
  Description of Artificial Sequence: Synthetic oligonucleotide
acgcauacaggcuucccau

SEQ ID NO: 686328 - RNA, 19 nt, Artificial Sequence
  Description of Artificial Sequence: Synthetic oligonucleotide
aguaagcauugguuucugu

SEQ ID NO: 686329 - RNA, 19 nt, Artificial Sequence
  Description of Artificial Sequence: Synthetic oligonucleotide
ugcccuucaagagcagaag

SEQ ID NO: 686330 - RNA, 19 nt, Artificial Sequence
  Description of Artificial Sequence: Synthetic oligonucleotide
uggaagcaacagcaacuac

SEQ ID NO: 686331 - RNA, 19 nt, Artificial Sequence
  Description of Artificial Sequence: Synthetic oligonucleotide
uucuacaugccagcccagc

SEQ ID NO: 686332 - RNA, 19 nt, Artificial Sequence
  Description of Artificial Sequence: Synthetic oligonucleotide
ugggcacgcauacaggcuu

SEQ ID NO: 686333 - RNA, 19 nt, Artificial Sequence
  Description of Artificial Sequence: Synthetic oligonucleotide
aggguaaaacauguuugca

SEQ ID NO: 686334 - RNA, 19 nt, Artificial Sequence
  Description of Artificial Sequence: Synthetic oligonucleotide
ggugagucaguaaauguca

SEQ ID NO: 686335 - RNA, 19 nt, Artificial Sequence
  Description of Artificial Sequence: Synthetic oligonucleotide
aguuaguuguuugguccag

SEQ ID NO: 686336 - RNA, 19 nt, Artificial Sequence
  Description of Artificial Sequence: Synthetic oligonucleotide
gguuucuguccuuuuccag

SEQ ID NO: 686337 - RNA, 19 nt, Artificial Sequence
  Description of Artificial Sequence: Synthetic oligonucleotide
caggauuagcugugugagc

SEQ ID NO: 686338 - RNA, 19 nt, Artificial Sequence
  Description of Artificial Sequence: Synthetic oligonucleotide
auaauccauagcaggaaaa

SEQ ID NO: 686339 - RNA, 19 nt, Artificial Sequence
  Description of Artificial Sequence: Synthetic oligonucleotide
caagcgcagaauagucuac

SEQ ID NO: 686340 - RNA, 19 nt, Artificial Sequence
  Description of Artificial Sequence: Synthetic oligonucleotide
agacacccagaaugucaac

SEQ ID NO: 686341 - RNA, 19 nt, Artificial Sequence
  Description of Artificial Sequence: Synthetic oligonucleotide
gugagucaguaaaugucag

SEQ ID NO: 686342 - RNA, 19 nt, Artificial Sequence
  Description of Artificial Sequence: Synthetic oligonucleotide
guaugggcacgcauacagg

SEQ ID NO: 686343 - RNA, 19 nt, Artificial Sequence
  Description of Artificial Sequence: Synthetic oligonucleotide
ugucagcacaagaaaccuu

SEQ ID NO: 686344 - RNA, 19 nt, Artificial Sequence
  Description of Artificial Sequence: Synthetic oligonucleotide
gaacaagaugugagaauga

SEQ ID NO: 686345 - RNA, 19 nt, Artificial Sequence
  Description of Artificial Sequence: Synthetic oligonucleotide
caauaaugacaugaaacua

SEQ ID NO: 686346 - RNA, 19 nt, Artificial Sequence
  Description of Artificial Sequence: Synthetic oligonucleotide
cucugaagacuucccuggc

SEQ ID NO: 686347 - RNA, 19 nt, Artificial Sequence
  Description of Artificial Sequence: Synthetic oligonucleotide
acuacacugagaugccauu

SEQ ID NO: 686348 - RNA, 19 nt, Artificial Sequence
  Description of Artificial Sequence: Synthetic oligonucleotide
agccaaaagcugaggagag

SEQ ID NO: 686349 - RNA, 19 nt, Artificial Sequence
  Description of Artificial Sequence: Synthetic oligonucleotide
cugagaugccauuuacaga

SEQ ID NO: 686350 - RNA, 19 nt, Artificial Sequence
  Description of Artificial Sequence: Synthetic oligonucleotide
cugauuaacucaguaaccu

SEQ ID NO: 686351 - RNA, 19 nt, Artificial Sequence
  Description of Artificial Sequence: Synthetic oligonucleotide
gaagacuucccuggcucug

SEQ ID NO: 686352 - RNA, 19 nt, Artificial Sequence
  Description of Artificial Sequence: Synthetic oligonucleotide
ccauagcaggaaaacaaac

SEQ ID NO: 686353 - RNA, 19 nt, Artificial Sequence
  Description of Artificial Sequence: Synthetic oligonucleotide
gucaacaugcauggaacuc

SEQ ID NO: 686354 - RNA, 19 nt, Artificial Sequence
  Description of Artificial Sequence: Synthetic oligonucleotide
aacuacaacaggagaggua

SEQ ID NO: 686355 - RNA, 19 nt, Artificial Sequence
  Description of Artificial Sequence: Synthetic oligonucleotide
cagaagucaacaaguuuaa

SEQ ID NO: 686356 - RNA, 19 nt, Artificial Sequence
  Description of Artificial Sequence: Synthetic oligonucleotide
caguuacaccuccaacaag

SEQ ID NO: 686357 - RNA, 19 nt, Artificial Sequence
  Description of Artificial Sequence: Synthetic oligonucleotide
uuugcacauuuaguuaguu

SEQ ID NO: 686358 - RNA, 19 nt, Artificial Sequence
  Description of Artificial Sequence: Synthetic oligonucleotide
aagaaaccuuugucagcaa

SEQ ID NO: 686359 - RNA, 19 nt, Artificial Sequence
  Description of Artificial Sequence: Synthetic oligonucleotide
gagacacccagaaugucaa

SEQ ID NO: 686360 - RNA, 19 nt, Artificial Sequence
  Description of Artificial Sequence: Synthetic oligonucleotide
gagcaagcgcagaauaguc

SEQ ID NO: 686361 - RNA, 19 nt, Artificial Sequence
  Description of Artificial Sequence: Synthetic oligonucleotide
aaacauguuugcacauuua

SEQ ID NO: 686362 - RNA, 19 nt, Artificial Sequence
  Description of Artificial Sequence: Synthetic oligonucleotide
ccaggauuagcugugugag

SEQ ID NO: 686363 - RNA, 19 nt, Artificial Sequence
  Description of Artificial Sequence: Synthetic oligonucleotide
cuauaauccauagcaggaa

SEQ ID NO: 686364 - RNA, 19 nt, Artificial Sequence
  Description of Artificial Sequence: Synthetic oligonucleotide
caucuccuuacagugcaac

SEQ ID NO: 686365 - RNA, 19 nt, Artificial Sequence
  Description of Artificial Sequence: Synthetic oligonucleotide
auacuuagaagggcacaca

SEQ ID NO: 686366 - RNA, 19 nt, Artificial Sequence
  Description of Artificial Sequence: Synthetic oligonucleotide
acgaaccuucagccaaaag

SEQ ID NO: 686367 - RNA, 19 nt, Artificial Sequence
  Description of Artificial Sequence: Synthetic oligonucleotide
uccuuacagugcaacuuuu

SEQ ID NO: 686368 - RNA, 19 nt, Artificial Sequence
  Description of Artificial Sequence: Synthetic oligonucleotide
acucaguaaccuugagaaa

SEQ ID NO: 686369 - RNA, 19 nt, Artificial Sequence
  Description of Artificial Sequence: Synthetic oligonucleotide
agcaauccaaaggggugag

SEQ ID NO: 686370 - RNA, 19 nt, Artificial Sequence
  Description of Artificial Sequence: Synthetic oligonucleotide
cacugagaugccauuuaca

SEQ ID NO: 686371 - RNA, 19 nt, Artificial Sequence
  Description of Artificial Sequence: Synthetic oligonucleotide
gcuuucuacaugccagccc

SEQ ID NO: 686372 - RNA, 19 nt, Artificial Sequence
  Description of Artificial Sequence: Synthetic oligonucleotide
caguaaccuugagaaacag

SEQ ID NO: 686373 - RNA, 19 nt, Artificial Sequence
  Description of Artificial Sequence: Synthetic oligonucleotide
agagguaugggcacgcaua

SEQ ID NO: 686374 - RNA, 19 nt, Artificial Sequence
  Description of Artificial Sequence: Synthetic oligonucleotide
ggcuucuauaauccauagc

SEQ ID NO: 686375 - RNA, 19 nt, Artificial Sequence
  Description of Artificial Sequence: Synthetic oligonucleotide
guacucugucagcacaaga

SEQ ID NO: 686376 - RNA, 19 nt, Artificial Sequence
  Description of Artificial Sequence: Synthetic oligonucleotide
agucuacagaagugcuacu

SEQ ID NO: 686377 - RNA, 19 nt, Artificial Sequence
  Description of Artificial Sequence: Synthetic oligonucleotide
agcaagcgcagaauagucu

SEQ ID NO: 686378 - RNA, 19 nt, Artificial Sequence
  Description of Artificial Sequence: Synthetic oligonucleotide
acccuauaagacaaaggaa

SEQ ID NO: 686379 - RNA, 19 nt, Artificial Sequence
  Description of Artificial Sequence: Synthetic oligonucleotide
gguuucuguucaauaauga

SEQ ID NO: 686380 - RNA, 19 nt, Artificial Sequence
  Description of Artificial Sequence: Synthetic oligonucleotide
gcagaauagucuacagaag

SEQ ID NO: 686381 - RNA, 19 nt, Artificial Sequence
  Description of Artificial Sequence: Synthetic oligonucleotide
cuacaacaggagagguaug

SEQ ID NO: 686382 - RNA, 19 nt, Artificial Sequence
  Description of Artificial Sequence: Synthetic oligonucleotide
acaagaaauuugaacccua

SEQ ID NO: 686383 - RNA, 19 nt, Artificial Sequence
  Description of Artificial Sequence: Synthetic oligonucleotide
aaacgaaccuucagccaaa

SEQ ID NO: 686384 - RNA, 19 nt, Artificial Sequence
  Description of Artificial Sequence: Synthetic oligonucleotide
ggaugucucagcugggcca

SEQ ID NO: 686385 - RNA, 19 nt, Artificial Sequence
  Description of Artificial Sequence: Synthetic oligonucleotide
ccagaaguggcuucuauaa

SEQ ID NO: 686386 - RNA, 19 nt, Artificial Sequence
  Description of Artificial Sequence: Synthetic oligonucleotide
cccagauucaguuuuggaa

SEQ ID NO: 686387 - RNA, 19 nt, Artificial Sequence
  Description of Artificial Sequence: Synthetic oligonucleotide
aggcaaggcaauggaagca

SEQ ID NO: 686388 - RNA, 19 nt, Artificial Sequence
  Description of Artificial Sequence: Synthetic oligonucleotide
cacuauuauuaaguguuaa

SEQ ID NO: 686389 - RNA, 19 nt, Artificial Sequence
  Description of Artificial Sequence: Synthetic oligonucleotide
caggagagguaugggcacg

SEQ ID NO: 686390 - RNA, 19 nt, Artificial Sequence
  Description of Artificial Sequence: Synthetic oligonucleotide
auagucuacagaagugcua

SEQ ID NO: 686391 - RNA, 19 nt, Artificial Sequence
  Description of Artificial Sequence: Synthetic oligonucleotide
cuuugguaggagccaucuc

SEQ ID NO: 686392 - RNA, 19 nt, Artificial Sequence
  Description of Artificial Sequence: Synthetic oligonucleotide
agaguccccugccggucuc

SEQ ID NO: 686393 - RNA, 19 nt, Artificial Sequence
  Description of Artificial Sequence: Synthetic oligonucleotide
cccuucaagagcagaaguc

SEQ ID NO: 686394 - RNA, 19 nt, Artificial Sequence
  Description of Artificial Sequence: Synthetic oligonucleotide
gucagcaauccaaaggggu

SEQ ID NO: 686395 - RNA, 19 nt, Artificial Sequence
  Description of Artificial Sequence: Synthetic oligonucleotide
aaucaaccuuccugcccuu

SEQ ID NO: 686396 - RNA, 19 nt, Artificial Sequence
  Description of Artificial Sequence: Synthetic oligonucleotide
guagacucuggugauauuu

SEQ ID NO: 686397 - RNA, 19 nt, Artificial Sequence
  Description of Artificial Sequence: Synthetic oligonucleotide
uuccaggguaaaacauguu

SEQ ID NO: 686398 - RNA, 19 nt, Artificial Sequence
  Description of Artificial Sequence: Synthetic oligonucleotide
aacgaaccuucagccaaaa

SEQ ID NO: 686399 - RNA, 19 nt, Artificial Sequence
  Description of Artificial Sequence: Synthetic oligonucleotide
agaacagaucaaggugagu

SEQ ID NO: 686400 - RNA, 19 nt, Artificial Sequence
  Description of Artificial Sequence: Synthetic oligonucleotide
gcaagcgcagaauagucua

SEQ ID NO: 686401 - RNA, 19 nt, Artificial Sequence
  Description of Artificial Sequence: Synthetic oligonucleotide
aaucugggagagacaccca

SEQ ID NO: 686402 - RNA, 19 nt, Artificial Sequence
  Description of Artificial Sequence: Synthetic oligonucleotide
guuaguuguuugguccaga

SEQ ID NO: 686403 - RNA, 19 nt, Artificial Sequence
  Description of Artificial Sequence: Synthetic oligonucleotide
guggcuucuauaauccaua

SEQ ID NO: 686404 - RNA, 19 nt, Artificial Sequence
  Description of Artificial Sequence: Synthetic oligonucleotide
augugagaaugagcuguug

SEQ ID NO: 686405 - RNA, 19 nt, Artificial Sequence
  Description of Artificial Sequence: Synthetic oligonucleotide
caagaaauuugaacccuau

SEQ ID NO: 686406 - RNA, 19 nt, Artificial Sequence
  Description of Artificial Sequence: Synthetic oligonucleotide
gagagacacccagaauguc

SEQ ID NO: 686407 - RNA, 19 nt, Artificial Sequence
  Description of Artificial Sequence: Synthetic oligonucleotide
ggagagcaagcgcagaaua

SEQ ID NO: 686408 - RNA, 19 nt, Artificial Sequence
  Description of Artificial Sequence: Synthetic oligonucleotide
agguuccccuuaagaaacg

SEQ ID NO: 686409 - RNA, 19 nt, Artificial Sequence
  Description of Artificial Sequence: Synthetic oligonucleotide
cagauucaguuuuggaagu

SEQ ID NO: 686410 - RNA, 19 nt, Artificial Sequence
  Description of Artificial Sequence: Synthetic oligonucleotide
guuuaaggucauagagcca

SEQ ID NO: 686411 - RNA, 19 nt, Artificial Sequence
  Description of Artificial Sequence: Synthetic oligonucleotide
augucaggaagaggaggca

SEQ ID NO: 686412 - RNA, 19 nt, Artificial Sequence
  Description of Artificial Sequence: Synthetic oligonucleotide
ccaucuacacacucuagaa

SEQ ID NO: 686413 - RNA, 19 nt, Artificial Sequence
  Description of Artificial Sequence: Synthetic oligonucleotide
agauucaguuuuggaagua

SEQ ID NO: 686414 - RNA, 19 nt, Artificial Sequence
  Description of Artificial Sequence: Synthetic oligonucleotide
uguagacucuggugauauu

SEQ ID NO: 686415 - RNA, 19 nt, Artificial Sequence
  Description of Artificial Sequence: Synthetic oligonucleotide
agauucugauuaacucagu

SEQ ID NO: 686416 - RNA, 19 nt, Artificial Sequence
  Description of Artificial Sequence: Synthetic oligonucleotide
ccaaucuugauuccugaaa

SEQ ID NO: 686417 - RNA, 19 nt, Artificial Sequence
  Description of Artificial Sequence: Synthetic oligonucleotide
ccggucucuccccagauuc

SEQ ID NO: 686418 - RNA, 19 nt, Artificial Sequence
  Description of Artificial Sequence: Synthetic oligonucleotide
guuacaccuccaacaagaa

SEQ ID NO: 686419 - RNA, 19 nt, Artificial Sequence
  Description of Artificial Sequence: Synthetic oligonucleotide
guaugacaagcagguuccc

SEQ ID NO: 686420 - RNA, 19 nt, Artificial Sequence
  Description of Artificial Sequence: Synthetic oligonucleotide
aggagagcaagcgcagaau

SEQ ID NO: 686421 - RNA, 19 nt, Artificial Sequence
  Description of Artificial Sequence: Synthetic oligonucleotide
gguaggagccaucuccuua

SEQ ID NO: 686422 - RNA, 19 nt, Artificial Sequence
  Description of Artificial Sequence: Synthetic oligonucleotide
gaaugucaacaugcaugga

SEQ ID NO: 686423 - RNA, 19 nt, Artificial Sequence
  Description of Artificial Sequence: Synthetic oligonucleotide
gacaagcagguuccccuua

SEQ ID NO: 686424 - RNA, 19 nt, Artificial Sequence
  Description of Artificial Sequence: Synthetic oligonucleotide
gugcaacuuuucaagggaa

SEQ ID NO: 686425 - RNA, 19 nt, Artificial Sequence
  Description of Artificial Sequence: Synthetic oligonucleotide
ccuugagaaacaggaggag

SEQ ID NO: 686426 - RNA, 19 nt, Artificial Sequence
  Description of Artificial Sequence: Synthetic oligonucleotide
augggcacgcauacaggcu

SEQ ID NO: 686427 - RNA, 19 nt, Artificial Sequence
  Description of Artificial Sequence: Synthetic oligonucleotide
auuagcugugugagcucca

SEQ ID NO: 686428 - RNA, 19 nt, Artificial Sequence
  Description of Artificial Sequence: Synthetic oligonucleotide
cagcccagccccuggugug

SEQ ID NO: 686429 - RNA, 19 nt, Artificial Sequence
  Description of Artificial Sequence: Synthetic oligonucleotide
gcgcagaauagucuacaga

SEQ ID NO: 686430 - RNA, 19 nt, Artificial Sequence
  Description of Artificial Sequence: Synthetic oligonucleotide
gagagguaugggcacgcau

SEQ ID NO: 686431 - RNA, 19 nt, Artificial Sequence
  Description of Artificial Sequence: Synthetic oligonucleotide
guuugguccagaaguggcu

SEQ ID NO: 686432 - RNA, 19 nt, Artificial Sequence
  Description of Artificial Sequence: Synthetic oligonucleotide
ugccggucucuccccagau

SEQ ID NO: 686433 - RNA, 19 nt, Artificial Sequence
  Description of Artificial Sequence: Synthetic oligonucleotide
guuccccuuaagaaacgaa

SEQ ID NO: 686434 - RNA, 19 nt, Artificial Sequence
  Description of Artificial Sequence: Synthetic oligonucleotide
cacuggcugccaaucuuga

SEQ ID NO: 686435 - RNA, 19 nt, Artificial Sequence
  Description of Artificial Sequence: Synthetic oligonucleotide
ggauuagcugugugagcuc

SEQ ID NO: 686436 - RNA, 19 nt, Artificial Sequence
  Description of Artificial Sequence: Synthetic oligonucleotide
gaagaggaggcaaggcaau

SEQ ID NO: 686437 - RNA, 19 nt, Artificial Sequence
  Description of Artificial Sequence: Synthetic oligonucleotide
gacucuggugauauuucau

SEQ ID NO: 686438 - RNA, 19 nt, Artificial Sequence
  Description of Artificial Sequence: Synthetic oligonucleotide
cccagaaugucaacaugca

SEQ ID NO: 686439 - RNA, 19 nt, Artificial Sequence
  Description of Artificial Sequence: Synthetic oligonucleotide
ccuuugucagcaauccaaa

SEQ ID NO: 686440 - RNA, 19 nt, Artificial Sequence
  Description of Artificial Sequence: Synthetic oligonucleotide
caugccagcccagccccug

SEQ ID NO: 686441 - RNA, 19 nt, Artificial Sequence
  Description of Artificial Sequence: Synthetic oligonucleotide
gucauagagccaggagcca

SEQ ID NO: 686442 - RNA, 19 nt, Artificial Sequence
  Description of Artificial Sequence: Synthetic oligonucleotide
ccugugcuuucuacaugcc

SEQ ID NO: 686443 - RNA, 19 nt, Artificial Sequence
  Description of Artificial Sequence: Synthetic oligonucleotide
guuugcacauuuaguuagu

SEQ ID NO: 686444 - RNA, 19 nt, Artificial Sequence
  Description of Artificial Sequence: Synthetic oligonucleotide
ggagagacacccagaaugu

SEQ ID NO: 686445 - RNA, 19 nt, Artificial Sequence
  Description of Artificial Sequence: Synthetic oligonucleotide
gcaauccaaaggggugagg

SEQ ID NO: 686446 - RNA, 19 nt, Artificial Sequence
  Description of Artificial Sequence: Synthetic oligonucleotide
cuccuuacagugcaacuuu

SEQ ID NO: 686447 - RNA, 19 nt, Artificial Sequence
  Description of Artificial Sequence: Synthetic oligonucleotide
agguaugggcacgcauaca

SEQ ID NO: 686448 - RNA, 19 nt, Artificial Sequence
  Description of Artificial Sequence: Synthetic oligonucleotide
acauuccacuguacucugu

SEQ ID NO: 686449 - RNA, 19 nt, Artificial Sequence
  Description of Artificial Sequence: Synthetic oligonucleotide
aguccccugccggucucuc

SEQ ID NO: 686450 - RNA, 19 nt, Artificial Sequence
  Description of Artificial Sequence: Synthetic oligonucleotide
ccaggagccaggauuagcu

SEQ ID NO: 686451 - RNA, 19 nt, Artificial Sequence
  Description of Artificial Sequence: Synthetic oligonucleotide
gaagugcuacuuguggcuu

SEQ ID NO: 686452 - RNA, 19 nt, Artificial Sequence
  Description of Artificial Sequence: Synthetic oligonucleotide
gccaaaagcugaggagagc

SEQ ID NO: 686453 - RNA, 19 nt, Artificial Sequence
  Description of Artificial Sequence: Synthetic oligonucleotide
caaccuuccugcccuucaa

SEQ ID NO: 686454 - RNA, 19 nt, Artificial Sequence
  Description of Artificial Sequence: Synthetic oligonucleotide
caacuacaacaggagaggu

SEQ ID NO: 686455 - RNA, 19 nt, Artificial Sequence
  Description of Artificial Sequence: Synthetic oligonucleotide
ggcuucccauggaacagug

SEQ ID NO: 686456 - RNA, 19 nt, Artificial Sequence
  Description of Artificial Sequence: Synthetic oligonucleotide
ccugaaaaugacuuuucuu

SEQ ID NO: 686457 - RNA, 19 nt, Artificial Sequence
  Description of Artificial Sequence: Synthetic oligonucleotide
gcaaggcaauggaagcaac

SEQ ID NO: 686458 - RNA, 19 nt, Artificial Sequence
  Description of Artificial Sequence: Synthetic oligonucleotide
gcccuucaagagcagaagu

SEQ ID NO: 686459 - RNA, 19 nt, Artificial Sequence
  Description of Artificial Sequence: Synthetic oligonucleotide
acuggccuuuggccuccga

SEQ ID NO: 686460 - RNA, 19 nt, Artificial Sequence
  Description of Artificial Sequence: Synthetic oligonucleotide
guccagaaguggcuucuau

SEQ ID NO: 686461 - RNA, 19 nt, Artificial Sequence
  Description of Artificial Sequence: Synthetic oligonucleotide
ggcacgcauacaggcuucc

SEQ ID NO: 686462 - RNA, 19 nt, Artificial Sequence
  Description of Artificial Sequence: Synthetic oligonucleotide
ccccuuaagaaacgaaccu

SEQ ID NO: 686463 - RNA, 19 nt, Artificial Sequence
  Description of Artificial Sequence: Synthetic oligonucleotide
ccacuauuauuaaguguua

SEQ ID NO: 686464 - RNA, 19 nt, Artificial Sequence
  Description of Artificial Sequence: Synthetic oligonucleotide
cuacacugagaugccauuu

SEQ ID NO: 686465 - RNA, 19 nt, Artificial Sequence
  Description of Artificial Sequence: Synthetic oligonucleotide
cugccggucucuccccaga

SEQ ID NO: 686466 - RNA, 19 nt, Artificial Sequence
  Description of Artificial Sequence: Synthetic oligonucleotide
cgcauacaggcuucccaug

SEQ ID NO: 686467 - RNA, 19 nt, Artificial Sequence
  Description of Artificial Sequence: Synthetic oligonucleotide
caacaaguuuaaggucaua

SEQ ID NO: 686468 - RNA, 19 nt, Artificial Sequence
  Description of Artificial Sequence: Synthetic oligonucleotide
cuuguggcuuccugugcuu

SEQ ID NO: 686469 - RNA, 19 nt, Artificial Sequence
  Description of Artificial Sequence: Synthetic oligonucleotide
gagccaggauuagcugugu

SEQ ID NO: 686470 - RNA, 19 nt, Artificial Sequence
  Description of Artificial Sequence: Synthetic oligonucleotide
ggagagguaugggcacgca

SEQ ID NO: 686471 - RNA, 19 nt, Artificial Sequence
  Description of Artificial Sequence: Synthetic oligonucleotide
acaugccagcccagccccu

SEQ ID NO: 686472 - RNA, 19 nt, Artificial Sequence
  Description of Artificial Sequence: Synthetic oligonucleotide
cauguaugacaagcagguu

SEQ ID NO: 686473 - RNA, 19 nt, Artificial Sequence
  Description of Artificial Sequence: Synthetic oligonucleotide
gcuucccauggaacaguga

SEQ ID NO: 686474 - RNA, 19 nt, Artificial Sequence
  Description of Artificial Sequence: Synthetic oligonucleotide
ucccuggcucuggcuuuaa

SEQ ID NO: 686475 - RNA, 19 nt, Artificial Sequence
  Description of Artificial Sequence: Synthetic oligonucleotide
gggcacgcauacaggcuuc

SEQ ID NO: 686476 - RNA, 19 nt, Artificial Sequence
  Description of Artificial Sequence: Synthetic oligonucleotide
gggugaggcuuuguagacu

SEQ ID NO: 686477 - RNA, 19 nt, Artificial Sequence
  Description of Artificial Sequence: Synthetic oligonucleotide
gugaggcuuuguagacucu

SEQ ID NO: 686478 - RNA, 19 nt, Artificial Sequence
  Description of Artificial Sequence: Synthetic oligonucleotide
caaaggggugaggcuuugu

SEQ ID NO: 686479 - RNA, 19 nt, Artificial Sequence
  Description of Artificial Sequence: Synthetic oligonucleotide
gguccagaaguggcuucua

SEQ ID NO: 686480 - RNA, 19 nt, Artificial Sequence
  Description of Artificial Sequence: Synthetic oligonucleotide
gaguccccugccggucucu

SEQ ID NO: 686481 - RNA, 19 nt, Artificial Sequence
  Description of Artificial Sequence: Synthetic oligonucleotide
cggucucuccccagauuca

SEQ ID NO: 686482 - RNA, 19 nt, Artificial Sequence
  Description of Artificial Sequence: Synthetic oligonucleotide
cccuggcucuggcuuuaaa

SEQ ID NO: 686483 - RNA, 19 nt, Artificial Sequence
  Description of Artificial Sequence: Synthetic oligonucleotide
uauauaauacaucagggcc

SEQ ID NO: 686484 - RNA, 19 nt, Artificial Sequence
  Description of Artificial Sequence: Synthetic oligonucleotide
auauauaauacaucagggc

SEQ ID NO: 686485 - RNA, 19 nt, Artificial Sequence
  Description of Artificial Sequence: Synthetic oligonucleotide
aaagcaaugauccccagca

SEQ ID NO: 686486 - RNA, 19 nt, Artificial Sequence
  Description of Artificial Sequence: Synthetic oligonucleotide
ucucauaagucucagaaca

SEQ ID NO: 686487 - RNA, 19 nt, Artificial Sequence
  Description of Artificial Sequence: Synthetic oligonucleotide
gauucgagcagaaagacgg

SEQ ID NO: 686488 - RNA, 19 nt, Artificial Sequence
  Description of Artificial Sequence: Synthetic oligonucleotide
uucuaggcuacccugaugg

SEQ ID NO: 686489 - RNA, 19 nt, Artificial Sequence
  Description of Artificial Sequence: Synthetic oligonucleotide
uccaauacgauccucacug

SEQ ID NO: 686490 - RNA, 19 nt, Artificial Sequence
  Description of Artificial Sequence: Synthetic oligonucleotide
uaccauuccaauacgaucc

SEQ ID NO: 686491 - RNA, 19 nt, Artificial Sequence
  Description of Artificial Sequence: Synthetic oligonucleotide
aagucaacgcuauuaagca

SEQ ID NO: 686492 - RNA, 19 nt, Artificial Sequence
  Description of Artificial Sequence: Synthetic oligonucleotide
uaugcaccuacucucagag

SEQ ID NO: 686493 - RNA, 19 nt, Artificial Sequence
  Description of Artificial Sequence: Synthetic oligonucleotide
uuaucucggagaaggaacg

SEQ ID NO: 686494 - RNA, 19 nt, Artificial Sequence
  Description of Artificial Sequence: Synthetic oligonucleotide
gaagucaacgcuauuaagc

SEQ ID NO: 686495 - RNA, 19 nt, Artificial Sequence
  Description of Artificial Sequence: Synthetic oligonucleotide
uaagacgaagacauccagg

SEQ ID NO: 686496 - RNA, 19 nt, Artificial Sequence
  Description of Artificial Sequence: Synthetic oligonucleotide
ucuggauucccacaccucc

SEQ ID NO: 686497 - RNA, 19 nt, Artificial Sequence
  Description of Artificial Sequence: Synthetic oligonucleotide
auacgauccucacuguagc

SEQ ID NO: 686498 - RNA, 19 nt, Artificial Sequence
  Description of Artificial Sequence: Synthetic oligonucleotide
ucuaaggugacagcugugg

SEQ ID NO: 686499 - RNA, 19 nt, Artificial Sequence
  Description of Artificial Sequence: Synthetic oligonucleotide
aauacgauccucacuguag

SEQ ID NO: 686500 - RNA, 19 nt, Artificial Sequence
  Description of Artificial Sequence: Synthetic oligonucleotide
uuaagacgaagacauccag

SEQ ID NO: 686501 - RNA, 19 nt, Artificial Sequence
  Description of Artificial Sequence: Synthetic oligonucleotide
cuuaucucggagaaggaac

SEQ ID NO: 686502 - RNA, 19 nt, Artificial Sequence
  Description of Artificial Sequence: Synthetic oligonucleotide
ugcgagugguaccacaagg

SEQ ID NO: 686503 - RNA, 19 nt, Artificial Sequence
  Description of Artificial Sequence: Synthetic oligonucleotide
gaaggaacgacugacccag

SEQ ID NO: 686504 - RNA, 19 nt, Artificial Sequence
  Description of Artificial Sequence: Synthetic oligonucleotide
auaccaaagcaccauaggu

SEQ ID NO: 686505 - RNA, 19 nt, Artificial Sequence
  Description of Artificial Sequence: Synthetic oligonucleotide
  modified_base (7)..(7): a, c, u, g, unknown or other
gaaagunuggggaagcauc

SEQ ID NO: 686506 - RNA, 19 nt, Artificial Sequence
  Description of Artificial Sequence: Synthetic oligonucleotide
  modified_base (9)..(9): a, c, u, g, unknown or other
ucuugcucnccuuugcugc

SEQ ID NO: 686507 - RNA, 19 nt, Artificial Sequence
  Description of Artificial Sequence: Synthetic oligonucleotide
aaacgguagaugcacgugu

SEQ ID NO: 686508 - RNA, 19 nt, Artificial Sequence
  Description of Artificial Sequence: Synthetic oligonucleotide
uuggggaaugguaagcuug

SEQ ID NO: 686509 - RNA, 19 nt, Artificial Sequence
  Description of Artificial Sequence: Synthetic oligonucleotide
aaguacaaaguagacccuc

SEQ ID NO: 686510 - RNA, 19 nt, Artificial Sequence
  Description of Artificial Sequence: Synthetic oligonucleotide
ugagaauucuauauauaau

SEQ ID NO: 686511 - RNA, 19 nt, Artificial Sequence
  Description of Artificial Sequence: Synthetic oligonucleotide
gagaaggaacgacugaccc

SEQ ID NO: 686512 - RNA, 19 nt, Artificial Sequence
  Description of Artificial Sequence: Synthetic oligonucleotide
gaacgacugacccagucag

SEQ ID NO: 686513 - RNA, 19 nt, Artificial Sequence
  Description of Artificial Sequence: Synthetic oligonucleotide
uccuccugauuccagggcg

SEQ ID NO: 686514 - RNA, 19 nt, Artificial Sequence
  Description of Artificial Sequence: Synthetic oligonucleotide
gaaagaauccgcugcucag

SEQ ID NO: 686515 - RNA, 19 nt, Artificial Sequence
  Description of Artificial Sequence: Synthetic oligonucleotide
gaaaacucagcagcaagag

SEQ ID NO: 686516 - RNA, 19 nt, Artificial Sequence
  Description of Artificial Sequence: Synthetic oligonucleotide
auuccaauacgauccucac

SEQ ID NO: 686517 - RNA, 19 nt, Artificial Sequence
  Description of Artificial Sequence: Synthetic oligonucleotide
  modified_base (2)..(2): a, c, u, g, unknown or other
unuggggaagcaucucugg

SEQ ID NO: 686518 - RNA, 19 nt, Artificial Sequence
  Description of Artificial Sequence: Synthetic oligonucleotide
gaugcacguguacucaggg

SEQ ID NO: 686519 - RNA, 19 nt, Artificial Sequence
  Description of Artificial Sequence: Synthetic oligonucleotide
uccaggauacaagaaaccc

SEQ ID NO: 686520 - RNA, 19 nt, Artificial Sequence
  Description of Artificial Sequence: Synthetic oligonucleotide
gagauagugcuguugggug

SEQ ID NO: 686521 - RNA, 19 nt, Artificial Sequence
  Description of Artificial Sequence: Synthetic oligonucleotide
acccuuaucucggagaagg

SEQ ID NO: 686522 - RNA, 19 nt, Artificial Sequence
  Description of Artificial Sequence: Synthetic oligonucleotide
accugguuaagacgaagac

SEQ ID NO: 686523 - RNA, 19 nt, Artificial Sequence
  Description of Artificial Sequence: Synthetic oligonucleotide
cagggaauccuacacacgc

SEQ ID NO: 686524 - RNA, 19 nt, Artificial Sequence
  Description of Artificial Sequence: Synthetic oligonucleotide
uauccuccaggauacaaga

SEQ ID NO: 686525 - RNA, 19 nt, Artificial Sequence
  Description of Artificial Sequence: Synthetic oligonucleotide
ucauaagucucagaacacc

SEQ ID NO: 686526 - RNA, 19 nt, Artificial Sequence
  Description of Artificial Sequence: Synthetic oligonucleotide
agaaccugcaaagucaucu

SEQ ID NO: 686527 - RNA, 19 nt, Artificial Sequence
  Description of Artificial Sequence: Synthetic oligonucleotide
  modified_base (4)..(4): a, c, u, g, unknown or other
agunuggggaagcaucucu

SEQ ID NO: 686528 - RNA, 19 nt, Artificial Sequence
  Description of Artificial Sequence: Synthetic oligonucleotide
uauuaagcaugugugggca

SEQ ID NO: 686529 - RNA, 19 nt, Artificial Sequence
  Description of Artificial Sequence: Synthetic oligonucleotide
ucuaccauuccaauacgau

SEQ ID NO: 686530 - RNA, 19 nt, Artificial Sequence
  Description of Artificial Sequence: Synthetic oligonucleotide
aggcacaaggucucaaagg

SEQ ID NO: 686531 - RNA, 19 nt, Artificial Sequence
  Description of Artificial Sequence: Synthetic oligonucleotide
guaagcuugcuccaggcac

SEQ ID NO: 686532 - RNA, 19 nt, Artificial Sequence
  Description of Artificial Sequence: Synthetic oligonucleotide
gcuagcagcaggcacaagg

SEQ ID NO: 686533 - RNA, 19 nt, Artificial Sequence
  Description of Artificial Sequence: Synthetic oligonucleotide
uaccaaagcaccauaggua

SEQ ID NO: 686534 - RNA, 19 nt, Artificial Sequence
  Description of Artificial Sequence: Synthetic oligonucleotide
aaagacggaccacagcaaa

SEQ ID NO: 686535 - RNA, 19 nt, Artificial Sequence
  Description of Artificial Sequence: Synthetic oligonucleotide
uauacccgggaaagaaucc

SEQ ID NO: 686536 - RNA, 19 nt, Artificial Sequence
  Description of Artificial Sequence: Synthetic oligonucleotide
  modified_base (17)..(17): a, c, u, g, unknown or other
ugcucagccugaaagunug

SEQ ID NO: 686537 - RNA, 19 nt, Artificial Sequence
  Description of Artificial Sequence: Synthetic oligonucleotide
ucgagcagaaagacggacc

SEQ ID NO: 686538 - RNA, 19 nt, Artificial Sequence
  Description of Artificial Sequence: Synthetic oligonucleotide
gaauccuacacacgcugcc

SEQ ID NO: 686539 - RNA, 19 nt, Artificial Sequence
  Description of Artificial Sequence: Synthetic oligonucleotide
auauaauacaucagggccu

SEQ ID NO: 686540 - RNA, 19 nt, Artificial Sequence
  Description of Artificial Sequence: Synthetic oligonucleotide
  modified_base (6)..(6): a, c, u, g, unknown or other
aaagunuggggaagcaucu

SEQ ID NO: 686541 - RNA, 19 nt, Artificial Sequence
  Description of Artificial Sequence: Synthetic oligonucleotide
uguggggcggauucgagca

SEQ ID NO: 686542 - RNA, 19 nt, Artificial Sequence
  Description of Artificial Sequence: Synthetic oligonucleotide
uggaagucaacgcuauuaa

SEQ ID NO: 686543 - RNA, 19 nt, Artificial Sequence
  Description of Artificial Sequence: Synthetic oligonucleotide
gguuaagacgaagacaucc

SEQ ID NO: 686544 - RNA, 19 nt, Artificial Sequence
  Description of Artificial Sequence: Synthetic oligonucleotide
accauagguaagaacaguc

SEQ ID NO: 686545 - RNA, 19 nt, Artificial Sequence
  Description of Artificial Sequence: Synthetic oligonucleotide
uccuccgucaccccaacca

SEQ ID NO: 686546 - RNA, 19 nt, Artificial Sequence
  Description of Artificial Sequence: Synthetic oligonucleotide
aaacagccuagguccuccc

SEQ ID NO: 686547 - RNA, 19 nt, Artificial Sequence
  Description of Artificial Sequence: Synthetic oligonucleotide
uacccugauggaauggccc

SEQ ID NO: 686548 - RNA, 19 nt, Artificial Sequence
  Description of Artificial Sequence: Synthetic oligonucleotide
cuaccauuccaauacgauc

SEQ ID NO: 686549 - RNA, 19 nt, Artificial Sequence
  Description of Artificial Sequence: Synthetic oligonucleotide
agcaaugauccccagcacu

SEQ ID NO: 686550 - RNA, 19 nt, Artificial Sequence
  Description of Artificial Sequence: Synthetic oligonucleotide
acaagaaaccccaggggac

SEQ ID NO: 686551 - RNA, 19 nt, Artificial Sequence
  Description of Artificial Sequence: Synthetic oligonucleotide
caggauacaagaaacccca

SEQ ID NO: 686552 - RNA, 19 nt, Artificial Sequence
  Description of Artificial Sequence: Synthetic oligonucleotide
uggauucccacaccuccgg

SEQ ID NO: 686553 - RNA, 19 nt, Artificial Sequence
  Description of Artificial Sequence: Synthetic oligonucleotide
gucaacgcuauuaagcaug

SEQ ID NO: 686554 - RNA, 19 nt, Artificial Sequence
  Description of Artificial Sequence: Synthetic oligonucleotide
gcuauuaagcauguguggg

SEQ ID NO: 686555 - RNA, 19 nt, Artificial Sequence
  Description of Artificial Sequence: Synthetic oligonucleotide
cuggggaccuucuagguug

SEQ ID NO: 686556 - RNA, 19 nt, Artificial Sequence
  Description of Artificial Sequence: Synthetic oligonucleotide
ucuccgugcacccggaaac

SEQ ID NO: 686557 - RNA, 19 nt, Artificial Sequence
  Description of Artificial Sequence: Synthetic oligonucleotide
uaagcuugcuccaggcaca

SEQ ID NO: 686558 - RNA, 19 nt, Artificial Sequence
  Description of Artificial Sequence: Synthetic oligonucleotide
ggcggauucgagcagaaag

SEQ ID NO: 686559 - RNA, 19 nt, Artificial Sequence
  Description of Artificial Sequence: Synthetic oligonucleotide
agggaugaaguacaaagua

SEQ ID NO: 686560 - RNA, 19 nt, Artificial Sequence
  Description of Artificial Sequence: Synthetic oligonucleotide
uacugauaacacuggcucc

SEQ ID NO: 686561 - RNA, 19 nt, Artificial Sequence
  Description of Artificial Sequence: Synthetic oligonucleotide
acgauccucacuguagcgc

SEQ ID NO: 686562 - RNA, 19 nt, Artificial Sequence
  Description of Artificial Sequence: Synthetic oligonucleotide
cugcaauguaugcagcccg

SEQ ID NO: 686563 - RNA, 19 nt, Artificial Sequence
  Description of Artificial Sequence: Synthetic oligonucleotide
agacggaccacagcaaaac

SEQ ID NO: 686564 - RNA, 19 nt, Artificial Sequence
  Description of Artificial Sequence: Synthetic oligonucleotide
cagcaaaacccugaggucc

SEQ ID NO: 686565 - RNA, 19 nt, Artificial Sequence
  Description of Artificial Sequence: Synthetic oligonucleotide
agucuaccauuccaauacg

SEQ ID NO: 686566 - RNA, 19 nt, Artificial Sequence
  Description of Artificial Sequence: Synthetic oligonucleotide
uacacacgcugccucuucg

SEQ ID NO: 686567 - RNA, 19 nt, Artificial Sequence
  Description of Artificial Sequence: Synthetic oligonucleotide
ggauacaagaaaccccagg

SEQ ID NO: 686568 - RNA, 19 nt, Artificial Sequence
  Description of Artificial Sequence: Synthetic oligonucleotide
acgaagacauccaggaggg

SEQ ID NO: 686569 - RNA, 19 nt, Artificial Sequence
  Description of Artificial Sequence: Synthetic oligonucleotide
agucagggaacugggauuc

SEQ ID NO: 686570 - RNA, 19 nt, Artificial Sequence
  Description of Artificial Sequence: Synthetic oligonucleotide
agguucagugagaagugcc

SEQ ID NO: 686571 - RNA, 19 nt, Artificial Sequence
  Description of Artificial Sequence: Synthetic oligonucleotide
agggauagaugcugggaag

SEQ ID NO: 686572 - RNA, 19 nt, Artificial Sequence
  Description of Artificial Sequence: Synthetic oligonucleotide
uacgauccucacuguagcg

SEQ ID NO: 686573 - RNA, 19 nt, Artificial Sequence
  Description of Artificial Sequence: Synthetic oligonucleotide
gaagggugagccucccagg

SEQ ID NO: 686574 - RNA, 19 nt, Artificial Sequence
  Description of Artificial Sequence: Synthetic oligonucleotide
cauuccaauacgauccuca

SEQ ID NO: 686575 - RNA, 19 nt, Artificial Sequence
  Description of Artificial Sequence: Synthetic oligonucleotide
auaagucucagaacaccgg

SEQ ID NO: 686576 - RNA, 19 nt, Artificial Sequence
  Description of Artificial Sequence: Synthetic oligonucleotide
cuaaggugacagcuguggg

SEQ ID NO: 686577 - RNA, 19 nt, Artificial Sequence
  Description of Artificial Sequence: Synthetic oligonucleotide
cugguuaagacgaagacau

SEQ ID NO: 686578 - RNA, 19 nt, Artificial Sequence
  Description of Artificial Sequence: Synthetic oligonucleotide
ucaacgcuauuaagcaugu

SEQ ID NO: 686579 - RNA, 19 nt, Artificial Sequence
  Description of Artificial Sequence: Synthetic oligonucleotide
acgacugacccagucaggg

SEQ ID NO: 686580 - RNA, 19 nt, Artificial Sequence
  Description of Artificial Sequence: Synthetic oligonucleotide
aaagggcuagugggcaggc

SEQ ID NO: 686581 - RNA, 19 nt, Artificial Sequence
  Description of Artificial Sequence: Synthetic oligonucleotide
  modified_base (3)..(3): a, c, u, g, unknown or other
ucnccuuugcugcccacca

SEQ ID NO: 686582 - RNA, 19 nt, Artificial Sequence
  Description of Artificial Sequence: Synthetic oligonucleotide
uaggcuacccugauggaau

SEQ ID NO: 686583 - RNA, 19 nt, Artificial Sequence
  Description of Artificial Sequence: Synthetic oligonucleotide
ugauggaauggccccaaaa

SEQ ID NO: 686584 - RNA, 19 nt, Artificial Sequence
  Description of Artificial Sequence: Synthetic oligonucleotide
gacccagucagggaacugg

SEQ ID NO: 686585 - RNA, 19 nt, Artificial Sequence
  Description of Artificial Sequence: Synthetic oligonucleotide
ugagcaugcaacucaucuc

SEQ ID NO: 686586 - RNA, 19 nt, Artificial Sequence
  Description of Artificial Sequence: Synthetic oligonucleotide
cucauaagucucagaacac

SEQ ID NO: 686587 - RNA, 19 nt, Artificial Sequence
  Description of Artificial Sequence: Synthetic oligonucleotide
cuccaggauacaagaaacc

SEQ ID NO: 686588 - RNA, 19 nt, Artificial Sequence
  Description of Artificial Sequence: Synthetic oligonucleotide
auaacacuggcuccuccug

SEQ ID NO: 686589 - RNA, 19 nt, Artificial Sequence
  Description of Artificial Sequence: Synthetic oligonucleotide
caacccaccaguagagaag

SEQ ID NO: 686590 - RNA, 19 nt, Artificial Sequence
  Description of Artificial Sequence: Synthetic oligonucleotide
agaaggaacgacugaccca

SEQ ID NO: 686591 - RNA, 19 nt, Artificial Sequence
  Description of Artificial Sequence: Synthetic oligonucleotide
ugugccaagaagugucccu

SEQ ID NO: 686592 - RNA, 19 nt, Artificial Sequence
  Description of Artificial Sequence: Synthetic oligonucleotide
aggaacgacugacccaguc

SEQ ID NO: 686593 - RNA, 19 nt, Artificial Sequence
  Description of Artificial Sequence: Synthetic oligonucleotide
uagaugcacguguacucag

SEQ ID NO: 686594 - RNA, 19 nt, Artificial Sequence
  Description of Artificial Sequence: Synthetic oligonucleotide
agcaaaacccugagguccc

SEQ ID NO: 686595 - RNA, 19 nt, Artificial Sequence
  Description of Artificial Sequence: Synthetic oligonucleotide
gauuccagggcguagucua

SEQ ID NO: 686596 - RNA, 19 nt, Artificial Sequence
  Description of Artificial Sequence: Synthetic oligonucleotide
aacccaccaguagagaaga

SEQ ID NO: 686597 - RNA, 19 nt, Artificial Sequence
  Description of Artificial Sequence: Synthetic oligonucleotide
uuccaauacgauccucacu

SEQ ID NO: 686598 - RNA, 19 nt, Artificial Sequence
  Description of Artificial Sequence: Synthetic oligonucleotide
cuggaccugguuaagacga

SEQ ID NO: 686599 - RNA, 19 nt, Artificial Sequence
  Description of Artificial Sequence: Synthetic oligonucleotide
uggggugcuaugcaccuac

SEQ ID NO: 686600 - RNA, 19 nt, Artificial Sequence
  Description of Artificial Sequence: Synthetic oligonucleotide
acgcuauuaagcaugugug

SEQ ID NO: 686601 - RNA, 19 nt, Artificial Sequence
  Description of Artificial Sequence: Synthetic oligonucleotide
ugcaauguaugcagcccga

SEQ ID NO: 686602 - RNA, 19 nt, Artificial Sequence
  Description of Artificial Sequence: Synthetic oligonucleotide
aaguagacccucaccccac

SEQ ID NO: 686603 - RNA, 19 nt, Artificial Sequence
  Description of Artificial Sequence: Synthetic oligonucleotide
ugggcacaugcucuaaggu

SEQ ID NO: 686604 - RNA, 19 nt, Artificial Sequence
  Description of Artificial Sequence: Synthetic oligonucleotide
  modified_base (5)..(5): a, c, u, g, unknown or other
aagunuggggaagcaucuc

SEQ ID NO: 686605 - RNA, 19 nt, Artificial Sequence
  Description of Artificial Sequence: Synthetic oligonucleotide
auccuacacacgcugccuc

SEQ ID NO: 686606 - RNA, 19 nt, Artificial Sequence
  Description of Artificial Sequence: Synthetic oligonucleotide
agccguauggcuuccuucu

SEQ ID NO: 686607 - RNA, 19 nt, Artificial Sequence
  Description of Artificial Sequence: Synthetic oligonucleotide
caauguaugcagcccgaag

SEQ ID NO: 686608 - RNA, 19 nt, Artificial Sequence
  Description of Artificial Sequence: Synthetic oligonucleotide
uauaauacaucagggccuu

SEQ ID NO: 686609 - RNA, 19 nt, Artificial Sequence
  Description of Artificial Sequence: Synthetic oligonucleotide
cuggauucccacaccuccg

SEQ ID NO: 686610 - RNA, 19 nt, Artificial Sequence
  Description of Artificial Sequence: Synthetic oligonucleotide
gagcaugcaacucaucucu

SEQ ID NO: 686611 - RNA, 19 nt, Artificial Sequence
  Description of Artificial Sequence: Synthetic oligonucleotide
gauccgaagcuccacaacu

SEQ ID NO: 686612 - RNA, 19 nt, Artificial Sequence
  Description of Artificial Sequence: Synthetic oligonucleotide
cucuguaggaguccacuac

SEQ ID NO: 686613 - RNA, 19 nt, Artificial Sequence
  Description of Artificial Sequence: Synthetic oligonucleotide
aauccuacacacgcugccu

SEQ ID NO: 686614 - RNA, 19 nt, Artificial Sequence
  Description of Artificial Sequence: Synthetic oligonucleotide
ggacaugagccucagacuc

SEQ ID NO: 686615 - RNA, 19 nt, Artificial Sequence
  Description of Artificial Sequence: Synthetic oligonucleotide
  modified_base (13)..(13): a, c, u, g, unknown or other
cagccugaaagunugggga

SEQ ID NO: 686616 - RNA, 19 nt, Artificial Sequence
  Description of Artificial Sequence: Synthetic oligonucleotide
gaaacgguagaugcacgug

SEQ ID NO: 686617 - RNA, 19 nt, Artificial Sequence
  Description of Artificial Sequence: Synthetic oligonucleotide
uacccgggaaagaauccgc

SEQ ID NO: 686618 - RNA, 19 nt, Artificial Sequence
  Description of Artificial Sequence: Synthetic oligonucleotide
caugcucuaaggugacagc

SEQ ID NO: 686619 - RNA, 19 nt, Artificial Sequence
  Description of Artificial Sequence: Synthetic oligonucleotide
caagaaaccccaggggacc

SEQ ID NO: 686620 - RNA, 19 nt, Artificial Sequence
  Description of Artificial Sequence: Synthetic oligonucleotide
gucucauaagucucagaac

SEQ ID NO: 686621 - RNA, 19 nt, Artificial Sequence
  Description of Artificial Sequence: Synthetic oligonucleotide
gacggaccacagcaaaacc

SEQ ID NO: 686622 - RNA, 19 nt, Artificial Sequence
  Description of Artificial Sequence: Synthetic oligonucleotide
ccaggauacaagaaacccc

SEQ ID NO: 686623 - RNA, 19 nt, Artificial Sequence
  Description of Artificial Sequence: Synthetic oligonucleotide
ugagaggcuuggacaaucu

SEQ ID NO: 686624 - RNA, 19 nt, Artificial Sequence
  Description of Artificial Sequence: Synthetic oligonucleotide
ggaagggugagccucccag

SEQ ID NO: 686625 - RNA, 19 nt, Artificial Sequence
  Description of Artificial Sequence: Synthetic oligonucleotide
gugcuaugcaccuacucuc

SEQ ID NO: 686626 - RNA, 19 nt, Artificial Sequence
  Description of Artificial Sequence: Synthetic oligonucleotide
cucagagcagggauagaug

SEQ ID NO: 686627 - RNA, 19 nt, Artificial Sequence
  Description of Artificial Sequence: Synthetic oligonucleotide
guauacccgggaaagaauc

SEQ ID NO: 686628 - RNA, 19 nt, Artificial Sequence
  Description of Artificial Sequence: Synthetic oligonucleotide
ugccaguuggaggaaaacu

SEQ ID NO: 686629 - RNA, 19 nt, Artificial Sequence
  Description of Artificial Sequence: Synthetic oligonucleotide
ucggagaaggaacgacuga

SEQ ID NO: 686630 - RNA, 19 nt, Artificial Sequence
  Description of Artificial Sequence: Synthetic oligonucleotide
  modified_base (19)..(19): a, c, u, g, unknown or other
uccggcugccucuugcucn

SEQ ID NO: 686631 - RNA, 19 nt, Artificial Sequence
  Description of Artificial Sequence: Synthetic oligonucleotide
guuaagacgaagacaucca

SEQ ID NO: 686632 - RNA, 19 nt, Artificial Sequence
  Description of Artificial Sequence: Synthetic oligonucleotide
gaaccugcaaagucaucuc

SEQ ID NO: 686633 - RNA, 19 nt, Artificial Sequence
  Description of Artificial Sequence: Synthetic oligonucleotide
  modified_base (8)..(8): a, c, u, g, unknown or other
ugaaagunuggggaagcau

SEQ ID NO: 686634 - RNA, 19 nt, Artificial Sequence
  Description of Artificial Sequence: Synthetic oligonucleotide
uccacuacuggcacccuua

SEQ ID NO: 686635 - RNA, 19 nt, Artificial Sequence
  Description of Artificial Sequence: Synthetic oligonucleotide
  modified_base (8)..(8): a, c, u, g, unknown or other
cuugcucnccuuugcugcc

SEQ ID NO: 686636 - RNA, 19 nt, Artificial Sequence
  Description of Artificial Sequence: Synthetic oligonucleotide
ucuucuaggcuacccugau

SEQ ID NO: 686637 - RNA, 19 nt, Artificial Sequence
  Description of Artificial Sequence: Synthetic oligonucleotide
agagaagaccaaagagccg

SEQ ID NO: 686638 - RNA, 19 nt, Artificial Sequence
  Description of Artificial Sequence: Synthetic oligonucleotide
gaacaccggguacugauaa

SEQ ID NO: 686639 - RNA, 19 nt, Artificial Sequence
  Description of Artificial Sequence: Synthetic oligonucleotide
augugccaagaaguguccc

SEQ ID NO: 686640 - RNA, 19 nt, Artificial Sequence
  Description of Artificial Sequence: Synthetic oligonucleotide
gauaacacuggcuccuccu

SEQ ID NO: 686641 - RNA, 19 nt, Artificial Sequence
  Description of Artificial Sequence: Synthetic oligonucleotide
augcucuaaggugacagcu

SEQ ID NO: 686642 - RNA, 19 nt, Artificial Sequence
  Description of Artificial Sequence: Synthetic oligonucleotide
gaguauacccgggaaagaa

SEQ ID NO: 686643 - RNA, 19 nt, Artificial Sequence
  Description of Artificial Sequence: Synthetic oligonucleotide
ggacaaucuuccugaagag

SEQ ID NO: 686644 - RNA, 19 nt, Artificial Sequence
  Description of Artificial Sequence: Synthetic oligonucleotide
agaagaccaaagagccggc

SEQ ID NO: 686645 - RNA, 19 nt, Artificial Sequence
  Description of Artificial Sequence: Synthetic oligonucleotide
ucccuuggggaaugguaag

SEQ ID NO: 686646 - RNA, 19 nt, Artificial Sequence
  Description of Artificial Sequence: Synthetic oligonucleotide
gggaguauacccgggaaag

SEQ ID NO: 686647 - RNA, 19 nt, Artificial Sequence
  Description of Artificial Sequence: Synthetic oligonucleotide
cucggggugacugcgagug

SEQ ID NO: 686648 - RNA, 19 nt, Artificial Sequence
  Description of Artificial Sequence: Synthetic oligonucleotide
ucaggcgguaccagguggu

SEQ ID NO: 686649 - RNA, 19 nt, Artificial Sequence
  Description of Artificial Sequence: Synthetic oligonucleotide
augacucggggugacugcg

SEQ ID NO: 686650 - RNA, 19 nt, Artificial Sequence
  Description of Artificial Sequence: Synthetic oligonucleotide
uggugcacuugcuccuccg

SEQ ID NO: 686651 - RNA, 19 nt, Artificial Sequence
  Description of Artificial Sequence: Synthetic oligonucleotide
ccggguacugauaacacug

SEQ ID NO: 686652 - RNA, 19 nt, Artificial Sequence
  Description of Artificial Sequence: Synthetic oligonucleotide
aguacaaaguagacccuca

SEQ ID NO: 686653 - RNA, 19 nt, Artificial Sequence
  Description of Artificial Sequence: Synthetic oligonucleotide
uacucucagagcagggaua

SEQ ID NO: 686654 - RNA, 19 nt, Artificial Sequence
  Description of Artificial Sequence: Synthetic oligonucleotide
agagaggcugcagcuuccc

SEQ ID NO: 686655 - RNA, 19 nt, Artificial Sequence
  Description of Artificial Sequence: Synthetic oligonucleotide
  modified_base (3)..(3): a, c, u, g, unknown or other
gunuggggaagcaucucug

SEQ ID NO: 686656 - RNA, 19 nt, Artificial Sequence
  Description of Artificial Sequence: Synthetic oligonucleotide
uggggaccuucuagguugg

SEQ ID NO: 686657 - RNA, 19 nt, Artificial Sequence
  Description of Artificial Sequence: Synthetic oligonucleotide
cacaaggucucaaagggcu

SEQ ID NO: 686658 - RNA, 19 nt, Artificial Sequence
  Description of Artificial Sequence: Synthetic oligonucleotide
cuugggcacaugcucuaag

SEQ ID NO: 686659 - RNA, 19 nt, Artificial Sequence
  Description of Artificial Sequence: Synthetic oligonucleotide
acaagacugagaauucuau

SEQ ID NO: 686660 - RNA, 19 nt, Artificial Sequence
  Description of Artificial Sequence: Synthetic oligonucleotide
agucaacgcuauuaagcau

SEQ ID NO: 686661 - RNA, 19 nt, Artificial Sequence
  Description of Artificial Sequence: Synthetic oligonucleotide
aacgacugacccagucagg

SEQ ID NO: 686662 - RNA, 19 nt, Artificial Sequence
  Description of Artificial Sequence: Synthetic oligonucleotide
gaccugugggccaugguac

SEQ ID NO: 686663 - RNA, 19 nt, Artificial Sequence
  Description of Artificial Sequence: Synthetic oligonucleotide
gagugguaccacaagggga

SEQ ID NO: 686664 - RNA, 19 nt, Artificial Sequence
  Description of Artificial Sequence: Synthetic oligonucleotide
aagucucagaacaccgggu

SEQ ID NO: 686665 - RNA, 19 nt, Artificial Sequence
  Description of Artificial Sequence: Synthetic oligonucleotide
gacaugagccucagacucc

SEQ ID NO: 686666 - RNA, 19 nt, Artificial Sequence
  Description of Artificial Sequence: Synthetic oligonucleotide
uagacccucaccccacauc

SEQ ID NO: 686667 - RNA, 19 nt, Artificial Sequence
  Description of Artificial Sequence: Synthetic oligonucleotide
accggguacugauaacacu

SEQ ID NO: 686668 - RNA, 19 nt, Artificial Sequence
  Description of Artificial Sequence: Synthetic oligonucleotide
agggaguauacccgggaaa

SEQ ID NO: 686669 - RNA, 19 nt, Artificial Sequence
  Description of Artificial Sequence: Synthetic oligonucleotide
ucucuguaggaguccacua

SEQ ID NO: 686670 - RNA, 19 nt, Artificial Sequence
  Description of Artificial Sequence: Synthetic oligonucleotide
gaagaccaaagagccggcc

SEQ ID NO: 686671 - RNA, 19 nt, Artificial Sequence
  Description of Artificial Sequence: Synthetic oligonucleotide
cacgcugccucuucguuuc

SEQ ID NO: 686672 - RNA, 19 nt, Artificial Sequence
  Description of Artificial Sequence: Synthetic oligonucleotide
guagucuaccauuccaaua

SEQ ID NO: 686673 - RNA, 19 nt, Artificial Sequence
  Description of Artificial Sequence: Synthetic oligonucleotide
gagcagggauagaugcugg

SEQ ID NO: 686674 - RNA, 19 nt, Artificial Sequence
  Description of Artificial Sequence: Synthetic oligonucleotide
cugagcaugcaacucaucu

SEQ ID NO: 686675 - RNA, 19 nt, Artificial Sequence
  Description of Artificial Sequence: Synthetic oligonucleotide
agaugcacguguacucagg

SEQ ID NO: 686676 - RNA, 19 nt, Artificial Sequence
  Description of Artificial Sequence: Synthetic oligonucleotide
  modified_base (12)..(12): a, c, u, g, unknown or other
agccugaaagunuggggaa

SEQ ID NO: 686677 - RNA, 19 nt, Artificial Sequence
  Description of Artificial Sequence: Synthetic oligonucleotide
cuguggggcggauucgagc

SEQ ID NO: 686678 - RNA, 19 nt, Artificial Sequence
  Description of Artificial Sequence: Synthetic oligonucleotide
uccccucucuucuaggcua

SEQ ID NO: 686679 - RNA, 19 nt, Artificial Sequence
  Description of Artificial Sequence: Synthetic oligonucleotide
ucuaggcuacccugaugga

SEQ ID NO: 686680 - RNA, 19 nt, Artificial Sequence
  Description of Artificial Sequence: Synthetic oligonucleotide
ugagaagugccuggaccug

SEQ ID NO: 686681 - RNA, 19 nt, Artificial Sequence
  Description of Artificial Sequence: Synthetic oligonucleotide
cacuggcuccuccugauuc

SEQ ID NO: 686682 - RNA, 19 nt, Artificial Sequence
  Description of Artificial Sequence: Synthetic oligonucleotide
uccuacacacgcugccucu

SEQ ID NO: 686683 - RNA, 19 nt, Artificial Sequence
  Description of Artificial Sequence: Synthetic oligonucleotide
  modified_base (4)..(4): a, c, u, g, unknown or other
cucnccuuugcugcccacc

SEQ ID NO: 686684 - RNA, 19 nt, Artificial Sequence
  Description of Artificial Sequence: Synthetic oligonucleotide
ggauucgagcagaaagacg

SEQ ID NO: 686685 - RNA, 19 nt, Artificial Sequence
  Description of Artificial Sequence: Synthetic oligonucleotide
gaccugguuaagacgaaga

SEQ ID NO: 686686 - RNA, 19 nt, Artificial Sequence
  Description of Artificial Sequence: Synthetic oligonucleotide
guuccagccguauggcuuc

SEQ ID NO: 686687 - RNA, 19 nt, Artificial Sequence
  Description of Artificial Sequence: Synthetic oligonucleotide
uccgucaccccaaccacuu

SEQ ID NO: 686688 - RNA, 19 nt, Artificial Sequence
  Description of Artificial Sequence: Synthetic oligonucleotide
aagaaaccccaggggaccu

SEQ ID NO: 686689 - RNA, 19 nt, Artificial Sequence
  Description of Artificial Sequence: Synthetic oligonucleotide
uccgugcacccggaaacgg

SEQ ID NO: 686690 - RNA, 19 nt, Artificial Sequence
  Description of Artificial Sequence: Synthetic oligonucleotide
gucucagaacaccggguac

SEQ ID NO: 686691 - RNA, 19 nt, Artificial Sequence
  Description of Artificial Sequence: Synthetic oligonucleotide
cacaaggggaugccgaaga

SEQ ID NO: 686692 - RNA, 19 nt, Artificial Sequence
  Description of Artificial Sequence: Synthetic oligonucleotide
ugcacccggaaacgguaga

SEQ ID NO: 686693 - RNA, 19 nt, Artificial Sequence
  Description of Artificial Sequence: Synthetic oligonucleotide
caccuacucucagagcagg

SEQ ID NO: 686694 - RNA, 19 nt, Artificial Sequence
  Description of Artificial Sequence: Synthetic oligonucleotide
gcgagugguaccacaaggg

SEQ ID NO: 686695 - RNA, 19 nt, Artificial Sequence
  Description of Artificial Sequence: Synthetic oligonucleotide
caccggguacugauaacac

SEQ ID NO: 686696 - RNA, 19 nt, Artificial Sequence
  Description of Artificial Sequence: Synthetic oligonucleotide
gugacugcgagugguacca

SEQ ID NO: 686697 - RNA, 19 nt, Artificial Sequence
  Description of Artificial Sequence: Synthetic oligonucleotide
uaucucggagaaggaacga

SEQ ID NO: 686698 - RNA, 19 nt, Artificial Sequence
  Description of Artificial Sequence: Synthetic oligonucleotide
acugagaauucuauauaua

SEQ ID NO: 686699 - RNA, 19 nt, Artificial Sequence
  Description of Artificial Sequence: Synthetic oligonucleotide
cuaugcaccuacucucaga

SEQ ID NO: 686700 - RNA, 19 nt, Artificial Sequence
  Description of Artificial Sequence: Synthetic oligonucleotide
ggugcuaugcaccuacucu

SEQ ID NO: 686701 - RNA, 19 nt, Artificial Sequence
  Description of Artificial Sequence: Synthetic oligonucleotide
acagccuagguccucccuu

SEQ ID NO: 686702 - RNA, 19 nt, Artificial Sequence
  Description of Artificial Sequence: Synthetic oligonucleotide
ggcaaaugugccaagaagu

SEQ ID NO: 686703 - RNA, 19 nt, Artificial Sequence
  Description of Artificial Sequence: Synthetic oligonucleotide
cuucguuucugcuccugga

SEQ ID NO: 686704 - RNA, 19 nt, Artificial Sequence
  Description of Artificial Sequence: Synthetic oligonucleotide
  modified_base (7)..(7): a, c, u, g, unknown or other
uugcucnccuuugcugccc

SEQ ID NO: 686705 - RNA, 19 nt, Artificial Sequence
  Description of Artificial Sequence: Synthetic oligonucleotide
  modified_base (6)..(6): a, c, u, g, unknown or other
ugcucnccuuugcugccca

SEQ ID NO: 686706 - RNA, 19 nt, Artificial Sequence
  Description of Artificial Sequence: Synthetic oligonucleotide
cgcuauuaagcaugugugg

SEQ ID NO: 686707 - RNA, 19 nt, Artificial Sequence
  Description of Artificial Sequence: Synthetic oligonucleotide
ggaacgacugacccaguca

SEQ ID NO: 686708 - RNA, 19 nt, Artificial Sequence
  Description of Artificial Sequence: Synthetic oligonucleotide
augcacguguacucagggu

SEQ ID NO: 686709 - RNA, 19 nt, Artificial Sequence
  Description of Artificial Sequence: Synthetic oligonucleotide
cucuaaggugacagcugug

SEQ ID NO: 686710 - RNA, 19 nt, Artificial Sequence
  Description of Artificial Sequence: Synthetic oligonucleotide
cuucuaggcuacccugaug

SEQ ID NO: 686711 - RNA, 19 nt, Artificial Sequence
  Description of Artificial Sequence: Synthetic oligonucleotide
cucuucuaggcuacccuga

SEQ ID NO: 686712 - RNA, 19 nt, Artificial Sequence
  Description of Artificial Sequence: Synthetic oligonucleotide
aguauacccgggaaagaau

SEQ ID NO: 686713 - RNA, 19 nt, Artificial Sequence
  Description of Artificial Sequence: Synthetic oligonucleotide
ggugacugcgagugguacc

SEQ ID NO: 686714 - RNA, 19 nt, Artificial Sequence
  Description of Artificial Sequence: Synthetic oligonucleotide
gagaaugacucggggugac

SEQ ID NO: 686715 - RNA, 19 nt, Artificial Sequence
  Description of Artificial Sequence: Synthetic oligonucleotide
gcuccagggaguauacccg

SEQ ID NO: 686716 - RNA, 19 nt, Artificial Sequence
  Description of Artificial Sequence: Synthetic oligonucleotide
aacgguagaugcacgugua

SEQ ID NO: 686717 - RNA, 19 nt, Artificial Sequence
  Description of Artificial Sequence: Synthetic oligonucleotide
agccuagguccucccuugg

SEQ ID NO: 686718 - RNA, 19 nt, Artificial Sequence
  Description of Artificial Sequence: Synthetic oligonucleotide
cagguggugccaacccacc

SEQ ID NO: 686719 - RNA, 19 nt, Artificial Sequence
  Description of Artificial Sequence: Synthetic oligonucleotide
gccaaggugggcugcaaug

SEQ ID NO: 686720 - RNA, 19 nt, Artificial Sequence
  Description of Artificial Sequence: Synthetic oligonucleotide
cucagaacaccggguacug

SEQ ID NO: 686721 - RNA, 19 nt, Artificial Sequence
  Description of Artificial Sequence: Synthetic oligonucleotide
cugagaggcuuggacaauc

SEQ ID NO: 686722 - RNA, 19 nt, Artificial Sequence
  Description of Artificial Sequence: Synthetic oligonucleotide
gacugcgagugguaccaca

SEQ ID NO: 686723 - RNA, 19 nt, Artificial Sequence
  Description of Artificial Sequence: Synthetic oligonucleotide
aggcuacccugauggaaug

SEQ ID NO: 686724 - RNA, 19 nt, Artificial Sequence
  Description of Artificial Sequence: Synthetic oligonucleotide
ugacgaucuggugcacuug

SEQ ID NO: 686725 - RNA, 19 nt, Artificial Sequence
  Description of Artificial Sequence: Synthetic oligonucleotide
cagccuagguccucccuug

SEQ ID NO: 686726 - RNA, 19 nt, Artificial Sequence
  Description of Artificial Sequence: Synthetic oligonucleotide
auuccagggcguagucuac

SEQ ID NO: 686727 - RNA, 19 nt, Artificial Sequence
  Description of Artificial Sequence: Synthetic oligonucleotide
gcaacucaucucucuguag

SEQ ID NO: 686728 - RNA, 19 nt, Artificial Sequence
  Description of Artificial Sequence: Synthetic oligonucleotide
agaauccgcugcucagccu

SEQ ID NO: 686729 - RNA, 19 nt, Artificial Sequence
  Description of Artificial Sequence: Synthetic oligonucleotide
ggcguagucuaccauucca

SEQ ID NO: 686730 - RNA, 19 nt, Artificial Sequence
  Description of Artificial Sequence: Synthetic oligonucleotide
acacacgcugccucuucgu

SEQ ID NO: 686731 - RNA, 19 nt, Artificial Sequence
  Description of Artificial Sequence: Synthetic oligonucleotide
gucuaccauuccaauacga

SEQ ID NO: 686732 - RNA, 19 nt, Artificial Sequence
  Description of Artificial Sequence: Synthetic oligonucleotide
agcaugcaacucaucucuc

SEQ ID NO: 686733 - RNA, 19 nt, Artificial Sequence
  Description of Artificial Sequence: Synthetic oligonucleotide
cugcgagugguaccacaag

SEQ ID NO: 686734 - RNA, 19 nt, Artificial Sequence
  Description of Artificial Sequence: Synthetic oligonucleotide
cagccguauggcuuccuuc

SEQ ID NO: 686735 - RNA, 19 nt, Artificial Sequence
  Description of Artificial Sequence: Synthetic oligonucleotide
ucagaacaccggguacuga

SEQ ID NO: 686736 - RNA, 19 nt, Artificial Sequence
  Description of Artificial Sequence: Synthetic oligonucleotide
cgcuccagggaguauaccc

SEQ ID NO: 686737 - RNA, 19 nt, Artificial Sequence
  Description of Artificial Sequence: Synthetic oligonucleotide
gcaccauagguaagaacag

SEQ ID NO: 686738 - RNA, 19 nt, Artificial Sequence
  Description of Artificial Sequence: Synthetic oligonucleotide
uggaccugguuaagacgaa

SEQ ID NO: 686739 - RNA, 19 nt, Artificial Sequence
  Description of Artificial Sequence: Synthetic oligonucleotide
cugauuccagggcguaguc

SEQ ID NO: 686740 - RNA, 19 nt, Artificial Sequence
  Description of Artificial Sequence: Synthetic oligonucleotide
agguggugccaacccacca

SEQ ID NO: 686741 - RNA, 19 nt, Artificial Sequence
  Description of Artificial Sequence: Synthetic oligonucleotide
cagacuccugagaggcuug

SEQ ID NO: 686742 - RNA, 19 nt, Artificial Sequence
  Description of Artificial Sequence: Synthetic oligonucleotide
acugcgagugguaccacaa

SEQ ID NO: 686743 - RNA, 19 nt, Artificial Sequence
  Description of Artificial Sequence: Synthetic oligonucleotide
aggauacaagaaaccccag

SEQ ID NO: 686744 - RNA, 19 nt, Artificial Sequence
  Description of Artificial Sequence: Synthetic oligonucleotide
gcagucgucaggcgguacc

SEQ ID NO: 686745 - RNA, 19 nt, Artificial Sequence
  Description of Artificial Sequence: Synthetic oligonucleotide
gguauguggccaucuuuga

SEQ ID NO: 686746 - RNA, 19 nt, Artificial Sequence
  Description of Artificial Sequence: Synthetic oligonucleotide
cuccgugcacccggaaacg

SEQ ID NO: 686747 - RNA, 19 nt, Artificial Sequence
  Description of Artificial Sequence: Synthetic oligonucleotide
aggugggcugcaauguaug

SEQ ID NO: 686748 - RNA, 19 nt, Artificial Sequence
  Description of Artificial Sequence: Synthetic oligonucleotide
acacgcugccucuucguuu

SEQ ID NO: 686749 - RNA, 19 nt, Artificial Sequence
  Description of Artificial Sequence: Synthetic oligonucleotide
caauacgauccucacugua

SEQ ID NO: 686750 - RNA, 19 nt, Artificial Sequence
  Description of Artificial Sequence: Synthetic oligonucleotide
agccccacuucaucugcca

SEQ ID NO: 686751 - RNA, 19 nt, Artificial Sequence
  Description of Artificial Sequence: Synthetic oligonucleotide
  modified_base (9)..(9): a, c, u, g, unknown or other
cugaaagunuggggaagca

SEQ ID NO: 686752 - RNA, 19 nt, Artificial Sequence
  Description of Artificial Sequence: Synthetic oligonucleotide
agcaguugccugggugcac

SEQ ID NO: 686753 - RNA, 19 nt, Artificial Sequence
  Description of Artificial Sequence: Synthetic oligonucleotide
uggggcggauucgagcaga

SEQ ID NO: 686754 - RNA, 19 nt, Artificial Sequence
  Description of Artificial Sequence: Synthetic oligonucleotide
gugggcugcaauguaugca

SEQ ID NO: 686755 - RNA, 19 nt, Artificial Sequence
  Description of Artificial Sequence: Synthetic oligonucleotide
aguugccugggugcacauc

SEQ ID NO: 686756 - RNA, 19 nt, Artificial Sequence
  Description of Artificial Sequence: Synthetic oligonucleotide
cuacacacgcugccucuuc

SEQ ID NO: 686757 - RNA, 19 nt, Artificial Sequence
  Description of Artificial Sequence: Synthetic oligonucleotide
cuaggcuacccugauggaa

SEQ ID NO: 686758 - RNA, 19 nt, Artificial Sequence
  Description of Artificial Sequence: Synthetic oligonucleotide
  modified_base (2)..(2): a, c, u, g, unknown or other
cnccuuugcugcccaccag

SEQ ID NO: 686759 - RNA, 19 nt, Artificial Sequence
  Description of Artificial Sequence: Synthetic oligonucleotide
ggcacccuuaucucggaga

SEQ ID NO: 686760 - RNA, 19 nt, Artificial Sequence
  Description of Artificial Sequence: Synthetic oligonucleotide
gguacugauaacacuggcu

SEQ ID NO: 686761 - RNA, 19 nt, Artificial Sequence
  Description of Artificial Sequence: Synthetic oligonucleotide
gagcagaaagacggaccac

SEQ ID NO: 686762 - RNA, 19 nt, Artificial Sequence
  Description of Artificial Sequence: Synthetic oligonucleotide
caggauccgaagcuccaca

SEQ ID NO: 686763 - RNA, 19 nt, Artificial Sequence
  Description of Artificial Sequence: Synthetic oligonucleotide
guaugcagcccgaaggggu

SEQ ID NO: 686764 - RNA, 19 nt, Artificial Sequence
  Description of Artificial Sequence: Synthetic oligonucleotide
cagaacaccggguacugau

SEQ ID NO: 686765 - RNA, 19 nt, Artificial Sequence
  Description of Artificial Sequence: Synthetic oligonucleotide
ggaaacgguagaugcacgu

SEQ ID NO: 686766 - RNA, 19 nt, Artificial Sequence
  Description of Artificial Sequence: Synthetic oligonucleotide
auucgagcagaaagacgga

SEQ ID NO: 686767 - RNA, 19 nt, Artificial Sequence
  Description of Artificial Sequence: Synthetic oligonucleotide
caaagucaucuccccucuc

SEQ ID NO: 686768 - RNA, 19 nt, Artificial Sequence
  Description of Artificial Sequence: Synthetic oligonucleotide
agaaugacucggggugacu

SEQ ID NO: 686769 - RNA, 19 nt, Artificial Sequence
  Description of Artificial Sequence: Synthetic oligonucleotide
ccggaaacgguagaugcac

SEQ ID NO: 686770 - RNA, 19 nt, Artificial Sequence
  Description of Artificial Sequence: Synthetic oligonucleotide
ggaguccacuacuggcacc

SEQ ID NO: 686771 - RNA, 19 nt, Artificial Sequence
  Description of Artificial Sequence: Synthetic oligonucleotide
uccgcugcucagccugaaa

SEQ ID NO: 686772 - RNA, 19 nt, Artificial Sequence
  Description of Artificial Sequence: Synthetic oligonucleotide
agcugguauccuccaggau

SEQ ID NO: 686773 - RNA, 19 nt, Artificial Sequence
  Description of Artificial Sequence: Synthetic oligonucleotide
gcggauucgagcagaaaga

SEQ ID NO: 686774 - RNA, 19 nt, Artificial Sequence
  Description of Artificial Sequence: Synthetic oligonucleotide
ccugguuaagacgaagaca

SEQ ID NO: 686775 - RNA, 19 nt, Artificial Sequence
  Description of Artificial Sequence: Synthetic oligonucleotide
cugauaacacuggcuccuc

SEQ ID NO: 686776 - RNA, 19 nt, Artificial Sequence
  Description of Artificial Sequence: Synthetic oligonucleotide
ggagauagugcuguugggu

SEQ ID NO: 686777 - RNA, 19 nt, Artificial Sequence
  Description of Artificial Sequence: Synthetic oligonucleotide
caaaacccugaggucccug

SEQ ID NO: 686778 - RNA, 19 nt, Artificial Sequence
  Description of Artificial Sequence: Synthetic oligonucleotide
agcuguggggcggauucga

SEQ ID NO: 686779 - RNA, 19 nt, Artificial Sequence
  Description of Artificial Sequence: Synthetic oligonucleotide
ggauucccacaccuccggc

SEQ ID NO: 686780 - RNA, 19 nt, Artificial Sequence
  Description of Artificial Sequence: Synthetic oligonucleotide
gcacccuuaucucggagaa

SEQ ID NO: 686781 - RNA, 19 nt, Artificial Sequence
  Description of Artificial Sequence: Synthetic oligonucleotide
aagggcuagugggcaggcu

SEQ ID NO: 686782 - RNA, 19 nt, Artificial Sequence
  Description of Artificial Sequence: Synthetic oligonucleotide
cagggaguauacccgggaa

SEQ ID NO: 686783 - RNA, 19 nt, Artificial Sequence
  Description of Artificial Sequence: Synthetic oligonucleotide
acccgggaaagaauccgcu

SEQ ID NO: 686784 - RNA, 19 nt, Artificial Sequence
  Description of Artificial Sequence: Synthetic oligonucleotide
guggggcggauucgagcag

SEQ ID NO: 686785 - RNA, 19 nt, Artificial Sequence
  Description of Artificial Sequence: Synthetic oligonucleotide
ugggaagggugagccuccc

SEQ ID NO: 686786 - RNA, 19 nt, Artificial Sequence
  Description of Artificial Sequence: Synthetic oligonucleotide
ggcuacccugauggaaugg

SEQ ID NO: 686787 - RNA, 19 nt, Artificial Sequence
  Description of Artificial Sequence: Synthetic oligonucleotide
gagaaccugcaaagucauc

SEQ ID NO: 686788 - RNA, 19 nt, Artificial Sequence
  Description of Artificial Sequence: Synthetic oligonucleotide
gguauccuccaggauacaa

SEQ ID NO: 686789 - RNA, 19 nt, Artificial Sequence
  Description of Artificial Sequence: Synthetic oligonucleotide
agaacaccggguacugaua

SEQ ID NO: 686790 - RNA, 19 nt, Artificial Sequence
  Description of Artificial Sequence: Synthetic oligonucleotide
cacccuuaucucggagaag

SEQ ID NO: 686791 - RNA, 19 nt, Artificial Sequence
  Description of Artificial Sequence: Synthetic oligonucleotide
caccaguagagaagaccaa

SEQ ID NO: 686792 - RNA, 19 nt, Artificial Sequence
  Description of Artificial Sequence: Synthetic oligonucleotide
caggcucuccgugcacccg

SEQ ID NO: 686793 - RNA, 19 nt, Artificial Sequence
  Description of Artificial Sequence: Synthetic oligonucleotide
cucuccgugcacccggaaa

SEQ ID NO: 686794 - RNA, 19 nt, Artificial Sequence
  Description of Artificial Sequence: Synthetic oligonucleotide
gguucagugagaagugccu

SEQ ID NO: 686795 - RNA, 19 nt, Artificial Sequence
  Description of Artificial Sequence: Synthetic oligonucleotide
agaggcugaggagggccgu

SEQ ID NO: 686796 - RNA, 19 nt, Artificial Sequence
  Description of Artificial Sequence: Synthetic oligonucleotide
gcagggauagaugcuggga

SEQ ID NO: 686797 - RNA, 19 nt, Artificial Sequence
  Description of Artificial Sequence: Synthetic oligonucleotide
cccgggaaagaauccgcug

SEQ ID NO: 686798 - RNA, 19 nt, Artificial Sequence
  Description of Artificial Sequence: Synthetic oligonucleotide
ggaguauacccgggaaaga

SEQ ID NO: 686799 - RNA, 19 nt, Artificial Sequence
  Description of Artificial Sequence: Synthetic oligonucleotide
gcaccuacucucagagcag

SEQ ID NO: 686800 - RNA, 19 nt, Artificial Sequence
  Description of Artificial Sequence: Synthetic oligonucleotide
gggcguagucuaccauucc

SEQ ID NO: 686801 - RNA, 19 nt, Artificial Sequence
  Description of Artificial Sequence: Synthetic oligonucleotide
cuccuccgucaccccaacc

SEQ ID NO: 686802 - RNA, 19 nt, Artificial Sequence
  Description of Artificial Sequence: Synthetic oligonucleotide
cggaaacgguagaugcacg

SEQ ID NO: 686803 - RNA, 19 nt, Artificial Sequence
  Description of Artificial Sequence: Synthetic oligonucleotide
caacgcuauuaagcaugug

SEQ ID NO: 686804 - RNA, 19 nt, Artificial Sequence
  Description of Artificial Sequence: Synthetic oligonucleotide
cagcuguggggcggauucg

SEQ ID NO: 686805 - RNA, 19 nt, Artificial Sequence
  Description of Artificial Sequence: Synthetic oligonucleotide
ggcguuccagccguauggc

SEQ ID NO: 686806 - RNA, 19 nt, Artificial Sequence
  Description of Artificial Sequence: Synthetic oligonucleotide
ugguauccuccaggauaca

SEQ ID NO: 686807 - RNA, 19 nt, Artificial Sequence
  Description of Artificial Sequence: Synthetic oligonucleotide
aaggaacgacugacccagu

SEQ ID NO: 686808 - RNA, 19 nt, Artificial Sequence
  Description of Artificial Sequence: Synthetic oligonucleotide
gggaccuucuagguuggca

SEQ ID NO: 686809 - RNA, 19 nt, Artificial Sequence
  Description of Artificial Sequence: Synthetic oligonucleotide
cagucgucaggcgguacca

SEQ ID NO: 686810 - RNA, 19 nt, Artificial Sequence
  Description of Artificial Sequence: Synthetic oligonucleotide
ugacugcgagugguaccac

SEQ ID NO: 686811 - RNA, 19 nt, Artificial Sequence
  Description of Artificial Sequence: Synthetic oligonucleotide
gguggggugcuaugcaccu

SEQ ID NO: 686812 - RNA, 19 nt, Artificial Sequence
  Description of Artificial Sequence: Synthetic oligonucleotide
cagggcguagucuaccauu

SEQ ID NO: 686813 - RNA, 19 nt, Artificial Sequence
  Description of Artificial Sequence: Synthetic oligonucleotide
caccauagguaagaacagu

SEQ ID NO: 686814 - RNA, 19 nt, Artificial Sequence
  Description of Artificial Sequence: Synthetic oligonucleotide
caggcgguaccagguggug

SEQ ID NO: 686815 - RNA, 19 nt, Artificial Sequence
  Description of Artificial Sequence: Synthetic oligonucleotide
cagcagggaugaaguacaa

SEQ ID NO: 686816 - RNA, 19 nt, Artificial Sequence
  Description of Artificial Sequence: Synthetic oligonucleotide
cagcaguugccugggugca

SEQ ID NO: 686817 - RNA, 19 nt, Artificial Sequence
  Description of Artificial Sequence: Synthetic oligonucleotide
gcacaugcucuaaggugac

SEQ ID NO: 686818 - RNA, 19 nt, Artificial Sequence
  Description of Artificial Sequence: Synthetic oligonucleotide
ggcacacaggagcugguau

SEQ ID NO: 686819 - RNA, 19 nt, Artificial Sequence
  Description of Artificial Sequence: Synthetic oligonucleotide
gguccucccuuggggaaug

SEQ ID NO: 686820 - RNA, 19 nt, Artificial Sequence
  Description of Artificial Sequence: Synthetic oligonucleotide
  modified_base (18)..(18): a, c, u, g, unknown or other
ccggcugccucuugcucnc

SEQ ID NO: 686821 - RNA, 19 nt, Artificial Sequence
  Description of Artificial Sequence: Synthetic oligonucleotide
gcuguggggcggauucgag

SEQ ID NO: 686822 - RNA, 19 nt, Artificial Sequence
  Description of Artificial Sequence: Synthetic oligonucleotide
ccacaaggggaugccgaag

SEQ ID NO: 686823 - RNA, 19 nt, Artificial Sequence
  Description of Artificial Sequence: Synthetic oligonucleotide
cuccccucucuucuaggcu

SEQ ID NO: 686824 - RNA, 19 nt, Artificial Sequence
  Description of Artificial Sequence: Synthetic oligonucleotide
uccaggcguuccagccgua

SEQ ID NO: 686825 - RNA, 19 nt, Artificial Sequence
  Description of Artificial Sequence: Synthetic oligonucleotide
augcagcccgaagggguaa

SEQ ID NO: 686826 - RNA, 19 nt, Artificial Sequence
  Description of Artificial Sequence: Synthetic oligonucleotide
ccagucagggaacugggau

SEQ ID NO: 686827 - RNA, 19 nt, Artificial Sequence
  Description of Artificial Sequence: Synthetic oligonucleotide
gcaauguaugcagcccgaa

SEQ ID NO: 686828 - RNA, 19 nt, Artificial Sequence
  Description of Artificial Sequence: Synthetic oligonucleotide
ccauuccaauacgauccuc

SEQ ID NO: 686829 - RNA, 19 nt, Artificial Sequence
  Description of Artificial Sequence: Synthetic oligonucleotide
cccuuaucucggagaagga

SEQ ID NO: 686830 - RNA, 19 nt, Artificial Sequence
  Description of Artificial Sequence: Synthetic oligonucleotide
  modified_base (5)..(5): a, c, u, g, unknown or other
gcucnccuuugcugcccac

SEQ ID NO: 686831 - RNA, 19 nt, Artificial Sequence
  Description of Artificial Sequence: Synthetic oligonucleotide
acaccuccggcugccucuu

SEQ ID NO: 686832 - RNA, 19 nt, Artificial Sequence
  Description of Artificial Sequence: Synthetic oligonucleotide
cccagucagggaacuggga

SEQ ID NO: 686833 - RNA, 19 nt, Artificial Sequence
  Description of Artificial Sequence: Synthetic oligonucleotide
cacacgcugccucuucguu

SEQ ID NO: 686834 - RNA, 19 nt, Artificial Sequence
  Description of Artificial Sequence: Synthetic oligonucleotide
ccugauuccagggcguagu

SEQ ID NO: 686835 - RNA, 19 nt, Artificial Sequence
  Description of Artificial Sequence: Synthetic oligonucleotide
gcuugacgaucuggugcac

SEQ ID NO: 686836 - RNA, 19 nt, Artificial Sequence
  Description of Artificial Sequence: Synthetic oligonucleotide
gggccaugguaccugccau

SEQ ID NO: 686837 - RNA, 19 nt, Artificial Sequence
  Description of Artificial Sequence: Synthetic oligonucleotide
ccaauacgauccucacugu

SEQ ID NO: 686838 - RNA, 19 nt, Artificial Sequence
  Description of Artificial Sequence: Synthetic oligonucleotide
caccuccggcugccucuug

SEQ ID NO: 686839 - RNA, 19 nt, Artificial Sequence
  Description of Artificial Sequence: Synthetic oligonucleotide
ccuccugauuccagggcgu

SEQ ID NO: 686840 - RNA, 19 nt, Artificial Sequence
  Description of Artificial Sequence: Synthetic oligonucleotide
cccucucuucuaggcuacc

SEQ ID NO: 686841 - RNA, 19 nt, Artificial Sequence
  Description of Artificial Sequence: Synthetic oligonucleotide
guggggugcuaugcaccua

SEQ ID NO: 686842 - RNA, 19 nt, Artificial Sequence
  Description of Artificial Sequence: Synthetic oligonucleotide
ccgcuccagggaguauacc

SEQ ID NO: 686843 - RNA, 19 nt, Artificial Sequence
  Description of Artificial Sequence: Synthetic oligonucleotide
aggcgccgcuccagggagu

SEQ ID NO: 686844 - RNA, 19 nt, Artificial Sequence
  Description of Artificial Sequence: Synthetic oligonucleotide
ccgucaccccaaccacuuc

SEQ ID NO: 686845 - RNA, 19 nt, Artificial Sequence
  Description of Artificial Sequence: Synthetic oligonucleotide
ggggcggauucgagcagaa

SEQ ID NO: 686846 - RNA, 19 nt, Artificial Sequence
  Description of Artificial Sequence: Synthetic oligonucleotide
ggcucuccgugcacccgga

SEQ ID NO: 686847 - RNA, 19 nt, Artificial Sequence
  Description of Artificial Sequence: Synthetic oligonucleotide
cagcagucgucaggcggua

SEQ ID NO: 686848 - RNA, 19 nt, Artificial Sequence
  Description of Artificial Sequence: Synthetic oligonucleotide
ccgugcacccggaaacggu

SEQ ID NO: 686849 - RNA, 19 nt, Artificial Sequence
  Description of Artificial Sequence: Synthetic oligonucleotide
gggcggauucgagcagaaa

SEQ ID NO: 686850 - RNA, 19 nt, Artificial Sequence
  Description of Artificial Sequence: Synthetic oligonucleotide
caggggaccugugggccau

SEQ ID NO: 686851 - RNA, 19 nt, Artificial Sequence
  Description of Artificial Sequence: Synthetic oligonucleotide
ccaugguaccugccaugcu

SEQ ID NO: 686852 - RNA, 19 nt, Artificial Sequence
  Description of Artificial Sequence: Synthetic oligonucleotide
ccagggcguagucuaccau

SEQ ID NO: 686853 - RNA, 19 nt, Artificial Sequence
  Description of Artificial Sequence: Synthetic oligonucleotide
ccuacacacgcugccucuu

SEQ ID NO: 686854 - RNA, 19 nt, Artificial Sequence
  Description of Artificial Sequence: Synthetic oligonucleotide
gcgccgcuccagggaguau

SEQ ID NO: 686855 - RNA, 19 nt, Artificial Sequence
  Description of Artificial Sequence: Synthetic oligonucleotide
uuaauaauuaauuaugugg

SEQ ID NO: 686856 - RNA, 19 nt, Artificial Sequence
  Description of Artificial Sequence: Synthetic oligonucleotide
aacaucuggguuuagaggc

SEQ ID NO: 686857 - RNA, 19 nt, Artificial Sequence
  Description of Artificial Sequence: Synthetic oligonucleotide
  modified_base (5)..(5): a, c, u, g, unknown or other
uuuunaauagauaccauag

SEQ ID NO: 686858 - RNA, 19 nt, Artificial Sequence
  Description of Artificial Sequence: Synthetic oligonucleotide
ugaguuauauuuaagacug

SEQ ID NO: 686859 - RNA, 19 nt, Artificial Sequence
  Description of Artificial Sequence: Synthetic oligonucleotide
aucgcaauaaauuauuggc

SEQ ID NO: 686860 - RNA, 19 nt, Artificial Sequence
  Description of Artificial Sequence: Synthetic oligonucleotide
aagucuacugauuuuggcc

SEQ ID NO: 686861 - RNA, 19 nt, Artificial Sequence
  Description of Artificial Sequence: Synthetic oligonucleotide
aaauuguagaaauuucuuc

SEQ ID NO: 686862 - RNA, 19 nt, Artificial Sequence
  Description of Artificial Sequence: Synthetic oligonucleotide
uuagcuuugguuuugauac

SEQ ID NO: 686863 - RNA, 19 nt, Artificial Sequence
  Description of Artificial Sequence: Synthetic oligonucleotide
acagcaauaaggcuggugc

SEQ ID NO: 686864 - RNA, 19 nt, Artificial Sequence
  Description of Artificial Sequence: Synthetic oligonucleotide
ugaauuagagaacaaagcu

SEQ ID NO: 686865 - RNA, 19 nt, Artificial Sequence
  Description of Artificial Sequence: Synthetic oligonucleotide
agaguuucugacuaaaagg

SEQ ID NO: 686866 - RNA, 19 nt, Artificial Sequence
  Description of Artificial Sequence: Synthetic oligonucleotide
ucuacaauauuccuuagcu

SEQ ID NO: 686867 - RNA, 19 nt, Artificial Sequence
  Description of Artificial Sequence: Synthetic oligonucleotide
aaagucuacugauuuuggc

SEQ ID NO: 686868 - RNA, 19 nt, Artificial Sequence
  Description of Artificial Sequence: Synthetic oligonucleotide
uaauuaauuaugugguagg

SEQ ID NO: 686869 - RNA, 19 nt, Artificial Sequence
  Description of Artificial Sequence: Synthetic oligonucleotide
uauuuaagacugcagaaug

SEQ ID NO: 686870 - RNA, 19 nt, Artificial Sequence
  Description of Artificial Sequence: Synthetic oligonucleotide
uauuccuuaggccacauga

SEQ ID NO: 686871 - RNA, 19 nt, Artificial Sequence
  Description of Artificial Sequence: Synthetic oligonucleotide
  modified_base (3)..(3): a, c, u, g, unknown or other
uunaauagauaccauaguu

SEQ ID NO: 686872 - RNA, 19 nt, Artificial Sequence
  Description of Artificial Sequence: Synthetic oligonucleotide
auuagugaaauuaaggaag

SEQ ID NO: 686873 - RNA, 19 nt, Artificial Sequence
  Description of Artificial Sequence: Synthetic oligonucleotide
  modified_base (8)..(8): a, c, u, g, unknown or other
aacuuuunaauagauacca

SEQ ID NO: 686874 - RNA, 19 nt, Artificial Sequence
  Description of Artificial Sequence: Synthetic oligonucleotide
aaacaucuggguuuagagg

SEQ ID NO: 686875 - RNA, 19 nt, Artificial Sequence
  Description of Artificial Sequence: Synthetic oligonucleotide
  modified_base (2)..(2): a, c, u, g, unknown or other
unaauagauaccauaguuc

SEQ ID NO: 686876 - RNA, 19 nt, Artificial Sequence
  Description of Artificial Sequence: Synthetic oligonucleotide
uaaaagggcaucaaagucu

SEQ ID NO: 686877 - RNA, 19 nt, Artificial Sequence
  Description of Artificial Sequence: Synthetic oligonucleotide
aauuuuggucuguuggagg

SEQ ID NO: 686878 - RNA, 19 nt, Artificial Sequence
  Description of Artificial Sequence: Synthetic oligonucleotide
uuaaggaaggauacaauga

SEQ ID NO: 686879 - RNA, 19 nt, Artificial Sequence
  Description of Artificial Sequence: Synthetic oligonucleotide
gaucgcaauaaauuauugg

SEQ ID NO: 686880 - RNA, 19 nt, Artificial Sequence
  Description of Artificial Sequence: Synthetic oligonucleotide
  modified_base (4)..(4): a, c, u, g, unknown or other
aaunucuccaaauccaauu

SEQ ID NO: 686881 - RNA, 19 nt, Artificial Sequence
  Description of Artificial Sequence: Synthetic oligonucleotide
ucuucgaagaaauuguaga

SEQ ID NO: 686882 - RNA, 19 nt, Artificial Sequence
  Description of Artificial Sequence: Synthetic oligonucleotide
  modified_base (4)..(4): a, c, u, g, unknown or other
uuunaauagauaccauagu

SEQ ID NO: 686883 - RNA, 19 nt, Artificial Sequence
  Description of Artificial Sequence: Synthetic oligonucleotide
aaucccuauuuuauaaccc

SEQ ID NO: 686884 - RNA, 19 nt, Artificial Sequence
  Description of Artificial Sequence: Synthetic oligonucleotide
uauaagaacuagcaugaca

SEQ ID NO: 686885 - RNA, 19 nt, Artificial Sequence
  Description of Artificial Sequence: Synthetic oligonucleotide
ugucuaggcacauauaaga

SEQ ID NO: 686886 - RNA, 19 nt, Artificial Sequence
  Description of Artificial Sequence: Synthetic oligonucleotide
  modified_base (3)..(3): a, c, u, g, unknown or other
aunucuccaaauccaauuc

SEQ ID NO: 686887 - RNA, 19 nt, Artificial Sequence
  Description of Artificial Sequence: Synthetic oligonucleotide
aucuaguucacuuaucuga

SEQ ID NO: 686888 - RNA, 19 nt, Artificial Sequence
  Description of Artificial Sequence: Synthetic oligonucleotide
aagaacacuggguccacac

SEQ ID NO: 686889 - RNA, 19 nt, Artificial Sequence
  Description of Artificial Sequence: Synthetic oligonucleotide
aagauaaugaaaugaguua

SEQ ID NO: 686890 - RNA, 19 nt, Artificial Sequence
  Description of Artificial Sequence: Synthetic oligonucleotide
cagaaugagcauaagaaac

SEQ ID NO: 686891 - RNA, 19 nt, Artificial Sequence
  Description of Artificial Sequence: Synthetic oligonucleotide
gaaucccuauuuuauaacc

SEQ ID NO: 686892 - RNA, 19 nt, Artificial Sequence
  Description of Artificial Sequence: Synthetic oligonucleotide
auauaagauaaugaaauga

SEQ ID NO: 686893 - RNA, 19 nt, Artificial Sequence
  Description of Artificial Sequence: Synthetic oligonucleotide
uuugaaaacaucuggguuu

SEQ ID NO: 686894 - RNA, 19 nt, Artificial Sequence
  Description of Artificial Sequence: Synthetic oligonucleotide
ucaguuaaguucaucauua

SEQ ID NO: 686895 - RNA, 19 nt, Artificial Sequence
  Description of Artificial Sequence: Synthetic oligonucleotide
aacagaaauguuugcuauc

SEQ ID NO: 686896 - RNA, 19 nt, Artificial Sequence
  Description of Artificial Sequence: Synthetic oligonucleotide
aauuccucgaauuuucuuu

SEQ ID NO: 686897 - RNA, 19 nt, Artificial Sequence
  Description of Artificial Sequence: Synthetic oligonucleotide
aauguucuacaauauuccu

SEQ ID NO: 686898 - RNA, 19 nt, Artificial Sequence
  Description of Artificial Sequence: Synthetic oligonucleotide
aacugguuugucuggucgc

SEQ ID NO: 686899 - RNA, 19 nt, Artificial Sequence
  Description of Artificial Sequence: Synthetic oligonucleotide
cacaacaccacauuuguug

SEQ ID NO: 686900 - RNA, 19 nt, Artificial Sequence
  Description of Artificial Sequence: Synthetic oligonucleotide
  modified_base (3)..(3): a, c, u, g, unknown or other
uunaugaguuucaccauca

SEQ ID NO: 686901 - RNA, 19 nt, Artificial Sequence
  Description of Artificial Sequence: Synthetic oligonucleotide
aauguccgaagcuauguca

SEQ ID NO: 686902 - RNA, 19 nt, Artificial Sequence
  Description of Artificial Sequence: Synthetic oligonucleotide
ucauauuggcaaaacaaaa

SEQ ID NO: 686903 - RNA, 19 nt, Artificial Sequence
  Description of Artificial Sequence: Synthetic oligonucleotide
acuaaaagggcaucaaagu

SEQ ID NO: 686904 - RNA, 19 nt, Artificial Sequence
  Description of Artificial Sequence: Synthetic oligonucleotide
uuuaaucuugccgucagug

SEQ ID NO: 686905 - RNA, 19 nt, Artificial Sequence
  Description of Artificial Sequence: Synthetic oligonucleotide
uguccuaaguuucacagau

SEQ ID NO: 686906 - RNA, 19 nt, Artificial Sequence
  Description of Artificial Sequence: Synthetic oligonucleotide
aaggcuggugcuuacauau

SEQ ID NO: 686907 - RNA, 19 nt, Artificial Sequence
  Description of Artificial Sequence: Synthetic oligonucleotide
  modified_base (9)..(9): a, c, u, g, unknown or other
caacuuuunaauagauacc

SEQ ID NO: 686908 - RNA, 19 nt, Artificial Sequence
  Description of Artificial Sequence: Synthetic oligonucleotide
uaaaaugugugugugugug

SEQ ID NO: 686909 - RNA, 19 nt, Artificial Sequence
  Description of Artificial Sequence: Synthetic oligonucleotide
uuuucguauuccuuaggcc

SEQ ID NO: 686910 - RNA, 19 nt, Artificial Sequence
  Description of Artificial Sequence: Synthetic oligonucleotide
aaugagcuaaauauaagau

SEQ ID NO: 686911 - RNA, 19 nt, Artificial Sequence
  Description of Artificial Sequence: Synthetic oligonucleotide
uaggccacaugaauuagag

SEQ ID NO: 686912 - RNA, 19 nt, Artificial Sequence
  Description of Artificial Sequence: Synthetic oligonucleotide
aaauccaauuccucgaauu

SEQ ID NO: 686913 - RNA, 19 nt, Artificial Sequence
  Description of Artificial Sequence: Synthetic oligonucleotide
ucuuuagaguuucugacua

SEQ ID NO: 686914 - RNA, 19 nt, Artificial Sequence
  Description of Artificial Sequence: Synthetic oligonucleotide
guuaaaaugugugugugug

SEQ ID NO: 686915 - RNA, 19 nt, Artificial Sequence
  Description of Artificial Sequence: Synthetic oligonucleotide
augagcauaagaaacagca

SEQ ID NO: 686916 - RNA, 19 nt, Artificial Sequence
  Description of Artificial Sequence: Synthetic oligonucleotide
aucaaguggauuaucuccc

SEQ ID NO: 686917 - RNA, 19 nt, Artificial Sequence
  Description of Artificial Sequence: Synthetic oligonucleotide
gaaauguuugcuaucccag

SEQ ID NO: 686918 - RNA, 19 nt, Artificial Sequence
  Description of Artificial Sequence: Synthetic oligonucleotide
aauuaauuaugugguaggu

SEQ ID NO: 686919 - RNA, 19 nt, Artificial Sequence
  Description of Artificial Sequence: Synthetic oligonucleotide
auagauaccauaguucaug

SEQ ID NO: 686920 - RNA, 19 nt, Artificial Sequence
  Description of Artificial Sequence: Synthetic oligonucleotide
aaccugguaacuaggaauc

SEQ ID NO: 686921 - RNA, 19 nt, Artificial Sequence
  Description of Artificial Sequence: Synthetic oligonucleotide
agugucuaggcacauauaa

SEQ ID NO: 686922 - RNA, 19 nt, Artificial Sequence
  Description of Artificial Sequence: Synthetic oligonucleotide
auuacuucgcaugaccuuc

SEQ ID NO: 686923 - RNA, 19 nt, Artificial Sequence
  Description of Artificial Sequence: Synthetic oligonucleotide
aguuucuaaucuucgaaga

SEQ ID NO: 686924 - RNA, 19 nt, Artificial Sequence
  Description of Artificial Sequence: Synthetic oligonucleotide
uccuuacuuaucaagugga

SEQ ID NO: 686925 - RNA, 19 nt, Artificial Sequence
  Description of Artificial Sequence: Synthetic oligonucleotide
cuaaaagggcaucaaaguc

SEQ ID NO: 686926 - RNA, 19 nt, Artificial Sequence
  Description of Artificial Sequence: Synthetic oligonucleotide
aguucacuuaucugaacag

SEQ ID NO: 686927 - RNA, 19 nt, Artificial Sequence
  Description of Artificial Sequence: Synthetic oligonucleotide
agucuacugauuuuggccu

SEQ ID NO: 686928 - RNA, 19 nt, Artificial Sequence
  Description of Artificial Sequence: Synthetic oligonucleotide
aaaugugugugugugugug

SEQ ID NO: 686929 - RNA, 19 nt, Artificial Sequence
  Description of Artificial Sequence: Synthetic oligonucleotide
uauuggcuuugguaggugg

SEQ ID NO: 686930 - RNA, 19 nt, Artificial Sequence
  Description of Artificial Sequence: Synthetic oligonucleotide
cucgaauuuucuuuggcug

SEQ ID NO: 686931 - RNA, 19 nt, Artificial Sequence
  Description of Artificial Sequence: Synthetic oligonucleotide
agaaauuguagaaauuucu

SEQ ID NO: 686932 - RNA, 19 nt, Artificial Sequence
  Description of Artificial Sequence: Synthetic oligonucleotide
uccuaagauaaccauuagu

SEQ ID NO: 686933 - RNA, 19 nt, Artificial Sequence
  Description of Artificial Sequence: Synthetic oligonucleotide
caaugagcuaaauauaaga

SEQ ID NO: 686934 - RNA, 19 nt, Artificial Sequence
  Description of Artificial Sequence: Synthetic oligonucleotide
  modified_base (4)..(4): a, c, u, g, unknown or other
cuunaugaguuucaccauc

SEQ ID NO: 686935 - RNA, 19 nt, Artificial Sequence
  Description of Artificial Sequence: Synthetic oligonucleotide
ugguuuacaagguuucugu

SEQ ID NO: 686936 - RNA, 19 nt, Artificial Sequence
  Description of Artificial Sequence: Synthetic oligonucleotide
auuucacucccauuccccg

SEQ ID NO: 686937 - RNA, 19 nt, Artificial Sequence
  Description of Artificial Sequence: Synthetic oligonucleotide
uuuggguacacuguuccag

SEQ ID NO: 686938 - RNA, 19 nt, Artificial Sequence
  Description of Artificial Sequence: Synthetic oligonucleotide
cuaacuggcaauuguucag

SEQ ID NO: 686939 - RNA, 19 nt, Artificial Sequence
  Description of Artificial Sequence: Synthetic oligonucleotide
aauccaauuccucgaauuu

SEQ ID NO: 686940 - RNA, 19 nt, Artificial Sequence
  Description of Artificial Sequence: Synthetic oligonucleotide
gucuuaacaagucaguuaa

SEQ ID NO: 686941 - RNA, 19 nt, Artificial Sequence
  Description of Artificial Sequence: Synthetic oligonucleotide
aguaauucauucaucugag

SEQ ID NO: 686942 - RNA, 19 nt, Artificial Sequence
  Description of Artificial Sequence: Synthetic oligonucleotide
ucaucuuucuuuugguaac

SEQ ID NO: 686943 - RNA, 19 nt, Artificial Sequence
  Description of Artificial Sequence: Synthetic oligonucleotide
caguuucuaaucuucgaag

SEQ ID NO: 686944 - RNA, 19 nt, Artificial Sequence
  Description of Artificial Sequence: Synthetic oligonucleotide
uagagaacaaagcuccuau

SEQ ID NO: 686945 - RNA, 19 nt, Artificial Sequence
  Description of Artificial Sequence: Synthetic oligonucleotide
uccagauuacuucgcauga

SEQ ID NO: 686946 - RNA, 19 nt, Artificial Sequence
  Description of Artificial Sequence: Synthetic oligonucleotide
uuaacaagucaguuaaguu

SEQ ID NO: 686947 - RNA, 19 nt, Artificial Sequence
  Description of Artificial Sequence: Synthetic oligonucleotide
cuggcaauuguucaggauc

SEQ ID NO: 686948 - RNA, 19 nt, Artificial Sequence
  Description of Artificial Sequence: Synthetic oligonucleotide
acacuguuccaggagaucg

SEQ ID NO: 686949 - RNA, 19 nt, Artificial Sequence
  Description of Artificial Sequence: Synthetic oligonucleotide
aguggauuaucuccccuuc

SEQ ID NO: 686950 - RNA, 19 nt, Artificial Sequence
  Description of Artificial Sequence: Synthetic oligonucleotide
uucauaggcaaauaauguu

SEQ ID NO: 686951 - RNA, 19 nt, Artificial Sequence
  Description of Artificial Sequence: Synthetic oligonucleotide
gaaggauacaaugagcuaa

SEQ ID NO: 686952 - RNA, 19 nt, Artificial Sequence
  Description of Artificial Sequence: Synthetic oligonucleotide
uguuugcuaucccagcaca

SEQ ID NO: 686953 - RNA, 19 nt, Artificial Sequence
  Description of Artificial Sequence: Synthetic oligonucleotide
auguuugcuaucccagcac

SEQ ID NO: 686954 - RNA, 19 nt, Artificial Sequence
  Description of Artificial Sequence: Synthetic oligonucleotide
agcuuugcgauuuccaccu

SEQ ID NO: 686955 - RNA, 19 nt, Artificial Sequence
  Description of Artificial Sequence: Synthetic oligonucleotide
caaagucuacugauuuugg

SEQ ID NO: 686956 - RNA, 19 nt, Artificial Sequence
  Description of Artificial Sequence: Synthetic oligonucleotide
uggcaauuguucaggaucu

SEQ ID NO: 686957 - RNA, 19 nt, Artificial Sequence
  Description of Artificial Sequence: Synthetic oligonucleotide
aguucuaauggaguuagga

SEQ ID NO: 686958 - RNA, 19 nt, Artificial Sequence
  Description of Artificial Sequence: Synthetic oligonucleotide
ucucaaugcaucuaccaua

SEQ ID NO: 686959 - RNA, 19 nt, Artificial Sequence
  Description of Artificial Sequence: Synthetic oligonucleotide
acaacuuuagguugccacu

SEQ ID NO: 686960 - RNA, 19 nt, Artificial Sequence
  Description of Artificial Sequence: Synthetic oligonucleotide
uaacuggcaauuguucagg

SEQ ID NO: 686961 - RNA, 19 nt, Artificial Sequence
  Description of Artificial Sequence: Synthetic oligonucleotide
uaucuaguucacuuaucug

SEQ ID NO: 686962 - RNA, 19 nt, Artificial Sequence
  Description of Artificial Sequence: Synthetic oligonucleotide
cagauuacuucgcaugacc

SEQ ID NO: 686963 - RNA, 19 nt, Artificial Sequence
  Description of Artificial Sequence: Synthetic oligonucleotide
  modified_base (6)..(6): a, c, u, g, unknown or other
cuuuunaauagauaccaua

SEQ ID NO: 686964 - RNA, 19 nt, Artificial Sequence
  Description of Artificial Sequence: Synthetic oligonucleotide
auaaauuauuggcuuuggu

SEQ ID NO: 686965 - RNA, 19 nt, Artificial Sequence
  Description of Artificial Sequence: Synthetic oligonucleotide
  modified_base (6)..(6): a, c, u, g, unknown or other
aaaaunucuccaaauccaa

SEQ ID NO: 686966 - RNA, 19 nt, Artificial Sequence
  Description of Artificial Sequence: Synthetic oligonucleotide
aaaaugugugugugugugu

SEQ ID NO: 686967 - RNA, 19 nt, Artificial Sequence
  Description of Artificial Sequence: Synthetic oligonucleotide
uuugauacuggcucaguuu

SEQ ID NO: 686968 - RNA, 19 nt, Artificial Sequence
  Description of Artificial Sequence: Synthetic oligonucleotide
ugucuuaacaagucaguua

SEQ ID NO: 686969 - RNA, 19 nt, Artificial Sequence
  Description of Artificial Sequence: Synthetic oligonucleotide
aagggcaucaaagucuacu

SEQ ID NO: 686970 - RNA, 19 nt, Artificial Sequence
  Description of Artificial Sequence: Synthetic oligonucleotide
accacaacaccacauuugu

SEQ ID NO: 686971 - RNA, 19 nt, Artificial Sequence
  Description of Artificial Sequence: Synthetic oligonucleotide
uuaaaaugugugugugugu

SEQ ID NO: 686972 - RNA, 19 nt, Artificial Sequence
  Description of Artificial Sequence: Synthetic oligonucleotide
aagauaaccauuagugaaa

SEQ ID NO: 686973 - RNA, 19 nt, Artificial Sequence
  Description of Artificial Sequence: Synthetic oligonucleotide
ucgaauuuucuuuggcugu

SEQ ID NO: 686974 - RNA, 19 nt, Artificial Sequence
  Description of Artificial Sequence: Synthetic oligonucleotide
uaacaggucaggcuuugga

SEQ ID NO: 686975 - RNA, 19 nt, Artificial Sequence
  Description of Artificial Sequence: Synthetic oligonucleotide
ggcuuugacgaguagcucg

SEQ ID NO: 686976 - RNA, 19 nt, Artificial Sequence
  Description of Artificial Sequence: Synthetic oligonucleotide
guuggagaauguccgaagc

SEQ ID NO: 686977 - RNA, 19 nt, Artificial Sequence
  Description of Artificial Sequence: Synthetic oligonucleotide
aguuggagaauguccgaag

SEQ ID NO: 686978 - RNA, 19 nt, Artificial Sequence
  Description of Artificial Sequence: Synthetic oligonucleotide
ggccacaugaauuagagaa

SEQ ID NO: 686979 - RNA, 19 nt, Artificial Sequence
  Description of Artificial Sequence: Synthetic oligonucleotide
uucucaaugcaucuaccau

SEQ ID NO: 686980 - RNA, 19 nt, Artificial Sequence
  Description of Artificial Sequence: Synthetic oligonucleotide
aucccuauuuuauaaccca

SEQ ID NO: 686981 - RNA, 19 nt, Artificial Sequence
  Description of Artificial Sequence: Synthetic oligonucleotide
uuuugauacuggcucaguu

SEQ ID NO: 686982 - RNA, 19 nt, Artificial Sequence
  Description of Artificial Sequence: Synthetic oligonucleotide
uuucugacuaaaagggcau

SEQ ID NO: 686983 - RNA, 19 nt, Artificial Sequence
  Description of Artificial Sequence: Synthetic oligonucleotide
uuucgucaccuccacauuc

SEQ ID NO: 686984 - RNA, 19 nt, Artificial Sequence
  Description of Artificial Sequence: Synthetic oligonucleotide
ugacgaguagcucgugucc

SEQ ID NO: 686985 - RNA, 19 nt, Artificial Sequence
  Description of Artificial Sequence: Synthetic oligonucleotide
uuggagaauguccgaagcu

SEQ ID NO: 686986 - RNA, 19 nt, Artificial Sequence
  Description of Artificial Sequence: Synthetic oligonucleotide
uaacuaggaaucccuauuu

SEQ ID NO: 686987 - RNA, 19 nt, Artificial Sequence
  Description of Artificial Sequence: Synthetic oligonucleotide
cuccagauuacuucgcaug

SEQ ID NO: 686988 - RNA, 19 nt, Artificial Sequence
  Description of Artificial Sequence: Synthetic oligonucleotide
ucuggaaacacuccuucuu

SEQ ID NO: 686989 - RNA, 19 nt, Artificial Sequence
  Description of Artificial Sequence: Synthetic oligonucleotide
agaaugagcauaagaaaca

SEQ ID NO: 686990 - RNA, 19 nt, Artificial Sequence
  Description of Artificial Sequence: Synthetic oligonucleotide
uuugacgaguagcucgugu

SEQ ID NO: 686991 - RNA, 19 nt, Artificial Sequence
  Description of Artificial Sequence: Synthetic oligonucleotide
uuucacucccauuccccgg

SEQ ID NO: 686992 - RNA, 19 nt, Artificial Sequence
  Description of Artificial Sequence: Synthetic oligonucleotide
auauuuaagacugcagaau

SEQ ID NO: 686993 - RNA, 19 nt, Artificial Sequence
  Description of Artificial Sequence: Synthetic oligonucleotide
acuuuagguugccacuauc

SEQ ID NO: 686994 - RNA, 19 nt, Artificial Sequence
  Description of Artificial Sequence: Synthetic oligonucleotide
agcagauguauuuacuuua

SEQ ID NO: 686995 - RNA, 19 nt, Artificial Sequence
  Description of Artificial Sequence: Synthetic oligonucleotide
uccucgaauuuucuuuggc

SEQ ID NO: 686996 - RNA, 19 nt, Artificial Sequence
  Description of Artificial Sequence: Synthetic oligonucleotide
ugagcauaagaaacagcaa

SEQ ID NO: 686997 - RNA, 19 nt, Artificial Sequence
  Description of Artificial Sequence: Synthetic oligonucleotide
gacccuuuacaggaggagg

SEQ ID NO: 686998 - RNA, 19 nt, Artificial Sequence
  Description of Artificial Sequence: Synthetic oligonucleotide
uagauaccauaguucaugu

SEQ ID NO: 686999 - RNA, 19 nt, Artificial Sequence
  Description of Artificial Sequence: Synthetic oligonucleotide
uucguauuccuuaggccac

SEQ ID NO: 687000 - RNA, 19 nt, Artificial Sequence
  Description of Artificial Sequence: Synthetic oligonucleotide
uuguagaaauuucuuccau

SEQ ID NO: 687001 - RNA, 19 nt, Artificial Sequence
  Description of Artificial Sequence: Synthetic oligonucleotide
uuccuaagauaaccauuag

SEQ ID NO: 687002 - RNA, 19 nt, Artificial Sequence
  Description of Artificial Sequence: Synthetic oligonucleotide
aaugugugugugugugugu

SEQ ID NO: 687003 - RNA, 19 nt, Artificial Sequence
  Description of Artificial Sequence: Synthetic oligonucleotide
cuuugcgauuuccaccucc

SEQ ID NO: 687004 - RNA, 19 nt, Artificial Sequence
  Description of Artificial Sequence: Synthetic oligonucleotide
auuaugugguaggugagga

SEQ ID NO: 687005 - RNA, 19 nt, Artificial Sequence
  Description of Artificial Sequence: Synthetic oligonucleotide
uuugguagguggagugggc

SEQ ID NO: 687006 - RNA, 19 nt, Artificial Sequence
  Description of Artificial Sequence: Synthetic oligonucleotide
aaguggauuaucuccccuu

SEQ ID NO: 687007 - RNA, 19 nt, Artificial Sequence
  Description of Artificial Sequence: Synthetic oligonucleotide
acuagaggugagguagagc

SEQ ID NO: 687008 - RNA, 19 nt, Artificial Sequence
  Description of Artificial Sequence: Synthetic oligonucleotide
aacuaggaaucccuauuuu

SEQ ID NO: 687009 - RNA, 19 nt, Artificial Sequence
  Description of Artificial Sequence: Synthetic oligonucleotide
uugacgaguagcucguguc

SEQ ID NO: 687010 - RNA, 19 nt, Artificial Sequence
  Description of Artificial Sequence: Synthetic oligonucleotide
uggguuuagaggcuuguuu

SEQ ID NO: 687011 - RNA, 19 nt, Artificial Sequence
  Description of Artificial Sequence: Synthetic oligonucleotide
agucaguuaaguucaucau

SEQ ID NO: 687012 - RNA, 19 nt, Artificial Sequence
  Description of Artificial Sequence: Synthetic oligonucleotide
cuucgaagaaauuguagaa

SEQ ID NO: 687013 - RNA, 19 nt, Artificial Sequence
  Description of Artificial Sequence: Synthetic oligonucleotide
uucacucccauuccccgga

SEQ ID NO: 687014 - RNA, 19 nt, Artificial Sequence
  Description of Artificial Sequence: Synthetic oligonucleotide
augcaucuaccauacccag

SEQ ID NO: 687015 - RNA, 19 nt, Artificial Sequence
  Description of Artificial Sequence: Synthetic oligonucleotide
ucaaagcuauucugauuca

SEQ ID NO: 687016 - RNA, 19 nt, Artificial Sequence
  Description of Artificial Sequence: Synthetic oligonucleotide
uucgucaccuccacauucu

SEQ ID NO: 687017 - RNA, 19 nt, Artificial Sequence
  Description of Artificial Sequence: Synthetic oligonucleotide
  modified_base (5)..(5): a, c, u, g, unknown or other
aaaunucuccaaauccaau

SEQ ID NO: 687018 - RNA, 19 nt, Artificial Sequence
  Description of Artificial Sequence: Synthetic oligonucleotide
aucuucgaagaaauuguag

SEQ ID NO: 687019 - RNA, 19 nt, Artificial Sequence
  Description of Artificial Sequence: Synthetic oligonucleotide
uuugcuaucccagcacagu

SEQ ID NO: 687020 - RNA, 19 nt, Artificial Sequence
  Description of Artificial Sequence: Synthetic oligonucleotide
ucccuauuuuauaacccaa

SEQ ID NO: 687021 - RNA, 19 nt, Artificial Sequence
  Description of Artificial Sequence: Synthetic oligonucleotide
cucuaaguucauccagggg

SEQ ID NO: 687022 - RNA, 19 nt, Artificial Sequence
  Description of Artificial Sequence: Synthetic oligonucleotide
agaauguccgaagcuaugu

SEQ ID NO: 687023 - RNA, 19 nt, Artificial Sequence
  Description of Artificial Sequence: Synthetic oligonucleotide
uuguccuaaguuucacaga

SEQ ID NO: 687024 - RNA, 19 nt, Artificial Sequence
  Description of Artificial Sequence: Synthetic oligonucleotide
uuccccggagacacuagag

SEQ ID NO: 687025 - RNA, 19 nt, Artificial Sequence
  Description of Artificial Sequence: Synthetic oligonucleotide
aauaaggcuggugcuuaca

SEQ ID NO: 687026 - RNA, 19 nt, Artificial Sequence
  Description of Artificial Sequence: Synthetic oligonucleotide
uggugcuuacauaucccac

SEQ ID NO: 687027 - RNA, 19 nt, Artificial Sequence
  Description of Artificial Sequence: Synthetic oligonucleotide
aucuaccauacccaguaau

SEQ ID NO: 687028 - RNA, 19 nt, Artificial Sequence
  Description of Artificial Sequence: Synthetic oligonucleotide
auuauuggcuuugguaggu

SEQ ID NO: 687029 - RNA, 19 nt, Artificial Sequence
  Description of Artificial Sequence: Synthetic oligonucleotide
uggccuaacuggcaauugu

SEQ ID NO: 687030 - RNA, 19 nt, Artificial Sequence
  Description of Artificial Sequence: Synthetic oligonucleotide
uugaaagagauggcuuuga

SEQ ID NO: 687031 - RNA, 19 nt, Artificial Sequence
  Description of Artificial Sequence: Synthetic oligonucleotide
aauagauaccauaguucau

SEQ ID NO: 687032 - RNA, 19 nt, Artificial Sequence
  Description of Artificial Sequence: Synthetic oligonucleotide
cuuagcuuugguuuugaua

SEQ ID NO: 687033 - RNA, 19 nt, Artificial Sequence
  Description of Artificial Sequence: Synthetic oligonucleotide
uguguguguguguguaacu

SEQ ID NO: 687034 - RNA, 19 nt, Artificial Sequence
  Description of Artificial Sequence: Synthetic oligonucleotide
uugcuaucccagcacagua

SEQ ID NO: 687035 - RNA, 19 nt, Artificial Sequence
  Description of Artificial Sequence: Synthetic oligonucleotide
uggagaauguccgaagcua

SEQ ID NO: 687036 - RNA, 19 nt, Artificial Sequence
  Description of Artificial Sequence: Synthetic oligonucleotide
gaauguccgaagcuauguc

SEQ ID NO: 687037 - RNA, 19 nt, Artificial Sequence
  Description of Artificial Sequence: Synthetic oligonucleotide
uuagagaacaaagcuccua

SEQ ID NO: 687038 - RNA, 19 nt, Artificial Sequence
  Description of Artificial Sequence: Synthetic oligonucleotide
auuacagauucaguaguau

SEQ ID NO: 687039 - RNA, 19 nt, Artificial Sequence
  Description of Artificial Sequence: Synthetic oligonucleotide
ucaccacaacaccacauuu

SEQ ID NO: 687040 - RNA, 19 nt, Artificial Sequence
  Description of Artificial Sequence: Synthetic oligonucleotide
ugcuaucccagcacaguaa

SEQ ID NO: 687041 - RNA, 19 nt, Artificial Sequence
  Description of Artificial Sequence: Synthetic oligonucleotide
agauuacuucgcaugaccu

SEQ ID NO: 687042 - RNA, 19 nt, Artificial Sequence
  Description of Artificial Sequence: Synthetic oligonucleotide
guugaaagagauggcuuug

SEQ ID NO: 687043 - RNA, 19 nt, Artificial Sequence
  Description of Artificial Sequence: Synthetic oligonucleotide
gcuuacauaucccacaugu

SEQ ID NO: 687044 - RNA, 19 nt, Artificial Sequence
  Description of Artificial Sequence: Synthetic oligonucleotide
  modified_base (2)..(2): a, c, u, g, unknown or other
unaugaguuucaccaucau

SEQ ID NO: 687045 - RNA, 19 nt, Artificial Sequence
  Description of Artificial Sequence: Synthetic oligonucleotide
acuuaucugaacagcaaaa

SEQ ID NO: 687046 - RNA, 19 nt, Artificial Sequence
  Description of Artificial Sequence: Synthetic oligonucleotide
uuacuucgcaugaccuucu

SEQ ID NO: 687047 - RNA, 19 nt, Artificial Sequence
  Description of Artificial Sequence: Synthetic oligonucleotide
agaucgcaauaaauuauug

SEQ ID NO: 687048 - RNA, 19 nt, Artificial Sequence
  Description of Artificial Sequence: Synthetic oligonucleotide
ugcagcuaacaggucaggc

SEQ ID NO: 687049 - RNA, 19 nt, Artificial Sequence
  Description of Artificial Sequence: Synthetic oligonucleotide
ugcaucuaccauacccagu

SEQ ID NO: 687050 - RNA, 19 nt, Artificial Sequence
  Description of Artificial Sequence: Synthetic oligonucleotide
cauaucccacaugugcugc

SEQ ID NO: 687051 - RNA, 19 nt, Artificial Sequence
  Description of Artificial Sequence: Synthetic oligonucleotide
uguguguguguguaacuuu

SEQ ID NO: 687052 - RNA, 19 nt, Artificial Sequence
  Description of Artificial Sequence: Synthetic oligonucleotide
gaucuuagcuuugguuuug

SEQ ID NO: 687053 - RNA, 19 nt, Artificial Sequence
  Description of Artificial Sequence: Synthetic oligonucleotide
gucuguuggagguggagga

SEQ ID NO: 687054 - RNA, 19 nt, Artificial Sequence
  Description of Artificial Sequence: Synthetic oligonucleotide
ggugcuuacauaucccaca

SEQ ID NO: 687055 - RNA, 19 nt, Artificial Sequence
  Description of Artificial Sequence: Synthetic oligonucleotide
cuuaacaagucaguuaagu

SEQ ID NO: 687056 - RNA, 19 nt, Artificial Sequence
  Description of Artificial Sequence: Synthetic oligonucleotide
ugaucccuucucaaugcau

SEQ ID NO: 687057 - RNA, 19 nt, Artificial Sequence
  Description of Artificial Sequence: Synthetic oligonucleotide
  modified_base (7)..(7): a, c, u, g, unknown or other
acuuuunaauagauaccau

SEQ ID NO: 687058 - RNA, 19 nt, Artificial Sequence
  Description of Artificial Sequence: Synthetic oligonucleotide
augugugugugugugugug

SEQ ID NO: 687059 - RNA, 19 nt, Artificial Sequence
  Description of Artificial Sequence: Synthetic oligonucleotide
ggcuggugcuuacauaucc

SEQ ID NO: 687060 - RNA, 19 nt, Artificial Sequence
  Description of Artificial Sequence: Synthetic oligonucleotide
ggaaucccuauuuuauaac

SEQ ID NO: 687061 - RNA, 19 nt, Artificial Sequence
  Description of Artificial Sequence: Synthetic oligonucleotide
ggucgcuuuggguacacug

SEQ ID NO: 687062 - RNA, 19 nt, Artificial Sequence
  Description of Artificial Sequence: Synthetic oligonucleotide
guuugcuaucccagcacag

SEQ ID NO: 687063 - RNA, 19 nt, Artificial Sequence
  Description of Artificial Sequence: Synthetic oligonucleotide
uacuuaucaaguggauuau

SEQ ID NO: 687064 - RNA, 19 nt, Artificial Sequence
  Description of Artificial Sequence: Synthetic oligonucleotide
ugguaacuaggaaucccua

SEQ ID NO: 687065 - RNA, 19 nt, Artificial Sequence
  Description of Artificial Sequence: Synthetic oligonucleotide
ugugugugugugugugugu

SEQ ID NO: 687066 - RNA, 19 nt, Artificial Sequence
  Description of Artificial Sequence: Synthetic oligonucleotide
ugacugauccaggagcaau

SEQ ID NO: 687067 - RNA, 19 nt, Artificial Sequence
  Description of Artificial Sequence: Synthetic oligonucleotide
agagaacaaagcuccuauu

SEQ ID NO: 687068 - RNA, 19 nt, Artificial Sequence
  Description of Artificial Sequence: Synthetic oligonucleotide
cuggugcuuacauauccca

SEQ ID NO: 687069 - RNA, 19 nt, Artificial Sequence
  Description of Artificial Sequence: Synthetic oligonucleotide
ccuaaguuucacagauucc

SEQ ID NO: 687070 - RNA, 19 nt, Artificial Sequence
  Description of Artificial Sequence: Synthetic oligonucleotide
gugugugugugugugugug

SEQ ID NO: 687071 - RNA, 19 nt, Artificial Sequence
  Description of Artificial Sequence: Synthetic oligonucleotide
auuccccggagacacuaga

SEQ ID NO: 687072 - RNA, 19 nt, Artificial Sequence
  Description of Artificial Sequence: Synthetic oligonucleotide
guguguguguguaacuuuc

SEQ ID NO: 687073 - RNA, 19 nt, Artificial Sequence
  Description of Artificial Sequence: Synthetic oligonucleotide
ucgcuuuggguacacuguu

SEQ ID NO: 687074 - RNA, 19 nt, Artificial Sequence
  Description of Artificial Sequence: Synthetic oligonucleotide
uguguguguguguguguaa

SEQ ID NO: 687075 - RNA, 19 nt, Artificial Sequence
  Description of Artificial Sequence: Synthetic oligonucleotide
auguucuacaauauuccuu

SEQ ID NO: 687076 - RNA, 19 nt, Artificial Sequence
  Description of Artificial Sequence: Synthetic oligonucleotide
auaggcaaauaauguucua

SEQ ID NO: 687077 - RNA, 19 nt, Artificial Sequence
  Description of Artificial Sequence: Synthetic oligonucleotide
ggcuuugaguuggagaaug

SEQ ID NO: 687078 - RNA, 19 nt, Artificial Sequence
  Description of Artificial Sequence: Synthetic oligonucleotide
ucccaugaucccuucucaa

SEQ ID NO: 687079 - RNA, 19 nt, Artificial Sequence
  Description of Artificial Sequence: Synthetic oligonucleotide
guaacuaggaaucccuauu

SEQ ID NO: 687080 - RNA, 19 nt, Artificial Sequence
  Description of Artificial Sequence: Synthetic oligonucleotide
ucuacugauuuuggccuaa

SEQ ID NO: 687081 - RNA, 19 nt, Artificial Sequence
  Description of Artificial Sequence: Synthetic oligonucleotide
ggauacaaugagcuaaaua

SEQ ID NO: 687082 - RNA, 19 nt, Artificial Sequence
  Description of Artificial Sequence: Synthetic oligonucleotide
gaagcacuugaagguguug

SEQ ID NO: 687083 - RNA, 19 nt, Artificial Sequence
  Description of Artificial Sequence: Synthetic oligonucleotide
uuggccuaacuggcaauug

SEQ ID NO: 687084 - RNA, 19 nt, Artificial Sequence
  Description of Artificial Sequence: Synthetic oligonucleotide
aggugagguagagccaguc

SEQ ID NO: 687085 - RNA, 19 nt, Artificial Sequence
  Description of Artificial Sequence: Synthetic oligonucleotide
agcuuuaaucuugccguca

SEQ ID NO: 687086 - RNA, 19 nt, Artificial Sequence
  Description of Artificial Sequence: Synthetic oligonucleotide
caauaaggcuggugcuuac

SEQ ID NO: 687087 - RNA, 19 nt, Artificial Sequence
  Description of Artificial Sequence: Synthetic oligonucleotide
guguguguguguguguaac

SEQ ID NO: 687088 - RNA, 19 nt, Artificial Sequence
  Description of Artificial Sequence: Synthetic oligonucleotide
gguuuugauacuggcucag

SEQ ID NO: 687089 - RNA, 19 nt, Artificial Sequence
  Description of Artificial Sequence: Synthetic oligonucleotide
gaguucuaauggaguuagg

SEQ ID NO: 687090 - RNA, 19 nt, Artificial Sequence
  Description of Artificial Sequence: Synthetic oligonucleotide
gucuggucgcuuuggguac

SEQ ID NO: 687091 - RNA, 19 nt, Artificial Sequence
  Description of Artificial Sequence: Synthetic oligonucleotide
  modified_base (7)..(7): a, c, u, g, unknown or other
gcccuunaugaguuucacc

SEQ ID NO: 687092 - RNA, 19 nt, Artificial Sequence
  Description of Artificial Sequence: Synthetic oligonucleotide
ugguuugucuggucgcuuu

SEQ ID NO: 687093 - RNA, 19 nt, Artificial Sequence
  Description of Artificial Sequence: Synthetic oligonucleotide
guccgaagcuaugucauca

SEQ ID NO: 687094 - RNA, 19 nt, Artificial Sequence
  Description of Artificial Sequence: Synthetic oligonucleotide
gccacuaucaucuuucuuu

SEQ ID NO: 687095 - RNA, 19 nt, Artificial Sequence
  Description of Artificial Sequence: Synthetic oligonucleotide
gucaguuaaguucaucauu

SEQ ID NO: 687096 - RNA, 19 nt, Artificial Sequence
  Description of Artificial Sequence: Synthetic oligonucleotide
accauacccaguaauucau

SEQ ID NO: 687097 - RNA, 19 nt, Artificial Sequence
  Description of Artificial Sequence: Synthetic oligonucleotide
agcaauaaggcuggugcuu

SEQ ID NO: 687098 - RNA, 19 nt, Artificial Sequence
  Description of Artificial Sequence: Synthetic oligonucleotide
cugguaacuaggaaucccu

SEQ ID NO: 687099 - RNA, 19 nt, Artificial Sequence
  Description of Artificial Sequence: Synthetic oligonucleotide
gauuacuucgcaugaccuu

SEQ ID NO: 687100 - RNA, 19 nt, Artificial Sequence
  Description of Artificial Sequence: Synthetic oligonucleotide
caggcacaacaguguaacc

SEQ ID NO: 687101 - RNA, 19 nt, Artificial Sequence
  Description of Artificial Sequence: Synthetic oligonucleotide
uucugacuaaaagggcauc

SEQ ID NO: 687102 - RNA, 19 nt, Artificial Sequence
  Description of Artificial Sequence: Synthetic oligonucleotide
ugguuucgucaccuccaca

SEQ ID NO: 687103 - RNA, 19 nt, Artificial Sequence
  Description of Artificial Sequence: Synthetic oligonucleotide
auguccgaagcuaugucau

SEQ ID NO: 687104 - RNA, 19 nt, Artificial Sequence
  Description of Artificial Sequence: Synthetic oligonucleotide
  modified_base (8)..(8): a, c, u, g, unknown or other
ugcccuunaugaguuucac

SEQ ID NO: 687105 - RNA, 19 nt, Artificial Sequence
  Description of Artificial Sequence: Synthetic oligonucleotide
ccuaacuggcaauuguuca

SEQ ID NO: 687106 - RNA, 19 nt, Artificial Sequence
  Description of Artificial Sequence: Synthetic oligonucleotide
guauuccuuaggccacaug

SEQ ID NO: 687107 - RNA, 19 nt, Artificial Sequence
  Description of Artificial Sequence: Synthetic oligonucleotide
caccuccagauuacuucgc

SEQ ID NO: 687108 - RNA, 19 nt, Artificial Sequence
  Description of Artificial Sequence: Synthetic oligonucleotide
caguaucuguuucuuuaga

SEQ ID NO: 687109 - RNA, 19 nt, Artificial Sequence
  Description of Artificial Sequence: Synthetic oligonucleotide
gguuucgucaccuccacau

SEQ ID NO: 687110 - RNA, 19 nt, Artificial Sequence
  Description of Artificial Sequence: Synthetic oligonucleotide
cauuccccggagacacuag

SEQ ID NO: 687111 - RNA, 19 nt, Artificial Sequence
  Description of Artificial Sequence: Synthetic oligonucleotide
cacauauaagaacuagcau

SEQ ID NO: 687112 - RNA, 19 nt, Artificial Sequence
  Description of Artificial Sequence: Synthetic oligonucleotide
ucguauuccuuaggccaca

SEQ ID NO: 687113 - RNA, 19 nt, Artificial Sequence
  Description of Artificial Sequence: Synthetic oligonucleotide
  modified_base (9)..(9): a, c, u, g, unknown or other
cugcccuunaugaguuuca

SEQ ID NO: 687114 - RNA, 19 nt, Artificial Sequence
  Description of Artificial Sequence: Synthetic oligonucleotide
cugauucugcuuuagcuuu

SEQ ID NO: 687115 - RNA, 19 nt, Artificial Sequence
  Description of Artificial Sequence: Synthetic oligonucleotide
uacuucgcaugaccuucuc

SEQ ID NO: 687116 - RNA, 19 nt, Artificial Sequence
  Description of Artificial Sequence: Synthetic oligonucleotide
ugccgucagugucugguuu

SEQ ID NO: 687117 - RNA, 19 nt, Artificial Sequence
  Description of Artificial Sequence: Synthetic oligonucleotide
ucuugccgucagugucugg

SEQ ID NO: 687118 - RNA, 19 nt, Artificial Sequence
  Description of Artificial Sequence: Synthetic oligonucleotide
ggcucaguuucuaaucuuc

SEQ ID NO: 687119 - RNA, 19 nt, Artificial Sequence
  Description of Artificial Sequence: Synthetic oligonucleotide
caguuaaguucaucauuaa

SEQ ID NO: 687120 - RNA, 19 nt, Artificial Sequence
  Description of Artificial Sequence: Synthetic oligonucleotide
ccacaugaauuagagaaca

SEQ ID NO: 687121 - RNA, 19 nt, Artificial Sequence
  Description of Artificial Sequence: Synthetic oligonucleotide
ggaaccugguaacuaggaa

SEQ ID NO: 687122 - RNA, 19 nt, Artificial Sequence
  Description of Artificial Sequence: Synthetic oligonucleotide
caggauuaagggcuuuucu

SEQ ID NO: 687123 - RNA, 19 nt, Artificial Sequence
  Description of Artificial Sequence: Synthetic oligonucleotide
gccacaugaauuagagaac

SEQ ID NO: 687124 - RNA, 19 nt, Artificial Sequence
  Description of Artificial Sequence: Synthetic oligonucleotide
cuuacuuaucaaguggauu

SEQ ID NO: 687125 - RNA, 19 nt, Artificial Sequence
  Description of Artificial Sequence: Synthetic oligonucleotide
cuugccgucagugucuggu

SEQ ID NO: 687126 - RNA, 19 nt, Artificial Sequence
  Description of Artificial Sequence: Synthetic oligonucleotide
cuacugauuuuggccuaac

SEQ ID NO: 687127 - RNA, 19 nt, Artificial Sequence
  Description of Artificial Sequence: Synthetic oligonucleotide
gugguaggugaggaaccug

SEQ ID NO: 687128 - RNA, 19 nt, Artificial Sequence
  Description of Artificial Sequence: Synthetic oligonucleotide
gagauggcuuugacgagua

SEQ ID NO: 687129 - RNA, 19 nt, Artificial Sequence
  Description of Artificial Sequence: Synthetic oligonucleotide
ccuuagcuuuaaucuugcc

SEQ ID NO: 687130 - RNA, 19 nt, Artificial Sequence
  Description of Artificial Sequence: Synthetic oligonucleotide
gucuacugauuuuggccua

SEQ ID NO: 687131 - RNA, 19 nt, Artificial Sequence
  Description of Artificial Sequence: Synthetic oligonucleotide
cuggguccacaccaccuca

SEQ ID NO: 687132 - RNA, 19 nt, Artificial Sequence
  Description of Artificial Sequence: Synthetic oligonucleotide
aggauacaaugagcuaaau

SEQ ID NO: 687133 - RNA, 19 nt, Artificial Sequence
  Description of Artificial Sequence: Synthetic oligonucleotide
aggcuggugcuuacauauc

SEQ ID NO: 687134 - RNA, 19 nt, Artificial Sequence
  Description of Artificial Sequence: Synthetic oligonucleotide
cccggagacacuagaggug

SEQ ID NO: 687135 - RNA, 19 nt, Artificial Sequence
  Description of Artificial Sequence: Synthetic oligonucleotide
uugccgucagugucugguu

SEQ ID NO: 687136 - RNA, 19 nt, Artificial Sequence
  Description of Artificial Sequence: Synthetic oligonucleotide
gugugugugugugugugua

SEQ ID NO: 687137 - RNA, 19 nt, Artificial Sequence
  Description of Artificial Sequence: Synthetic oligonucleotide
gucgcuuuggguacacugu

SEQ ID NO: 687138 - RNA, 19 nt, Artificial Sequence
  Description of Artificial Sequence: Synthetic oligonucleotide
cuuugacgaguagcucgug

SEQ ID NO: 687139 - RNA, 19 nt, Artificial Sequence
  Description of Artificial Sequence: Synthetic oligonucleotide
gccuaacuggcaauuguuc

SEQ ID NO: 687140 - RNA, 19 nt, Artificial Sequence
  Description of Artificial Sequence: Synthetic oligonucleotide
gcaggauuaagggcuuuuc

SEQ ID NO: 687141 - RNA, 19 nt, Artificial Sequence
  Description of Artificial Sequence: Synthetic oligonucleotide
ggaucuuagcuuugguuuu

SEQ ID NO: 687142 - RNA, 19 nt, Artificial Sequence
  Description of Artificial Sequence: Synthetic oligonucleotide
gacugauccaggagcaauu

SEQ ID NO: 687143 - RNA, 19 nt, Artificial Sequence
  Description of Artificial Sequence: Synthetic oligonucleotide
ccagauuacuucgcaugac

SEQ ID NO: 687144 - RNA, 19 nt, Artificial Sequence
  Description of Artificial Sequence: Synthetic oligonucleotide
guuuugauacuggcucagu

SEQ ID NO: 687145 - RNA, 19 nt, Artificial Sequence
  Description of Artificial Sequence: Synthetic oligonucleotide
gcaauaaggcuggugcuua

SEQ ID NO: 687146 - RNA, 19 nt, Artificial Sequence
  Description of Artificial Sequence: Synthetic oligonucleotide
guguguguguguguaacuu

SEQ ID NO: 687147 - RNA, 19 nt, Artificial Sequence
  Description of Artificial Sequence: Synthetic oligonucleotide
ggauuaucuccccuucuuu

SEQ ID NO: 687148 - RNA, 19 nt, Artificial Sequence
  Description of Artificial Sequence: Synthetic oligonucleotide
guuucgucaccuccacauu

SEQ ID NO: 687149 - RNA, 19 nt, Artificial Sequence
  Description of Artificial Sequence: Synthetic oligonucleotide
gccauugaguucacccuuc

SEQ ID NO: 687150 - RNA, 19 nt, Artificial Sequence
  Description of Artificial Sequence: Synthetic oligonucleotide
ggagaauguccgaagcuau

SEQ ID NO: 687151 - RNA, 19 nt, Artificial Sequence
  Description of Artificial Sequence: Synthetic oligonucleotide
ccggagacacuagagguga

SEQ ID NO: 687152 - RNA, 19 nt, Artificial Sequence
  Description of Artificial Sequence: Synthetic oligonucleotide
cccuuuacaggaggaggug

SEQ ID NO: 687153 - RNA, 19 nt, Artificial Sequence
  Description of Artificial Sequence: Synthetic oligonucleotide
uggucgcuuuggguacacu

SEQ ID NO: 687154 - RNA, 19 nt, Artificial Sequence
  Description of Artificial Sequence: Synthetic oligonucleotide
gugacugauccaggagcaa

SEQ ID NO: 687155 - RNA, 19 nt, Artificial Sequence
  Description of Artificial Sequence: Synthetic oligonucleotide
agagccagucaaagcuauu

SEQ ID NO: 687156 - RNA, 19 nt, Artificial Sequence
  Description of Artificial Sequence: Synthetic oligonucleotide
gaguagcucguguccuuuu

SEQ ID NO: 687157 - RNA, 19 nt, Artificial Sequence
  Description of Artificial Sequence: Synthetic oligonucleotide
cacucccauuccccggaga

SEQ ID NO: 687158 - RNA, 19 nt, Artificial Sequence
  Description of Artificial Sequence: Synthetic oligonucleotide
  modified_base (5)..(5): a, c, u, g, unknown or other
ccuunaugaguuucaccau

SEQ ID NO: 687159 - RNA, 19 nt, Artificial Sequence
  Description of Artificial Sequence: Synthetic oligonucleotide
ccccggagacacuagaggu

SEQ ID NO: 687160 - RNA, 19 nt, Artificial Sequence
  Description of Artificial Sequence: Synthetic oligonucleotide
ccuuacuuaucaaguggau

SEQ ID NO: 687161 - RNA, 19 nt, Artificial Sequence
  Description of Artificial Sequence: Synthetic oligonucleotide
gcuuugcgauuuccaccuc

SEQ ID NO: 687162 - RNA, 19 nt, Artificial Sequence
  Description of Artificial Sequence: Synthetic oligonucleotide
cccuggguaagaaguuaaa

SEQ ID NO: 687163 - RNA, 19 nt, Artificial Sequence
  Description of Artificial Sequence: Synthetic oligonucleotide
cccaugaucccuucucaau

SEQ ID NO: 687164 - RNA, 19 nt, Artificial Sequence
  Description of Artificial Sequence: Synthetic oligonucleotide
guccuaaguuucacagauu

SEQ ID NO: 687165 - RNA, 19 nt, Artificial Sequence
  Description of Artificial Sequence: Synthetic oligonucleotide
ccuccagauuacuucgcau

SEQ ID NO: 687166 - RNA, 19 nt, Artificial Sequence
  Description of Artificial Sequence: Synthetic oligonucleotide
ccauacccaguaauucauu

SEQ ID NO: 687167 - RNA, 19 nt, Artificial Sequence
  Description of Artificial Sequence: Synthetic oligonucleotide
cugguuugucuggucgcuu

SEQ ID NO: 687168 - RNA, 19 nt, Artificial Sequence
  Description of Artificial Sequence: Synthetic oligonucleotide
cgaguagcucguguccuuu

SEQ ID NO: 687169 - RNA, 19 nt, Artificial Sequence
  Description of Artificial Sequence: Synthetic oligonucleotide
  modified_base (1)..(1): a, c, u, g, unknown or other
naauagauaccauaguuca

SEQ ID NO: 687170 - RNA, 19 nt, Artificial Sequence
  Description of Artificial Sequence: Synthetic oligonucleotide
  modified_base (1)..(1): a, c, u, g, unknown or other
naugaguuucaccaucauc

SEQ ID NO: 687171 - RNA, 19 nt, Artificial Sequence
  Description of Artificial Sequence: Synthetic oligonucleotide
aguuaaaugacccauacac

SEQ ID NO: 687172 - RNA, 19 nt, Artificial Sequence
  Description of Artificial Sequence: Synthetic oligonucleotide
auaucaagcagauacaugc

SEQ ID NO: 687173 - RNA, 19 nt, Artificial Sequence
  Description of Artificial Sequence: Synthetic oligonucleotide
accaauaucaagcagauac

SEQ ID NO: 687174 - RNA, 19 nt, Artificial Sequence
  Description of Artificial Sequence: Synthetic oligonucleotide
aaugacaucaauauuuagc

SEQ ID NO: 687175 - RNA, 19 nt, Artificial Sequence
  Description of Artificial Sequence: Synthetic oligonucleotide
ucacauaguagauagaagg

SEQ ID NO: 687176 - RNA, 19 nt, Artificial Sequence
  Description of Artificial Sequence: Synthetic oligonucleotide
uucaagcuaaacuugaagg

SEQ ID NO: 687177 - RNA, 19 nt, Artificial Sequence
  Description of Artificial Sequence: Synthetic oligonucleotide
uucgauacgauuuucuugg

SEQ ID NO: 687178 - RNA, 19 nt, Artificial Sequence
  Description of Artificial Sequence: Synthetic oligonucleotide
ugcaugaucguaaagaaug

SEQ ID NO: 687179 - RNA, 19 nt, Artificial Sequence
  Description of Artificial Sequence: Synthetic oligonucleotide
augggauucaguuauggcc

SEQ ID NO: 687180 - RNA, 19 nt, Artificial Sequence
  Description of Artificial Sequence: Synthetic oligonucleotide
auguacaagcuacaaaugc

SEQ ID NO: 687181 - RNA, 19 nt, Artificial Sequence
  Description of Artificial Sequence: Synthetic oligonucleotide
acccguugaaaguagaugc

SEQ ID NO: 687182 - RNA, 19 nt, Artificial Sequence
  Description of Artificial Sequence: Synthetic oligonucleotide
uaaacuugaagguaagagc

SEQ ID NO: 687183 - RNA, 19 nt, Artificial Sequence
  Description of Artificial Sequence: Synthetic oligonucleotide
aguguaugcacccauguuc

SEQ ID NO: 687184 - RNA, 19 nt, Artificial Sequence
  Description of Artificial Sequence: Synthetic oligonucleotide
cuuacauggauuugcauag

SEQ ID NO: 687185 - RNA, 19 nt, Artificial Sequence
  Description of Artificial Sequence: Synthetic oligonucleotide
acuaacaguaaguuaaaug

SEQ ID NO: 687186 - RNA, 19 nt, Artificial Sequence
  Description of Artificial Sequence: Synthetic oligonucleotide
ucggcuauaacucucacuc

SEQ ID NO: 687187 - RNA, 19 nt, Artificial Sequence
  Description of Artificial Sequence: Synthetic oligonucleotide
uucaguuauggccaguucc

SEQ ID NO: 687188 - RNA, 19 nt, Artificial Sequence
  Description of Artificial Sequence: Synthetic oligonucleotide
uguaugauacuuccaacug

SEQ ID NO: 687189 - RNA, 19 nt, Artificial Sequence
  Description of Artificial Sequence: Synthetic oligonucleotide
auagaaggccucuggaacc

SEQ ID NO: 687190 - RNA, 19 nt, Artificial Sequence
  Description of Artificial Sequence: Synthetic oligonucleotide
uauuuagcucuuuugcccg

SEQ ID NO: 687191 - RNA, 19 nt, Artificial Sequence
  Description of Artificial Sequence: Synthetic oligonucleotide
aacaguaaguuaaaugguc

SEQ ID NO: 687192 - RNA, 19 nt, Artificial Sequence
  Description of Artificial Sequence: Synthetic oligonucleotide
gauauugacugccagugug

SEQ ID NO: 687193 - RNA, 19 nt, Artificial Sequence
  Description of Artificial Sequence: Synthetic oligonucleotide
uccaacuguuacuaggugg

SEQ ID NO: 687194 - RNA, 19 nt, Artificial Sequence
  Description of Artificial Sequence: Synthetic oligonucleotide
gauacuagcagaagcacag

SEQ ID NO: 687195 - RNA, 19 nt, Artificial Sequence
  Description of Artificial Sequence: Synthetic oligonucleotide
uucaucgaggauauggcag

SEQ ID NO: 687196 - RNA, 19 nt, Artificial Sequence
  Description of Artificial Sequence: Synthetic oligonucleotide
cauggauuugcauagauga

SEQ ID NO: 687197 - RNA, 19 nt, Artificial Sequence
  Description of Artificial Sequence: Synthetic oligonucleotide
uguacaagcuacaaaugcu

SEQ ID NO: 687198 - RNA, 19 nt, Artificial Sequence
  Description of Artificial Sequence: Synthetic oligonucleotide
aaagccuuagaugccuucc

SEQ ID NO: 687199 - RNA, 19 nt, Artificial Sequence
  Description of Artificial Sequence: Synthetic oligonucleotide
uuugcauagaugauccucu

SEQ ID NO: 687200 - RNA, 19 nt, Artificial Sequence
  Description of Artificial Sequence: Synthetic oligonucleotide
uguaccaacuguaucucag

SEQ ID NO: 687201 - RNA, 19 nt, Artificial Sequence
  Description of Artificial Sequence: Synthetic oligonucleotide
ucaagauaguuuauuuuca

SEQ ID NO: 687202 - RNA, 19 nt, Artificial Sequence
  Description of Artificial Sequence: Synthetic oligonucleotide
cuaaacuugaagguaagag

SEQ ID NO: 687203 - RNA, 19 nt, Artificial Sequence
  Description of Artificial Sequence: Synthetic oligonucleotide
cauugauacuagcagaagc

SEQ ID NO: 687204 - RNA, 19 nt, Artificial Sequence
  Description of Artificial Sequence: Synthetic oligonucleotide
uauaacucucacuccagag

SEQ ID NO: 687205 - RNA, 19 nt, Artificial Sequence
  Description of Artificial Sequence: Synthetic oligonucleotide
ucaagcuaaacuugaaggu

SEQ ID NO: 687206 - RNA, 19 nt, Artificial Sequence
  Description of Artificial Sequence: Synthetic oligonucleotide
acaguaaguuaaauggucc

SEQ ID NO: 687207 - RNA, 19 nt, Artificial Sequence
  Description of Artificial Sequence: Synthetic oligonucleotide
cuugaucugagacacuugc

SEQ ID NO: 687208 - RNA, 19 nt, Artificial Sequence
  Description of Artificial Sequence: Synthetic oligonucleotide
ugaucguaaagaaugcagu

SEQ ID NO: 687209 - RNA, 19 nt, Artificial Sequence
  Description of Artificial Sequence: Synthetic oligonucleotide
aaugcaguuaaaugaccca

SEQ ID NO: 687210 - RNA, 19 nt, Artificial Sequence
  Description of Artificial Sequence: Synthetic oligonucleotide
uaaaugacccauacacucc

SEQ ID NO: 687211 - RNA, 19 nt, Artificial Sequence
  Description of Artificial Sequence: Synthetic oligonucleotide
cauuucaaaacuaacagua

SEQ ID NO: 687212 - RNA, 19 nt, Artificial Sequence
  Description of Artificial Sequence: Synthetic oligonucleotide
caacauuagcuuuuggccc

SEQ ID NO: 687213 - RNA, 19 nt, Artificial Sequence
  Description of Artificial Sequence: Synthetic oligonucleotide
auacaugaagguuugcuca

SEQ ID NO: 687214 - RNA, 19 nt, Artificial Sequence
  Description of Artificial Sequence: Synthetic oligonucleotide
ucauaagcugccacauugg

SEQ ID NO: 687215 - RNA, 19 nt, Artificial Sequence
  Description of Artificial Sequence: Synthetic oligonucleotide
gaaguugauugccaagugc

SEQ ID NO: 687216 - RNA, 19 nt, Artificial Sequence
  Description of Artificial Sequence: Synthetic oligonucleotide
ggcaucuacacauugauac

SEQ ID NO: 687217 - RNA, 19 nt, Artificial Sequence
  Description of Artificial Sequence: Synthetic oligonucleotide
uagaugauccucucgggag

SEQ ID NO: 687218 - RNA, 19 nt, Artificial Sequence
  Description of Artificial Sequence: Synthetic oligonucleotide
aaaagccuuagaugccuuc

SEQ ID NO: 687219 - RNA, 19 nt, Artificial Sequence
  Description of Artificial Sequence: Synthetic oligonucleotide
cucgacaucacauaguaga

SEQ ID NO: 687220 - RNA, 19 nt, Artificial Sequence
  Description of Artificial Sequence: Synthetic oligonucleotide
uuuuagccaucuuaggugu

SEQ ID NO: 687221 - RNA, 19 nt, Artificial Sequence
  Description of Artificial Sequence: Synthetic oligonucleotide
uguugagauuuauuacagg

SEQ ID NO: 687222 - RNA, 19 nt, Artificial Sequence
  Description of Artificial Sequence: Synthetic oligonucleotide
aauccggucaaggccaucg

SEQ ID NO: 687223 - RNA, 19 nt, Artificial Sequence
  Description of Artificial Sequence: Synthetic oligonucleotide
aagguuugcucacuggacu

SEQ ID NO: 687224 - RNA, 19 nt, Artificial Sequence
  Description of Artificial Sequence: Synthetic oligonucleotide
aguggcgauccgcaaaacc

SEQ ID NO: 687225 - RNA, 19 nt, Artificial Sequence
  Description of Artificial Sequence: Synthetic oligonucleotide
uaugauauugacugccagu

SEQ ID NO: 687226 - RNA, 19 nt, Artificial Sequence
  Description of Artificial Sequence: Synthetic oligonucleotide
caggauaucaggucgcuag

SEQ ID NO: 687227 - RNA, 19 nt, Artificial Sequence
  Description of Artificial Sequence: Synthetic oligonucleotide
ugcuguaugauacuuccaa

SEQ ID NO: 687228 - RNA, 19 nt, Artificial Sequence
  Description of Artificial Sequence: Synthetic oligonucleotide
guagauagaaggccucugg

SEQ ID NO: 687229 - RNA, 19 nt, Artificial Sequence
  Description of Artificial Sequence: Synthetic oligonucleotide
gaaugcaguuaaaugaccc

SEQ ID NO: 687230 - RNA, 19 nt, Artificial Sequence
  Description of Artificial Sequence: Synthetic oligonucleotide
cucaccaacaugacuacag

SEQ ID NO: 687231 - RNA, 19 nt, Artificial Sequence
  Description of Artificial Sequence: Synthetic oligonucleotide
guaguaucugccuggcucg

SEQ ID NO: 687232 - RNA, 19 nt, Artificial Sequence
  Description of Artificial Sequence: Synthetic oligonucleotide
uauccucagauccaggaaa

SEQ ID NO: 687233 - RNA, 19 nt, Artificial Sequence
  Description of Artificial Sequence: Synthetic oligonucleotide
caaacauucccugaugccc

SEQ ID NO: 687234 - RNA, 19 nt, Artificial Sequence
  Description of Artificial Sequence: Synthetic oligonucleotide
augauauugacugccagug

SEQ ID NO: 687235 - RNA, 19 nt, Artificial Sequence
  Description of Artificial Sequence: Synthetic oligonucleotide
acuugaagguaagagcuac

SEQ ID NO: 687236 - RNA, 19 nt, Artificial Sequence
  Description of Artificial Sequence: Synthetic oligonucleotide
cuuuacacugagucgacac

SEQ ID NO: 687237 - RNA, 19 nt, Artificial Sequence
  Description of Artificial Sequence: Synthetic oligonucleotide
ugugcaugaucguaaagaa

SEQ ID NO: 687238 - RNA, 19 nt, Artificial Sequence
  Description of Artificial Sequence: Synthetic oligonucleotide
gauacgauuuucuuggcua

SEQ ID NO: 687239 - RNA, 19 nt, Artificial Sequence
  Description of Artificial Sequence: Synthetic oligonucleotide
acugagucgacacacugcu

SEQ ID NO: 687240 - RNA, 19 nt, Artificial Sequence
  Description of Artificial Sequence: Synthetic oligonucleotide
aaaccuguuccaauggcag

SEQ ID NO: 687241 - RNA, 19 nt, Artificial Sequence
  Description of Artificial Sequence: Synthetic oligonucleotide
auaacucucacuccagagu

SEQ ID NO: 687242 - RNA, 19 nt, Artificial Sequence
  Description of Artificial Sequence: Synthetic oligonucleotide
cauaaaagggagugacccg

SEQ ID NO: 687243 - RNA, 19 nt, Artificial Sequence
  Description of Artificial Sequence: Synthetic oligonucleotide
uuaagggacauugcaaaca

SEQ ID NO: 687244 - RNA, 19 nt, Artificial Sequence
  Description of Artificial Sequence: Synthetic oligonucleotide
aauaucaagcagauacaug

SEQ ID NO: 687245 - RNA, 19 nt, Artificial Sequence
  Description of Artificial Sequence: Synthetic oligonucleotide
uuuacacugagucgacaca

SEQ ID NO: 687246 - RNA, 19 nt, Artificial Sequence
  Description of Artificial Sequence: Synthetic oligonucleotide
auugauacuagcagaagca

SEQ ID NO: 687247 - RNA, 19 nt, Artificial Sequence
  Description of Artificial Sequence: Synthetic oligonucleotide
gguaagagcuacaagaaug

SEQ ID NO: 687248 - RNA, 19 nt, Artificial Sequence
  Description of Artificial Sequence: Synthetic oligonucleotide
uuuaagcuucguauccuca

SEQ ID NO: 687249 - RNA, 19 nt, Artificial Sequence
  Description of Artificial Sequence: Synthetic oligonucleotide
aacguaguaucugccuggc

SEQ ID NO: 687250 - RNA, 19 nt, Artificial Sequence
  Description of Artificial Sequence: Synthetic oligonucleotide
caguaaguuaaaugguccc

SEQ ID NO: 687251 - RNA, 19 nt, Artificial Sequence
  Description of Artificial Sequence: Synthetic oligonucleotide
gacugcauaaaagggagug

SEQ ID NO: 687252 - RNA, 19 nt, Artificial Sequence
  Description of Artificial Sequence: Synthetic oligonucleotide
auaagcugccacauuggcc

SEQ ID NO: 687253 - RNA, 19 nt, Artificial Sequence
  Description of Artificial Sequence: Synthetic oligonucleotide
acuuuugacugcauaaaag

SEQ ID NO: 687254 - RNA, 19 nt, Artificial Sequence
  Description of Artificial Sequence: Synthetic oligonucleotide
agggucaguacauccacuc

SEQ ID NO: 687255 - RNA, 19 nt, Artificial Sequence
  Description of Artificial Sequence: Synthetic oligonucleotide
agaugauccucucgggagg

SEQ ID NO: 687256 - RNA, 19 nt, Artificial Sequence
  Description of Artificial Sequence: Synthetic oligonucleotide
gaggcaacguaguaucugc

SEQ ID NO: 687257 - RNA, 19 nt, Artificial Sequence
  Description of Artificial Sequence: Synthetic oligonucleotide
gaugggauucaguuauggc

SEQ ID NO: 687258 - RNA, 19 nt, Artificial Sequence
  Description of Artificial Sequence: Synthetic oligonucleotide
ugcccaauuauuucaagau

SEQ ID NO: 687259 - RNA, 19 nt, Artificial Sequence
  Description of Artificial Sequence: Synthetic oligonucleotide
agcuacaaaugcuugcuca

SEQ ID NO: 687260 - RNA, 19 nt, Artificial Sequence
  Description of Artificial Sequence: Synthetic oligonucleotide
ugcauaaaagggagugacc

SEQ ID NO: 687261 - RNA, 19 nt, Artificial Sequence
  Description of Artificial Sequence: Synthetic oligonucleotide
uuagaaucgucaguggcga

SEQ ID NO: 687262 - RNA, 19 nt, Artificial Sequence
  Description of Artificial Sequence: Synthetic oligonucleotide
ugagucgacacacugcuuu

SEQ ID NO: 687263 - RNA, 19 nt, Artificial Sequence
  Description of Artificial Sequence: Synthetic oligonucleotide
uaaaagggagugacccggg

SEQ ID NO: 687264 - RNA, 19 nt, Artificial Sequence
  Description of Artificial Sequence: Synthetic oligonucleotide
aggaauacacuucauuaau

SEQ ID NO: 687265 - RNA, 19 nt, Artificial Sequence
  Description of Artificial Sequence: Synthetic oligonucleotide
uccgacaaggccuggacga

SEQ ID NO: 687266 - RNA, 19 nt, Artificial Sequence
  Description of Artificial Sequence: Synthetic oligonucleotide
augaucguaaagaaugcag

SEQ ID NO: 687267 - RNA, 19 nt, Artificial Sequence
  Description of Artificial Sequence: Synthetic oligonucleotide
auagaugauccucucggga

SEQ ID NO: 687268 - RNA, 19 nt, Artificial Sequence
  Description of Artificial Sequence: Synthetic oligonucleotide
ggauauggcagucaaacuc

SEQ ID NO: 687269 - RNA, 19 nt, Artificial Sequence
  Description of Artificial Sequence: Synthetic oligonucleotide
guuaguaugucugaaaagu

SEQ ID NO: 687270 - RNA, 19 nt, Artificial Sequence
  Description of Artificial Sequence: Synthetic oligonucleotide
gcuucguauccucagaucc

SEQ ID NO: 687271 - RNA, 19 nt, Artificial Sequence
  Description of Artificial Sequence: Synthetic oligonucleotide
agugugucccuucuuuaag

SEQ ID NO: 687272 - RNA, 19 nt, Artificial Sequence
  Description of Artificial Sequence: Synthetic oligonucleotide
caacguaguaucugccugg

SEQ ID NO: 687273 - RNA, 19 nt, Artificial Sequence
  Description of Artificial Sequence: Synthetic oligonucleotide
aaggccaucgcauguuggu

SEQ ID NO: 687274 - RNA, 19 nt, Artificial Sequence
  Description of Artificial Sequence: Synthetic oligonucleotide
aacccguugaaaguagaug

SEQ ID NO: 687275 - RNA, 19 nt, Artificial Sequence
  Description of Artificial Sequence: Synthetic oligonucleotide
caucaucuggacuccauug

SEQ ID NO: 687276 - RNA, 19 nt, Artificial Sequence
  Description of Artificial Sequence: Synthetic oligonucleotide
cuaugauauugacugccag

SEQ ID NO: 687277 - RNA, 19 nt, Artificial Sequence
  Description of Artificial Sequence: Synthetic oligonucleotide
ucgggaggcacuccaaggc

SEQ ID NO: 687278 - RNA, 19 nt, Artificial Sequence
  Description of Artificial Sequence: Synthetic oligonucleotide
gaaucgucaguggcgaucc

SEQ ID NO: 687279 - RNA, 19 nt, Artificial Sequence
  Description of Artificial Sequence: Synthetic oligonucleotide
gauaucaggucgcuaggca

SEQ ID NO: 687280 - RNA, 19 nt, Artificial Sequence
  Description of Artificial Sequence: Synthetic oligonucleotide
cauaagcugccacauuggc

SEQ ID NO: 687281 - RNA, 19 nt, Artificial Sequence
  Description of Artificial Sequence: Synthetic oligonucleotide
agguuugcucacuggacuc

SEQ ID NO: 687282 - RNA, 19 nt, Artificial Sequence
  Description of Artificial Sequence: Synthetic oligonucleotide
cauacacuccaucauucac

SEQ ID NO: 687283 - RNA, 19 nt, Artificial Sequence
  Description of Artificial Sequence: Synthetic oligonucleotide
ucuagagaugggauucagu

SEQ ID NO: 687284 - RNA, 19 nt, Artificial Sequence
  Description of Artificial Sequence: Synthetic oligonucleotide
uaagugugacccaucuccu

SEQ ID NO: 687285 - RNA, 19 nt, Artificial Sequence
  Description of Artificial Sequence: Synthetic oligonucleotide
accuucauuaacucaacuu

SEQ ID NO: 687286 - RNA, 19 nt, Artificial Sequence
  Description of Artificial Sequence: Synthetic oligonucleotide
uacaugaagguuugcucac

SEQ ID NO: 687287 - RNA, 19 nt, Artificial Sequence
  Description of Artificial Sequence: Synthetic oligonucleotide
uacauggauuugcauagau

SEQ ID NO: 687288 - RNA, 19 nt, Artificial Sequence
  Description of Artificial Sequence: Synthetic oligonucleotide
gaguaauacuucucaucug

SEQ ID NO: 687289 - RNA, 19 nt, Artificial Sequence
  Description of Artificial Sequence: Synthetic oligonucleotide
aacuuuacacugagucgac

SEQ ID NO: 687290 - RNA, 19 nt, Artificial Sequence
  Description of Artificial Sequence: Synthetic oligonucleotide
ucucggugugccuacaaaa

SEQ ID NO: 687291 - RNA, 19 nt, Artificial Sequence
  Description of Artificial Sequence: Synthetic oligonucleotide
ucuggcgggaaguacuugu

SEQ ID NO: 687292 - RNA, 19 nt, Artificial Sequence
  Description of Artificial Sequence: Synthetic oligonucleotide
aagcuaaacuugaagguaa

SEQ ID NO: 687293 - RNA, 19 nt, Artificial Sequence
  Description of Artificial Sequence: Synthetic oligonucleotide
uugcuuacauggauuugca

SEQ ID NO: 687294 - RNA, 19 nt, Artificial Sequence
  Description of Artificial Sequence: Synthetic oligonucleotide
aaacauucccugaugccca

SEQ ID NO: 687295 - RNA, 19 nt, Artificial Sequence
  Description of Artificial Sequence: Synthetic oligonucleotide
ucgaggauauggcagucaa

SEQ ID NO: 687296 - RNA, 19 nt, Artificial Sequence
  Description of Artificial Sequence: Synthetic oligonucleotide
uccgcaaaaccaacuuggc

SEQ ID NO: 687297 - RNA, 19 nt, Artificial Sequence
  Description of Artificial Sequence: Synthetic oligonucleotide
acaguguaugcacccaugu

SEQ ID NO: 687298 - RNA, 19 nt, Artificial Sequence
  Description of Artificial Sequence: Synthetic oligonucleotide
ucuggcgaccuucauuaac

SEQ ID NO: 687299 - RNA, 19 nt, Artificial Sequence
  Description of Artificial Sequence: Synthetic oligonucleotide
ucaguggcgauccgcaaaa

SEQ ID NO: 687300 - RNA, 19 nt, Artificial Sequence
  Description of Artificial Sequence: Synthetic oligonucleotide
cugcauaaaagggagugac

SEQ ID NO: 687301 - RNA, 19 nt, Artificial Sequence
  Description of Artificial Sequence: Synthetic oligonucleotide
uggaacccguugaaaguag

SEQ ID NO: 687302 - RNA, 19 nt, Artificial Sequence
  Description of Artificial Sequence: Synthetic oligonucleotide
gcugacaccaaugacauca

SEQ ID NO: 687303 - RNA, 19 nt, Artificial Sequence
  Description of Artificial Sequence: Synthetic oligonucleotide
auaguagauagaaggccuc

SEQ ID NO: 687304 - RNA, 19 nt, Artificial Sequence
  Description of Artificial Sequence: Synthetic oligonucleotide
uuacuagguggugaugcag

SEQ ID NO: 687305 - RNA, 19 nt, Artificial Sequence
  Description of Artificial Sequence: Synthetic oligonucleotide
ugauauugacugccagugu

SEQ ID NO: 687306 - RNA, 19 nt, Artificial Sequence
  Description of Artificial Sequence: Synthetic oligonucleotide
agcuucguauccucagauc

SEQ ID NO: 687307 - RNA, 19 nt, Artificial Sequence
  Description of Artificial Sequence: Synthetic oligonucleotide
agguaagugugacccaucu

SEQ ID NO: 687308 - RNA, 19 nt, Artificial Sequence
  Description of Artificial Sequence: Synthetic oligonucleotide
ugaggcaacguaguaucug

SEQ ID NO: 687309 - RNA, 19 nt, Artificial Sequence
  Description of Artificial Sequence: Synthetic oligonucleotide
ucucgggaggcacuccaag

SEQ ID NO: 687310 - RNA, 19 nt, Artificial Sequence
  Description of Artificial Sequence: Synthetic oligonucleotide
aucgucaguggcgauccgc

SEQ ID NO: 687311 - RNA, 19 nt, Artificial Sequence
  Description of Artificial Sequence: Synthetic oligonucleotide
aucacauaguagauagaag

SEQ ID NO: 687312 - RNA, 19 nt, Artificial Sequence
  Description of Artificial Sequence: Synthetic oligonucleotide
ucgacacacugcuuuagaa

SEQ ID NO: 687313 - RNA, 19 nt, Artificial Sequence
  Description of Artificial Sequence: Synthetic oligonucleotide
cacugagucgacacacugc

SEQ ID NO: 687314 - RNA, 19 nt, Artificial Sequence
  Description of Artificial Sequence: Synthetic oligonucleotide
cacauugauacuagcagaa

SEQ ID NO: 687315 - RNA, 19 nt, Artificial Sequence
  Description of Artificial Sequence: Synthetic oligonucleotide
uugcuggcggcauacuuga

SEQ ID NO: 687316 - RNA, 19 nt, Artificial Sequence
  Description of Artificial Sequence: Synthetic oligonucleotide
auacacuccaucauucaca

SEQ ID NO: 687317 - RNA, 19 nt, Artificial Sequence
  Description of Artificial Sequence: Synthetic oligonucleotide
cacaauccggucaaggcca

SEQ ID NO: 687318 - RNA, 19 nt, Artificial Sequence
  Description of Artificial Sequence: Synthetic oligonucleotide
cugugcaggaagugugucc

SEQ ID NO: 687319 - RNA, 19 nt, Artificial Sequence
  Description of Artificial Sequence: Synthetic oligonucleotide
augacgguccaucccgcuc

SEQ ID NO: 687320 - RNA, 19 nt, Artificial Sequence
  Description of Artificial Sequence: Synthetic oligonucleotide
cuacaagaauggcaucuac

SEQ ID NO: 687321 - RNA, 19 nt, Artificial Sequence
  Description of Artificial Sequence: Synthetic oligonucleotide
cucgggaggcacuccaagg

SEQ ID NO: 687322 - RNA, 19 nt, Artificial Sequence
  Description of Artificial Sequence: Synthetic oligonucleotide
auacgauuuucuuggcuau

SEQ ID NO: 687323 - RNA, 19 nt, Artificial Sequence
  Description of Artificial Sequence: Synthetic oligonucleotide
aacuaacaguaaguuaaau

SEQ ID NO: 687324 - RNA, 19 nt, Artificial Sequence
  Description of Artificial Sequence: Synthetic oligonucleotide
aggucucagggucaguaca

SEQ ID NO: 687325 - RNA, 19 nt, Artificial Sequence
  Description of Artificial Sequence: Synthetic oligonucleotide
ugacguuccucaccaacau

SEQ ID NO: 687326 - RNA, 19 nt, Artificial Sequence
  Description of Artificial Sequence: Synthetic oligonucleotide
acauugauacuagcagaag

SEQ ID NO: 687327 - RNA, 19 nt, Artificial Sequence
  Description of Artificial Sequence: Synthetic oligonucleotide
aaguacuuguccagagcug

SEQ ID NO: 687328 - RNA, 19 nt, Artificial Sequence
  Description of Artificial Sequence: Synthetic oligonucleotide
gcaguuaaaugacccauac

SEQ ID NO: 687329 - RNA, 19 nt, Artificial Sequence
  Description of Artificial Sequence: Synthetic oligonucleotide
aaacuaacaguaaguuaaa

SEQ ID NO: 687330 - RNA, 19 nt, Artificial Sequence
  Description of Artificial Sequence: Synthetic oligonucleotide
aaaugcuugcucaguggcu

SEQ ID NO: 687331 - RNA, 19 nt, Artificial Sequence
  Description of Artificial Sequence: Synthetic oligonucleotide
ucguauccucagauccagg

SEQ ID NO: 687332 - RNA, 19 nt, Artificial Sequence
  Description of Artificial Sequence: Synthetic oligonucleotide
caaggccaucgcauguugg

SEQ ID NO: 687333 - RNA, 19 nt, Artificial Sequence
  Description of Artificial Sequence: Synthetic oligonucleotide
aguagauagaaggccucug

SEQ ID NO: 687334 - RNA, 19 nt, Artificial Sequence
  Description of Artificial Sequence: Synthetic oligonucleotide
ggcuauaacucucacucca

SEQ ID NO: 687335 - RNA, 19 nt, Artificial Sequence
  Description of Artificial Sequence: Synthetic oligonucleotide
gcuuacauggauuugcaua

SEQ ID NO: 687336 - RNA, 19 nt, Artificial Sequence
  Description of Artificial Sequence: Synthetic oligonucleotide
gcuuuagaaucgucagugg

SEQ ID NO: 687337 - RNA, 19 nt, Artificial Sequence
  Description of Artificial Sequence: Synthetic oligonucleotide
ggcuaugauauugacugcc

SEQ ID NO: 687338 - RNA, 19 nt, Artificial Sequence
  Description of Artificial Sequence: Synthetic oligonucleotide
gaugauccucucgggaggc

SEQ ID NO: 687339 - RNA, 19 nt, Artificial Sequence
  Description of Artificial Sequence: Synthetic oligonucleotide
auacaugcugaaaccaacu

SEQ ID NO: 687340 - RNA, 19 nt, Artificial Sequence
  Description of Artificial Sequence: Synthetic oligonucleotide
acgauuuucuuggcuauga

SEQ ID NO: 687341 - RNA, 19 nt, Artificial Sequence
  Description of Artificial Sequence: Synthetic oligonucleotide
aaucgucaguggcgauccg

SEQ ID NO: 687342 - RNA, 19 nt, Artificial Sequence
  Description of Artificial Sequence: Synthetic oligonucleotide
ucagaacgucuccaagguc

SEQ ID NO: 687343 - RNA, 19 nt, Artificial Sequence
  Description of Artificial Sequence: Synthetic oligonucleotide
aucguaaagaaugcaguua

SEQ ID NO: 687344 - RNA, 19 nt, Artificial Sequence
  Description of Artificial Sequence: Synthetic oligonucleotide
guaugauacuuccaacugu

SEQ ID NO: 687345 - RNA, 19 nt, Artificial Sequence
  Description of Artificial Sequence: Synthetic oligonucleotide
gcugaggcaacguaguauc

SEQ ID NO: 687346 - RNA, 19 nt, Artificial Sequence
  Description of Artificial Sequence: Synthetic oligonucleotide
agcuaggguguucacuaca

SEQ ID NO: 687347 - RNA, 19 nt, Artificial Sequence
  Description of Artificial Sequence: Synthetic oligonucleotide
cuaggguguucacuacagc

SEQ ID NO: 687348 - RNA, 19 nt, Artificial Sequence
  Description of Artificial Sequence: Synthetic oligonucleotide
gucaguacauccacucccc

SEQ ID NO: 687349 - RNA, 19 nt, Artificial Sequence
  Description of Artificial Sequence: Synthetic oligonucleotide
caguacauccacuccccac

SEQ ID NO: 687350 - RNA, 19 nt, Artificial Sequence
  Description of Artificial Sequence: Synthetic oligonucleotide
agaacgucuccaagguccg

SEQ ID NO: 687351 - RNA, 19 nt, Artificial Sequence
  Description of Artificial Sequence: Synthetic oligonucleotide
gcaacguaguaucugccug

SEQ ID NO: 687352 - RNA, 19 nt, Artificial Sequence
  Description of Artificial Sequence: Synthetic oligonucleotide
auauugacugccaguguga

SEQ ID NO: 687353 - RNA, 19 nt, Artificial Sequence
  Description of Artificial Sequence: Synthetic oligonucleotide
augcaguuaaaugacccau

SEQ ID NO: 687354 - RNA, 19 nt, Artificial Sequence
  Description of Artificial Sequence: Synthetic oligonucleotide
augacguuccucaccaaca

SEQ ID NO: 687355 - RNA, 19 nt, Artificial Sequence
  Description of Artificial Sequence: Synthetic oligonucleotide
ucgauacgauuuucuuggc

SEQ ID NO: 687356 - RNA, 19 nt, Artificial Sequence
  Description of Artificial Sequence: Synthetic oligonucleotide
cacaugugcaugaucguaa

SEQ ID NO: 687357 - RNA, 19 nt, Artificial Sequence
  Description of Artificial Sequence: Synthetic oligonucleotide
auuuagcucuuuugcccgu

SEQ ID NO: 687358 - RNA, 19 nt, Artificial Sequence
  Description of Artificial Sequence: Synthetic oligonucleotide
uccauugcuggcggcauac

SEQ ID NO: 687359 - RNA, 19 nt, Artificial Sequence
  Description of Artificial Sequence: Synthetic oligonucleotide
ccacaauccggucaaggcc

SEQ ID NO: 687360 - RNA, 19 nt, Artificial Sequence
  Description of Artificial Sequence: Synthetic oligonucleotide
uacgauuuucuuggcuaug

SEQ ID NO: 687361 - RNA, 19 nt, Artificial Sequence
  Description of Artificial Sequence: Synthetic oligonucleotide
aggcaacguaguaucugcc

SEQ ID NO: 687362 - RNA, 19 nt, Artificial Sequence
  Description of Artificial Sequence: Synthetic oligonucleotide
aucugugccaagcccuacu

SEQ ID NO: 687363 - RNA, 19 nt, Artificial Sequence
  Description of Artificial Sequence: Synthetic oligonucleotide
gucacaacauuagcuuuug

SEQ ID NO: 687364 - RNA, 19 nt, Artificial Sequence
  Description of Artificial Sequence: Synthetic oligonucleotide
uuagcucuuuugcccguuc

SEQ ID NO: 687365 - RNA, 19 nt, Artificial Sequence
  Description of Artificial Sequence: Synthetic oligonucleotide
cuauaacucucacuccaga

SEQ ID NO: 687366 - RNA, 19 nt, Artificial Sequence
  Description of Artificial Sequence: Synthetic oligonucleotide
acccauacacuccaucauu

SEQ ID NO: 687367 - RNA, 19 nt, Artificial Sequence
  Description of Artificial Sequence: Synthetic oligonucleotide
cuucguauccucagaucca

SEQ ID NO: 687368 - RNA, 19 nt, Artificial Sequence
  Description of Artificial Sequence: Synthetic oligonucleotide
aguugauugccaagugcug

SEQ ID NO: 687369 - RNA, 19 nt, Artificial Sequence
  Description of Artificial Sequence: Synthetic oligonucleotide
agcuaaacuugaagguaag

SEQ ID NO: 687370 - RNA, 19 nt, Artificial Sequence
  Description of Artificial Sequence: Synthetic oligonucleotide
ucgcauguugguccccaga

SEQ ID NO: 687371 - RNA, 19 nt, Artificial Sequence
  Description of Artificial Sequence: Synthetic oligonucleotide
augcuggaugaguaauacu

SEQ ID NO: 687372 - RNA, 19 nt, Artificial Sequence
  Description of Artificial Sequence: Synthetic oligonucleotide
acagguaagugugacccau

SEQ ID NO: 687373 - RNA, 19 nt, Artificial Sequence
  Description of Artificial Sequence: Synthetic oligonucleotide
aucgucagagccccuucga

SEQ ID NO: 687374 - RNA, 19 nt, Artificial Sequence
  Description of Artificial Sequence: Synthetic oligonucleotide
ugacugccagugugaaagc

SEQ ID NO: 687375 - RNA, 19 nt, Artificial Sequence
  Description of Artificial Sequence: Synthetic oligonucleotide
auuggccucgacaucacau

SEQ ID NO: 687376 - RNA, 19 nt, Artificial Sequence
  Description of Artificial Sequence: Synthetic oligonucleotide
uggcaucuacacauugaua

SEQ ID NO: 687377 - RNA, 19 nt, Artificial Sequence
  Description of Artificial Sequence: Synthetic oligonucleotide
ggucgcuaggcagaugacg

SEQ ID NO: 687378 - RNA, 19 nt, Artificial Sequence
  Description of Artificial Sequence: Synthetic oligonucleotide
uuacauggauuugcauaga

SEQ ID NO: 687379 - RNA, 19 nt, Artificial Sequence
  Description of Artificial Sequence: Synthetic oligonucleotide
ugcuuacauggauuugcau

SEQ ID NO: 687380 - RNA, 19 nt, Artificial Sequence
  Description of Artificial Sequence: Synthetic oligonucleotide
caagcuaaacuugaaggua

SEQ ID NO: 687381 - RNA, 19 nt, Artificial Sequence
  Description of Artificial Sequence: Synthetic oligonucleotide
uacauccacuccccacgug

SEQ ID NO: 687382 - RNA, 19 nt, Artificial Sequence
  Description of Artificial Sequence: Synthetic oligonucleotide
ucgucagagccccuucgau

SEQ ID NO: 687383 - RNA, 19 nt, Artificial Sequence
  Description of Artificial Sequence: Synthetic oligonucleotide
cguaguaucugccuggcuc

SEQ ID NO: 687384 - RNA, 19 nt, Artificial Sequence
  Description of Artificial Sequence: Synthetic oligonucleotide
cauuacuuuugacugcaua

SEQ ID NO: 687385 - RNA, 19 nt, Artificial Sequence
  Description of Artificial Sequence: Synthetic oligonucleotide
agucgacacacugcuuuag

SEQ ID NO: 687386 - RNA, 19 nt, Artificial Sequence
  Description of Artificial Sequence: Synthetic oligonucleotide
cguugaaaguagaugcagc

SEQ ID NO: 687387 - RNA, 19 nt, Artificial Sequence
  Description of Artificial Sequence: Synthetic oligonucleotide
caugaucguaaagaaugca

SEQ ID NO: 687388 - RNA, 19 nt, Artificial Sequence
  Description of Artificial Sequence: Synthetic oligonucleotide
aacuugaagguaagagcua

SEQ ID NO: 687389 - RNA, 19 nt, Artificial Sequence
  Description of Artificial Sequence: Synthetic oligonucleotide
guauccucagauccaggaa

SEQ ID NO: 687390 - RNA, 19 nt, Artificial Sequence
  Description of Artificial Sequence: Synthetic oligonucleotide
cuggcggcauacuugaucu

SEQ ID NO: 687391 - RNA, 19 nt, Artificial Sequence
  Description of Artificial Sequence: Synthetic oligonucleotide
cccauucugccaaauguac

SEQ ID NO: 687392 - RNA, 19 nt, Artificial Sequence
  Description of Artificial Sequence: Synthetic oligonucleotide
cacguggaagcugacacca

SEQ ID NO: 687393 - RNA, 19 nt, Artificial Sequence
  Description of Artificial Sequence: Synthetic oligonucleotide
ccugaugcccaauuauuuc

SEQ ID NO: 687394 - RNA, 19 nt, Artificial Sequence
  Description of Artificial Sequence: Synthetic oligonucleotide
cuggcgaccuucauuaacu

SEQ ID NO: 687395 - RNA, 19 nt, Artificial Sequence
  Description of Artificial Sequence: Synthetic oligonucleotide
ugaggggcacacguuagua

SEQ ID NO: 687396 - RNA, 19 nt, Artificial Sequence
  Description of Artificial Sequence: Synthetic oligonucleotide
agcugaggcaacguaguau

SEQ ID NO: 687397 - RNA, 19 nt, Artificial Sequence
  Description of Artificial Sequence: Synthetic oligonucleotide
aggccaucgcauguugguc

SEQ ID NO: 687398 - RNA, 19 nt, Artificial Sequence
  Description of Artificial Sequence: Synthetic oligonucleotide
cguuaguaugucugaaaag

SEQ ID NO: 687399 - RNA, 19 nt, Artificial Sequence
  Description of Artificial Sequence: Synthetic oligonucleotide
gcgaagucaaggguugagg

SEQ ID NO: 687400 - RNA, 19 nt, Artificial Sequence
  Description of Artificial Sequence: Synthetic oligonucleotide
agccugugcaggaagugug

SEQ ID NO: 687401 - RNA, 19 nt, Artificial Sequence
  Description of Artificial Sequence: Synthetic oligonucleotide
caagguccgccacauaaaa

SEQ ID NO: 687402 - RNA, 19 nt, Artificial Sequence
  Description of Artificial Sequence: Synthetic oligonucleotide
gcaugaucguaaagaaugc

SEQ ID NO: 687403 - RNA, 19 nt, Artificial Sequence
  Description of Artificial Sequence: Synthetic oligonucleotide
guugauugccaagugcugu

SEQ ID NO: 687404 - RNA, 19 nt, Artificial Sequence
  Description of Artificial Sequence: Synthetic oligonucleotide
uugccaagugcuguaugau

SEQ ID NO: 687405 - RNA, 19 nt, Artificial Sequence
  Description of Artificial Sequence: Synthetic oligonucleotide
gcuauaacucucacuccag

SEQ ID NO: 687406 - RNA, 19 nt, Artificial Sequence
  Description of Artificial Sequence: Synthetic oligonucleotide
gucgacacacugcuuuaga

SEQ ID NO: 687407 - RNA, 19 nt, Artificial Sequence
  Description of Artificial Sequence: Synthetic oligonucleotide
gcucuggcgaccuucauua

SEQ ID NO: 687408 - RNA, 19 nt, Artificial Sequence
  Description of Artificial Sequence: Synthetic oligonucleotide
acuuuacacugagucgaca

SEQ ID NO: 687409 - RNA, 19 nt, Artificial Sequence
  Description of Artificial Sequence: Synthetic oligonucleotide
auccuugucaucagaggaa

SEQ ID NO: 687410 - RNA, 19 nt, Artificial Sequence
  Description of Artificial Sequence: Synthetic oligonucleotide
aagacacagcgggcauccg

SEQ ID NO: 687411 - RNA, 19 nt, Artificial Sequence
  Description of Artificial Sequence: Synthetic oligonucleotide
agcugacaccaaugacauc

SEQ ID NO: 687412 - RNA, 19 nt, Artificial Sequence
  Description of Artificial Sequence: Synthetic oligonucleotide
ugauugccaagugcuguau

SEQ ID NO: 687413 - RNA, 19 nt, Artificial Sequence
  Description of Artificial Sequence: Synthetic oligonucleotide
aucgcauguugguccccag

SEQ ID NO: 687414 - RNA, 19 nt, Artificial Sequence
  Description of Artificial Sequence: Synthetic oligonucleotide
ggcgggaaguacuugucca

SEQ ID NO: 687415 - RNA, 19 nt, Artificial Sequence
  Description of Artificial Sequence: Synthetic oligonucleotide
aguguggcaccaaacuuua

SEQ ID NO: 687416 - RNA, 19 nt, Artificial Sequence
  Description of Artificial Sequence: Synthetic oligonucleotide
auggauuugcauagaugau

SEQ ID NO: 687417 - RNA, 19 nt, Artificial Sequence
  Description of Artificial Sequence: Synthetic oligonucleotide
ccgcaaaaccaacuuggcc

SEQ ID NO: 687418 - RNA, 19 nt, Artificial Sequence
  Description of Artificial Sequence: Synthetic oligonucleotide
gcgggaaguacuuguccag

SEQ ID NO: 687419 - RNA, 19 nt, Artificial Sequence
  Description of Artificial Sequence: Synthetic oligonucleotide
aucgaggauauggcaguca

SEQ ID NO: 687420 - RNA, 19 nt, Artificial Sequence
  Description of Artificial Sequence: Synthetic oligonucleotide
gacgaaggucucaggguca

SEQ ID NO: 687421 - RNA, 19 nt, Artificial Sequence
  Description of Artificial Sequence: Synthetic oligonucleotide
acacuugcuuacauggauu

SEQ ID NO: 687422 - RNA, 19 nt, Artificial Sequence
  Description of Artificial Sequence: Synthetic oligonucleotide
cagguaagugugacccauc

SEQ ID NO: 687423 - RNA, 19 nt, Artificial Sequence
  Description of Artificial Sequence: Synthetic oligonucleotide
gucgcuaggcagaugacgu

SEQ ID NO: 687424 - RNA, 19 nt, Artificial Sequence
  Description of Artificial Sequence: Synthetic oligonucleotide
cuguaccaacuguaucuca

SEQ ID NO: 687425 - RNA, 19 nt, Artificial Sequence
  Description of Artificial Sequence: Synthetic oligonucleotide
uuuagcucuuuugcccguu

SEQ ID NO: 687426 - RNA, 19 nt, Artificial Sequence
  Description of Artificial Sequence: Synthetic oligonucleotide
guacaagcuacaaaugcuu

SEQ ID NO: 687427 - RNA, 19 nt, Artificial Sequence
  Description of Artificial Sequence: Synthetic oligonucleotide
ccguugaaaguagaugcag

SEQ ID NO: 687428 - RNA, 19 nt, Artificial Sequence
  Description of Artificial Sequence: Synthetic oligonucleotide
gacccauacacuccaucau

SEQ ID NO: 687429 - RNA, 19 nt, Artificial Sequence
  Description of Artificial Sequence: Synthetic oligonucleotide
gcuggcggcauacuugauc

SEQ ID NO: 687430 - RNA, 19 nt, Artificial Sequence
  Description of Artificial Sequence: Synthetic oligonucleotide
cagcuaggguguucacuac

SEQ ID NO: 687431 - RNA, 19 nt, Artificial Sequence
  Description of Artificial Sequence: Synthetic oligonucleotide
guaucugccuggcucggcu

SEQ ID NO: 687432 - RNA, 19 nt, Artificial Sequence
  Description of Artificial Sequence: Synthetic oligonucleotide
acguaguaucugccuggcu

SEQ ID NO: 687433 - RNA, 19 nt, Artificial Sequence
  Description of Artificial Sequence: Synthetic oligonucleotide
gccucgacaucacauagua

SEQ ID NO: 687434 - RNA, 19 nt, Artificial Sequence
  Description of Artificial Sequence: Synthetic oligonucleotide
ccuacucuuacaaagucau

SEQ ID NO: 687435 - RNA, 19 nt, Artificial Sequence
  Description of Artificial Sequence: Synthetic oligonucleotide
caggcagauuacagcgcuc

SEQ ID NO: 687436 - RNA, 19 nt, Artificial Sequence
  Description of Artificial Sequence: Synthetic oligonucleotide
caucuccuagccuuccaua

SEQ ID NO: 687437 - RNA, 19 nt, Artificial Sequence
  Description of Artificial Sequence: Synthetic oligonucleotide
ggcgaagucaaggguugag

SEQ ID NO: 687438 - RNA, 19 nt, Artificial Sequence
  Description of Artificial Sequence: Synthetic oligonucleotide
cagucaaaaccuguuccaa

SEQ ID NO: 687439 - RNA, 19 nt, Artificial Sequence
  Description of Artificial Sequence: Synthetic oligonucleotide
gcuaggcagaugacguucc

SEQ ID NO: 687440 - RNA, 19 nt, Artificial Sequence
  Description of Artificial Sequence: Synthetic oligonucleotide
caguuauggccaguuccuc

SEQ ID NO: 687441 - RNA, 19 nt, Artificial Sequence
  Description of Artificial Sequence: Synthetic oligonucleotide
gccaucgcauguugguccc

SEQ ID NO: 687442 - RNA, 19 nt, Artificial Sequence
  Description of Artificial Sequence: Synthetic oligonucleotide
cagaauguccuuggcagua

SEQ ID NO: 687443 - RNA, 19 nt, Artificial Sequence
  Description of Artificial Sequence: Synthetic oligonucleotide
caucgaggauauggcaguc

SEQ ID NO: 687444 - RNA, 19 nt, Artificial Sequence
  Description of Artificial Sequence: Synthetic oligonucleotide
auggcucucggugugccua

SEQ ID NO: 687445 - RNA, 19 nt, Artificial Sequence
  Description of Artificial Sequence: Synthetic oligonucleotide
aggucgcuaggcagaugac

SEQ ID NO: 687446 - RNA, 19 nt, Artificial Sequence
  Description of Artificial Sequence: Synthetic oligonucleotide
ucgcuaggcagaugacguu

SEQ ID NO: 687447 - RNA, 19 nt, Artificial Sequence
  Description of Artificial Sequence: Synthetic oligonucleotide
gaggggcacacguuaguau

SEQ ID NO: 687448 - RNA, 19 nt, Artificial Sequence
  Description of Artificial Sequence: Synthetic oligonucleotide
ccacguggaagcugacacc

SEQ ID NO: 687449 - RNA, 19 nt, Artificial Sequence
  Description of Artificial Sequence: Synthetic oligonucleotide
gaugacgguccaucccgcu

SEQ ID NO: 687450 - RNA, 19 nt, Artificial Sequence
  Description of Artificial Sequence: Synthetic oligonucleotide
cccuacucuuacaaaguca

SEQ ID NO: 687451 - RNA, 19 nt, Artificial Sequence
  Description of Artificial Sequence: Synthetic oligonucleotide
gcuaaacuugaagguaaga

SEQ ID NO: 687452 - RNA, 19 nt, Artificial Sequence
  Description of Artificial Sequence: Synthetic oligonucleotide
gaacgucuccaagguccgc

SEQ ID NO: 687453 - RNA, 19 nt, Artificial Sequence
  Description of Artificial Sequence: Synthetic oligonucleotide
cguauccucagauccagga

SEQ ID NO: 687454 - RNA, 19 nt, Artificial Sequence
  Description of Artificial Sequence: Synthetic oligonucleotide
ggcagaugacguuccucac

SEQ ID NO: 687455 - RNA, 19 nt, Artificial Sequence
  Description of Artificial Sequence: Synthetic oligonucleotide
agcgggcauccgacaaggc

SEQ ID NO: 687456 - RNA, 19 nt, Artificial Sequence
  Description of Artificial Sequence: Synthetic oligonucleotide
ggcaacguaguaucugccu

SEQ ID NO: 687457 - RNA, 19 nt, Artificial Sequence
  Description of Artificial Sequence: Synthetic oligonucleotide
gagaagccugcugguucug

SEQ ID NO: 687458 - RNA, 19 nt, Artificial Sequence
  Description of Artificial Sequence: Synthetic oligonucleotide
agaugacguuccucaccaa

SEQ ID NO: 687459 - RNA, 19 nt, Artificial Sequence
  Description of Artificial Sequence: Synthetic oligonucleotide
ccucgacaucacauaguag

SEQ ID NO: 687460 - RNA, 19 nt, Artificial Sequence
  Description of Artificial Sequence: Synthetic oligonucleotide
gaacccguugaaaguagau

SEQ ID NO: 687461 - RNA, 19 nt, Artificial Sequence
  Description of Artificial Sequence: Synthetic oligonucleotide
cacagcgggcauccgacaa

SEQ ID NO: 687462 - RNA, 19 nt, Artificial Sequence
  Description of Artificial Sequence: Synthetic oligonucleotide
cuagccuuccauacuucau

SEQ ID NO: 687463 - RNA, 19 nt, Artificial Sequence
  Description of Artificial Sequence: Synthetic oligonucleotide
ggcacaagagaugggcaga

SEQ ID NO: 687464 - RNA, 19 nt, Artificial Sequence
  Description of Artificial Sequence: Synthetic oligonucleotide
gucucagggucaguacauc

SEQ ID NO: 687465 - RNA, 19 nt, Artificial Sequence
  Description of Artificial Sequence: Synthetic oligonucleotide
caucgcauguuggucccca

SEQ ID NO: 687466 - RNA, 19 nt, Artificial Sequence
  Description of Artificial Sequence: Synthetic oligonucleotide
cuucaaauuuaagcuucgu

SEQ ID NO: 687467 - RNA, 19 nt, Artificial Sequence
  Description of Artificial Sequence: Synthetic oligonucleotide
uccucucgggaggcacucc

SEQ ID NO: 687468 - RNA, 19 nt, Artificial Sequence
  Description of Artificial Sequence: Synthetic oligonucleotide
aaggccucuggaacccguu

SEQ ID NO: 687469 - RNA, 19 nt, Artificial Sequence
  Description of Artificial Sequence: Synthetic oligonucleotide
cuccuagccuuccauacuu

SEQ ID NO: 687470 - RNA, 19 nt, Artificial Sequence
  Description of Artificial Sequence: Synthetic oligonucleotide
gcaacaguguaugcaccca

SEQ ID NO: 687471 - RNA, 19 nt, Artificial Sequence
  Description of Artificial Sequence: Synthetic oligonucleotide
gucuggcgggaaguacuug

SEQ ID NO: 687472 - RNA, 19 nt, Artificial Sequence
  Description of Artificial Sequence: Synthetic oligonucleotide
ggaacccguugaaaguaga

SEQ ID NO: 687473 - RNA, 19 nt, Artificial Sequence
  Description of Artificial Sequence: Synthetic oligonucleotide
ggcagauuacagcgcucca

SEQ ID NO: 687474 - RNA, 19 nt, Artificial Sequence
  Description of Artificial Sequence: Synthetic oligonucleotide
ggcgauccgcaaaaccaac

SEQ ID NO: 687475 - RNA, 19 nt, Artificial Sequence
  Description of Artificial Sequence: Synthetic oligonucleotide
gcccuguaccaacuguauc

SEQ ID NO: 687476 - RNA, 19 nt, Artificial Sequence
  Description of Artificial Sequence: Synthetic oligonucleotide
gcaaaaccaacuuggccuu

SEQ ID NO: 687477 - RNA, 19 nt, Artificial Sequence
  Description of Artificial Sequence: Synthetic oligonucleotide
cugaggcaacguaguaucu

SEQ ID NO: 687478 - RNA, 19 nt, Artificial Sequence
  Description of Artificial Sequence: Synthetic oligonucleotide
aggcgaagucaaggguuga

SEQ ID NO: 687479 - RNA, 19 nt, Artificial Sequence
  Description of Artificial Sequence: Synthetic oligonucleotide
cggcuauaacucucacucc

SEQ ID NO: 687480 - RNA, 19 nt, Artificial Sequence
  Description of Artificial Sequence: Synthetic oligonucleotide
gugcaugaucguaaagaau

SEQ ID NO: 687481 - RNA, 19 nt, Artificial Sequence
  Description of Artificial Sequence: Synthetic oligonucleotide
ccaauggcagcuagggugu

SEQ ID NO: 687482 - RNA, 19 nt, Artificial Sequence
  Description of Artificial Sequence: Synthetic oligonucleotide
cgaccuucauuaacucaac

SEQ ID NO: 687483 - RNA, 19 nt, Artificial Sequence
  Description of Artificial Sequence: Synthetic oligonucleotide
cauugcuggcggcauacuu

SEQ ID NO: 687484 - RNA, 19 nt, Artificial Sequence
  Description of Artificial Sequence: Synthetic oligonucleotide
ggcucggcuauaacucuca

SEQ ID NO: 687485 - RNA, 19 nt, Artificial Sequence
  Description of Artificial Sequence: Synthetic oligonucleotide
gcgcuccacaauccgguca

SEQ ID NO: 687486 - RNA, 19 nt, Artificial Sequence
  Description of Artificial Sequence: Synthetic oligonucleotide
caguggcgauccgcaaaac

SEQ ID NO: 687487 - RNA, 19 nt, Artificial Sequence
  Description of Artificial Sequence: Synthetic oligonucleotide
ggcacacguuaguaugucu

SEQ ID NO: 687488 - RNA, 19 nt, Artificial Sequence
  Description of Artificial Sequence: Synthetic oligonucleotide
gcccauucugccaaaugua

SEQ ID NO: 687489 - RNA, 19 nt, Artificial Sequence
  Description of Artificial Sequence: Synthetic oligonucleotide
cuaggcagaugacguuccu

SEQ ID NO: 687490 - RNA, 19 nt, Artificial Sequence
  Description of Artificial Sequence: Synthetic oligonucleotide
gagagcuuuuagccaucuu

SEQ ID NO: 687491 - RNA, 19 nt, Artificial Sequence
  Description of Artificial Sequence: Synthetic oligonucleotide
cuacucuuacaaagucauu

SEQ ID NO: 687492 - RNA, 19 nt, Artificial Sequence
  Description of Artificial Sequence: Synthetic oligonucleotide
guuugcucacuggacucau

SEQ ID NO: 687493 - RNA, 19 nt, Artificial Sequence
  Description of Artificial Sequence: Synthetic oligonucleotide
gggcacacguuaguauguc

SEQ ID NO: 687494 - RNA, 19 nt, Artificial Sequence
  Description of Artificial Sequence: Synthetic oligonucleotide
ccugugcaggaaguguguc

SEQ ID NO: 687495 - RNA, 19 nt, Artificial Sequence
  Description of Artificial Sequence: Synthetic oligonucleotide
cgcuaggcagaugacguuc

SEQ ID NO: 687496 - RNA, 19 nt, Artificial Sequence
  Description of Artificial Sequence: Synthetic oligonucleotide
gucaaggccaucgcauguu

SEQ ID NO: 687497 - RNA, 19 nt, Artificial Sequence
  Description of Artificial Sequence: Synthetic oligonucleotide
cucuggcgaccuucauuaa

SEQ ID NO: 687498 - RNA, 19 nt, Artificial Sequence
  Description of Artificial Sequence: Synthetic oligonucleotide
caauccggucaaggccauc

SEQ ID NO: 687499 - RNA, 19 nt, Artificial Sequence
  Description of Artificial Sequence: Synthetic oligonucleotide
cagccugugcaggaagugu

SEQ ID NO: 687500 - RNA, 19 nt, Artificial Sequence
  Description of Artificial Sequence: Synthetic oligonucleotide
cccuucgauacgauuuucu

SEQ ID NO: 687501 - RNA, 19 nt, Artificial Sequence
  Description of Artificial Sequence: Synthetic oligonucleotide
ccaagagaagccugcuggu

SEQ ID NO: 687502 - RNA, 19 nt, Artificial Sequence
  Description of Artificial Sequence: Synthetic oligonucleotide
ccaucccgcucuccugggc

SEQ ID NO: 687503 - RNA, 19 nt, Artificial Sequence
  Description of Artificial Sequence: Synthetic oligonucleotide
ccaagugcuguaugauacu

SEQ ID NO: 687504 - RNA, 19 nt, Artificial Sequence
  Description of Artificial Sequence: Synthetic oligonucleotide
ggucucagggucaguacau

SEQ ID NO: 687505 - RNA, 19 nt, Artificial Sequence
  Description of Artificial Sequence: Synthetic oligonucleotide
ggagagcuuuuagccaucu

SEQ ID NO: 687506 - RNA, 19 nt, Artificial Sequence
  Description of Artificial Sequence: Synthetic oligonucleotide
cauggcucucggugugccu

SEQ ID NO: 687507 - RNA, 19 nt, Artificial Sequence
  Description of Artificial Sequence: Synthetic oligonucleotide
gcugcuguugagauuuauu

SEQ ID NO: 687508 - RNA, 19 nt, Artificial Sequence
  Description of Artificial Sequence: Synthetic oligonucleotide
ggggcacacguuaguaugu

SEQ ID NO: 687509 - RNA, 19 nt, Artificial Sequence
  Description of Artificial Sequence: Synthetic oligonucleotide
gcucucggugugccuacaa

SEQ ID NO: 687510 - RNA, 19 nt, Artificial Sequence
  Description of Artificial Sequence: Synthetic oligonucleotide
cacaagagaugggcagagu

SEQ ID NO: 687511 - RNA, 19 nt, Artificial Sequence
  Description of Artificial Sequence: Synthetic oligonucleotide
cgucagagccccuucgaua

SEQ ID NO: 687512 - RNA, 19 nt, Artificial Sequence
  Description of Artificial Sequence: Synthetic oligonucleotide
ccggucaaggccaucgcau

SEQ ID NO: 687513 - RNA, 19 nt, Artificial Sequence
  Description of Artificial Sequence: Synthetic oligonucleotide
gucaaggguugaggaacau

SEQ ID NO: 687514 - RNA, 19 nt, Artificial Sequence
  Description of Artificial Sequence: Synthetic oligonucleotide
cgauacgauuuucuuggcu

SEQ ID NO: 687515 - RNA, 19 nt, Artificial Sequence
  Description of Artificial Sequence: Synthetic oligonucleotide
ccaucgcauguuggucccc

SEQ ID NO: 687516 - RNA, 19 nt, Artificial Sequence
  Description of Artificial Sequence: Synthetic oligonucleotide
cugagucgacacacugcuu

SEQ ID NO: 687517 - RNA, 19 nt, Artificial Sequence
  Description of Artificial Sequence: Synthetic oligonucleotide
ggccucgacaucacauagu

SEQ ID NO: 687518 - RNA, 19 nt, Artificial Sequence
  Description of Artificial Sequence: Synthetic oligonucleotide
ccucaccaacaugacuaca

SEQ ID NO: 687519 - RNA, 19 nt, Artificial Sequence
  Description of Artificial Sequence: Synthetic oligonucleotide
ccccuucgauacgauuuuc

SEQ ID NO: 687520 - RNA, 19 nt, Artificial Sequence
  Description of Artificial Sequence: Synthetic oligonucleotide
gccccuucgauacgauuuu

SEQ ID NO: 687521 - RNA, 19 nt, Artificial Sequence
  Description of Artificial Sequence: Synthetic oligonucleotide
ccaggauaucaggucgcua

SEQ ID NO: 687522 - RNA, 19 nt, Artificial Sequence
  Description of Artificial Sequence: Synthetic oligonucleotide
cgucaguggcgauccgcaa

SEQ ID NO: 687523 - RNA, 19 nt, Artificial Sequence
  Description of Artificial Sequence: Synthetic oligonucleotide
ccgcucuccugggcacaag

SEQ ID NO: 687524 - RNA, 19 nt, Artificial Sequence
  Description of Artificial Sequence: Synthetic oligonucleotide
cccgcucuccugggcacaa

SEQ ID NO: 687525 - RNA, 19 nt, Artificial Sequence
  Description of Artificial Sequence: Synthetic oligonucleotide
ccauugcuggcggcauacu

SEQ ID NO: 687526 - RNA, 19 nt, Artificial Sequence
  Description of Artificial Sequence: Synthetic oligonucleotide
aaaauuaggagagccaauc

SEQ ID NO: 687527 - RNA, 19 nt, Artificial Sequence
  Description of Artificial Sequence: Synthetic oligonucleotide
aauuaggagagccaaucag

SEQ ID NO: 687528 - RNA, 19 nt, Artificial Sequence
  Description of Artificial Sequence: Synthetic oligonucleotide
uagauauucauuacacggg

SEQ ID NO: 687529 - RNA, 19 nt, Artificial Sequence
  Description of Artificial Sequence: Synthetic oligonucleotide
uguaagaacacguagcggu

SEQ ID NO: 687530 - RNA, 19 nt, Artificial Sequence
  Description of Artificial Sequence: Synthetic oligonucleotide
gaagccauugaccucaggg

SEQ ID NO: 687531 - RNA, 19 nt, Artificial Sequence
  Description of Artificial Sequence: Synthetic oligonucleotide
ucuaucuguaucucaaagg

SEQ ID NO: 687532 - RNA, 19 nt, Artificial Sequence
  Description of Artificial Sequence: Synthetic oligonucleotide
auauucauuacacgggaac

SEQ ID NO: 687533 - RNA, 19 nt, Artificial Sequence
  Description of Artificial Sequence: Synthetic oligonucleotide
guuugcaccacucaagacg

SEQ ID NO: 687534 - RNA, 19 nt, Artificial Sequence
  Description of Artificial Sequence: Synthetic oligonucleotide
uuaggagagccaaucagcg

SEQ ID NO: 687535 - RNA, 19 nt, Artificial Sequence
  Description of Artificial Sequence: Synthetic oligonucleotide
uuuggcguguggaagaggg

SEQ ID NO: 687536 - RNA, 19 nt, Artificial Sequence
  Description of Artificial Sequence: Synthetic oligonucleotide
cauuacacgggaacgaucg

SEQ ID NO: 687537 - RNA, 19 nt, Artificial Sequence
  Description of Artificial Sequence: Synthetic oligonucleotide
cuuguaagaacacguagcg

SEQ ID NO: 687538 - RNA, 19 nt, Artificial Sequence
  Description of Artificial Sequence: Synthetic oligonucleotide
gauagagaccuugaggucg

SEQ ID NO: 687539 - RNA, 19 nt, Artificial Sequence
  Description of Artificial Sequence: Synthetic oligonucleotide
uuauucauggucagcacgc

SEQ ID NO: 687540 - RNA, 19 nt, Artificial Sequence
  Description of Artificial Sequence: Synthetic oligonucleotide
aagccauugaccucagggg

SEQ ID NO: 687541 - RNA, 19 nt, Artificial Sequence
  Description of Artificial Sequence: Synthetic oligonucleotide
uuuaucugccccuucaaga

SEQ ID NO: 687542 - RNA, 19 nt, Artificial Sequence
  Description of Artificial Sequence: Synthetic oligonucleotide
acuuauucccuauguacac

SEQ ID NO: 687543 - RNA, 19 nt, Artificial Sequence
  Description of Artificial Sequence: Synthetic oligonucleotide
uuaucugccccuucaagag

SEQ ID NO: 687544 - RNA, 19 nt, Artificial Sequence
  Description of Artificial Sequence: Synthetic oligonucleotide
aguuacauuguccccacag

SEQ ID NO: 687545 - RNA, 19 nt, Artificial Sequence
  Description of Artificial Sequence: Synthetic oligonucleotide
uuugcaccacucaagacga

SEQ ID NO: 687546 - RNA, 19 nt, Artificial Sequence
  Description of Artificial Sequence: Synthetic oligonucleotide
aaacuucgacuguagugac

SEQ ID NO: 687547 - RNA, 19 nt, Artificial Sequence
  Description of Artificial Sequence: Synthetic oligonucleotide
aaauuaggagagccaauca

SEQ ID NO: 687548 - RNA, 19 nt, Artificial Sequence
  Description of Artificial Sequence: Synthetic oligonucleotide
uuuuaucugccccuucaag

SEQ ID NO: 687549 - RNA, 19 nt, Artificial Sequence
  Description of Artificial Sequence: Synthetic oligonucleotide
agaacugccgcucaaugug

SEQ ID NO: 687550 - RNA, 19 nt, Artificial Sequence
  Description of Artificial Sequence: Synthetic oligonucleotide
gagccaaucagcgugaggc

SEQ ID NO: 687551 - RNA, 19 nt, Artificial Sequence
  Description of Artificial Sequence: Synthetic oligonucleotide
gaaacuucgacuguaguga

SEQ ID NO: 687552 - RNA, 19 nt, Artificial Sequence
  Description of Artificial Sequence: Synthetic oligonucleotide
cuugaugugcugcagcccg

SEQ ID NO: 687553 - RNA, 19 nt, Artificial Sequence
  Description of Artificial Sequence: Synthetic oligonucleotide
uucaccguagaacugccgc

SEQ ID NO: 687554 - RNA, 19 nt, Artificial Sequence
  Description of Artificial Sequence: Synthetic oligonucleotide
ugaccuguacccaaaauua

SEQ ID NO: 687555 - RNA, 19 nt, Artificial Sequence
  Description of Artificial Sequence: Synthetic oligonucleotide
aggaggaucugauacucgg

SEQ ID NO: 687556 - RNA, 19 nt, Artificial Sequence
  Description of Artificial Sequence: Synthetic oligonucleotide
agacuccaaauucugggac

SEQ ID NO: 687557 - RNA, 19 nt, Artificial Sequence
  Description of Artificial Sequence: Synthetic oligonucleotide
agauauucauuacacggga

SEQ ID NO: 687558 - RNA, 19 nt, Artificial Sequence
  Description of Artificial Sequence: Synthetic oligonucleotide
uuuccagacaauccaccag

SEQ ID NO: 687559 - RNA, 19 nt, Artificial Sequence
  Description of Artificial Sequence: Synthetic oligonucleotide
aacuuauucccuauguaca

SEQ ID NO: 687560 - RNA, 19 nt, Artificial Sequence
  Description of Artificial Sequence: Synthetic oligonucleotide
aucucaucuaucuguaucu

SEQ ID NO: 687561 - RNA, 19 nt, Artificial Sequence
  Description of Artificial Sequence: Synthetic oligonucleotide
acacacuucaccguagaac

SEQ ID NO: 687562 - RNA, 19 nt, Artificial Sequence
  Description of Artificial Sequence: Synthetic oligonucleotide
aagagacgcggccucagag

SEQ ID NO: 687563 - RNA, 19 nt, Artificial Sequence
  Description of Artificial Sequence: Synthetic oligonucleotide
auucauggucagcacgccc

SEQ ID NO: 687564 - RNA, 19 nt, Artificial Sequence
  Description of Artificial Sequence: Synthetic oligonucleotide
guucauaccccauguuugg

SEQ ID NO: 687565 - RNA, 19 nt, Artificial Sequence
  Description of Artificial Sequence: Synthetic oligonucleotide
gaaucuucagccuccguca

SEQ ID NO: 687566 - RNA, 19 nt, Artificial Sequence
  Description of Artificial Sequence: Synthetic oligonucleotide
gguagauauucauuacacg

SEQ ID NO: 687567 - RNA, 19 nt, Artificial Sequence
  Description of Artificial Sequence: Synthetic oligonucleotide
ugacgugagagcuggagac

SEQ ID NO: 687568 - RNA, 19 nt, Artificial Sequence
  Description of Artificial Sequence: Synthetic oligonucleotide
gagccauuacgacaugcgg

SEQ ID NO: 687569 - RNA, 19 nt, Artificial Sequence
  Description of Artificial Sequence: Synthetic oligonucleotide
aucuguaucucaaagggcu

SEQ ID NO: 687570 - RNA, 19 nt, Artificial Sequence
  Description of Artificial Sequence: Synthetic oligonucleotide
auuuucggccccuggcacc

SEQ ID NO: 687571 - RNA, 19 nt, Artificial Sequence
  Description of Artificial Sequence: Synthetic oligonucleotide
ugauacucggcucgagugc

SEQ ID NO: 687572 - RNA, 19 nt, Artificial Sequence
  Description of Artificial Sequence: Synthetic oligonucleotide
gaaccugugcacucccucg

SEQ ID NO: 687573 - RNA, 19 nt, Artificial Sequence
  Description of Artificial Sequence: Synthetic oligonucleotide
aagagggagacacgcacgu

SEQ ID NO: 687574 - RNA, 19 nt, Artificial Sequence
  Description of Artificial Sequence: Synthetic oligonucleotide
auggugaccguccggcgcc

SEQ ID NO: 687575 - RNA, 19 nt, Artificial Sequence
  Description of Artificial Sequence: Synthetic oligonucleotide
auauaacuuauucccuaug

SEQ ID NO: 687576 - RNA, 19 nt, Artificial Sequence
  Description of Artificial Sequence: Synthetic oligonucleotide
aagacgacguuguugucaa

SEQ ID NO: 687577 - RNA, 19 nt, Artificial Sequence
  Description of Artificial Sequence: Synthetic oligonucleotide
ggaaacuucgacuguagug

SEQ ID NO: 687578 - RNA, 19 nt, Artificial Sequence
  Description of Artificial Sequence: Synthetic oligonucleotide
aucacgacucgccucuugg

SEQ ID NO: 687579 - RNA, 19 nt, Artificial Sequence
  Description of Artificial Sequence: Synthetic oligonucleotide
uuguaagggugcaccaugc

SEQ ID NO: 687580 - RNA, 19 nt, Artificial Sequence
  Description of Artificial Sequence: Synthetic oligonucleotide
agggaugccaucacgacuc

SEQ ID NO: 687581 - RNA, 19 nt, Artificial Sequence
  Description of Artificial Sequence: Synthetic oligonucleotide
aguaacagccauggugacc

SEQ ID NO: 687582 - RNA, 19 nt, Artificial Sequence
  Description of Artificial Sequence: Synthetic oligonucleotide
caugacccgcuuauuagcc

SEQ ID NO: 687583 - RNA, 19 nt, Artificial Sequence
  Description of Artificial Sequence: Synthetic oligonucleotide
ucgagugccuagcaccagg

SEQ ID NO: 687584 - RNA, 19 nt, Artificial Sequence
  Description of Artificial Sequence: Synthetic oligonucleotide
uuguaagaacacguagcgg

SEQ ID NO: 687585 - RNA, 19 nt, Artificial Sequence
  Description of Artificial Sequence: Synthetic oligonucleotide
gacgacguuguugucaaag

SEQ ID NO: 687586 - RNA, 19 nt, Artificial Sequence
  Description of Artificial Sequence: Synthetic oligonucleotide
ccguaggucacccagaccg

SEQ ID NO: 687587 - RNA, 19 nt, Artificial Sequence
  Description of Artificial Sequence: Synthetic oligonucleotide
cacgggaacgaucggaagg

SEQ ID NO: 687588 - RNA, 19 nt, Artificial Sequence
  Description of Artificial Sequence: Synthetic oligonucleotide
gcaugaaagguccaucccg

SEQ ID NO: 687589 - RNA, 19 nt, Artificial Sequence
  Description of Artificial Sequence: Synthetic oligonucleotide
cugauacucggcucgagug

SEQ ID NO: 687590 - RNA, 19 nt, Artificial Sequence
  Description of Artificial Sequence: Synthetic oligonucleotide
ugggguuaccaucuucacc

SEQ ID NO: 687591 - RNA, 19 nt, Artificial Sequence
  Description of Artificial Sequence: Synthetic oligonucleotide
gguaaauccaggugucagg

SEQ ID NO: 687592 - RNA, 19 nt, Artificial Sequence
  Description of Artificial Sequence: Synthetic oligonucleotide
aagagcucgaagaacucug

SEQ ID NO: 687593 - RNA, 19 nt, Artificial Sequence
  Description of Artificial Sequence: Synthetic oligonucleotide
ugguucauaccccauguuu

SEQ ID NO: 687594 - RNA, 19 nt, Artificial Sequence
  Description of Artificial Sequence: Synthetic oligonucleotide
ugcgccaguauuccugaag

SEQ ID NO: 687595 - RNA, 19 nt, Artificial Sequence
  Description of Artificial Sequence: Synthetic oligonucleotide
uggccugaacacuucgggg

SEQ ID NO: 687596 - RNA, 19 nt, Artificial Sequence
  Description of Artificial Sequence: Synthetic oligonucleotide
gggaccagguuucugaucc

SEQ ID NO: 687597 - RNA, 19 nt, Artificial Sequence
  Description of Artificial Sequence: Synthetic oligonucleotide
auuacgacaugcggucacc

SEQ ID NO: 687598 - RNA, 19 nt, Artificial Sequence
  Description of Artificial Sequence: Synthetic oligonucleotide
ugaacugaccuguacccaa

SEQ ID NO: 687599 - RNA, 19 nt, Artificial Sequence
  Description of Artificial Sequence: Synthetic oligonucleotide
ucauugcagaagcacggcu

SEQ ID NO: 687600 - RNA, 19 nt, Artificial Sequence
  Description of Artificial Sequence: Synthetic oligonucleotide
aguggaucacguccaugac

SEQ ID NO: 687601 - RNA, 19 nt, Artificial Sequence
  Description of Artificial Sequence: Synthetic oligonucleotide
uguaagggugcaccaugcc

SEQ ID NO: 687602 - RNA, 19 nt, Artificial Sequence
  Description of Artificial Sequence: Synthetic oligonucleotide
gugacuaucucaucuaucu

SEQ ID NO: 687603 - RNA, 19 nt, Artificial Sequence
  Description of Artificial Sequence: Synthetic oligonucleotide
uacacaggguagauauuca

SEQ ID NO: 687604 - RNA, 19 nt, Artificial Sequence
  Description of Artificial Sequence: Synthetic oligonucleotide
acacguagcgguccuggcg

SEQ ID NO: 687605 - RNA, 19 nt, Artificial Sequence
  Description of Artificial Sequence: Synthetic oligonucleotide
cacguagcgguccuggcgg

SEQ ID NO: 687606 - RNA, 19 nt, Artificial Sequence
  Description of Artificial Sequence: Synthetic oligonucleotide
uuagccgcucugcaguaug

SEQ ID NO: 687607 - RNA, 19 nt, Artificial Sequence
  Description of Artificial Sequence: Synthetic oligonucleotide
aagaacacguagcgguccu

SEQ ID NO: 687608 - RNA, 19 nt, Artificial Sequence
  Description of Artificial Sequence: Synthetic oligonucleotide
uagaacugccgcucaaugu

SEQ ID NO: 687609 - RNA, 19 nt, Artificial Sequence
  Description of Artificial Sequence: Synthetic oligonucleotide
uggaucgcaaguagagcug

SEQ ID NO: 687610 - RNA, 19 nt, Artificial Sequence
  Description of Artificial Sequence: Synthetic oligonucleotide
agagccauuacgacaugcg

SEQ ID NO: 687611 - RNA, 19 nt, Artificial Sequence
  Description of Artificial Sequence: Synthetic oligonucleotide
uccgucaguuuucugccgc

SEQ ID NO: 687612 - RNA, 19 nt, Artificial Sequence
  Description of Artificial Sequence: Synthetic oligonucleotide
ugacccgcuuauuagccgc

SEQ ID NO: 687613 - RNA, 19 nt, Artificial Sequence
  Description of Artificial Sequence: Synthetic oligonucleotide
accuguacccaaaauuagg

SEQ ID NO: 687614 - RNA, 19 nt, Artificial Sequence
  Description of Artificial Sequence: Synthetic oligonucleotide
ugcucaaaggucgcagagg

SEQ ID NO: 687615 - RNA, 19 nt, Artificial Sequence
  Description of Artificial Sequence: Synthetic oligonucleotide
acgacaugcggucaccucu

SEQ ID NO: 687616 - RNA, 19 nt, Artificial Sequence
  Description of Artificial Sequence: Synthetic oligonucleotide
gaucagugggguuaccauc

SEQ ID NO: 687617 - RNA, 19 nt, Artificial Sequence
  Description of Artificial Sequence: Synthetic oligonucleotide
uaagaacacguagcggucc

SEQ ID NO: 687618 - RNA, 19 nt, Artificial Sequence
  Description of Artificial Sequence: Synthetic oligonucleotide
aagggugcaccaugccauc

SEQ ID NO: 687619 - RNA, 19 nt, Artificial Sequence
  Description of Artificial Sequence: Synthetic oligonucleotide
accgucaguuacauugucc

SEQ ID NO: 687620 - RNA, 19 nt, Artificial Sequence
  Description of Artificial Sequence: Synthetic oligonucleotide
uacacgggaacgaucggaa

SEQ ID NO: 687621 - RNA, 19 nt, Artificial Sequence
  Description of Artificial Sequence: Synthetic oligonucleotide
gaaggaucucacaccagcc

SEQ ID NO: 687622 - RNA, 19 nt, Artificial Sequence
  Description of Artificial Sequence: Synthetic oligonucleotide
gauacucggcucgagugcc

SEQ ID NO: 687623 - RNA, 19 nt, Artificial Sequence
  Description of Artificial Sequence: Synthetic oligonucleotide
cucguugaagcgcucuggg

SEQ ID NO: 687624 - RNA, 19 nt, Artificial Sequence
  Description of Artificial Sequence: Synthetic oligonucleotide
ucucguugaagcgcucugg

SEQ ID NO: 687625 - RNA, 19 nt, Artificial Sequence
  Description of Artificial Sequence: Synthetic oligonucleotide
auggugcgagaguucuucc

SEQ ID NO: 687626 - RNA, 19 nt, Artificial Sequence
  Description of Artificial Sequence: Synthetic oligonucleotide
acgggaacgaucggaaggg

SEQ ID NO: 687627 - RNA, 19 nt, Artificial Sequence
  Description of Artificial Sequence: Synthetic oligonucleotide
auuacacgggaacgaucgg

SEQ ID NO: 687628 - RNA, 19 nt, Artificial Sequence
  Description of Artificial Sequence: Synthetic oligonucleotide
ucaguuacauuguccccac

SEQ ID NO: 687629 - RNA, 19 nt, Artificial Sequence
  Description of Artificial Sequence: Synthetic oligonucleotide
caagggagccaguaacagc

SEQ ID NO: 687630 - RNA, 19 nt, Artificial Sequence
  Description of Artificial Sequence: Synthetic oligonucleotide
ucauuacacgggaacgauc

SEQ ID NO: 687631 - RNA, 19 nt, Artificial Sequence
  Description of Artificial Sequence: Synthetic oligonucleotide
cauucagaaggcugagaug

SEQ ID NO: 687632 - RNA, 19 nt, Artificial Sequence
  Description of Artificial Sequence: Synthetic oligonucleotide
guacacaggguagauauuc

SEQ ID NO: 687633 - RNA, 19 nt, Artificial Sequence
  Description of Artificial Sequence: Synthetic oligonucleotide
augacccgcuuauuagccg

SEQ ID NO: 687634 - RNA, 19 nt, Artificial Sequence
  Description of Artificial Sequence: Synthetic oligonucleotide
uuacacgggaacgaucgga

SEQ ID NO: 687635 - RNA, 19 nt, Artificial Sequence
  Description of Artificial Sequence: Synthetic oligonucleotide
ugaucagugggguuaccau

SEQ ID NO: 687636 - RNA, 19 nt, Artificial Sequence
  Description of Artificial Sequence: Synthetic oligonucleotide
ugugcacucccucgggaca

SEQ ID NO: 687637 - RNA, 19 nt, Artificial Sequence
  Description of Artificial Sequence: Synthetic oligonucleotide
gaccuguacccaaaauuag

SEQ ID NO: 687638 - RNA, 19 nt, Artificial Sequence
  Description of Artificial Sequence: Synthetic oligonucleotide
ggaaucuucagccuccguc

SEQ ID NO: 687639 - RNA, 19 nt, Artificial Sequence
  Description of Artificial Sequence: Synthetic oligonucleotide
cucacaccagccaugccug

SEQ ID NO: 687640 - RNA, 19 nt, Artificial Sequence
  Description of Artificial Sequence: Synthetic oligonucleotide
agaagcacggcugaaggau

SEQ ID NO: 687641 - RNA, 19 nt, Artificial Sequence
  Description of Artificial Sequence: Synthetic oligonucleotide
agagcucgaagaacucugc

SEQ ID NO: 687642 - RNA, 19 nt, Artificial Sequence
  Description of Artificial Sequence: Synthetic oligonucleotide
agcccggucaccuuuguaa

SEQ ID NO: 687643 - RNA, 19 nt, Artificial Sequence
  Description of Artificial Sequence: Synthetic oligonucleotide
cagaccggagucauugcag

SEQ ID NO: 687644 - RNA, 19 nt, Artificial Sequence
  Description of Artificial Sequence: Synthetic oligonucleotide
agugggguuaccaucuuca

SEQ ID NO: 687645 - RNA, 19 nt, Artificial Sequence
  Description of Artificial Sequence: Synthetic oligonucleotide
acaacguccaccgugucau

SEQ ID NO: 687646 - RNA, 19 nt, Artificial Sequence
  Description of Artificial Sequence: Synthetic oligonucleotide
ggcgaggaggaucugauac

SEQ ID NO: 687647 - RNA, 19 nt, Artificial Sequence
  Description of Artificial Sequence: Synthetic oligonucleotide
cuggacccgauccugcugc

SEQ ID NO: 687648 - RNA, 19 nt, Artificial Sequence
  Description of Artificial Sequence: Synthetic oligonucleotide
ucccuucgcuccaaagaag

SEQ ID NO: 687649 - RNA, 19 nt, Artificial Sequence
  Description of Artificial Sequence: Synthetic oligonucleotide
gaucacguccaugacccgc

SEQ ID NO: 687650 - RNA, 19 nt, Artificial Sequence
  Description of Artificial Sequence: Synthetic oligonucleotide
gguucauaccccauguuug

SEQ ID NO: 687651 - RNA, 19 nt, Artificial Sequence
  Description of Artificial Sequence: Synthetic oligonucleotide
aggucggaaggaaacuucg

SEQ ID NO: 687652 - RNA, 19 nt, Artificial Sequence
  Description of Artificial Sequence: Synthetic oligonucleotide
ccgucaguuacauuguccc

SEQ ID NO: 687653 - RNA, 19 nt, Artificial Sequence
  Description of Artificial Sequence: Synthetic oligonucleotide
uugaccucaggggaggcga

SEQ ID NO: 687654 - RNA, 19 nt, Artificial Sequence
  Description of Artificial Sequence: Synthetic oligonucleotide
gucaguuacauugucccca

SEQ ID NO: 687655 - RNA, 19 nt, Artificial Sequence
  Description of Artificial Sequence: Synthetic oligonucleotide
cauuacgacaugcggucac

SEQ ID NO: 687656 - RNA, 19 nt, Artificial Sequence
  Description of Artificial Sequence: Synthetic oligonucleotide
acuucaccguagaacugcc

SEQ ID NO: 687657 - RNA, 19 nt, Artificial Sequence
  Description of Artificial Sequence: Synthetic oligonucleotide
cacgacucgccucuuggcc

SEQ ID NO: 687658 - RNA, 19 nt, Artificial Sequence
  Description of Artificial Sequence: Synthetic oligonucleotide
cauggugaccguccggcgc

SEQ ID NO: 687659 - RNA, 19 nt, Artificial Sequence
  Description of Artificial Sequence: Synthetic oligonucleotide
agguuuggcguguggaaga

SEQ ID NO: 687660 - RNA, 19 nt, Artificial Sequence
  Description of Artificial Sequence: Synthetic oligonucleotide
aguaggagucacucaaguu

SEQ ID NO: 687661 - RNA, 19 nt, Artificial Sequence
  Description of Artificial Sequence: Synthetic oligonucleotide
uccgucacgauggcaaucu

SEQ ID NO: 687662 - RNA, 19 nt, Artificial Sequence
  Description of Artificial Sequence: Synthetic oligonucleotide
agcccgauggucucguuga

SEQ ID NO: 687663 - RNA, 19 nt, Artificial Sequence
  Description of Artificial Sequence: Synthetic oligonucleotide
agagccaaucagcgugagg

SEQ ID NO: 687664 - RNA, 19 nt, Artificial Sequence
  Description of Artificial Sequence: Synthetic oligonucleotide
ugcgagaguucuuccuacc

SEQ ID NO: 687665 - RNA, 19 nt, Artificial Sequence
  Description of Artificial Sequence: Synthetic oligonucleotide
cccauguuuggcauuuucg

SEQ ID NO: 687666 - RNA, 19 nt, Artificial Sequence
  Description of Artificial Sequence: Synthetic oligonucleotide
acuucgacuguagugacuu

SEQ ID NO: 687667 - RNA, 19 nt, Artificial Sequence
  Description of Artificial Sequence: Synthetic oligonucleotide
ugcaguaugcagcccgguc

SEQ ID NO: 687668 - RNA, 19 nt, Artificial Sequence
  Description of Artificial Sequence: Synthetic oligonucleotide
ucaccguagaacugccgcu

SEQ ID NO: 687669 - RNA, 19 nt, Artificial Sequence
  Description of Artificial Sequence: Synthetic oligonucleotide
ucgacuguagugacuucuc

SEQ ID NO: 687670 - RNA, 19 nt, Artificial Sequence
  Description of Artificial Sequence: Synthetic oligonucleotide
ggccugaacacuucggggc

SEQ ID NO: 687671 - RNA, 19 nt, Artificial Sequence
  Description of Artificial Sequence: Synthetic oligonucleotide
uauucauggucagcacgcc

SEQ ID NO: 687672 - RNA, 19 nt, Artificial Sequence
  Description of Artificial Sequence: Synthetic oligonucleotide
ccaguaacagccaugguga

SEQ ID NO: 687673 - RNA, 19 nt, Artificial Sequence
  Description of Artificial Sequence: Synthetic oligonucleotide
aucggaaggggcaaugcug

SEQ ID NO: 687674 - RNA, 19 nt, Artificial Sequence
  Description of Artificial Sequence: Synthetic oligonucleotide
cauuuucggccccuggcac

SEQ ID NO: 687675 - RNA, 19 nt, Artificial Sequence
  Description of Artificial Sequence: Synthetic oligonucleotide
cacgcuggaucgcaaguag

SEQ ID NO: 687676 - RNA, 19 nt, Artificial Sequence
  Description of Artificial Sequence: Synthetic oligonucleotide
ggcucgagugccuagcacc

SEQ ID NO: 687677 - RNA, 19 nt, Artificial Sequence
  Description of Artificial Sequence: Synthetic oligonucleotide
uaggucacccagaccguca

SEQ ID NO: 687678 - RNA, 19 nt, Artificial Sequence
  Description of Artificial Sequence: Synthetic oligonucleotide
gaggaucugauacucggcu

SEQ ID NO: 687679 - RNA, 19 nt, Artificial Sequence
  Description of Artificial Sequence: Synthetic oligonucleotide
cauggugcgagaguucuuc

SEQ ID NO: 687680 - RNA, 19 nt, Artificial Sequence
  Description of Artificial Sequence: Synthetic oligonucleotide
gaggaggaucugauacucg

SEQ ID NO: 687681 - RNA, 19 nt, Artificial Sequence
  Description of Artificial Sequence: Synthetic oligonucleotide
ucccguaggucacccagac

SEQ ID NO: 687682 - RNA, 19 nt, Artificial Sequence
  Description of Artificial Sequence: Synthetic oligonucleotide
gccuccgucaguuuucugc

SEQ ID NO: 687683 - RNA, 19 nt, Artificial Sequence
  Description of Artificial Sequence: Synthetic oligonucleotide
agccauuacgacaugcggu

SEQ ID NO: 687684 - RNA, 19 nt, Artificial Sequence
  Description of Artificial Sequence: Synthetic oligonucleotide
acccugacgugagagcugg

SEQ ID NO: 687685 - RNA, 19 nt, Artificial Sequence
  Description of Artificial Sequence: Synthetic oligonucleotide
accggagucauugcagaag

SEQ ID NO: 687686 - RNA, 19 nt, Artificial Sequence
  Description of Artificial Sequence: Synthetic oligonucleotide
acccagaccggagucauug

SEQ ID NO: 687687 - RNA, 19 nt, Artificial Sequence
  Description of Artificial Sequence: Synthetic oligonucleotide
cuggaucgcaaguagagcu

SEQ ID NO: 687688 - RNA, 19 nt, Artificial Sequence
  Description of Artificial Sequence: Synthetic oligonucleotide
cacccagaccgucaguuac

SEQ ID NO: 687689 - RNA, 19 nt, Artificial Sequence
  Description of Artificial Sequence: Synthetic oligonucleotide
ucacgacucgccucuuggc

SEQ ID NO: 687690 - RNA, 19 nt, Artificial Sequence
  Description of Artificial Sequence: Synthetic oligonucleotide
ucguugaagcgcucuggga

SEQ ID NO: 687691 - RNA, 19 nt, Artificial Sequence
  Description of Artificial Sequence: Synthetic oligonucleotide
augaaagguccaucccgug

SEQ ID NO: 687692 - RNA, 19 nt, Artificial Sequence
  Description of Artificial Sequence: Synthetic oligonucleotide
cucuccgucacgauggcaa

SEQ ID NO: 687693 - RNA, 19 nt, Artificial Sequence
  Description of Artificial Sequence: Synthetic oligonucleotide
uaggagagccaaucagcgu

SEQ ID NO: 687694 - RNA, 19 nt, Artificial Sequence
  Description of Artificial Sequence: Synthetic oligonucleotide
ugaagagacgcggccucag

SEQ ID NO: 687695 - RNA, 19 nt, Artificial Sequence
  Description of Artificial Sequence: Synthetic oligonucleotide
acgacucgccucuuggcca

SEQ ID NO: 687696 - RNA, 19 nt, Artificial Sequence
  Description of Artificial Sequence: Synthetic oligonucleotide
uugaggucggaaggaaacu

SEQ ID NO: 687697 - RNA, 19 nt, Artificial Sequence
  Description of Artificial Sequence: Synthetic oligonucleotide
gaugggccucugaagagac

SEQ ID NO: 687698 - RNA, 19 nt, Artificial Sequence
  Description of Artificial Sequence: Synthetic oligonucleotide
ggcauuuucggccccuggc

SEQ ID NO: 687699 - RNA, 19 nt, Artificial Sequence
  Description of Artificial Sequence: Synthetic oligonucleotide
cagucuuguaagaacacgu

SEQ ID NO: 687700 - RNA, 19 nt, Artificial Sequence
  Description of Artificial Sequence: Synthetic oligonucleotide
acacgggaacgaucggaag

SEQ ID NO: 687701 - RNA, 19 nt, Artificial Sequence
  Description of Artificial Sequence: Synthetic oligonucleotide
agacaauccaccaguuccu

SEQ ID NO: 687702 - RNA, 19 nt, Artificial Sequence
  Description of Artificial Sequence: Synthetic oligonucleotide
cagguuuggcguguggaag

SEQ ID NO: 687703 - RNA, 19 nt, Artificial Sequence
  Description of Artificial Sequence: Synthetic oligonucleotide
gcgccaguauuccugaagc

SEQ ID NO: 687704 - RNA, 19 nt, Artificial Sequence
  Description of Artificial Sequence: Synthetic oligonucleotide
ucacuggcccaucucugaa

SEQ ID NO: 687705 - RNA, 19 nt, Artificial Sequence
  Description of Artificial Sequence: Synthetic oligonucleotide
gccauuacgacaugcgguc

SEQ ID NO: 687706 - RNA, 19 nt, Artificial Sequence
  Description of Artificial Sequence: Synthetic oligonucleotide
guagugacuucuccagaga

SEQ ID NO: 687707 - RNA, 19 nt, Artificial Sequence
  Description of Artificial Sequence: Synthetic oligonucleotide
agcucgcugggacacccag

SEQ ID NO: 687708 - RNA, 19 nt, Artificial Sequence
  Description of Artificial Sequence: Synthetic oligonucleotide
aaucagcgugaggcagggc

SEQ ID NO: 687709 - RNA, 19 nt, Artificial Sequence
  Description of Artificial Sequence: Synthetic oligonucleotide
ccgggugaaguccaggagg

SEQ ID NO: 687710 - RNA, 19 nt, Artificial Sequence
  Description of Artificial Sequence: Synthetic oligonucleotide
cugugcacucccucgggac

SEQ ID NO: 687711 - RNA, 19 nt, Artificial Sequence
  Description of Artificial Sequence: Synthetic oligonucleotide
uguacacaggguagauauu

SEQ ID NO: 687712 - RNA, 19 nt, Artificial Sequence
  Description of Artificial Sequence: Synthetic oligonucleotide
uuuucggccccuggcaccu

SEQ ID NO: 687713 - RNA, 19 nt, Artificial Sequence
  Description of Artificial Sequence: Synthetic oligonucleotide
uagccgcucugcaguaugc

SEQ ID NO: 687714 - RNA, 19 nt, Artificial Sequence
  Description of Artificial Sequence: Synthetic oligonucleotide
cccuucgcuccaaagaagc

SEQ ID NO: 687715 - RNA, 19 nt, Artificial Sequence
  Description of Artificial Sequence: Synthetic oligonucleotide
uacccaaaauuaggagagc

SEQ ID NO: 687716 - RNA, 19 nt, Artificial Sequence
  Description of Artificial Sequence: Synthetic oligonucleotide
acuaucucaucuaucugua

SEQ ID NO: 687717 - RNA, 19 nt, Artificial Sequence
  Description of Artificial Sequence: Synthetic oligonucleotide
uauuagccgcucugcagua

SEQ ID NO: 687718 - RNA, 19 nt, Artificial Sequence
  Description of Artificial Sequence: Synthetic oligonucleotide
agggugcaccaugccaucc

SEQ ID NO: 687719 - RNA, 19 nt, Artificial Sequence
  Description of Artificial Sequence: Synthetic oligonucleotide
guaagaacacguagcgguc

SEQ ID NO: 687720 - RNA, 19 nt, Artificial Sequence
  Description of Artificial Sequence: Synthetic oligonucleotide
cuucgcuccaaagaagcca

SEQ ID NO: 687721 - RNA, 19 nt, Artificial Sequence
  Description of Artificial Sequence: Synthetic oligonucleotide
augccaucacgacucgccu

SEQ ID NO: 687722 - RNA, 19 nt, Artificial Sequence
  Description of Artificial Sequence: Synthetic oligonucleotide
acggcugaaggaucucaca

SEQ ID NO: 687723 - RNA, 19 nt, Artificial Sequence
  Description of Artificial Sequence: Synthetic oligonucleotide
caaaggucgcagaggucac

SEQ ID NO: 687724 - RNA, 19 nt, Artificial Sequence
  Description of Artificial Sequence: Synthetic oligonucleotide
gaggucggaaggaaacuuc

SEQ ID NO: 687725 - RNA, 19 nt, Artificial Sequence
  Description of Artificial Sequence: Synthetic oligonucleotide
ucccggugaacugaccugu

SEQ ID NO: 687726 - RNA, 19 nt, Artificial Sequence
  Description of Artificial Sequence: Synthetic oligonucleotide
aagcacggcugaaggaucu

SEQ ID NO: 687727 - RNA, 19 nt, Artificial Sequence
  Description of Artificial Sequence: Synthetic oligonucleotide
gagcucgaagaacucugca

SEQ ID NO: 687728 - RNA, 19 nt, Artificial Sequence
  Description of Artificial Sequence: Synthetic oligonucleotide
gucauugcagaagcacggc

SEQ ID NO: 687729 - RNA, 19 nt, Artificial Sequence
  Description of Artificial Sequence: Synthetic oligonucleotide
gucucguugaagcgcucug

SEQ ID NO: 687730 - RNA, 19 nt, Artificial Sequence
  Description of Artificial Sequence: Synthetic oligonucleotide
ccaugacccgcuuauuagc

SEQ ID NO: 687731 - RNA, 19 nt, Artificial Sequence
  Description of Artificial Sequence: Synthetic oligonucleotide
uccuaccucuugagccccg

SEQ ID NO: 687732 - RNA, 19 nt, Artificial Sequence
  Description of Artificial Sequence: Synthetic oligonucleotide
ccaacaucgccucagccuc

SEQ ID NO: 687733 - RNA, 19 nt, Artificial Sequence
  Description of Artificial Sequence: Synthetic oligonucleotide
ucagcacgcccaacaucgc

SEQ ID NO: 687734 - RNA, 19 nt, Artificial Sequence
  Description of Artificial Sequence: Synthetic oligonucleotide
aacuucgacuguagugacu

SEQ ID NO: 687735 - RNA, 19 nt, Artificial Sequence
  Description of Artificial Sequence: Synthetic oligonucleotide
agccaaucagcgugaggca

SEQ ID NO: 687736 - RNA, 19 nt, Artificial Sequence
  Description of Artificial Sequence: Synthetic oligonucleotide
cucccuucgcuccaaagaa

SEQ ID NO: 687737 - RNA, 19 nt, Artificial Sequence
  Description of Artificial Sequence: Synthetic oligonucleotide
ccggagucauugcagaagc

SEQ ID NO: 687738 - RNA, 19 nt, Artificial Sequence
  Description of Artificial Sequence: Synthetic oligonucleotide
cuccgucaguuuucugccg

SEQ ID NO: 687739 - RNA, 19 nt, Artificial Sequence
  Description of Artificial Sequence: Synthetic oligonucleotide
uacgacaugcggucaccuc

SEQ ID NO: 687740 - RNA, 19 nt, Artificial Sequence
  Description of Artificial Sequence: Synthetic oligonucleotide
ucgcagguuuggcgugugg

SEQ ID NO: 687741 - RNA, 19 nt, Artificial Sequence
  Description of Artificial Sequence: Synthetic oligonucleotide
uuacgacaugcggucaccu

SEQ ID NO: 687742 - RNA, 19 nt, Artificial Sequence
  Description of Artificial Sequence: Synthetic oligonucleotide
ucggcucgagugccuagca

SEQ ID NO: 687743 - RNA, 19 nt, Artificial Sequence
  Description of Artificial Sequence: Synthetic oligonucleotide
cugacgugagagcuggaga

SEQ ID NO: 687744 - RNA, 19 nt, Artificial Sequence
  Description of Artificial Sequence: Synthetic oligonucleotide
gaucggaaggggcaaugcu

SEQ ID NO: 687745 - RNA, 19 nt, Artificial Sequence
  Description of Artificial Sequence: Synthetic oligonucleotide
ggaacgaucggaaggggca

SEQ ID NO: 687746 - RNA, 19 nt, Artificial Sequence
  Description of Artificial Sequence: Synthetic oligonucleotide
cagcacgcccaacaucgcc

SEQ ID NO: 687747 - RNA, 19 nt, Artificial Sequence
  Description of Artificial Sequence: Synthetic oligonucleotide
aggggcaaugcuggaaucu

SEQ ID NO: 687748 - RNA, 19 nt, Artificial Sequence
  Description of Artificial Sequence: Synthetic oligonucleotide
caugcggucaccucugagu

SEQ ID NO: 687749 - RNA, 19 nt, Artificial Sequence
  Description of Artificial Sequence: Synthetic oligonucleotide
gaccagguuucugauccac

SEQ ID NO: 687750 - RNA, 19 nt, Artificial Sequence
  Description of Artificial Sequence: Synthetic oligonucleotide
guggggaggugaccugagg

SEQ ID NO: 687751 - RNA, 19 nt, Artificial Sequence
  Description of Artificial Sequence: Synthetic oligonucleotide
auggucucguugaagcgcu

SEQ ID NO: 687752 - RNA, 19 nt, Artificial Sequence
  Description of Artificial Sequence: Synthetic oligonucleotide
agucuuguaagaacacgua

SEQ ID NO: 687753 - RNA, 19 nt, Artificial Sequence
  Description of Artificial Sequence: Synthetic oligonucleotide
accguagaacugccgcuca

SEQ ID NO: 687754 - RNA, 19 nt, Artificial Sequence
  Description of Artificial Sequence: Synthetic oligonucleotide
gaagagacgcggccucaga

SEQ ID NO: 687755 - RNA, 19 nt, Artificial Sequence
  Description of Artificial Sequence: Synthetic oligonucleotide
gcaaguagagcugcucuug

SEQ ID NO: 687756 - RNA, 19 nt, Artificial Sequence
  Description of Artificial Sequence: Synthetic oligonucleotide
accuuagcuccucgcucag

SEQ ID NO: 687757 - RNA, 19 nt, Artificial Sequence
  Description of Artificial Sequence: Synthetic oligonucleotide
ucacucaaguuugcaccac

SEQ ID NO: 687758 - RNA, 19 nt, Artificial Sequence
  Description of Artificial Sequence: Synthetic oligonucleotide
agcuucaccugccgaccug

SEQ ID NO: 687759 - RNA, 19 nt, Artificial Sequence
  Description of Artificial Sequence: Synthetic oligonucleotide
caacaucgccucagccucc

SEQ ID NO: 687760 - RNA, 19 nt, Artificial Sequence
  Description of Artificial Sequence: Synthetic oligonucleotide
ugccaucacgacucgccuc

SEQ ID NO: 687761 - RNA, 19 nt, Artificial Sequence
  Description of Artificial Sequence: Synthetic oligonucleotide
ggaucgcaaguagagcugc

SEQ ID NO: 687762 - RNA, 19 nt, Artificial Sequence
  Description of Artificial Sequence: Synthetic oligonucleotide
gaccgucaguuacauuguc

SEQ ID NO: 687763 - RNA, 19 nt, Artificial Sequence
  Description of Artificial Sequence: Synthetic oligonucleotide
agcacgcccaacaucgccu

SEQ ID NO: 687764 - RNA, 19 nt, Artificial Sequence
  Description of Artificial Sequence: Synthetic oligonucleotide
guuuggcguguggaagagg

SEQ ID NO: 687765 - RNA, 19 nt, Artificial Sequence
  Description of Artificial Sequence: Synthetic oligonucleotide
aucacguccaugacccgcu

SEQ ID NO: 687766 - RNA, 19 nt, Artificial Sequence
  Description of Artificial Sequence: Synthetic oligonucleotide
caccacgcuggaucgcaag

SEQ ID NO: 687767 - RNA, 19 nt, Artificial Sequence
  Description of Artificial Sequence: Synthetic oligonucleotide
ccggucaccuuuguaaggg

SEQ ID NO: 687768 - RNA, 19 nt, Artificial Sequence
  Description of Artificial Sequence: Synthetic oligonucleotide
ucaagacgacguuguuguc

SEQ ID NO: 687769 - RNA, 19 nt, Artificial Sequence
  Description of Artificial Sequence: Synthetic oligonucleotide
guuuggcauuuucggcccc

SEQ ID NO: 687770 - RNA, 19 nt, Artificial Sequence
  Description of Artificial Sequence: Synthetic oligonucleotide
ggucucggugacuaucuca

SEQ ID NO: 687771 - RNA, 19 nt, Artificial Sequence
  Description of Artificial Sequence: Synthetic oligonucleotide
gcauuuucggccccuggca

SEQ ID NO: 687772 - RNA, 19 nt, Artificial Sequence
  Description of Artificial Sequence: Synthetic oligonucleotide
cacaacguccaccguguca

SEQ ID NO: 687773 - RNA, 19 nt, Artificial Sequence
  Description of Artificial Sequence: Synthetic oligonucleotide
agggucucggugacuaucu

SEQ ID NO: 687774 - RNA, 19 nt, Artificial Sequence
  Description of Artificial Sequence: Synthetic oligonucleotide
cuggcccaucucugaaaag

SEQ ID NO: 687775 - RNA, 19 nt, Artificial Sequence
  Description of Artificial Sequence: Synthetic oligonucleotide
ucacccagaccgucaguua

SEQ ID NO: 687776 - RNA, 19 nt, Artificial Sequence
  Description of Artificial Sequence: Synthetic oligonucleotide
agaccgucaguuacauugu

SEQ ID NO: 687777 - RNA, 19 nt, Artificial Sequence
  Description of Artificial Sequence: Synthetic oligonucleotide
cacucccucgggacauagg

SEQ ID NO: 687778 - RNA, 19 nt, Artificial Sequence
  Description of Artificial Sequence: Synthetic oligonucleotide
guagcgguccuggcgguug

SEQ ID NO: 687779 - RNA, 19 nt, Artificial Sequence
  Description of Artificial Sequence: Synthetic oligonucleotide
cucggcucgagugccuagc

SEQ ID NO: 687780 - RNA, 19 nt, Artificial Sequence
  Description of Artificial Sequence: Synthetic oligonucleotide
caucacgacucgccucuug

SEQ ID NO: 687781 - RNA, 19 nt, Artificial Sequence
  Description of Artificial Sequence: Synthetic oligonucleotide
acgaucggaaggggcaaug

SEQ ID NO: 687782 - RNA, 19 nt, Artificial Sequence
  Description of Artificial Sequence: Synthetic oligonucleotide
aucgccucagccucccgua

SEQ ID NO: 687783 - RNA, 19 nt, Artificial Sequence
  Description of Artificial Sequence: Synthetic oligonucleotide
aacgaucggaaggggcaau

SEQ ID NO: 687784 - RNA, 19 nt, Artificial Sequence
  Description of Artificial Sequence: Synthetic oligonucleotide
gugaacugaccuguaccca

SEQ ID NO: 687785 - RNA, 19 nt, Artificial Sequence
  Description of Artificial Sequence: Synthetic oligonucleotide
caccguagaacugccgcuc

SEQ ID NO: 687786 - RNA, 19 nt, Artificial Sequence
  Description of Artificial Sequence: Synthetic oligonucleotide
ugcucccugccagguacag

SEQ ID NO: 687787 - RNA, 19 nt, Artificial Sequence
  Description of Artificial Sequence: Synthetic oligonucleotide
gcccggucaccuuuguaag

SEQ ID NO: 687788 - RNA, 19 nt, Artificial Sequence
  Description of Artificial Sequence: Synthetic oligonucleotide
uggacccgauccugcugcc

SEQ ID NO: 687789 - RNA, 19 nt, Artificial Sequence
  Description of Artificial Sequence: Synthetic oligonucleotide
ccuucgcuccaaagaagcc

SEQ ID NO: 687790 - RNA, 19 nt, Artificial Sequence
  Description of Artificial Sequence: Synthetic oligonucleotide
gaccggagucauugcagaa

SEQ ID NO: 687791 - RNA, 19 nt, Artificial Sequence
  Description of Artificial Sequence: Synthetic oligonucleotide
gggaacgaucggaaggggc

SEQ ID NO: 687792 - RNA, 19 nt, Artificial Sequence
  Description of Artificial Sequence: Synthetic oligonucleotide
cagugggguuaccaucuuc

SEQ ID NO: 687793 - RNA, 19 nt, Artificial Sequence
  Description of Artificial Sequence: Synthetic oligonucleotide
cacccugacgugagagcug

SEQ ID NO: 687794 - RNA, 19 nt, Artificial Sequence
  Description of Artificial Sequence: Synthetic oligonucleotide
gguuuggcguguggaagag

SEQ ID NO: 687795 - RNA, 19 nt, Artificial Sequence
  Description of Artificial Sequence: Synthetic oligonucleotide
gaacgaucggaaggggcaa

SEQ ID NO: 687796 - RNA, 19 nt, Artificial Sequence
  Description of Artificial Sequence: Synthetic oligonucleotide
gcuggaucgcaaguagagc

SEQ ID NO: 687797 - RNA, 19 nt, Artificial Sequence
  Description of Artificial Sequence: Synthetic oligonucleotide
gucaccacgcuggaucgca

SEQ ID NO: 687798 - RNA, 19 nt, Artificial Sequence
  Description of Artificial Sequence: Synthetic oligonucleotide
ucaccacgcuggaucgcaa

SEQ ID NO: 687799 - RNA, 19 nt, Artificial Sequence
  Description of Artificial Sequence: Synthetic oligonucleotide
aggagcucgcugggacacc

SEQ ID NO: 687800 - RNA, 19 nt, Artificial Sequence
  Description of Artificial Sequence: Synthetic oligonucleotide
ggugcgagaguucuuccua

SEQ ID NO: 687801 - RNA, 19 nt, Artificial Sequence
  Description of Artificial Sequence: Synthetic oligonucleotide
agagggagacacgcacgug

SEQ ID NO: 687802 - RNA, 19 nt, Artificial Sequence
  Description of Artificial Sequence: Synthetic oligonucleotide
agcacggcugaaggaucuc

SEQ ID NO: 687803 - RNA, 19 nt, Artificial Sequence
  Description of Artificial Sequence: Synthetic oligonucleotide
cauaccccauguuuggcau

SEQ ID NO: 687804 - RNA, 19 nt, Artificial Sequence
  Description of Artificial Sequence: Synthetic oligonucleotide
guaggucacccagaccguc

SEQ ID NO: 687805 - RNA, 19 nt, Artificial Sequence
  Description of Artificial Sequence: Synthetic oligonucleotide
ccugacgugagagcuggag

SEQ ID NO: 687806 - RNA, 19 nt, Artificial Sequence
  Description of Artificial Sequence: Synthetic oligonucleotide
ggucagcacgcccaacauc

SEQ ID NO: 687807 - RNA, 19 nt, Artificial Sequence
  Description of Artificial Sequence: Synthetic oligonucleotide
acccgcuuauuagccgcuc

SEQ ID NO: 687808 - RNA, 19 nt, Artificial Sequence
  Description of Artificial Sequence: Synthetic oligonucleotide
cccggucaccuuuguaagg

SEQ ID NO: 687809 - RNA, 19 nt, Artificial Sequence
  Description of Artificial Sequence: Synthetic oligonucleotide
agagaccuugaggucggaa

SEQ ID NO: 687810 - RNA, 19 nt, Artificial Sequence
  Description of Artificial Sequence: Synthetic oligonucleotide
gcgccggccacucccuucg

SEQ ID NO: 687811 - RNA, 19 nt, Artificial Sequence
  Description of Artificial Sequence: Synthetic oligonucleotide
gggaugccaucacgacucg

SEQ ID NO: 687812 - RNA, 19 nt, Artificial Sequence
  Description of Artificial Sequence: Synthetic oligonucleotide
augggccucugaagagacg

SEQ ID NO: 687813 - RNA, 19 nt, Artificial Sequence
  Description of Artificial Sequence: Synthetic oligonucleotide
ggagcucgcugggacaccc

SEQ ID NO: 687814 - RNA, 19 nt, Artificial Sequence
  Description of Artificial Sequence: Synthetic oligonucleotide
gagcccucgcagguuuggc

SEQ ID NO: 687815 - RNA, 19 nt, Artificial Sequence
  Description of Artificial Sequence: Synthetic oligonucleotide
cgucaguuacauugucccc

SEQ ID NO: 687816 - RNA, 19 nt, Artificial Sequence
  Description of Artificial Sequence: Synthetic oligonucleotide
cagcgggagcagcauggug

SEQ ID NO: 687817 - RNA, 19 nt, Artificial Sequence
  Description of Artificial Sequence: Synthetic oligonucleotide
uggugaccguccggcgccg

SEQ ID NO: 687818 - RNA, 19 nt, Artificial Sequence
  Description of Artificial Sequence: Synthetic oligonucleotide
aggucccggugaacugacc

SEQ ID NO: 687819 - RNA, 19 nt, Artificial Sequence
  Description of Artificial Sequence: Synthetic oligonucleotide
ggucccggugaacugaccu

SEQ ID NO: 687820 - RNA, 19 nt, Artificial Sequence
  Description of Artificial Sequence: Synthetic oligonucleotide
agccgcucugcaguaugca

SEQ ID NO: 687821 - RNA, 19 nt, Artificial Sequence
  Description of Artificial Sequence: Synthetic oligonucleotide
uacucggcucgagugccua

SEQ ID NO: 687822 - RNA, 19 nt, Artificial Sequence
  Description of Artificial Sequence: Synthetic oligonucleotide
ccgcuuauuagccgcucug

SEQ ID NO: 687823 - RNA, 19 nt, Artificial Sequence
  Description of Artificial Sequence: Synthetic oligonucleotide
caccuggccugaacacuuc

SEQ ID NO: 687824 - RNA, 19 nt, Artificial Sequence
  Description of Artificial Sequence: Synthetic oligonucleotide
ugcugguggcucccuuauu

SEQ ID NO: 687825 - RNA, 19 nt, Artificial Sequence
  Description of Artificial Sequence: Synthetic oligonucleotide
acguagcgguccuggcggu

SEQ ID NO: 687826 - RNA, 19 nt, Artificial Sequence
  Description of Artificial Sequence: Synthetic oligonucleotide
guccuggcgguuggugaag

SEQ ID NO: 687827 - RNA, 19 nt, Artificial Sequence
  Description of Artificial Sequence: Synthetic oligonucleotide
gccaucacgacucgccucu

SEQ ID NO: 687828 - RNA, 19 nt, Artificial Sequence
  Description of Artificial Sequence: Synthetic oligonucleotide
uggucucguugaagcgcuc

SEQ ID NO: 687829 - RNA, 19 nt, Artificial Sequence
  Description of Artificial Sequence: Synthetic oligonucleotide
gccucugaagagacgcggc

SEQ ID NO: 687830 - RNA, 19 nt, Artificial Sequence
  Description of Artificial Sequence: Synthetic oligonucleotide
cuccgucacgauggcaauc

SEQ ID NO: 687831 - RNA, 19 nt, Artificial Sequence
  Description of Artificial Sequence: Synthetic oligonucleotide
gcuuccgucagcagggucu

SEQ ID NO: 687832 - RNA, 19 nt, Artificial Sequence
  Description of Artificial Sequence: Synthetic oligonucleotide
ccagaccggagucauugca

SEQ ID NO: 687833 - RNA, 19 nt, Artificial Sequence
  Description of Artificial Sequence: Synthetic oligonucleotide
agccuccgucaguuuucug

SEQ ID NO: 687834 - RNA, 19 nt, Artificial Sequence
  Description of Artificial Sequence: Synthetic oligonucleotide
ggucggaaggaaacuucga

SEQ ID NO: 687835 - RNA, 19 nt, Artificial Sequence
  Description of Artificial Sequence: Synthetic oligonucleotide
gcagagagucacuguggaa

SEQ ID NO: 687836 - RNA, 19 nt, Artificial Sequence
  Description of Artificial Sequence: Synthetic oligonucleotide
gcaacugcagggacacauc

SEQ ID NO: 687837 - RNA, 19 nt, Artificial Sequence
  Description of Artificial Sequence: Synthetic oligonucleotide
gcaagguggggaggugacc

SEQ ID NO: 687838 - RNA, 19 nt, Artificial Sequence
  Description of Artificial Sequence: Synthetic oligonucleotide
gaucgcaaguagagcugcu

SEQ ID NO: 687839 - RNA, 19 nt, Artificial Sequence
  Description of Artificial Sequence: Synthetic oligonucleotide
auacucggcucgagugccu

SEQ ID NO: 687840 - RNA, 19 nt, Artificial Sequence
  Description of Artificial Sequence: Synthetic oligonucleotide
cucgcagguuuggcgugug

SEQ ID NO: 687841 - RNA, 19 nt, Artificial Sequence
  Description of Artificial Sequence: Synthetic oligonucleotide
cccagaccggagucauugc

SEQ ID NO: 687842 - RNA, 19 nt, Artificial Sequence
  Description of Artificial Sequence: Synthetic oligonucleotide
caucccgugcgccaguauu

SEQ ID NO: 687843 - RNA, 19 nt, Artificial Sequence
  Description of Artificial Sequence: Synthetic oligonucleotide
gcgagaguucuuccuaccu

SEQ ID NO: 687844 - RNA, 19 nt, Artificial Sequence
  Description of Artificial Sequence: Synthetic oligonucleotide
agacgacguuguugucaaa

SEQ ID NO: 687845 - RNA, 19 nt, Artificial Sequence
  Description of Artificial Sequence: Synthetic oligonucleotide
cgacaugcggucaccucug

SEQ ID NO: 687846 - RNA, 19 nt, Artificial Sequence
  Description of Artificial Sequence: Synthetic oligonucleotide
caucgccucagccucccgu

SEQ ID NO: 687847 - RNA, 19 nt, Artificial Sequence
  Description of Artificial Sequence: Synthetic oligonucleotide
ccacucaagacgacguugu

SEQ ID NO: 687848 - RNA, 19 nt, Artificial Sequence
  Description of Artificial Sequence: Synthetic oligonucleotide
ccccuucaagagcucgaag

SEQ ID NO: 687849 - RNA, 19 nt, Artificial Sequence
  Description of Artificial Sequence: Synthetic oligonucleotide
gcgaggaggaucugauacu

SEQ ID NO: 687850 - RNA, 19 nt, Artificial Sequence
  Description of Artificial Sequence: Synthetic oligonucleotide
caguuacauuguccccaca

SEQ ID NO: 687851 - RNA, 19 nt, Artificial Sequence
  Description of Artificial Sequence: Synthetic oligonucleotide
gggacacccagaccggagu

SEQ ID NO: 687852 - RNA, 19 nt, Artificial Sequence
  Description of Artificial Sequence: Synthetic oligonucleotide
ggaccagguuucugaucca

SEQ ID NO: 687853 - RNA, 19 nt, Artificial Sequence
  Description of Artificial Sequence: Synthetic oligonucleotide
gcacgcccaacaucgccuc

SEQ ID NO: 687854 - RNA, 19 nt, Artificial Sequence
  Description of Artificial Sequence: Synthetic oligonucleotide
cgaucggaaggggcaaugc

SEQ ID NO: 687855 - RNA, 19 nt, Artificial Sequence
  Description of Artificial Sequence: Synthetic oligonucleotide
cagccucccguaggucacc

SEQ ID NO: 687856 - RNA, 19 nt, Artificial Sequence
  Description of Artificial Sequence: Synthetic oligonucleotide
gcacucccucgggacauag

SEQ ID NO: 687857 - RNA, 19 nt, Artificial Sequence
  Description of Artificial Sequence: Synthetic oligonucleotide
gcggccucagagccauuac

SEQ ID NO: 687858 - RNA, 19 nt, Artificial Sequence
  Description of Artificial Sequence: Synthetic oligonucleotide
cccguaggucacccagacc

SEQ ID NO: 687859 - RNA, 19 nt, Artificial Sequence
  Description of Artificial Sequence: Synthetic oligonucleotide
gcccucgcagguuuggcgu

SEQ ID NO: 687860 - RNA, 19 nt, Artificial Sequence
  Description of Artificial Sequence: Synthetic oligonucleotide
ccccgggugaaguccagga

SEQ ID NO: 687861 - RNA, 19 nt, Artificial Sequence
  Description of Artificial Sequence: Synthetic oligonucleotide
cacguccaugacccgcuua

SEQ ID NO: 687862 - RNA, 19 nt, Artificial Sequence
  Description of Artificial Sequence: Synthetic oligonucleotide
gacccgcuuauuagccgcu

SEQ ID NO: 687863 - RNA, 19 nt, Artificial Sequence
  Description of Artificial Sequence: Synthetic oligonucleotide
cacgcccaacaucgccuca

SEQ ID NO: 687864 - RNA, 19 nt, Artificial Sequence
  Description of Artificial Sequence: Synthetic oligonucleotide
gguuggaggccaggccuuc

SEQ ID NO: 687865 - RNA, 19 nt, Artificial Sequence
  Description of Artificial Sequence: Synthetic oligonucleotide
ggucucguugaagcgcucu

SEQ ID NO: 687866 - RNA, 19 nt, Artificial Sequence
  Description of Artificial Sequence: Synthetic oligonucleotide
cugcugguggcucccuuau

SEQ ID NO: 687867 - RNA, 19 nt, Artificial Sequence
  Description of Artificial Sequence: Synthetic oligonucleotide
cgugcgccaguauuccuga

SEQ ID NO: 687868 - RNA, 19 nt, Artificial Sequence
  Description of Artificial Sequence: Synthetic oligonucleotide
ggcgccggccacucccuuc

SEQ ID NO: 687869 - RNA, 19 nt, Artificial Sequence
  Description of Artificial Sequence: Synthetic oligonucleotide
gccccgggugaaguccagg

SEQ ID NO: 687870 - RNA, 19 nt, Artificial Sequence
  Description of Artificial Sequence: Synthetic oligonucleotide
gugcgccaguauuccugaa

SEQ ID NO: 687871 - RNA, 19 nt, Artificial Sequence
  Description of Artificial Sequence: Synthetic oligonucleotide
ggugaccguccggcgccgg

SEQ ID NO: 687872 - RNA, 19 nt, Artificial Sequence
  Description of Artificial Sequence: Synthetic oligonucleotide
ggauggcgccggccacucc

SEQ ID NO: 687873 - RNA, 19 nt, Artificial Sequence
  Description of Artificial Sequence: Synthetic oligonucleotide
ccauuacgacaugcgguca

SEQ ID NO: 687874 - RNA, 19 nt, Artificial Sequence
  Description of Artificial Sequence: Synthetic oligonucleotide
ccgucacgauggcaaucug

SEQ ID NO: 687875 - RNA, 19 nt, Artificial Sequence
  Description of Artificial Sequence: Synthetic oligonucleotide
gggauggcgccggccacuc

SEQ ID NO: 687876 - RNA, 19 nt, Artificial Sequence
  Description of Artificial Sequence: Synthetic oligonucleotide
caccacucaagacgacguu

SEQ ID NO: 687877 - RNA, 19 nt, Artificial Sequence
  Description of Artificial Sequence: Synthetic oligonucleotide
cgcagguuuggcgugugga

SEQ ID NO: 687878 - RNA, 19 nt, Artificial Sequence
  Description of Artificial Sequence: Synthetic oligonucleotide
gcucgcugggacacccaga

SEQ ID NO: 687879 - RNA, 19 nt, Artificial Sequence
  Description of Artificial Sequence: Synthetic oligonucleotide
cggcucgagugccuagcac

SEQ ID NO: 687880 - RNA, 19 nt, Artificial Sequence
  Description of Artificial Sequence: Synthetic oligonucleotide
gcucuccgucacgauggca

SEQ ID NO: 687881 - RNA, 19 nt, Artificial Sequence
  Description of Artificial Sequence: Synthetic oligonucleotide
cugcaguaugcagcccggu

SEQ ID NO: 687882 - RNA, 19 nt, Artificial Sequence
  Description of Artificial Sequence: Synthetic oligonucleotide
gcccgauggucucguugaa

SEQ ID NO: 687883 - RNA, 19 nt, Artificial Sequence
  Description of Artificial Sequence: Synthetic oligonucleotide
cccgcuuauuagccgcucu

SEQ ID NO: 687884 - RNA, 19 nt, Artificial Sequence
  Description of Artificial Sequence: Synthetic oligonucleotide
cgccaguauuccugaagcu

SEQ ID NO: 687885 - RNA, 19 nt, Artificial Sequence
  Description of Artificial Sequence: Synthetic oligonucleotide
cgcaaguagagcugcucuu

SEQ ID NO: 687886 - RNA, 19 nt, Artificial Sequence
  Description of Artificial Sequence: Synthetic oligonucleotide
cagcuuccgucagcagggu

SEQ ID NO: 687887 - RNA, 19 nt, Artificial Sequence
  Description of Artificial Sequence: Synthetic oligonucleotide
ggaggagcccucgcagguu

SEQ ID NO: 687888 - RNA, 19 nt, Artificial Sequence
  Description of Artificial Sequence: Synthetic oligonucleotide
cccagaccgucaguuacau

SEQ ID NO: 687889 - RNA, 19 nt, Artificial Sequence
  Description of Artificial Sequence: Synthetic oligonucleotide
cggucaccuuuguaagggu

SEQ ID NO: 687890 - RNA, 19 nt, Artificial Sequence
  Description of Artificial Sequence: Synthetic oligonucleotide
cccugacgugagagcugga

SEQ ID NO: 687891 - RNA, 19 nt, Artificial Sequence
  Description of Artificial Sequence: Synthetic oligonucleotide
cccgugcgccaguauuccu

SEQ ID NO: 687892 - RNA, 19 nt, Artificial Sequence
  Description of Artificial Sequence: Synthetic oligonucleotide
gacucgccucuuggccauu

SEQ ID NO: 687893 - RNA, 19 nt, Artificial Sequence
  Description of Artificial Sequence: Synthetic oligonucleotide
cgcggccucagagccauua

SEQ ID NO: 687894 - RNA, 19 nt, Artificial Sequence
  Description of Artificial Sequence: Synthetic oligonucleotide
cguagcgguccuggcgguu

SEQ ID NO: 687895 - RNA, 19 nt, Artificial Sequence
  Description of Artificial Sequence: Synthetic oligonucleotide
uuaacuuuaucacuugaag

SEQ ID NO: 687896 - RNA, 19 nt, Artificial Sequence
  Description of Artificial Sequence: Synthetic oligonucleotide
aacuuuaucacuugaaguu

SEQ ID NO: 687897 - RNA, 19 nt, Artificial Sequence
  Description of Artificial Sequence: Synthetic oligonucleotide
uaacuuuaucacuugaagu

SEQ ID NO: 687898 - RNA, 19 nt, Artificial Sequence
  Description of Artificial Sequence: Synthetic oligonucleotide
aacaccgacgacugccacc

SEQ ID NO: 687899 - RNA, 19 nt, Artificial Sequence
  Description of Artificial Sequence: Synthetic oligonucleotide
gaagccaacucccaccagc

SEQ ID NO: 687900 - RNA, 19 nt, Artificial Sequence
  Description of Artificial Sequence: Synthetic oligonucleotide
aacucccaccagcuggaac

SEQ ID NO: 687901 - RNA, 19 nt, Artificial Sequence
  Description of Artificial Sequence: Synthetic oligonucleotide
uggaacaccgacgacugcc

SEQ ID NO: 687902 - RNA, 19 nt, Artificial Sequence
  Description of Artificial Sequence: Synthetic oligonucleotide
acaccgacgacugccaccg

SEQ ID NO: 687903 - RNA, 19 nt, Artificial Sequence
  Description of Artificial Sequence: Synthetic oligonucleotide
caccgugaagccaacuccc

SEQ ID NO: 687904 - RNA, 19 nt, Artificial Sequence
  Description of Artificial Sequence: Synthetic oligonucleotide
agcuggaacaccgacgacu

SEQ ID NO: 687905 - RNA, 19 nt, Artificial Sequence
  Description of Artificial Sequence: Synthetic oligonucleotide
gccaacucccaccagcugg

SEQ ID NO: 687906 - RNA, 19 nt, Artificial Sequence
  Description of Artificial Sequence: Synthetic oligonucleotide
cuuuaucacuugaaguuua

SEQ ID NO: 687907 - RNA, 19 nt, Artificial Sequence
  Description of Artificial Sequence: Synthetic oligonucleotide
aagccaacucccaccagcu

SEQ ID NO: 687908 - RNA, 19 nt, Artificial Sequence
  Description of Artificial Sequence: Synthetic oligonucleotide
accagcuggaacaccgacg

SEQ ID NO: 687909 - RNA, 19 nt, Artificial Sequence
  Description of Artificial Sequence: Synthetic oligonucleotide
ugaagccaacucccaccag

SEQ ID NO: 687910 - RNA, 19 nt, Artificial Sequence
  Description of Artificial Sequence: Synthetic oligonucleotide
cccaccagcuggaacaccg

SEQ ID NO: 687911 - RNA, 19 nt, Artificial Sequence
  Description of Artificial Sequence: Synthetic oligonucleotide
gcaccgugaagccaacucc

SEQ ID NO: 687912 - RNA, 19 nt, Artificial Sequence
  Description of Artificial Sequence: Synthetic oligonucleotide
gcuggaacaccgacgacug

SEQ ID NO: 687913 - RNA, 19 nt, Artificial Sequence
  Description of Artificial Sequence: Synthetic oligonucleotide
caccagcuggaacaccgac

SEQ ID NO: 687914 - RNA, 19 nt, Artificial Sequence
  Description of Artificial Sequence: Synthetic oligonucleotide
ccagcuggaacaccgacga

SEQ ID NO: 687915 - RNA, 19 nt, Artificial Sequence
  Description of Artificial Sequence: Synthetic oligonucleotide
agccaacucccaccagcug

SEQ ID NO: 687916 - RNA, 19 nt, Artificial Sequence
  Description of Artificial Sequence: Synthetic oligonucleotide
cuggaacaccgacgacugc

SEQ ID NO: 687917 - RNA, 19 nt, Artificial Sequence
  Description of Artificial Sequence: Synthetic oligonucleotide
accgugaagccaacuccca

SEQ ID NO: 687918 - RNA, 19 nt, Artificial Sequence
  Description of Artificial Sequence: Synthetic oligonucleotide
ggaacaccgacgacugcca

SEQ ID NO: 687919 - RNA, 19 nt, Artificial Sequence
  Description of Artificial Sequence: Synthetic oligonucleotide
ccaacucccaccagcugga

SEQ ID NO: 687920 - RNA, 19 nt, Artificial Sequence
  Description of Artificial Sequence: Synthetic oligonucleotide
ccgugaagccaacucccac

SEQ ID NO: 687921 - RNA, 19 nt, Artificial Sequence
  Description of Artificial Sequence: Synthetic oligonucleotide
cagcuggaacaccgacgac

SEQ ID NO: 687922 - RNA, 19 nt, Artificial Sequence
  Description of Artificial Sequence: Synthetic oligonucleotide
ccaccagcuggaacaccga

SEQ ID NO: 687923 - RNA, 19 nt, Artificial Sequence
  Description of Artificial Sequence: Synthetic oligonucleotide
acuaguaacgcucuggggc

SEQ ID NO: 687924 - RNA, 19 nt, Artificial Sequence
  Description of Artificial Sequence: Synthetic oligonucleotide
aauuuuaacuggcaggauc

SEQ ID NO: 687925 - RNA, 19 nt, Artificial Sequence
  Description of Artificial Sequence: Synthetic oligonucleotide
uucuaguuaacauauauug

SEQ ID NO: 687926 - RNA, 19 nt, Artificial Sequence
  Description of Artificial Sequence: Synthetic oligonucleotide
auuuacauaucguuuaugg

SEQ ID NO: 687927 - RNA, 19 nt, Artificial Sequence
  Description of Artificial Sequence: Synthetic oligonucleotide
uguaucuuaagacaguacc

SEQ ID NO: 687928 - RNA, 19 nt, Artificial Sequence
  Description of Artificial Sequence: Synthetic oligonucleotide
agcgauauaacuuaaaggu

SEQ ID NO: 687929 - RNA, 19 nt, Artificial Sequence
  Description of Artificial Sequence: Synthetic oligonucleotide
aaagcgauauaacuuaaag

SEQ ID NO: 687930 - RNA, 19 nt, Artificial Sequence
  Description of Artificial Sequence: Synthetic oligonucleotide
uuuaacugcacucugccag

SEQ ID NO: 687931 - RNA, 19 nt, Artificial Sequence
  Description of Artificial Sequence: Synthetic oligonucleotide
aagcgauauaacuuaaagg

SEQ ID NO: 687932 - RNA, 19 nt, Artificial Sequence
  Description of Artificial Sequence: Synthetic oligonucleotide
ugucacauggucaugacag

SEQ ID NO: 687933 - RNA, 19 nt, Artificial Sequence
  Description of Artificial Sequence: Synthetic oligonucleotide
caucaugggacauugaugg

SEQ ID NO: 687934 - RNA, 19 nt, Artificial Sequence
  Description of Artificial Sequence: Synthetic oligonucleotide
auuagcaacaaucuuacca

SEQ ID NO: 687935 - RNA, 19 nt, Artificial Sequence
  Description of Artificial Sequence: Synthetic oligonucleotide
uuauuauaaucuauagucc

SEQ ID NO: 687936 - RNA, 19 nt, Artificial Sequence
  Description of Artificial Sequence: Synthetic oligonucleotide
uuacauaucguuuauggcu

SEQ ID NO: 687937 - RNA, 19 nt, Artificial Sequence
  Description of Artificial Sequence: Synthetic oligonucleotide
uacaauguaagacaagcga

SEQ ID NO: 687938 - RNA, 19 nt, Artificial Sequence
  Description of Artificial Sequence: Synthetic oligonucleotide
aaucuuaccacuaaagaca

SEQ ID NO: 687939 - RNA, 19 nt, Artificial Sequence
  Description of Artificial Sequence: Synthetic oligonucleotide
ugcacuuuuacaaaagcga

SEQ ID NO: 687940 - RNA, 19 nt, Artificial Sequence
  Description of Artificial Sequence: Synthetic oligonucleotide
aauacuaguaacgcucugg

SEQ ID NO: 687941 - RNA, 19 nt, Artificial Sequence
  Description of Artificial Sequence: Synthetic oligonucleotide
ucucauuguauacugaacu

SEQ ID NO: 687942 - RNA, 19 nt, Artificial Sequence
  Description of Artificial Sequence: Synthetic oligonucleotide
uuacaauguaagacaagcg

SEQ ID NO: 687943 - RNA, 19 nt, Artificial Sequence
  Description of Artificial Sequence: Synthetic oligonucleotide
ugcuauguaacucccaccc

SEQ ID NO: 687944 - RNA, 19 nt, Artificial Sequence
  Description of Artificial Sequence: Synthetic oligonucleotide
aauuaaucccaccucagaa

SEQ ID NO: 687945 - RNA, 19 nt, Artificial Sequence
  Description of Artificial Sequence: Synthetic oligonucleotide
uuagcaacaaucuuaccac

SEQ ID NO: 687946 - RNA, 19 nt, Artificial Sequence
  Description of Artificial Sequence: Synthetic oligonucleotide
uauguuauuauaagcauuu

SEQ ID NO: 687947 - RNA, 19 nt, Artificial Sequence
  Description of Artificial Sequence: Synthetic oligonucleotide
uauuguauaaauacucuau

SEQ ID NO: 687948 - RNA, 19 nt, Artificial Sequence
  Description of Artificial Sequence: Synthetic oligonucleotide
uccucaauguuacaggacc

SEQ ID NO: 687949 - RNA, 19 nt, Artificial Sequence
  Description of Artificial Sequence: Synthetic oligonucleotide
uuguacuagugacugaucc

SEQ ID NO: 687950 - RNA, 19 nt, Artificial Sequence
  Description of Artificial Sequence: Synthetic oligonucleotide
uaccacuaaagacacauca

SEQ ID NO: 687951 - RNA, 19 nt, Artificial Sequence
  Description of Artificial Sequence: Synthetic oligonucleotide
acugguuugauucaugggu

SEQ ID NO: 687952 - RNA, 19 nt, Artificial Sequence
  Description of Artificial Sequence: Synthetic oligonucleotide
auagauguuaacaagagaa

SEQ ID NO: 687953 - RNA, 19 nt, Artificial Sequence
  Description of Artificial Sequence: Synthetic oligonucleotide
aauagauguuaacaagaga

SEQ ID NO: 687954 - RNA, 19 nt, Artificial Sequence
  Description of Artificial Sequence: Synthetic oligonucleotide
uacauaucguuuauggcug

SEQ ID NO: 687955 - RNA, 19 nt, Artificial Sequence
  Description of Artificial Sequence: Synthetic oligonucleotide
uuuacauaucguuuauggc

SEQ ID NO: 687956 - RNA, 19 nt, Artificial Sequence
  Description of Artificial Sequence: Synthetic oligonucleotide
ucuaguuaacauauauugu

SEQ ID NO: 687957 - RNA, 19 nt, Artificial Sequence
  Description of Artificial Sequence: Synthetic oligonucleotide
uguuauuauaagcauuuau

SEQ ID NO: 687958 - RNA, 19 nt, Artificial Sequence
  Description of Artificial Sequence: Synthetic oligonucleotide
auuauuucuaguuaacaua

SEQ ID NO: 687959 - RNA, 19 nt, Artificial Sequence
  Description of Artificial Sequence: Synthetic oligonucleotide
uuugcuauguaacucccac

SEQ ID NO: 687960 - RNA, 19 nt, Artificial Sequence
  Description of Artificial Sequence: Synthetic oligonucleotide
uuaacuggcaggaucgugu

SEQ ID NO: 687961 - RNA, 19 nt, Artificial Sequence
  Description of Artificial Sequence: Synthetic oligonucleotide
uguaucagcccucccaugc

SEQ ID NO: 687962 - RNA, 19 nt, Artificial Sequence
  Description of Artificial Sequence: Synthetic oligonucleotide
uuucguuuggcacacgagu

SEQ ID NO: 687963 - RNA, 19 nt, Artificial Sequence
  Description of Artificial Sequence: Synthetic oligonucleotide
cucgucaaauuuuaacugg

SEQ ID NO: 687964 - RNA, 19 nt, Artificial Sequence
  Description of Artificial Sequence: Synthetic oligonucleotide
gacauugaugggcugaagc

SEQ ID NO: 687965 - RNA, 19 nt, Artificial Sequence
  Description of Artificial Sequence: Synthetic oligonucleotide
acauauaauucauaguaau

SEQ ID NO: 687966 - RNA, 19 nt, Artificial Sequence
  Description of Artificial Sequence: Synthetic oligonucleotide
acaaucuuaccacuaaaga

SEQ ID NO: 687967 - RNA, 19 nt, Artificial Sequence
  Description of Artificial Sequence: Synthetic oligonucleotide
aauauagccuacaaugcca

SEQ ID NO: 687968 - RNA, 19 nt, Artificial Sequence
  Description of Artificial Sequence: Synthetic oligonucleotide
gucaaauuuuaacuggcag

SEQ ID NO: 687969 - RNA, 19 nt, Artificial Sequence
  Description of Artificial Sequence: Synthetic oligonucleotide
ucauuguauacugaacucc

SEQ ID NO: 687970 - RNA, 19 nt, Artificial Sequence
  Description of Artificial Sequence: Synthetic oligonucleotide
uacauauaauucauaguaa

SEQ ID NO: 687971 - RNA, 19 nt, Artificial Sequence
  Description of Artificial Sequence: Synthetic oligonucleotide
aguaauguauuuuacuaua

SEQ ID NO: 687972 - RNA, 19 nt, Artificial Sequence
  Description of Artificial Sequence: Synthetic oligonucleotide
aaguguuucguuuggcaca

SEQ ID NO: 687973 - RNA, 19 nt, Artificial Sequence
  Description of Artificial Sequence: Synthetic oligonucleotide
uccauuauugucgggacag

SEQ ID NO: 687974 - RNA, 19 nt, Artificial Sequence
  Description of Artificial Sequence: Synthetic oligonucleotide
acaaaagcgauauaacuua

SEQ ID NO: 687975 - RNA, 19 nt, Artificial Sequence
  Description of Artificial Sequence: Synthetic oligonucleotide
accucgucaaauuuuaacu

SEQ ID NO: 687976 - RNA, 19 nt, Artificial Sequence
  Description of Artificial Sequence: Synthetic oligonucleotide
aagucaauguaaugcuuug

SEQ ID NO: 687977 - RNA, 19 nt, Artificial Sequence
  Description of Artificial Sequence: Synthetic oligonucleotide
aaugucaugauaaccgggu

SEQ ID NO: 687978 - RNA, 19 nt, Artificial Sequence
  Description of Artificial Sequence: Synthetic oligonucleotide
agcgaucuccaauagaugu

SEQ ID NO: 687979 - RNA, 19 nt, Artificial Sequence
  Description of Artificial Sequence: Synthetic oligonucleotide
uacaguauuugccaaccac

SEQ ID NO: 687980 - RNA, 19 nt, Artificial Sequence
  Description of Artificial Sequence: Synthetic oligonucleotide
ucuaguguggacagaguga

SEQ ID NO: 687981 - RNA, 19 nt, Artificial Sequence
  Description of Artificial Sequence: Synthetic oligonucleotide
ucauuaacuaccucgucaa

SEQ ID NO: 687982 - RNA, 19 nt, Artificial Sequence
  Description of Artificial Sequence: Synthetic oligonucleotide
ucgucaaauuuuaacuggc

SEQ ID NO: 687983 - RNA, 19 nt, Artificial Sequence
  Description of Artificial Sequence: Synthetic oligonucleotide
uguagcguacucuuuugcc

SEQ ID NO: 687984 - RNA, 19 nt, Artificial Sequence
  Description of Artificial Sequence: Synthetic oligonucleotide
cuaguaacgcucuggggcg

SEQ ID NO: 687985 - RNA, 19 nt, Artificial Sequence
  Description of Artificial Sequence: Synthetic oligonucleotide
uuugauuucgguguuucac

SEQ ID NO: 687986 - RNA, 19 nt, Artificial Sequence
  Description of Artificial Sequence: Synthetic oligonucleotide
aggaauuaaucccaccuca

SEQ ID NO: 687987 - RNA, 19 nt, Artificial Sequence
  Description of Artificial Sequence: Synthetic oligonucleotide
uucggauucuuuccaacgc

SEQ ID NO: 687988 - RNA, 19 nt, Artificial Sequence
  Description of Artificial Sequence: Synthetic oligonucleotide
aagacaagcgaucuccaau

SEQ ID NO: 687989 - RNA, 19 nt, Artificial Sequence
  Description of Artificial Sequence: Synthetic oligonucleotide
uuaacauauauuguauaaa

SEQ ID NO: 687990 - RNA, 19 nt, Artificial Sequence
  Description of Artificial Sequence: Synthetic oligonucleotide
caggauacgacuguuagac

SEQ ID NO: 687991 - RNA, 19 nt, Artificial Sequence
  Description of Artificial Sequence: Synthetic oligonucleotide
uaacuuaaagguuuaucau

SEQ ID NO: 687992 - RNA, 19 nt, Artificial Sequence
  Description of Artificial Sequence: Synthetic oligonucleotide
ugucaugauaaccgggucu

SEQ ID NO: 687993 - RNA, 19 nt, Artificial Sequence
  Description of Artificial Sequence: Synthetic oligonucleotide
uuggcaucguacaugguac

SEQ ID NO: 687994 - RNA, 19 nt, Artificial Sequence
  Description of Artificial Sequence: Synthetic oligonucleotide
uaucguuuauggcuguucu

SEQ ID NO: 687995 - RNA, 19 nt, Artificial Sequence
  Description of Artificial Sequence: Synthetic oligonucleotide
ucucccuuugcuauguaac

SEQ ID NO: 687996 - RNA, 19 nt, Artificial Sequence
  Description of Artificial Sequence: Synthetic oligonucleotide
uuguucacacacuugccgc

SEQ ID NO: 687997 - RNA, 19 nt, Artificial Sequence
  Description of Artificial Sequence: Synthetic oligonucleotide
aacuguuuaacugcacucu

SEQ ID NO: 687998 - RNA, 19 nt, Artificial Sequence
  Description of Artificial Sequence: Synthetic oligonucleotide
uggcacacgaguaagccac

SEQ ID NO: 687999 - RNA, 19 nt, Artificial Sequence
  Description of Artificial Sequence: Synthetic oligonucleotide
uuggguguccauuccacag

SEQ ID NO: 688000 - RNA, 19 nt, Artificial Sequence
  Description of Artificial Sequence: Synthetic oligonucleotide
uguuucguuuggcacacga

SEQ ID NO: 688001 - RNA, 19 nt, Artificial Sequence
  Description of Artificial Sequence: Synthetic oligonucleotide
auauuguauaaauacucua

SEQ ID NO: 688002 - RNA, 19 nt, Artificial Sequence
  Description of Artificial Sequence: Synthetic oligonucleotide
ucucucauuguauacugaa

SEQ ID NO: 688003 - RNA, 19 nt, Artificial Sequence
  Description of Artificial Sequence: Synthetic oligonucleotide
caaugucaugauaaccggg

SEQ ID NO: 688004 - RNA, 19 nt, Artificial Sequence
  Description of Artificial Sequence: Synthetic oligonucleotide
ucggauucuuuccaacgcc

SEQ ID NO: 688005 - RNA, 19 nt, Artificial Sequence
  Description of Artificial Sequence: Synthetic oligonucleotide
auuaaucccaccucagaaa

SEQ ID NO: 688006 - RNA, 19 nt, Artificial Sequence
  Description of Artificial Sequence: Synthetic oligonucleotide
uaucuuaagacaguaccuc

SEQ ID NO: 688007 - RNA, 19 nt, Artificial Sequence
  Description of Artificial Sequence: Synthetic oligonucleotide
uacugguuugauucauggg

SEQ ID NO: 688008 - RNA, 19 nt, Artificial Sequence
  Description of Artificial Sequence: Synthetic oligonucleotide
ucgguguuucacuucaaug

SEQ ID NO: 688009 - RNA, 19 nt, Artificial Sequence
  Description of Artificial Sequence: Synthetic oligonucleotide
caucguacaugguaccagg

SEQ ID NO: 688010 - RNA, 19 nt, Artificial Sequence
  Description of Artificial Sequence: Synthetic oligonucleotide
uuuggcaccggguugucac

SEQ ID NO: 688011 - RNA, 19 nt, Artificial Sequence
  Description of Artificial Sequence: Synthetic oligonucleotide
auacuuggguguccauucc

SEQ ID NO: 688012 - RNA, 19 nt, Artificial Sequence
  Description of Artificial Sequence: Synthetic oligonucleotide
cauaaaugcuuacuaucug

SEQ ID NO: 688013 - RNA, 19 nt, Artificial Sequence
  Description of Artificial Sequence: Synthetic oligonucleotide
ugauaaccgggucuuguac

SEQ ID NO: 688014 - RNA, 19 nt, Artificial Sequence
  Description of Artificial Sequence: Synthetic oligonucleotide
aguguggacagagugaagu

SEQ ID NO: 688015 - RNA, 19 nt, Artificial Sequence
  Description of Artificial Sequence: Synthetic oligonucleotide
agugaaguuuccauucagg

SEQ ID NO: 688016 - RNA, 19 nt, Artificial Sequence
  Description of Artificial Sequence: Synthetic oligonucleotide
ucaugacaggaaauauagc

SEQ ID NO: 688017 - RNA, 19 nt, Artificial Sequence
  Description of Artificial Sequence: Synthetic oligonucleotide
cucauuguauacugaacuc

SEQ ID NO: 688018 - RNA, 19 nt, Artificial Sequence
  Description of Artificial Sequence: Synthetic oligonucleotide
cucuaguguggacagagug

SEQ ID NO: 688019 - RNA, 19 nt, Artificial Sequence
  Description of Artificial Sequence: Synthetic oligonucleotide
ugacucuuuacaguauuug

SEQ ID NO: 688020 - RNA, 19 nt, Artificial Sequence
  Description of Artificial Sequence: Synthetic oligonucleotide
uauucucucucaguagaag

SEQ ID NO: 688021 - RNA, 19 nt, Artificial Sequence
  Description of Artificial Sequence: Synthetic oligonucleotide
aucuuaagacaguaccucu

SEQ ID NO: 688022 - RNA, 19 nt, Artificial Sequence
  Description of Artificial Sequence: Synthetic oligonucleotide
acgaguaagccaccagagg

SEQ ID NO: 688023 - RNA, 19 nt, Artificial Sequence
  Description of Artificial Sequence: Synthetic oligonucleotide
aguguuucguuuggcacac

SEQ ID NO: 688024 - RNA, 19 nt, Artificial Sequence
  Description of Artificial Sequence: Synthetic oligonucleotide
uucacaguauuucccucca

SEQ ID NO: 688025 - RNA, 19 nt, Artificial Sequence
  Description of Artificial Sequence: Synthetic oligonucleotide
gaauuaaucccaccucaga

SEQ ID NO: 688026 - RNA, 19 nt, Artificial Sequence
  Description of Artificial Sequence: Synthetic oligonucleotide
ucguacaugguaccaggca

SEQ ID NO: 688027 - RNA, 19 nt, Artificial Sequence
  Description of Artificial Sequence: Synthetic oligonucleotide
auguagcuugcaccugucc

SEQ ID NO: 688028 - RNA, 19 nt, Artificial Sequence
  Description of Artificial Sequence: Synthetic oligonucleotide
aguccuucuuagaaggaac

SEQ ID NO: 688029 - RNA, 19 nt, Artificial Sequence
  Description of Artificial Sequence: Synthetic oligonucleotide
cacgaguaagccaccagag

SEQ ID NO: 688030 - RNA, 19 nt, Artificial Sequence
  Description of Artificial Sequence: Synthetic oligonucleotide
uuacuaucugacucuuuac

SEQ ID NO: 688031 - RNA, 19 nt, Artificial Sequence
  Description of Artificial Sequence: Synthetic oligonucleotide
aggauacgacuguuagacc

SEQ ID NO: 688032 - RNA, 19 nt, Artificial Sequence
  Description of Artificial Sequence: Synthetic oligonucleotide
acacgaguaagccaccaga

SEQ ID NO: 688033 - RNA, 19 nt, Artificial Sequence
  Description of Artificial Sequence: Synthetic oligonucleotide
aaucccaccucagaaaaua

SEQ ID NO: 688034 - RNA, 19 nt, Artificial Sequence
  Description of Artificial Sequence: Synthetic oligonucleotide
ggauacgacuguuagacca

SEQ ID NO: 688035 - RNA, 19 nt, Artificial Sequence
  Description of Artificial Sequence: Synthetic oligonucleotide
gauacgacuguuagaccag

SEQ ID NO: 688036 - RNA, 19 nt, Artificial Sequence
  Description of Artificial Sequence: Synthetic oligonucleotide
gucgggacaguccucaaug

SEQ ID NO: 688037 - RNA, 19 nt, Artificial Sequence
  Description of Artificial Sequence: Synthetic oligonucleotide
agugugcaaaagucaaugu

SEQ ID NO: 688038 - RNA, 19 nt, Artificial Sequence
  Description of Artificial Sequence: Synthetic oligonucleotide
augucaugauaaccggguc

SEQ ID NO: 688039 - RNA, 19 nt, Artificial Sequence
  Description of Artificial Sequence: Synthetic oligonucleotide
auggcuagaaagcugccau

SEQ ID NO: 688040 - RNA, 19 nt, Artificial Sequence
  Description of Artificial Sequence: Synthetic oligonucleotide
aggaauugugacaauguca

SEQ ID NO: 688041 - RNA, 19 nt, Artificial Sequence
  Description of Artificial Sequence: Synthetic oligonucleotide
aucguuuauggcuguucuc

SEQ ID NO: 688042 - RNA, 19 nt, Artificial Sequence
  Description of Artificial Sequence: Synthetic oligonucleotide
cagcuuacaauguaagaca

SEQ ID NO: 688043 - RNA, 19 nt, Artificial Sequence
  Description of Artificial Sequence: Synthetic oligonucleotide
uucguuuggcacacgagua

SEQ ID NO: 688044 - RNA, 19 nt, Artificial Sequence
  Description of Artificial Sequence: Synthetic oligonucleotide
cuuacuaucugacucuuua

SEQ ID NO: 688045 - RNA, 19 nt, Artificial Sequence
  Description of Artificial Sequence: Synthetic oligonucleotide
acaauguaagacaagcgau

SEQ ID NO: 688046 - RNA, 19 nt, Artificial Sequence
  Description of Artificial Sequence: Synthetic oligonucleotide
uugugugcuucacauugcu

SEQ ID NO: 688047 - RNA, 19 nt, Artificial Sequence
  Description of Artificial Sequence: Synthetic oligonucleotide
ugccauaaaugcuuacuau

SEQ ID NO: 688048 - RNA, 19 nt, Artificial Sequence
  Description of Artificial Sequence: Synthetic oligonucleotide
ucucucucaguagaagagc

SEQ ID NO: 688049 - RNA, 19 nt, Artificial Sequence
  Description of Artificial Sequence: Synthetic oligonucleotide
uggugagacgccagcauac

SEQ ID NO: 688050 - RNA, 19 nt, Artificial Sequence
  Description of Artificial Sequence: Synthetic oligonucleotide
auacauauggaaacagcca

SEQ ID NO: 688051 - RNA, 19 nt, Artificial Sequence
  Description of Artificial Sequence: Synthetic oligonucleotide
acgacuguuagaccagcug

SEQ ID NO: 688052 - RNA, 19 nt, Artificial Sequence
  Description of Artificial Sequence: Synthetic oligonucleotide
gaguaguacaugugcuggc

SEQ ID NO: 688053 - RNA, 19 nt, Artificial Sequence
  Description of Artificial Sequence: Synthetic oligonucleotide
cucucauuguauacugaac

SEQ ID NO: 688054 - RNA, 19 nt, Artificial Sequence
  Description of Artificial Sequence: Synthetic oligonucleotide
ucaauguuacaggaccugu

SEQ ID NO: 688055 - RNA, 19 nt, Artificial Sequence
  Description of Artificial Sequence: Synthetic oligonucleotide
agacaagcgaucuccaaua

SEQ ID NO: 688056 - RNA, 19 nt, Artificial Sequence
  Description of Artificial Sequence: Synthetic oligonucleotide
auagccuacaaugccauaa

SEQ ID NO: 688057 - RNA, 19 nt, Artificial Sequence
  Description of Artificial Sequence: Synthetic oligonucleotide
uuccauuauugucgggaca

SEQ ID NO: 688058 - RNA, 19 nt, Artificial Sequence
  Description of Artificial Sequence: Synthetic oligonucleotide
gacuguuagaccagcugcc

SEQ ID NO: 688059 - RNA, 19 nt, Artificial Sequence
  Description of Artificial Sequence: Synthetic oligonucleotide
cagugugcaaaagucaaug

SEQ ID NO: 688060 - RNA, 19 nt, Artificial Sequence
  Description of Artificial Sequence: Synthetic oligonucleotide
gcagcuuacaauguaagac

SEQ ID NO: 688061 - RNA, 19 nt, Artificial Sequence
  Description of Artificial Sequence: Synthetic oligonucleotide
auaaucuauaguccuucuu

SEQ ID NO: 688062 - RNA, 19 nt, Artificial Sequence
  Description of Artificial Sequence: Synthetic oligonucleotide
aggauauaggucccaucug

SEQ ID NO: 688063 - RNA, 19 nt, Artificial Sequence
  Description of Artificial Sequence: Synthetic oligonucleotide
aggaguggaccugcuaccc

SEQ ID NO: 688064 - RNA, 19 nt, Artificial Sequence
  Description of Artificial Sequence: Synthetic oligonucleotide
cugaacagacauucaccag

SEQ ID NO: 688065 - RNA, 19 nt, Artificial Sequence
  Description of Artificial Sequence: Synthetic oligonucleotide
ugcuacauauggucucuca

SEQ ID NO: 688066 - RNA, 19 nt, Artificial Sequence
  Description of Artificial Sequence: Synthetic oligonucleotide
uugugcuacauauggucuc

SEQ ID NO: 688067 - RNA, 19 nt, Artificial Sequence
  Description of Artificial Sequence: Synthetic oligonucleotide
acucuauuuuauaugcacu

SEQ ID NO: 688068 - RNA, 19 nt, Artificial Sequence
  Description of Artificial Sequence: Synthetic oligonucleotide
auugugcuacauauggucu

SEQ ID NO: 688069 - RNA, 19 nt, Artificial Sequence
  Description of Artificial Sequence: Synthetic oligonucleotide
ccucagaaaauagacauac

SEQ ID NO: 688070 - RNA, 19 nt, Artificial Sequence
  Description of Artificial Sequence: Synthetic oligonucleotide
auacgacuguuagaccagc

SEQ ID NO: 688071 - RNA, 19 nt, Artificial Sequence
  Description of Artificial Sequence: Synthetic oligonucleotide
aaaagcgauauaacuuaaa

SEQ ID NO: 688072 - RNA, 19 nt, Artificial Sequence
  Description of Artificial Sequence: Synthetic oligonucleotide
uaacuaccucgucaaauuu

SEQ ID NO: 688073 - RNA, 19 nt, Artificial Sequence
  Description of Artificial Sequence: Synthetic oligonucleotide
auuguauacugaacuccuc

SEQ ID NO: 688074 - RNA, 19 nt, Artificial Sequence
  Description of Artificial Sequence: Synthetic oligonucleotide
acauauggucucucagaug

SEQ ID NO: 688075 - RNA, 19 nt, Artificial Sequence
  Description of Artificial Sequence: Synthetic oligonucleotide
caagcgaucuccaauagau

SEQ ID NO: 688076 - RNA, 19 nt, Artificial Sequence
  Description of Artificial Sequence: Synthetic oligonucleotide
aaccgggucuuguacuagu

SEQ ID NO: 688077 - RNA, 19 nt, Artificial Sequence
  Description of Artificial Sequence: Synthetic oligonucleotide
aucguacaugguaccaggc

SEQ ID NO: 688078 - RNA, 19 nt, Artificial Sequence
  Description of Artificial Sequence: Synthetic oligonucleotide
acaguaccucuguagguga

SEQ ID NO: 688079 - RNA, 19 nt, Artificial Sequence
  Description of Artificial Sequence: Synthetic oligonucleotide
aggaucguguccugaucuc

SEQ ID NO: 688080 - RNA, 19 nt, Artificial Sequence
  Description of Artificial Sequence: Synthetic oligonucleotide
gccauaaaugcuuacuauc

SEQ ID NO: 688081 - RNA, 19 nt, Artificial Sequence
  Description of Artificial Sequence: Synthetic oligonucleotide
acaagcgaucuccaauaga

SEQ ID NO: 688082 - RNA, 19 nt, Artificial Sequence
  Description of Artificial Sequence: Synthetic oligonucleotide
uuggugagacgccagcaua

SEQ ID NO: 688083 - RNA, 19 nt, Artificial Sequence
  Description of Artificial Sequence: Synthetic oligonucleotide
ugcuaccugcuucucacaa

SEQ ID NO: 688084 - RNA, 19 nt, Artificial Sequence
  Description of Artificial Sequence: Synthetic oligonucleotide
aguaguacaugugcuggcu

SEQ ID NO: 688085 - RNA, 19 nt, Artificial Sequence
  Description of Artificial Sequence: Synthetic oligonucleotide
uagccuacaaugccauaaa

SEQ ID NO: 688086 - RNA, 19 nt, Artificial Sequence
  Description of Artificial Sequence: Synthetic oligonucleotide
cuguagcguacucuuuugc

SEQ ID NO: 688087 - RNA, 19 nt, Artificial Sequence
  Description of Artificial Sequence: Synthetic oligonucleotide
aaauuuuaacuggcaggau

SEQ ID NO: 688088 - RNA, 19 nt, Artificial Sequence
  Description of Artificial Sequence: Synthetic oligonucleotide
auuauaaucuauaguccuu

SEQ ID NO: 688089 - RNA, 19 nt, Artificial Sequence
  Description of Artificial Sequence: Synthetic oligonucleotide
ugguuugauucauggguuc

SEQ ID NO: 688090 - RNA, 19 nt, Artificial Sequence
  Description of Artificial Sequence: Synthetic oligonucleotide
gauaaccgggucuuguacu

SEQ ID NO: 688091 - RNA, 19 nt, Artificial Sequence
  Description of Artificial Sequence: Synthetic oligonucleotide
ugguuacugguuugauuca

SEQ ID NO: 688092 - RNA, 19 nt, Artificial Sequence
  Description of Artificial Sequence: Synthetic oligonucleotide
cuggcgguuggcaucguac

SEQ ID NO: 688093 - RNA, 19 nt, Artificial Sequence
  Description of Artificial Sequence: Synthetic oligonucleotide
gaucucucccuuugcuaug

SEQ ID NO: 688094 - RNA, 19 nt, Artificial Sequence
  Description of Artificial Sequence: Synthetic oligonucleotide
ucaggauauaggucccauc

SEQ ID NO: 688095 - RNA, 19 nt, Artificial Sequence
  Description of Artificial Sequence: Synthetic oligonucleotide
cauuguauacugaacuccu

SEQ ID NO: 688096 - RNA, 19 nt, Artificial Sequence
  Description of Artificial Sequence: Synthetic oligonucleotide
agcguacucuuuugccuuc

SEQ ID NO: 688097 - RNA, 19 nt, Artificial Sequence
  Description of Artificial Sequence: Synthetic oligonucleotide
gaugcuaacaguccucauu

SEQ ID NO: 688098 - RNA, 19 nt, Artificial Sequence
  Description of Artificial Sequence: Synthetic oligonucleotide
cauguggagccauuuccuc

SEQ ID NO: 688099 - RNA, 19 nt, Artificial Sequence
  Description of Artificial Sequence: Synthetic oligonucleotide
caccucagaaaauagacau

SEQ ID NO: 688100 - RNA, 19 nt, Artificial Sequence
  Description of Artificial Sequence: Synthetic oligonucleotide
ccucgucaaauuuuaacug

SEQ ID NO: 688101 - RNA, 19 nt, Artificial Sequence
  Description of Artificial Sequence: Synthetic oligonucleotide
acagccaugguuaaucauu

SEQ ID NO: 688102 - RNA, 19 nt, Artificial Sequence
  Description of Artificial Sequence: Synthetic oligonucleotide
aacuaccucgucaaauuuu

SEQ ID NO: 688103 - RNA, 19 nt, Artificial Sequence
  Description of Artificial Sequence: Synthetic oligonucleotide
uacgacuguuagaccagcu

SEQ ID NO: 688104 - RNA, 19 nt, Artificial Sequence
  Description of Artificial Sequence: Synthetic oligonucleotide
gcuaacaguccucauuaac

SEQ ID NO: 688105 - RNA, 19 nt, Artificial Sequence
  Description of Artificial Sequence: Synthetic oligonucleotide
ggugccgucugcccaaggg

SEQ ID NO: 688106 - RNA, 19 nt, Artificial Sequence
  Description of Artificial Sequence: Synthetic oligonucleotide
guuucguuuggcacacgag

SEQ ID NO: 688107 - RNA, 19 nt, Artificial Sequence
  Description of Artificial Sequence: Synthetic oligonucleotide
ugauccuggauaucuucuu

SEQ ID NO: 688108 - RNA, 19 nt, Artificial Sequence
  Description of Artificial Sequence: Synthetic oligonucleotide
ugccgucugcccaagggaa

SEQ ID NO: 688109 - RNA, 19 nt, Artificial Sequence
  Description of Artificial Sequence: Synthetic oligonucleotide
uggucucucagaugcuaac

SEQ ID NO: 688110 - RNA, 19 nt, Artificial Sequence
  Description of Artificial Sequence: Synthetic oligonucleotide
ggaauuaaucccaccucag

SEQ ID NO: 688111 - RNA, 19 nt, Artificial Sequence
  Description of Artificial Sequence: Synthetic oligonucleotide
accuguagcguacucuuuu

SEQ ID NO: 688112 - RNA, 19 nt, Artificial Sequence
  Description of Artificial Sequence: Synthetic oligonucleotide
uagcguacucuuuugccuu

SEQ ID NO: 688113 - RNA, 19 nt, Artificial Sequence
  Description of Artificial Sequence: Synthetic oligonucleotide
uggcgguuggcaucguaca

SEQ ID NO: 688114 - RNA, 19 nt, Artificial Sequence
  Description of Artificial Sequence: Synthetic oligonucleotide
gacgccagcauacuugggu

SEQ ID NO: 688115 - RNA, 19 nt, Artificial Sequence
  Description of Artificial Sequence: Synthetic oligonucleotide
uggcaucguacaugguacc

SEQ ID NO: 688116 - RNA, 19 nt, Artificial Sequence
  Description of Artificial Sequence: Synthetic oligonucleotide
augauaaccgggucuugua

SEQ ID NO: 688117 - RNA, 19 nt, Artificial Sequence
  Description of Artificial Sequence: Synthetic oligonucleotide
gccuacaaugccauaaaug

SEQ ID NO: 688118 - RNA, 19 nt, Artificial Sequence
  Description of Artificial Sequence: Synthetic oligonucleotide
uggucaugacaggaaauau

SEQ ID NO: 688119 - RNA, 19 nt, Artificial Sequence
  Description of Artificial Sequence: Synthetic oligonucleotide
uaguguggacagagugaag

SEQ ID NO: 688120 - RNA, 19 nt, Artificial Sequence
  Description of Artificial Sequence: Synthetic oligonucleotide
caguguaucagcccuccca

SEQ ID NO: 688121 - RNA, 19 nt, Artificial Sequence
  Description of Artificial Sequence: Synthetic oligonucleotide
cuaguguggacagagugaa

SEQ ID NO: 688122 - RNA, 19 nt, Artificial Sequence
  Description of Artificial Sequence: Synthetic oligonucleotide
acuugccgcugacacacca

SEQ ID NO: 688123 - RNA, 19 nt, Artificial Sequence
  Description of Artificial Sequence: Synthetic oligonucleotide
guagcguacucuuuugccu

SEQ ID NO: 688124 - RNA, 19 nt, Artificial Sequence
  Description of Artificial Sequence: Synthetic oligonucleotide
acuaccucgucaaauuuua

SEQ ID NO: 688125 - RNA, 19 nt, Artificial Sequence
  Description of Artificial Sequence: Synthetic oligonucleotide
guaucuuaagacaguaccu

SEQ ID NO: 688126 - RNA, 19 nt, Artificial Sequence
  Description of Artificial Sequence: Synthetic oligonucleotide
acauaucguuuauggcugu

SEQ ID NO: 688127 - RNA, 19 nt, Artificial Sequence
  Description of Artificial Sequence: Synthetic oligonucleotide
ccaaagaguaguacaugug

SEQ ID NO: 688128 - RNA, 19 nt, Artificial Sequence
  Description of Artificial Sequence: Synthetic oligonucleotide
auauagccuacaaugccau

SEQ ID NO: 688129 - RNA, 19 nt, Artificial Sequence
  Description of Artificial Sequence: Synthetic oligonucleotide
aacgccgcugaggagucca

SEQ ID NO: 688130 - RNA, 19 nt, Artificial Sequence
  Description of Artificial Sequence: Synthetic oligonucleotide
caaaagcgauauaacuuaa

SEQ ID NO: 688131 - RNA, 19 nt, Artificial Sequence
  Description of Artificial Sequence: Synthetic oligonucleotide
auacucuauuuuauaugca

SEQ ID NO: 688132 - RNA, 19 nt, Artificial Sequence
  Description of Artificial Sequence: Synthetic oligonucleotide
cacacgaguaagccaccag

SEQ ID NO: 688133 - RNA, 19 nt, Artificial Sequence
  Description of Artificial Sequence: Synthetic oligonucleotide
cucagaaaauagacauaca

SEQ ID NO: 688134 - RNA, 19 nt, Artificial Sequence
  Description of Artificial Sequence: Synthetic oligonucleotide
cguacaugguaccaggcag

SEQ ID NO: 688135 - RNA, 19 nt, Artificial Sequence
  Description of Artificial Sequence: Synthetic oligonucleotide
agagguaccagugcaccaa

SEQ ID NO: 688136 - RNA, 19 nt, Artificial Sequence
  Description of Artificial Sequence: Synthetic oligonucleotide
gguuugauucauggguucc

SEQ ID NO: 688137 - RNA, 19 nt, Artificial Sequence
  Description of Artificial Sequence: Synthetic oligonucleotide
uaaccgggucuuguacuag

SEQ ID NO: 688138 - RNA, 19 nt, Artificial Sequence
  Description of Artificial Sequence: Synthetic oligonucleotide
aggaccuguagcguacucu

SEQ ID NO: 688139 - RNA, 19 nt, Artificial Sequence
  Description of Artificial Sequence: Synthetic oligonucleotide
gaucguguccugaucucuc

SEQ ID NO: 688140 - RNA, 19 nt, Artificial Sequence
  Description of Artificial Sequence: Synthetic oligonucleotide
ccuuugcuauguaacuccc

SEQ ID NO: 688141 - RNA, 19 nt, Artificial Sequence
  Description of Artificial Sequence: Synthetic oligonucleotide
agcucuugauggcuagaaa

SEQ ID NO: 688142 - RNA, 19 nt, Artificial Sequence
  Description of Artificial Sequence: Synthetic oligonucleotide
uaacugcacucugccagug

SEQ ID NO: 688143 - RNA, 19 nt, Artificial Sequence
  Description of Artificial Sequence: Synthetic oligonucleotide
uauagccuacaaugccaua

SEQ ID NO: 688144 - RNA, 19 nt, Artificial Sequence
  Description of Artificial Sequence: Synthetic oligonucleotide
gaugggguucugaggcuug

SEQ ID NO: 688145 - RNA, 19 nt, Artificial Sequence
  Description of Artificial Sequence: Synthetic oligonucleotide
caccagagguaccagugca

SEQ ID NO: 688146 - RNA, 19 nt, Artificial Sequence
  Description of Artificial Sequence: Synthetic oligonucleotide
cuuggguguccauuccaca

SEQ ID NO: 688147 - RNA, 19 nt, Artificial Sequence
  Description of Artificial Sequence: Synthetic oligonucleotide
caauguuacaggaccugua

SEQ ID NO: 688148 - RNA, 19 nt, Artificial Sequence
  Description of Artificial Sequence: Synthetic oligonucleotide
guacaugguaccaggcaga

SEQ ID NO: 688149 - RNA, 19 nt, Artificial Sequence
  Description of Artificial Sequence: Synthetic oligonucleotide
ccauaaaugcuuacuaucu

SEQ ID NO: 688150 - RNA, 19 nt, Artificial Sequence
  Description of Artificial Sequence: Synthetic oligonucleotide
cacagcucucguuugcuaa

SEQ ID NO: 688151 - RNA, 19 nt, Artificial Sequence
  Description of Artificial Sequence: Synthetic oligonucleotide
gcuauguaacucccacccc

SEQ ID NO: 688152 - RNA, 19 nt, Artificial Sequence
  Description of Artificial Sequence: Synthetic oligonucleotide
gaguaagccaccagaggua

SEQ ID NO: 688153 - RNA, 19 nt, Artificial Sequence
  Description of Artificial Sequence: Synthetic oligonucleotide
uuggcaccggguugucaca

SEQ ID NO: 688154 - RNA, 19 nt, Artificial Sequence
  Description of Artificial Sequence: Synthetic oligonucleotide
aguaacgcucuggggcguc

SEQ ID NO: 688155 - RNA, 19 nt, Artificial Sequence
  Description of Artificial Sequence: Synthetic oligonucleotide
cugucacauggucaugaca

SEQ ID NO: 688156 - RNA, 19 nt, Artificial Sequence
  Description of Artificial Sequence: Synthetic oligonucleotide
cggauucuuuccaacgccg

SEQ ID NO: 688157 - RNA, 19 nt, Artificial Sequence
  Description of Artificial Sequence: Synthetic oligonucleotide
ugcucggggcagugcuugg

SEQ ID NO: 688158 - RNA, 19 nt, Artificial Sequence
  Description of Artificial Sequence: Synthetic oligonucleotide
acauauggaaacagccaua

SEQ ID NO: 688159 - RNA, 19 nt, Artificial Sequence
  Description of Artificial Sequence: Synthetic oligonucleotide
aggaguccacuguaucuua

SEQ ID NO: 688160 - RNA, 19 nt, Artificial Sequence
  Description of Artificial Sequence: Synthetic oligonucleotide
gcaucguacaugguaccag

SEQ ID NO: 688161 - RNA, 19 nt, Artificial Sequence
  Description of Artificial Sequence: Synthetic oligonucleotide
agaugcuaacaguccucau

SEQ ID NO: 688162 - RNA, 19 nt, Artificial Sequence
  Description of Artificial Sequence: Synthetic oligonucleotide
ccaauauuugugucuccuc

SEQ ID NO: 688163 - RNA, 19 nt, Artificial Sequence
  Description of Artificial Sequence: Synthetic oligonucleotide
caguauuugccaaccacau

SEQ ID NO: 688164 - RNA, 19 nt, Artificial Sequence
  Description of Artificial Sequence: Synthetic oligonucleotide
uggcuagaaagcugccauu

SEQ ID NO: 688165 - RNA, 19 nt, Artificial Sequence
  Description of Artificial Sequence: Synthetic oligonucleotide
gugccgucugcccaaggga

SEQ ID NO: 688166 - RNA, 19 nt, Artificial Sequence
  Description of Artificial Sequence: Synthetic oligonucleotide
ugccgcugacacaccauuu

SEQ ID NO: 688167 - RNA, 19 nt, Artificial Sequence
  Description of Artificial Sequence: Synthetic oligonucleotide
ccuguagcguacucuuuug

SEQ ID NO: 688168 - RNA, 19 nt, Artificial Sequence
  Description of Artificial Sequence: Synthetic oligonucleotide
ggaguggaccugcuacccc

SEQ ID NO: 688169 - RNA, 19 nt, Artificial Sequence
  Description of Artificial Sequence: Synthetic oligonucleotide
uggugccgucugcccaagg

SEQ ID NO: 688170 - RNA, 19 nt, Artificial Sequence
  Description of Artificial Sequence: Synthetic oligonucleotide
gcucauucccaaagggagc

SEQ ID NO: 688171 - RNA, 19 nt, Artificial Sequence
  Description of Artificial Sequence: Synthetic oligonucleotide
ucaccaggauacgacuguu

SEQ ID NO: 688172 - RNA, 19 nt, Artificial Sequence
  Description of Artificial Sequence: Synthetic oligonucleotide
cugguuugauucauggguu

SEQ ID NO: 688173 - RNA, 19 nt, Artificial Sequence
  Description of Artificial Sequence: Synthetic oligonucleotide
aacgcucuggggcgucauu

SEQ ID NO: 688174 - RNA, 19 nt, Artificial Sequence
  Description of Artificial Sequence: Synthetic oligonucleotide
ccgcugacacaccauuucc

SEQ ID NO: 688175 - RNA, 19 nt, Artificial Sequence
  Description of Artificial Sequence: Synthetic oligonucleotide
ggucaugacaggaaauaua

SEQ ID NO: 688176 - RNA, 19 nt, Artificial Sequence
  Description of Artificial Sequence: Synthetic oligonucleotide
cauuaacuaccucgucaaa

SEQ ID NO: 688177 - RNA, 19 nt, Artificial Sequence
  Description of Artificial Sequence: Synthetic oligonucleotide
accgggucuuguacuagug

SEQ ID NO: 688178 - RNA, 19 nt, Artificial Sequence
  Description of Artificial Sequence: Synthetic oligonucleotide
gcacuggcgguuggcaucg

SEQ ID NO: 688179 - RNA, 19 nt, Artificial Sequence
  Description of Artificial Sequence: Synthetic oligonucleotide
gccgcugacacaccauuuc

SEQ ID NO: 688180 - RNA, 19 nt, Artificial Sequence
  Description of Artificial Sequence: Synthetic oligonucleotide
cucuguaggugaggucuug

SEQ ID NO: 688181 - RNA, 19 nt, Artificial Sequence
  Description of Artificial Sequence: Synthetic oligonucleotide
agaucagaugggagcuuga

SEQ ID NO: 688182 - RNA, 19 nt, Artificial Sequence
  Description of Artificial Sequence: Synthetic oligonucleotide
uaguaacgcucuggggcgu

SEQ ID NO: 688183 - RNA, 19 nt, Artificial Sequence
  Description of Artificial Sequence: Synthetic oligonucleotide
cuggcaggaucguguccug

SEQ ID NO: 688184 - RNA, 19 nt, Artificial Sequence
  Description of Artificial Sequence: Synthetic oligonucleotide
gcaccggguugucacauuc

SEQ ID NO: 688185 - RNA, 19 nt, Artificial Sequence
  Description of Artificial Sequence: Synthetic oligonucleotide
gggaaguguuucguuuggc

SEQ ID NO: 688186 - RNA, 19 nt, Artificial Sequence
  Description of Artificial Sequence: Synthetic oligonucleotide
guuuauggcuguucucauu

SEQ ID NO: 688187 - RNA, 19 nt, Artificial Sequence
  Description of Artificial Sequence: Synthetic oligonucleotide
gaucagaugggagcuugau

SEQ ID NO: 688188 - RNA, 19 nt, Artificial Sequence
  Description of Artificial Sequence: Synthetic oligonucleotide
uaccccgcagcagcuuaca

SEQ ID NO: 688189 - RNA, 19 nt, Artificial Sequence
  Description of Artificial Sequence: Synthetic oligonucleotide
aggugaggucuugcucuag

SEQ ID NO: 688190 - RNA, 19 nt, Artificial Sequence
  Description of Artificial Sequence: Synthetic oligonucleotide
uugcucuaguguggacaga

SEQ ID NO: 688191 - RNA, 19 nt, Artificial Sequence
  Description of Artificial Sequence: Synthetic oligonucleotide
gggcucauucccaaaggga

SEQ ID NO: 688192 - RNA, 19 nt, Artificial Sequence
  Description of Artificial Sequence: Synthetic oligonucleotide
gcaggaauugugacaaugu

SEQ ID NO: 688193 - RNA, 19 nt, Artificial Sequence
  Description of Artificial Sequence: Synthetic oligonucleotide
cagcauacuugggugucca

SEQ ID NO: 688194 - RNA, 19 nt, Artificial Sequence
  Description of Artificial Sequence: Synthetic oligonucleotide
agacgccagcauacuuggg

SEQ ID NO: 688195 - RNA, 19 nt, Artificial Sequence
  Description of Artificial Sequence: Synthetic oligonucleotide
cgaguaagccaccagaggu

SEQ ID NO: 688196 - RNA, 19 nt, Artificial Sequence
  Description of Artificial Sequence: Synthetic oligonucleotide
cgucauugugcuacauaug

SEQ ID NO: 688197 - RNA, 19 nt, Artificial Sequence
  Description of Artificial Sequence: Synthetic oligonucleotide
ggcaucguacaugguacca

SEQ ID NO: 688198 - RNA, 19 nt, Artificial Sequence
  Description of Artificial Sequence: Synthetic oligonucleotide
acuggcgguuggcaucgua

SEQ ID NO: 688199 - RNA, 19 nt, Artificial Sequence
  Description of Artificial Sequence: Synthetic oligonucleotide
gugacugauccuggauauc

SEQ ID NO: 688200 - RNA, 19 nt, Artificial Sequence
  Description of Artificial Sequence: Synthetic oligonucleotide
uggcaccggguugucacau

SEQ ID NO: 688201 - RNA, 19 nt, Artificial Sequence
  Description of Artificial Sequence: Synthetic oligonucleotide
cguuuggcacacgaguaag

SEQ ID NO: 688202 - RNA, 19 nt, Artificial Sequence
  Description of Artificial Sequence: Synthetic oligonucleotide
cugacucuuuacaguauuu

SEQ ID NO: 688203 - RNA, 19 nt, Artificial Sequence
  Description of Artificial Sequence: Synthetic oligonucleotide
cuccagcacucuugaucuc

SEQ ID NO: 688204 - RNA, 19 nt, Artificial Sequence
  Description of Artificial Sequence: Synthetic oligonucleotide
ggaccuguagcguacucuu

SEQ ID NO: 688205 - RNA, 19 nt, Artificial Sequence
  Description of Artificial Sequence: Synthetic oligonucleotide
cagcucucguuugcuaaca

SEQ ID NO: 688206 - RNA, 19 nt, Artificial Sequence
  Description of Artificial Sequence: Synthetic oligonucleotide
uaacgcucuggggcgucau

SEQ ID NO: 688207 - RNA, 19 nt, Artificial Sequence
  Description of Artificial Sequence: Synthetic oligonucleotide
accccgcagcagcuuacaa

SEQ ID NO: 688208 - RNA, 19 nt, Artificial Sequence
  Description of Artificial Sequence: Synthetic oligonucleotide
guguuucguuuggcacacg

SEQ ID NO: 688209 - RNA, 19 nt, Artificial Sequence
  Description of Artificial Sequence: Synthetic oligonucleotide
gugcuacauauggucucuc

SEQ ID NO: 688210 - RNA, 19 nt, Artificial Sequence
  Description of Artificial Sequence: Synthetic oligonucleotide
guaacgcucuggggcguca

SEQ ID NO: 688211 - RNA, 19 nt, Artificial Sequence
  Description of Artificial Sequence: Synthetic oligonucleotide
guggaccugcuaccccgca

SEQ ID NO: 688212 - RNA, 19 nt, Artificial Sequence
  Description of Artificial Sequence: Synthetic oligonucleotide
gcccucccaugcuaccugc

SEQ ID NO: 688213 - RNA, 19 nt, Artificial Sequence
  Description of Artificial Sequence: Synthetic oligonucleotide
gcgauauaacuuaaagguu

SEQ ID NO: 688214 - RNA, 19 nt, Artificial Sequence
  Description of Artificial Sequence: Synthetic oligonucleotide
acgccgcugaggaguccac

SEQ ID NO: 688215 - RNA, 19 nt, Artificial Sequence
  Description of Artificial Sequence: Synthetic oligonucleotide
gcuggugccgucugcccaa

SEQ ID NO: 688216 - RNA, 19 nt, Artificial Sequence
  Description of Artificial Sequence: Synthetic oligonucleotide
gugagacgccagcauacuu

SEQ ID NO: 688217 - RNA, 19 nt, Artificial Sequence
  Description of Artificial Sequence: Synthetic oligonucleotide
cauucccaaagggagcuuu

SEQ ID NO: 688218 - RNA, 19 nt, Artificial Sequence
  Description of Artificial Sequence: Synthetic oligonucleotide
cauguccgucuuguucaca

SEQ ID NO: 688219 - RNA, 19 nt, Artificial Sequence
  Description of Artificial Sequence: Synthetic oligonucleotide
ggcacacgaguaagccacc

SEQ ID NO: 688220 - RNA, 19 nt, Artificial Sequence
  Description of Artificial Sequence: Synthetic oligonucleotide
cuugccgcugacacaccau

SEQ ID NO: 688221 - RNA, 19 nt, Artificial Sequence
  Description of Artificial Sequence: Synthetic oligonucleotide
ccaacgccgcugaggaguc

SEQ ID NO: 688222 - RNA, 19 nt, Artificial Sequence
  Description of Artificial Sequence: Synthetic oligonucleotide
ggaucguguccugaucucu

SEQ ID NO: 688223 - RNA, 19 nt, Artificial Sequence
  Description of Artificial Sequence: Synthetic oligonucleotide
ggcaggaucguguccugau

SEQ ID NO: 688224 - RNA, 19 nt, Artificial Sequence
  Description of Artificial Sequence: Synthetic oligonucleotide
caccggguugucacauucu

SEQ ID NO: 688225 - RNA, 19 nt, Artificial Sequence
  Description of Artificial Sequence: Synthetic oligonucleotide
gcacacgaguaagccacca

SEQ ID NO: 688226 - RNA, 19 nt, Artificial Sequence
  Description of Artificial Sequence: Synthetic oligonucleotide
caacgccgcugaggagucc

SEQ ID NO: 688227 - RNA, 19 nt, Artificial Sequence
  Description of Artificial Sequence: Synthetic oligonucleotide
cugcccaagggaaguguuu

SEQ ID NO: 688228 - RNA, 19 nt, Artificial Sequence
  Description of Artificial Sequence: Synthetic oligonucleotide
cauaucguuuauggcuguu

SEQ ID NO: 688229 - RNA, 19 nt, Artificial Sequence
  Description of Artificial Sequence: Synthetic oligonucleotide
ggcgguuggcaucguacau

SEQ ID NO: 688230 - RNA, 19 nt, Artificial Sequence
  Description of Artificial Sequence: Synthetic oligonucleotide
gcgaucuccaauagauguu

SEQ ID NO: 688231 - RNA, 19 nt, Artificial Sequence
  Description of Artificial Sequence: Synthetic oligonucleotide
ccacgcuccuuggcaggcc

SEQ ID NO: 688232 - RNA, 19 nt, Artificial Sequence
  Description of Artificial Sequence: Synthetic oligonucleotide
ccccaucaugggacauuga

SEQ ID NO: 688233 - RNA, 19 nt, Artificial Sequence
  Description of Artificial Sequence: Synthetic oligonucleotide
gcuuacuaucugacucuuu

SEQ ID NO: 688234 - RNA, 19 nt, Artificial Sequence
  Description of Artificial Sequence: Synthetic oligonucleotide
ccgcugaggaguccacugu

SEQ ID NO: 688235 - RNA, 19 nt, Artificial Sequence
  Description of Artificial Sequence: Synthetic oligonucleotide
ccgcagcagcuuacaaugu

SEQ ID NO: 688236 - RNA, 19 nt, Artificial Sequence
  Description of Artificial Sequence: Synthetic oligonucleotide
gccucacugguuacugguu

SEQ ID NO: 688237 - RNA, 19 nt, Artificial Sequence
  Description of Artificial Sequence: Synthetic oligonucleotide
ggcaccggguugucacauu

SEQ ID NO: 688238 - RNA, 19 nt, Artificial Sequence
  Description of Artificial Sequence: Synthetic oligonucleotide
gggcgucauugugcuacau

SEQ ID NO: 688239 - RNA, 19 nt, Artificial Sequence
  Description of Artificial Sequence: Synthetic oligonucleotide
cacuggcgguuggcaucgu

SEQ ID NO: 688240 - RNA, 19 nt, Artificial Sequence
  Description of Artificial Sequence: Synthetic oligonucleotide
aaaagagcuccacagaccc

SEQ ID NO: 688241 - RNA, 19 nt, Artificial Sequence
  Description of Artificial Sequence: Synthetic oligonucleotide
uaugcgauggcaaagggag

SEQ ID NO: 688242 - RNA, 19 nt, Artificial Sequence
  Description of Artificial Sequence: Synthetic oligonucleotide
aaauaggcaagguaagagg

SEQ ID NO: 688243 - RNA, 19 nt, Artificial Sequence
  Description of Artificial Sequence: Synthetic oligonucleotide
aauccguggagucuggagc

SEQ ID NO: 688244 - RNA, 19 nt, Artificial Sequence
  Description of Artificial Sequence: Synthetic oligonucleotide
uguagggauaaucaugugg

SEQ ID NO: 688245 - RNA, 19 nt, Artificial Sequence
  Description of Artificial Sequence: Synthetic oligonucleotide
aauaggcaagguaagaggc

SEQ ID NO: 688246 - RNA, 19 nt, Artificial Sequence
  Description of Artificial Sequence: Synthetic oligonucleotide
uauugcugggauaucaugg

SEQ ID NO: 688247 - RNA, 19 nt, Artificial Sequence
  Description of Artificial Sequence: Synthetic oligonucleotide
auaggcaaagucuagaagu

SEQ ID NO: 688248 - RNA, 19 nt, Artificial Sequence
  Description of Artificial Sequence: Synthetic oligonucleotide
aaaauaggcaagguaagag

SEQ ID NO: 688249 - RNA, 19 nt, Artificial Sequence
  Description of Artificial Sequence: Synthetic oligonucleotide
uguggcuuaaguuauuacc

SEQ ID NO: 688250 - RNA, 19 nt, Artificial Sequence
  Description of Artificial Sequence: Synthetic oligonucleotide
uguagaauggccugaauac

SEQ ID NO: 688251 - RNA, 19 nt, Artificial Sequence
  Description of Artificial Sequence: Synthetic oligonucleotide
cuugcaaagacuuccgugc

SEQ ID NO: 688252 - RNA, 19 nt, Artificial Sequence
  Description of Artificial Sequence: Synthetic oligonucleotide
aacaggaguagccgggccc

SEQ ID NO: 688253 - RNA, 19 nt, Artificial Sequence
  Description of Artificial Sequence: Synthetic oligonucleotide
gaucgaagcaaccagccag

SEQ ID NO: 688254 - RNA, 19 nt, Artificial Sequence
  Description of Artificial Sequence: Synthetic oligonucleotide
uuugaaugcugcaagagua

SEQ ID NO: 688255 - RNA, 19 nt, Artificial Sequence
  Description of Artificial Sequence: Synthetic oligonucleotide
guuaggaugcaucaggagc

SEQ ID NO: 688256 - RNA, 19 nt, Artificial Sequence
  Description of Artificial Sequence: Synthetic oligonucleotide
ugcaacaagcccuugcagg

SEQ ID NO: 688257 - RNA, 19 nt, Artificial Sequence
  Description of Artificial Sequence: Synthetic oligonucleotide
gaaaccaguggccaggcag

SEQ ID NO: 688258 - RNA, 19 nt, Artificial Sequence
  Description of Artificial Sequence: Synthetic oligonucleotide
gagguuaggaugcaucagg

SEQ ID NO: 688259 - RNA, 19 nt, Artificial Sequence
  Description of Artificial Sequence: Synthetic oligonucleotide
uauaggcaaagucuagaag

SEQ ID NO: 688260 - RNA, 19 nt, Artificial Sequence
  Description of Artificial Sequence: Synthetic oligonucleotide
aaggaauccuacugcaaag

SEQ ID NO: 688261 - RNA, 19 nt, Artificial Sequence
  Description of Artificial Sequence: Synthetic oligonucleotide
aucacaggugacaacaugc

SEQ ID NO: 688262 - RNA, 19 nt, Artificial Sequence
  Description of Artificial Sequence: Synthetic oligonucleotide
uguaucacagcaagcaggu

SEQ ID NO: 688263 - RNA, 19 nt, Artificial Sequence
  Description of Artificial Sequence: Synthetic oligonucleotide
uuaaugcagucccagguca

SEQ ID NO: 688264 - RNA, 19 nt, Artificial Sequence
  Description of Artificial Sequence: Synthetic oligonucleotide
caagaguagagcuuggcac

SEQ ID NO: 688265 - RNA, 19 nt, Artificial Sequence
  Description of Artificial Sequence: Synthetic oligonucleotide
aaguuauuaccaggaaugg

SEQ ID NO: 688266 - RNA, 19 nt, Artificial Sequence
  Description of Artificial Sequence: Synthetic oligonucleotide
cuguaucacagcaagcagg

SEQ ID NO: 688267 - RNA, 19 nt, Artificial Sequence
  Description of Artificial Sequence: Synthetic oligonucleotide
ugugacguccuguaggcag

SEQ ID NO: 688268 - RNA, 19 nt, Artificial Sequence
  Description of Artificial Sequence: Synthetic oligonucleotide
ugaaugguuucuugcaaag

SEQ ID NO: 688269 - RNA, 19 nt, Artificial Sequence
  Description of Artificial Sequence: Synthetic oligonucleotide
ugggcuguaucacagcaag

SEQ ID NO: 688270 - RNA, 19 nt, Artificial Sequence
  Description of Artificial Sequence: Synthetic oligonucleotide
uaaucauguggauacuggc

SEQ ID NO: 688271 - RNA, 19 nt, Artificial Sequence
  Description of Artificial Sequence: Synthetic oligonucleotide
aacucuugcagcaugguga

SEQ ID NO: 688272 - RNA, 19 nt, Artificial Sequence
  Description of Artificial Sequence: Synthetic oligonucleotide
agccaugugaccgaaaguc

SEQ ID NO: 688273 - RNA, 19 nt, Artificial Sequence
  Description of Artificial Sequence: Synthetic oligonucleotide
ugggauaucauggcgagug

SEQ ID NO: 688274 - RNA, 19 nt, Artificial Sequence
  Description of Artificial Sequence: Synthetic oligonucleotide
aaggcuugcuuguucuggg

SEQ ID NO: 688275 - RNA, 19 nt, Artificial Sequence
  Description of Artificial Sequence: Synthetic oligonucleotide
uuauuaccaggaaugggga

SEQ ID NO: 688276 - RNA, 19 nt, Artificial Sequence
  Description of Artificial Sequence: Synthetic oligonucleotide
caggcuucggaauaggccc

SEQ ID NO: 688277 - RNA, 19 nt, Artificial Sequence
  Description of Artificial Sequence: Synthetic oligonucleotide
agacaaagacuugaugccc

SEQ ID NO: 688278 - RNA, 19 nt, Artificial Sequence
  Description of Artificial Sequence: Synthetic oligonucleotide
cacacugugguagaaaagc

SEQ ID NO: 688279 - RNA, 19 nt, Artificial Sequence
  Description of Artificial Sequence: Synthetic oligonucleotide
agguaacagacauuuccac

SEQ ID NO: 688280 - RNA, 19 nt, Artificial Sequence
  Description of Artificial Sequence: Synthetic oligonucleotide
uguaguugagauagcuggc

SEQ ID NO: 688281 - RNA, 19 nt, Artificial Sequence
  Description of Artificial Sequence: Synthetic oligonucleotide
caagaaagcuacugugacg

SEQ ID NO: 688282 - RNA, 19 nt, Artificial Sequence
  Description of Artificial Sequence: Synthetic oligonucleotide
aacgguggcaucagugugc

SEQ ID NO: 688283 - RNA, 19 nt, Artificial Sequence
  Description of Artificial Sequence: Synthetic oligonucleotide
uguugcaacaagcccuugc

SEQ ID NO: 688284 - RNA, 19 nt, Artificial Sequence
  Description of Artificial Sequence: Synthetic oligonucleotide
cucuggacaggaacgaagg

SEQ ID NO: 688285 - RNA, 19 nt, Artificial Sequence
  Description of Artificial Sequence: Synthetic oligonucleotide
gcaagaaaccagaugaucg

SEQ ID NO: 688286 - RNA, 19 nt, Artificial Sequence
  Description of Artificial Sequence: Synthetic oligonucleotide
gauaaucauguggauacug

SEQ ID NO: 688287 - RNA, 19 nt, Artificial Sequence
  Description of Artificial Sequence: Synthetic oligonucleotide
ugaccgaaagucauggcaa

SEQ ID NO: 688288 - RNA, 19 nt, Artificial Sequence
  Description of Artificial Sequence: Synthetic oligonucleotide
auggcaaagggagacaaag

SEQ ID NO: 688289 - RNA, 19 nt, Artificial Sequence
  Description of Artificial Sequence: Synthetic oligonucleotide
augaucgaagcaaccagcc

SEQ ID NO: 688290 - RNA, 19 nt, Artificial Sequence
  Description of Artificial Sequence: Synthetic oligonucleotide
aguuauuaccaggaauggg

SEQ ID NO: 688291 - RNA, 19 nt, Artificial Sequence
  Description of Artificial Sequence: Synthetic oligonucleotide
uucuuuagaagcuccuggu

SEQ ID NO: 688292 - RNA, 19 nt, Artificial Sequence
  Description of Artificial Sequence: Synthetic oligonucleotide
uggcucacgaggcuguagg

SEQ ID NO: 688293 - RNA, 19 nt, Artificial Sequence
  Description of Artificial Sequence: Synthetic oligonucleotide
ucuugggccugucuuguag

SEQ ID NO: 688294 - RNA, 19 nt, Artificial Sequence
  Description of Artificial Sequence: Synthetic oligonucleotide
guggauucuggcuuggccc

SEQ ID NO: 688295 - RNA, 19 nt, Artificial Sequence
  Description of Artificial Sequence: Synthetic oligonucleotide
agugcugagcccaucauag

SEQ ID NO: 688296 - RNA, 19 nt, Artificial Sequence
  Description of Artificial Sequence: Synthetic oligonucleotide
ugaacagacagugaucgaa

SEQ ID NO: 688297 - RNA, 19 nt, Artificial Sequence
  Description of Artificial Sequence: Synthetic oligonucleotide
gaugaucgaagcaaccagc

SEQ ID NO: 688298 - RNA, 19 nt, Artificial Sequence
  Description of Artificial Sequence: Synthetic oligonucleotide
uggcuuaaguuauuaccag

SEQ ID NO: 688299 - RNA, 19 nt, Artificial Sequence
  Description of Artificial Sequence: Synthetic oligonucleotide
ugucuuguagaauggccug

SEQ ID NO: 688300 - RNA, 19 nt, Artificial Sequence
  Description of Artificial Sequence: Synthetic oligonucleotide
aaccagaugaucgaagcaa

SEQ ID NO: 688301 - RNA, 19 nt, Artificial Sequence
  Description of Artificial Sequence: Synthetic oligonucleotide
aguugagauagcuggccag

SEQ ID NO: 688302 - RNA, 19 nt, Artificial Sequence
  Description of Artificial Sequence: Synthetic oligonucleotide
guagggauaaucaugugga

SEQ ID NO: 688303 - RNA, 19 nt, Artificial Sequence
  Description of Artificial Sequence: Synthetic oligonucleotide
gauaucauggcgagugccc

SEQ ID NO: 688304 - RNA, 19 nt, Artificial Sequence
  Description of Artificial Sequence: Synthetic oligonucleotide
auauaggcaaagucuagaa

SEQ ID NO: 688305 - RNA, 19 nt, Artificial Sequence
  Description of Artificial Sequence: Synthetic oligonucleotide
ugggaauccgcucccagga

SEQ ID NO: 688306 - RNA, 19 nt, Artificial Sequence
  Description of Artificial Sequence: Synthetic oligonucleotide
ugcugggauaucauggcga

SEQ ID NO: 688307 - RNA, 19 nt, Artificial Sequence
  Description of Artificial Sequence: Synthetic oligonucleotide
cugaauacagaugcgguac

SEQ ID NO: 688308 - RNA, 19 nt, Artificial Sequence
  Description of Artificial Sequence: Synthetic oligonucleotide
aguccaagaaagcuacugu

SEQ ID NO: 688309 - RNA, 19 nt, Artificial Sequence
  Description of Artificial Sequence: Synthetic oligonucleotide
acagaugcgguacccaugu

SEQ ID NO: 688310 - RNA, 19 nt, Artificial Sequence
  Description of Artificial Sequence: Synthetic oligonucleotide
ugucaccaaaauaggcaag

SEQ ID NO: 688311 - RNA, 19 nt, Artificial Sequence
  Description of Artificial Sequence: Synthetic oligonucleotide
uggagcuuguaguugagau

SEQ ID NO: 688312 - RNA, 19 nt, Artificial Sequence
  Description of Artificial Sequence: Synthetic oligonucleotide
ugucuaccuucuuugguug

SEQ ID NO: 688313 - RNA, 19 nt, Artificial Sequence
  Description of Artificial Sequence: Synthetic oligonucleotide
aguaacaggaguagccggg

SEQ ID NO: 688314 - RNA, 19 nt, Artificial Sequence
  Description of Artificial Sequence: Synthetic oligonucleotide
acaggugacaacaugcuca

SEQ ID NO: 688315 - RNA, 19 nt, Artificial Sequence
  Description of Artificial Sequence: Synthetic oligonucleotide
augugaccgaaagucaugg

SEQ ID NO: 688316 - RNA, 19 nt, Artificial Sequence
  Description of Artificial Sequence: Synthetic oligonucleotide
gaucccacgcagcucuugg

SEQ ID NO: 688317 - RNA, 19 nt, Artificial Sequence
  Description of Artificial Sequence: Synthetic oligonucleotide
aauacagaugcgguaccca

SEQ ID NO: 688318 - RNA, 19 nt, Artificial Sequence
  Description of Artificial Sequence: Synthetic oligonucleotide
gaagcuaacgguggcauca

SEQ ID NO: 688319 - RNA, 19 nt, Artificial Sequence
  Description of Artificial Sequence: Synthetic oligonucleotide
ggucaggcugccuagaagc

SEQ ID NO: 688320 - RNA, 19 nt, Artificial Sequence
  Description of Artificial Sequence: Synthetic oligonucleotide
uucccagugaacacacucu

SEQ ID NO: 688321 - RNA, 19 nt, Artificial Sequence
  Description of Artificial Sequence: Synthetic oligonucleotide
aaguaggugugcagggugg

SEQ ID NO: 688322 - RNA, 19 nt, Artificial Sequence
  Description of Artificial Sequence: Synthetic oligonucleotide
aaacugugucuuaaugcag

SEQ ID NO: 688323 - RNA, 19 nt, Artificial Sequence
  Description of Artificial Sequence: Synthetic oligonucleotide
ugccuguugcaacaagccc

SEQ ID NO: 688324 - RNA, 19 nt, Artificial Sequence
  Description of Artificial Sequence: Synthetic oligonucleotide
uuaccaggaauggggaaag

SEQ ID NO: 688325 - RNA, 19 nt, Artificial Sequence
  Description of Artificial Sequence: Synthetic oligonucleotide
aaagcuacugugacguccu

SEQ ID NO: 688326 - RNA, 19 nt, Artificial Sequence
  Description of Artificial Sequence: Synthetic oligonucleotide
guugagauagcuggccagg

SEQ ID NO: 688327 - RNA, 19 nt, Artificial Sequence
  Description of Artificial Sequence: Synthetic oligonucleotide
gugacaacaugcucauugc

SEQ ID NO: 688328 - RNA, 19 nt, Artificial Sequence
  Description of Artificial Sequence: Synthetic oligonucleotide
gugaccgaaagucauggca

SEQ ID NO: 688329 - RNA, 19 nt, Artificial Sequence
  Description of Artificial Sequence: Synthetic oligonucleotide
guugcaacaagcccuugca

SEQ ID NO: 688330 - RNA, 19 nt, Artificial Sequence
  Description of Artificial Sequence: Synthetic oligonucleotide
ugaucgaagcaaccagcca

SEQ ID NO: 688331 - RNA, 19 nt, Artificial Sequence
  Description of Artificial Sequence: Synthetic oligonucleotide
uugaggugacaaucuuggg

SEQ ID NO: 688332 - RNA, 19 nt, Artificial Sequence
  Description of Artificial Sequence: Synthetic oligonucleotide
gaggcuguagggauaauca

SEQ ID NO: 688333 - RNA, 19 nt, Artificial Sequence
  Description of Artificial Sequence: Synthetic oligonucleotide
ugcucauugccaccacugc

SEQ ID NO: 688334 - RNA, 19 nt, Artificial Sequence
  Description of Artificial Sequence: Synthetic oligonucleotide
ucauguggauacuggcuca

SEQ ID NO: 688335 - RNA, 19 nt, Artificial Sequence
  Description of Artificial Sequence: Synthetic oligonucleotide
uacagaugcgguacccaug

SEQ ID NO: 688336 - RNA, 19 nt, Artificial Sequence
  Description of Artificial Sequence: Synthetic oligonucleotide
agguaugcgauggcaaagg

SEQ ID NO: 688337 - RNA, 19 nt, Artificial Sequence
  Description of Artificial Sequence: Synthetic oligonucleotide
ggggcuuaagugcugagcc

SEQ ID NO: 688338 - RNA, 19 nt, Artificial Sequence
  Description of Artificial Sequence: Synthetic oligonucleotide
guaagaggcacagugggca

SEQ ID NO: 688339 - RNA, 19 nt, Artificial Sequence
  Description of Artificial Sequence: Synthetic oligonucleotide
ggcaaagucuagaaguggg

SEQ ID NO: 688340 - RNA, 19 nt, Artificial Sequence
  Description of Artificial Sequence: Synthetic oligonucleotide
gaauacagaugcgguaccc

SEQ ID NO: 688341 - RNA, 19 nt, Artificial Sequence
  Description of Artificial Sequence: Synthetic oligonucleotide
guaguugagauagcuggcc

SEQ ID NO: 688342 - RNA, 19 nt, Artificial Sequence
  Description of Artificial Sequence: Synthetic oligonucleotide
aggcaggaucuauugcugg

SEQ ID NO: 688343 - RNA, 19 nt, Artificial Sequence
  Description of Artificial Sequence: Synthetic oligonucleotide
aggaccccgugccuguugc

SEQ ID NO: 688344 - RNA, 19 nt, Artificial Sequence
  Description of Artificial Sequence: Synthetic oligonucleotide
caagaaaccagaugaucga

SEQ ID NO: 688345 - RNA, 19 nt, Artificial Sequence
  Description of Artificial Sequence: Synthetic oligonucleotide
cauaggcuggcaaugucuc

SEQ ID NO: 688346 - RNA, 19 nt, Artificial Sequence
  Description of Artificial Sequence: Synthetic oligonucleotide
aguagccgggcccagggug

SEQ ID NO: 688347 - RNA, 19 nt, Artificial Sequence
  Description of Artificial Sequence: Synthetic oligonucleotide
aggggcuuaagugcugagc

SEQ ID NO: 688348 - RNA, 19 nt, Artificial Sequence
  Description of Artificial Sequence: Synthetic oligonucleotide
agcugucuaccuucuuugg

SEQ ID NO: 688349 - RNA, 19 nt, Artificial Sequence
  Description of Artificial Sequence: Synthetic oligonucleotide
accagaugaucgaagcaac

SEQ ID NO: 688350 - RNA, 19 nt, Artificial Sequence
  Description of Artificial Sequence: Synthetic oligonucleotide
ugagguuaggaugcaucag

SEQ ID NO: 688351 - RNA, 19 nt, Artificial Sequence
  Description of Artificial Sequence: Synthetic oligonucleotide
aucaugccaaagccuuugg

SEQ ID NO: 688352 - RNA, 19 nt, Artificial Sequence
  Description of Artificial Sequence: Synthetic oligonucleotide
aagccuuuggugagguuag

SEQ ID NO: 688353 - RNA, 19 nt, Artificial Sequence
  Description of Artificial Sequence: Synthetic oligonucleotide
auuaccaggaauggggaaa

SEQ ID NO: 688354 - RNA, 19 nt, Artificial Sequence
  Description of Artificial Sequence: Synthetic oligonucleotide
agcaaccagccagugaggg

SEQ ID NO: 688355 - RNA, 19 nt, Artificial Sequence
  Description of Artificial Sequence: Synthetic oligonucleotide
agaaaccagaugaucgaag

SEQ ID NO: 688356 - RNA, 19 nt, Artificial Sequence
  Description of Artificial Sequence: Synthetic oligonucleotide
ccugcauguccacugaugg

SEQ ID NO: 688357 - RNA, 19 nt, Artificial Sequence
  Description of Artificial Sequence: Synthetic oligonucleotide
gugagguuaggaugcauca

SEQ ID NO: 688358 - RNA, 19 nt, Artificial Sequence
  Description of Artificial Sequence: Synthetic oligonucleotide
aagaaaccagaugaucgaa

SEQ ID NO: 688359 - RNA, 19 nt, Artificial Sequence
  Description of Artificial Sequence: Synthetic oligonucleotide
caugugaccgaaagucaug

SEQ ID NO: 688360 - RNA, 19 nt, Artificial Sequence
  Description of Artificial Sequence: Synthetic oligonucleotide
uaacaggaguagccgggcc

SEQ ID NO: 688361 - RNA, 19 nt, Artificial Sequence
  Description of Artificial Sequence: Synthetic oligonucleotide
ugcgguacccauguaguga

SEQ ID NO: 688362 - RNA, 19 nt, Artificial Sequence
  Description of Artificial Sequence: Synthetic oligonucleotide
uauuaccaggaauggggaa

SEQ ID NO: 688363 - RNA, 19 nt, Artificial Sequence
  Description of Artificial Sequence: Synthetic oligonucleotide
ugcaucaggagcagccggu

SEQ ID NO: 688364 - RNA, 19 nt, Artificial Sequence
  Description of Artificial Sequence: Synthetic oligonucleotide
ggcagaaaggaagcuaacg

SEQ ID NO: 688365 - RNA, 19 nt, Artificial Sequence
  Description of Artificial Sequence: Synthetic oligonucleotide
cuguagcuuugaaugcugc

SEQ ID NO: 688366 - RNA, 19 nt, Artificial Sequence
  Description of Artificial Sequence: Synthetic oligonucleotide
gcaacaagcccuugcaggc

SEQ ID NO: 688367 - RNA, 19 nt, Artificial Sequence
  Description of Artificial Sequence: Synthetic oligonucleotide
auacagaugcgguacccau

SEQ ID NO: 688368 - RNA, 19 nt, Artificial Sequence
  Description of Artificial Sequence: Synthetic oligonucleotide
ccaaaauaggcaagguaag

SEQ ID NO: 688369 - RNA, 19 nt, Artificial Sequence
  Description of Artificial Sequence: Synthetic oligonucleotide
aggcaaagucuagaagugg

SEQ ID NO: 688370 - RNA, 19 nt, Artificial Sequence
  Description of Artificial Sequence: Synthetic oligonucleotide
uacccauguagugacuccc

SEQ ID NO: 688371 - RNA, 19 nt, Artificial Sequence
  Description of Artificial Sequence: Synthetic oligonucleotide
uggugaacagacagugauc

SEQ ID NO: 688372 - RNA, 19 nt, Artificial Sequence
  Description of Artificial Sequence: Synthetic oligonucleotide
uucggaauaggcccugcuu

SEQ ID NO: 688373 - RNA, 19 nt, Artificial Sequence
  Description of Artificial Sequence: Synthetic oligonucleotide
agugggcucaauccgugga

SEQ ID NO: 688374 - RNA, 19 nt, Artificial Sequence
  Description of Artificial Sequence: Synthetic oligonucleotide
gacaaagacuugaugccca

SEQ ID NO: 688375 - RNA, 19 nt, Artificial Sequence
  Description of Artificial Sequence: Synthetic oligonucleotide
gguaugcgauggcaaaggg

SEQ ID NO: 688376 - RNA, 19 nt, Artificial Sequence
  Description of Artificial Sequence: Synthetic oligonucleotide
cugucaccaaaauaggcaa

SEQ ID NO: 688377 - RNA, 19 nt, Artificial Sequence
  Description of Artificial Sequence: Synthetic oligonucleotide
ucgggcuagggcugcaagc

SEQ ID NO: 688378 - RNA, 19 nt, Artificial Sequence
  Description of Artificial Sequence: Synthetic oligonucleotide
uccuguaggcagagccagg

SEQ ID NO: 688379 - RNA, 19 nt, Artificial Sequence
  Description of Artificial Sequence: Synthetic oligonucleotide
ggcaggaucuauugcuggg

SEQ ID NO: 688380 - RNA, 19 nt, Artificial Sequence
  Description of Artificial Sequence: Synthetic oligonucleotide
guacccauguagugacucc

SEQ ID NO: 688381 - RNA, 19 nt, Artificial Sequence
  Description of Artificial Sequence: Synthetic oligonucleotide
uucagucccucggugaggu

SEQ ID NO: 688382 - RNA, 19 nt, Artificial Sequence
  Description of Artificial Sequence: Synthetic oligonucleotide
uguugggcauauaggcaaa

SEQ ID NO: 688383 - RNA, 19 nt, Artificial Sequence
  Description of Artificial Sequence: Synthetic oligonucleotide
gcugcaagaguagagcuug

SEQ ID NO: 688384 - RNA, 19 nt, Artificial Sequence
  Description of Artificial Sequence: Synthetic oligonucleotide
gguuaggaugcaucaggag

SEQ ID NO: 688385 - RNA, 19 nt, Artificial Sequence
  Description of Artificial Sequence: Synthetic oligonucleotide
gacuugagcaaguguucca

SEQ ID NO: 688386 - RNA, 19 nt, Artificial Sequence
  Description of Artificial Sequence: Synthetic oligonucleotide
gcuuaaguuauuaccagga

SEQ ID NO: 688387 - RNA, 19 nt, Artificial Sequence
  Description of Artificial Sequence: Synthetic oligonucleotide
uaagugcugagcccaucau

SEQ ID NO: 688388 - RNA, 19 nt, Artificial Sequence
  Description of Artificial Sequence: Synthetic oligonucleotide
cuguggcuuaaguuauuac

SEQ ID NO: 688389 - RNA, 19 nt, Artificial Sequence
  Description of Artificial Sequence: Synthetic oligonucleotide
aggaauccuacugcaaaga

SEQ ID NO: 688390 - RNA, 19 nt, Artificial Sequence
  Description of Artificial Sequence: Synthetic oligonucleotide
guagaauggccugaauaca

SEQ ID NO: 688391 - RNA, 19 nt, Artificial Sequence
  Description of Artificial Sequence: Synthetic oligonucleotide
cugcauguccacugauggc

SEQ ID NO: 688392 - RNA, 19 nt, Artificial Sequence
  Description of Artificial Sequence: Synthetic oligonucleotide
agccauacagaggguuccc

SEQ ID NO: 688393 - RNA, 19 nt, Artificial Sequence
  Description of Artificial Sequence: Synthetic oligonucleotide
cugugucuuaaugcagucc

SEQ ID NO: 688394 - RNA, 19 nt, Artificial Sequence
  Description of Artificial Sequence: Synthetic oligonucleotide
uccaucgggcagcuucacc

SEQ ID NO: 688395 - RNA, 19 nt, Artificial Sequence
  Description of Artificial Sequence: Synthetic oligonucleotide
auaucauggcgagugccca

SEQ ID NO: 688396 - RNA, 19 nt, Artificial Sequence
  Description of Artificial Sequence: Synthetic oligonucleotide
gugccuguugcaacaagcc

SEQ ID NO: 688397 - RNA, 19 nt, Artificial Sequence
  Description of Artificial Sequence: Synthetic oligonucleotide
ggucacuucuccucugcag

SEQ ID NO: 688398 - RNA, 19 nt, Artificial Sequence
  Description of Artificial Sequence: Synthetic oligonucleotide
gcaaagaccagaaguaaca

SEQ ID NO: 688399 - RNA, 19 nt, Artificial Sequence
  Description of Artificial Sequence: Synthetic oligonucleotide
gcugggauaucauggcgag

SEQ ID NO: 688400 - RNA, 19 nt, Artificial Sequence
  Description of Artificial Sequence: Synthetic oligonucleotide
aagcuaacgguggcaucag

SEQ ID NO: 688401 - RNA, 19 nt, Artificial Sequence
  Description of Artificial Sequence: Synthetic oligonucleotide
uggcuagugacagcugucu

SEQ ID NO: 688402 - RNA, 19 nt, Artificial Sequence
  Description of Artificial Sequence: Synthetic oligonucleotide
ugacagcugucuaccuucu

SEQ ID NO: 688403 - RNA, 19 nt, Artificial Sequence
  Description of Artificial Sequence: Synthetic oligonucleotide
uccgcucccaggacuugag

SEQ ID NO: 688404 - RNA, 19 nt, Artificial Sequence
  Description of Artificial Sequence: Synthetic oligonucleotide
aagcaaccagccagugagg

SEQ ID NO: 688405 - RNA, 19 nt, Artificial Sequence
  Description of Artificial Sequence: Synthetic oligonucleotide
augcucauugccaccacug

SEQ ID NO: 688406 - RNA, 19 nt, Artificial Sequence
  Description of Artificial Sequence: Synthetic oligonucleotide
acccauguagugacucccc

SEQ ID NO: 688407 - RNA, 19 nt, Artificial Sequence
  Description of Artificial Sequence: Synthetic oligonucleotide
aaacgccagcaccuucagu

SEQ ID NO: 688408 - RNA, 19 nt, Artificial Sequence
  Description of Artificial Sequence: Synthetic oligonucleotide
uagggauaaucauguggau

SEQ ID NO: 688409 - RNA, 19 nt, Artificial Sequence
  Description of Artificial Sequence: Synthetic oligonucleotide
accccgugccuguugcaac

SEQ ID NO: 688410 - RNA, 19 nt, Artificial Sequence
  Description of Artificial Sequence: Synthetic oligonucleotide
guaacaggaguagccgggc

SEQ ID NO: 688411 - RNA, 19 nt, Artificial Sequence
  Description of Artificial Sequence: Synthetic oligonucleotide
caauggcaguagcacacug

SEQ ID NO: 688412 - RNA, 19 nt, Artificial Sequence
  Description of Artificial Sequence: Synthetic oligonucleotide
augcgguacccauguagug

SEQ ID NO: 688413 - RNA, 19 nt, Artificial Sequence
  Description of Artificial Sequence: Synthetic oligonucleotide
agggauaaucauguggaua

SEQ ID NO: 688414 - RNA, 19 nt, Artificial Sequence
  Description of Artificial Sequence: Synthetic oligonucleotide
acgguggcaucagugugcg

SEQ ID NO: 688415 - RNA, 19 nt, Artificial Sequence
  Description of Artificial Sequence: Synthetic oligonucleotide
cccaguccaagaaagcuac

SEQ ID NO: 688416 - RNA, 19 nt, Artificial Sequence
  Description of Artificial Sequence: Synthetic oligonucleotide
cugcaaacugggcuguauc

SEQ ID NO: 688417 - RNA, 19 nt, Artificial Sequence
  Description of Artificial Sequence: Synthetic oligonucleotide
accgaaagucauggcaaag

SEQ ID NO: 688418 - RNA, 19 nt, Artificial Sequence
  Description of Artificial Sequence: Synthetic oligonucleotide
cauggcgagugcccagucc

SEQ ID NO: 688419 - RNA, 19 nt, Artificial Sequence
  Description of Artificial Sequence: Synthetic oligonucleotide
ggcuguagggauaaucaug

SEQ ID NO: 688420 - RNA, 19 nt, Artificial Sequence
  Description of Artificial Sequence: Synthetic oligonucleotide
cagguaugcgauggcaaag

SEQ ID NO: 688421 - RNA, 19 nt, Artificial Sequence
  Description of Artificial Sequence: Synthetic oligonucleotide
cacaggugacaacaugcuc

SEQ ID NO: 688422 - RNA, 19 nt, Artificial Sequence
  Description of Artificial Sequence: Synthetic oligonucleotide
cucaauccguggagucugg

SEQ ID NO: 688423 - RNA, 19 nt, Artificial Sequence
  Description of Artificial Sequence: Synthetic oligonucleotide
aggagugcaagagcuggug

SEQ ID NO: 688424 - RNA, 19 nt, Artificial Sequence
  Description of Artificial Sequence: Synthetic oligonucleotide
aaggacugaaugguuucuu

SEQ ID NO: 688425 - RNA, 19 nt, Artificial Sequence
  Description of Artificial Sequence: Synthetic oligonucleotide
ggauaucauggcgagugcc

SEQ ID NO: 688426 - RNA, 19 nt, Artificial Sequence
  Description of Artificial Sequence: Synthetic oligonucleotide
aggcuguagggauaaucau

SEQ ID NO: 688427 - RNA, 19 nt, Artificial Sequence
  Description of Artificial Sequence: Synthetic oligonucleotide
ccgaaagucauggcaaagg

SEQ ID NO: 688428 - RNA, 19 nt, Artificial Sequence
  Description of Artificial Sequence: Synthetic oligonucleotide
gaugcgguacccauguagu

SEQ ID NO: 688429 - RNA, 19 nt, Artificial Sequence
  Description of Artificial Sequence: Synthetic oligonucleotide
gauggucaggcacuuugcu

SEQ ID NO: 688430 - RNA, 19 nt, Artificial Sequence
  Description of Artificial Sequence: Synthetic oligonucleotide
agaauggccugaauacaga

SEQ ID NO: 688431 - RNA, 19 nt, Artificial Sequence
  Description of Artificial Sequence: Synthetic oligonucleotide
agguuaggaugcaucagga

SEQ ID NO: 688432 - RNA, 19 nt, Artificial Sequence
  Description of Artificial Sequence: Synthetic oligonucleotide
cuaacgguggcaucagugu

SEQ ID NO: 688433 - RNA, 19 nt, Artificial Sequence
  Description of Artificial Sequence: Synthetic oligonucleotide
cugcaagaguagagcuugg

SEQ ID NO: 688434 - RNA, 19 nt, Artificial Sequence
  Description of Artificial Sequence: Synthetic oligonucleotide
gcuaacgguggcaucagug

SEQ ID NO: 688435 - RNA, 19 nt, Artificial Sequence
  Description of Artificial Sequence: Synthetic oligonucleotide
guaugcgauggcaaaggga

SEQ ID NO: 688436 - RNA, 19 nt, Artificial Sequence
  Description of Artificial Sequence: Synthetic oligonucleotide
aggguucccagugaacaca

SEQ ID NO: 688437 - RNA, 19 nt, Artificial Sequence
  Description of Artificial Sequence: Synthetic oligonucleotide
uugggccugucuuguagaa

SEQ ID NO: 688438 - RNA, 19 nt, Artificial Sequence
  Description of Artificial Sequence: Synthetic oligonucleotide
acgaagggaaguaggugug

SEQ ID NO: 688439 - RNA, 19 nt, Artificial Sequence
  Description of Artificial Sequence: Synthetic oligonucleotide
cagucccucggugagguug

SEQ ID NO: 688440 - RNA, 19 nt, Artificial Sequence
  Description of Artificial Sequence: Synthetic oligonucleotide
guagccgggcccagggugg

SEQ ID NO: 688441 - RNA, 19 nt, Artificial Sequence
  Description of Artificial Sequence: Synthetic oligonucleotide
agucccucggugagguugg

SEQ ID NO: 688442 - RNA, 19 nt, Artificial Sequence
  Description of Artificial Sequence: Synthetic oligonucleotide
ccagaugaucgaagcaacc

SEQ ID NO: 688443 - RNA, 19 nt, Artificial Sequence
  Description of Artificial Sequence: Synthetic oligonucleotide
aggaagcuaacgguggcau

SEQ ID NO: 688444 - RNA, 19 nt, Artificial Sequence
  Description of Artificial Sequence: Synthetic oligonucleotide
aucgaagcaaccagccagu

SEQ ID NO: 688445 - RNA, 19 nt, Artificial Sequence
  Description of Artificial Sequence: Synthetic oligonucleotide
gaccgaaagucauggcaaa

SEQ ID NO: 688446 - RNA, 19 nt, Artificial Sequence
  Description of Artificial Sequence: Synthetic oligonucleotide
gcccacaugauggucaggc

SEQ ID NO: 688447 - RNA, 19 nt, Artificial Sequence
  Description of Artificial Sequence: Synthetic oligonucleotide
cuugggccugucuuguaga

SEQ ID NO: 688448 - RNA, 19 nt, Artificial Sequence
  Description of Artificial Sequence: Synthetic oligonucleotide
gugcuugggguauagcugu

SEQ ID NO: 688449 - RNA, 19 nt, Artificial Sequence
  Description of Artificial Sequence: Synthetic oligonucleotide
aggaucuauugcugggaua

SEQ ID NO: 688450 - RNA, 19 nt, Artificial Sequence
  Description of Artificial Sequence: Synthetic oligonucleotide
ggcauauaggcaaagucua

SEQ ID NO: 688451 - RNA, 19 nt, Artificial Sequence
  Description of Artificial Sequence: Synthetic oligonucleotide
uuggcucacgaggcuguag

SEQ ID NO: 688452 - RNA, 19 nt, Artificial Sequence
  Description of Artificial Sequence: Synthetic oligonucleotide
ggcaagaaaccagaugauc

SEQ ID NO: 688453 - RNA, 19 nt, Artificial Sequence
  Description of Artificial Sequence: Synthetic oligonucleotide
ucgaagcaaccagccagug

SEQ ID NO: 688454 - RNA, 19 nt, Artificial Sequence
  Description of Artificial Sequence: Synthetic oligonucleotide
ggccccaaacgccagcacc

SEQ ID NO: 688455 - RNA, 19 nt, Artificial Sequence
  Description of Artificial Sequence: Synthetic oligonucleotide
uggcucuggacaggaacga

SEQ ID NO: 688456 - RNA, 19 nt, Artificial Sequence
  Description of Artificial Sequence: Synthetic oligonucleotide
agagugggcucaauccgug

SEQ ID NO: 688457 - RNA, 19 nt, Artificial Sequence
  Description of Artificial Sequence: Synthetic oligonucleotide
ccuagaagcucucucuuca

SEQ ID NO: 688458 - RNA, 19 nt, Artificial Sequence
  Description of Artificial Sequence: Synthetic oligonucleotide
ucacgaggcuguagggaua

SEQ ID NO: 688459 - RNA, 19 nt, Artificial Sequence
  Description of Artificial Sequence: Synthetic oligonucleotide
ccuacugcaaagaccagaa

SEQ ID NO: 688460 - RNA, 19 nt, Artificial Sequence
  Description of Artificial Sequence: Synthetic oligonucleotide
gcucuggacaggaacgaag

SEQ ID NO: 688461 - RNA, 19 nt, Artificial Sequence
  Description of Artificial Sequence: Synthetic oligonucleotide
agaaaccaguggccaggca

SEQ ID NO: 688462 - RNA, 19 nt, Artificial Sequence
  Description of Artificial Sequence: Synthetic oligonucleotide
ggaucuauugcugggauau

SEQ ID NO: 688463 - RNA, 19 nt, Artificial Sequence
  Description of Artificial Sequence: Synthetic oligonucleotide
ggcucacgaggcuguaggg

SEQ ID NO: 688464 - RNA, 19 nt, Artificial Sequence
  Description of Artificial Sequence: Synthetic oligonucleotide
gugccuucuugggaauccg

SEQ ID NO: 688465 - RNA, 19 nt, Artificial Sequence
  Description of Artificial Sequence: Synthetic oligonucleotide
cucgggcuagggcugcaag

SEQ ID NO: 688466 - RNA, 19 nt, Artificial Sequence
  Description of Artificial Sequence: Synthetic oligonucleotide
aucauggcgagugcccagu

SEQ ID NO: 688467 - RNA, 19 nt, Artificial Sequence
  Description of Artificial Sequence: Synthetic oligonucleotide
ggugagguuggcaaaaccu

SEQ ID NO: 688468 - RNA, 19 nt, Artificial Sequence
  Description of Artificial Sequence: Synthetic oligonucleotide
ggcuuaagugcugagccca

SEQ ID NO: 688469 - RNA, 19 nt, Artificial Sequence
  Description of Artificial Sequence: Synthetic oligonucleotide
gggcauauaggcaaagucu

SEQ ID NO: 688470 - RNA, 19 nt, Artificial Sequence
  Description of Artificial Sequence: Synthetic oligonucleotide
gggaccaaucaugccaaag

SEQ ID NO: 688471 - RNA, 19 nt, Artificial Sequence
  Description of Artificial Sequence: Synthetic oligonucleotide
gcgguacccauguagugac

SEQ ID NO: 688472 - RNA, 19 nt, Artificial Sequence
  Description of Artificial Sequence: Synthetic oligonucleotide
agcuacugugacguccugu

SEQ ID NO: 688473 - RNA, 19 nt, Artificial Sequence
  Description of Artificial Sequence: Synthetic oligonucleotide
guggcagugcuccugggcu

SEQ ID NO: 688474 - RNA, 19 nt, Artificial Sequence
  Description of Artificial Sequence: Synthetic oligonucleotide
ggcaggcaggaucuauugc

SEQ ID NO: 688475 - RNA, 19 nt, Artificial Sequence
  Description of Artificial Sequence: Synthetic oligonucleotide
cuucugguuuggcuaguga

SEQ ID NO: 688476 - RNA, 19 nt, Artificial Sequence
  Description of Artificial Sequence: Synthetic oligonucleotide
gguacccauguagugacuc

SEQ ID NO: 688477 - RNA, 19 nt, Artificial Sequence
  Description of Artificial Sequence: Synthetic oligonucleotide
gcucaauccguggagucug

SEQ ID NO: 688478 - RNA, 19 nt, Artificial Sequence
  Description of Artificial Sequence: Synthetic oligonucleotide
agcaaggcugucaccaaaa

SEQ ID NO: 688479 - RNA, 19 nt, Artificial Sequence
  Description of Artificial Sequence: Synthetic oligonucleotide
gcuacugugacguccugua

SEQ ID NO: 688480 - RNA, 19 nt, Artificial Sequence
  Description of Artificial Sequence: Synthetic oligonucleotide
aauccgcucccaggacuug

SEQ ID NO: 688481 - RNA, 19 nt, Artificial Sequence
  Description of Artificial Sequence: Synthetic oligonucleotide
gggcuuaagugcugagccc

SEQ ID NO: 688482 - RNA, 19 nt, Artificial Sequence
  Description of Artificial Sequence: Synthetic oligonucleotide
uaccuucuuugguugucuu

SEQ ID NO: 688483 - RNA, 19 nt, Artificial Sequence
  Description of Artificial Sequence: Synthetic oligonucleotide
ugcuggccaacaggcaaga

SEQ ID NO: 688484 - RNA, 19 nt, Artificial Sequence
  Description of Artificial Sequence: Synthetic oligonucleotide
cugucuaccuucuuugguu

SEQ ID NO: 688485 - RNA, 19 nt, Artificial Sequence
  Description of Artificial Sequence: Synthetic oligonucleotide
cagcacaggcagcaugauc

SEQ ID NO: 688486 - RNA, 19 nt, Artificial Sequence
  Description of Artificial Sequence: Synthetic oligonucleotide
uuggugagguuaggaugca

SEQ ID NO: 688487 - RNA, 19 nt, Artificial Sequence
  Description of Artificial Sequence: Synthetic oligonucleotide
gaaggacugaaugguuucu

SEQ ID NO: 688488 - RNA, 19 nt, Artificial Sequence
  Description of Artificial Sequence: Synthetic oligonucleotide
ucggugagguuggcaaaac

SEQ ID NO: 688489 - RNA, 19 nt, Artificial Sequence
  Description of Artificial Sequence: Synthetic oligonucleotide
agcuaacgguggcaucagu

SEQ ID NO: 688490 - RNA, 19 nt, Artificial Sequence
  Description of Artificial Sequence: Synthetic oligonucleotide
gaucuauugcugggauauc

SEQ ID NO: 688491 - RNA, 19 nt, Artificial Sequence
  Description of Artificial Sequence: Synthetic oligonucleotide
cugccuagaagcucucucu

SEQ ID NO: 688492 - RNA, 19 nt, Artificial Sequence
  Description of Artificial Sequence: Synthetic oligonucleotide
cucacgaggcuguagggau

SEQ ID NO: 688493 - RNA, 19 nt, Artificial Sequence
  Description of Artificial Sequence: Synthetic oligonucleotide
gcaagcuugaaggacugaa

SEQ ID NO: 688494 - RNA, 19 nt, Artificial Sequence
  Description of Artificial Sequence: Synthetic oligonucleotide
cacauccagagcuuucagu

SEQ ID NO: 688495 - RNA, 19 nt, Artificial Sequence
  Description of Artificial Sequence: Synthetic oligonucleotide
agggaguuguugggcauau

SEQ ID NO: 688496 - RNA, 19 nt, Artificial Sequence
  Description of Artificial Sequence: Synthetic oligonucleotide
ggaacgaagggaaguaggu

SEQ ID NO: 688497 - RNA, 19 nt, Artificial Sequence
  Description of Artificial Sequence: Synthetic oligonucleotide
cagccgguccagguaugcg

SEQ ID NO: 688498 - RNA, 19 nt, Artificial Sequence
  Description of Artificial Sequence: Synthetic oligonucleotide
ggaagcuaacgguggcauc

SEQ ID NO: 688499 - RNA, 19 nt, Artificial Sequence
  Description of Artificial Sequence: Synthetic oligonucleotide
gugacguccuguaggcaga

SEQ ID NO: 688500 - RNA, 19 nt, Artificial Sequence
  Description of Artificial Sequence: Synthetic oligonucleotide
cagauccuucaaggagugc

SEQ ID NO: 688501 - RNA, 19 nt, Artificial Sequence
  Description of Artificial Sequence: Synthetic oligonucleotide
ccugaauacagaugcggua

SEQ ID NO: 688502 - RNA, 19 nt, Artificial Sequence
  Description of Artificial Sequence: Synthetic oligonucleotide
cagagugggcucaauccgu

SEQ ID NO: 688503 - RNA, 19 nt, Artificial Sequence
  Description of Artificial Sequence: Synthetic oligonucleotide
gccuagaagcucucucuuc

SEQ ID NO: 688504 - RNA, 19 nt, Artificial Sequence
  Description of Artificial Sequence: Synthetic oligonucleotide
ggcaucagugugcguccag

SEQ ID NO: 688505 - RNA, 19 nt, Artificial Sequence
  Description of Artificial Sequence: Synthetic oligonucleotide
ugggccugucuuguagaau

SEQ ID NO: 688506 - RNA, 19 nt, Artificial Sequence
  Description of Artificial Sequence: Synthetic oligonucleotide
cagcuuuggucaggagccc

SEQ ID NO: 688507 - RNA, 19 nt, Artificial Sequence
  Description of Artificial Sequence: Synthetic oligonucleotide
gguccagguaugcgauggc

SEQ ID NO: 688508 - RNA, 19 nt, Artificial Sequence
  Description of Artificial Sequence: Synthetic oligonucleotide
ggaauccgcucccaggacu

SEQ ID NO: 688509 - RNA, 19 nt, Artificial Sequence
  Description of Artificial Sequence: Synthetic oligonucleotide
gccuguugcaacaagcccu

SEQ ID NO: 688510 - RNA, 19 nt, Artificial Sequence
  Description of Artificial Sequence: Synthetic oligonucleotide
agugugcguccaggccagc

SEQ ID NO: 688511 - RNA, 19 nt, Artificial Sequence
  Description of Artificial Sequence: Synthetic oligonucleotide
uggcaucagugugcgucca

SEQ ID NO: 688512 - RNA, 19 nt, Artificial Sequence
  Description of Artificial Sequence: Synthetic oligonucleotide
ggagccauaggcuggcaau

SEQ ID NO: 688513 - RNA, 19 nt, Artificial Sequence
  Description of Artificial Sequence: Synthetic oligonucleotide
cugcagcuuuggucaggag

SEQ ID NO: 688514 - RNA, 19 nt, Artificial Sequence
  Description of Artificial Sequence: Synthetic oligonucleotide
ugcguccuccaggcuucgg

SEQ ID NO: 688515 - RNA, 19 nt, Artificial Sequence
  Description of Artificial Sequence: Synthetic oligonucleotide
cucggugagguuggcaaaa

SEQ ID NO: 688516 - RNA, 19 nt, Artificial Sequence
  Description of Artificial Sequence: Synthetic oligonucleotide
gcccuuggaugaucccacg

SEQ ID NO: 688517 - RNA, 19 nt, Artificial Sequence
  Description of Artificial Sequence: Synthetic oligonucleotide
gcaggaucuauugcuggga

SEQ ID NO: 688518 - RNA, 19 nt, Artificial Sequence
  Description of Artificial Sequence: Synthetic oligonucleotide
aggcaagguaagaggcaca

SEQ ID NO: 688519 - RNA, 19 nt, Artificial Sequence
  Description of Artificial Sequence: Synthetic oligonucleotide
ucccucggugagguuggca

SEQ ID NO: 688520 - RNA, 19 nt, Artificial Sequence
  Description of Artificial Sequence: Synthetic oligonucleotide
auccgcucccaggacuuga

SEQ ID NO: 688521 - RNA, 19 nt, Artificial Sequence
  Description of Artificial Sequence: Synthetic oligonucleotide
gacguccuguaggcagagc

SEQ ID NO: 688522 - RNA, 19 nt, Artificial Sequence
  Description of Artificial Sequence: Synthetic oligonucleotide
gaccccgugccuguugcaa

SEQ ID NO: 688523 - RNA, 19 nt, Artificial Sequence
  Description of Artificial Sequence: Synthetic oligonucleotide
cacgaggcuguagggauaa

SEQ ID NO: 688524 - RNA, 19 nt, Artificial Sequence
  Description of Artificial Sequence: Synthetic oligonucleotide
gcugagcccaucauagaaa

SEQ ID NO: 688525 - RNA, 19 nt, Artificial Sequence
  Description of Artificial Sequence: Synthetic oligonucleotide
gccauaggcuggcaauguc

SEQ ID NO: 688526 - RNA, 19 nt, Artificial Sequence
  Description of Artificial Sequence: Synthetic oligonucleotide
gcaaccagccagugaggga

SEQ ID NO: 688527 - RNA, 19 nt, Artificial Sequence
  Description of Artificial Sequence: Synthetic oligonucleotide
ccauaggcuggcaaugucu

SEQ ID NO: 688528 - RNA, 19 nt, Artificial Sequence
  Description of Artificial Sequence: Synthetic oligonucleotide
cuaccuucuuugguugucu

SEQ ID NO: 688529 - RNA, 19 nt, Artificial Sequence
  Description of Artificial Sequence: Synthetic oligonucleotide
gcucacgaggcuguaggga

SEQ ID NO: 688530 - RNA, 19 nt, Artificial Sequence
  Description of Artificial Sequence: Synthetic oligonucleotide
ggugucuuauccaacucuu

SEQ ID NO: 688531 - RNA, 19 nt, Artificial Sequence
  Description of Artificial Sequence: Synthetic oligonucleotide
aggugccacaauggcagua

SEQ ID NO: 688532 - RNA, 19 nt, Artificial Sequence
  Description of Artificial Sequence: Synthetic oligonucleotide
ggcuuggccccaaacgcca

SEQ ID NO: 688533 - RNA, 19 nt, Artificial Sequence
  Description of Artificial Sequence: Synthetic oligonucleotide
cgugccuucuugggaaucc

SEQ ID NO: 688534 - RNA, 19 nt, Artificial Sequence
  Description of Artificial Sequence: Synthetic oligonucleotide
cuucggaauaggcccugcu

SEQ ID NO: 688535 - RNA, 19 nt, Artificial Sequence
  Description of Artificial Sequence: Synthetic oligonucleotide
agccacacuuucagucccu

SEQ ID NO: 688536 - RNA, 19 nt, Artificial Sequence
  Description of Artificial Sequence: Synthetic oligonucleotide
gguccaucgggcagcuuca

SEQ ID NO: 688537 - RNA, 19 nt, Artificial Sequence
  Description of Artificial Sequence: Synthetic oligonucleotide
gggcuguaucacagcaagc

SEQ ID NO: 688538 - RNA, 19 nt, Artificial Sequence
  Description of Artificial Sequence: Synthetic oligonucleotide
cggugagguuggcaaaacc

SEQ ID NO: 688539 - RNA, 19 nt, Artificial Sequence
  Description of Artificial Sequence: Synthetic oligonucleotide
cucuugcagcauggugaac

SEQ ID NO: 688540 - RNA, 19 nt, Artificial Sequence
  Description of Artificial Sequence: Synthetic oligonucleotide
cuguugcaacaagcccuug

SEQ ID NO: 688541 - RNA, 19 nt, Artificial Sequence
  Description of Artificial Sequence: Synthetic oligonucleotide
gggagccauaggcuggcaa

SEQ ID NO: 688542 - RNA, 19 nt, Artificial Sequence
  Description of Artificial Sequence: Synthetic oligonucleotide
cgaggcuguagggauaauc

SEQ ID NO: 688543 - RNA, 19 nt, Artificial Sequence
  Description of Artificial Sequence: Synthetic oligonucleotide
gccugaauacagaugcggu

SEQ ID NO: 688544 - RNA, 19 nt, Artificial Sequence
  Description of Artificial Sequence: Synthetic oligonucleotide
agcagccgguccagguaug

SEQ ID NO: 688545 - RNA, 19 nt, Artificial Sequence
  Description of Artificial Sequence: Synthetic oligonucleotide
ggcuagugacagcugucua

SEQ ID NO: 688546 - RNA, 19 nt, Artificial Sequence
  Description of Artificial Sequence: Synthetic oligonucleotide
caggaguagccgggcccag

SEQ ID NO: 688547 - RNA, 19 nt, Artificial Sequence
  Description of Artificial Sequence: Synthetic oligonucleotide
gaguagccgggcccagggu

SEQ ID NO: 688548 - RNA, 19 nt, Artificial Sequence
  Description of Artificial Sequence: Synthetic oligonucleotide
gcagccgguccagguaugc

SEQ ID NO: 688549 - RNA, 19 nt, Artificial Sequence
  Description of Artificial Sequence: Synthetic oligonucleotide
ucagucccucggugagguu

SEQ ID NO: 688550 - RNA, 19 nt, Artificial Sequence
  Description of Artificial Sequence: Synthetic oligonucleotide
ggauaaucauguggauacu

SEQ ID NO: 688551 - RNA, 19 nt, Artificial Sequence
  Description of Artificial Sequence: Synthetic oligonucleotide
gugcguccuccaggcuucg

SEQ ID NO: 688552 - RNA, 19 nt, Artificial Sequence
  Description of Artificial Sequence: Synthetic oligonucleotide
cugugacguccuguaggca

SEQ ID NO: 688553 - RNA, 19 nt, Artificial Sequence
  Description of Artificial Sequence: Synthetic oligonucleotide
cuucagccauacagagggu

SEQ ID NO: 688554 - RNA, 19 nt, Artificial Sequence
  Description of Artificial Sequence: Synthetic oligonucleotide
guccaucgggcagcuucac

SEQ ID NO: 688555 - RNA, 19 nt, Artificial Sequence
  Description of Artificial Sequence: Synthetic oligonucleotide
gcaaagacuuccgugccuu

SEQ ID NO: 688556 - RNA, 19 nt, Artificial Sequence
  Description of Artificial Sequence: Synthetic oligonucleotide
caacaagcccuugcaggcu

SEQ ID NO: 688557 - RNA, 19 nt, Artificial Sequence
  Description of Artificial Sequence: Synthetic oligonucleotide
ggguggauucuggcuuggc

SEQ ID NO: 688558 - RNA, 19 nt, Artificial Sequence
  Description of Artificial Sequence: Synthetic oligonucleotide
ccgugccuguugcaacaag

SEQ ID NO: 688559 - RNA, 19 nt, Artificial Sequence
  Description of Artificial Sequence: Synthetic oligonucleotide
cgaagcaaccagccaguga

SEQ ID NO: 688560 - RNA, 19 nt, Artificial Sequence
  Description of Artificial Sequence: Synthetic oligonucleotide
gcgauggcaaagggagaca

SEQ ID NO: 688561 - RNA, 19 nt, Artificial Sequence
  Description of Artificial Sequence: Synthetic oligonucleotide
cuugucccagggcccacau

SEQ ID NO: 688562 - RNA, 19 nt, Artificial Sequence
  Description of Artificial Sequence: Synthetic oligonucleotide
ccgcucccaggacuugagc

SEQ ID NO: 688563 - RNA, 19 nt, Artificial Sequence
  Description of Artificial Sequence: Synthetic oligonucleotide
ccguggagucuggagcuug

SEQ ID NO: 688564 - RNA, 19 nt, Artificial Sequence
  Description of Artificial Sequence: Synthetic oligonucleotide
gccccaaacgccagcaccu

SEQ ID NO: 688565 - RNA, 19 nt, Artificial Sequence
  Description of Artificial Sequence: Synthetic oligonucleotide
gacuccccuggugucuuau

SEQ ID NO: 688566 - RNA, 19 nt, Artificial Sequence
  Description of Artificial Sequence: Synthetic oligonucleotide
ccccgugccuguugcaaca

SEQ ID NO: 688567 - RNA, 19 nt, Artificial Sequence
  Description of Artificial Sequence: Synthetic oligonucleotide
gcauguccacugauggcua

SEQ ID NO: 688568 - RNA, 19 nt, Artificial Sequence
  Description of Artificial Sequence: Synthetic oligonucleotide
cuuggcucacgaggcugua

SEQ ID NO: 688569 - RNA, 19 nt, Artificial Sequence
  Description of Artificial Sequence: Synthetic oligonucleotide
gucccucggugagguuggc

SEQ ID NO: 688570 - RNA, 19 nt, Artificial Sequence
  Description of Artificial Sequence: Synthetic oligonucleotide
ggaccccgugccuguugca

SEQ ID NO: 688571 - RNA, 19 nt, Artificial Sequence
  Description of Artificial Sequence: Synthetic oligonucleotide
cugggauaucauggcgagu

SEQ ID NO: 688572 - RNA, 19 nt, Artificial Sequence
  Description of Artificial Sequence: Synthetic oligonucleotide
caggugccacaauggcagu

SEQ ID NO: 688573 - RNA, 19 nt, Artificial Sequence
  Description of Artificial Sequence: Synthetic oligonucleotide
gcugcaaacugggcuguau

SEQ ID NO: 688574 - RNA, 19 nt, Artificial Sequence
  Description of Artificial Sequence: Synthetic oligonucleotide
cccauguagugacuccccu

SEQ ID NO: 688575 - RNA, 19 nt, Artificial Sequence
  Description of Artificial Sequence: Synthetic oligonucleotide
acgaggcuguagggauaau

SEQ ID NO: 688576 - RNA, 19 nt, Artificial Sequence
  Description of Artificial Sequence: Synthetic oligonucleotide
ccgugccuucuugggaauc

SEQ ID NO: 688577 - RNA, 19 nt, Artificial Sequence
  Description of Artificial Sequence: Synthetic oligonucleotide
ggcccuucugaaguccuuu

SEQ ID NO: 688578 - RNA, 19 nt, Artificial Sequence
  Description of Artificial Sequence: Synthetic oligonucleotide
ggcugccuagaagcucucu

SEQ ID NO: 688579 - RNA, 19 nt, Artificial Sequence
  Description of Artificial Sequence: Synthetic oligonucleotide
cguggagucuggagcuugu

SEQ ID NO: 688580 - RNA, 19 nt, Artificial Sequence
  Description of Artificial Sequence: Synthetic oligonucleotide
ccgaggaccccgugccugu

SEQ ID NO: 688581 - RNA, 19 nt, Artificial Sequence
  Description of Artificial Sequence: Synthetic oligonucleotide
cccgugccuguugcaacaa

SEQ ID NO: 688582 - RNA, 19 nt, Artificial Sequence
  Description of Artificial Sequence: Synthetic oligonucleotide
ggcucagagugggcucaau

SEQ ID NO: 688583 - RNA, 19 nt, Artificial Sequence
  Description of Artificial Sequence: Synthetic oligonucleotide
cgguacccauguagugacu

SEQ ID NO: 688584 - RNA, 19 nt, Artificial Sequence
  Description of Artificial Sequence: Synthetic oligonucleotide
ccccaaacgccagcaccuu

SEQ ID NO: 688585 - RNA, 19 nt, Artificial Sequence
  Description of Artificial Sequence: Synthetic oligonucleotide
aacagcauauucuaauacc

SEQ ID NO: 688586 - RNA, 19 nt, Artificial Sequence
  Description of Artificial Sequence: Synthetic oligonucleotide
aaacaugaguauuaaauga

SEQ ID NO: 688587 - RNA, 19 nt, Artificial Sequence
  Description of Artificial Sequence: Synthetic oligonucleotide
aaacuuaacaggucucggc

SEQ ID NO: 688588 - RNA, 19 nt, Artificial Sequence
  Description of Artificial Sequence: Synthetic oligonucleotide
ugaauuuagaaacaugagu

SEQ ID NO: 688589 - RNA, 19 nt, Artificial Sequence
  Description of Artificial Sequence: Synthetic oligonucleotide
uaucauuaaagcccuauag

SEQ ID NO: 688590 - RNA, 19 nt, Artificial Sequence
  Description of Artificial Sequence: Synthetic oligonucleotide
aaccaggccaacuugaguc

SEQ ID NO: 688591 - RNA, 19 nt, Artificial Sequence
  Description of Artificial Sequence: Synthetic oligonucleotide
aaacgagacauccuugugg

SEQ ID NO: 688592 - RNA, 19 nt, Artificial Sequence
  Description of Artificial Sequence: Synthetic oligonucleotide
auaacaaagaacuguagug

SEQ ID NO: 688593 - RNA, 19 nt, Artificial Sequence
  Description of Artificial Sequence: Synthetic oligonucleotide
aauaauuacucuuggcgug

SEQ ID NO: 688594 - RNA, 19 nt, Artificial Sequence
  Description of Artificial Sequence: Synthetic oligonucleotide
aaucuagugacaguuuacc

SEQ ID NO: 688595 - RNA, 19 nt, Artificial Sequence
  Description of Artificial Sequence: Synthetic oligonucleotide
ugacaguuuaccaaguucc

SEQ ID NO: 688596 - RNA, 19 nt, Artificial Sequence
  Description of Artificial Sequence: Synthetic oligonucleotide
aucauuaaagcccuauagg

SEQ ID NO: 688597 - RNA, 19 nt, Artificial Sequence
  Description of Artificial Sequence: Synthetic oligonucleotide
uauaacaucggaagccugg

SEQ ID NO: 688598 - RNA, 19 nt, Artificial Sequence
  Description of Artificial Sequence: Synthetic oligonucleotide
auggcuuaagcacaguagc

SEQ ID NO: 688599 - RNA, 19 nt, Artificial Sequence
  Description of Artificial Sequence: Synthetic oligonucleotide
ucauuaaagcccuauaggu

SEQ ID NO: 688600 - RNA, 19 nt, Artificial Sequence
  Description of Artificial Sequence: Synthetic oligonucleotide
aguauuacugcuuugcaca

SEQ ID NO: 688601 - RNA, 19 nt, Artificial Sequence
  Description of Artificial Sequence: Synthetic oligonucleotide
uaaccacugaacuauaacc

SEQ ID NO: 688602 - RNA, 19 nt, Artificial Sequence
  Description of Artificial Sequence: Synthetic oligonucleotide
ugaacuauaaccaggccaa

SEQ ID NO: 688603 - RNA, 19 nt, Artificial Sequence
  Description of Artificial Sequence: Synthetic oligonucleotide
aaucagacgagugaagauc

SEQ ID NO: 688604 - RNA, 19 nt, Artificial Sequence
  Description of Artificial Sequence: Synthetic oligonucleotide
cuugggauacugaagaagc

SEQ ID NO: 688605 - RNA, 19 nt, Artificial Sequence
  Description of Artificial Sequence: Synthetic oligonucleotide
acaauuauuguucccuagg

SEQ ID NO: 688606 - RNA, 19 nt, Artificial Sequence
  Description of Artificial Sequence: Synthetic oligonucleotide
auaaauuggaccucagaug

SEQ ID NO: 688607 - RNA, 19 nt, Artificial Sequence
  Description of Artificial Sequence: Synthetic oligonucleotide
guagcuacaaacaagccag

SEQ ID NO: 688608 - RNA, 19 nt, Artificial Sequence
  Description of Artificial Sequence: Synthetic oligonucleotide
aauugauauaguaaaacau

SEQ ID NO: 688609 - RNA, 19 nt, Artificial Sequence
  Description of Artificial Sequence: Synthetic oligonucleotide
uugauauagaagcaaauuu

SEQ ID NO: 688610 - RNA, 19 nt, Artificial Sequence
  Description of Artificial Sequence: Synthetic oligonucleotide
ugauauagaagcaaauuuu

SEQ ID NO: 688611 - RNA, 19 nt, Artificial Sequence
  Description of Artificial Sequence: Synthetic oligonucleotide
uuguauagucaucuuaggc

SEQ ID NO: 688612 - RNA, 19 nt, Artificial Sequence
  Description of Artificial Sequence: Synthetic oligonucleotide
gugucuauaacaucggaag

SEQ ID NO: 688613 - RNA, 19 nt, Artificial Sequence
  Description of Artificial Sequence: Synthetic oligonucleotide
aagaucacuaccaacuguc

SEQ ID NO: 688614 - RNA, 19 nt, Artificial Sequence
  Description of Artificial Sequence: Synthetic oligonucleotide
gaagaagguagguaccugg

SEQ ID NO: 688615 - RNA, 19 nt, Artificial Sequence
  Description of Artificial Sequence: Synthetic oligonucleotide
ucuauaaggaucauaucau

SEQ ID NO: 688616 - RNA, 19 nt, Artificial Sequence
  Description of Artificial Sequence: Synthetic oligonucleotide
cugcuuaagaucaguaucg

SEQ ID NO: 688617 - RNA, 19 nt, Artificial Sequence
  Description of Artificial Sequence: Synthetic oligonucleotide
aacuuaacaggucucggca

SEQ ID NO: 688618 - RNA, 19 nt, Artificial Sequence
  Description of Artificial Sequence: Synthetic oligonucleotide
augaguauuacugcuuugc

SEQ ID NO: 688619 - RNA, 19 nt, Artificial Sequence
  Description of Artificial Sequence: Synthetic oligonucleotide
uuggagauaaugcaaucca

SEQ ID NO: 688620 - RNA, 19 nt, Artificial Sequence
  Description of Artificial Sequence: Synthetic oligonucleotide
ucaacagaugcucugggga

SEQ ID NO: 688621 - RNA, 19 nt, Artificial Sequence
  Description of Artificial Sequence: Synthetic oligonucleotide
acuguaaacuacuggcugg

SEQ ID NO: 688622 - RNA, 19 nt, Artificial Sequence
  Description of Artificial Sequence: Synthetic oligonucleotide
uuuaagacaaauacucuuu

SEQ ID NO: 688623 - RNA, 19 nt, Artificial Sequence
  Description of Artificial Sequence: Synthetic oligonucleotide
gaguauuaaaugaugguug

SEQ ID NO: 688624 - RNA, 19 nt, Artificial Sequence
  Description of Artificial Sequence: Synthetic oligonucleotide
uaaugcaccaagugaacag

SEQ ID NO: 688625 - RNA, 19 nt, Artificial Sequence
  Description of Artificial Sequence: Synthetic oligonucleotide
uuacccuuaggaaugacuc

SEQ ID NO: 688626 - RNA, 19 nt, Artificial Sequence
  Description of Artificial Sequence: Synthetic oligonucleotide
uccucaguaacauaagcac

SEQ ID NO: 688627 - RNA, 19 nt, Artificial Sequence
  Description of Artificial Sequence: Synthetic oligonucleotide
agugcuaacuguaaacuac

SEQ ID NO: 688628 - RNA, 19 nt, Artificial Sequence
  Description of Artificial Sequence: Synthetic oligonucleotide
aaaacuuaacaggucucgg

SEQ ID NO: 688629 - RNA, 19 nt, Artificial Sequence
  Description of Artificial Sequence: Synthetic oligonucleotide
gaagcgaugucuucuguag

SEQ ID NO: 688630 - RNA, 19 nt, Artificial Sequence
  Description of Artificial Sequence: Synthetic oligonucleotide
acaacuuuugauugugaag

SEQ ID NO: 688631 - RNA, 19 nt, Artificial Sequence
  Description of Artificial Sequence: Synthetic oligonucleotide
aaagugcuaacuguaaacu

SEQ ID NO: 688632 - RNA, 19 nt, Artificial Sequence
  Description of Artificial Sequence: Synthetic oligonucleotide
auuaaagcccuauagguuu

SEQ ID NO: 688633 - RNA, 19 nt, Artificial Sequence
  Description of Artificial Sequence: Synthetic oligonucleotide
uucugagucaacagaagca

SEQ ID NO: 688634 - RNA, 19 nt, Artificial Sequence
  Description of Artificial Sequence: Synthetic oligonucleotide
aauaugggaucuguuagug

SEQ ID NO: 688635 - RNA, 19 nt, Artificial Sequence
  Description of Artificial Sequence: Synthetic oligonucleotide
uuuggagauaaugcaaucc

SEQ ID NO: 688636 - RNA, 19 nt, Artificial Sequence
  Description of Artificial Sequence: Synthetic oligonucleotide
ugucuauaacaucggaagc

SEQ ID NO: 688637 - RNA, 19 nt, Artificial Sequence
  Description of Artificial Sequence: Synthetic oligonucleotide
agcuguuaagcuuugguga

SEQ ID NO: 688638 - RNA, 19 nt, Artificial Sequence
  Description of Artificial Sequence: Synthetic oligonucleotide
aguguuauuguuucugagu

SEQ ID NO: 688639 - RNA, 19 nt, Artificial Sequence
  Description of Artificial Sequence: Synthetic oligonucleotide
uguaguaccugcuucugac

SEQ ID NO: 688640 - RNA, 19 nt, Artificial Sequence
  Description of Artificial Sequence: Synthetic oligonucleotide
uuauacaacuuuccuuccc

SEQ ID NO: 688641 - RNA, 19 nt, Artificial Sequence
  Description of Artificial Sequence: Synthetic oligonucleotide
uccaccauuuacuucgaag

SEQ ID NO: 688642 - RNA, 19 nt, Artificial Sequence
  Description of Artificial Sequence: Synthetic oligonucleotide
ugaagaccuaauuacaaua

SEQ ID NO: 688643 - RNA, 19 nt, Artificial Sequence
  Description of Artificial Sequence: Synthetic oligonucleotide
uccaauuauauuugauucu

SEQ ID NO: 688644 - RNA, 19 nt, Artificial Sequence
  Description of Artificial Sequence: Synthetic oligonucleotide
uuuacccuuaggaaugacu

SEQ ID NO: 688645 - RNA, 19 nt, Artificial Sequence
  Description of Artificial Sequence: Synthetic oligonucleotide
uauucuaauaccccucaau

SEQ ID NO: 688646 - RNA, 19 nt, Artificial Sequence
  Description of Artificial Sequence: Synthetic oligonucleotide
caauuauuguucccuaggc

SEQ ID NO: 688647 - RNA, 19 nt, Artificial Sequence
  Description of Artificial Sequence: Synthetic oligonucleotide
cuggugauaacuguuuugg

SEQ ID NO: 688648 - RNA, 19 nt, Artificial Sequence
  Description of Artificial Sequence: Synthetic oligonucleotide
caauugauauaguaaaaca

SEQ ID NO: 688649 - RNA, 19 nt, Artificial Sequence
  Description of Artificial Sequence: Synthetic oligonucleotide
ugaugguccaccauuuacu

SEQ ID NO: 688650 - RNA, 19 nt, Artificial Sequence
  Description of Artificial Sequence: Synthetic oligonucleotide
ugggcaauugauauaguaa

SEQ ID NO: 688651 - RNA, 19 nt, Artificial Sequence
  Description of Artificial Sequence: Synthetic oligonucleotide
aguuugaauaauuacucuu

SEQ ID NO: 688652 - RNA, 19 nt, Artificial Sequence
  Description of Artificial Sequence: Synthetic oligonucleotide
ugucacuuguguucaacag

SEQ ID NO: 688653 - RNA, 19 nt, Artificial Sequence
  Description of Artificial Sequence: Synthetic oligonucleotide
agguaagacggauucagug

SEQ ID NO: 688654 - RNA, 19 nt, Artificial Sequence
  Description of Artificial Sequence: Synthetic oligonucleotide
auucuaauaccccucaaua

SEQ ID NO: 688655 - RNA, 19 nt, Artificial Sequence
  Description of Artificial Sequence: Synthetic oligonucleotide
aggcugaggaauuucaucu

SEQ ID NO: 688656 - RNA, 19 nt, Artificial Sequence
  Description of Artificial Sequence: Synthetic oligonucleotide
uaugggaucuguuaguguu

SEQ ID NO: 688657 - RNA, 19 nt, Artificial Sequence
  Description of Artificial Sequence: Synthetic oligonucleotide
cauggcuuaagcacaguag

SEQ ID NO: 688658 - RNA, 19 nt, Artificial Sequence
  Description of Artificial Sequence: Synthetic oligonucleotide
ggaauaugggaucuguuag

SEQ ID NO: 688659 - RNA, 19 nt, Artificial Sequence
  Description of Artificial Sequence: Synthetic oligonucleotide
gauugugaagaccuaauua

SEQ ID NO: 688660 - RNA, 19 nt, Artificial Sequence
  Description of Artificial Sequence: Synthetic oligonucleotide
gaauaauuacucuuggcgu

SEQ ID NO: 688661 - RNA, 19 nt, Artificial Sequence
  Description of Artificial Sequence: Synthetic oligonucleotide
aaaucagacgagugaagau

SEQ ID NO: 688662 - RNA, 19 nt, Artificial Sequence
  Description of Artificial Sequence: Synthetic oligonucleotide
acugaacuauaaccaggcc

SEQ ID NO: 688663 - RNA, 19 nt, Artificial Sequence
  Description of Artificial Sequence: Synthetic oligonucleotide
gagcuguuaagcuuuggug

SEQ ID NO: 688664 - RNA, 19 nt, Artificial Sequence
  Description of Artificial Sequence: Synthetic oligonucleotide
cuugucugaagaagguagg

SEQ ID NO: 688665 - RNA, 19 nt, Artificial Sequence
  Description of Artificial Sequence: Synthetic oligonucleotide
uuuggugacuuaaguagcu

SEQ ID NO: 688666 - RNA, 19 nt, Artificial Sequence
  Description of Artificial Sequence: Synthetic oligonucleotide
uugaugguccaccauuuac

SEQ ID NO: 688667 - RNA, 19 nt, Artificial Sequence
  Description of Artificial Sequence: Synthetic oligonucleotide
ugaguauuacugcuuugca

SEQ ID NO: 688668 - RNA, 19 nt, Artificial Sequence
  Description of Artificial Sequence: Synthetic oligonucleotide
uucuaauaccccucaauaa

SEQ ID NO: 688669 - RNA, 19 nt, Artificial Sequence
  Description of Artificial Sequence: Synthetic oligonucleotide
aaugacucuugauuuguuu

SEQ ID NO: 688670 - RNA, 19 nt, Artificial Sequence
  Description of Artificial Sequence: Synthetic oligonucleotide
acagaguacagugucuaac

SEQ ID NO: 688671 - RNA, 19 nt, Artificial Sequence
  Description of Artificial Sequence: Synthetic oligonucleotide
uucuuuacuuguaguaccu

SEQ ID NO: 688672 - RNA, 19 nt, Artificial Sequence
  Description of Artificial Sequence: Synthetic oligonucleotide
gaguauuacugcuuugcac

SEQ ID NO: 688673 - RNA, 19 nt, Artificial Sequence
  Description of Artificial Sequence: Synthetic oligonucleotide
aacaucggaagccuggaua

SEQ ID NO: 688674 - RNA, 19 nt, Artificial Sequence
  Description of Artificial Sequence: Synthetic oligonucleotide
agcgggaaacgagacaucc

SEQ ID NO: 688675 - RNA, 19 nt, Artificial Sequence
  Description of Artificial Sequence: Synthetic oligonucleotide
uuauuguucccuaggcaac

SEQ ID NO: 688676 - RNA, 19 nt, Artificial Sequence
  Description of Artificial Sequence: Synthetic oligonucleotide
gacugccuaaagaugaucc

SEQ ID NO: 688677 - RNA, 19 nt, Artificial Sequence
  Description of Artificial Sequence: Synthetic oligonucleotide
aguucuguacuauucuggu

SEQ ID NO: 688678 - RNA, 19 nt, Artificial Sequence
  Description of Artificial Sequence: Synthetic oligonucleotide
uggaauaugggaucuguua

SEQ ID NO: 688679 - RNA, 19 nt, Artificial Sequence
  Description of Artificial Sequence: Synthetic oligonucleotide
aagaccuaauuacaauaau

SEQ ID NO: 688680 - RNA, 19 nt, Artificial Sequence
  Description of Artificial Sequence: Synthetic oligonucleotide
uggaccucagaugauauac

SEQ ID NO: 688681 - RNA, 19 nt, Artificial Sequence
  Description of Artificial Sequence: Synthetic oligonucleotide
cucaauaauuuucugggca

SEQ ID NO: 688682 - RNA, 19 nt, Artificial Sequence
  Description of Artificial Sequence: Synthetic oligonucleotide
cuucuagcgcaucuggagg

SEQ ID NO: 688683 - RNA, 19 nt, Artificial Sequence
  Description of Artificial Sequence: Synthetic oligonucleotide
uggacuuuucuauaaggau

SEQ ID NO: 688684 - RNA, 19 nt, Artificial Sequence
  Description of Artificial Sequence: Synthetic oligonucleotide
aagguagguaccuggagua

SEQ ID NO: 688685 - RNA, 19 nt, Artificial Sequence
  Description of Artificial Sequence: Synthetic oligonucleotide
agugucuaacugcagagau

SEQ ID NO: 688686 - RNA, 19 nt, Artificial Sequence
  Description of Artificial Sequence: Synthetic oligonucleotide
uaacacguugucauaaauu

SEQ ID NO: 688687 - RNA, 19 nt, Artificial Sequence
  Description of Artificial Sequence: Synthetic oligonucleotide
acuauaaccaggccaacuu

SEQ ID NO: 688688 - RNA, 19 nt, Artificial Sequence
  Description of Artificial Sequence: Synthetic oligonucleotide
cugaacuauaaccaggcca

SEQ ID NO: 688689 - RNA, 19 nt, Artificial Sequence
  Description of Artificial Sequence: Synthetic oligonucleotide
uaccccucaauaauuuucu

SEQ ID NO: 688690 - RNA, 19 nt, Artificial Sequence
  Description of Artificial Sequence: Synthetic oligonucleotide
agagcuguuaagcuuuggu

SEQ ID NO: 688691 - RNA, 19 nt, Artificial Sequence
  Description of Artificial Sequence: Synthetic oligonucleotide
aaagauggaagaaucucaa

SEQ ID NO: 688692 - RNA, 19 nt, Artificial Sequence
  Description of Artificial Sequence: Synthetic oligonucleotide
uggagauaaugcaauccac

SEQ ID NO: 688693 - RNA, 19 nt, Artificial Sequence
  Description of Artificial Sequence: Synthetic oligonucleotide
gauaaagccauguggugaa

SEQ ID NO: 688694 - RNA, 19 nt, Artificial Sequence
  Description of Artificial Sequence: Synthetic oligonucleotide
ucugaccauaacacuauuc

SEQ ID NO: 688695 - RNA, 19 nt, Artificial Sequence
  Description of Artificial Sequence: Synthetic oligonucleotide
uggcgugugacacugcacu

SEQ ID NO: 688696 - RNA, 19 nt, Artificial Sequence
  Description of Artificial Sequence: Synthetic oligonucleotide
agacucuaaauccucagua

SEQ ID NO: 688697 - RNA, 19 nt, Artificial Sequence
  Description of Artificial Sequence: Synthetic oligonucleotide
cacguugucauaaauugga

SEQ ID NO: 688698 - RNA, 19 nt, Artificial Sequence
  Description of Artificial Sequence: Synthetic oligonucleotide
uucuagcgcaucuggaggc

SEQ ID NO: 688699 - RNA, 19 nt, Artificial Sequence
  Description of Artificial Sequence: Synthetic oligonucleotide
ccuggauaaagccaugugg

SEQ ID NO: 688700 - RNA, 19 nt, Artificial Sequence
  Description of Artificial Sequence: Synthetic oligonucleotide
uuaagcuuuggugacuuaa

SEQ ID NO: 688701 - RNA, 19 nt, Artificial Sequence
  Description of Artificial Sequence: Synthetic oligonucleotide
ucggaagccuggauaaagc

SEQ ID NO: 688702 - RNA, 19 nt, Artificial Sequence
  Description of Artificial Sequence: Synthetic oligonucleotide
cuaacugcagagaugagua

SEQ ID NO: 688703 - RNA, 19 nt, Artificial Sequence
  Description of Artificial Sequence: Synthetic oligonucleotide
aauuuucugggcaauugau

SEQ ID NO: 688704 - RNA, 19 nt, Artificial Sequence
  Description of Artificial Sequence: Synthetic oligonucleotide
ugucauaaauuggaccuca

SEQ ID NO: 688705 - RNA, 19 nt, Artificial Sequence
  Description of Artificial Sequence: Synthetic oligonucleotide
aggucucggcaauuaaaac

SEQ ID NO: 688706 - RNA, 19 nt, Artificial Sequence
  Description of Artificial Sequence: Synthetic oligonucleotide
guaacauaagcacuggcua

SEQ ID NO: 688707 - RNA, 19 nt, Artificial Sequence
  Description of Artificial Sequence: Synthetic oligonucleotide
accuaauuacaauaauaaa

SEQ ID NO: 688708 - RNA, 19 nt, Artificial Sequence
  Description of Artificial Sequence: Synthetic oligonucleotide
augggguaaccacugaacu

SEQ ID NO: 688709 - RNA, 19 nt, Artificial Sequence
  Description of Artificial Sequence: Synthetic oligonucleotide
ugcuuaagaucaguaucgg

SEQ ID NO: 688710 - RNA, 19 nt, Artificial Sequence
  Description of Artificial Sequence: Synthetic oligonucleotide
ggauagagcaugaacaaug

SEQ ID NO: 688711 - RNA, 19 nt, Artificial Sequence
  Description of Artificial Sequence: Synthetic oligonucleotide
guaagacggauucaguguc

SEQ ID NO: 688712 - RNA, 19 nt, Artificial Sequence
  Description of Artificial Sequence: Synthetic oligonucleotide
aacuauaaccaggccaacu

SEQ ID NO: 688713 - RNA, 19 nt, Artificial Sequence
  Description of Artificial Sequence: Synthetic oligonucleotide
acaaucuagugacaguuua

SEQ ID NO: 688714 - RNA, 19 nt, Artificial Sequence
  Description of Artificial Sequence: Synthetic oligonucleotide
ugacucuugauuuguuuuc

SEQ ID NO: 688715 - RNA, 19 nt, Artificial Sequence
  Description of Artificial Sequence: Synthetic oligonucleotide
gaugaguauuacugcuuug

SEQ ID NO: 688716 - RNA, 19 nt, Artificial Sequence
  Description of Artificial Sequence: Synthetic oligonucleotide
uaauaccccucaauaauuu

SEQ ID NO: 688717 - RNA, 19 nt, Artificial Sequence
  Description of Artificial Sequence: Synthetic oligonucleotide
ugauugugaagaccuaauu

SEQ ID NO: 688718 - RNA, 19 nt, Artificial Sequence
  Description of Artificial Sequence: Synthetic oligonucleotide
gacaacuuuugauugugaa

SEQ ID NO: 688719 - RNA, 19 nt, Artificial Sequence
  Description of Artificial Sequence: Synthetic oligonucleotide
uaguaccugcuucugacaa

SEQ ID NO: 688720 - RNA, 19 nt, Artificial Sequence
  Description of Artificial Sequence: Synthetic oligonucleotide
ugcuaacuguaaacuacug

SEQ ID NO: 688721 - RNA, 19 nt, Artificial Sequence
  Description of Artificial Sequence: Synthetic oligonucleotide
aucauaucauuaaagcccu

SEQ ID NO: 688722 - RNA, 19 nt, Artificial Sequence
  Description of Artificial Sequence: Synthetic oligonucleotide
aauaccccucaauaauuuu

SEQ ID NO: 688723 - RNA, 19 nt, Artificial Sequence
  Description of Artificial Sequence: Synthetic oligonucleotide
cauaaauuggaccucagau

SEQ ID NO: 688724 - RNA, 19 nt, Artificial Sequence
  Description of Artificial Sequence: Synthetic oligonucleotide
ucucuuuaccccuccccag

SEQ ID NO: 688725 - RNA, 19 nt, Artificial Sequence
  Description of Artificial Sequence: Synthetic oligonucleotide
augacucuugauuuguuuu

SEQ ID NO: 688726 - RNA, 19 nt, Artificial Sequence
  Description of Artificial Sequence: Synthetic oligonucleotide
uguacuauggugggagacu

SEQ ID NO: 688727 - RNA, 19 nt, Artificial Sequence
  Description of Artificial Sequence: Synthetic oligonucleotide
cuauaaccaggccaacuug

SEQ ID NO: 688728 - RNA, 19 nt, Artificial Sequence
  Description of Artificial Sequence: Synthetic oligonucleotide
gugggcuguaaauggaaag

SEQ ID NO: 688729 - RNA, 19 nt, Artificial Sequence
  Description of Artificial Sequence: Synthetic oligonucleotide
auaacacguugucauaaau

SEQ ID NO: 688730 - RNA, 19 nt, Artificial Sequence
  Description of Artificial Sequence: Synthetic oligonucleotide
uggcuuaagcacaguagcu

SEQ ID NO: 688731 - RNA, 19 nt, Artificial Sequence
  Description of Artificial Sequence: Synthetic oligonucleotide
gaagaccuaauuacaauaa

SEQ ID NO: 688732 - RNA, 19 nt, Artificial Sequence
  Description of Artificial Sequence: Synthetic oligonucleotide
agcccuauagguuuauuuu

SEQ ID NO: 688733 - RNA, 19 nt, Artificial Sequence
  Description of Artificial Sequence: Synthetic oligonucleotide
ugccuaaagaugauccaau

SEQ ID NO: 688734 - RNA, 19 nt, Artificial Sequence
  Description of Artificial Sequence: Synthetic oligonucleotide
uacucuuggcgugugacac

SEQ ID NO: 688735 - RNA, 19 nt, Artificial Sequence
  Description of Artificial Sequence: Synthetic oligonucleotide
uuaccaaguuccucaacau

SEQ ID NO: 688736 - RNA, 19 nt, Artificial Sequence
  Description of Artificial Sequence: Synthetic oligonucleotide
auaucauuaaagcccuaua

SEQ ID NO: 688737 - RNA, 19 nt, Artificial Sequence
  Description of Artificial Sequence: Synthetic oligonucleotide
gacgagugaagaucacuac

SEQ ID NO: 688738 - RNA, 19 nt, Artificial Sequence
  Description of Artificial Sequence: Synthetic oligonucleotide
acuacuggcuggugauaac

SEQ ID NO: 688739 - RNA, 19 nt, Artificial Sequence
  Description of Artificial Sequence: Synthetic oligonucleotide
ccuaauuacaauaauaaau

SEQ ID NO: 688740 - RNA, 19 nt, Artificial Sequence
  Description of Artificial Sequence: Synthetic oligonucleotide
ugcuucugacaaucuagug

SEQ ID NO: 688741 - RNA, 19 nt, Artificial Sequence
  Description of Artificial Sequence: Synthetic oligonucleotide
acugccuaaagaugaucca

SEQ ID NO: 688742 - RNA, 19 nt, Artificial Sequence
  Description of Artificial Sequence: Synthetic oligonucleotide
uuacucuuggcgugugaca

SEQ ID NO: 688743 - RNA, 19 nt, Artificial Sequence
  Description of Artificial Sequence: Synthetic oligonucleotide
cugagucaacagaagcagc

SEQ ID NO: 688744 - RNA, 19 nt, Artificial Sequence
  Description of Artificial Sequence: Synthetic oligonucleotide
aauauccccuccccucacu

SEQ ID NO: 688745 - RNA, 19 nt, Artificial Sequence
  Description of Artificial Sequence: Synthetic oligonucleotide
ggugaacggacacugcucc

SEQ ID NO: 688746 - RNA, 19 nt, Artificial Sequence
  Description of Artificial Sequence: Synthetic oligonucleotide
uaagacggauucagugucu

SEQ ID NO: 688747 - RNA, 19 nt, Artificial Sequence
  Description of Artificial Sequence: Synthetic oligonucleotide
aucggaagccuggauaaag

SEQ ID NO: 688748 - RNA, 19 nt, Artificial Sequence
  Description of Artificial Sequence: Synthetic oligonucleotide
acacguugucauaaauugg

SEQ ID NO: 688749 - RNA, 19 nt, Artificial Sequence
  Description of Artificial Sequence: Synthetic oligonucleotide
auaauuacucuuggcgugu

SEQ ID NO: 688750 - RNA, 19 nt, Artificial Sequence
  Description of Artificial Sequence: Synthetic oligonucleotide
ucuguacuauucuggucac

SEQ ID NO: 688751 - RNA, 19 nt, Artificial Sequence
  Description of Artificial Sequence: Synthetic oligonucleotide
cccuauagguuuauuuugg

SEQ ID NO: 688752 - RNA, 19 nt, Artificial Sequence
  Description of Artificial Sequence: Synthetic oligonucleotide
aguaccagugggcuguaaa

SEQ ID NO: 688753 - RNA, 19 nt, Artificial Sequence
  Description of Artificial Sequence: Synthetic oligonucleotide
uggaagcgggaaacgagac

SEQ ID NO: 688754 - RNA, 19 nt, Artificial Sequence
  Description of Artificial Sequence: Synthetic oligonucleotide
cucggcaauuaaaacuuuc

SEQ ID NO: 688755 - RNA, 19 nt, Artificial Sequence
  Description of Artificial Sequence: Synthetic oligonucleotide
uuuugauugugaagaccua

SEQ ID NO: 688756 - RNA, 19 nt, Artificial Sequence
  Description of Artificial Sequence: Synthetic oligonucleotide
agaccuaauuacaauaaua

SEQ ID NO: 688757 - RNA, 19 nt, Artificial Sequence
  Description of Artificial Sequence: Synthetic oligonucleotide
cuuuucucuuuaccccucc

SEQ ID NO: 688758 - RNA, 19 nt, Artificial Sequence
  Description of Artificial Sequence: Synthetic oligonucleotide
uuaaagcccuauagguuua

SEQ ID NO: 688759 - RNA, 19 nt, Artificial Sequence
  Description of Artificial Sequence: Synthetic oligonucleotide
gcuucuagcgcaucuggag

SEQ ID NO: 688760 - RNA, 19 nt, Artificial Sequence
  Description of Artificial Sequence: Synthetic oligonucleotide
gugaaugcaacucuucccu

SEQ ID NO: 688761 - RNA, 19 nt, Artificial Sequence
  Description of Artificial Sequence: Synthetic oligonucleotide
ugcagugaaugcaacucuu

SEQ ID NO: 688762 - RNA, 19 nt, Artificial Sequence
  Description of Artificial Sequence: Synthetic oligonucleotide
cuauaacaucggaagccug

SEQ ID NO: 688763 - RNA, 19 nt, Artificial Sequence
  Description of Artificial Sequence: Synthetic oligonucleotide
auaugggaucuguuagugu

SEQ ID NO: 688764 - RNA, 19 nt, Artificial Sequence
  Description of Artificial Sequence: Synthetic oligonucleotide
acguugucauaaauuggac

SEQ ID NO: 688765 - RNA, 19 nt, Artificial Sequence
  Description of Artificial Sequence: Synthetic oligonucleotide
caggcaauauccccucccc

SEQ ID NO: 688766 - RNA, 19 nt, Artificial Sequence
  Description of Artificial Sequence: Synthetic oligonucleotide
gaauaugggaucuguuagu

SEQ ID NO: 688767 - RNA, 19 nt, Artificial Sequence
  Description of Artificial Sequence: Synthetic oligonucleotide
ccugcuuaagaucaguauc

SEQ ID NO: 688768 - RNA, 19 nt, Artificial Sequence
  Description of Artificial Sequence: Synthetic oligonucleotide
auauccccuccccucacug

SEQ ID NO: 688769 - RNA, 19 nt, Artificial Sequence
  Description of Artificial Sequence: Synthetic oligonucleotide
uacccuuaggaaugacucu

SEQ ID NO: 688770 - RNA, 19 nt, Artificial Sequence
  Description of Artificial Sequence: Synthetic oligonucleotide
ucccuaggcaaccaacuuu

SEQ ID NO: 688771 - RNA, 19 nt, Artificial Sequence
  Description of Artificial Sequence: Synthetic oligonucleotide
agcuacaaacaagccagag

SEQ ID NO: 688772 - RNA, 19 nt, Artificial Sequence
  Description of Artificial Sequence: Synthetic oligonucleotide
ugaugguuguauagucauc

SEQ ID NO: 688773 - RNA, 19 nt, Artificial Sequence
  Description of Artificial Sequence: Synthetic oligonucleotide
uggugaacggacacugcuc

SEQ ID NO: 688774 - RNA, 19 nt, Artificial Sequence
  Description of Artificial Sequence: Synthetic oligonucleotide
ccccucaauaauuuucugg

SEQ ID NO: 688775 - RNA, 19 nt, Artificial Sequence
  Description of Artificial Sequence: Synthetic oligonucleotide
uggugauaacuguuuuggu

SEQ ID NO: 688776 - RNA, 19 nt, Artificial Sequence
  Description of Artificial Sequence: Synthetic oligonucleotide
uguuaagcuuuggugacuu

SEQ ID NO: 688777 - RNA, 19 nt, Artificial Sequence
  Description of Artificial Sequence: Synthetic oligonucleotide
aguuuaccaaguuccucaa

SEQ ID NO: 688778 - RNA, 19 nt, Artificial Sequence
  Description of Artificial Sequence: Synthetic oligonucleotide
ccacugaacuauaaccagg

SEQ ID NO: 688779 - RNA, 19 nt, Artificial Sequence
  Description of Artificial Sequence: Synthetic oligonucleotide
agaagcgaugucuucugua

SEQ ID NO: 688780 - RNA, 19 nt, Artificial Sequence
  Description of Artificial Sequence: Synthetic oligonucleotide
auaaccaggccaacuugag

SEQ ID NO: 688781 - RNA, 19 nt, Artificial Sequence
  Description of Artificial Sequence: Synthetic oligonucleotide
ugaaugcaacucuucccuc

SEQ ID NO: 688782 - RNA, 19 nt, Artificial Sequence
  Description of Artificial Sequence: Synthetic oligonucleotide
agugacaguuuaccaaguu

SEQ ID NO: 688783 - RNA, 19 nt, Artificial Sequence
  Description of Artificial Sequence: Synthetic oligonucleotide
gaagcgggaaacgagacau

SEQ ID NO: 688784 - RNA, 19 nt, Artificial Sequence
  Description of Artificial Sequence: Synthetic oligonucleotide
auaacaucggaagccugga

SEQ ID NO: 688785 - RNA, 19 nt, Artificial Sequence
  Description of Artificial Sequence: Synthetic oligonucleotide
ggaaaaucagacgagugaa

SEQ ID NO: 688786 - RNA, 19 nt, Artificial Sequence
  Description of Artificial Sequence: Synthetic oligonucleotide
gcccuauagguuuauuuug

SEQ ID NO: 688787 - RNA, 19 nt, Artificial Sequence
  Description of Artificial Sequence: Synthetic oligonucleotide
cugaugaugcuggaauaug

SEQ ID NO: 688788 - RNA, 19 nt, Artificial Sequence
  Description of Artificial Sequence: Synthetic oligonucleotide
uccauaacacguugucaua

SEQ ID NO: 688789 - RNA, 19 nt, Artificial Sequence
  Description of Artificial Sequence: Synthetic oligonucleotide
acuccauaacacguuguca

SEQ ID NO: 688790 - RNA, 19 nt, Artificial Sequence
  Description of Artificial Sequence: Synthetic oligonucleotide
auauucuaauaccccucaa

SEQ ID NO: 688791 - RNA, 19 nt, Artificial Sequence
  Description of Artificial Sequence: Synthetic oligonucleotide
ugcaccaagugaacagcau

SEQ ID NO: 688792 - RNA, 19 nt, Artificial Sequence
  Description of Artificial Sequence: Synthetic oligonucleotide
cuuaagcacaguagcuaca

SEQ ID NO: 688793 - RNA, 19 nt, Artificial Sequence
  Description of Artificial Sequence: Synthetic oligonucleotide
gcuguuaagcuuuggugac

SEQ ID NO: 688794 - RNA, 19 nt, Artificial Sequence
  Description of Artificial Sequence: Synthetic oligonucleotide
uccccagucagcucccacu

SEQ ID NO: 688795 - RNA, 19 nt, Artificial Sequence
  Description of Artificial Sequence: Synthetic oligonucleotide
ggagauaaugcaauccaca

SEQ ID NO: 688796 - RNA, 19 nt, Artificial Sequence
  Description of Artificial Sequence: Synthetic oligonucleotide
uccugaugaugcuggaaua

SEQ ID NO: 688797 - RNA, 19 nt, Artificial Sequence
  Description of Artificial Sequence: Synthetic oligonucleotide
gucacugaauuuagaaaca

SEQ ID NO: 688798 - RNA, 19 nt, Artificial Sequence
  Description of Artificial Sequence: Synthetic oligonucleotide
uugucauaaauuggaccuc

SEQ ID NO: 688799 - RNA, 19 nt, Artificial Sequence
  Description of Artificial Sequence: Synthetic oligonucleotide
ggcuuuacccuuaggaaug

SEQ ID NO: 688800 - RNA, 19 nt, Artificial Sequence
  Description of Artificial Sequence: Synthetic oligonucleotide
ccuauagguuuauuuuggc

SEQ ID NO: 688801 - RNA, 19 nt, Artificial Sequence
  Description of Artificial Sequence: Synthetic oligonucleotide
acugccagcaaugggguaa

SEQ ID NO: 688802 - RNA, 19 nt, Artificial Sequence
  Description of Artificial Sequence: Synthetic oligonucleotide
ggugaaggaacaauaagua

SEQ ID NO: 688803 - RNA, 19 nt, Artificial Sequence
  Description of Artificial Sequence: Synthetic oligonucleotide
acugugggacuugugguca

SEQ ID NO: 688804 - RNA, 19 nt, Artificial Sequence
  Description of Artificial Sequence: Synthetic oligonucleotide
ugaacggacacugcuccau

SEQ ID NO: 688805 - RNA, 19 nt, Artificial Sequence
  Description of Artificial Sequence: Synthetic oligonucleotide
agacgagugaagaucacua

SEQ ID NO: 688806 - RNA, 19 nt, Artificial Sequence
  Description of Artificial Sequence: Synthetic oligonucleotide
uucccuaggcaaccaacuu

SEQ ID NO: 688807 - RNA, 19 nt, Artificial Sequence
  Description of Artificial Sequence: Synthetic oligonucleotide
uuggcgugugacacugcac

SEQ ID NO: 688808 - RNA, 19 nt, Artificial Sequence
  Description of Artificial Sequence: Synthetic oligonucleotide
gguaagacggauucagugu

SEQ ID NO: 688809 - RNA, 19 nt, Artificial Sequence
  Description of Artificial Sequence: Synthetic oligonucleotide
cucuuggcgugugacacug

SEQ ID NO: 688810 - RNA, 19 nt, Artificial Sequence
  Description of Artificial Sequence: Synthetic oligonucleotide
cugggcaauugauauagua

SEQ ID NO: 688811 - RNA, 19 nt, Artificial Sequence
  Description of Artificial Sequence: Synthetic oligonucleotide
guacuauggugggagacuc

SEQ ID NO: 688812 - RNA, 19 nt, Artificial Sequence
  Description of Artificial Sequence: Synthetic oligonucleotide
gucauaaauuggaccucag

SEQ ID NO: 688813 - RNA, 19 nt, Artificial Sequence
  Description of Artificial Sequence: Synthetic oligonucleotide
guaguaccugcuucugaca

SEQ ID NO: 688814 - RNA, 19 nt, Artificial Sequence
  Description of Artificial Sequence: Synthetic oligonucleotide
agucuggacagaguacagu

SEQ ID NO: 688815 - RNA, 19 nt, Artificial Sequence
  Description of Artificial Sequence: Synthetic oligonucleotide
gugucuaacugcagagaug

SEQ ID NO: 688816 - RNA, 19 nt, Artificial Sequence
  Description of Artificial Sequence: Synthetic oligonucleotide
acuauggugggagacucua

SEQ ID NO: 688817 - RNA, 19 nt, Artificial Sequence
  Description of Artificial Sequence: Synthetic oligonucleotide
cauuaaagcccuauagguu

SEQ ID NO: 688818 - RNA, 19 nt, Artificial Sequence
  Description of Artificial Sequence: Synthetic oligonucleotide
aggcaauauccccuccccu

SEQ ID NO: 688819 - RNA, 19 nt, Artificial Sequence
  Description of Artificial Sequence: Synthetic oligonucleotide
guguacuauggugggagac

SEQ ID NO: 688820 - RNA, 19 nt, Artificial Sequence
  Description of Artificial Sequence: Synthetic oligonucleotide
acuauucuggucacugaau

SEQ ID NO: 688821 - RNA, 19 nt, Artificial Sequence
  Description of Artificial Sequence: Synthetic oligonucleotide
accccucaauaauuuucug

SEQ ID NO: 688822 - RNA, 19 nt, Artificial Sequence
  Description of Artificial Sequence: Synthetic oligonucleotide
uguuuuggugugguguguu

SEQ ID NO: 688823 - RNA, 19 nt, Artificial Sequence
  Description of Artificial Sequence: Synthetic oligonucleotide
uaucggcaauuucuuccuc

SEQ ID NO: 688824 - RNA, 19 nt, Artificial Sequence
  Description of Artificial Sequence: Synthetic oligonucleotide
cuaauaccccucaauaauu

SEQ ID NO: 688825 - RNA, 19 nt, Artificial Sequence
  Description of Artificial Sequence: Synthetic oligonucleotide
gaugguccaccauuuacuu

SEQ ID NO: 688826 - RNA, 19 nt, Artificial Sequence
  Description of Artificial Sequence: Synthetic oligonucleotide
guagguaccuggaguacca

SEQ ID NO: 688827 - RNA, 19 nt, Artificial Sequence
  Description of Artificial Sequence: Synthetic oligonucleotide
aagcgggaaacgagacauc

SEQ ID NO: 688828 - RNA, 19 nt, Artificial Sequence
  Description of Artificial Sequence: Synthetic oligonucleotide
acauaagcacuggcuaagu

SEQ ID NO: 688829 - RNA, 19 nt, Artificial Sequence
  Description of Artificial Sequence: Synthetic oligonucleotide
guggaagcgggaaacgaga

SEQ ID NO: 688830 - RNA, 19 nt, Artificial Sequence
  Description of Artificial Sequence: Synthetic oligonucleotide
agaucaguaucggcaauuu

SEQ ID NO: 688831 - RNA, 19 nt, Artificial Sequence
  Description of Artificial Sequence: Synthetic oligonucleotide
ucuagcgcaucuggaggcu

SEQ ID NO: 688832 - RNA, 19 nt, Artificial Sequence
  Description of Artificial Sequence: Synthetic oligonucleotide
uaacaggucucggcaauua

SEQ ID NO: 688833 - RNA, 19 nt, Artificial Sequence
  Description of Artificial Sequence: Synthetic oligonucleotide
agaucacuaccaacuguca

SEQ ID NO: 688834 - RNA, 19 nt, Artificial Sequence
  Description of Artificial Sequence: Synthetic oligonucleotide
cacuuguguucaacagaug

SEQ ID NO: 688835 - RNA, 19 nt, Artificial Sequence
  Description of Artificial Sequence: Synthetic oligonucleotide
acaggucucggcaauuaaa

SEQ ID NO: 688836 - RNA, 19 nt, Artificial Sequence
  Description of Artificial Sequence: Synthetic oligonucleotide
ucauaucauuaaagcccua

SEQ ID NO: 688837 - RNA, 19 nt, Artificial Sequence
  Description of Artificial Sequence: Synthetic oligonucleotide
gaacuauaaccaggccaac

SEQ ID NO: 688838 - RNA, 19 nt, Artificial Sequence
  Description of Artificial Sequence: Synthetic oligonucleotide
ggauacugaagaagcgaug

SEQ ID NO: 688839 - RNA, 19 nt, Artificial Sequence
  Description of Artificial Sequence: Synthetic oligonucleotide
ucuuggcgugugacacugc

SEQ ID NO: 688840 - RNA, 19 nt, Artificial Sequence
  Description of Artificial Sequence: Synthetic oligonucleotide
gugcauggcuuaagcacag

SEQ ID NO: 688841 - RNA, 19 nt, Artificial Sequence
  Description of Artificial Sequence: Synthetic oligonucleotide
aaacuacuggcuggugaua

SEQ ID NO: 688842 - RNA, 19 nt, Artificial Sequence
  Description of Artificial Sequence: Synthetic oligonucleotide
caccaagugaacagcauau

SEQ ID NO: 688843 - RNA, 19 nt, Artificial Sequence
  Description of Artificial Sequence: Synthetic oligonucleotide
gucucggcaauuaaaacuu

SEQ ID NO: 688844 - RNA, 19 nt, Artificial Sequence
  Description of Artificial Sequence: Synthetic oligonucleotide
gcauauucuaauaccccuc

SEQ ID NO: 688845 - RNA, 19 nt, Artificial Sequence
  Description of Artificial Sequence: Synthetic oligonucleotide
cugccuaaagaugauccaa

SEQ ID NO: 688846 - RNA, 19 nt, Artificial Sequence
  Description of Artificial Sequence: Synthetic oligonucleotide
agugggcuguaaauggaaa

SEQ ID NO: 688847 - RNA, 19 nt, Artificial Sequence
  Description of Artificial Sequence: Synthetic oligonucleotide
cauaucauuaaagcccuau

SEQ ID NO: 688848 - RNA, 19 nt, Artificial Sequence
  Description of Artificial Sequence: Synthetic oligonucleotide
acuuguggucagagugagg

SEQ ID NO: 688849 - RNA, 19 nt, Artificial Sequence
  Description of Artificial Sequence: Synthetic oligonucleotide
guaccagugggcuguaaau

SEQ ID NO: 688850 - RNA, 19 nt, Artificial Sequence
  Description of Artificial Sequence: Synthetic oligonucleotide
uaaagcccuauagguuuau

SEQ ID NO: 688851 - RNA, 19 nt, Artificial Sequence
  Description of Artificial Sequence: Synthetic oligonucleotide
ugugggacuuguggucaga

SEQ ID NO: 688852 - RNA, 19 nt, Artificial Sequence
  Description of Artificial Sequence: Synthetic oligonucleotide
accucagaugauauacuua

SEQ ID NO: 688853 - RNA, 19 nt, Artificial Sequence
  Description of Artificial Sequence: Synthetic oligonucleotide
cggaagccuggauaaagcc

SEQ ID NO: 688854 - RNA, 19 nt, Artificial Sequence
  Description of Artificial Sequence: Synthetic oligonucleotide
aagccuggauaaagccaug

SEQ ID NO: 688855 - RNA, 19 nt, Artificial Sequence
  Description of Artificial Sequence: Synthetic oligonucleotide
ccuaaagaugauccaauua

SEQ ID NO: 688856 - RNA, 19 nt, Artificial Sequence
  Description of Artificial Sequence: Synthetic oligonucleotide
ggcaauugauauaguaaaa

SEQ ID NO: 688857 - RNA, 19 nt, Artificial Sequence
  Description of Artificial Sequence: Synthetic oligonucleotide
caauuugccuuuugauggu

SEQ ID NO: 688858 - RNA, 19 nt, Artificial Sequence
  Description of Artificial Sequence: Synthetic oligonucleotide
gggaaacgagacauccuug

SEQ ID NO: 688859 - RNA, 19 nt, Artificial Sequence
  Description of Artificial Sequence: Synthetic oligonucleotide
ggaagcgggaaacgagaca

SEQ ID NO: 688860 - RNA, 19 nt, Artificial Sequence
  Description of Artificial Sequence: Synthetic oligonucleotide
guucccuaggcaaccaacu

SEQ ID NO: 688861 - RNA, 19 nt, Artificial Sequence
  Description of Artificial Sequence: Synthetic oligonucleotide
gugaacggacacugcucca

SEQ ID NO: 688862 - RNA, 19 nt, Artificial Sequence
  Description of Artificial Sequence: Synthetic oligonucleotide
gcaccaagugaacagcaua

SEQ ID NO: 688863 - RNA, 19 nt, Artificial Sequence
  Description of Artificial Sequence: Synthetic oligonucleotide
cuauggugggagacucuaa

SEQ ID NO: 688864 - RNA, 19 nt, Artificial Sequence
  Description of Artificial Sequence: Synthetic oligonucleotide
cagugucuaacugcagaga

SEQ ID NO: 688865 - RNA, 19 nt, Artificial Sequence
  Description of Artificial Sequence: Synthetic oligonucleotide
gggguaaccacugaacuau

SEQ ID NO: 688866 - RNA, 19 nt, Artificial Sequence
  Description of Artificial Sequence: Synthetic oligonucleotide
cuacuggcuggugauaacu

SEQ ID NO: 688867 - RNA, 19 nt, Artificial Sequence
  Description of Artificial Sequence: Synthetic oligonucleotide
cacuauucaucaguucugu

SEQ ID NO: 688868 - RNA, 19 nt, Artificial Sequence
  Description of Artificial Sequence: Synthetic oligonucleotide
gguguacuauggugggaga

SEQ ID NO: 688869 - RNA, 19 nt, Artificial Sequence
  Description of Artificial Sequence: Synthetic oligonucleotide
gugggagacucuaaauccu

SEQ ID NO: 688870 - RNA, 19 nt, Artificial Sequence
  Description of Artificial Sequence: Synthetic oligonucleotide
ccugagggagaagcuauac

SEQ ID NO: 688871 - RNA, 19 nt, Artificial Sequence
  Description of Artificial Sequence: Synthetic oligonucleotide
guuaagcuuuggugacuua

SEQ ID NO: 688872 - RNA, 19 nt, Artificial Sequence
  Description of Artificial Sequence: Synthetic oligonucleotide
gacaaucuagugacaguuu

SEQ ID NO: 688873 - RNA, 19 nt, Artificial Sequence
  Description of Artificial Sequence: Synthetic oligonucleotide
cuguaaacuacuggcuggu

SEQ ID NO: 688874 - RNA, 19 nt, Artificial Sequence
  Description of Artificial Sequence: Synthetic oligonucleotide
ccauauucccuuuaacaau

SEQ ID NO: 688875 - RNA, 19 nt, Artificial Sequence
  Description of Artificial Sequence: Synthetic oligonucleotide
ccauaacacguugucauaa

SEQ ID NO: 688876 - RNA, 19 nt, Artificial Sequence
  Description of Artificial Sequence: Synthetic oligonucleotide
cagacgagugaagaucacu

SEQ ID NO: 688877 - RNA, 19 nt, Artificial Sequence
  Description of Artificial Sequence: Synthetic oligonucleotide
gggauacugaagaagcgau

SEQ ID NO: 688878 - RNA, 19 nt, Artificial Sequence
  Description of Artificial Sequence: Synthetic oligonucleotide
ggcuaagucagcagguggu

SEQ ID NO: 688879 - RNA, 19 nt, Artificial Sequence
  Description of Artificial Sequence: Synthetic oligonucleotide
ccuaggcaaccaacuuuug

SEQ ID NO: 688880 - RNA, 19 nt, Artificial Sequence
  Description of Artificial Sequence: Synthetic oligonucleotide
ccccagucagcucccacug

SEQ ID NO: 688881 - RNA, 19 nt, Artificial Sequence
  Description of Artificial Sequence: Synthetic oligonucleotide
ggacugccuaaagaugauc

SEQ ID NO: 688882 - RNA, 19 nt, Artificial Sequence
  Description of Artificial Sequence: Synthetic oligonucleotide
gaaugacucuugauuuguu

SEQ ID NO: 688883 - RNA, 19 nt, Artificial Sequence
  Description of Artificial Sequence: Synthetic oligonucleotide
gcuggaauaugggaucugu

SEQ ID NO: 688884 - RNA, 19 nt, Artificial Sequence
  Description of Artificial Sequence: Synthetic oligonucleotide
cuccccgcuauuuggacuu

SEQ ID NO: 688885 - RNA, 19 nt, Artificial Sequence
  Description of Artificial Sequence: Synthetic oligonucleotide
gccuaaagaugauccaauu

SEQ ID NO: 688886 - RNA, 19 nt, Artificial Sequence
  Description of Artificial Sequence: Synthetic oligonucleotide
cuguuaagcuuuggugacu

SEQ ID NO: 688887 - RNA, 19 nt, Artificial Sequence
  Description of Artificial Sequence: Synthetic oligonucleotide
cccuaggcaaccaacuuuu

SEQ ID NO: 688888 - RNA, 19 nt, Artificial Sequence
  Description of Artificial Sequence: Synthetic oligonucleotide
ccacuccccgcuauuugga

SEQ ID NO: 688889 - RNA, 19 nt, Artificial Sequence
  Description of Artificial Sequence: Synthetic oligonucleotide
gaguaccagugggcuguaa

SEQ ID NO: 688890 - RNA, 19 nt, Artificial Sequence
  Description of Artificial Sequence: Synthetic oligonucleotide
ccugaugaugcuggaauau

SEQ ID NO: 688891 - RNA, 19 nt, Artificial Sequence
  Description of Artificial Sequence: Synthetic oligonucleotide
uccccgcuauuuggacuuu

SEQ ID NO: 688892 - RNA, 19 nt, Artificial Sequence
  Description of Artificial Sequence: Synthetic oligonucleotide
ggguaaccacugaacuaua

SEQ ID NO: 688893 - RNA, 19 nt, Artificial Sequence
  Description of Artificial Sequence: Synthetic oligonucleotide
cgggaaacgagacauccuu

SEQ ID NO: 688894 - RNA, 19 nt, Artificial Sequence
  Description of Artificial Sequence: Synthetic oligonucleotide
gccuugacuugagcuuguc

SEQ ID NO: 688895 - RNA, 19 nt, Artificial Sequence
  Description of Artificial Sequence: Synthetic oligonucleotide
gcgggaaacgagacauccu

SEQ ID NO: 688896 - RNA, 19 nt, Artificial Sequence
  Description of Artificial Sequence: Synthetic oligonucleotide
ccccgcuauuuggacuuuu

SEQ ID NO: 688897 - RNA, 19 nt, Artificial Sequence
  Description of Artificial Sequence: Synthetic oligonucleotide
aaacguaauggacucaucc

SEQ ID NO: 688898 - RNA, 19 nt, Artificial Sequence
  Description of Artificial Sequence: Synthetic oligonucleotide
gaaguuauuacauucuugc

SEQ ID NO: 688899 - RNA, 19 nt, Artificial Sequence
  Description of Artificial Sequence: Synthetic oligonucleotide
uuuaaaguaucuugaacgg

SEQ ID NO: 688900 - RNA, 19 nt, Artificial Sequence
  Description of Artificial Sequence: Synthetic oligonucleotide
aguuauuacauucuugcuc

SEQ ID NO: 688901 - RNA, 19 nt, Artificial Sequence
  Description of Artificial Sequence: Synthetic oligonucleotide
uuguaauuuauaauccgcg

SEQ ID NO: 688902 - RNA, 19 nt, Artificial Sequence
  Description of Artificial Sequence: Synthetic oligonucleotide
uguggagcgaauaaacugg

SEQ ID NO: 688903 - RNA, 19 nt, Artificial Sequence
  Description of Artificial Sequence: Synthetic oligonucleotide
ugagcgaucaagaagagaa

SEQ ID NO: 688904 - RNA, 19 nt, Artificial Sequence
  Description of Artificial Sequence: Synthetic oligonucleotide
guuauuacauucuugcucc

SEQ ID NO: 688905 - RNA, 19 nt, Artificial Sequence
  Description of Artificial Sequence: Synthetic oligonucleotide
ugauguauaucuuauucag

SEQ ID NO: 688906 - RNA, 19 nt, Artificial Sequence
  Description of Artificial Sequence: Synthetic oligonucleotide
ucgguaaagauggagaugg

SEQ ID NO: 688907 - RNA, 19 nt, Artificial Sequence
  Description of Artificial Sequence: Synthetic oligonucleotide
uguaacacgucauuuuggg

SEQ ID NO: 688908 - RNA, 19 nt, Artificial Sequence
  Description of Artificial Sequence: Synthetic oligonucleotide
uugguugugauguauaucu

SEQ ID NO: 688909 - RNA, 19 nt, Artificial Sequence
  Description of Artificial Sequence: Synthetic oligonucleotide
uguguaccgaacauaaucc

SEQ ID NO: 688910 - RNA, 19 nt, Artificial Sequence
  Description of Artificial Sequence: Synthetic oligonucleotide
uaauuuauaauccgcgaga

SEQ ID NO: 688911 - RNA, 19 nt, Artificial Sequence
  Description of Artificial Sequence: Synthetic oligonucleotide
uugauuaauccgcagcagg

SEQ ID NO: 688912 - RNA, 19 nt, Artificial Sequence
  Description of Artificial Sequence: Synthetic oligonucleotide
ugauuaauccgcagcaggg

SEQ ID NO: 688913 - RNA, 19 nt, Artificial Sequence
  Description of Artificial Sequence: Synthetic oligonucleotide
aaagcaacucgcuuaacca

SEQ ID NO: 688914 - RNA, 19 nt, Artificial Sequence
  Description of Artificial Sequence: Synthetic oligonucleotide
guuuucaugucauaccacg

SEQ ID NO: 688915 - RNA, 19 nt, Artificial Sequence
  Description of Artificial Sequence: Synthetic oligonucleotide
ucccgaauaauacugagac

SEQ ID NO: 688916 - RNA, 19 nt, Artificial Sequence
  Description of Artificial Sequence: Synthetic oligonucleotide
uucacaaucaugaagcaua

SEQ ID NO: 688917 - RNA, 19 nt, Artificial Sequence
  Description of Artificial Sequence: Synthetic oligonucleotide
auuugacuccaacuggucc

SEQ ID NO: 688918 - RNA, 19 nt, Artificial Sequence
  Description of Artificial Sequence: Synthetic oligonucleotide
cacguuguaauuuauaauc

SEQ ID NO: 688919 - RNA, 19 nt, Artificial Sequence
  Description of Artificial Sequence: Synthetic oligonucleotide
uacugagacacacugagga

SEQ ID NO: 688920 - RNA, 19 nt, Artificial Sequence
  Description of Artificial Sequence: Synthetic oligonucleotide
aauaucaggccucugugga

SEQ ID NO: 688921 - RNA, 19 nt, Artificial Sequence
  Description of Artificial Sequence: Synthetic oligonucleotide
uguuauacugaaguuuugg

SEQ ID NO: 688922 - RNA, 19 nt, Artificial Sequence
  Description of Artificial Sequence: Synthetic oligonucleotide
guaauuuauaauccgcgag

SEQ ID NO: 688923 - RNA, 19 nt, Artificial Sequence
  Description of Artificial Sequence: Synthetic oligonucleotide
ucaaugucggccaggagag

SEQ ID NO: 688924 - RNA, 19 nt, Artificial Sequence
  Description of Artificial Sequence: Synthetic oligonucleotide
uuuguuauacugaaguuuu

SEQ ID NO: 688925 - RNA, 19 nt, Artificial Sequence
  Description of Artificial Sequence: Synthetic oligonucleotide
ucaaucaacugccaggcga

SEQ ID NO: 688926 - RNA, 19 nt, Artificial Sequence
  Description of Artificial Sequence: Synthetic oligonucleotide
uaacacgucauuuuggggu

SEQ ID NO: 688927 - RNA, 19 nt, Artificial Sequence
  Description of Artificial Sequence: Synthetic oligonucleotide
gacggguugacccuuaugc

SEQ ID NO: 688928 - RNA, 19 nt, Artificial Sequence
  Description of Artificial Sequence: Synthetic oligonucleotide
accauggacggguugaccc

SEQ ID NO: 688929 - RNA, 19 nt, Artificial Sequence
  Description of Artificial Sequence: Synthetic oligonucleotide
aacucgcuuggcuuggccc

SEQ ID NO: 688930 - RNA, 19 nt, Artificial Sequence
  Description of Artificial Sequence: Synthetic oligonucleotide
aguuuggugaccauggacg

SEQ ID NO: 688931 - RNA, 19 nt, Artificial Sequence
  Description of Artificial Sequence: Synthetic oligonucleotide
aacugagcgaucaagaaga

SEQ ID NO: 688932 - RNA, 19 nt, Artificial Sequence
  Description of Artificial Sequence: Synthetic oligonucleotide
uguaauuuauaauccgcga

SEQ ID NO: 688933 - RNA, 19 nt, Artificial Sequence
  Description of Artificial Sequence: Synthetic oligonucleotide
uggucuauguaacacguca

SEQ ID NO: 688934 - RNA, 19 nt, Artificial Sequence
  Description of Artificial Sequence: Synthetic oligonucleotide
uauucgcuugauuaauccg

SEQ ID NO: 688935 - RNA, 19 nt, Artificial Sequence
  Description of Artificial Sequence: Synthetic oligonucleotide
acguaauggacucauccac

SEQ ID NO: 688936 - RNA, 19 nt, Artificial Sequence
  Description of Artificial Sequence: Synthetic oligonucleotide
ugaauaucaggccucugug

SEQ ID NO: 688937 - RNA, 19 nt, Artificial Sequence
  Description of Artificial Sequence: Synthetic oligonucleotide
auucgcuugauuaauccgc

SEQ ID NO: 688938 - RNA, 19 nt, Artificial Sequence
  Description of Artificial Sequence: Synthetic oligonucleotide
uuggcaaccucguagcggg

SEQ ID NO: 688939 - RNA, 19 nt, Artificial Sequence
  Description of Artificial Sequence: Synthetic oligonucleotide
aacacgucauuuugggguc

SEQ ID NO: 688940 - RNA, 19 nt, Artificial Sequence
  Description of Artificial Sequence: Synthetic oligonucleotide
uugaauaucaggccucugu

SEQ ID NO: 688941 - RNA, 19 nt, Artificial Sequence
  Description of Artificial Sequence: Synthetic oligonucleotide
gaauaucaggccucugugg

SEQ ID NO: 688942 - RNA, 19 nt, Artificial Sequence
  Description of Artificial Sequence: Synthetic oligonucleotide
aauccgcgagacuuccucc

SEQ ID NO: 688943 - RNA, 19 nt, Artificial Sequence
  Description of Artificial Sequence: Synthetic oligonucleotide
accaauaaacguaauggac

SEQ ID NO: 688944 - RNA, 19 nt, Artificial Sequence
  Description of Artificial Sequence: Synthetic oligonucleotide
aacguaauggacucaucca

SEQ ID NO: 688945 - RNA, 19 nt, Artificial Sequence
  Description of Artificial Sequence: Synthetic oligonucleotide
aagcaacucgcuuaaccag

SEQ ID NO: 688946 - RNA, 19 nt, Artificial Sequence
  Description of Artificial Sequence: Synthetic oligonucleotide
uggacaaacuugcagauuu

SEQ ID NO: 688947 - RNA, 19 nt, Artificial Sequence
  Description of Artificial Sequence: Synthetic oligonucleotide
aacucgcuuaaccagcucu

SEQ ID NO: 688948 - RNA, 19 nt, Artificial Sequence
  Description of Artificial Sequence: Synthetic oligonucleotide
cuauucgcuugauuaaucc

SEQ ID NO: 688949 - RNA, 19 nt, Artificial Sequence
  Description of Artificial Sequence: Synthetic oligonucleotide
ugggaugaucugcagaacc

SEQ ID NO: 688950 - RNA, 19 nt, Artificial Sequence
  Description of Artificial Sequence: Synthetic oligonucleotide
uggguugugaaugccagcg

SEQ ID NO: 688951 - RNA, 19 nt, Artificial Sequence
  Description of Artificial Sequence: Synthetic oligonucleotide
uaggguaagcgcuugguug

SEQ ID NO: 688952 - RNA, 19 nt, Artificial Sequence
  Description of Artificial Sequence: Synthetic oligonucleotide
auaaacuggccaaucaggg

SEQ ID NO: 688953 - RNA, 19 nt, Artificial Sequence
  Description of Artificial Sequence: Synthetic oligonucleotide
ucgaccaauaaacguaaug

SEQ ID NO: 688954 - RNA, 19 nt, Artificial Sequence
  Description of Artificial Sequence: Synthetic oligonucleotide
aaauaggguaagcgcuugg

SEQ ID NO: 688955 - RNA, 19 nt, Artificial Sequence
  Description of Artificial Sequence: Synthetic oligonucleotide
ugacgaccgggaaauaggg

SEQ ID NO: 688956 - RNA, 19 nt, Artificial Sequence
  Description of Artificial Sequence: Synthetic oligonucleotide
uccuuauuccaucuuccag

SEQ ID NO: 688957 - RNA, 19 nt, Artificial Sequence
  Description of Artificial Sequence: Synthetic oligonucleotide
cauuguggagcgaauaaac

SEQ ID NO: 688958 - RNA, 19 nt, Artificial Sequence
  Description of Artificial Sequence: Synthetic oligonucleotide
uuuuguuauacugaaguuu

SEQ ID NO: 688959 - RNA, 19 nt, Artificial Sequence
  Description of Artificial Sequence: Synthetic oligonucleotide
agguaagcgguccaaaucu

SEQ ID NO: 688960 - RNA, 19 nt, Artificial Sequence
  Description of Artificial Sequence: Synthetic oligonucleotide
ugucaaucaacugccaggc

SEQ ID NO: 688961 - RNA, 19 nt, Artificial Sequence
  Description of Artificial Sequence: Synthetic oligonucleotide
gaugcugacguaguccugg

SEQ ID NO: 688962 - RNA, 19 nt, Artificial Sequence
  Description of Artificial Sequence: Synthetic oligonucleotide
uucaggagagacgugaaca

SEQ ID NO: 688963 - RNA, 19 nt, Artificial Sequence
  Description of Artificial Sequence: Synthetic oligonucleotide
uguucuuaagaaguuauua

SEQ ID NO: 688964 - RNA, 19 nt, Artificial Sequence
  Description of Artificial Sequence: Synthetic oligonucleotide
aaaguugacgaccgggaaa

SEQ ID NO: 688965 - RNA, 19 nt, Artificial Sequence
  Description of Artificial Sequence: Synthetic oligonucleotide
ugcagauuugacuccaacu

SEQ ID NO: 688966 - RNA, 19 nt, Artificial Sequence
  Description of Artificial Sequence: Synthetic oligonucleotide
gacuguucggaacucauca

SEQ ID NO: 688967 - RNA, 19 nt, Artificial Sequence
  Description of Artificial Sequence: Synthetic oligonucleotide
gauuaauccgcagcagggg

SEQ ID NO: 688968 - RNA, 19 nt, Artificial Sequence
  Description of Artificial Sequence: Synthetic oligonucleotide
cagauuugacuccaacugg

SEQ ID NO: 688969 - RNA, 19 nt, Artificial Sequence
  Description of Artificial Sequence: Synthetic oligonucleotide
agagucgaccaauaaacgu

SEQ ID NO: 688970 - RNA, 19 nt, Artificial Sequence
  Description of Artificial Sequence: Synthetic oligonucleotide
guaauggacucauccacag

SEQ ID NO: 688971 - RNA, 19 nt, Artificial Sequence
  Description of Artificial Sequence: Synthetic oligonucleotide
augcuuuccugcaugaugg

SEQ ID NO: 688972 - RNA, 19 nt, Artificial Sequence
  Description of Artificial Sequence: Synthetic oligonucleotide
agggcuauucgcuugauua

SEQ ID NO: 688973 - RNA, 19 nt, Artificial Sequence
  Description of Artificial Sequence: Synthetic oligonucleotide
gaccaauaaacguaaugga

SEQ ID NO: 688974 - RNA, 19 nt, Artificial Sequence
  Description of Artificial Sequence: Synthetic oligonucleotide
aacccauccaugguggcuc

SEQ ID NO: 688975 - RNA, 19 nt, Artificial Sequence
  Description of Artificial Sequence: Synthetic oligonucleotide
augcccucgguaaagaugg

SEQ ID NO: 688976 - RNA, 19 nt, Artificial Sequence
  Description of Artificial Sequence: Synthetic oligonucleotide
uguaccgaacauaauccuc

SEQ ID NO: 688977 - RNA, 19 nt, Artificial Sequence
  Description of Artificial Sequence: Synthetic oligonucleotide
aagcgcuugguugugaugu

SEQ ID NO: 688978 - RNA, 19 nt, Artificial Sequence
  Description of Artificial Sequence: Synthetic oligonucleotide
auaccacguguucagcugg

SEQ ID NO: 688979 - RNA, 19 nt, Artificial Sequence
  Description of Artificial Sequence: Synthetic oligonucleotide
agagacgugaacaugcucu

SEQ ID NO: 688980 - RNA, 19 nt, Artificial Sequence
  Description of Artificial Sequence: Synthetic oligonucleotide
ucuugcuccacguuguaau

SEQ ID NO: 688981 - RNA, 19 nt, Artificial Sequence
  Description of Artificial Sequence: Synthetic oligonucleotide
uugagauuguccagagcug

SEQ ID NO: 688982 - RNA, 19 nt, Artificial Sequence
  Description of Artificial Sequence: Synthetic oligonucleotide
ucucccgaauaauacugag

SEQ ID NO: 688983 - RNA, 19 nt, Artificial Sequence
  Description of Artificial Sequence: Synthetic oligonucleotide
guaacacgucauuuugggg

SEQ ID NO: 688984 - RNA, 19 nt, Artificial Sequence
  Description of Artificial Sequence: Synthetic oligonucleotide
gauauugaugguccugauc

SEQ ID NO: 688985 - RNA, 19 nt, Artificial Sequence
  Description of Artificial Sequence: Synthetic oligonucleotide
auucaguggguugugaaug

SEQ ID NO: 688986 - RNA, 19 nt, Artificial Sequence
  Description of Artificial Sequence: Synthetic oligonucleotide
agcaacucgcuuaaccagc

SEQ ID NO: 688987 - RNA, 19 nt, Artificial Sequence
  Description of Artificial Sequence: Synthetic oligonucleotide
acaaacuugcagauuugac

SEQ ID NO: 688988 - RNA, 19 nt, Artificial Sequence
  Description of Artificial Sequence: Synthetic oligonucleotide
uccauuguggagcgaauaa

SEQ ID NO: 688989 - RNA, 19 nt, Artificial Sequence
  Description of Artificial Sequence: Synthetic oligonucleotide
uuacauucuugcuccacgu

SEQ ID NO: 688990 - RNA, 19 nt, Artificial Sequence
  Description of Artificial Sequence: Synthetic oligonucleotide
auagugggcuucaaugucg

SEQ ID NO: 688991 - RNA, 19 nt, Artificial Sequence
  Description of Artificial Sequence: Synthetic oligonucleotide
cagagucgaccaauaaacg

SEQ ID NO: 688992 - RNA, 19 nt, Artificial Sequence
  Description of Artificial Sequence: Synthetic oligonucleotide
aggagagccuuauugagau

SEQ ID NO: 688993 - RNA, 19 nt, Artificial Sequence
  Description of Artificial Sequence: Synthetic oligonucleotide
uauaauccgcgagacuucc

SEQ ID NO: 688994 - RNA, 19 nt, Artificial Sequence
  Description of Artificial Sequence: Synthetic oligonucleotide
aaguugacgaccgggaaau

SEQ ID NO: 688995 - RNA, 19 nt, Artificial Sequence
  Description of Artificial Sequence: Synthetic oligonucleotide
aaaucgacaggaagaguug

SEQ ID NO: 688996 - RNA, 19 nt, Artificial Sequence
  Description of Artificial Sequence: Synthetic oligonucleotide
uguaccgcgaauggaacug

SEQ ID NO: 688997 - RNA, 19 nt, Artificial Sequence
  Description of Artificial Sequence: Synthetic oligonucleotide
ggauccaccuuaaugaugc

SEQ ID NO: 688998 - RNA, 19 nt, Artificial Sequence
  Description of Artificial Sequence: Synthetic oligonucleotide
uuauaauccgcgagacuuc

SEQ ID NO: 688999 - RNA, 19 nt, Artificial Sequence
  Description of Artificial Sequence: Synthetic oligonucleotide
ggaagaguugagcucauug

SEQ ID NO: 689000 - RNA, 19 nt, Artificial Sequence
  Description of Artificial Sequence: Synthetic oligonucleotide
ucggcgagaaacuggacaa

SEQ ID NO: 689001 - RNA, 19 nt, Artificial Sequence
  Description of Artificial Sequence: Synthetic oligonucleotide
uaauccgcgagacuuccuc

SEQ ID NO: 689002 - RNA, 19 nt, Artificial Sequence
  Description of Artificial Sequence: Synthetic oligonucleotide
agcuugggcaucaacucgc

SEQ ID NO: 689003 - RNA, 19 nt, Artificial Sequence
  Description of Artificial Sequence: Synthetic oligonucleotide
uucaguggguugugaaugc

SEQ ID NO: 689004 - RNA, 19 nt, Artificial Sequence
  Description of Artificial Sequence: Synthetic oligonucleotide
uauucaguggguugugaau

SEQ ID NO: 689005 - RNA, 19 nt, Artificial Sequence
  Description of Artificial Sequence: Synthetic oligonucleotide
uguggagggcgaaagcaac

SEQ ID NO: 689006 - RNA, 19 nt, Artificial Sequence
  Description of Artificial Sequence: Synthetic oligonucleotide
cuguauuagcugcacaguc

SEQ ID NO: 689007 - RNA, 19 nt, Artificial Sequence
  Description of Artificial Sequence: Synthetic oligonucleotide
gaggcaagcuugaggaacg

SEQ ID NO: 689008 - RNA, 19 nt, Artificial Sequence
  Description of Artificial Sequence: Synthetic oligonucleotide
ugauggcggaaagauaagc

SEQ ID NO: 689009 - RNA, 19 nt, Artificial Sequence
  Description of Artificial Sequence: Synthetic oligonucleotide
uccugaucauuugauggag

SEQ ID NO: 689010 - RNA, 19 nt, Artificial Sequence
  Description of Artificial Sequence: Synthetic oligonucleotide
uaucucucaggauaauuuu

SEQ ID NO: 689011 - RNA, 19 nt, Artificial Sequence
  Description of Artificial Sequence: Synthetic oligonucleotide
ugacccuuaugcuuuccug

SEQ ID NO: 689012 - RNA, 19 nt, Artificial Sequence
  Description of Artificial Sequence: Synthetic oligonucleotide
caguccugaaucuuuguuc

SEQ ID NO: 689013 - RNA, 19 nt, Artificial Sequence
  Description of Artificial Sequence: Synthetic oligonucleotide
cauaggacaccaguucucc

SEQ ID NO: 689014 - RNA, 19 nt, Artificial Sequence
  Description of Artificial Sequence: Synthetic oligonucleotide
auaaacguaauggacucau

SEQ ID NO: 689015 - RNA, 19 nt, Artificial Sequence
  Description of Artificial Sequence: Synthetic oligonucleotide
cauaccacguguucagcug

SEQ ID NO: 689016 - RNA, 19 nt, Artificial Sequence
  Description of Artificial Sequence: Synthetic oligonucleotide
auauaagaguguguugucu

SEQ ID NO: 689017 - RNA, 19 nt, Artificial Sequence
  Description of Artificial Sequence: Synthetic oligonucleotide
aacuuucggggugucggcg

SEQ ID NO: 689018 - RNA, 19 nt, Artificial Sequence
  Description of Artificial Sequence: Synthetic oligonucleotide
ccgaacauaauccuccagg

SEQ ID NO: 689019 - RNA, 19 nt, Artificial Sequence
  Description of Artificial Sequence: Synthetic oligonucleotide
uguguaccgcgaauggaac

SEQ ID NO: 689020 - RNA, 19 nt, Artificial Sequence
  Description of Artificial Sequence: Synthetic oligonucleotide
aaucgacaggaagaguuga

SEQ ID NO: 689021 - RNA, 19 nt, Artificial Sequence
  Description of Artificial Sequence: Synthetic oligonucleotide
gaugcccucgguaaagaug

SEQ ID NO: 689022 - RNA, 19 nt, Artificial Sequence
  Description of Artificial Sequence: Synthetic oligonucleotide
ggaacugcuguguguaccg

SEQ ID NO: 689023 - RNA, 19 nt, Artificial Sequence
  Description of Artificial Sequence: Synthetic oligonucleotide
uucucccgaauaauacuga

SEQ ID NO: 689024 - RNA, 19 nt, Artificial Sequence
  Description of Artificial Sequence: Synthetic oligonucleotide
aacuuaggaaugggaaugu

SEQ ID NO: 689025 - RNA, 19 nt, Artificial Sequence
  Description of Artificial Sequence: Synthetic oligonucleotide
ucgacaggaagaguugagc

SEQ ID NO: 689026 - RNA, 19 nt, Artificial Sequence
  Description of Artificial Sequence: Synthetic oligonucleotide
aggguaagcgcuugguugu

SEQ ID NO: 689027 - RNA, 19 nt, Artificial Sequence
  Description of Artificial Sequence: Synthetic oligonucleotide
uuaauccgcagcaggggaa

SEQ ID NO: 689028 - RNA, 19 nt, Artificial Sequence
  Description of Artificial Sequence: Synthetic oligonucleotide
guugacgaccgggaaauag

SEQ ID NO: 689029 - RNA, 19 nt, Artificial Sequence
  Description of Artificial Sequence: Synthetic oligonucleotide
cgaccaauaaacguaaugg

SEQ ID NO: 689030 - RNA, 19 nt, Artificial Sequence
  Description of Artificial Sequence: Synthetic oligonucleotide
gaacaugcucucugggaug

SEQ ID NO: 689031 - RNA, 19 nt, Artificial Sequence
  Description of Artificial Sequence: Synthetic oligonucleotide
acauaauccuccaggaaca

SEQ ID NO: 689032 - RNA, 19 nt, Artificial Sequence
  Description of Artificial Sequence: Synthetic oligonucleotide
uggcggaaagauaagcuuu

SEQ ID NO: 689033 - RNA, 19 nt, Artificial Sequence
  Description of Artificial Sequence: Synthetic oligonucleotide
acgguucuaucucucagga

SEQ ID NO: 689034 - RNA, 19 nt, Artificial Sequence
  Description of Artificial Sequence: Synthetic oligonucleotide
gcagagucgaccaauaaac

SEQ ID NO: 689035 - RNA, 19 nt, Artificial Sequence
  Description of Artificial Sequence: Synthetic oligonucleotide
cugaucauuugauggagga

SEQ ID NO: 689036 - RNA, 19 nt, Artificial Sequence
  Description of Artificial Sequence: Synthetic oligonucleotide
cuugauuaauccgcagcag

SEQ ID NO: 689037 - RNA, 19 nt, Artificial Sequence
  Description of Artificial Sequence: Synthetic oligonucleotide
ggauguacucaaaggaccg

SEQ ID NO: 689038 - RNA, 19 nt, Artificial Sequence
  Description of Artificial Sequence: Synthetic oligonucleotide
acgaccgggaaauagggua

SEQ ID NO: 689039 - RNA, 19 nt, Artificial Sequence
  Description of Artificial Sequence: Synthetic oligonucleotide
caaaggaccgguggaaccc

SEQ ID NO: 689040 - RNA, 19 nt, Artificial Sequence
  Description of Artificial Sequence: Synthetic oligonucleotide
cuguguguaccgcgaaugg

SEQ ID NO: 689041 - RNA, 19 nt, Artificial Sequence
  Description of Artificial Sequence: Synthetic oligonucleotide
acaggcgcgaacuuaggaa

SEQ ID NO: 689042 - RNA, 19 nt, Artificial Sequence
  Description of Artificial Sequence: Synthetic oligonucleotide
aucggccggcaucucaggc

SEQ ID NO: 689043 - RNA, 19 nt, Artificial Sequence
  Description of Artificial Sequence: Synthetic oligonucleotide
gguugugaaugccagcggc

SEQ ID NO: 689044 - RNA, 19 nt, Artificial Sequence
  Description of Artificial Sequence: Synthetic oligonucleotide
ucaucaagaugcccucggu

SEQ ID NO: 689045 - RNA, 19 nt, Artificial Sequence
  Description of Artificial Sequence: Synthetic oligonucleotide
gagggcgaaagcaacucgc

SEQ ID NO: 689046 - RNA, 19 nt, Artificial Sequence
  Description of Artificial Sequence: Synthetic oligonucleotide
aguggguugugaaugccag

SEQ ID NO: 689047 - RNA, 19 nt, Artificial Sequence
  Description of Artificial Sequence: Synthetic oligonucleotide
agaaccuuucucacauagg

SEQ ID NO: 689048 - RNA, 19 nt, Artificial Sequence
  Description of Artificial Sequence: Synthetic oligonucleotide
caaaucgacaggaagaguu

SEQ ID NO: 689049 - RNA, 19 nt, Artificial Sequence
  Description of Artificial Sequence: Synthetic oligonucleotide
uaauccgcagcaggggaag

SEQ ID NO: 689050 - RNA, 19 nt, Artificial Sequence
  Description of Artificial Sequence: Synthetic oligonucleotide
gagcuuuguguaccgaaca

SEQ ID NO: 689051 - RNA, 19 nt, Artificial Sequence
  Description of Artificial Sequence: Synthetic oligonucleotide
agagucggcugcuggucac

SEQ ID NO: 689052 - RNA, 19 nt, Artificial Sequence
  Description of Artificial Sequence: Synthetic oligonucleotide
agggucggcagguuuccgg

SEQ ID NO: 689053 - RNA, 19 nt, Artificial Sequence
  Description of Artificial Sequence: Synthetic oligonucleotide
uugaacgguucuaucucuc

SEQ ID NO: 689054 - RNA, 19 nt, Artificial Sequence
  Description of Artificial Sequence: Synthetic oligonucleotide
uaucuugaacgguucuauc

SEQ ID NO: 689055 - RNA, 19 nt, Artificial Sequence
  Description of Artificial Sequence: Synthetic oligonucleotide
gcuugauuaauccgcagca

SEQ ID NO: 689056 - RNA, 19 nt, Artificial Sequence
  Description of Artificial Sequence: Synthetic oligonucleotide
gacaaacuugcagauuuga

SEQ ID NO: 689057 - RNA, 19 nt, Artificial Sequence
  Description of Artificial Sequence: Synthetic oligonucleotide
acauacugaggaaauucug

SEQ ID NO: 689058 - RNA, 19 nt, Artificial Sequence
  Description of Artificial Sequence: Synthetic oligonucleotide
acauaggacaccaguucuc

SEQ ID NO: 689059 - RNA, 19 nt, Artificial Sequence
  Description of Artificial Sequence: Synthetic oligonucleotide
uuacuugaauuugcaacaa

SEQ ID NO: 689060 - RNA, 19 nt, Artificial Sequence
  Description of Artificial Sequence: Synthetic oligonucleotide
aagauaagcuuuacuugaa

SEQ ID NO: 689061 - RNA, 19 nt, Artificial Sequence
  Description of Artificial Sequence: Synthetic oligonucleotide
ggugauggcggaaagauaa

SEQ ID NO: 689062 - RNA, 19 nt, Artificial Sequence
  Description of Artificial Sequence: Synthetic oligonucleotide
cuuggugaguuuucauguc

SEQ ID NO: 689063 - RNA, 19 nt, Artificial Sequence
  Description of Artificial Sequence: Synthetic oligonucleotide
uuauuacauucuugcucca

SEQ ID NO: 689064 - RNA, 19 nt, Artificial Sequence
  Description of Artificial Sequence: Synthetic oligonucleotide
uguguguaccgcgaaugga

SEQ ID NO: 689065 - RNA, 19 nt, Artificial Sequence
  Description of Artificial Sequence: Synthetic oligonucleotide
uaaacguaauggacucauc

SEQ ID NO: 689066 - RNA, 19 nt, Artificial Sequence
  Description of Artificial Sequence: Synthetic oligonucleotide
ucacaggacuguucggaac

SEQ ID NO: 689067 - RNA, 19 nt, Artificial Sequence
  Description of Artificial Sequence: Synthetic oligonucleotide
gagucgaccaauaaacgua

SEQ ID NO: 689068 - RNA, 19 nt, Artificial Sequence
  Description of Artificial Sequence: Synthetic oligonucleotide
ugaagcauagaagccuguc

SEQ ID NO: 689069 - RNA, 19 nt, Artificial Sequence
  Description of Artificial Sequence: Synthetic oligonucleotide
ucauuggcgaucugcuguc

SEQ ID NO: 689070 - RNA, 19 nt, Artificial Sequence
  Description of Artificial Sequence: Synthetic oligonucleotide
ugcaucugcccaaccuuca

SEQ ID NO: 689071 - RNA, 19 nt, Artificial Sequence
  Description of Artificial Sequence: Synthetic oligonucleotide
gucggcgagaaacuggaca

SEQ ID NO: 689072 - RNA, 19 nt, Artificial Sequence
  Description of Artificial Sequence: Synthetic oligonucleotide
cugagcguagucccgcagc

SEQ ID NO: 689073 - RNA, 19 nt, Artificial Sequence
  Description of Artificial Sequence: Synthetic oligonucleotide
ccgauagugggcuucaaug

SEQ ID NO: 689074 - RNA, 19 nt, Artificial Sequence
  Description of Artificial Sequence: Synthetic oligonucleotide
acccuuaugcuuuccugca

SEQ ID NO: 689075 - RNA, 19 nt, Artificial Sequence
  Description of Artificial Sequence: Synthetic oligonucleotide
ucuaucucucaggauaauu

SEQ ID NO: 689076 - RNA, 19 nt, Artificial Sequence
  Description of Artificial Sequence: Synthetic oligonucleotide
gagacgugaacaugcucuc

SEQ ID NO: 689077 - RNA, 19 nt, Artificial Sequence
  Description of Artificial Sequence: Synthetic oligonucleotide
ucgcuuaaccagcucuuuc

SEQ ID NO: 689078 - RNA, 19 nt, Artificial Sequence
  Description of Artificial Sequence: Synthetic oligonucleotide
ugaucauuugauggaggaa

SEQ ID NO: 689079 - RNA, 19 nt, Artificial Sequence
  Description of Artificial Sequence: Synthetic oligonucleotide
gacguaguccuggauguac

SEQ ID NO: 689080 - RNA, 19 nt, Artificial Sequence
  Description of Artificial Sequence: Synthetic oligonucleotide
uaagcgcuugguugugaug

SEQ ID NO: 689081 - RNA, 19 nt, Artificial Sequence
  Description of Artificial Sequence: Synthetic oligonucleotide
accgguggaacccauccau

SEQ ID NO: 689082 - RNA, 19 nt, Artificial Sequence
  Description of Artificial Sequence: Synthetic oligonucleotide
gucaaucaacugccaggcg

SEQ ID NO: 689083 - RNA, 19 nt, Artificial Sequence
  Description of Artificial Sequence: Synthetic oligonucleotide
accgaacauaauccuccag

SEQ ID NO: 689084 - RNA, 19 nt, Artificial Sequence
  Description of Artificial Sequence: Synthetic oligonucleotide
auaggguaagcgcuugguu

SEQ ID NO: 689085 - RNA, 19 nt, Artificial Sequence
  Description of Artificial Sequence: Synthetic oligonucleotide
aaucaacugccaggcgaag

SEQ ID NO: 689086 - RNA, 19 nt, Artificial Sequence
  Description of Artificial Sequence: Synthetic oligonucleotide
acggguugacccuuaugcu

SEQ ID NO: 689087 - RNA, 19 nt, Artificial Sequence
  Description of Artificial Sequence: Synthetic oligonucleotide
cugcccaaccuucauuaug

SEQ ID NO: 689088 - RNA, 19 nt, Artificial Sequence
  Description of Artificial Sequence: Synthetic oligonucleotide
ucgcuugauuaauccgcag

SEQ ID NO: 689089 - RNA, 19 nt, Artificial Sequence
  Description of Artificial Sequence: Synthetic oligonucleotide
ugauauugaugguccugau

SEQ ID NO: 689090 - RNA, 19 nt, Artificial Sequence
  Description of Artificial Sequence: Synthetic oligonucleotide
acggaagcagaaggaaguc

SEQ ID NO: 689091 - RNA, 19 nt, Artificial Sequence
  Description of Artificial Sequence: Synthetic oligonucleotide
aucaacucgcuuggcuugg

SEQ ID NO: 689092 - RNA, 19 nt, Artificial Sequence
  Description of Artificial Sequence: Synthetic oligonucleotide
accgggaaauaggguaagc

SEQ ID NO: 689093 - RNA, 19 nt, Artificial Sequence
  Description of Artificial Sequence: Synthetic oligonucleotide
agggucguuuucaucauca

SEQ ID NO: 689094 - RNA, 19 nt, Artificial Sequence
  Description of Artificial Sequence: Synthetic oligonucleotide
aauccgcagcaggggaagg

SEQ ID NO: 689095 - RNA, 19 nt, Artificial Sequence
  Description of Artificial Sequence: Synthetic oligonucleotide
caucaucaagaugcccucg

SEQ ID NO: 689096 - RNA, 19 nt, Artificial Sequence
  Description of Artificial Sequence: Synthetic oligonucleotide
ucggccggcaucucaggca

SEQ ID NO: 689097 - RNA, 19 nt, Artificial Sequence
  Description of Artificial Sequence: Synthetic oligonucleotide
cuaucucucaggauaauuu

SEQ ID NO: 689098 - RNA, 19 nt, Artificial Sequence
  Description of Artificial Sequence: Synthetic oligonucleotide
gguccaaagccuguauuag

SEQ ID NO: 689099 - RNA, 19 nt, Artificial Sequence
  Description of Artificial Sequence: Synthetic oligonucleotide
aaaggaccgguggaaccca

SEQ ID NO: 689100 - RNA, 19 nt, Artificial Sequence
  Description of Artificial Sequence: Synthetic oligonucleotide
caaucaacugccaggcgaa

SEQ ID NO: 689101 - RNA, 19 nt, Artificial Sequence
  Description of Artificial Sequence: Synthetic oligonucleotide
ugugaaugccagcggccuc

SEQ ID NO: 689102 - RNA, 19 nt, Artificial Sequence
  Description of Artificial Sequence: Synthetic oligonucleotide
cagcccauagaugcugacg

SEQ ID NO: 689103 - RNA, 19 nt, Artificial Sequence
  Description of Artificial Sequence: Synthetic oligonucleotide
ggagggcgaaagcaacucg

SEQ ID NO: 689104 - RNA, 19 nt, Artificial Sequence
  Description of Artificial Sequence: Synthetic oligonucleotide
uccggcagaccaugccuag

SEQ ID NO: 689105 - RNA, 19 nt, Artificial Sequence
  Description of Artificial Sequence: Synthetic oligonucleotide
acuuaggaaugggaaugug

SEQ ID NO: 689106 - RNA, 19 nt, Artificial Sequence
  Description of Artificial Sequence: Synthetic oligonucleotide
gaagagucggcugcugguc

SEQ ID NO: 689107 - RNA, 19 nt, Artificial Sequence
  Description of Artificial Sequence: Synthetic oligonucleotide
ggaccgguggaacccaucc

SEQ ID NO: 689108 - RNA, 19 nt, Artificial Sequence
  Description of Artificial Sequence: Synthetic oligonucleotide
aguuaggcacaugggccuc

SEQ ID NO: 689109 - RNA, 19 nt, Artificial Sequence
  Description of Artificial Sequence: Synthetic oligonucleotide
ccgaggguugaauaucagg

SEQ ID NO: 689110 - RNA, 19 nt, Artificial Sequence
  Description of Artificial Sequence: Synthetic oligonucleotide
cgggaaauaggguaagcgc

SEQ ID NO: 689111 - RNA, 19 nt, Artificial Sequence
  Description of Artificial Sequence: Synthetic oligonucleotide
gucggcagguuuccggcag

SEQ ID NO: 689112 - RNA, 19 nt, Artificial Sequence
  Description of Artificial Sequence: Synthetic oligonucleotide
ggugucggcgagaaacugg

SEQ ID NO: 689113 - RNA, 19 nt, Artificial Sequence
  Description of Artificial Sequence: Synthetic oligonucleotide
guacaugcucugccagucc

SEQ ID NO: 689114 - RNA, 19 nt, Artificial Sequence
  Description of Artificial Sequence: Synthetic oligonucleotide
agucgaccaauaaacguaa

SEQ ID NO: 689115 - RNA, 19 nt, Artificial Sequence
  Description of Artificial Sequence: Synthetic oligonucleotide
cucccgaauaauacugaga

SEQ ID NO: 689116 - RNA, 19 nt, Artificial Sequence
  Description of Artificial Sequence: Synthetic oligonucleotide
cucuguggagggcgaaagc

SEQ ID NO: 689117 - RNA, 19 nt, Artificial Sequence
  Description of Artificial Sequence: Synthetic oligonucleotide
aucgacaggaagaguugag

SEQ ID NO: 689118 - RNA, 19 nt, Artificial Sequence
  Description of Artificial Sequence: Synthetic oligonucleotide
cucauuggcgaucugcugu

SEQ ID NO: 689119 - RNA, 19 nt, Artificial Sequence
  Description of Artificial Sequence: Synthetic oligonucleotide
guggagcgaauaaacuggc

SEQ ID NO: 689120 - RNA, 19 nt, Artificial Sequence
  Description of Artificial Sequence: Synthetic oligonucleotide
uccgcgagacuuccuccug

SEQ ID NO: 689121 - RNA, 19 nt, Artificial Sequence
  Description of Artificial Sequence: Synthetic oligonucleotide
auccgcgagacuuccuccu

SEQ ID NO: 689122 - RNA, 19 nt, Artificial Sequence
  Description of Artificial Sequence: Synthetic oligonucleotide
ugguugugauguauaucuu

SEQ ID NO: 689123 - RNA, 19 nt, Artificial Sequence
  Description of Artificial Sequence: Synthetic oligonucleotide
uggcgaucugcugucucag

SEQ ID NO: 689124 - RNA, 19 nt, Artificial Sequence
  Description of Artificial Sequence: Synthetic oligonucleotide
ugcggcagugccccgucac

SEQ ID NO: 689125 - RNA, 19 nt, Artificial Sequence
  Description of Artificial Sequence: Synthetic oligonucleotide
guguguaccgcgaauggaa

SEQ ID NO: 689126 - RNA, 19 nt, Artificial Sequence
  Description of Artificial Sequence: Synthetic oligonucleotide
ugcuguguguaccgcgaau

SEQ ID NO: 689127 - RNA, 19 nt, Artificial Sequence
  Description of Artificial Sequence: Synthetic oligonucleotide
caccuuaaugaugcccacc

SEQ ID NO: 689128 - RNA, 19 nt, Artificial Sequence
  Description of Artificial Sequence: Synthetic oligonucleotide
auaauccuccaggaacaga

SEQ ID NO: 689129 - RNA, 19 nt, Artificial Sequence
  Description of Artificial Sequence: Synthetic oligonucleotide
uaccgcgaauggaacugcu

SEQ ID NO: 689130 - RNA, 19 nt, Artificial Sequence
  Description of Artificial Sequence: Synthetic oligonucleotide
cugccaggugccuggaauc

SEQ ID NO: 689131 - RNA, 19 nt, Artificial Sequence
  Description of Artificial Sequence: Synthetic oligonucleotide
aggaacuuucggggugucg

SEQ ID NO: 689132 - RNA, 19 nt, Artificial Sequence
  Description of Artificial Sequence: Synthetic oligonucleotide
cugacguaguccuggaugu

SEQ ID NO: 689133 - RNA, 19 nt, Artificial Sequence
  Description of Artificial Sequence: Synthetic oligonucleotide
ccgggaaauaggguaagcg

SEQ ID NO: 689134 - RNA, 19 nt, Artificial Sequence
  Description of Artificial Sequence: Synthetic oligonucleotide
cuuucggggugucggcgag

SEQ ID NO: 689135 - RNA, 19 nt, Artificial Sequence
  Description of Artificial Sequence: Synthetic oligonucleotide
ggcgaaagcaacucgcuua

SEQ ID NO: 689136 - RNA, 19 nt, Artificial Sequence
  Description of Artificial Sequence: Synthetic oligonucleotide
gugaccauggacggguuga

SEQ ID NO: 689137 - RNA, 19 nt, Artificial Sequence
  Description of Artificial Sequence: Synthetic oligonucleotide
gaccgggaaauaggguaag

SEQ ID NO: 689138 - RNA, 19 nt, Artificial Sequence
  Description of Artificial Sequence: Synthetic oligonucleotide
uaccacguguucagcuggu

SEQ ID NO: 689139 - RNA, 19 nt, Artificial Sequence
  Description of Artificial Sequence: Synthetic oligonucleotide
guggguugugaaugccagc

SEQ ID NO: 689140 - RNA, 19 nt, Artificial Sequence
  Description of Artificial Sequence: Synthetic oligonucleotide
agaugcccucgguaaagau

SEQ ID NO: 689141 - RNA, 19 nt, Artificial Sequence
  Description of Artificial Sequence: Synthetic oligonucleotide
agcgaauaaacuggccaau

SEQ ID NO: 689142 - RNA, 19 nt, Artificial Sequence
  Description of Artificial Sequence: Synthetic oligonucleotide
cacauaggacaccaguucu

SEQ ID NO: 689143 - RNA, 19 nt, Artificial Sequence
  Description of Artificial Sequence: Synthetic oligonucleotide
uggcccgaggguugaauau

SEQ ID NO: 689144 - RNA, 19 nt, Artificial Sequence
  Description of Artificial Sequence: Synthetic oligonucleotide
ggauaauuuucugaaacau

SEQ ID NO: 689145 - RNA, 19 nt, Artificial Sequence
  Description of Artificial Sequence: Synthetic oligonucleotide
ggguugugaaugccagcgg

SEQ ID NO: 689146 - RNA, 19 nt, Artificial Sequence
  Description of Artificial Sequence: Synthetic oligonucleotide
ggcgcgaacuuaggaaugg

SEQ ID NO: 689147 - RNA, 19 nt, Artificial Sequence
  Description of Artificial Sequence: Synthetic oligonucleotide
cccacgaucugcaugguga

SEQ ID NO: 689148 - RNA, 19 nt, Artificial Sequence
  Description of Artificial Sequence: Synthetic oligonucleotide
gugauggcggaaagauaag

SEQ ID NO: 689149 - RNA, 19 nt, Artificial Sequence
  Description of Artificial Sequence: Synthetic oligonucleotide
ccgagcugagcguaguccc

SEQ ID NO: 689150 - RNA, 19 nt, Artificial Sequence
  Description of Artificial Sequence: Synthetic oligonucleotide
acugagcgaucaagaagag

SEQ ID NO: 689151 - RNA, 19 nt, Artificial Sequence
  Description of Artificial Sequence: Synthetic oligonucleotide
gugucggcgagaaacugga

SEQ ID NO: 689152 - RNA, 19 nt, Artificial Sequence
  Description of Artificial Sequence: Synthetic oligonucleotide
gggaaauaggguaagcgcu

SEQ ID NO: 689153 - RNA, 19 nt, Artificial Sequence
  Description of Artificial Sequence: Synthetic oligonucleotide
agguuuccggcagaccaug

SEQ ID NO: 689154 - RNA, 19 nt, Artificial Sequence
  Description of Artificial Sequence: Synthetic oligonucleotide
uggcaaccucguagcgggg

SEQ ID NO: 689155 - RNA, 19 nt, Artificial Sequence
  Description of Artificial Sequence: Synthetic oligonucleotide
caucaagaugcccucggua

SEQ ID NO: 689156 - RNA, 19 nt, Artificial Sequence
  Description of Artificial Sequence: Synthetic oligonucleotide
cgcuugauuaauccgcagc

SEQ ID NO: 689157 - RNA, 19 nt, Artificial Sequence
  Description of Artificial Sequence: Synthetic oligonucleotide
cacguguucagcuggucua

SEQ ID NO: 689158 - RNA, 19 nt, Artificial Sequence
  Description of Artificial Sequence: Synthetic oligonucleotide
caucggccggcaucucagg

SEQ ID NO: 689159 - RNA, 19 nt, Artificial Sequence
  Description of Artificial Sequence: Synthetic oligonucleotide
guguaccgaacauaauccu

SEQ ID NO: 689160 - RNA, 19 nt, Artificial Sequence
  Description of Artificial Sequence: Synthetic oligonucleotide
gcaacugagcgaucaagaa

SEQ ID NO: 689161 - RNA, 19 nt, Artificial Sequence
  Description of Artificial Sequence: Synthetic oligonucleotide
gucacaggacuguucggaa

SEQ ID NO: 689162 - RNA, 19 nt, Artificial Sequence
  Description of Artificial Sequence: Synthetic oligonucleotide
ucggcagguuuccggcaga

SEQ ID NO: 689163 - RNA, 19 nt, Artificial Sequence
  Description of Artificial Sequence: Synthetic oligonucleotide
guugaauaucaggccucug

SEQ ID NO: 689164 - RNA, 19 nt, Artificial Sequence
  Description of Artificial Sequence: Synthetic oligonucleotide
ggcaacugagcgaucaaga

SEQ ID NO: 689165 - RNA, 19 nt, Artificial Sequence
  Description of Artificial Sequence: Synthetic oligonucleotide
ugaccauggacggguugac

SEQ ID NO: 689166 - RNA, 19 nt, Artificial Sequence
  Description of Artificial Sequence: Synthetic oligonucleotide
ugucggcgagaaacuggac

SEQ ID NO: 689167 - RNA, 19 nt, Artificial Sequence
  Description of Artificial Sequence: Synthetic oligonucleotide
guaucuugaacgguucuau

SEQ ID NO: 689168 - RNA, 19 nt, Artificial Sequence
  Description of Artificial Sequence: Synthetic oligonucleotide
gcgaauggaacugcuucag

SEQ ID NO: 689169 - RNA, 19 nt, Artificial Sequence
  Description of Artificial Sequence: Synthetic oligonucleotide
gggucggcagguuuccggc

SEQ ID NO: 689170 - RNA, 19 nt, Artificial Sequence
  Description of Artificial Sequence: Synthetic oligonucleotide
uuuuggcaacugagcgauc

SEQ ID NO: 689171 - RNA, 19 nt, Artificial Sequence
  Description of Artificial Sequence: Synthetic oligonucleotide
guaccgcgaauggaacugc

SEQ ID NO: 689172 - RNA, 19 nt, Artificial Sequence
  Description of Artificial Sequence: Synthetic oligonucleotide
agagccuuauugagauugu

SEQ ID NO: 689173 - RNA, 19 nt, Artificial Sequence
  Description of Artificial Sequence: Synthetic oligonucleotide
cacaggcgcgaacuuagga

SEQ ID NO: 689174 - RNA, 19 nt, Artificial Sequence
  Description of Artificial Sequence: Synthetic oligonucleotide
gcgaacuuaggaaugggaa

SEQ ID NO: 689175 - RNA, 19 nt, Artificial Sequence
  Description of Artificial Sequence: Synthetic oligonucleotide
acguaguccuggauguacu

SEQ ID NO: 689176 - RNA, 19 nt, Artificial Sequence
  Description of Artificial Sequence: Synthetic oligonucleotide
gaccgguggaacccaucca

SEQ ID NO: 689177 - RNA, 19 nt, Artificial Sequence
  Description of Artificial Sequence: Synthetic oligonucleotide
agggcgaaagcaacucgcu

SEQ ID NO: 689178 - RNA, 19 nt, Artificial Sequence
  Description of Artificial Sequence: Synthetic oligonucleotide
ucaacucgcuuggcuuggc

SEQ ID NO: 689179 - RNA, 19 nt, Artificial Sequence
  Description of Artificial Sequence: Synthetic oligonucleotide
accacguguucagcugguc

SEQ ID NO: 689180 - RNA, 19 nt, Artificial Sequence
  Description of Artificial Sequence: Synthetic oligonucleotide
ccgcgaauggaacugcuuc

SEQ ID NO: 689181 - RNA, 19 nt, Artificial Sequence
  Description of Artificial Sequence: Synthetic oligonucleotide
uucuaucucucaggauaau

SEQ ID NO: 689182 - RNA, 19 nt, Artificial Sequence
  Description of Artificial Sequence: Synthetic oligonucleotide
agcugagcguagucccgca

SEQ ID NO: 689183 - RNA, 19 nt, Artificial Sequence
  Description of Artificial Sequence: Synthetic oligonucleotide
gagcgaucaagaagagaaa

SEQ ID NO: 689184 - RNA, 19 nt, Artificial Sequence
  Description of Artificial Sequence: Synthetic oligonucleotide
cccucgguaaagauggaga

SEQ ID NO: 689185 - RNA, 19 nt, Artificial Sequence
  Description of Artificial Sequence: Synthetic oligonucleotide
gcuauucgcuugauuaauc

SEQ ID NO: 689186 - RNA, 19 nt, Artificial Sequence
  Description of Artificial Sequence: Synthetic oligonucleotide
ggaacccauccaugguggc

SEQ ID NO: 689187 - RNA, 19 nt, Artificial Sequence
  Description of Artificial Sequence: Synthetic oligonucleotide
ggacaaacuugcagauuug

SEQ ID NO: 689188 - RNA, 19 nt, Artificial Sequence
  Description of Artificial Sequence: Synthetic oligonucleotide
gcgaaagcaacucgcuuaa

SEQ ID NO: 689189 - RNA, 19 nt, Artificial Sequence
  Description of Artificial Sequence: Synthetic oligonucleotide
ucggccaggagagccuuau

SEQ ID NO: 689190 - RNA, 19 nt, Artificial Sequence
  Description of Artificial Sequence: Synthetic oligonucleotide
aggcgcgaacuuaggaaug

SEQ ID NO: 689191 - RNA, 19 nt, Artificial Sequence
  Description of Artificial Sequence: Synthetic oligonucleotide
uggacggguugacccuuau

SEQ ID NO: 689192 - RNA, 19 nt, Artificial Sequence
  Description of Artificial Sequence: Synthetic oligonucleotide
acucgcuuaaccagcucuu

SEQ ID NO: 689193 - RNA, 19 nt, Artificial Sequence
  Description of Artificial Sequence: Synthetic oligonucleotide
ggguugaauaucaggccuc

SEQ ID NO: 689194 - RNA, 19 nt, Artificial Sequence
  Description of Artificial Sequence: Synthetic oligonucleotide
guaagcgcuugguugugau

SEQ ID NO: 689195 - RNA, 19 nt, Artificial Sequence
  Description of Artificial Sequence: Synthetic oligonucleotide
acguguucagcuggucuau

SEQ ID NO: 689196 - RNA, 19 nt, Artificial Sequence
  Description of Artificial Sequence: Synthetic oligonucleotide
cacgucauuuuggggucug

SEQ ID NO: 689197 - RNA, 19 nt, Artificial Sequence
  Description of Artificial Sequence: Synthetic oligonucleotide
gcgaauaaacuggccaauc

SEQ ID NO: 689198 - RNA, 19 nt, Artificial Sequence
  Description of Artificial Sequence: Synthetic oligonucleotide
caacucgcuuaaccagcuc

SEQ ID NO: 689199 - RNA, 19 nt, Artificial Sequence
  Description of Artificial Sequence: Synthetic oligonucleotide
cugagcgaucaagaagaga

SEQ ID NO: 689200 - RNA, 19 nt, Artificial Sequence
  Description of Artificial Sequence: Synthetic oligonucleotide
guguaccgcgaauggaacu

SEQ ID NO: 689201 - RNA, 19 nt, Artificial Sequence
  Description of Artificial Sequence: Synthetic oligonucleotide
cggggugucggcgagaaac

SEQ ID NO: 689202 - RNA, 19 nt, Artificial Sequence
  Description of Artificial Sequence: Synthetic oligonucleotide
agggcgcccacagcaucgg

SEQ ID NO: 689203 - RNA, 19 nt, Artificial Sequence
  Description of Artificial Sequence: Synthetic oligonucleotide
auaauccgcgagacuuccu

SEQ ID NO: 689204 - RNA, 19 nt, Artificial Sequence
  Description of Artificial Sequence: Synthetic oligonucleotide
ggcaucaacucgcuuggcu

SEQ ID NO: 689205 - RNA, 19 nt, Artificial Sequence
  Description of Artificial Sequence: Synthetic oligonucleotide
aggaccgguggaacccauc

SEQ ID NO: 689206 - RNA, 19 nt, Artificial Sequence
  Description of Artificial Sequence: Synthetic oligonucleotide
ggagugaagggucccgaua

SEQ ID NO: 689207 - RNA, 19 nt, Artificial Sequence
  Description of Artificial Sequence: Synthetic oligonucleotide
ugcccucgguaaagaugga

SEQ ID NO: 689208 - RNA, 19 nt, Artificial Sequence
  Description of Artificial Sequence: Synthetic oligonucleotide
ccugucacggaagcagaag

SEQ ID NO: 689209 - RNA, 19 nt, Artificial Sequence
  Description of Artificial Sequence: Synthetic oligonucleotide
gagauuguccagagcugcu

SEQ ID NO: 689210 - RNA, 19 nt, Artificial Sequence
  Description of Artificial Sequence: Synthetic oligonucleotide
gcugagcguagucccgcag

SEQ ID NO: 689211 - RNA, 19 nt, Artificial Sequence
  Description of Artificial Sequence: Synthetic oligonucleotide
auccacaggcgcgaacuua

SEQ ID NO: 689212 - RNA, 19 nt, Artificial Sequence
  Description of Artificial Sequence: Synthetic oligonucleotide
acacgucauuuuggggucu

SEQ ID NO: 689213 - RNA, 19 nt, Artificial Sequence
  Description of Artificial Sequence: Synthetic oligonucleotide
ugacguaguccuggaugua

SEQ ID NO: 689214 - RNA, 19 nt, Artificial Sequence
  Description of Artificial Sequence: Synthetic oligonucleotide
caaugucggccaggagagc

SEQ ID NO: 689215 - RNA, 19 nt, Artificial Sequence
  Description of Artificial Sequence: Synthetic oligonucleotide
agacuuccuccugccaaau

SEQ ID NO: 689216 - RNA, 19 nt, Artificial Sequence
  Description of Artificial Sequence: Synthetic oligonucleotide
cagcggccuccagauaggc

SEQ ID NO: 689217 - RNA, 19 nt, Artificial Sequence
  Description of Artificial Sequence: Synthetic oligonucleotide
gaguggacugguacaugcu

SEQ ID NO: 689218 - RNA, 19 nt, Artificial Sequence
  Description of Artificial Sequence: Synthetic oligonucleotide
gcuuuguguaccgaacaua

SEQ ID NO: 689219 - RNA, 19 nt, Artificial Sequence
  Description of Artificial Sequence: Synthetic oligonucleotide
cuccauuguggagcgaaua

SEQ ID NO: 689220 - RNA, 19 nt, Artificial Sequence
  Description of Artificial Sequence: Synthetic oligonucleotide
gcgcgaacuuaggaauggg

SEQ ID NO: 689221 - RNA, 19 nt, Artificial Sequence
  Description of Artificial Sequence: Synthetic oligonucleotide
ucagggcuauucgcuugau

SEQ ID NO: 689222 - RNA, 19 nt, Artificial Sequence
  Description of Artificial Sequence: Synthetic oligonucleotide
aaggaccgguggaacccau

SEQ ID NO: 689223 - RNA, 19 nt, Artificial Sequence
  Description of Artificial Sequence: Synthetic oligonucleotide
acgucauuuuggggucugu

SEQ ID NO: 689224 - RNA, 19 nt, Artificial Sequence
  Description of Artificial Sequence: Synthetic oligonucleotide
gcgaucaagaagagaaagu

SEQ ID NO: 689225 - RNA, 19 nt, Artificial Sequence
  Description of Artificial Sequence: Synthetic oligonucleotide
ucgcuuggcuuggcccgag

SEQ ID NO: 689226 - RNA, 19 nt, Artificial Sequence
  Description of Artificial Sequence: Synthetic oligonucleotide
gaggaacuuucgggguguc

SEQ ID NO: 689227 - RNA, 19 nt, Artificial Sequence
  Description of Artificial Sequence: Synthetic oligonucleotide
gacgaccgggaaauagggu

SEQ ID NO: 689228 - RNA, 19 nt, Artificial Sequence
  Description of Artificial Sequence: Synthetic oligonucleotide
ccacaggcgcgaacuuagg

SEQ ID NO: 689229 - RNA, 19 nt, Artificial Sequence
  Description of Artificial Sequence: Synthetic oligonucleotide
ccgguggaacccauccaug

SEQ ID NO: 689230 - RNA, 19 nt, Artificial Sequence
  Description of Artificial Sequence: Synthetic oligonucleotide
gcggaaagauaagcuuuac

SEQ ID NO: 689231 - RNA, 19 nt, Artificial Sequence
  Description of Artificial Sequence: Synthetic oligonucleotide
gggugucggcgagaaacug

SEQ ID NO: 689232 - RNA, 19 nt, Artificial Sequence
  Description of Artificial Sequence: Synthetic oligonucleotide
cccgaggguugaauaucag

SEQ ID NO: 689233 - RNA, 19 nt, Artificial Sequence
  Description of Artificial Sequence: Synthetic oligonucleotide
ccgcgagacuuccuccugc

SEQ ID NO: 689234 - RNA, 19 nt, Artificial Sequence
  Description of Artificial Sequence: Synthetic oligonucleotide
cgcgagacuuccuccugcc

SEQ ID NO: 689235 - RNA, 19 nt, Artificial Sequence
  Description of Artificial Sequence: Synthetic oligonucleotide
accgcgaauggaacugcuu

SEQ ID NO: 689236 - RNA, 19 nt, Artificial Sequence
  Description of Artificial Sequence: Synthetic oligonucleotide
gggucguuuucaucaucaa

SEQ ID NO: 689237 - RNA, 19 nt, Artificial Sequence
  Description of Artificial Sequence: Synthetic oligonucleotide
ggacgaguggcggccaguc

SEQ ID NO: 689238 - RNA, 19 nt, Artificial Sequence
  Description of Artificial Sequence: Synthetic oligonucleotide
ggucacuucuuggugaguu

SEQ ID NO: 689239 - RNA, 19 nt, Artificial Sequence
  Description of Artificial Sequence: Synthetic oligonucleotide
cgcgaauggaacugcuuca

SEQ ID NO: 689240 - RNA, 19 nt, Artificial Sequence
  Description of Artificial Sequence: Synthetic oligonucleotide
caacugccaggcgaaggaa

SEQ ID NO: 689241 - RNA, 19 nt, Artificial Sequence
  Description of Artificial Sequence: Synthetic oligonucleotide
cgcgaacuuaggaauggga

SEQ ID NO: 689242 - RNA, 19 nt, Artificial Sequence
  Description of Artificial Sequence: Synthetic oligonucleotide
ggucggcagguuuccggca

SEQ ID NO: 689243 - RNA, 19 nt, Artificial Sequence
  Description of Artificial Sequence: Synthetic oligonucleotide
ggucuauguaacacgucau

SEQ ID NO: 689244 - RNA, 19 nt, Artificial Sequence
  Description of Artificial Sequence: Synthetic oligonucleotide
agucggcugcuggucacuu

SEQ ID NO: 689245 - RNA, 19 nt, Artificial Sequence
  Description of Artificial Sequence: Synthetic oligonucleotide
ggcuauucgcuugauuaau

SEQ ID NO: 689246 - RNA, 19 nt, Artificial Sequence
  Description of Artificial Sequence: Synthetic oligonucleotide
ggguaagcgcuugguugug

SEQ ID NO: 689247 - RNA, 19 nt, Artificial Sequence
  Description of Artificial Sequence: Synthetic oligonucleotide
cgaacuuaggaaugggaau

SEQ ID NO: 689248 - RNA, 19 nt, Artificial Sequence
  Description of Artificial Sequence: Synthetic oligonucleotide
aguugacgaccgggaaaua

SEQ ID NO: 689249 - RNA, 19 nt, Artificial Sequence
  Description of Artificial Sequence: Synthetic oligonucleotide
ggaggaacuuucggggugu

SEQ ID NO: 689250 - RNA, 19 nt, Artificial Sequence
  Description of Artificial Sequence: Synthetic oligonucleotide
ggagagacgugaacaugcu

SEQ ID NO: 689251 - RNA, 19 nt, Artificial Sequence
  Description of Artificial Sequence: Synthetic oligonucleotide
gucaugggucugaagcuuu

SEQ ID NO: 689252 - RNA, 19 nt, Artificial Sequence
  Description of Artificial Sequence: Synthetic oligonucleotide
cccaagguguucuggauuu

SEQ ID NO: 689253 - RNA, 19 nt, Artificial Sequence
  Description of Artificial Sequence: Synthetic oligonucleotide
gcauagaagccuguccaau

SEQ ID NO: 689254 - RNA, 19 nt, Artificial Sequence
  Description of Artificial Sequence: Synthetic oligonucleotide
gccaggcgaaggaaagguc

SEQ ID NO: 689255 - RNA, 19 nt, Artificial Sequence
  Description of Artificial Sequence: Synthetic oligonucleotide
acguggcccugaguuuggu

SEQ ID NO: 689256 - RNA, 19 nt, Artificial Sequence
  Description of Artificial Sequence: Synthetic oligonucleotide
ggaacguggcccugaguuu

SEQ ID NO: 689257 - RNA, 19 nt, Artificial Sequence
  Description of Artificial Sequence: Synthetic oligonucleotide
cucgcuuggcuuggcccga

SEQ ID NO: 689258 - RNA, 19 nt, Artificial Sequence
  Description of Artificial Sequence: Synthetic oligonucleotide
gcaacucgcuuaaccagcu

SEQ ID NO: 689259 - RNA, 19 nt, Artificial Sequence
  Description of Artificial Sequence: Synthetic oligonucleotide
ccccacgaucugcauggug

SEQ ID NO: 689260 - RNA, 19 nt, Artificial Sequence
  Description of Artificial Sequence: Synthetic oligonucleotide
cgaccgggaaauaggguaa

SEQ ID NO: 689261 - RNA, 19 nt, Artificial Sequence
  Description of Artificial Sequence: Synthetic oligonucleotide
gagucggcugcuggucacu

SEQ ID NO: 689262 - RNA, 19 nt, Artificial Sequence
  Description of Artificial Sequence: Synthetic oligonucleotide
cggaaagauaagcuuuacu

SEQ ID NO: 689263 - RNA, 19 nt, Artificial Sequence
  Description of Artificial Sequence: Synthetic oligonucleotide
ccacguguucagcuggucu

SEQ ID NO: 689264 - RNA, 19 nt, Artificial Sequence
  Description of Artificial Sequence: Synthetic oligonucleotide
gggagugaagggucccgau

SEQ ID NO: 689265 - RNA, 19 nt, Artificial Sequence
  Description of Artificial Sequence: Synthetic oligonucleotide
gguaagcgguccaaaucuu

SEQ ID NO: 689266 - RNA, 19 nt, Artificial Sequence
  Description of Artificial Sequence: Synthetic oligonucleotide
gucgaccaauaaacguaau

SEQ ID NO: 689267 - RNA, 19 nt, Artificial Sequence
  Description of Artificial Sequence: Synthetic oligonucleotide
cucgcuuaaccagcucuuu

SEQ ID NO: 689268 - RNA, 19 nt, Artificial Sequence
  Description of Artificial Sequence: Synthetic oligonucleotide
ggggugucggcgagaaacu

SEQ ID NO: 689269 - RNA, 19 nt, Artificial Sequence
  Description of Artificial Sequence: Synthetic oligonucleotide
ccugcggcagugccccguc

SEQ ID NO: 689270 - RNA, 19 nt, Artificial Sequence
  Description of Artificial Sequence: Synthetic oligonucleotide
ggggagcuuuguguaccga

SEQ ID NO: 689271 - RNA, 19 nt, Artificial Sequence
  Description of Artificial Sequence: Synthetic oligonucleotide
cauuggcgaucugcugucu

SEQ ID NO: 689272 - RNA, 19 nt, Artificial Sequence
  Description of Artificial Sequence: Synthetic oligonucleotide
cagggcuauucgcuugauu

SEQ ID NO: 689273 - RNA, 19 nt, Artificial Sequence
  Description of Artificial Sequence: Synthetic oligonucleotide
cugcggcagugccccguca

SEQ ID NO: 689274 - RNA, 19 nt, Artificial Sequence
  Description of Artificial Sequence: Synthetic oligonucleotide
gcccaccagggucguuuuc

SEQ ID NO: 689275 - RNA, 19 nt, Artificial Sequence
  Description of Artificial Sequence: Synthetic oligonucleotide
cggguugacccuuaugcuu

SEQ ID NO: 689276 - RNA, 19 nt, Artificial Sequence
  Description of Artificial Sequence: Synthetic oligonucleotide
cccgauagugggcuucaau

SEQ ID NO: 689277 - RNA, 19 nt, Artificial Sequence
  Description of Artificial Sequence: Synthetic oligonucleotide
ggucugugauccgcaggau

SEQ ID NO: 689278 - RNA, 19 nt, Artificial Sequence
  Description of Artificial Sequence: Synthetic oligonucleotide
gcgcuugguugugauguau

SEQ ID NO: 689279 - RNA, 19 nt, Artificial Sequence
  Description of Artificial Sequence: Synthetic oligonucleotide
gcuccauuguggagcgaau

SEQ ID NO: 689280 - RNA, 19 nt, Artificial Sequence
  Description of Artificial Sequence: Synthetic oligonucleotide
cccuuaugcuuuccugcau

SEQ ID NO: 689281 - RNA, 19 nt, Artificial Sequence
  Description of Artificial Sequence: Synthetic oligonucleotide
ccggcagaccaugccuaga

SEQ ID NO: 689282 - RNA, 19 nt, Artificial Sequence
  Description of Artificial Sequence: Synthetic oligonucleotide
ggccggcaucucaggcauc

SEQ ID NO: 689283 - RNA, 19 nt, Artificial Sequence
  Description of Artificial Sequence: Synthetic oligonucleotide
cggccggcaucucaggcau

SEQ ID NO: 689284 - RNA, 19 nt, Artificial Sequence
  Description of Artificial Sequence: Synthetic oligonucleotide
gggucccgauagugggcuu

SEQ ID NO: 689285 - RNA, 19 nt, Artificial Sequence
  Description of Artificial Sequence: Synthetic oligonucleotide
cggccaggagagccuuauu

SEQ ID NO: 689286 - RNA, 19 nt, Artificial Sequence
  Description of Artificial Sequence: Synthetic oligonucleotide
acuauuuacauucagaguc

SEQ ID NO: 689287 - RNA, 19 nt, Artificial Sequence
  Description of Artificial Sequence: Synthetic oligonucleotide
aauccguuauuccaugucc

SEQ ID NO: 689288 - RNA, 19 nt, Artificial Sequence
  Description of Artificial Sequence: Synthetic oligonucleotide
ucuagaaacuggaagaucc

SEQ ID NO: 689289 - RNA, 19 nt, Artificial Sequence
  Description of Artificial Sequence: Synthetic oligonucleotide
ugaaaauuuugaaaggaug

SEQ ID NO: 689290 - RNA, 19 nt, Artificial Sequence
  Description of Artificial Sequence: Synthetic oligonucleotide
aauacucaaccaccgagac

SEQ ID NO: 689291 - RNA, 19 nt, Artificial Sequence
  Description of Artificial Sequence: Synthetic oligonucleotide
agguauacgcugcagaacc

SEQ ID NO: 689292 - RNA, 19 nt, Artificial Sequence
  Description of Artificial Sequence: Synthetic oligonucleotide
ugaagugugacauaccagc

SEQ ID NO: 689293 - RNA, 19 nt, Artificial Sequence
  Description of Artificial Sequence: Synthetic oligonucleotide
acauguaacgcacuacugc

SEQ ID NO: 689294 - RNA, 19 nt, Artificial Sequence
  Description of Artificial Sequence: Synthetic oligonucleotide
uguaccaacaguaugcaac

SEQ ID NO: 689295 - RNA, 19 nt, Artificial Sequence
  Description of Artificial Sequence: Synthetic oligonucleotide
uuccauuggaucuagacca

SEQ ID NO: 689296 - RNA, 19 nt, Artificial Sequence
  Description of Artificial Sequence: Synthetic oligonucleotide
cuuuaccuacccuagaacg

SEQ ID NO: 689297 - RNA, 19 nt, Artificial Sequence
  Description of Artificial Sequence: Synthetic oligonucleotide
aaacauguaacgcacuacu

SEQ ID NO: 689298 - RNA, 19 nt, Artificial Sequence
  Description of Artificial Sequence: Synthetic oligonucleotide
uuagcuucccaucaaaacu

SEQ ID NO: 689299 - RNA, 19 nt, Artificial Sequence
  Description of Artificial Sequence: Synthetic oligonucleotide
ugucucuagaugaaaauug

SEQ ID NO: 689300 - RNA, 19 nt, Artificial Sequence
  Description of Artificial Sequence: Synthetic oligonucleotide
ugagauuuaaugacucuag

SEQ ID NO: 689301 - RNA, 19 nt, Artificial Sequence
  Description of Artificial Sequence: Synthetic oligonucleotide
uaccagucuaaaaugaaag

SEQ ID NO: 689302 - RNA, 19 nt, Artificial Sequence
  Description of Artificial Sequence: Synthetic oligonucleotide
uuaaccucccuaaacuggg

SEQ ID NO: 689303 - RNA, 19 nt, Artificial Sequence
  Description of Artificial Sequence: Synthetic oligonucleotide
aaaacucgcuuauagagau

SEQ ID NO: 689304 - RNA, 19 nt, Artificial Sequence
  Description of Artificial Sequence: Synthetic oligonucleotide
ucuucugagauuuaaugac

SEQ ID NO: 689305 - RNA, 19 nt, Artificial Sequence
  Description of Artificial Sequence: Synthetic oligonucleotide
aagaucaauucuucuuugg

SEQ ID NO: 689306 - RNA, 19 nt, Artificial Sequence
  Description of Artificial Sequence: Synthetic oligonucleotide
uauagagauucauuaauac

SEQ ID NO: 689307 - RNA, 19 nt, Artificial Sequence
  Description of Artificial Sequence: Synthetic oligonucleotide
aaaucaagguaacacuugu

SEQ ID NO: 689308 - RNA, 19 nt, Artificial Sequence
  Description of Artificial Sequence: Synthetic oligonucleotide
acaacagauggccuguagc

SEQ ID NO: 689309 - RNA, 19 nt, Artificial Sequence
  Description of Artificial Sequence: Synthetic oligonucleotide
cuauauuucugaaaucgag

SEQ ID NO: 689310 - RNA, 19 nt, Artificial Sequence
  Description of Artificial Sequence: Synthetic oligonucleotide
ucuguauuguacucagugg

SEQ ID NO: 689311 - RNA, 19 nt, Artificial Sequence
  Description of Artificial Sequence: Synthetic oligonucleotide
aguaagguuuucuuugggg

SEQ ID NO: 689312 - RNA, 19 nt, Artificial Sequence
  Description of Artificial Sequence: Synthetic oligonucleotide
aauccuaaugugcaguaga

SEQ ID NO: 689313 - RNA, 19 nt, Artificial Sequence
  Description of Artificial Sequence: Synthetic oligonucleotide
aacucgcuuauagagauuc

SEQ ID NO: 689314 - RNA, 19 nt, Artificial Sequence
  Description of Artificial Sequence: Synthetic oligonucleotide
aacaacucucuugaugacc

SEQ ID NO: 689315 - RNA, 19 nt, Artificial Sequence
  Description of Artificial Sequence: Synthetic oligonucleotide
caguaugcaacccagcugg

SEQ ID NO: 689316 - RNA, 19 nt, Artificial Sequence
  Description of Artificial Sequence: Synthetic oligonucleotide
ucauugagccuacugcugg

SEQ ID NO: 689317 - RNA, 19 nt, Artificial Sequence
  Description of Artificial Sequence: Synthetic oligonucleotide
cuagugugaagguauacgc

SEQ ID NO: 689318 - RNA, 19 nt, Artificial Sequence
  Description of Artificial Sequence: Synthetic oligonucleotide
ggaaaacucgcuuauagag

SEQ ID NO: 689319 - RNA, 19 nt, Artificial Sequence
  Description of Artificial Sequence: Synthetic oligonucleotide
aauccuuacuccuuucugu

SEQ ID NO: 689320 - RNA, 19 nt, Artificial Sequence
  Description of Artificial Sequence: Synthetic oligonucleotide
aggugcaucuaucugacuc

SEQ ID NO: 689321 - RNA, 19 nt, Artificial Sequence
  Description of Artificial Sequence: Synthetic oligonucleotide
cuuaaccucccuaaacugg

SEQ ID NO: 689322 - RNA, 19 nt, Artificial Sequence
  Description of Artificial Sequence: Synthetic oligonucleotide
uaagucauuugccucauuc

SEQ ID NO: 689323 - RNA, 19 nt, Artificial Sequence
  Description of Artificial Sequence: Synthetic oligonucleotide
agauuuaaugacucuagga

SEQ ID NO: 689324 - RNA, 19 nt, Artificial Sequence
  Description of Artificial Sequence: Synthetic oligonucleotide
agaaugaaacugcucauug

SEQ ID NO: 689325 - RNA, 19 nt, Artificial Sequence
  Description of Artificial Sequence: Synthetic oligonucleotide
aaugcaaucaagggugcuc

SEQ ID NO: 689326 - RNA, 19 nt, Artificial Sequence
  Description of Artificial Sequence: Synthetic oligonucleotide
cauguaacgcacuacugcc

SEQ ID NO: 689327 - RNA, 19 nt, Artificial Sequence
  Description of Artificial Sequence: Synthetic oligonucleotide
auucaucuaccuuuccucg

SEQ ID NO: 689328 - RNA, 19 nt, Artificial Sequence
  Description of Artificial Sequence: Synthetic oligonucleotide
agacuuaaccucccuaaac

SEQ ID NO: 689329 - RNA, 19 nt, Artificial Sequence
  Description of Artificial Sequence: Synthetic oligonucleotide
ugaaaucgaguucuagcag

SEQ ID NO: 689330 - RNA, 19 nt, Artificial Sequence
  Description of Artificial Sequence: Synthetic oligonucleotide
agugugaagguauacgcug

SEQ ID NO: 689331 - RNA, 19 nt, Artificial Sequence
  Description of Artificial Sequence: Synthetic oligonucleotide
agaacguugcuucaauaag

SEQ ID NO: 689332 - RNA, 19 nt, Artificial Sequence
  Description of Artificial Sequence: Synthetic oligonucleotide
aggaguuaaagggaaaggg

SEQ ID NO: 689333 - RNA, 19 nt, Artificial Sequence
  Description of Artificial Sequence: Synthetic oligonucleotide
ucacuaggcacgaagucag

SEQ ID NO: 689334 - RNA, 19 nt, Artificial Sequence
  Description of Artificial Sequence: Synthetic oligonucleotide
ugacauaccagccaaccuc

SEQ ID NO: 689335 - RNA, 19 nt, Artificial Sequence
  Description of Artificial Sequence: Synthetic oligonucleotide
uauucaucuaccuuuccuc

SEQ ID NO: 689336 - RNA, 19 nt, Artificial Sequence
  Description of Artificial Sequence: Synthetic oligonucleotide
gacgaaaucaagguaacac

SEQ ID NO: 689337 - RNA, 19 nt, Artificial Sequence
  Description of Artificial Sequence: Synthetic oligonucleotide
uuaggaaucucugaaauuu

SEQ ID NO: 689338 - RNA, 19 nt, Artificial Sequence
  Description of Artificial Sequence: Synthetic oligonucleotide
gaauguagacuuaaccucc

SEQ ID NO: 689339 - RNA, 19 nt, Artificial Sequence
  Description of Artificial Sequence: Synthetic oligonucleotide
uguaguaucugcugcacaa

SEQ ID NO: 689340 - RNA, 19 nt, Artificial Sequence
  Description of Artificial Sequence: Synthetic oligonucleotide
aaaaugcaaucaagggugc

SEQ ID NO: 689341 - RNA, 19 nt, Artificial Sequence
  Description of Artificial Sequence: Synthetic oligonucleotide
aauguagacuuaaccuccc

SEQ ID NO: 689342 - RNA, 19 nt, Artificial Sequence
  Description of Artificial Sequence: Synthetic oligonucleotide
acuucagacacuguugagg

SEQ ID NO: 689343 - RNA, 19 nt, Artificial Sequence
  Description of Artificial Sequence: Synthetic oligonucleotide
ucaaaauccuaaugugcag

SEQ ID NO: 689344 - RNA, 19 nt, Artificial Sequence
  Description of Artificial Sequence: Synthetic oligonucleotide
uaggguaccuucuuuaccu

SEQ ID NO: 689345 - RNA, 19 nt, Artificial Sequence
  Description of Artificial Sequence: Synthetic oligonucleotide
ugaagguauacgcugcaga

SEQ ID NO: 689346 - RNA, 19 nt, Artificial Sequence
  Description of Artificial Sequence: Synthetic oligonucleotide
aacguugcuucaauaaguc

SEQ ID NO: 689347 - RNA, 19 nt, Artificial Sequence
  Description of Artificial Sequence: Synthetic oligonucleotide
uuuaccuacccuagaacgu

SEQ ID NO: 689348 - RNA, 19 nt, Artificial Sequence
  Description of Artificial Sequence: Synthetic oligonucleotide
auccugagauuuuagcuuc

SEQ ID NO: 689349 - RNA, 19 nt, Artificial Sequence
  Description of Artificial Sequence: Synthetic oligonucleotide
ucuuaccagacuauuucug

SEQ ID NO: 689350 - RNA, 19 nt, Artificial Sequence
  Description of Artificial Sequence: Synthetic oligonucleotide
uauuguacucagugguggg

SEQ ID NO: 689351 - RNA, 19 nt, Artificial Sequence
  Description of Artificial Sequence: Synthetic oligonucleotide
auauucaucuaccuuuccu

SEQ ID NO: 689352 - RNA, 19 nt, Artificial Sequence
  Description of Artificial Sequence: Synthetic oligonucleotide
acauucagaguccucccac

SEQ ID NO: 689353 - RNA, 19 nt, Artificial Sequence
  Description of Artificial Sequence: Synthetic oligonucleotide
uuuaucagcugcugugugc

SEQ ID NO: 689354 - RNA, 19 nt, Artificial Sequence
  Description of Artificial Sequence: Synthetic oligonucleotide
caucuuagugaaaauuuug

SEQ ID NO: 689355 - RNA, 19 nt, Artificial Sequence
  Description of Artificial Sequence: Synthetic oligonucleotide
gaagacgaaaucaagguaa

SEQ ID NO: 689356 - RNA, 19 nt, Artificial Sequence
  Description of Artificial Sequence: Synthetic oligonucleotide
agauuuuagcuucccauca

SEQ ID NO: 689357 - RNA, 19 nt, Artificial Sequence
  Description of Artificial Sequence: Synthetic oligonucleotide
acgaaaucaagguaacacu

SEQ ID NO: 689358 - RNA, 19 nt, Artificial Sequence
  Description of Artificial Sequence: Synthetic oligonucleotide
gagaauaagggcgaggauc

SEQ ID NO: 689359 - RNA, 19 nt, Artificial Sequence
  Description of Artificial Sequence: Synthetic oligonucleotide
aguaccuacaggcuccuug

SEQ ID NO: 689360 - RNA, 19 nt, Artificial Sequence
  Description of Artificial Sequence: Synthetic oligonucleotide
aagacgaaaucaagguaac

SEQ ID NO: 689361 - RNA, 19 nt, Artificial Sequence
  Description of Artificial Sequence: Synthetic oligonucleotide
ugguacauauggaucauaa

SEQ ID NO: 689362 - RNA, 19 nt, Artificial Sequence
  Description of Artificial Sequence: Synthetic oligonucleotide
uagaacguugcuucaauaa

SEQ ID NO: 689363 - RNA, 19 nt, Artificial Sequence
  Description of Artificial Sequence: Synthetic oligonucleotide
aagguauacgcugcagaac

SEQ ID NO: 689364 - RNA, 19 nt, Artificial Sequence
  Description of Artificial Sequence: Synthetic oligonucleotide
ugacucccaaucuucaccc

SEQ ID NO: 689365 - RNA, 19 nt, Artificial Sequence
  Description of Artificial Sequence: Synthetic oligonucleotide
aaaauccuaaugugcagua

SEQ ID NO: 689366 - RNA, 19 nt, Artificial Sequence
  Description of Artificial Sequence: Synthetic oligonucleotide
agcagauggugucaaauca

SEQ ID NO: 689367 - RNA, 19 nt, Artificial Sequence
  Description of Artificial Sequence: Synthetic oligonucleotide
auaaucucgaguaagguuu

SEQ ID NO: 689368 - RNA, 19 nt, Artificial Sequence
  Description of Artificial Sequence: Synthetic oligonucleotide
aucaagguaacacuuguuu

SEQ ID NO: 689369 - RNA, 19 nt, Artificial Sequence
  Description of Artificial Sequence: Synthetic oligonucleotide
guauuguacucaguggugg

SEQ ID NO: 689370 - RNA, 19 nt, Artificial Sequence
  Description of Artificial Sequence: Synthetic oligonucleotide
acuuaaccucccuaaacug

SEQ ID NO: 689371 - RNA, 19 nt, Artificial Sequence
  Description of Artificial Sequence: Synthetic oligonucleotide
augcaaucaagggugcucc

SEQ ID NO: 689372 - RNA, 19 nt, Artificial Sequence
  Description of Artificial Sequence: Synthetic oligonucleotide
aagugugacauaccagcca

SEQ ID NO: 689373 - RNA, 19 nt, Artificial Sequence
  Description of Artificial Sequence: Synthetic oligonucleotide
cugaaaucgaguucuagca

SEQ ID NO: 689374 - RNA, 19 nt, Artificial Sequence
  Description of Artificial Sequence: Synthetic oligonucleotide
gacauaccagccaaccucg

SEQ ID NO: 689375 - RNA, 19 nt, Artificial Sequence
  Description of Artificial Sequence: Synthetic oligonucleotide
agugccaacuaaguuacuc

SEQ ID NO: 689376 - RNA, 19 nt, Artificial Sequence
  Description of Artificial Sequence: Synthetic oligonucleotide
auuggcucaaauaccuggc

SEQ ID NO: 689377 - RNA, 19 nt, Artificial Sequence
  Description of Artificial Sequence: Synthetic oligonucleotide
augaguaccuacaggcucc

SEQ ID NO: 689378 - RNA, 19 nt, Artificial Sequence
  Description of Artificial Sequence: Synthetic oligonucleotide
gaaaucaagguaacacuug

SEQ ID NO: 689379 - RNA, 19 nt, Artificial Sequence
  Description of Artificial Sequence: Synthetic oligonucleotide
uuuaggguaccuucuuuac

SEQ ID NO: 689380 - RNA, 19 nt, Artificial Sequence
  Description of Artificial Sequence: Synthetic oligonucleotide
uaguauuaauaaaauucua

SEQ ID NO: 689381 - RNA, 19 nt, Artificial Sequence
  Description of Artificial Sequence: Synthetic oligonucleotide
uacccuagaacguugcuuc

SEQ ID NO: 689382 - RNA, 19 nt, Artificial Sequence
  Description of Artificial Sequence: Synthetic oligonucleotide
uuaaaccacaucacauccu

SEQ ID NO: 689383 - RNA, 19 nt, Artificial Sequence
  Description of Artificial Sequence: Synthetic oligonucleotide
uaagggaccuuguggauga

SEQ ID NO: 689384 - RNA, 19 nt, Artificial Sequence
  Description of Artificial Sequence: Synthetic oligonucleotide
gacaucuucuguucauaag

SEQ ID NO: 689385 - RNA, 19 nt, Artificial Sequence
  Description of Artificial Sequence: Synthetic oligonucleotide
aaacugcacuucauguggc

SEQ ID NO: 689386 - RNA, 19 nt, Artificial Sequence
  Description of Artificial Sequence: Synthetic oligonucleotide
caaagugccaacuaaguua

SEQ ID NO: 689387 - RNA, 19 nt, Artificial Sequence
  Description of Artificial Sequence: Synthetic oligonucleotide
uuuucacccacgguacugg

SEQ ID NO: 689388 - RNA, 19 nt, Artificial Sequence
  Description of Artificial Sequence: Synthetic oligonucleotide
cuucauguggccaugagua

SEQ ID NO: 689389 - RNA, 19 nt, Artificial Sequence
  Description of Artificial Sequence: Synthetic oligonucleotide
ucaaagugccaacuaaguu

SEQ ID NO: 689390 - RNA, 19 nt, Artificial Sequence
  Description of Artificial Sequence: Synthetic oligonucleotide
caugaagugugacauacca

SEQ ID NO: 689391 - RNA, 19 nt, Artificial Sequence
  Description of Artificial Sequence: Synthetic oligonucleotide
uuauuaauccuuacuccuu

SEQ ID NO: 689392 - RNA, 19 nt, Artificial Sequence
  Description of Artificial Sequence: Synthetic oligonucleotide
gaguaagguuuucuuuggg

SEQ ID NO: 689393 - RNA, 19 nt, Artificial Sequence
  Description of Artificial Sequence: Synthetic oligonucleotide
auaccagccaaccucggcu

SEQ ID NO: 689394 - RNA, 19 nt, Artificial Sequence
  Description of Artificial Sequence: Synthetic oligonucleotide
uccucccacgaacauagcc

SEQ ID NO: 689395 - RNA, 19 nt, Artificial Sequence
  Description of Artificial Sequence: Synthetic oligonucleotide
uuacucuccucacuaggca

SEQ ID NO: 689396 - RNA, 19 nt, Artificial Sequence
  Description of Artificial Sequence: Synthetic oligonucleotide
acaugggcaaacaaguaag

SEQ ID NO: 689397 - RNA, 19 nt, Artificial Sequence
  Description of Artificial Sequence: Synthetic oligonucleotide
ucacccacgguacugguuc

SEQ ID NO: 689398 - RNA, 19 nt, Artificial Sequence
  Description of Artificial Sequence: Synthetic oligonucleotide
gaaguaaagaacaucugua

SEQ ID NO: 689399 - RNA, 19 nt, Artificial Sequence
  Description of Artificial Sequence: Synthetic oligonucleotide
uagugugaagguauacgcu

SEQ ID NO: 689400 - RNA, 19 nt, Artificial Sequence
  Description of Artificial Sequence: Synthetic oligonucleotide
gaagguauacgcugcagaa

SEQ ID NO: 689401 - RNA, 19 nt, Artificial Sequence
  Description of Artificial Sequence: Synthetic oligonucleotide
agugcuaucucagcauuuc

SEQ ID NO: 689402 - RNA, 19 nt, Artificial Sequence
  Description of Artificial Sequence: Synthetic oligonucleotide
ucaagguaacacuuguuuu

SEQ ID NO: 689403 - RNA, 19 nt, Artificial Sequence
  Description of Artificial Sequence: Synthetic oligonucleotide
auggugucaaaucaagcau

SEQ ID NO: 689404 - RNA, 19 nt, Artificial Sequence
  Description of Artificial Sequence: Synthetic oligonucleotide
ugcgacaugaagugugaca

SEQ ID NO: 689405 - RNA, 19 nt, Artificial Sequence
  Description of Artificial Sequence: Synthetic oligonucleotide
cugacucccaaucuucacc

SEQ ID NO: 689406 - RNA, 19 nt, Artificial Sequence
  Description of Artificial Sequence: Synthetic oligonucleotide
uguaacgcacuacugccau

SEQ ID NO: 689407 - RNA, 19 nt, Artificial Sequence
  Description of Artificial Sequence: Synthetic oligonucleotide
aucuuagugaaaauuuuga

SEQ ID NO: 689408 - RNA, 19 nt, Artificial Sequence
  Description of Artificial Sequence: Synthetic oligonucleotide
gagcauaaucucgaguaag

SEQ ID NO: 689409 - RNA, 19 nt, Artificial Sequence
  Description of Artificial Sequence: Synthetic oligonucleotide
caugaguaccuacaggcuc

SEQ ID NO: 689410 - RNA, 19 nt, Artificial Sequence
  Description of Artificial Sequence: Synthetic oligonucleotide
ggugaagcaggcugaaagg

SEQ ID NO: 689411 - RNA, 19 nt, Artificial Sequence
  Description of Artificial Sequence: Synthetic oligonucleotide
aaccucccuaaacugggug

SEQ ID NO: 689412 - RNA, 19 nt, Artificial Sequence
  Description of Artificial Sequence: Synthetic oligonucleotide
ugugcaguagagacaggac

SEQ ID NO: 689413 - RNA, 19 nt, Artificial Sequence
  Description of Artificial Sequence: Synthetic oligonucleotide
cauucagaguccucccacg

SEQ ID NO: 689414 - RNA, 19 nt, Artificial Sequence
  Description of Artificial Sequence: Synthetic oligonucleotide
aguccucccacgaacauag

SEQ ID NO: 689415 - RNA, 19 nt, Artificial Sequence
  Description of Artificial Sequence: Synthetic oligonucleotide
agauccgagcauaaucucg

SEQ ID NO: 689416 - RNA, 19 nt, Artificial Sequence
  Description of Artificial Sequence: Synthetic oligonucleotide
cuguucauaagguaguaaa

SEQ ID NO: 689417 - RNA, 19 nt, Artificial Sequence
  Description of Artificial Sequence: Synthetic oligonucleotide
cuugccugaaauacucaac

SEQ ID NO: 689418 - RNA, 19 nt, Artificial Sequence
  Description of Artificial Sequence: Synthetic oligonucleotide
gacuuaaccucccuaaacu

SEQ ID NO: 689419 - RNA, 19 nt, Artificial Sequence
  Description of Artificial Sequence: Synthetic oligonucleotide
aacauguaacgcacuacug

SEQ ID NO: 689420 - RNA, 19 nt, Artificial Sequence
  Description of Artificial Sequence: Synthetic oligonucleotide
ugugaagguauacgcugca

SEQ ID NO: 689421 - RNA, 19 nt, Artificial Sequence
  Description of Artificial Sequence: Synthetic oligonucleotide
gaaaacucgcuuauagaga

SEQ ID NO: 689422 - RNA, 19 nt, Artificial Sequence
  Description of Artificial Sequence: Synthetic oligonucleotide
cauauggaucauaagucca

SEQ ID NO: 689423 - RNA, 19 nt, Artificial Sequence
  Description of Artificial Sequence: Synthetic oligonucleotide
accaacaguaugcaaccca

SEQ ID NO: 689424 - RNA, 19 nt, Artificial Sequence
  Description of Artificial Sequence: Synthetic oligonucleotide
ugaaaccuagugugaaggu

SEQ ID NO: 689425 - RNA, 19 nt, Artificial Sequence
  Description of Artificial Sequence: Synthetic oligonucleotide
acuaggcacgaagucagcg

SEQ ID NO: 689426 - RNA, 19 nt, Artificial Sequence
  Description of Artificial Sequence: Synthetic oligonucleotide
aaguccauuuggggaaaac

SEQ ID NO: 689427 - RNA, 19 nt, Artificial Sequence
  Description of Artificial Sequence: Synthetic oligonucleotide
guagacuuaaccucccuaa

SEQ ID NO: 689428 - RNA, 19 nt, Artificial Sequence
  Description of Artificial Sequence: Synthetic oligonucleotide
uaacgcacuacugccaucu

SEQ ID NO: 689429 - RNA, 19 nt, Artificial Sequence
  Description of Artificial Sequence: Synthetic oligonucleotide
gaagugugacauaccagcc

SEQ ID NO: 689430 - RNA, 19 nt, Artificial Sequence
  Description of Artificial Sequence: Synthetic oligonucleotide
uguuuaucagcugcugugu

SEQ ID NO: 689431 - RNA, 19 nt, Artificial Sequence
  Description of Artificial Sequence: Synthetic oligonucleotide
aaaucaagcauuggcucaa

SEQ ID NO: 689432 - RNA, 19 nt, Artificial Sequence
  Description of Artificial Sequence: Synthetic oligonucleotide
cacuuuucacccacgguac

SEQ ID NO: 689433 - RNA, 19 nt, Artificial Sequence
  Description of Artificial Sequence: Synthetic oligonucleotide
agaagacgaaaucaaggua

SEQ ID NO: 689434 - RNA, 19 nt, Artificial Sequence
  Description of Artificial Sequence: Synthetic oligonucleotide
uugguaauuggauguuccu

SEQ ID NO: 689435 - RNA, 19 nt, Artificial Sequence
  Description of Artificial Sequence: Synthetic oligonucleotide
ucugcgacaugaaguguga

SEQ ID NO: 689436 - RNA, 19 nt, Artificial Sequence
  Description of Artificial Sequence: Synthetic oligonucleotide
ugcagaaccccugaaugca

SEQ ID NO: 689437 - RNA, 19 nt, Artificial Sequence
  Description of Artificial Sequence: Synthetic oligonucleotide
aaggagaacugacucccaa

SEQ ID NO: 689438 - RNA, 19 nt, Artificial Sequence
  Description of Artificial Sequence: Synthetic oligonucleotide
gaagauccgagcauaaucu

SEQ ID NO: 689439 - RNA, 19 nt, Artificial Sequence
  Description of Artificial Sequence: Synthetic oligonucleotide
agcgacaugggcaaacaag

SEQ ID NO: 689440 - RNA, 19 nt, Artificial Sequence
  Description of Artificial Sequence: Synthetic oligonucleotide
uggugucaaaucaagcauu

SEQ ID NO: 689441 - RNA, 19 nt, Artificial Sequence
  Description of Artificial Sequence: Synthetic oligonucleotide
ugccugaaauacucaacca

SEQ ID NO: 689442 - RNA, 19 nt, Artificial Sequence
  Description of Artificial Sequence: Synthetic oligonucleotide
guuacucuccucacuaggc

SEQ ID NO: 689443 - RNA, 19 nt, Artificial Sequence
  Description of Artificial Sequence: Synthetic oligonucleotide
acaggugcaucuaucugac

SEQ ID NO: 689444 - RNA, 19 nt, Artificial Sequence
  Description of Artificial Sequence: Synthetic oligonucleotide
aagguaacacuuguuuuau

SEQ ID NO: 689445 - RNA, 19 nt, Artificial Sequence
  Description of Artificial Sequence: Synthetic oligonucleotide
gacacuguugaggagaucu

SEQ ID NO: 689446 - RNA, 19 nt, Artificial Sequence
  Description of Artificial Sequence: Synthetic oligonucleotide
ggaagauccgagcauaauc

SEQ ID NO: 689447 - RNA, 19 nt, Artificial Sequence
  Description of Artificial Sequence: Synthetic oligonucleotide
ugccaacuaaguuacucuc

SEQ ID NO: 689448 - RNA, 19 nt, Artificial Sequence
  Description of Artificial Sequence: Synthetic oligonucleotide
ucccuaaacugggugaagc

SEQ ID NO: 689449 - RNA, 19 nt, Artificial Sequence
  Description of Artificial Sequence: Synthetic oligonucleotide
uauacgcugcagaaccccu

SEQ ID NO: 689450 - RNA, 19 nt, Artificial Sequence
  Description of Artificial Sequence: Synthetic oligonucleotide
ucuaccuuuccucgucacu

SEQ ID NO: 689451 - RNA, 19 nt, Artificial Sequence
  Description of Artificial Sequence: Synthetic oligonucleotide
uucugaaaucgaguucuag

SEQ ID NO: 689452 - RNA, 19 nt, Artificial Sequence
  Description of Artificial Sequence: Synthetic oligonucleotide
guauccugagauuuuagcu

SEQ ID NO: 689453 - RNA, 19 nt, Artificial Sequence
  Description of Artificial Sequence: Synthetic oligonucleotide
caaucaagggugcuccuug

SEQ ID NO: 689454 - RNA, 19 nt, Artificial Sequence
  Description of Artificial Sequence: Synthetic oligonucleotide
guugccaggguuccgacuc

SEQ ID NO: 689455 - RNA, 19 nt, Artificial Sequence
  Description of Artificial Sequence: Synthetic oligonucleotide
cuguuuguaaagacuccug

SEQ ID NO: 689456 - RNA, 19 nt, Artificial Sequence
  Description of Artificial Sequence: Synthetic oligonucleotide
ucuaggaguuaaagggaaa

SEQ ID NO: 689457 - RNA, 19 nt, Artificial Sequence
  Description of Artificial Sequence: Synthetic oligonucleotide
ugcugcacaaaucuccauu

SEQ ID NO: 689458 - RNA, 19 nt, Artificial Sequence
  Description of Artificial Sequence: Synthetic oligonucleotide
auaagggaccuuguggaug

SEQ ID NO: 689459 - RNA, 19 nt, Artificial Sequence
  Description of Artificial Sequence: Synthetic oligonucleotide
ugcagaugacugcuaccag

SEQ ID NO: 689460 - RNA, 19 nt, Artificial Sequence
  Description of Artificial Sequence: Synthetic oligonucleotide
uacugacaucuucuguuca

SEQ ID NO: 689461 - RNA, 19 nt, Artificial Sequence
  Description of Artificial Sequence: Synthetic oligonucleotide
aucuaccuuuccucgucac

SEQ ID NO: 689462 - RNA, 19 nt, Artificial Sequence
  Description of Artificial Sequence: Synthetic oligonucleotide
cacuacugccaucuuagug

SEQ ID NO: 689463 - RNA, 19 nt, Artificial Sequence
  Description of Artificial Sequence: Synthetic oligonucleotide
uacucuccucacuaggcac

SEQ ID NO: 689464 - RNA, 19 nt, Artificial Sequence
  Description of Artificial Sequence: Synthetic oligonucleotide
aacccagcuggugugggag

SEQ ID NO: 689465 - RNA, 19 nt, Artificial Sequence
  Description of Artificial Sequence: Synthetic oligonucleotide
gguacauauggaucauaag

SEQ ID NO: 689466 - RNA, 19 nt, Artificial Sequence
  Description of Artificial Sequence: Synthetic oligonucleotide
uagaaacuggaagauccga

SEQ ID NO: 689467 - RNA, 19 nt, Artificial Sequence
  Description of Artificial Sequence: Synthetic oligonucleotide
cucauugagccuacugcug

SEQ ID NO: 689468 - RNA, 19 nt, Artificial Sequence
  Description of Artificial Sequence: Synthetic oligonucleotide
caagguaacacuuguuuua

SEQ ID NO: 689469 - RNA, 19 nt, Artificial Sequence
  Description of Artificial Sequence: Synthetic oligonucleotide
ggaaaggguccacaggugc

SEQ ID NO: 689470 - RNA, 19 nt, Artificial Sequence
  Description of Artificial Sequence: Synthetic oligonucleotide
gaugacugcuaccagucua

SEQ ID NO: 689471 - RNA, 19 nt, Artificial Sequence
  Description of Artificial Sequence: Synthetic oligonucleotide
cuaucugacucauuuggaa

SEQ ID NO: 689472 - RNA, 19 nt, Artificial Sequence
  Description of Artificial Sequence: Synthetic oligonucleotide
acaugaagugugacauacc

SEQ ID NO: 689473 - RNA, 19 nt, Artificial Sequence
  Description of Artificial Sequence: Synthetic oligonucleotide
uccgagcauaaucucgagu

SEQ ID NO: 689474 - RNA, 19 nt, Artificial Sequence
  Description of Artificial Sequence: Synthetic oligonucleotide
agaaccuuaaggucuucuu

SEQ ID NO: 689475 - RNA, 19 nt, Artificial Sequence
  Description of Artificial Sequence: Synthetic oligonucleotide
auucagaguccucccacga

SEQ ID NO: 689476 - RNA, 19 nt, Artificial Sequence
  Description of Artificial Sequence: Synthetic oligonucleotide
gggaauguagacuuaaccu

SEQ ID NO: 689477 - RNA, 19 nt, Artificial Sequence
  Description of Artificial Sequence: Synthetic oligonucleotide
auuuggggaaaacucgcuu

SEQ ID NO: 689478 - RNA, 19 nt, Artificial Sequence
  Description of Artificial Sequence: Synthetic oligonucleotide
uacgcugcagaaccccuga

SEQ ID NO: 689479 - RNA, 19 nt, Artificial Sequence
  Description of Artificial Sequence: Synthetic oligonucleotide
gauccgagcauaaucucga

SEQ ID NO: 689480 - RNA, 19 nt, Artificial Sequence
  Description of Artificial Sequence: Synthetic oligonucleotide
uccguuauuccauguccac

SEQ ID NO: 689481 - RNA, 19 nt, Artificial Sequence
  Description of Artificial Sequence: Synthetic oligonucleotide
auccuaaugugcaguagag

SEQ ID NO: 689482 - RNA, 19 nt, Artificial Sequence
  Description of Artificial Sequence: Synthetic oligonucleotide
accuacaggcuccuugaug

SEQ ID NO: 689483 - RNA, 19 nt, Artificial Sequence
  Description of Artificial Sequence: Synthetic oligonucleotide
uugagccuacugcuggugu

SEQ ID NO: 689484 - RNA, 19 nt, Artificial Sequence
  Description of Artificial Sequence: Synthetic oligonucleotide
cauaccagccaaccucggc

SEQ ID NO: 689485 - RNA, 19 nt, Artificial Sequence
  Description of Artificial Sequence: Synthetic oligonucleotide
cucccacgaacauagccug

SEQ ID NO: 689486 - RNA, 19 nt, Artificial Sequence
  Description of Artificial Sequence: Synthetic oligonucleotide
agggcgaggaucggaagcg

SEQ ID NO: 689487 - RNA, 19 nt, Artificial Sequence
  Description of Artificial Sequence: Synthetic oligonucleotide
cuaccagucuaaaaugaaa

SEQ ID NO: 689488 - RNA, 19 nt, Artificial Sequence
  Description of Artificial Sequence: Synthetic oligonucleotide
caacaguaugcaacccagc

SEQ ID NO: 689489 - RNA, 19 nt, Artificial Sequence
  Description of Artificial Sequence: Synthetic oligonucleotide
gaacugacucccaaucuuc

SEQ ID NO: 689490 - RNA, 19 nt, Artificial Sequence
  Description of Artificial Sequence: Synthetic oligonucleotide
uccuaaugugcaguagaga

SEQ ID NO: 689491 - RNA, 19 nt, Artificial Sequence
  Description of Artificial Sequence: Synthetic oligonucleotide
uaccuacccuagaacguug

SEQ ID NO: 689492 - RNA, 19 nt, Artificial Sequence
  Description of Artificial Sequence: Synthetic oligonucleotide
gucugcgacaugaagugug

SEQ ID NO: 689493 - RNA, 19 nt, Artificial Sequence
  Description of Artificial Sequence: Synthetic oligonucleotide
aagccgcaucagcaguuag

SEQ ID NO: 689494 - RNA, 19 nt, Artificial Sequence
  Description of Artificial Sequence: Synthetic oligonucleotide
acugaauccguuauuccau

SEQ ID NO: 689495 - RNA, 19 nt, Artificial Sequence
  Description of Artificial Sequence: Synthetic oligonucleotide
accagccaaccucggcucc

SEQ ID NO: 689496 - RNA, 19 nt, Artificial Sequence
  Description of Artificial Sequence: Synthetic oligonucleotide
guauacgcugcagaacccc

SEQ ID NO: 689497 - RNA, 19 nt, Artificial Sequence
  Description of Artificial Sequence: Synthetic oligonucleotide
uucagaguccucccacgaa

SEQ ID NO: 689498 - RNA, 19 nt, Artificial Sequence
  Description of Artificial Sequence: Synthetic oligonucleotide
ccuagugugaagguauacg

SEQ ID NO: 689499 - RNA, 19 nt, Artificial Sequence
  Description of Artificial Sequence: Synthetic oligonucleotide
uccuuacuccuuucuguac

SEQ ID NO: 689500 - RNA, 19 nt, Artificial Sequence
  Description of Artificial Sequence: Synthetic oligonucleotide
auacucaaccaccgagaca

SEQ ID NO: 689501 - RNA, 19 nt, Artificial Sequence
  Description of Artificial Sequence: Synthetic oligonucleotide
ucugcguccccacuugguu

SEQ ID NO: 689502 - RNA, 19 nt, Artificial Sequence
  Description of Artificial Sequence: Synthetic oligonucleotide
caggguuccgacucacuac

SEQ ID NO: 689503 - RNA, 19 nt, Artificial Sequence
  Description of Artificial Sequence: Synthetic oligonucleotide
agggacgucugcgacauga

SEQ ID NO: 689504 - RNA, 19 nt, Artificial Sequence
  Description of Artificial Sequence: Synthetic oligonucleotide
gaacguugcuucaauaagu

SEQ ID NO: 689505 - RNA, 19 nt, Artificial Sequence
  Description of Artificial Sequence: Synthetic oligonucleotide
uccuugccugaaauacuca

SEQ ID NO: 689506 - RNA, 19 nt, Artificial Sequence
  Description of Artificial Sequence: Synthetic oligonucleotide
acguugcuucaauaaguca

SEQ ID NO: 689507 - RNA, 19 nt, Artificial Sequence
  Description of Artificial Sequence: Synthetic oligonucleotide
uaaucucgaguaagguuuu

SEQ ID NO: 689508 - RNA, 19 nt, Artificial Sequence
  Description of Artificial Sequence: Synthetic oligonucleotide
ccauuuggggaaaacucgc

SEQ ID NO: 689509 - RNA, 19 nt, Artificial Sequence
  Description of Artificial Sequence: Synthetic oligonucleotide
auauggaucauaaguccau

SEQ ID NO: 689510 - RNA, 19 nt, Artificial Sequence
  Description of Artificial Sequence: Synthetic oligonucleotide
uuaccuacccuagaacguu

SEQ ID NO: 689511 - RNA, 19 nt, Artificial Sequence
  Description of Artificial Sequence: Synthetic oligonucleotide
cucuaggaguuaaagggaa

SEQ ID NO: 689512 - RNA, 19 nt, Artificial Sequence
  Description of Artificial Sequence: Synthetic oligonucleotide
cacccuccagaaaccauag

SEQ ID NO: 689513 - RNA, 19 nt, Artificial Sequence
  Description of Artificial Sequence: Synthetic oligonucleotide
ugguaauuggauguuccuu

SEQ ID NO: 689514 - RNA, 19 nt, Artificial Sequence
  Description of Artificial Sequence: Synthetic oligonucleotide
accagacuauuucuguuua

SEQ ID NO: 689515 - RNA, 19 nt, Artificial Sequence
  Description of Artificial Sequence: Synthetic oligonucleotide
caggaccccacugaauccg

SEQ ID NO: 689516 - RNA, 19 nt, Artificial Sequence
  Description of Artificial Sequence: Synthetic oligonucleotide
cuuaccagacuauuucugu

SEQ ID NO: 689517 - RNA, 19 nt, Artificial Sequence
  Description of Artificial Sequence: Synthetic oligonucleotide
aacugcucauugagccuac

SEQ ID NO: 689518 - RNA, 19 nt, Artificial Sequence
  Description of Artificial Sequence: Synthetic oligonucleotide
agagaauaagggcgaggau

SEQ ID NO: 689519 - RNA, 19 nt, Artificial Sequence
  Description of Artificial Sequence: Synthetic oligonucleotide
aggagaacugacucccaau

SEQ ID NO: 689520 - RNA, 19 nt, Artificial Sequence
  Description of Artificial Sequence: Synthetic oligonucleotide
aaugacucuaggaguuaaa

SEQ ID NO: 689521 - RNA, 19 nt, Artificial Sequence
  Description of Artificial Sequence: Synthetic oligonucleotide
gugugaagguauacgcugc

SEQ ID NO: 689522 - RNA, 19 nt, Artificial Sequence
  Description of Artificial Sequence: Synthetic oligonucleotide
gacgucugcgacaugaagu

SEQ ID NO: 689523 - RNA, 19 nt, Artificial Sequence
  Description of Artificial Sequence: Synthetic oligonucleotide
uacaggcuccuugaugugu

SEQ ID NO: 689524 - RNA, 19 nt, Artificial Sequence
  Description of Artificial Sequence: Synthetic oligonucleotide
gaguucuagcagcaucauc

SEQ ID NO: 689525 - RNA, 19 nt, Artificial Sequence
  Description of Artificial Sequence: Synthetic oligonucleotide
augcaacccagcuggugug

SEQ ID NO: 689526 - RNA, 19 nt, Artificial Sequence
  Description of Artificial Sequence: Synthetic oligonucleotide
gcuuauagagauucauuaa

SEQ ID NO: 689527 - RNA, 19 nt, Artificial Sequence
  Description of Artificial Sequence: Synthetic oligonucleotide
auaagguaguaaagaaaau

SEQ ID NO: 689528 - RNA, 19 nt, Artificial Sequence
  Description of Artificial Sequence: Synthetic oligonucleotide
uccuuuaggguaccuucuu

SEQ ID NO: 689529 - RNA, 19 nt, Artificial Sequence
  Description of Artificial Sequence: Synthetic oligonucleotide
ucggaagcgccugaaucca

SEQ ID NO: 689530 - RNA, 19 nt, Artificial Sequence
  Description of Artificial Sequence: Synthetic oligonucleotide
aucucgaguaagguuuucu

SEQ ID NO: 689531 - RNA, 19 nt, Artificial Sequence
  Description of Artificial Sequence: Synthetic oligonucleotide
gaauaagggcgaggaucgg

SEQ ID NO: 689532 - RNA, 19 nt, Artificial Sequence
  Description of Artificial Sequence: Synthetic oligonucleotide
accaccgagacagggacgu

SEQ ID NO: 689533 - RNA, 19 nt, Artificial Sequence
  Description of Artificial Sequence: Synthetic oligonucleotide
gagaacugacucccaaucu

SEQ ID NO: 689534 - RNA, 19 nt, Artificial Sequence
  Description of Artificial Sequence: Synthetic oligonucleotide
ggugcaucuaucugacuca

SEQ ID NO: 689535 - RNA, 19 nt, Artificial Sequence
  Description of Artificial Sequence: Synthetic oligonucleotide
uucacccuccagaaaccau

SEQ ID NO: 689536 - RNA, 19 nt, Artificial Sequence
  Description of Artificial Sequence: Synthetic oligonucleotide
uauggaucauaaguccauu

SEQ ID NO: 689537 - RNA, 19 nt, Artificial Sequence
  Description of Artificial Sequence: Synthetic oligonucleotide
agccgcaucagcaguuagg

SEQ ID NO: 689538 - RNA, 19 nt, Artificial Sequence
  Description of Artificial Sequence: Synthetic oligonucleotide
auccgagcauaaucucgag

SEQ ID NO: 689539 - RNA, 19 nt, Artificial Sequence
  Description of Artificial Sequence: Synthetic oligonucleotide
cugagauuuaaugacucua

SEQ ID NO: 689540 - RNA, 19 nt, Artificial Sequence
  Description of Artificial Sequence: Synthetic oligonucleotide
caacuaaguuacucuccuc

SEQ ID NO: 689541 - RNA, 19 nt, Artificial Sequence
  Description of Artificial Sequence: Synthetic oligonucleotide
aaccaccgagacagggacg

SEQ ID NO: 689542 - RNA, 19 nt, Artificial Sequence
  Description of Artificial Sequence: Synthetic oligonucleotide
ugagaacaacucucuugau

SEQ ID NO: 689543 - RNA, 19 nt, Artificial Sequence
  Description of Artificial Sequence: Synthetic oligonucleotide
uguuccuuuaggguaccuu

SEQ ID NO: 689544 - RNA, 19 nt, Artificial Sequence
  Description of Artificial Sequence: Synthetic oligonucleotide
cuucuguucauaagguagu

SEQ ID NO: 689545 - RNA, 19 nt, Artificial Sequence
  Description of Artificial Sequence: Synthetic oligonucleotide
cauaaucucgaguaagguu

SEQ ID NO: 689546 - RNA, 19 nt, Artificial Sequence
  Description of Artificial Sequence: Synthetic oligonucleotide
gggaaaacucgcuuauaga

SEQ ID NO: 689547 - RNA, 19 nt, Artificial Sequence
  Description of Artificial Sequence: Synthetic oligonucleotide
uuucacccacgguacuggu

SEQ ID NO: 689548 - RNA, 19 nt, Artificial Sequence
  Description of Artificial Sequence: Synthetic oligonucleotide
auugagccuacugcuggug

SEQ ID NO: 689549 - RNA, 19 nt, Artificial Sequence
  Description of Artificial Sequence: Synthetic oligonucleotide
aaaauccauucagcuuggu

SEQ ID NO: 689550 - RNA, 19 nt, Artificial Sequence
  Description of Artificial Sequence: Synthetic oligonucleotide
cacuucauguggccaugag

SEQ ID NO: 689551 - RNA, 19 nt, Artificial Sequence
  Description of Artificial Sequence: Synthetic oligonucleotide
auccguuauuccaugucca

SEQ ID NO: 689552 - RNA, 19 nt, Artificial Sequence
  Description of Artificial Sequence: Synthetic oligonucleotide
ugagccuacugcugguguu

SEQ ID NO: 689553 - RNA, 19 nt, Artificial Sequence
  Description of Artificial Sequence: Synthetic oligonucleotide
gcuaucucagcauuuccaa

SEQ ID NO: 689554 - RNA, 19 nt, Artificial Sequence
  Description of Artificial Sequence: Synthetic oligonucleotide
agacgaaaucaagguaaca

SEQ ID NO: 689555 - RNA, 19 nt, Artificial Sequence
  Description of Artificial Sequence: Synthetic oligonucleotide
cauuggaucuagaccagcu

SEQ ID NO: 689556 - RNA, 19 nt, Artificial Sequence
  Description of Artificial Sequence: Synthetic oligonucleotide
gguaauuggauguuccuuu

SEQ ID NO: 689557 - RNA, 19 nt, Artificial Sequence
  Description of Artificial Sequence: Synthetic oligonucleotide
gacugcuaccagucuaaaa

SEQ ID NO: 689558 - RNA, 19 nt, Artificial Sequence
  Description of Artificial Sequence: Synthetic oligonucleotide
gugccaacuaaguuacucu

SEQ ID NO: 689559 - RNA, 19 nt, Artificial Sequence
  Description of Artificial Sequence: Synthetic oligonucleotide
guaugcaacccagcuggug

SEQ ID NO: 689560 - RNA, 19 nt, Artificial Sequence
  Description of Artificial Sequence: Synthetic oligonucleotide
cuugaugaccauccugucu

SEQ ID NO: 689561 - RNA, 19 nt, Artificial Sequence
  Description of Artificial Sequence: Synthetic oligonucleotide
uggauuggcugcagugcua

SEQ ID NO: 689562 - RNA, 19 nt, Artificial Sequence
  Description of Artificial Sequence: Synthetic oligonucleotide
cugcguccccacuugguuc

SEQ ID NO: 689563 - RNA, 19 nt, Artificial Sequence
  Description of Artificial Sequence: Synthetic oligonucleotide
cuaaguuacucuccucacu

SEQ ID NO: 689564 - RNA, 19 nt, Artificial Sequence
  Description of Artificial Sequence: Synthetic oligonucleotide
gcaucuaucugacucauuu

SEQ ID NO: 689565 - RNA, 19 nt, Artificial Sequence
  Description of Artificial Sequence: Synthetic oligonucleotide
ccgagcauaaucucgagua

SEQ ID NO: 689566 - RNA, 19 nt, Artificial Sequence
  Description of Artificial Sequence: Synthetic oligonucleotide
cuagaacguugcuucaaua

SEQ ID NO: 689567 - RNA, 19 nt, Artificial Sequence
  Description of Artificial Sequence: Synthetic oligonucleotide
agaguccucccacgaacau

SEQ ID NO: 689568 - RNA, 19 nt, Artificial Sequence
  Description of Artificial Sequence: Synthetic oligonucleotide
auguaacgcacuacugcca

SEQ ID NO: 689569 - RNA, 19 nt, Artificial Sequence
  Description of Artificial Sequence: Synthetic oligonucleotide
cacuaggcacgaagucagc

SEQ ID NO: 689570 - RNA, 19 nt, Artificial Sequence
  Description of Artificial Sequence: Synthetic oligonucleotide
ugaguaccuacaggcuccu

SEQ ID NO: 689571 - RNA, 19 nt, Artificial Sequence
  Description of Artificial Sequence: Synthetic oligonucleotide
cugucuggauccacugaca

SEQ ID NO: 689572 - RNA, 19 nt, Artificial Sequence
  Description of Artificial Sequence: Synthetic oligonucleotide
cacgaacauagccugagau

SEQ ID NO: 689573 - RNA, 19 nt, Artificial Sequence
  Description of Artificial Sequence: Synthetic oligonucleotide
agcuucuuaccagacuauu

SEQ ID NO: 689574 - RNA, 19 nt, Artificial Sequence
  Description of Artificial Sequence: Synthetic oligonucleotide
ugcuccccuuccauuggau

SEQ ID NO: 689575 - RNA, 19 nt, Artificial Sequence
  Description of Artificial Sequence: Synthetic oligonucleotide
gagaaugaaacugcucauu

SEQ ID NO: 689576 - RNA, 19 nt, Artificial Sequence
  Description of Artificial Sequence: Synthetic oligonucleotide
gaccccacugaauccguua

SEQ ID NO: 689577 - RNA, 19 nt, Artificial Sequence
  Description of Artificial Sequence: Synthetic oligonucleotide
gguauacgcugcagaaccc

SEQ ID NO: 689578 - RNA, 19 nt, Artificial Sequence
  Description of Artificial Sequence: Synthetic oligonucleotide
acauaccagccaaccucgg

SEQ ID NO: 689579 - RNA, 19 nt, Artificial Sequence
  Description of Artificial Sequence: Synthetic oligonucleotide
caucuaccuuuccucguca

SEQ ID NO: 689580 - RNA, 19 nt, Artificial Sequence
  Description of Artificial Sequence: Synthetic oligonucleotide
agguaacacuuguuuuauu

SEQ ID NO: 689581 - RNA, 19 nt, Artificial Sequence
  Description of Artificial Sequence: Synthetic oligonucleotide
ugcaucuaucugacucauu

SEQ ID NO: 689582 - RNA, 19 nt, Artificial Sequence
  Description of Artificial Sequence: Synthetic oligonucleotide
cauuuggggaaaacucgcu

SEQ ID NO: 689583 - RNA, 19 nt, Artificial Sequence
  Description of Artificial Sequence: Synthetic oligonucleotide
guaacgcacuacugccauc

SEQ ID NO: 689584 - RNA, 19 nt, Artificial Sequence
  Description of Artificial Sequence: Synthetic oligonucleotide
gaggaucggaagcgccuga

SEQ ID NO: 689585 - RNA, 19 nt, Artificial Sequence
  Description of Artificial Sequence: Synthetic oligonucleotide
aacgcacuacugccaucuu

SEQ ID NO: 689586 - RNA, 19 nt, Artificial Sequence
  Description of Artificial Sequence: Synthetic oligonucleotide
uaaguccauuuggggaaaa

SEQ ID NO: 689587 - RNA, 19 nt, Artificial Sequence
  Description of Artificial Sequence: Synthetic oligonucleotide
guaguaucugcugcacaaa

SEQ ID NO: 689588 - RNA, 19 nt, Artificial Sequence
  Description of Artificial Sequence: Synthetic oligonucleotide
ggugggaauguagacuuaa

SEQ ID NO: 689589 - RNA, 19 nt, Artificial Sequence
  Description of Artificial Sequence: Synthetic oligonucleotide
ugacugcuaccagucuaaa

SEQ ID NO: 689590 - RNA, 19 nt, Artificial Sequence
  Description of Artificial Sequence: Synthetic oligonucleotide
cuucacccuccagaaacca

SEQ ID NO: 689591 - RNA, 19 nt, Artificial Sequence
  Description of Artificial Sequence: Synthetic oligonucleotide
cugucacagaagacgaaau

SEQ ID NO: 689592 - RNA, 19 nt, Artificial Sequence
  Description of Artificial Sequence: Synthetic oligonucleotide
gcuguaguaucugcugcac

SEQ ID NO: 689593 - RNA, 19 nt, Artificial Sequence
  Description of Artificial Sequence: Synthetic oligonucleotide
gcagaaccccugaaugcag

SEQ ID NO: 689594 - RNA, 19 nt, Artificial Sequence
  Description of Artificial Sequence: Synthetic oligonucleotide
ccgacucacuaccauguuc

SEQ ID NO: 689595 - RNA, 19 nt, Artificial Sequence
  Description of Artificial Sequence: Synthetic oligonucleotide
acucgcuuauagagauuca

SEQ ID NO: 689596 - RNA, 19 nt, Artificial Sequence
  Description of Artificial Sequence: Synthetic oligonucleotide
ccucacuaggcacgaaguc

SEQ ID NO: 689597 - RNA, 19 nt, Artificial Sequence
  Description of Artificial Sequence: Synthetic oligonucleotide
cccacgaacauagccugag

SEQ ID NO: 689598 - RNA, 19 nt, Artificial Sequence
  Description of Artificial Sequence: Synthetic oligonucleotide
gcgacaugggcaaacaagu

SEQ ID NO: 689599 - RNA, 19 nt, Artificial Sequence
  Description of Artificial Sequence: Synthetic oligonucleotide
ggcuuaaaccacaucacau

SEQ ID NO: 689600 - RNA, 19 nt, Artificial Sequence
  Description of Artificial Sequence: Synthetic oligonucleotide
aguaugcaacccagcuggu

SEQ ID NO: 689601 - RNA, 19 nt, Artificial Sequence
  Description of Artificial Sequence: Synthetic oligonucleotide
gcgacaugaagugugacau

SEQ ID NO: 689602 - RNA, 19 nt, Artificial Sequence
  Description of Artificial Sequence: Synthetic oligonucleotide
gcuaccagucuaaaaugaa

SEQ ID NO: 689603 - RNA, 19 nt, Artificial Sequence
  Description of Artificial Sequence: Synthetic oligonucleotide
caaauaccuggccuauuau

SEQ ID NO: 689604 - RNA, 19 nt, Artificial Sequence
  Description of Artificial Sequence: Synthetic oligonucleotide
cugcgacaugaagugugac

SEQ ID NO: 689605 - RNA, 19 nt, Artificial Sequence
  Description of Artificial Sequence: Synthetic oligonucleotide
cucgcuuauagagauucau

SEQ ID NO: 689606 - RNA, 19 nt, Artificial Sequence
  Description of Artificial Sequence: Synthetic oligonucleotide
ccaacuaaguuacucuccu

SEQ ID NO: 689607 - RNA, 19 nt, Artificial Sequence
  Description of Artificial Sequence: Synthetic oligonucleotide
gcugugugcugagagaaua

SEQ ID NO: 689608 - RNA, 19 nt, Artificial Sequence
  Description of Artificial Sequence: Synthetic oligonucleotide
gcgccugaauccacagugg

SEQ ID NO: 689609 - RNA, 19 nt, Artificial Sequence
  Description of Artificial Sequence: Synthetic oligonucleotide
gggucccaaggagaugucc

SEQ ID NO: 689610 - RNA, 19 nt, Artificial Sequence
  Description of Artificial Sequence: Synthetic oligonucleotide
aggaucggaagcgccugaa

SEQ ID NO: 689611 - RNA, 19 nt, Artificial Sequence
  Description of Artificial Sequence: Synthetic oligonucleotide
cccuaaacugggugaagca

SEQ ID NO: 689612 - RNA, 19 nt, Artificial Sequence
  Description of Artificial Sequence: Synthetic oligonucleotide
ggcgaggaucggaagcgcc

SEQ ID NO: 689613 - RNA, 19 nt, Artificial Sequence
  Description of Artificial Sequence: Synthetic oligonucleotide
cauugagccuacugcuggu

SEQ ID NO: 689614 - RNA, 19 nt, Artificial Sequence
  Description of Artificial Sequence: Synthetic oligonucleotide
ccauuggaucuagaccagc

SEQ ID NO: 689615 - RNA, 19 nt, Artificial Sequence
  Description of Artificial Sequence: Synthetic oligonucleotide
ccucccacgaacauagccu

SEQ ID NO: 689616 - RNA, 19 nt, Artificial Sequence
  Description of Artificial Sequence: Synthetic oligonucleotide
acccacgguacugguucug

SEQ ID NO: 689617 - RNA, 19 nt, Artificial Sequence
  Description of Artificial Sequence: Synthetic oligonucleotide
gugcuccuugccugaaaua

SEQ ID NO: 689618 - RNA, 19 nt, Artificial Sequence
  Description of Artificial Sequence: Synthetic oligonucleotide
cuacccuagaacguugcuu

SEQ ID NO: 689619 - RNA, 19 nt, Artificial Sequence
  Description of Artificial Sequence: Synthetic oligonucleotide
cgaaaucaagguaacacuu

SEQ ID NO: 689620 - RNA, 19 nt, Artificial Sequence
  Description of Artificial Sequence: Synthetic oligonucleotide
cagcgacaugggcaaacaa

SEQ ID NO: 689621 - RNA, 19 nt, Artificial Sequence
  Description of Artificial Sequence: Synthetic oligonucleotide
ccaucuuagugaaaauuuu

SEQ ID NO: 689622 - RNA, 19 nt, Artificial Sequence
  Description of Artificial Sequence: Synthetic oligonucleotide
caccgagacagggacgucu

SEQ ID NO: 689623 - RNA, 19 nt, Artificial Sequence
  Description of Artificial Sequence: Synthetic oligonucleotide
gguuccgacucacuaccau

SEQ ID NO: 689624 - RNA, 19 nt, Artificial Sequence
  Description of Artificial Sequence: Synthetic oligonucleotide
ggccuauuauaagggaccu

SEQ ID NO: 689625 - RNA, 19 nt, Artificial Sequence
  Description of Artificial Sequence: Synthetic oligonucleotide
cguuauuccauguccacuu

SEQ ID NO: 689626 - RNA, 19 nt, Artificial Sequence
  Description of Artificial Sequence: Synthetic oligonucleotide
ggcacgaagucagcgacau

SEQ ID NO: 689627 - RNA, 19 nt, Artificial Sequence
  Description of Artificial Sequence: Synthetic oligonucleotide
ccaugaguaccuacaggcu

SEQ ID NO: 689628 - RNA, 19 nt, Artificial Sequence
  Description of Artificial Sequence: Synthetic oligonucleotide
gccugaauccacaguggaa

SEQ ID NO: 689629 - RNA, 19 nt, Artificial Sequence
  Description of Artificial Sequence: Synthetic oligonucleotide
gugcaucuaucugacucau

SEQ ID NO: 689630 - RNA, 19 nt, Artificial Sequence
  Description of Artificial Sequence: Synthetic oligonucleotide
gcuucuuaccagacuauuu

SEQ ID NO: 689631 - RNA, 19 nt, Artificial Sequence
  Description of Artificial Sequence: Synthetic oligonucleotide
cugccaucuuagugaaaau

SEQ ID NO: 689632 - RNA, 19 nt, Artificial Sequence
  Description of Artificial Sequence: Synthetic oligonucleotide
ccgagacagggacgucugc

SEQ ID NO: 689633 - RNA, 19 nt, Artificial Sequence
  Description of Artificial Sequence: Synthetic oligonucleotide
gggcgaggaucggaagcgc

SEQ ID NO: 689634 - RNA, 19 nt, Artificial Sequence
  Description of Artificial Sequence: Synthetic oligonucleotide
cgagcauaaucucgaguaa

SEQ ID NO: 689635 - RNA, 19 nt, Artificial Sequence
  Description of Artificial Sequence: Synthetic oligonucleotide
ccuagaacguugcuucaau

SEQ ID NO: 689636 - RNA, 19 nt, Artificial Sequence
  Description of Artificial Sequence: Synthetic oligonucleotide
ccaaagccgcaucagcagu

SEQ ID NO: 689637 - RNA, 19 nt, Artificial Sequence
  Description of Artificial Sequence: Synthetic oligonucleotide
cgaggaucggaagcgccug

SEQ ID NO: 689638 - RNA, 19 nt, Artificial Sequence
  Description of Artificial Sequence: Synthetic oligonucleotide
caucagcaguuaggaaucu

SEQ ID NO: 689639 - RNA, 19 nt, Artificial Sequence
  Description of Artificial Sequence: Synthetic oligonucleotide
ccacgaacauagccugaga

SEQ ID NO: 689640 - RNA, 19 nt, Artificial Sequence
  Description of Artificial Sequence: Synthetic oligonucleotide
ggaucggaagcgccugaau

SEQ ID NO: 689641 - RNA, 19 nt, Artificial Sequence
  Description of Artificial Sequence: Synthetic oligonucleotide
ccccuuccauuggaucuag

SEQ ID NO: 689642 - RNA, 19 nt, Artificial Sequence
  Description of Artificial Sequence: Synthetic oligonucleotide
ggguuccgacucacuacca

SEQ ID NO: 689643 - RNA, 19 nt, Artificial Sequence
  Description of Artificial Sequence: Synthetic oligonucleotide
caggugcaucuaucugacu

SEQ ID NO: 689644 - RNA, 19 nt, Artificial Sequence
  Description of Artificial Sequence: Synthetic oligonucleotide
gcgaggaucggaagcgccu

SEQ ID NO: 689645 - RNA, 19 nt, Artificial Sequence
  Description of Artificial Sequence: Synthetic oligonucleotide
gggacgucugcgacaugaa

SEQ ID NO: 689646 - RNA, 19 nt, Artificial Sequence
  Description of Artificial Sequence: Synthetic oligonucleotide
cccuagaacguugcuucaa

SEQ ID NO: 689647 - RNA, 19 nt, Artificial Sequence
  Description of Artificial Sequence: Synthetic oligonucleotide
ccguuauuccauguccacu

SEQ ID NO: 689648 - RNA, 19 nt, Artificial Sequence
  Description of Artificial Sequence: Synthetic oligonucleotide
ccgcaucagcaguuaggaa

SEQ ID NO: 689649 - RNA, 19 nt, Artificial Sequence
  Description of Artificial Sequence: Synthetic oligonucleotide
ggggucccaaggagauguc

SEQ ID NO: 689650 - RNA, 19 nt, Artificial Sequence
  Description of Artificial Sequence: Synthetic oligonucleotide
gccuauuauaagggaccuu

SEQ ID NO: 689651 - RNA, 19 nt, Artificial Sequence
  Description of Artificial Sequence: Synthetic oligonucleotide
ccaccgagacagggacguc

SEQ ID NO: 689652 - RNA, 19 nt, Artificial Sequence
  Description of Artificial Sequence: Synthetic oligonucleotide
cagccaaccucggcuccuu

SEQ ID NO: 689653 - RNA, 19 nt, Artificial Sequence
  Description of Artificial Sequence: Synthetic oligonucleotide
ggaccccacugaauccguu

SEQ ID NO: 689654 - RNA, 19 nt, Artificial Sequence
  Description of Artificial Sequence: Synthetic oligonucleotide
cgucugcgacaugaagugu

SEQ ID NO: 689655 - RNA, 19 nt, Artificial Sequence
  Description of Artificial Sequence: Synthetic oligonucleotide
ugaaaauucccaaugaggc

SEQ ID NO: 689656 - RNA, 19 nt, Artificial Sequence
  Description of Artificial Sequence: Synthetic oligonucleotide
aauguagcggaucaaacuc

SEQ ID NO: 689657 - RNA, 19 nt, Artificial Sequence
  Description of Artificial Sequence: Synthetic oligonucleotide
gauucagugacuuacgaug

SEQ ID NO: 689658 - RNA, 19 nt, Artificial Sequence
  Description of Artificial Sequence: Synthetic oligonucleotide
agaagagugaauugggcgc

SEQ ID NO: 689659 - RNA, 19 nt, Artificial Sequence
  Description of Artificial Sequence: Synthetic oligonucleotide
uggaugaucaauccaaucc

SEQ ID NO: 689660 - RNA, 19 nt, Artificial Sequence
  Description of Artificial Sequence: Synthetic oligonucleotide
aacuugaucucacaugcgg

SEQ ID NO: 689661 - RNA, 19 nt, Artificial Sequence
  Description of Artificial Sequence: Synthetic oligonucleotide
aauuuaguucauuugggca

SEQ ID NO: 689662 - RNA, 19 nt, Artificial Sequence
  Description of Artificial Sequence: Synthetic oligonucleotide
aaauguuccagugaaauga

SEQ ID NO: 689663 - RNA, 19 nt, Artificial Sequence
  Description of Artificial Sequence: Synthetic oligonucleotide
uuauauuugguaaacaguu

SEQ ID NO: 689664 - RNA, 19 nt, Artificial Sequence
  Description of Artificial Sequence: Synthetic oligonucleotide
agaggagucaacaagauuc

SEQ ID NO: 689665 - RNA, 19 nt, Artificial Sequence
  Description of Artificial Sequence: Synthetic oligonucleotide
aguaugacccaccucaugg

SEQ ID NO: 689666 - RNA, 19 nt, Artificial Sequence
  Description of Artificial Sequence: Synthetic oligonucleotide
aacagauugguaucccagc

SEQ ID NO: 689667 - RNA, 19 nt, Artificial Sequence
  Description of Artificial Sequence: Synthetic oligonucleotide
cauucuguaaagauguucc

SEQ ID NO: 689668 - RNA, 19 nt, Artificial Sequence
  Description of Artificial Sequence: Synthetic oligonucleotide
agugucaguaccaugaugg

SEQ ID NO: 689669 - RNA, 19 nt, Artificial Sequence
  Description of Artificial Sequence: Synthetic oligonucleotide
agaauuauuauauuuggua

SEQ ID NO: 689670 - RNA, 19 nt, Artificial Sequence
  Description of Artificial Sequence: Synthetic oligonucleotide
aaauguagcggaucaaacu

SEQ ID NO: 689671 - RNA, 19 nt, Artificial Sequence
  Description of Artificial Sequence: Synthetic oligonucleotide
aauguaaagaaugucugcu

SEQ ID NO: 689672 - RNA, 19 nt, Artificial Sequence
  Description of Artificial Sequence: Synthetic oligonucleotide
uguuccuuugucaaggucu

SEQ ID NO: 689673 - RNA, 19 nt, Artificial Sequence
  Description of Artificial Sequence: Synthetic oligonucleotide
aauuacaggcccugaacag

SEQ ID NO: 689674 - RNA, 19 nt, Artificial Sequence
  Description of Artificial Sequence: Synthetic oligonucleotide
aaaggcagaugaaaauucc

SEQ ID NO: 689675 - RNA, 19 nt, Artificial Sequence
  Description of Artificial Sequence: Synthetic oligonucleotide
agauugguaucccagcugg

SEQ ID NO: 689676 - RNA, 19 nt, Artificial Sequence
  Description of Artificial Sequence: Synthetic oligonucleotide
ucguagaugaguuuuguga

SEQ ID NO: 689677 - RNA, 19 nt, Artificial Sequence
  Description of Artificial Sequence: Synthetic oligonucleotide
uuuucggaguccaugagac

SEQ ID NO: 689678 - RNA, 19 nt, Artificial Sequence
  Description of Artificial Sequence: Synthetic oligonucleotide
gacauaaccaucaauggac

SEQ ID NO: 689679 - RNA, 19 nt, Artificial Sequence
  Description of Artificial Sequence: Synthetic oligonucleotide
gucaacaagauucagugac

SEQ ID NO: 689680 - RNA, 19 nt, Artificial Sequence
  Description of Artificial Sequence: Synthetic oligonucleotide
uuuccaacuagcuucucgc

SEQ ID NO: 689681 - RNA, 19 nt, Artificial Sequence
  Description of Artificial Sequence: Synthetic oligonucleotide
aucaauccaauccggaguc

SEQ ID NO: 689682 - RNA, 19 nt, Artificial Sequence
  Description of Artificial Sequence: Synthetic oligonucleotide
agcggaucaaacuccauuc

SEQ ID NO: 689683 - RNA, 19 nt, Artificial Sequence
  Description of Artificial Sequence: Synthetic oligonucleotide
uaaaccacgaucuccugug

SEQ ID NO: 689684 - RNA, 19 nt, Artificial Sequence
  Description of Artificial Sequence: Synthetic oligonucleotide
aauuuaagcuggcuucuca

SEQ ID NO: 689685 - RNA, 19 nt, Artificial Sequence
  Description of Artificial Sequence: Synthetic oligonucleotide
ugugacaaauguuccagug

SEQ ID NO: 689686 - RNA, 19 nt, Artificial Sequence
  Description of Artificial Sequence: Synthetic oligonucleotide
accaucaauggacagacca

SEQ ID NO: 689687 - RNA, 19 nt, Artificial Sequence
  Description of Artificial Sequence: Synthetic oligonucleotide
agcucaucgaaccuauuuc

SEQ ID NO: 689688 - RNA, 19 nt, Artificial Sequence
  Description of Artificial Sequence: Synthetic oligonucleotide
ugguaaacaguuugguucc

SEQ ID NO: 689689 - RNA, 19 nt, Artificial Sequence
  Description of Artificial Sequence: Synthetic oligonucleotide
acugugaacagugacuccg

SEQ ID NO: 689690 - RNA, 19 nt, Artificial Sequence
  Description of Artificial Sequence: Synthetic oligonucleotide
aagaggcuaggcugggccc

SEQ ID NO: 689691 - RNA, 19 nt, Artificial Sequence
  Description of Artificial Sequence: Synthetic oligonucleotide
uuuguuagguaggucauug

SEQ ID NO: 689692 - RNA, 19 nt, Artificial Sequence
  Description of Artificial Sequence: Synthetic oligonucleotide
auuuaagcuggcuucucag

SEQ ID NO: 689693 - RNA, 19 nt, Artificial Sequence
  Description of Artificial Sequence: Synthetic oligonucleotide
gaauuacaggcccugaaca

SEQ ID NO: 689694 - RNA, 19 nt, Artificial Sequence
  Description of Artificial Sequence: Synthetic oligonucleotide
gaaccuagaaaaugauccc

SEQ ID NO: 689695 - RNA, 19 nt, Artificial Sequence
  Description of Artificial Sequence: Synthetic oligonucleotide
aguccauuucaccaugguc

SEQ ID NO: 689696 - RNA, 19 nt, Artificial Sequence
  Description of Artificial Sequence: Synthetic oligonucleotide
uaggccuuauugcaucugg

SEQ ID NO: 689697 - RNA, 19 nt, Artificial Sequence
  Description of Artificial Sequence: Synthetic oligonucleotide
uucuuuaggagugucugag

SEQ ID NO: 689698 - RNA, 19 nt, Artificial Sequence
  Description of Artificial Sequence: Synthetic oligonucleotide
aaacagauugguaucccag

SEQ ID NO: 689699 - RNA, 19 nt, Artificial Sequence
  Description of Artificial Sequence: Synthetic oligonucleotide
cuuggguuguugaggaugg

SEQ ID NO: 689700 - RNA, 19 nt, Artificial Sequence
  Description of Artificial Sequence: Synthetic oligonucleotide
aagauucagugacuuacga

SEQ ID NO: 689701 - RNA, 19 nt, Artificial Sequence
  Description of Artificial Sequence: Synthetic oligonucleotide
uaaacaguuugguucccag

SEQ ID NO: 689702 - RNA, 19 nt, Artificial Sequence
  Description of Artificial Sequence: Synthetic oligonucleotide
gaugaucaauccaauccgg

SEQ ID NO: 689703 - RNA, 19 nt, Artificial Sequence
  Description of Artificial Sequence: Synthetic oligonucleotide
gguagaauccuacagggac

SEQ ID NO: 689704 - RNA, 19 nt, Artificial Sequence
  Description of Artificial Sequence: Synthetic oligonucleotide
uccaacuagcuucucgcag

SEQ ID NO: 689705 - RNA, 19 nt, Artificial Sequence
  Description of Artificial Sequence: Synthetic oligonucleotide
ugagagguuaggcaaaauu

SEQ ID NO: 689706 - RNA, 19 nt, Artificial Sequence
  Description of Artificial Sequence: Synthetic oligonucleotide
ugccuguuggggacgaugg

SEQ ID NO: 689707 - RNA, 19 nt, Artificial Sequence
  Description of Artificial Sequence: Synthetic oligonucleotide
uguuagguaggucauugua

SEQ ID NO: 689708 - RNA, 19 nt, Artificial Sequence
  Description of Artificial Sequence: Synthetic oligonucleotide
caaugaggaauuacaggcc

SEQ ID NO: 689709 - RNA, 19 nt, Artificial Sequence
  Description of Artificial Sequence: Synthetic oligonucleotide
aucucuguauccgagagca

SEQ ID NO: 689710 - RNA, 19 nt, Artificial Sequence
  Description of Artificial Sequence: Synthetic oligonucleotide
uuauuauauuugguaaaca

SEQ ID NO: 689711 - RNA, 19 nt, Artificial Sequence
  Description of Artificial Sequence: Synthetic oligonucleotide
aaaaugaucccagggugcu

SEQ ID NO: 689712 - RNA, 19 nt, Artificial Sequence
  Description of Artificial Sequence: Synthetic oligonucleotide
aauccggagucugagcauc

SEQ ID NO: 689713 - RNA, 19 nt, Artificial Sequence
  Description of Artificial Sequence: Synthetic oligonucleotide
ucaucgaaccuauuucugu

SEQ ID NO: 689714 - RNA, 19 nt, Artificial Sequence
  Description of Artificial Sequence: Synthetic oligonucleotide
ucaacaagauucagugacu

SEQ ID NO: 689715 - RNA, 19 nt, Artificial Sequence
  Description of Artificial Sequence: Synthetic oligonucleotide
acuaggagcacugucauaa

SEQ ID NO: 689716 - RNA, 19 nt, Artificial Sequence
  Description of Artificial Sequence: Synthetic oligonucleotide
caucaguuuuaucuguggc

SEQ ID NO: 689717 - RNA, 19 nt, Artificial Sequence
  Description of Artificial Sequence: Synthetic oligonucleotide
caaugguagucauauucag

SEQ ID NO: 689718 - RNA, 19 nt, Artificial Sequence
  Description of Artificial Sequence: Synthetic oligonucleotide
cuagagugcugucaucucc

SEQ ID NO: 689719 - RNA, 19 nt, Artificial Sequence
  Description of Artificial Sequence: Synthetic oligonucleotide
acagacugcauucuguaaa

SEQ ID NO: 689720 - RNA, 19 nt, Artificial Sequence
  Description of Artificial Sequence: Synthetic oligonucleotide
ucagugacuuacgaugucc

SEQ ID NO: 689721 - RNA, 19 nt, Artificial Sequence
  Description of Artificial Sequence: Synthetic oligonucleotide
uguagcggaucaaacucca

SEQ ID NO: 689722 - RNA, 19 nt, Artificial Sequence
  Description of Artificial Sequence: Synthetic oligonucleotide
uguugacuccaguaugacc

SEQ ID NO: 689723 - RNA, 19 nt, Artificial Sequence
  Description of Artificial Sequence: Synthetic oligonucleotide
uaggucauuguaccauaag

SEQ ID NO: 689724 - RNA, 19 nt, Artificial Sequence
  Description of Artificial Sequence: Synthetic oligonucleotide
gaggcuacgggacaaguga

SEQ ID NO: 689725 - RNA, 19 nt, Artificial Sequence
  Description of Artificial Sequence: Synthetic oligonucleotide
cuuauugcaucuggcagcc

SEQ ID NO: 689726 - RNA, 19 nt, Artificial Sequence
  Description of Artificial Sequence: Synthetic oligonucleotide
ggugagagccaauuuaagc

SEQ ID NO: 689727 - RNA, 19 nt, Artificial Sequence
  Description of Artificial Sequence: Synthetic oligonucleotide
cagaaauuccugcaaauga

SEQ ID NO: 689728 - RNA, 19 nt, Artificial Sequence
  Description of Artificial Sequence: Synthetic oligonucleotide
aaauucccaaugaggcuac

SEQ ID NO: 689729 - RNA, 19 nt, Artificial Sequence
  Description of Artificial Sequence: Synthetic oligonucleotide
gcuuuuguuagguagguca

SEQ ID NO: 689730 - RNA, 19 nt, Artificial Sequence
  Description of Artificial Sequence: Synthetic oligonucleotide
acagauugguaucccagcu

SEQ ID NO: 689731 - RNA, 19 nt, Artificial Sequence
  Description of Artificial Sequence: Synthetic oligonucleotide
uuuaagcuggcuucucagu

SEQ ID NO: 689732 - RNA, 19 nt, Artificial Sequence
  Description of Artificial Sequence: Synthetic oligonucleotide
cucugguagaauccuacag

SEQ ID NO: 689733 - RNA, 19 nt, Artificial Sequence
  Description of Artificial Sequence: Synthetic oligonucleotide
cacacucucugguagaauc

SEQ ID NO: 689734 - RNA, 19 nt, Artificial Sequence
  Description of Artificial Sequence: Synthetic oligonucleotide
uccgugccaacucuguagc

SEQ ID NO: 689735 - RNA, 19 nt, Artificial Sequence
  Description of Artificial Sequence: Synthetic oligonucleotide
uacgggacaagugacagau

SEQ ID NO: 689736 - RNA, 19 nt, Artificial Sequence
  Description of Artificial Sequence: Synthetic oligonucleotide
cuugaucucacaugcgguc

SEQ ID NO: 689737 - RNA, 19 nt, Artificial Sequence
  Description of Artificial Sequence: Synthetic oligonucleotide
uauccgagagcagugucag

SEQ ID NO: 689738 - RNA, 19 nt, Artificial Sequence
  Description of Artificial Sequence: Synthetic oligonucleotide
auaaccaucaauggacaga

SEQ ID NO: 689739 - RNA, 19 nt, Artificial Sequence
  Description of Artificial Sequence: Synthetic oligonucleotide
ucaccauggucaucucugg

SEQ ID NO: 689740 - RNA, 19 nt, Artificial Sequence
  Description of Artificial Sequence: Synthetic oligonucleotide
uggugagagccaauuuaag

SEQ ID NO: 689741 - RNA, 19 nt, Artificial Sequence
  Description of Artificial Sequence: Synthetic oligonucleotide
uuugagcagucuuucaguu

SEQ ID NO: 689742 - RNA, 19 nt, Artificial Sequence
  Description of Artificial Sequence: Synthetic oligonucleotide
aggccugaaauguagcgga

SEQ ID NO: 689743 - RNA, 19 nt, Artificial Sequence
  Description of Artificial Sequence: Synthetic oligonucleotide
cacgguugagcacugacuc

SEQ ID NO: 689744 - RNA, 19 nt, Artificial Sequence
  Description of Artificial Sequence: Synthetic oligonucleotide
gagagguuaggcaaaauua

SEQ ID NO: 689745 - RNA, 19 nt, Artificial Sequence
  Description of Artificial Sequence: Synthetic oligonucleotide
gucuagcuauuguugcugg

SEQ ID NO: 689746 - RNA, 19 nt, Artificial Sequence
  Description of Artificial Sequence: Synthetic oligonucleotide
ucccaaugaggcuacggga

SEQ ID NO: 689747 - RNA, 19 nt, Artificial Sequence
  Description of Artificial Sequence: Synthetic oligonucleotide
uccuacagggacccuguug

SEQ ID NO: 689748 - RNA, 19 nt, Artificial Sequence
  Description of Artificial Sequence: Synthetic oligonucleotide
uguggcuuaaacacacauu

SEQ ID NO: 689749 - RNA, 19 nt, Artificial Sequence
  Description of Artificial Sequence: Synthetic oligonucleotide
ucuggugauaccacuccuc

SEQ ID NO: 689750 - RNA, 19 nt, Artificial Sequence
  Description of Artificial Sequence: Synthetic oligonucleotide
uccacauggacagcaaacu

SEQ ID NO: 689751 - RNA, 19 nt, Artificial Sequence
  Description of Artificial Sequence: Synthetic oligonucleotide
guagucauauucaggaguc

SEQ ID NO: 689752 - RNA, 19 nt, Artificial Sequence
  Description of Artificial Sequence: Synthetic oligonucleotide
agauucagugacuuacgau

SEQ ID NO: 689753 - RNA, 19 nt, Artificial Sequence
  Description of Artificial Sequence: Synthetic oligonucleotide
gagugaauugggcgcacgc

SEQ ID NO: 689754 - RNA, 19 nt, Artificial Sequence
  Description of Artificial Sequence: Synthetic oligonucleotide
ugaauugggcgcacgcuuc

SEQ ID NO: 689755 - RNA, 19 nt, Artificial Sequence
  Description of Artificial Sequence: Synthetic oligonucleotide
gaauccuacagggacccug

SEQ ID NO: 689756 - RNA, 19 nt, Artificial Sequence
  Description of Artificial Sequence: Synthetic oligonucleotide
gccaaugguagucauauuc

SEQ ID NO: 689757 - RNA, 19 nt, Artificial Sequence
  Description of Artificial Sequence: Synthetic oligonucleotide
ugugaacagugacuccgug

SEQ ID NO: 689758 - RNA, 19 nt, Artificial Sequence
  Description of Artificial Sequence: Synthetic oligonucleotide
agcuauuguugcuggaaga

SEQ ID NO: 689759 - RNA, 19 nt, Artificial Sequence
  Description of Artificial Sequence: Synthetic oligonucleotide
ucgauacucgggcugggac

SEQ ID NO: 689760 - RNA, 19 nt, Artificial Sequence
  Description of Artificial Sequence: Synthetic oligonucleotide
uguauccgagagcaguguc

SEQ ID NO: 689761 - RNA, 19 nt, Artificial Sequence
  Description of Artificial Sequence: Synthetic oligonucleotide
gacauacauggccagguaa

SEQ ID NO: 689762 - RNA, 19 nt, Artificial Sequence
  Description of Artificial Sequence: Synthetic oligonucleotide
uaggagcacugucauaaaa

SEQ ID NO: 689763 - RNA, 19 nt, Artificial Sequence
  Description of Artificial Sequence: Synthetic oligonucleotide
ugagaagacugugaacagu

SEQ ID NO: 689764 - RNA, 19 nt, Artificial Sequence
  Description of Artificial Sequence: Synthetic oligonucleotide
agcuagagugcugucaucu

SEQ ID NO: 689765 - RNA, 19 nt, Artificial Sequence
  Description of Artificial Sequence: Synthetic oligonucleotide
agagguuaggcaaaauuaa

SEQ ID NO: 689766 - RNA, 19 nt, Artificial Sequence
  Description of Artificial Sequence: Synthetic oligonucleotide
ccuuauugcaucuggcagc

SEQ ID NO: 689767 - RNA, 19 nt, Artificial Sequence
  Description of Artificial Sequence: Synthetic oligonucleotide
ugggcagaaauuccugcaa

SEQ ID NO: 689768 - RNA, 19 nt, Artificial Sequence
  Description of Artificial Sequence: Synthetic oligonucleotide
ucgcagacuugaaggaaug

SEQ ID NO: 689769 - RNA, 19 nt, Artificial Sequence
  Description of Artificial Sequence: Synthetic oligonucleotide
agcuguacaaucuggucua

SEQ ID NO: 689770 - RNA, 19 nt, Artificial Sequence
  Description of Artificial Sequence: Synthetic oligonucleotide
ggaauuacaggcccugaac

SEQ ID NO: 689771 - RNA, 19 nt, Artificial Sequence
  Description of Artificial Sequence: Synthetic oligonucleotide
agucaacaagauucaguga

SEQ ID NO: 689772 - RNA, 19 nt, Artificial Sequence
  Description of Artificial Sequence: Synthetic oligonucleotide
uagcggaucaaacuccauu

SEQ ID NO: 689773 - RNA, 19 nt, Artificial Sequence
  Description of Artificial Sequence: Synthetic oligonucleotide
auuguugcuggaagaaucu

SEQ ID NO: 689774 - RNA, 19 nt, Artificial Sequence
  Description of Artificial Sequence: Synthetic oligonucleotide
agccaauuuaagcuggcuu

SEQ ID NO: 689775 - RNA, 19 nt, Artificial Sequence
  Description of Artificial Sequence: Synthetic oligonucleotide
uccuguagguuugagcagu

SEQ ID NO: 689776 - RNA, 19 nt, Artificial Sequence
  Description of Artificial Sequence: Synthetic oligonucleotide
uuuaguucauuugggcaau

SEQ ID NO: 689777 - RNA, 19 nt, Artificial Sequence
  Description of Artificial Sequence: Synthetic oligonucleotide
aagagugaauugggcgcac

SEQ ID NO: 689778 - RNA, 19 nt, Artificial Sequence
  Description of Artificial Sequence: Synthetic oligonucleotide
gauacucgggcugggacac

SEQ ID NO: 689779 - RNA, 19 nt, Artificial Sequence
  Description of Artificial Sequence: Synthetic oligonucleotide
gauaccacuccucucaguu

SEQ ID NO: 689780 - RNA, 19 nt, Artificial Sequence
  Description of Artificial Sequence: Synthetic oligonucleotide
ccgugaagccuucugaugg

SEQ ID NO: 689781 - RNA, 19 nt, Artificial Sequence
  Description of Artificial Sequence: Synthetic oligonucleotide
ucuagcuauuguugcugga

SEQ ID NO: 689782 - RNA, 19 nt, Artificial Sequence
  Description of Artificial Sequence: Synthetic oligonucleotide
ucacaugcggucaucucuu

SEQ ID NO: 689783 - RNA, 19 nt, Artificial Sequence
  Description of Artificial Sequence: Synthetic oligonucleotide
aauccuacagggacccugu

SEQ ID NO: 689784 - RNA, 19 nt, Artificial Sequence
  Description of Artificial Sequence: Synthetic oligonucleotide
cagagugagagguuaggca

SEQ ID NO: 689785 - RNA, 19 nt, Artificial Sequence
  Description of Artificial Sequence: Synthetic oligonucleotide
uccccgugaagccuucuga

SEQ ID NO: 689786 - RNA, 19 nt, Artificial Sequence
  Description of Artificial Sequence: Synthetic oligonucleotide
agguuaggcaaaauuaaaa

SEQ ID NO: 689787 - RNA, 19 nt, Artificial Sequence
  Description of Artificial Sequence: Synthetic oligonucleotide
cucguagaugaguuuugug

SEQ ID NO: 689788 - RNA, 19 nt, Artificial Sequence
  Description of Artificial Sequence: Synthetic oligonucleotide
auucagugacuuacgaugu

SEQ ID NO: 689789 - RNA, 19 nt, Artificial Sequence
  Description of Artificial Sequence: Synthetic oligonucleotide
cauccagccuucuccugcg

SEQ ID NO: 689790 - RNA, 19 nt, Artificial Sequence
  Description of Artificial Sequence: Synthetic oligonucleotide
cugauguccuguccacugg

SEQ ID NO: 689791 - RNA, 19 nt, Artificial Sequence
  Description of Artificial Sequence: Synthetic oligonucleotide
agagccaauuuaagcuggc

SEQ ID NO: 689792 - RNA, 19 nt, Artificial Sequence
  Description of Artificial Sequence: Synthetic oligonucleotide
ggacauaaccaucaaugga

SEQ ID NO: 689793 - RNA, 19 nt, Artificial Sequence
  Description of Artificial Sequence: Synthetic oligonucleotide
cuuuucggaguccaugaga

SEQ ID NO: 689794 - RNA, 19 nt, Artificial Sequence
  Description of Artificial Sequence: Synthetic oligonucleotide
gaagagugaauugggcgca

SEQ ID NO: 689795 - RNA, 19 nt, Artificial Sequence
  Description of Artificial Sequence: Synthetic oligonucleotide
uucaugucgaaggggcuga

SEQ ID NO: 689796 - RNA, 19 nt, Artificial Sequence
  Description of Artificial Sequence: Synthetic oligonucleotide
uccaauccggagucugagc

SEQ ID NO: 689797 - RNA, 19 nt, Artificial Sequence
  Description of Artificial Sequence: Synthetic oligonucleotide
ugcgcagccacugucccug

SEQ ID NO: 689798 - RNA, 19 nt, Artificial Sequence
  Description of Artificial Sequence: Synthetic oligonucleotide
gauugguaucccagcuggg

SEQ ID NO: 689799 - RNA, 19 nt, Artificial Sequence
  Description of Artificial Sequence: Synthetic oligonucleotide
aucgaaccuauuucuguaa

SEQ ID NO: 689800 - RNA, 19 nt, Artificial Sequence
  Description of Artificial Sequence: Synthetic oligonucleotide
cuggucuacauggaugaug

SEQ ID NO: 689801 - RNA, 19 nt, Artificial Sequence
  Description of Artificial Sequence: Synthetic oligonucleotide
gaccauguuuauggguuag

SEQ ID NO: 689802 - RNA, 19 nt, Artificial Sequence
  Description of Artificial Sequence: Synthetic oligonucleotide
aauccaauccggagucuga

SEQ ID NO: 689803 - RNA, 19 nt, Artificial Sequence
  Description of Artificial Sequence: Synthetic oligonucleotide
caucucuguauccgagagc

SEQ ID NO: 689804 - RNA, 19 nt, Artificial Sequence
  Description of Artificial Sequence: Synthetic oligonucleotide
gacuccgugcuguccaaac

SEQ ID NO: 689805 - RNA, 19 nt, Artificial Sequence
  Description of Artificial Sequence: Synthetic oligonucleotide
auggacagaccauggcacu

SEQ ID NO: 689806 - RNA, 19 nt, Artificial Sequence
  Description of Artificial Sequence: Synthetic oligonucleotide
cuccuucccacucagaaua

SEQ ID NO: 689807 - RNA, 19 nt, Artificial Sequence
  Description of Artificial Sequence: Synthetic oligonucleotide
uguccuguccacuggccuc

SEQ ID NO: 689808 - RNA, 19 nt, Artificial Sequence
  Description of Artificial Sequence: Synthetic oligonucleotide
aagaggcguggagaugguc

SEQ ID NO: 689809 - RNA, 19 nt, Artificial Sequence
  Description of Artificial Sequence: Synthetic oligonucleotide
ggcuuaaacacacauugcu

SEQ ID NO: 689810 - RNA, 19 nt, Artificial Sequence
  Description of Artificial Sequence: Synthetic oligonucleotide
cacacgguugagcacugac

SEQ ID NO: 689811 - RNA, 19 nt, Artificial Sequence
  Description of Artificial Sequence: Synthetic oligonucleotide
agugaauugggcgcacgcu

SEQ ID NO: 689812 - RNA, 19 nt, Artificial Sequence
  Description of Artificial Sequence: Synthetic oligonucleotide
acauacauggccagguaaa

SEQ ID NO: 689813 - RNA, 19 nt, Artificial Sequence
  Description of Artificial Sequence: Synthetic oligonucleotide
auugggcgcacgcuucucu

SEQ ID NO: 689814 - RNA, 19 nt, Artificial Sequence
  Description of Artificial Sequence: Synthetic oligonucleotide
gaggagucaacaagauuca

SEQ ID NO: 689815 - RNA, 19 nt, Artificial Sequence
  Description of Artificial Sequence: Synthetic oligonucleotide
caauccaauccggagucug

SEQ ID NO: 689816 - RNA, 19 nt, Artificial Sequence
  Description of Artificial Sequence: Synthetic oligonucleotide
cugucgauacucgggcugg

SEQ ID NO: 689817 - RNA, 19 nt, Artificial Sequence
  Description of Artificial Sequence: Synthetic oligonucleotide
acgaucuccugugugagaa

SEQ ID NO: 689818 - RNA, 19 nt, Artificial Sequence
  Description of Artificial Sequence: Synthetic oligonucleotide
gagguuaggcaaaauuaaa

SEQ ID NO: 689819 - RNA, 19 nt, Artificial Sequence
  Description of Artificial Sequence: Synthetic oligonucleotide
gcccugaacagagugagag

SEQ ID NO: 689820 - RNA, 19 nt, Artificial Sequence
  Description of Artificial Sequence: Synthetic oligonucleotide
auccaauccggagucugag

SEQ ID NO: 689821 - RNA, 19 nt, Artificial Sequence
  Description of Artificial Sequence: Synthetic oligonucleotide
agucauauucaggagucuu

SEQ ID NO: 689822 - RNA, 19 nt, Artificial Sequence
  Description of Artificial Sequence: Synthetic oligonucleotide
gucauauucaggagucuuc

SEQ ID NO: 689823 - RNA, 19 nt, Artificial Sequence
  Description of Artificial Sequence: Synthetic oligonucleotide
agagugaauugggcgcacg

SEQ ID NO: 689824 - RNA, 19 nt, Artificial Sequence
  Description of Artificial Sequence: Synthetic oligonucleotide
cugcacucagaagagacca

SEQ ID NO: 689825 - RNA, 19 nt, Artificial Sequence
  Description of Artificial Sequence: Synthetic oligonucleotide
uuguugacuccaguaugac

SEQ ID NO: 689826 - RNA, 19 nt, Artificial Sequence
  Description of Artificial Sequence: Synthetic oligonucleotide
gguuaggccuuauugcauc

SEQ ID NO: 689827 - RNA, 19 nt, Artificial Sequence
  Description of Artificial Sequence: Synthetic oligonucleotide
ucugggccaaugguaguca

SEQ ID NO: 689828 - RNA, 19 nt, Artificial Sequence
  Description of Artificial Sequence: Synthetic oligonucleotide
gcuugucuagcuauuguug

SEQ ID NO: 689829 - RNA, 19 nt, Artificial Sequence
  Description of Artificial Sequence: Synthetic oligonucleotide
cagauucagagggugacca

SEQ ID NO: 689830 - RNA, 19 nt, Artificial Sequence
  Description of Artificial Sequence: Synthetic oligonucleotide
ugaccauguuuauggguua

SEQ ID NO: 689831 - RNA, 19 nt, Artificial Sequence
  Description of Artificial Sequence: Synthetic oligonucleotide
ugauaccacuccucucagu

SEQ ID NO: 689832 - RNA, 19 nt, Artificial Sequence
  Description of Artificial Sequence: Synthetic oligonucleotide
augcggucaucucuugggu

SEQ ID NO: 689833 - RNA, 19 nt, Artificial Sequence
  Description of Artificial Sequence: Synthetic oligonucleotide
ccaaugguagucauauuca

SEQ ID NO: 689834 - RNA, 19 nt, Artificial Sequence
  Description of Artificial Sequence: Synthetic oligonucleotide
ugcacucagaagagaccaa

SEQ ID NO: 689835 - RNA, 19 nt, Artificial Sequence
  Description of Artificial Sequence: Synthetic oligonucleotide
aggcuacgggacaagugac

SEQ ID NO: 689836 - RNA, 19 nt, Artificial Sequence
  Description of Artificial Sequence: Synthetic oligonucleotide
caucgaaccuauuucugua

SEQ ID NO: 689837 - RNA, 19 nt, Artificial Sequence
  Description of Artificial Sequence: Synthetic oligonucleotide
uuaguucauuugggcaaug

SEQ ID NO: 689838 - RNA, 19 nt, Artificial Sequence
  Description of Artificial Sequence: Synthetic oligonucleotide
gcuacgggacaagugacag

SEQ ID NO: 689839 - RNA, 19 nt, Artificial Sequence
  Description of Artificial Sequence: Synthetic oligonucleotide
cagugacuuacgaugucca

SEQ ID NO: 689840 - RNA, 19 nt, Artificial Sequence
  Description of Artificial Sequence: Synthetic oligonucleotide
agugucugagaggagucaa

SEQ ID NO: 689841 - RNA, 19 nt, Artificial Sequence
  Description of Artificial Sequence: Synthetic oligonucleotide
guauccgagagcaguguca

SEQ ID NO: 689842 - RNA, 19 nt, Artificial Sequence
  Description of Artificial Sequence: Synthetic oligonucleotide
ggcagaugaaaauucccaa

SEQ ID NO: 689843 - RNA, 19 nt, Artificial Sequence
  Description of Artificial Sequence: Synthetic oligonucleotide
ccauguuuauggguuaggc

SEQ ID NO: 689844 - RNA, 19 nt, Artificial Sequence
  Description of Artificial Sequence: Synthetic oligonucleotide
ccugaaauguagcggauca

SEQ ID NO: 689845 - RNA, 19 nt, Artificial Sequence
  Description of Artificial Sequence: Synthetic oligonucleotide
caacuagcuucucgcaguc

SEQ ID NO: 689846 - RNA, 19 nt, Artificial Sequence
  Description of Artificial Sequence: Synthetic oligonucleotide
acuagcucaucgaaccuau

SEQ ID NO: 689847 - RNA, 19 nt, Artificial Sequence
  Description of Artificial Sequence: Synthetic oligonucleotide
ugggcgcacgcuucucucc

SEQ ID NO: 689848 - RNA, 19 nt, Artificial Sequence
  Description of Artificial Sequence: Synthetic oligonucleotide
ggaccucgcagacuugaag

SEQ ID NO: 689849 - RNA, 19 nt, Artificial Sequence
  Description of Artificial Sequence: Synthetic oligonucleotide
uagucauauucaggagucu

SEQ ID NO: 689850 - RNA, 19 nt, Artificial Sequence
  Description of Artificial Sequence: Synthetic oligonucleotide
aucucacaugcggucaucu

SEQ ID NO: 689851 - RNA, 19 nt, Artificial Sequence
  Description of Artificial Sequence: Synthetic oligonucleotide
gcugucgauacucgggcug

SEQ ID NO: 689852 - RNA, 19 nt, Artificial Sequence
  Description of Artificial Sequence: Synthetic oligonucleotide
ugucgauacucgggcuggg

SEQ ID NO: 689853 - RNA, 19 nt, Artificial Sequence
  Description of Artificial Sequence: Synthetic oligonucleotide
agauucagagggugaccau

SEQ ID NO: 689854 - RNA, 19 nt, Artificial Sequence
  Description of Artificial Sequence: Synthetic oligonucleotide
acacgguugagcacugacu

SEQ ID NO: 689855 - RNA, 19 nt, Artificial Sequence
  Description of Artificial Sequence: Synthetic oligonucleotide
gggacccuuuauuacauaa

SEQ ID NO: 689856 - RNA, 19 nt, Artificial Sequence
  Description of Artificial Sequence: Synthetic oligonucleotide
ucuccugcgcagccacugu

SEQ ID NO: 689857 - RNA, 19 nt, Artificial Sequence
  Description of Artificial Sequence: Synthetic oligonucleotide
guaaacaguuugguuccca

SEQ ID NO: 689858 - RNA, 19 nt, Artificial Sequence
  Description of Artificial Sequence: Synthetic oligonucleotide
agcugucgauacucgggcu

SEQ ID NO: 689859 - RNA, 19 nt, Artificial Sequence
  Description of Artificial Sequence: Synthetic oligonucleotide
agugagagguuaggcaaaa

SEQ ID NO: 689860 - RNA, 19 nt, Artificial Sequence
  Description of Artificial Sequence: Synthetic oligonucleotide
agaagacugugaacaguga

SEQ ID NO: 689861 - RNA, 19 nt, Artificial Sequence
  Description of Artificial Sequence: Synthetic oligonucleotide
auaccacuccucucaguuu

SEQ ID NO: 689862 - RNA, 19 nt, Artificial Sequence
  Description of Artificial Sequence: Synthetic oligonucleotide
gcauucuguaaagauguuc

SEQ ID NO: 689863 - RNA, 19 nt, Artificial Sequence
  Description of Artificial Sequence: Synthetic oligonucleotide
ugcggucaucucuuggguu

SEQ ID NO: 689864 - RNA, 19 nt, Artificial Sequence
  Description of Artificial Sequence: Synthetic oligonucleotide
caauuuaagcuggcuucuc

SEQ ID NO: 689865 - RNA, 19 nt, Artificial Sequence
  Description of Artificial Sequence: Synthetic oligonucleotide
uccuucccacucagaauau

SEQ ID NO: 689866 - RNA, 19 nt, Artificial Sequence
  Description of Artificial Sequence: Synthetic oligonucleotide
agagggugaccauguuuau

SEQ ID NO: 689867 - RNA, 19 nt, Artificial Sequence
  Description of Artificial Sequence: Synthetic oligonucleotide
ugcuuuuguuagguagguc

SEQ ID NO: 689868 - RNA, 19 nt, Artificial Sequence
  Description of Artificial Sequence: Synthetic oligonucleotide
ccauccagccuucuccugc

SEQ ID NO: 689869 - RNA, 19 nt, Artificial Sequence
  Description of Artificial Sequence: Synthetic oligonucleotide
uugggcgcacgcuucucuc

SEQ ID NO: 689870 - RNA, 19 nt, Artificial Sequence
  Description of Artificial Sequence: Synthetic oligonucleotide
cgggacaagugacagauuc

SEQ ID NO: 689871 - RNA, 19 nt, Artificial Sequence
  Description of Artificial Sequence: Synthetic oligonucleotide
ccaauccggagucugagca

SEQ ID NO: 689872 - RNA, 19 nt, Artificial Sequence
  Description of Artificial Sequence: Synthetic oligonucleotide
cauuugggcaaugaggaau

SEQ ID NO: 689873 - RNA, 19 nt, Artificial Sequence
  Description of Artificial Sequence: Synthetic oligonucleotide
gugaccauguuuauggguu

SEQ ID NO: 689874 - RNA, 19 nt, Artificial Sequence
  Description of Artificial Sequence: Synthetic oligonucleotide
guuaggccuuauugcaucu

SEQ ID NO: 689875 - RNA, 19 nt, Artificial Sequence
  Description of Artificial Sequence: Synthetic oligonucleotide
gaauugggcgcacgcuucu

SEQ ID NO: 689876 - RNA, 19 nt, Artificial Sequence
  Description of Artificial Sequence: Synthetic oligonucleotide
augaucccagggugcuucu

SEQ ID NO: 689877 - RNA, 19 nt, Artificial Sequence
  Description of Artificial Sequence: Synthetic oligonucleotide
gacacacgguugagcacug

SEQ ID NO: 689878 - RNA, 19 nt, Artificial Sequence
  Description of Artificial Sequence: Synthetic oligonucleotide
gugaauugggcgcacgcuu

SEQ ID NO: 689879 - RNA, 19 nt, Artificial Sequence
  Description of Artificial Sequence: Synthetic oligonucleotide
gguaggucauuguaccaua

SEQ ID NO: 689880 - RNA, 19 nt, Artificial Sequence
  Description of Artificial Sequence: Synthetic oligonucleotide
cuggugggacagcagaucu

SEQ ID NO: 689881 - RNA, 19 nt, Artificial Sequence
  Description of Artificial Sequence: Synthetic oligonucleotide
guaggucauuguaccauaa

SEQ ID NO: 689882 - RNA, 19 nt, Artificial Sequence
  Description of Artificial Sequence: Synthetic oligonucleotide
cuacgggacaagugacaga

SEQ ID NO: 689883 - RNA, 19 nt, Artificial Sequence
  Description of Artificial Sequence: Synthetic oligonucleotide
uuccagcuagagugcuguc

SEQ ID NO: 689884 - RNA, 19 nt, Artificial Sequence
  Description of Artificial Sequence: Synthetic oligonucleotide
gcuagagugcugucaucuc

SEQ ID NO: 689885 - RNA, 19 nt, Artificial Sequence
  Description of Artificial Sequence: Synthetic oligonucleotide
cgagagcagugucaguacc

SEQ ID NO: 689886 - RNA, 19 nt, Artificial Sequence
  Description of Artificial Sequence: Synthetic oligonucleotide
ggacacacgguugagcacu

SEQ ID NO: 689887 - RNA, 19 nt, Artificial Sequence
  Description of Artificial Sequence: Synthetic oligonucleotide
caaugaggcuacgggacaa

SEQ ID NO: 689888 - RNA, 19 nt, Artificial Sequence
  Description of Artificial Sequence: Synthetic oligonucleotide
cccgugaagccuucugaug

SEQ ID NO: 689889 - RNA, 19 nt, Artificial Sequence
  Description of Artificial Sequence: Synthetic oligonucleotide
cuguacaaucuggucuaca

SEQ ID NO: 689890 - RNA, 19 nt, Artificial Sequence
  Description of Artificial Sequence: Synthetic oligonucleotide
auccgagagcagugucagu

SEQ ID NO: 689891 - RNA, 19 nt, Artificial Sequence
  Description of Artificial Sequence: Synthetic oligonucleotide
gggacaagugacagauuca

SEQ ID NO: 689892 - RNA, 19 nt, Artificial Sequence
  Description of Artificial Sequence: Synthetic oligonucleotide
uuauugcaucuggcagccu

SEQ ID NO: 689893 - RNA, 19 nt, Artificial Sequence
  Description of Artificial Sequence: Synthetic oligonucleotide
cacgaucuccugugugaga

SEQ ID NO: 689894 - RNA, 19 nt, Artificial Sequence
  Description of Artificial Sequence: Synthetic oligonucleotide
cacuagcucaucgaaccua

SEQ ID NO: 689895 - RNA, 19 nt, Artificial Sequence
  Description of Artificial Sequence: Synthetic oligonucleotide
ccagguaaaccacgaucuc

SEQ ID NO: 689896 - RNA, 19 nt, Artificial Sequence
  Description of Artificial Sequence: Synthetic oligonucleotide
cuaggcugggcccggacau

SEQ ID NO: 689897 - RNA, 19 nt, Artificial Sequence
  Description of Artificial Sequence: Synthetic oligonucleotide
ccucagucuggugauacca

SEQ ID NO: 689898 - RNA, 19 nt, Artificial Sequence
  Description of Artificial Sequence: Synthetic oligonucleotide
ccacgaucuccugugugag

SEQ ID NO: 689899 - RNA, 19 nt, Artificial Sequence
  Description of Artificial Sequence: Synthetic oligonucleotide
gccucguagaugaguuuug

SEQ ID NO: 689900 - RNA, 19 nt, Artificial Sequence
  Description of Artificial Sequence: Synthetic oligonucleotide
caguuuuguugacuccagu

SEQ ID NO: 689901 - RNA, 19 nt, Artificial Sequence
  Description of Artificial Sequence: Synthetic oligonucleotide
cugcuuuuguuagguaggu

SEQ ID NO: 689902 - RNA, 19 nt, Artificial Sequence
  Description of Artificial Sequence: Synthetic oligonucleotide
gugacuccgugcuguccaa

SEQ ID NO: 689903 - RNA, 19 nt, Artificial Sequence
  Description of Artificial Sequence: Synthetic oligonucleotide
gcggaucaaacuccauucu

SEQ ID NO: 689904 - RNA, 19 nt, Artificial Sequence
  Description of Artificial Sequence: Synthetic oligonucleotide
cgauacucgggcugggaca

SEQ ID NO: 689905 - RNA, 19 nt, Artificial Sequence
  Description of Artificial Sequence: Synthetic oligonucleotide
acccuguugauggccccau

SEQ ID NO: 689906 - RNA, 19 nt, Artificial Sequence
  Description of Artificial Sequence: Synthetic oligonucleotide
cacuaggagcacugucaua

SEQ ID NO: 689907 - RNA, 19 nt, Artificial Sequence
  Description of Artificial Sequence: Synthetic oligonucleotide
cccgauucuguccaucucu

SEQ ID NO: 689908 - RNA, 19 nt, Artificial Sequence
  Description of Artificial Sequence: Synthetic oligonucleotide
caauccggagucugagcau

SEQ ID NO: 689909 - RNA, 19 nt, Artificial Sequence
  Description of Artificial Sequence: Synthetic oligonucleotide
gggcgcacgcuucucucca

SEQ ID NO: 689910 - RNA, 19 nt, Artificial Sequence
  Description of Artificial Sequence: Synthetic oligonucleotide
cuguauccgagagcagugu

SEQ ID NO: 689911 - RNA, 19 nt, Artificial Sequence
  Description of Artificial Sequence: Synthetic oligonucleotide
gaagaggcguggagauggu

SEQ ID NO: 689912 - RNA, 19 nt, Artificial Sequence
  Description of Artificial Sequence: Synthetic oligonucleotide
ccaucaauggacagaccau

SEQ ID NO: 689913 - RNA, 19 nt, Artificial Sequence
  Description of Artificial Sequence: Synthetic oligonucleotide
ggcuaggcugggcccggac

SEQ ID NO: 689914 - RNA, 19 nt, Artificial Sequence
  Description of Artificial Sequence: Synthetic oligonucleotide
auacucgggcugggacaca

SEQ ID NO: 689915 - RNA, 19 nt, Artificial Sequence
  Description of Artificial Sequence: Synthetic oligonucleotide
cgaaccuauuucuguaacu

SEQ ID NO: 689916 - RNA, 19 nt, Artificial Sequence
  Description of Artificial Sequence: Synthetic oligonucleotide
acgcuucucuccacaccaa

SEQ ID NO: 689917 - RNA, 19 nt, Artificial Sequence
  Description of Artificial Sequence: Synthetic oligonucleotide
gcacucagaagagaccaau

SEQ ID NO: 689918 - RNA, 19 nt, Artificial Sequence
  Description of Artificial Sequence: Synthetic oligonucleotide
cuguagguuugagcagucu

SEQ ID NO: 689919 - RNA, 19 nt, Artificial Sequence
  Description of Artificial Sequence: Synthetic oligonucleotide
ggccccauccagccuucuc

SEQ ID NO: 689920 - RNA, 19 nt, Artificial Sequence
  Description of Artificial Sequence: Synthetic oligonucleotide
ggccucguagaugaguuuu

SEQ ID NO: 689921 - RNA, 19 nt, Artificial Sequence
  Description of Artificial Sequence: Synthetic oligonucleotide
gcgcacgcuucucuccaca

SEQ ID NO: 689922 - RNA, 19 nt, Artificial Sequence
  Description of Artificial Sequence: Synthetic oligonucleotide
ggcguggagauggucuucu

SEQ ID NO: 689923 - RNA, 19 nt, Artificial Sequence
  Description of Artificial Sequence: Synthetic oligonucleotide
ccccgauucuguccaucuc

SEQ ID NO: 689924 - RNA, 19 nt, Artificial Sequence
  Description of Artificial Sequence: Synthetic oligonucleotide
uggccccauccagccuucu

SEQ ID NO: 689925 - RNA, 19 nt, Artificial Sequence
  Description of Artificial Sequence: Synthetic oligonucleotide
guagcggaucaaacuccau

SEQ ID NO: 689926 - RNA, 19 nt, Artificial Sequence
  Description of Artificial Sequence: Synthetic oligonucleotide
cuagcucaucgaaccuauu

SEQ ID NO: 689927 - RNA, 19 nt, Artificial Sequence
  Description of Artificial Sequence: Synthetic oligonucleotide
ggguuaggccuuauugcau

SEQ ID NO: 689928 - RNA, 19 nt, Artificial Sequence
  Description of Artificial Sequence: Synthetic oligonucleotide
gugagagguuaggcaaaau

SEQ ID NO: 689929 - RNA, 19 nt, Artificial Sequence
  Description of Artificial Sequence: Synthetic oligonucleotide
acgggacaagugacagauu

SEQ ID NO: 689930 - RNA, 19 nt, Artificial Sequence
  Description of Artificial Sequence: Synthetic oligonucleotide
gcuggaccucgcagacuug

SEQ ID NO: 689931 - RNA, 19 nt, Artificial Sequence
  Description of Artificial Sequence: Synthetic oligonucleotide
ggcccugaacagagugaga

SEQ ID NO: 689932 - RNA, 19 nt, Artificial Sequence
  Description of Artificial Sequence: Synthetic oligonucleotide
ccucguagaugaguuuugu

SEQ ID NO: 689933 - RNA, 19 nt, Artificial Sequence
  Description of Artificial Sequence: Synthetic oligonucleotide
cccuguugauggccccauc

SEQ ID NO: 689934 - RNA, 19 nt, Artificial Sequence
  Description of Artificial Sequence: Synthetic oligonucleotide
ccccgugaagccuucugau

SEQ ID NO: 689935 - RNA, 19 nt, Artificial Sequence
  Description of Artificial Sequence: Synthetic oligonucleotide
cugcuugguccuguagguu

SEQ ID NO: 689936 - RNA, 19 nt, Artificial Sequence
  Description of Artificial Sequence: Synthetic oligonucleotide
ggccugaaauguagcggau

SEQ ID NO: 689937 - RNA, 19 nt, Artificial Sequence
  Description of Artificial Sequence: Synthetic oligonucleotide
ggccaaugguagucauauu

SEQ ID NO: 689938 - RNA, 19 nt, Artificial Sequence
  Description of Artificial Sequence: Synthetic oligonucleotide
agcauauagaagcauaucc

SEQ ID NO: 689939 - RNA, 19 nt, Artificial Sequence
  Description of Artificial Sequence: Synthetic oligonucleotide
agugaaugaaaucugauca

SEQ ID NO: 689940 - RNA, 19 nt, Artificial Sequence
  Description of Artificial Sequence: Synthetic oligonucleotide
ucggcaagcauauagaagc

SEQ ID NO: 689941 - RNA, 19 nt, Artificial Sequence
  Description of Artificial Sequence: Synthetic oligonucleotide
aaucugaucauuucucgag

SEQ ID NO: 689942 - RNA, 19 nt, Artificial Sequence
  Description of Artificial Sequence: Synthetic oligonucleotide
uuuguaacgccucaaguug

SEQ ID NO: 689943 - RNA, 19 nt, Artificial Sequence
  Description of Artificial Sequence: Synthetic oligonucleotide
aacgccucaaguuggcucc

SEQ ID NO: 689944 - RNA, 19 nt, Artificial Sequence
  Description of Artificial Sequence: Synthetic oligonucleotide
uugaguagggacauaacgc

SEQ ID NO: 689945 - RNA, 19 nt, Artificial Sequence
  Description of Artificial Sequence: Synthetic oligonucleotide
uuuagguuuaaagcgaugc

SEQ ID NO: 689946 - RNA, 19 nt, Artificial Sequence
  Description of Artificial Sequence: Synthetic oligonucleotide
agggguauaucccaaaguc

SEQ ID NO: 689947 - RNA, 19 nt, Artificial Sequence
  Description of Artificial Sequence: Synthetic oligonucleotide
uguuuuagguuuaaagcga

SEQ ID NO: 689948 - RNA, 19 nt, Artificial Sequence
  Description of Artificial Sequence: Synthetic oligonucleotide
ucucaagugaaugaaaucu

SEQ ID NO: 689949 - RNA, 19 nt, Artificial Sequence
  Description of Artificial Sequence: Synthetic oligonucleotide
uggcuauaagaaaucaggg

SEQ ID NO: 689950 - RNA, 19 nt, Artificial Sequence
  Description of Artificial Sequence: Synthetic oligonucleotide
auaauguucucucuguucu

SEQ ID NO: 689951 - RNA, 19 nt, Artificial Sequence
  Description of Artificial Sequence: Synthetic oligonucleotide
aaauucacgaagauccagg

SEQ ID NO: 689952 - RNA, 19 nt, Artificial Sequence
  Description of Artificial Sequence: Synthetic oligonucleotide
aacgguauaacggugaaaa

SEQ ID NO: 689953 - RNA, 19 nt, Artificial Sequence
  Description of Artificial Sequence: Synthetic oligonucleotide
aaaagugggucuucgggug

SEQ ID NO: 689954 - RNA, 19 nt, Artificial Sequence
  Description of Artificial Sequence: Synthetic oligonucleotide
ucggaaaucaucccuuugc

SEQ ID NO: 689955 - RNA, 19 nt, Artificial Sequence
  Description of Artificial Sequence: Synthetic oligonucleotide
guggcuauaagaaaucagg

SEQ ID NO: 689956 - RNA, 19 nt, Artificial Sequence
  Description of Artificial Sequence: Synthetic oligonucleotide
uagugaaagggaacgaggc

SEQ ID NO: 689957 - RNA, 19 nt, Artificial Sequence
  Description of Artificial Sequence: Synthetic oligonucleotide
ucugaucauuucucgaggg

SEQ ID NO: 689958 - RNA, 19 nt, Artificial Sequence
  Description of Artificial Sequence: Synthetic oligonucleotide
aacgugaugcccuacccug

SEQ ID NO: 689959 - RNA, 19 nt, Artificial Sequence
  Description of Artificial Sequence: Synthetic oligonucleotide
guuguaaccacuuggucug

SEQ ID NO: 689960 - RNA, 19 nt, Artificial Sequence
  Description of Artificial Sequence: Synthetic oligonucleotide
ucaagugaaugaaaucuga

SEQ ID NO: 689961 - RNA, 19 nt, Artificial Sequence
  Description of Artificial Sequence: Synthetic oligonucleotide
ugccuuauuuucaucacug

SEQ ID NO: 689962 - RNA, 19 nt, Artificial Sequence
  Description of Artificial Sequence: Synthetic oligonucleotide
aaaacaagggaccggccca

SEQ ID NO: 689963 - RNA, 19 nt, Artificial Sequence
  Description of Artificial Sequence: Synthetic oligonucleotide
ugaagaagagucacgugug

SEQ ID NO: 689964 - RNA, 19 nt, Artificial Sequence
  Description of Artificial Sequence: Synthetic oligonucleotide
ucauuuguaacgccucaag

SEQ ID NO: 689965 - RNA, 19 nt, Artificial Sequence
  Description of Artificial Sequence: Synthetic oligonucleotide
aacauggggauacuuuucu

SEQ ID NO: 689966 - RNA, 19 nt, Artificial Sequence
  Description of Artificial Sequence: Synthetic oligonucleotide
gucucgaacauccuuauac

SEQ ID NO: 689967 - RNA, 19 nt, Artificial Sequence
  Description of Artificial Sequence: Synthetic oligonucleotide
aaacucuaggucugaaugu

SEQ ID NO: 689968 - RNA, 19 nt, Artificial Sequence
  Description of Artificial Sequence: Synthetic oligonucleotide
gagguagugaaagggaacg

SEQ ID NO: 689969 - RNA, 19 nt, Artificial Sequence
  Description of Artificial Sequence: Synthetic oligonucleotide
ucuaggucugaauguaucc

SEQ ID NO: 689970 - RNA, 19 nt, Artificial Sequence
  Description of Artificial Sequence: Synthetic oligonucleotide
agaacgugaugcccuaccc

SEQ ID NO: 689971 - RNA, 19 nt, Artificial Sequence
  Description of Artificial Sequence: Synthetic oligonucleotide
agacgaacuaccuaagccu

SEQ ID NO: 689972 - RNA, 19 nt, Artificial Sequence
  Description of Artificial Sequence: Synthetic oligonucleotide
uuguaacgccucaaguugg

SEQ ID NO: 689973 - RNA, 19 nt, Artificial Sequence
  Description of Artificial Sequence: Synthetic oligonucleotide
ggugaaaagguuuugugug

SEQ ID NO: 689974 - RNA, 19 nt, Artificial Sequence
  Description of Artificial Sequence: Synthetic oligonucleotide
uuucgcguugauuugucag

SEQ ID NO: 689975 - RNA, 19 nt, Artificial Sequence
  Description of Artificial Sequence: Synthetic oligonucleotide
uacaguauaagguggccga

SEQ ID NO: 689976 - RNA, 19 nt, Artificial Sequence
  Description of Artificial Sequence: Synthetic oligonucleotide
agggacacuccacaacucc

SEQ ID NO: 689977 - RNA, 19 nt, Artificial Sequence
  Description of Artificial Sequence: Synthetic oligonucleotide
ucuacuagcuccaacucua

SEQ ID NO: 689978 - RNA, 19 nt, Artificial Sequence
  Description of Artificial Sequence: Synthetic oligonucleotide
agguccaacagggagaccg

SEQ ID NO: 689979 - RNA, 19 nt, Artificial Sequence
  Description of Artificial Sequence: Synthetic oligonucleotide
uguauucucuucugggcag

SEQ ID NO: 689980 - RNA, 19 nt, Artificial Sequence
  Description of Artificial Sequence: Synthetic oligonucleotide
uaaucauaggcaucaagau

SEQ ID NO: 689981 - RNA, 19 nt, Artificial Sequence
  Description of Artificial Sequence: Synthetic oligonucleotide
aguuggcuccagcagaacg

SEQ ID NO: 689982 - RNA, 19 nt, Artificial Sequence
  Description of Artificial Sequence: Synthetic oligonucleotide
augccaaucaagcuuauaa

SEQ ID NO: 689983 - RNA, 19 nt, Artificial Sequence
  Description of Artificial Sequence: Synthetic oligonucleotide
cagacgaacuaccuaagcc

SEQ ID NO: 689984 - RNA, 19 nt, Artificial Sequence
  Description of Artificial Sequence: Synthetic oligonucleotide
gaaauguccagagaacaug

SEQ ID NO: 689985 - RNA, 19 nt, Artificial Sequence
  Description of Artificial Sequence: Synthetic oligonucleotide
aagucgagguagugaaagg

SEQ ID NO: 689986 - RNA, 19 nt, Artificial Sequence
  Description of Artificial Sequence: Synthetic oligonucleotide
aucugaucauuucucgagg

SEQ ID NO: 689987 - RNA, 19 nt, Artificial Sequence
  Description of Artificial Sequence: Synthetic oligonucleotide
cauauagaagcauauccca

SEQ ID NO: 689988 - RNA, 19 nt, Artificial Sequence
  Description of Artificial Sequence: Synthetic oligonucleotide
aacgaguggcgcuuccgcg

SEQ ID NO: 689989 - RNA, 19 nt, Artificial Sequence
  Description of Artificial Sequence: Synthetic oligonucleotide
cagcaagucucgaacaucc

SEQ ID NO: 689990 - RNA, 19 nt, Artificial Sequence
  Description of Artificial Sequence: Synthetic oligonucleotide
cuuccuuguagccugccgg

SEQ ID NO: 689991 - RNA, 19 nt, Artificial Sequence
  Description of Artificial Sequence: Synthetic oligonucleotide
uccuuauacagcauggcuu

SEQ ID NO: 689992 - RNA, 19 nt, Artificial Sequence
  Description of Artificial Sequence: Synthetic oligonucleotide
ucuugagacgcuguuuuag

SEQ ID NO: 689993 - RNA, 19 nt, Artificial Sequence
  Description of Artificial Sequence: Synthetic oligonucleotide
ucucgaacauccuuauaca

SEQ ID NO: 689994 - RNA, 19 nt, Artificial Sequence
  Description of Artificial Sequence: Synthetic oligonucleotide
gcuauaagaaaucagggaa

SEQ ID NO: 689995 - RNA, 19 nt, Artificial Sequence
  Description of Artificial Sequence: Synthetic oligonucleotide
agcaguauuguuucugccu

SEQ ID NO: 689996 - RNA, 19 nt, Artificial Sequence
  Description of Artificial Sequence: Synthetic oligonucleotide
agucgagguagugaaaggg

SEQ ID NO: 689997 - RNA, 19 nt, Artificial Sequence
  Description of Artificial Sequence: Synthetic oligonucleotide
cucaagugaaugaaaucug

SEQ ID NO: 689998 - RNA, 19 nt, Artificial Sequence
  Description of Artificial Sequence: Synthetic oligonucleotide
uccugaacgccccuggggc

SEQ ID NO: 689999 - RNA, 19 nt, Artificial Sequence
  Description of Artificial Sequence: Synthetic oligonucleotide
aaucaucccuuugcaaggg

SEQ ID NO: 690000 - RNA, 19 nt, Artificial Sequence
  Description of Artificial Sequence: Synthetic oligonucleotide
cuucggaauucauuucgcg

SEQ ID NO: 690001 - RNA, 19 nt, Artificial Sequence
  Description of Artificial Sequence: Synthetic oligonucleotide
uucgcguugauuugucagc

SEQ ID NO: 690002 - RNA, 19 nt, Artificial Sequence
  Description of Artificial Sequence: Synthetic oligonucleotide
uuuuagguuuaaagcgaug

SEQ ID NO: 690003 - RNA, 19 nt, Artificial Sequence
  Description of Artificial Sequence: Synthetic oligonucleotide
cuaagccucuuccagcugc

SEQ ID NO: 690004 - RNA, 19 nt, Artificial Sequence
  Description of Artificial Sequence: Synthetic oligonucleotide
ucacgaagauccagggucc

SEQ ID NO: 690005 - RNA, 19 nt, Artificial Sequence
  Description of Artificial Sequence: Synthetic oligonucleotide
uccaaugggguuguaacca

SEQ ID NO: 690006 - RNA, 19 nt, Artificial Sequence
  Description of Artificial Sequence: Synthetic oligonucleotide
ugaaccuucggaauucauu

SEQ ID NO: 690007 - RNA, 19 nt, Artificial Sequence
  Description of Artificial Sequence: Synthetic oligonucleotide
uucauuucgcguugauuug

SEQ ID NO: 690008 - RNA, 19 nt, Artificial Sequence
  Description of Artificial Sequence: Synthetic oligonucleotide
ugcaaaagugccuuauuuu

SEQ ID NO: 690009 - RNA, 19 nt, Artificial Sequence
  Description of Artificial Sequence: Synthetic oligonucleotide
ucaucccuuugcaagggug

SEQ ID NO: 690010 - RNA, 19 nt, Artificial Sequence
  Description of Artificial Sequence: Synthetic oligonucleotide
ggaacgaggccuuggaggg

SEQ ID NO: 690011 - RNA, 19 nt, Artificial Sequence
  Description of Artificial Sequence: Synthetic oligonucleotide
auccuuauacagcauggcu

SEQ ID NO: 690012 - RNA, 19 nt, Artificial Sequence
  Description of Artificial Sequence: Synthetic oligonucleotide
auauagaagcauaucccag

SEQ ID NO: 690013 - RNA, 19 nt, Artificial Sequence
  Description of Artificial Sequence: Synthetic oligonucleotide
cauggggauacuuuucuuc

SEQ ID NO: 690014 - RNA, 19 nt, Artificial Sequence
  Description of Artificial Sequence: Synthetic oligonucleotide
cuaccuaagccucuuccag

SEQ ID NO: 690015 - RNA, 19 nt, Artificial Sequence
  Description of Artificial Sequence: Synthetic oligonucleotide
cuacaguauaagguggccg

SEQ ID NO: 690016 - RNA, 19 nt, Artificial Sequence
  Description of Artificial Sequence: Synthetic oligonucleotide
aguauuguuucugccucac

SEQ ID NO: 690017 - RNA, 19 nt, Artificial Sequence
  Description of Artificial Sequence: Synthetic oligonucleotide
ugaucauuucucgaggguc

SEQ ID NO: 690018 - RNA, 19 nt, Artificial Sequence
  Description of Artificial Sequence: Synthetic oligonucleotide
acggugaaaagguuuugug

SEQ ID NO: 690019 - RNA, 19 nt, Artificial Sequence
  Description of Artificial Sequence: Synthetic oligonucleotide
gccaccagagcccaaaggg

SEQ ID NO: 690020 - RNA, 19 nt, Artificial Sequence
  Description of Artificial Sequence: Synthetic oligonucleotide
gggaacgaggccuuggagg

SEQ ID NO: 690021 - RNA, 19 nt, Artificial Sequence
  Description of Artificial Sequence: Synthetic oligonucleotide
cucucuucggcccgaacgg

SEQ ID NO: 690022 - RNA, 19 nt, Artificial Sequence
  Description of Artificial Sequence: Synthetic oligonucleotide
uguaccuggagccggcgac

SEQ ID NO: 690023 - RNA, 19 nt, Artificial Sequence
  Description of Artificial Sequence: Synthetic oligonucleotide
agcgaugccaaucaagcuu

SEQ ID NO: 690024 - RNA, 19 nt, Artificial Sequence
  Description of Artificial Sequence: Synthetic oligonucleotide
ugaaccuugcuugaguaau

SEQ ID NO: 690025 - RNA, 19 nt, Artificial Sequence
  Description of Artificial Sequence: Synthetic oligonucleotide
acgaguggagcagaaagag

SEQ ID NO: 690026 - RNA, 19 nt, Artificial Sequence
  Description of Artificial Sequence: Synthetic oligonucleotide
aacggugaaaagguuuugu

SEQ ID NO: 690027 - RNA, 19 nt, Artificial Sequence
  Description of Artificial Sequence: Synthetic oligonucleotide
cacguagcaguauuguuuc

SEQ ID NO: 690028 - RNA, 19 nt, Artificial Sequence
  Description of Artificial Sequence: Synthetic oligonucleotide
cucggcaagcauauagaag

SEQ ID NO: 690029 - RNA, 19 nt, Artificial Sequence
  Description of Artificial Sequence: Synthetic oligonucleotide
guucucgaagaucugguca

SEQ ID NO: 690030 - RNA, 19 nt, Artificial Sequence
  Description of Artificial Sequence: Synthetic oligonucleotide
gcuuauaauguucucucug

SEQ ID NO: 690031 - RNA, 19 nt, Artificial Sequence
  Description of Artificial Sequence: Synthetic oligonucleotide
ugccaaucaagcuuauaau

SEQ ID NO: 690032 - RNA, 19 nt, Artificial Sequence
  Description of Artificial Sequence: Synthetic oligonucleotide
uuauggagcacacgcugaa

SEQ ID NO: 690033 - RNA, 19 nt, Artificial Sequence
  Description of Artificial Sequence: Synthetic oligonucleotide
gaaucggcgcucugcagcc

SEQ ID NO: 690034 - RNA, 19 nt, Artificial Sequence
  Description of Artificial Sequence: Synthetic oligonucleotide
cugucagcaagucucgaac

SEQ ID NO: 690035 - RNA, 19 nt, Artificial Sequence
  Description of Artificial Sequence: Synthetic oligonucleotide
aagggaacgaggccuugga

SEQ ID NO: 690036 - RNA, 19 nt, Artificial Sequence
  Description of Artificial Sequence: Synthetic oligonucleotide
aagcgaugccaaucaagcu

SEQ ID NO: 690037 - RNA, 19 nt, Artificial Sequence
  Description of Artificial Sequence: Synthetic oligonucleotide
gcauauagaagcauauccc

SEQ ID NO: 690038 - RNA, 19 nt, Artificial Sequence
  Description of Artificial Sequence: Synthetic oligonucleotide
uugagacgcuguuuuaggu

SEQ ID NO: 690039 - RNA, 19 nt, Artificial Sequence
  Description of Artificial Sequence: Synthetic oligonucleotide
aucgccguuguucuucuug

SEQ ID NO: 690040 - RNA, 19 nt, Artificial Sequence
  Description of Artificial Sequence: Synthetic oligonucleotide
auaucccaaagucggaaau

SEQ ID NO: 690041 - RNA, 19 nt, Artificial Sequence
  Description of Artificial Sequence: Synthetic oligonucleotide
guuuaaagcgaugccaauc

SEQ ID NO: 690042 - RNA, 19 nt, Artificial Sequence
  Description of Artificial Sequence: Synthetic oligonucleotide
aaaucgccguuguucuucu

SEQ ID NO: 690043 - RNA, 19 nt, Artificial Sequence
  Description of Artificial Sequence: Synthetic oligonucleotide
aguagggacauaacgccag

SEQ ID NO: 690044 - RNA, 19 nt, Artificial Sequence
  Description of Artificial Sequence: Synthetic oligonucleotide
uccagcagaacgugaugcc

SEQ ID NO: 690045 - RNA, 19 nt, Artificial Sequence
  Description of Artificial Sequence: Synthetic oligonucleotide
acgaguggcgcuuccgcgg

SEQ ID NO: 690046 - RNA, 19 nt, Artificial Sequence
  Description of Artificial Sequence: Synthetic oligonucleotide
uaacgccagggucuacagg

SEQ ID NO: 690047 - RNA, 19 nt, Artificial Sequence
  Description of Artificial Sequence: Synthetic oligonucleotide
gaacgaguggcgcuuccgc

SEQ ID NO: 690048 - RNA, 19 nt, Artificial Sequence
  Description of Artificial Sequence: Synthetic oligonucleotide
agcccaaaggggcauugag

SEQ ID NO: 690049 - RNA, 19 nt, Artificial Sequence
  Description of Artificial Sequence: Synthetic oligonucleotide
uagcaguauuguuucugcc

SEQ ID NO: 690050 - RNA, 19 nt, Artificial Sequence
  Description of Artificial Sequence: Synthetic oligonucleotide
cugaagaagagucacgugu

SEQ ID NO: 690051 - RNA, 19 nt, Artificial Sequence
  Description of Artificial Sequence: Synthetic oligonucleotide
gaaccuucggaauucauuu

SEQ ID NO: 690052 - RNA, 19 nt, Artificial Sequence
  Description of Artificial Sequence: Synthetic oligonucleotide
cucuaggucugaauguauc

SEQ ID NO: 690053 - RNA, 19 nt, Artificial Sequence
  Description of Artificial Sequence: Synthetic oligonucleotide
cuccagcagaacgugaugc

SEQ ID NO: 690054 - RNA, 19 nt, Artificial Sequence
  Description of Artificial Sequence: Synthetic oligonucleotide
aacucuaggucugaaugua

SEQ ID NO: 690055 - RNA, 19 nt, Artificial Sequence
  Description of Artificial Sequence: Synthetic oligonucleotide
uaacgccucaaguuggcuc

SEQ ID NO: 690056 - RNA, 19 nt, Artificial Sequence
  Description of Artificial Sequence: Synthetic oligonucleotide
uccgcggugagguccaaca

SEQ ID NO: 690057 - RNA, 19 nt, Artificial Sequence
  Description of Artificial Sequence: Synthetic oligonucleotide
guccaaugggguuguaacc

SEQ ID NO: 690058 - RNA, 19 nt, Artificial Sequence
  Description of Artificial Sequence: Synthetic oligonucleotide
agugucaauucuacuagcu

SEQ ID NO: 690059 - RNA, 19 nt, Artificial Sequence
  Description of Artificial Sequence: Synthetic oligonucleotide
agaguuggacccagguggc

SEQ ID NO: 690060 - RNA, 19 nt, Artificial Sequence
  Description of Artificial Sequence: Synthetic oligonucleotide
ugagacgcuguuuuagguu

SEQ ID NO: 690061 - RNA, 19 nt, Artificial Sequence
  Description of Artificial Sequence: Synthetic oligonucleotide
gacugcgauggucucggag

SEQ ID NO: 690062 - RNA, 19 nt, Artificial Sequence
  Description of Artificial Sequence: Synthetic oligonucleotide
gacccagguggcuauaaga

SEQ ID NO: 690063 - RNA, 19 nt, Artificial Sequence
  Description of Artificial Sequence: Synthetic oligonucleotide
uuccucuccucucucucug

SEQ ID NO: 690064 - RNA, 19 nt, Artificial Sequence
  Description of Artificial Sequence: Synthetic oligonucleotide
uggucucggaggcaacgag

SEQ ID NO: 690065 - RNA, 19 nt, Artificial Sequence
  Description of Artificial Sequence: Synthetic oligonucleotide
acgguauaacggugaaaag

SEQ ID NO: 690066 - RNA, 19 nt, Artificial Sequence
  Description of Artificial Sequence: Synthetic oligonucleotide
ucggaggcaacgaguggag

SEQ ID NO: 690067 - RNA, 19 nt, Artificial Sequence
  Description of Artificial Sequence: Synthetic oligonucleotide
cugacugcgauggucucgg

SEQ ID NO: 690068 - RNA, 19 nt, Artificial Sequence
  Description of Artificial Sequence: Synthetic oligonucleotide
ucauuucgcguugauuugu

SEQ ID NO: 690069 - RNA, 19 nt, Artificial Sequence
  Description of Artificial Sequence: Synthetic oligonucleotide
cagaacgugaugcccuacc

SEQ ID NO: 690070 - RNA, 19 nt, Artificial Sequence
  Description of Artificial Sequence: Synthetic oligonucleotide
uacgcgacgccccgggcag

SEQ ID NO: 690071 - RNA, 19 nt, Artificial Sequence
  Description of Artificial Sequence: Synthetic oligonucleotide
gguuguaaccacuuggucu

SEQ ID NO: 690072 - RNA, 19 nt, Artificial Sequence
  Description of Artificial Sequence: Synthetic oligonucleotide
uuccuuguagccugccgga

SEQ ID NO: 690073 - RNA, 19 nt, Artificial Sequence
  Description of Artificial Sequence: Synthetic oligonucleotide
gcuuauggagcacacgcug

SEQ ID NO: 690074 - RNA, 19 nt, Artificial Sequence
  Description of Artificial Sequence: Synthetic oligonucleotide
gucucaagugaaugaaauc

SEQ ID NO: 690075 - RNA, 19 nt, Artificial Sequence
  Description of Artificial Sequence: Synthetic oligonucleotide
guagggacauaacgccagg

SEQ ID NO: 690076 - RNA, 19 nt, Artificial Sequence
  Description of Artificial Sequence: Synthetic oligonucleotide
cauccuuauacagcauggc

SEQ ID NO: 690077 - RNA, 19 nt, Artificial Sequence
  Description of Artificial Sequence: Synthetic oligonucleotide
gggguauaucccaaagucg

SEQ ID NO: 690078 - RNA, 19 nt, Artificial Sequence
  Description of Artificial Sequence: Synthetic oligonucleotide
gaguacgcgacgccccggg

SEQ ID NO: 690079 - RNA, 19 nt, Artificial Sequence
  Description of Artificial Sequence: Synthetic oligonucleotide
gggugcuuggcucaccagg

SEQ ID NO: 690080 - RNA, 19 nt, Artificial Sequence
  Description of Artificial Sequence: Synthetic oligonucleotide
ugcuugaguaauucuucau

SEQ ID NO: 690081 - RNA, 19 nt, Artificial Sequence
  Description of Artificial Sequence: Synthetic oligonucleotide
uuuccucuccucucucucu

SEQ ID NO: 690082 - RNA, 19 nt, Artificial Sequence
  Description of Artificial Sequence: Synthetic oligonucleotide
cagcaaaucgccguuguuc

SEQ ID NO: 690083 - RNA, 19 nt, Artificial Sequence
  Description of Artificial Sequence: Synthetic oligonucleotide
cugggcagcgaaucggcgc

SEQ ID NO: 690084 - RNA, 19 nt, Artificial Sequence
  Description of Artificial Sequence: Synthetic oligonucleotide
ggcaauaccucaaauucac

SEQ ID NO: 690085 - RNA, 19 nt, Artificial Sequence
  Description of Artificial Sequence: Synthetic oligonucleotide
auaacggugaaaagguuuu

SEQ ID NO: 690086 - RNA, 19 nt, Artificial Sequence
  Description of Artificial Sequence: Synthetic oligonucleotide
gacgaacuaccuaagccuc

SEQ ID NO: 690087 - RNA, 19 nt, Artificial Sequence
  Description of Artificial Sequence: Synthetic oligonucleotide
aggccuaggggcucccaac

SEQ ID NO: 690088 - RNA, 19 nt, Artificial Sequence
  Description of Artificial Sequence: Synthetic oligonucleotide
agcauggcuucauuuguaa

SEQ ID NO: 690089 - RNA, 19 nt, Artificial Sequence
  Description of Artificial Sequence: Synthetic oligonucleotide
cuuauggagcacacgcuga

SEQ ID NO: 690090 - RNA, 19 nt, Artificial Sequence
  Description of Artificial Sequence: Synthetic oligonucleotide
agcgaaucggcgcucugca

SEQ ID NO: 690091 - RNA, 19 nt, Artificial Sequence
  Description of Artificial Sequence: Synthetic oligonucleotide
cagcagacgaacuaccuaa

SEQ ID NO: 690092 - RNA, 19 nt, Artificial Sequence
  Description of Artificial Sequence: Synthetic oligonucleotide
uucauuuguaacgccucaa

SEQ ID NO: 690093 - RNA, 19 nt, Artificial Sequence
  Description of Artificial Sequence: Synthetic oligonucleotide
caaaucgccguuguucuuc

SEQ ID NO: 690094 - RNA, 19 nt, Artificial Sequence
  Description of Artificial Sequence: Synthetic oligonucleotide
aaugggguuguaaccacuu

SEQ ID NO: 690095 - RNA, 19 nt, Artificial Sequence
  Description of Artificial Sequence: Synthetic oligonucleotide
ucgccguuguucuucuugu

SEQ ID NO: 690096 - RNA, 19 nt, Artificial Sequence
  Description of Artificial Sequence: Synthetic oligonucleotide
caacugggcagcgaaucgg

SEQ ID NO: 690097 - RNA, 19 nt, Artificial Sequence
  Description of Artificial Sequence: Synthetic oligonucleotide
auuucgcguugauuuguca

SEQ ID NO: 690098 - RNA, 19 nt, Artificial Sequence
  Description of Artificial Sequence: Synthetic oligonucleotide
ucuucggcccgaacgguau

SEQ ID NO: 690099 - RNA, 19 nt, Artificial Sequence
  Description of Artificial Sequence: Synthetic oligonucleotide
aguacgcgacgccccgggc

SEQ ID NO: 690100 - RNA, 19 nt, Artificial Sequence
  Description of Artificial Sequence: Synthetic oligonucleotide
aaguuggcuccagcagaac

SEQ ID NO: 690101 - RNA, 19 nt, Artificial Sequence
  Description of Artificial Sequence: Synthetic oligonucleotide
acagcagacgaacuaccua

SEQ ID NO: 690102 - RNA, 19 nt, Artificial Sequence
  Description of Artificial Sequence: Synthetic oligonucleotide
guauucucuucugggcagg

SEQ ID NO: 690103 - RNA, 19 nt, Artificial Sequence
  Description of Artificial Sequence: Synthetic oligonucleotide
gcaguauuguuucugccuc

SEQ ID NO: 690104 - RNA, 19 nt, Artificial Sequence
  Description of Artificial Sequence: Synthetic oligonucleotide
ccuagaguccugcacagug

SEQ ID NO: 690105 - RNA, 19 nt, Artificial Sequence
  Description of Artificial Sequence: Synthetic oligonucleotide
guguguaacaccacuucuc

SEQ ID NO: 690106 - RNA, 19 nt, Artificial Sequence
  Description of Artificial Sequence: Synthetic oligonucleotide
uccucuccucucucucugg

SEQ ID NO: 690107 - RNA, 19 nt, Artificial Sequence
  Description of Artificial Sequence: Synthetic oligonucleotide
cauuucgcguugauuuguc

SEQ ID NO: 690108 - RNA, 19 nt, Artificial Sequence
  Description of Artificial Sequence: Synthetic oligonucleotide
ggcgacauggccgaagcag

SEQ ID NO: 690109 - RNA, 19 nt, Artificial Sequence
  Description of Artificial Sequence: Synthetic oligonucleotide
cuugagucaguggcccugg

SEQ ID NO: 690110 - RNA, 19 nt, Artificial Sequence
  Description of Artificial Sequence: Synthetic oligonucleotide
gugcuuuagcccagguugg

SEQ ID NO: 690111 - RNA, 19 nt, Artificial Sequence
  Description of Artificial Sequence: Synthetic oligonucleotide
gucucggaggcaacgagug

SEQ ID NO: 690112 - RNA, 19 nt, Artificial Sequence
  Description of Artificial Sequence: Synthetic oligonucleotide
guguaacaccacuucucug

SEQ ID NO: 690113 - RNA, 19 nt, Artificial Sequence
  Description of Artificial Sequence: Synthetic oligonucleotide
gucggaaaucaucccuuug

SEQ ID NO: 690114 - RNA, 19 nt, Artificial Sequence
  Description of Artificial Sequence: Synthetic oligonucleotide
uuggcuccagcagaacgug

SEQ ID NO: 690115 - RNA, 19 nt, Artificial Sequence
  Description of Artificial Sequence: Synthetic oligonucleotide
aguggagcagaaagagaag

SEQ ID NO: 690116 - RNA, 19 nt, Artificial Sequence
  Description of Artificial Sequence: Synthetic oligonucleotide
ucgcguugauuugucagcu

SEQ ID NO: 690117 - RNA, 19 nt, Artificial Sequence
  Description of Artificial Sequence: Synthetic oligonucleotide
caguauaagguggccgagc

SEQ ID NO: 690118 - RNA, 19 nt, Artificial Sequence
  Description of Artificial Sequence: Synthetic oligonucleotide
auuugucagcugcuacagu

SEQ ID NO: 690119 - RNA, 19 nt, Artificial Sequence
  Description of Artificial Sequence: Synthetic oligonucleotide
uguaaccacuuggucuggc

SEQ ID NO: 690120 - RNA, 19 nt, Artificial Sequence
  Description of Artificial Sequence: Synthetic oligonucleotide
cauccugaacgccccuggg

SEQ ID NO: 690121 - RNA, 19 nt, Artificial Sequence
  Description of Artificial Sequence: Synthetic oligonucleotide
gagcccuagaguccugcac

SEQ ID NO: 690122 - RNA, 19 nt, Artificial Sequence
  Description of Artificial Sequence: Synthetic oligonucleotide
uggccgagcccuagagucc

SEQ ID NO: 690123 - RNA, 19 nt, Artificial Sequence
  Description of Artificial Sequence: Synthetic oligonucleotide
uucgagaauggcucaucuu

SEQ ID NO: 690124 - RNA, 19 nt, Artificial Sequence
  Description of Artificial Sequence: Synthetic oligonucleotide
guauaucccaaagucggaa

SEQ ID NO: 690125 - RNA, 19 nt, Artificial Sequence
  Description of Artificial Sequence: Synthetic oligonucleotide
agguggcuauaagaaauca

SEQ ID NO: 690126 - RNA, 19 nt, Artificial Sequence
  Description of Artificial Sequence: Synthetic oligonucleotide
gaguagggacauaacgcca

SEQ ID NO: 690127 - RNA, 19 nt, Artificial Sequence
  Description of Artificial Sequence: Synthetic oligonucleotide
gugaaaagguuuugugugu

SEQ ID NO: 690128 - RNA, 19 nt, Artificial Sequence
  Description of Artificial Sequence: Synthetic oligonucleotide
cauuuguaacgccucaagu

SEQ ID NO: 690129 - RNA, 19 nt, Artificial Sequence
  Description of Artificial Sequence: Synthetic oligonucleotide
gagggguauaucccaaagu

SEQ ID NO: 690130 - RNA, 19 nt, Artificial Sequence
  Description of Artificial Sequence: Synthetic oligonucleotide
gagauugcugaagaagagu

SEQ ID NO: 690131 - RNA, 19 nt, Artificial Sequence
  Description of Artificial Sequence: Synthetic oligonucleotide
ucucaagcuucaggaggag

SEQ ID NO: 690132 - RNA, 19 nt, Artificial Sequence
  Description of Artificial Sequence: Synthetic oligonucleotide
uggagccggcgacauggcc

SEQ ID NO: 690133 - RNA, 19 nt, Artificial Sequence
  Description of Artificial Sequence: Synthetic oligonucleotide
gucgagguagugaaaggga

SEQ ID NO: 690134 - RNA, 19 nt, Artificial Sequence
  Description of Artificial Sequence: Synthetic oligonucleotide
gaagcauaucccagagcuc

SEQ ID NO: 690135 - RNA, 19 nt, Artificial Sequence
  Description of Artificial Sequence: Synthetic oligonucleotide
cauuucucgagggucuuca

SEQ ID NO: 690136 - RNA, 19 nt, Artificial Sequence
  Description of Artificial Sequence: Synthetic oligonucleotide
cauaacgccagggucuaca

SEQ ID NO: 690137 - RNA, 19 nt, Artificial Sequence
  Description of Artificial Sequence: Synthetic oligonucleotide
uaagguggccgagcccuag

SEQ ID NO: 690138 - RNA, 19 nt, Artificial Sequence
  Description of Artificial Sequence: Synthetic oligonucleotide
aguagcuagcuggagcuuu

SEQ ID NO: 690139 - RNA, 19 nt, Artificial Sequence
  Description of Artificial Sequence: Synthetic oligonucleotide
uccgcgggugcuuggcuca

SEQ ID NO: 690140 - RNA, 19 nt, Artificial Sequence
  Description of Artificial Sequence: Synthetic oligonucleotide
aucaucccuuugcaagggu

SEQ ID NO: 690141 - RNA, 19 nt, Artificial Sequence
  Description of Artificial Sequence: Synthetic oligonucleotide
ugcccuacccugggcaucc

SEQ ID NO: 690142 - RNA, 19 nt, Artificial Sequence
  Description of Artificial Sequence: Synthetic oligonucleotide
ccaaucaagcuuauaaugu

SEQ ID NO: 690143 - RNA, 19 nt, Artificial Sequence
  Description of Artificial Sequence: Synthetic oligonucleotide
agucggaaaucaucccuuu

SEQ ID NO: 690144 - RNA, 19 nt, Artificial Sequence
  Description of Artificial Sequence: Synthetic oligonucleotide
gcagacgaacuaccuaagc

SEQ ID NO: 690145 - RNA, 19 nt, Artificial Sequence
  Description of Artificial Sequence: Synthetic oligonucleotide
acgcugaagcucuccaaaa

SEQ ID NO: 690146 - RNA, 19 nt, Artificial Sequence
  Description of Artificial Sequence: Synthetic oligonucleotide
agggucuacaggcccagua

SEQ ID NO: 690147 - RNA, 19 nt, Artificial Sequence
  Description of Artificial Sequence: Synthetic oligonucleotide
gaacgugaugcccuacccu

SEQ ID NO: 690148 - RNA, 19 nt, Artificial Sequence
  Description of Artificial Sequence: Synthetic oligonucleotide
cucaggccccgaacgagug

SEQ ID NO: 690149 - RNA, 19 nt, Artificial Sequence
  Description of Artificial Sequence: Synthetic oligonucleotide
agcucggcaagcauauaga

SEQ ID NO: 690150 - RNA, 19 nt, Artificial Sequence
  Description of Artificial Sequence: Synthetic oligonucleotide
ucaauucuacuagcuccaa

SEQ ID NO: 690151 - RNA, 19 nt, Artificial Sequence
  Description of Artificial Sequence: Synthetic oligonucleotide
agcagacgaacuaccuaag

SEQ ID NO: 690152 - RNA, 19 nt, Artificial Sequence
  Description of Artificial Sequence: Synthetic oligonucleotide
guaaagccaccagagccca

SEQ ID NO: 690153 - RNA, 19 nt, Artificial Sequence
  Description of Artificial Sequence: Synthetic oligonucleotide
cuuguagccugccggaucu

SEQ ID NO: 690154 - RNA, 19 nt, Artificial Sequence
  Description of Artificial Sequence: Synthetic oligonucleotide
cucggaggcaacgagugga

SEQ ID NO: 690155 - RNA, 19 nt, Artificial Sequence
  Description of Artificial Sequence: Synthetic oligonucleotide
gaacuaccuaagccucuuc

SEQ ID NO: 690156 - RNA, 19 nt, Artificial Sequence
  Description of Artificial Sequence: Synthetic oligonucleotide
caagugaaugaaaucugau

SEQ ID NO: 690157 - RNA, 19 nt, Artificial Sequence
  Description of Artificial Sequence: Synthetic oligonucleotide
ggcccugucagcaagucuc

SEQ ID NO: 690158 - RNA, 19 nt, Artificial Sequence
  Description of Artificial Sequence: Synthetic oligonucleotide
gaguccugcacaguggggu

SEQ ID NO: 690159 - RNA, 19 nt, Artificial Sequence
  Description of Artificial Sequence: Synthetic oligonucleotide
agguagugaaagggaacga

SEQ ID NO: 690160 - RNA, 19 nt, Artificial Sequence
  Description of Artificial Sequence: Synthetic oligonucleotide
ccaacucuacuugggagcc

SEQ ID NO: 690161 - RNA, 19 nt, Artificial Sequence
  Description of Artificial Sequence: Synthetic oligonucleotide
acgugaugcccuacccugg

SEQ ID NO: 690162 - RNA, 19 nt, Artificial Sequence
  Description of Artificial Sequence: Synthetic oligonucleotide
cagcgaaucggcgcucugc

SEQ ID NO: 690163 - RNA, 19 nt, Artificial Sequence
  Description of Artificial Sequence: Synthetic oligonucleotide
agaguccugcacagugggg

SEQ ID NO: 690164 - RNA, 19 nt, Artificial Sequence
  Description of Artificial Sequence: Synthetic oligonucleotide
uuggucuggcuucgagaau

SEQ ID NO: 690165 - RNA, 19 nt, Artificial Sequence
  Description of Artificial Sequence: Synthetic oligonucleotide
auuucucgagggucuucau

SEQ ID NO: 690166 - RNA, 19 nt, Artificial Sequence
  Description of Artificial Sequence: Synthetic oligonucleotide
gcuacaguauaagguggcc

SEQ ID NO: 690167 - RNA, 19 nt, Artificial Sequence
  Description of Artificial Sequence: Synthetic oligonucleotide
caguauuguuucugccuca

SEQ ID NO: 690168 - RNA, 19 nt, Artificial Sequence
  Description of Artificial Sequence: Synthetic oligonucleotide
caggagaguaaagccacca

SEQ ID NO: 690169 - RNA, 19 nt, Artificial Sequence
  Description of Artificial Sequence: Synthetic oligonucleotide
cgaaucggcgcucugcagc

SEQ ID NO: 690170 - RNA, 19 nt, Artificial Sequence
  Description of Artificial Sequence: Synthetic oligonucleotide
gggaguacgcgacgccccg

SEQ ID NO: 690171 - RNA, 19 nt, Artificial Sequence
  Description of Artificial Sequence: Synthetic oligonucleotide
ucccguugccgucgagcug

SEQ ID NO: 690172 - RNA, 19 nt, Artificial Sequence
  Description of Artificial Sequence: Synthetic oligonucleotide
ccaaaggggcauugaguag

SEQ ID NO: 690173 - RNA, 19 nt, Artificial Sequence
  Description of Artificial Sequence: Synthetic oligonucleotide
guacgcgacgccccgggca

SEQ ID NO: 690174 - RNA, 19 nt, Artificial Sequence
  Description of Artificial Sequence: Synthetic oligonucleotide
uucggcccgaacgguauaa

SEQ ID NO: 690175 - RNA, 19 nt, Artificial Sequence
  Description of Artificial Sequence: Synthetic oligonucleotide
gucuucggguggugagggg

SEQ ID NO: 690176 - RNA, 19 nt, Artificial Sequence
  Description of Artificial Sequence: Synthetic oligonucleotide
acguagcaguauuguuucu

SEQ ID NO: 690177 - RNA, 19 nt, Artificial Sequence
  Description of Artificial Sequence: Synthetic oligonucleotide
aguuggacccagguggcua

SEQ ID NO: 690178 - RNA, 19 nt, Artificial Sequence
  Description of Artificial Sequence: Synthetic oligonucleotide
guuggcuccagcagaacgu

SEQ ID NO: 690179 - RNA, 19 nt, Artificial Sequence
  Description of Artificial Sequence: Synthetic oligonucleotide
gacauaacgccagggucua

SEQ ID NO: 690180 - RNA, 19 nt, Artificial Sequence
  Description of Artificial Sequence: Synthetic oligonucleotide
cacgaagauccaggguccc

SEQ ID NO: 690181 - RNA, 19 nt, Artificial Sequence
  Description of Artificial Sequence: Synthetic oligonucleotide
uagccugccggaucuccau

SEQ ID NO: 690182 - RNA, 19 nt, Artificial Sequence
  Description of Artificial Sequence: Synthetic oligonucleotide
ucucuucggcccgaacggu

SEQ ID NO: 690183 - RNA, 19 nt, Artificial Sequence
  Description of Artificial Sequence: Synthetic oligonucleotide
cccguugccgucgagcugc

SEQ ID NO: 690184 - RNA, 19 nt, Artificial Sequence
  Description of Artificial Sequence: Synthetic oligonucleotide
ggacauaacgccagggucu

SEQ ID NO: 690185 - RNA, 19 nt, Artificial Sequence
  Description of Artificial Sequence: Synthetic oligonucleotide
gagcacacgcugaagcucu

SEQ ID NO: 690186 - RNA, 19 nt, Artificial Sequence
  Description of Artificial Sequence: Synthetic oligonucleotide
acgaacuaccuaagccucu

SEQ ID NO: 690187 - RNA, 19 nt, Artificial Sequence
  Description of Artificial Sequence: Synthetic oligonucleotide
agucucgaacauccuuaua

SEQ ID NO: 690188 - RNA, 19 nt, Artificial Sequence
  Description of Artificial Sequence: Synthetic oligonucleotide
gaacgguauaacggugaaa

SEQ ID NO: 690189 - RNA, 19 nt, Artificial Sequence
  Description of Artificial Sequence: Synthetic oligonucleotide
cugaacgccccuggggcug

SEQ ID NO: 690190 - RNA, 19 nt, Artificial Sequence
  Description of Artificial Sequence: Synthetic oligonucleotide
aacaagggaccggcccaga

SEQ ID NO: 690191 - RNA, 19 nt, Artificial Sequence
  Description of Artificial Sequence: Synthetic oligonucleotide
acauaacgccagggucuac

SEQ ID NO: 690192 - RNA, 19 nt, Artificial Sequence
  Description of Artificial Sequence: Synthetic oligonucleotide
gcccuagaguccugcacag

SEQ ID NO: 690193 - RNA, 19 nt, Artificial Sequence
  Description of Artificial Sequence: Synthetic oligonucleotide
ccucaaguuggcuccagca

SEQ ID NO: 690194 - RNA, 19 nt, Artificial Sequence
  Description of Artificial Sequence: Synthetic oligonucleotide
acucuaggucugaauguau

SEQ ID NO: 690195 - RNA, 19 nt, Artificial Sequence
  Description of Artificial Sequence: Synthetic oligonucleotide
cuccgcgggugcuuggcuc

SEQ ID NO: 690196 - RNA, 19 nt, Artificial Sequence
  Description of Artificial Sequence: Synthetic oligonucleotide
agcauaucccagagcucug

SEQ ID NO: 690197 - RNA, 19 nt, Artificial Sequence
  Description of Artificial Sequence: Synthetic oligonucleotide
gaggccuaggggcucccaa

SEQ ID NO: 690198 - RNA, 19 nt, Artificial Sequence
  Description of Artificial Sequence: Synthetic oligonucleotide
gguauaucccaaagucgga

SEQ ID NO: 690199 - RNA, 19 nt, Artificial Sequence
  Description of Artificial Sequence: Synthetic oligonucleotide
gggucuucggguggugagg

SEQ ID NO: 690200 - RNA, 19 nt, Artificial Sequence
  Description of Artificial Sequence: Synthetic oligonucleotide
cugaucauuucucgagggu

SEQ ID NO: 690201 - RNA, 19 nt, Artificial Sequence
  Description of Artificial Sequence: Synthetic oligonucleotide
gcucggcaagcauauagaa

SEQ ID NO: 690202 - RNA, 19 nt, Artificial Sequence
  Description of Artificial Sequence: Synthetic oligonucleotide
auacaccugcaaggucauc

SEQ ID NO: 690203 - RNA, 19 nt, Artificial Sequence
  Description of Artificial Sequence: Synthetic oligonucleotide
cuggagccggcgacauggc

SEQ ID NO: 690204 - RNA, 19 nt, Artificial Sequence
  Description of Artificial Sequence: Synthetic oligonucleotide
gaugccaaucaagcuuaua

SEQ ID NO: 690205 - RNA, 19 nt, Artificial Sequence
  Description of Artificial Sequence: Synthetic oligonucleotide
cuuccugaacuuguauucu

SEQ ID NO: 690206 - RNA, 19 nt, Artificial Sequence
  Description of Artificial Sequence: Synthetic oligonucleotide
aucauuucucgagggucuu

SEQ ID NO: 690207 - RNA, 19 nt, Artificial Sequence
  Description of Artificial Sequence: Synthetic oligonucleotide
ccaugaaccuucggaauuc

SEQ ID NO: 690208 - RNA, 19 nt, Artificial Sequence
  Description of Artificial Sequence: Synthetic oligonucleotide
gaccggcccagaggguggg

SEQ ID NO: 690209 - RNA, 19 nt, Artificial Sequence
  Description of Artificial Sequence: Synthetic oligonucleotide
aaucggcgcucugcagcca

SEQ ID NO: 690210 - RNA, 19 nt, Artificial Sequence
  Description of Artificial Sequence: Synthetic oligonucleotide
cuggaggccuaggggcucc

SEQ ID NO: 690211 - RNA, 19 nt, Artificial Sequence
  Description of Artificial Sequence: Synthetic oligonucleotide
ccgaacgguauaacgguga

SEQ ID NO: 690212 - RNA, 19 nt, Artificial Sequence
  Description of Artificial Sequence: Synthetic oligonucleotide
gggaccggcccagagggug

SEQ ID NO: 690213 - RNA, 19 nt, Artificial Sequence
  Description of Artificial Sequence: Synthetic oligonucleotide
gucuacaggcccaguagcu

SEQ ID NO: 690214 - RNA, 19 nt, Artificial Sequence
  Description of Artificial Sequence: Synthetic oligonucleotide
ggaucuccauuucuugagu

SEQ ID NO: 690215 - RNA, 19 nt, Artificial Sequence
  Description of Artificial Sequence: Synthetic oligonucleotide
ccgucgagcugccuucugc

SEQ ID NO: 690216 - RNA, 19 nt, Artificial Sequence
  Description of Artificial Sequence: Synthetic oligonucleotide
gggacacuccacaacucca

SEQ ID NO: 690217 - RNA, 19 nt, Artificial Sequence
  Description of Artificial Sequence: Synthetic oligonucleotide
ccucuccucucucucuggc

SEQ ID NO: 690218 - RNA, 19 nt, Artificial Sequence
  Description of Artificial Sequence: Synthetic oligonucleotide
ccuuguagccugccggauc

SEQ ID NO: 690219 - RNA, 19 nt, Artificial Sequence
  Description of Artificial Sequence: Synthetic oligonucleotide
gcucccguugccgucgagc

SEQ ID NO: 690220 - RNA, 19 nt, Artificial Sequence
  Description of Artificial Sequence: Synthetic oligonucleotide
ugaacgccccuggggcugu

SEQ ID NO: 690221 - RNA, 19 nt, Artificial Sequence
  Description of Artificial Sequence: Synthetic oligonucleotide
cucuucggcccgaacggua

SEQ ID NO: 690222 - RNA, 19 nt, Artificial Sequence
  Description of Artificial Sequence: Synthetic oligonucleotide
gagcccaaaggggcauuga

SEQ ID NO: 690223 - RNA, 19 nt, Artificial Sequence
  Description of Artificial Sequence: Synthetic oligonucleotide
guagcuagcuggagcuuua

SEQ ID NO: 690224 - RNA, 19 nt, Artificial Sequence
  Description of Artificial Sequence: Synthetic oligonucleotide
gcgaaucggcgcucugcag

SEQ ID NO: 690225 - RNA, 19 nt, Artificial Sequence
  Description of Artificial Sequence: Synthetic oligonucleotide
gcgaugccaaucaagcuua

SEQ ID NO: 690226 - RNA, 19 nt, Artificial Sequence
  Description of Artificial Sequence: Synthetic oligonucleotide
gcccugucagcaagucucg

SEQ ID NO: 690227 - RNA, 19 nt, Artificial Sequence
  Description of Artificial Sequence: Synthetic oligonucleotide
gggguuguaaccacuuggu

SEQ ID NO: 690228 - RNA, 19 nt, Artificial Sequence
  Description of Artificial Sequence: Synthetic oligonucleotide
gccuaggggcucccaacug

SEQ ID NO: 690229 - RNA, 19 nt, Artificial Sequence
  Description of Artificial Sequence: Synthetic oligonucleotide
gcccuuguuccugaguguc

SEQ ID NO: 690230 - RNA, 19 nt, Artificial Sequence
  Description of Artificial Sequence: Synthetic oligonucleotide
gcgacauggccgaagcaga

SEQ ID NO: 690231 - RNA, 19 nt, Artificial Sequence
  Description of Artificial Sequence: Synthetic oligonucleotide
ggaccggcccagagggugg

SEQ ID NO: 690232 - RNA, 19 nt, Artificial Sequence
  Description of Artificial Sequence: Synthetic oligonucleotide
gcacguagcaguauuguuu

SEQ ID NO: 690233 - RNA, 19 nt, Artificial Sequence
  Description of Artificial Sequence: Synthetic oligonucleotide
ggcacccgagccuuguugu

SEQ ID NO: 690234 - RNA, 19 nt, Artificial Sequence
  Description of Artificial Sequence: Synthetic oligonucleotide
ggaguacgcgacgccccgg

SEQ ID NO: 690235 - RNA, 19 nt, Artificial Sequence
  Description of Artificial Sequence: Synthetic oligonucleotide
guauaacggugaaaagguu

SEQ ID NO: 690236 - RNA, 19 nt, Artificial Sequence
  Description of Artificial Sequence: Synthetic oligonucleotide
ggugagggguauaucccaa

SEQ ID NO: 690237 - RNA, 19 nt, Artificial Sequence
  Description of Artificial Sequence: Synthetic oligonucleotide
cucuccucucucucuggcu

SEQ ID NO: 690238 - RNA, 19 nt, Artificial Sequence
  Description of Artificial Sequence: Synthetic oligonucleotide
acgcuguuuuagguuuaaa

SEQ ID NO: 690239 - RNA, 19 nt, Artificial Sequence
  Description of Artificial Sequence: Synthetic oligonucleotide
cacccgagccuuguuguaa

SEQ ID NO: 690240 - RNA, 19 nt, Artificial Sequence
  Description of Artificial Sequence: Synthetic oligonucleotide
ggcccugucuuugcccuug

SEQ ID NO: 690241 - RNA, 19 nt, Artificial Sequence
  Description of Artificial Sequence: Synthetic oligonucleotide
agacgcuguuuuagguuua

SEQ ID NO: 690242 - RNA, 19 nt, Artificial Sequence
  Description of Artificial Sequence: Synthetic oligonucleotide
uuguagccugccggaucuc

SEQ ID NO: 690243 - RNA, 19 nt, Artificial Sequence
  Description of Artificial Sequence: Synthetic oligonucleotide
gcgggugcuuggcucacca

SEQ ID NO: 690244 - RNA, 19 nt, Artificial Sequence
  Description of Artificial Sequence: Synthetic oligonucleotide
guaacgccucaaguuggcu

SEQ ID NO: 690245 - RNA, 19 nt, Artificial Sequence
  Description of Artificial Sequence: Synthetic oligonucleotide
ccuaagccucuuccagcug

SEQ ID NO: 690246 - RNA, 19 nt, Artificial Sequence
  Description of Artificial Sequence: Synthetic oligonucleotide
cgaacgaguggcgcuuccg

SEQ ID NO: 690247 - RNA, 19 nt, Artificial Sequence
  Description of Artificial Sequence: Synthetic oligonucleotide
ccgcuugggcaauaccuca

SEQ ID NO: 690248 - RNA, 19 nt, Artificial Sequence
  Description of Artificial Sequence: Synthetic oligonucleotide
auaagguggccgagcccua

SEQ ID NO: 690249 - RNA, 19 nt, Artificial Sequence
  Description of Artificial Sequence: Synthetic oligonucleotide
ccgcggugagguccaacag

SEQ ID NO: 690250 - RNA, 19 nt, Artificial Sequence
  Description of Artificial Sequence: Synthetic oligonucleotide
ggcacguagcaguauuguu

SEQ ID NO: 690251 - RNA, 19 nt, Artificial Sequence
  Description of Artificial Sequence: Synthetic oligonucleotide
gcagcgaaucggcgcucug

SEQ ID NO: 690252 - RNA, 19 nt, Artificial Sequence
  Description of Artificial Sequence: Synthetic oligonucleotide
cucccugccugacugcgau

SEQ ID NO: 690253 - RNA, 19 nt, Artificial Sequence
  Description of Artificial Sequence: Synthetic oligonucleotide
ccgaacgaguggcgcuucc

SEQ ID NO: 690254 - RNA, 19 nt, Artificial Sequence
  Description of Artificial Sequence: Synthetic oligonucleotide
ggucucggaggcaacgagu

SEQ ID NO: 690255 - RNA, 19 nt, Artificial Sequence
  Description of Artificial Sequence: Synthetic oligonucleotide
acgccucaaguuggcucca

SEQ ID NO: 690256 - RNA, 19 nt, Artificial Sequence
  Description of Artificial Sequence: Synthetic oligonucleotide
gcaacgaguggagcagaaa

SEQ ID NO: 690257 - RNA, 19 nt, Artificial Sequence
  Description of Artificial Sequence: Synthetic oligonucleotide
ccgagcccuagaguccugc

SEQ ID NO: 690258 - RNA, 19 nt, Artificial Sequence
  Description of Artificial Sequence: Synthetic oligonucleotide
gcagaacgugaugcccuac

SEQ ID NO: 690259 - RNA, 19 nt, Artificial Sequence
  Description of Artificial Sequence: Synthetic oligonucleotide
cggcaagcauauagaagca

SEQ ID NO: 690260 - RNA, 19 nt, Artificial Sequence
  Description of Artificial Sequence: Synthetic oligonucleotide
cgaacgguauaacggugaa

SEQ ID NO: 690261 - RNA, 19 nt, Artificial Sequence
  Description of Artificial Sequence: Synthetic oligonucleotide
cacacaccuuuguggcccu

SEQ ID NO: 690262 - RNA, 19 nt, Artificial Sequence
  Description of Artificial Sequence: Synthetic oligonucleotide
gccgucgagcugccuucug

SEQ ID NO: 690263 - RNA, 19 nt, Artificial Sequence
  Description of Artificial Sequence: Synthetic oligonucleotide
cccuacccugggcauccug

SEQ ID NO: 690264 - RNA, 19 nt, Artificial Sequence
  Description of Artificial Sequence: Synthetic oligonucleotide
gaacgccccuggggcugug

SEQ ID NO: 690265 - RNA, 19 nt, Artificial Sequence
  Description of Artificial Sequence: Synthetic oligonucleotide
agggaccggcccagagggu

SEQ ID NO: 690266 - RNA, 19 nt, Artificial Sequence
  Description of Artificial Sequence: Synthetic oligonucleotide
gccuccgcgggugcuuggc

SEQ ID NO: 690267 - RNA, 19 nt, Artificial Sequence
  Description of Artificial Sequence: Synthetic oligonucleotide
gugccucucuucggcccga

SEQ ID NO: 690268 - RNA, 19 nt, Artificial Sequence
  Description of Artificial Sequence: Synthetic oligonucleotide
gcagcaaaucgccguuguu

SEQ ID NO: 690269 - RNA, 19 nt, Artificial Sequence
  Description of Artificial Sequence: Synthetic oligonucleotide
cgcuugggcaauaccucaa

SEQ ID NO: 690270 - RNA, 19 nt, Artificial Sequence
  Description of Artificial Sequence: Synthetic oligonucleotide
gccugccggaucuccauuu

SEQ ID NO: 690271 - RNA, 19 nt, Artificial Sequence
  Description of Artificial Sequence: Synthetic oligonucleotide
ccugaacgccccuggggcu

SEQ ID NO: 690272 - RNA, 19 nt, Artificial Sequence
  Description of Artificial Sequence: Synthetic oligonucleotide
ggcagcgaaucggcgcucu

SEQ ID NO: 690273 - RNA, 19 nt, Artificial Sequence
  Description of Artificial Sequence: Synthetic oligonucleotide
cccgaacgaguggcgcuuc

SEQ ID NO: 690274 - RNA, 19 nt, Artificial Sequence
  Description of Artificial Sequence: Synthetic oligonucleotide
caguagcuagcuggagcuu

SEQ ID NO: 690275 - RNA, 19 nt, Artificial Sequence
  Description of Artificial Sequence: Synthetic oligonucleotide
cgcgacgccccgggcagag

SEQ ID NO: 690276 - RNA, 19 nt, Artificial Sequence
  Description of Artificial Sequence: Synthetic oligonucleotide
cuggcacccgagccuuguu

SEQ ID NO: 690277 - RNA, 19 nt, Artificial Sequence
  Description of Artificial Sequence: Synthetic oligonucleotide
cgccucaaguuggcuccag

SEQ ID NO: 690278 - RNA, 19 nt, Artificial Sequence
  Description of Artificial Sequence: Synthetic oligonucleotide
cagggucuacaggcccagu

SEQ ID NO: 690279 - RNA, 19 nt, Artificial Sequence
  Description of Artificial Sequence: Synthetic oligonucleotide
gcgacgccccgggcagagc

SEQ ID NO: 690280 - RNA, 19 nt, Artificial Sequence
  Description of Artificial Sequence: Synthetic oligonucleotide
cgaacuaccuaagccucuu

SEQ ID NO: 690281 - RNA, 19 nt, Artificial Sequence
  Description of Artificial Sequence: Synthetic oligonucleotide
cgaguggcgcuuccgcggu

SEQ ID NO: 690282 - RNA, 19 nt, Artificial Sequence
  Description of Artificial Sequence: Synthetic oligonucleotide
ccgcgggugcuuggcucac

SEQ ID NO: 690283 - RNA, 19 nt, Artificial Sequence
  Description of Artificial Sequence: Synthetic oligonucleotide
cgcgggugcuuggcucacc

SEQ ID NO: 690284 - RNA, 19 nt, Artificial Sequence
  Description of Artificial Sequence: Synthetic oligonucleotide
ccuccgcgggugcuuggcu

SEQ ID NO: 690285 - RNA, 19 nt, Artificial Sequence
  Description of Artificial Sequence: Synthetic oligonucleotide
ccccgaacgaguggcgcuu

SEQ ID NO: 690286 - RNA, 19 nt, Artificial Sequence
  Description of Artificial Sequence: Synthetic oligonucleotide
aacacaaaagcucugaaac

SEQ ID NO: 690287 - RNA, 19 nt, Artificial Sequence
  Description of Artificial Sequence: Synthetic oligonucleotide
aaaggaaacucagagaacc

SEQ ID NO: 690288 - RNA, 19 nt, Artificial Sequence
  Description of Artificial Sequence: Synthetic oligonucleotide
ucaguuuauaaccaaacgg

SEQ ID NO: 690289 - RNA, 19 nt, Artificial Sequence
  Description of Artificial Sequence: Synthetic oligonucleotide
aauuccaaguaguuggccc

SEQ ID NO: 690290 - RNA, 19 nt, Artificial Sequence
  Description of Artificial Sequence: Synthetic oligonucleotide
aaauugaggagccagccuc

SEQ ID NO: 690291 - RNA, 19 nt, Artificial Sequence
  Description of Artificial Sequence: Synthetic oligonucleotide
aacacagggguuuaaaaug

SEQ ID NO: 690292 - RNA, 19 nt, Artificial Sequence
  Description of Artificial Sequence: Synthetic oligonucleotide
aaguaguuggcccugcuuc

SEQ ID NO: 690293 - RNA, 19 nt, Artificial Sequence
  Description of Artificial Sequence: Synthetic oligonucleotide
ucugaugagaguagagucg

SEQ ID NO: 690294 - RNA, 19 nt, Artificial Sequence
  Description of Artificial Sequence: Synthetic oligonucleotide
auagccaaguacuggaggc

SEQ ID NO: 690295 - RNA, 19 nt, Artificial Sequence
  Description of Artificial Sequence: Synthetic oligonucleotide
aaauaugcaauugcccagc

SEQ ID NO: 690296 - RNA, 19 nt, Artificial Sequence
  Description of Artificial Sequence: Synthetic oligonucleotide
aggaauaugggccaagaag

SEQ ID NO: 690297 - RNA, 19 nt, Artificial Sequence
  Description of Artificial Sequence: Synthetic oligonucleotide
uuacuuuaagaccaaaguc

SEQ ID NO: 690298 - RNA, 19 nt, Artificial Sequence
  Description of Artificial Sequence: Synthetic oligonucleotide
gaacuugaaacagugaaag

SEQ ID NO: 690299 - RNA, 19 nt, Artificial Sequence
  Description of Artificial Sequence: Synthetic oligonucleotide
uaugcaauugcccagcaaa

SEQ ID NO: 690300 - RNA, 19 nt, Artificial Sequence
  Description of Artificial Sequence: Synthetic oligonucleotide
aaacaaugcacaugaacca

SEQ ID NO: 690301 - RNA, 19 nt, Artificial Sequence
  Description of Artificial Sequence: Synthetic oligonucleotide
aacagcauagcuuccucuc

SEQ ID NO: 690302 - RNA, 19 nt, Artificial Sequence
  Description of Artificial Sequence: Synthetic oligonucleotide
cuaaccuucuccaagugag

SEQ ID NO: 690303 - RNA, 19 nt, Artificial Sequence
  Description of Artificial Sequence: Synthetic oligonucleotide
aucuuuguaaacaaugcac

SEQ ID NO: 690304 - RNA, 19 nt, Artificial Sequence
  Description of Artificial Sequence: Synthetic oligonucleotide
aaaacaaccaaagauucaa

SEQ ID NO: 690305 - RNA, 19 nt, Artificial Sequence
  Description of Artificial Sequence: Synthetic oligonucleotide
aguagagucgcgcugugcg

SEQ ID NO: 690306 - RNA, 19 nt, Artificial Sequence
  Description of Artificial Sequence: Synthetic oligonucleotide
ggaacuaacacacuuauga

SEQ ID NO: 690307 - RNA, 19 nt, Artificial Sequence
  Description of Artificial Sequence: Synthetic oligonucleotide
ucugaaacccaccaaucgc

SEQ ID NO: 690308 - RNA, 19 nt, Artificial Sequence
  Description of Artificial Sequence: Synthetic oligonucleotide
aaagcucugaaacccacca

SEQ ID NO: 690309 - RNA, 19 nt, Artificial Sequence
  Description of Artificial Sequence: Synthetic oligonucleotide
cacacuuaugagaacaacc

SEQ ID NO: 690310 - RNA, 19 nt, Artificial Sequence
  Description of Artificial Sequence: Synthetic oligonucleotide
aaaauggagaaagggcaac

SEQ ID NO: 690311 - RNA, 19 nt, Artificial Sequence
  Description of Artificial Sequence: Synthetic oligonucleotide
augaaagauguccacaugu

SEQ ID NO: 690312 - RNA, 19 nt, Artificial Sequence
  Description of Artificial Sequence: Synthetic oligonucleotide
agaaauugaggagccagcc

SEQ ID NO: 690313 - RNA, 19 nt, Artificial Sequence
  Description of Artificial Sequence: Synthetic oligonucleotide
agauucaaggagaaaacac

SEQ ID NO: 690314 - RNA, 19 nt, Artificial Sequence
  Description of Artificial Sequence: Synthetic oligonucleotide
auggccucuaaccuucucc

SEQ ID NO: 690315 - RNA, 19 nt, Artificial Sequence
  Description of Artificial Sequence: Synthetic oligonucleotide
gaacuaacacacuuaugag

SEQ ID NO: 690316 - RNA, 19 nt, Artificial Sequence
  Description of Artificial Sequence: Synthetic oligonucleotide
cucaguuuauaaccaaacg

SEQ ID NO: 690317 - RNA, 19 nt, Artificial Sequence
  Description of Artificial Sequence: Synthetic oligonucleotide
ggauacuucacccaauucc

SEQ ID NO: 690318 - RNA, 19 nt, Artificial Sequence
  Description of Artificial Sequence: Synthetic oligonucleotide
acaaaacacacuguuccgc

SEQ ID NO: 690319 - RNA, 19 nt, Artificial Sequence
  Description of Artificial Sequence: Synthetic oligonucleotide
aguuuauaaccaaacggac

SEQ ID NO: 690320 - RNA, 19 nt, Artificial Sequence
  Description of Artificial Sequence: Synthetic oligonucleotide
ggugacaagagucccaugg

SEQ ID NO: 690321 - RNA, 19 nt, Artificial Sequence
  Description of Artificial Sequence: Synthetic oligonucleotide
uguuucaagaaccguggca

SEQ ID NO: 690322 - RNA, 19 nt, Artificial Sequence
  Description of Artificial Sequence: Synthetic oligonucleotide
gaaccaugggaauaaaaca

SEQ ID NO: 690323 - RNA, 19 nt, Artificial Sequence
  Description of Artificial Sequence: Synthetic oligonucleotide
caguuuauaaccaaacgga

SEQ ID NO: 690324 - RNA, 19 nt, Artificial Sequence
  Description of Artificial Sequence: Synthetic oligonucleotide
ugguggacccaucagaugu

SEQ ID NO: 690325 - RNA, 19 nt, Artificial Sequence
  Description of Artificial Sequence: Synthetic oligonucleotide
acaagagucccaugggcac

SEQ ID NO: 690326 - RNA, 19 nt, Artificial Sequence
  Description of Artificial Sequence: Synthetic oligonucleotide
aggugcaucauuuugccga

SEQ ID NO: 690327 - RNA, 19 nt, Artificial Sequence
  Description of Artificial Sequence: Synthetic oligonucleotide
caaacggacaggauguccc

SEQ ID NO: 690328 - RNA, 19 nt, Artificial Sequence
  Description of Artificial Sequence: Synthetic oligonucleotide
uauaaccaaacggacagga

SEQ ID NO: 690329 - RNA, 19 nt, Artificial Sequence
  Description of Artificial Sequence: Synthetic oligonucleotide
ugaggggagugucugauga

SEQ ID NO: 690330 - RNA, 19 nt, Artificial Sequence
  Description of Artificial Sequence: Synthetic oligonucleotide
acacgguccacugucagcc

SEQ ID NO: 690331 - RNA, 19 nt, Artificial Sequence
  Description of Artificial Sequence: Synthetic oligonucleotide
acuaucaaugguuggagaa

SEQ ID NO: 690332 - RNA, 19 nt, Artificial Sequence
  Description of Artificial Sequence: Synthetic oligonucleotide
ugacaagagucccaugggc

SEQ ID NO: 690333 - RNA, 19 nt, Artificial Sequence
  Description of Artificial Sequence: Synthetic oligonucleotide
aagauucaaggagaaaaca

SEQ ID NO: 690334 - RNA, 19 nt, Artificial Sequence
  Description of Artificial Sequence: Synthetic oligonucleotide
accaguaucaaauuccaua

SEQ ID NO: 690335 - RNA, 19 nt, Artificial Sequence
  Description of Artificial Sequence: Synthetic oligonucleotide
caaauugccucauggcccg

SEQ ID NO: 690336 - RNA, 19 nt, Artificial Sequence
  Description of Artificial Sequence: Synthetic oligonucleotide
gaaggagaauuauauacaa

SEQ ID NO: 690337 - RNA, 19 nt, Artificial Sequence
  Description of Artificial Sequence: Synthetic oligonucleotide
uuugacgaccgcuggaaug

SEQ ID NO: 690338 - RNA, 19 nt, Artificial Sequence
  Description of Artificial Sequence: Synthetic oligonucleotide
ucuaaccuucuccaaguga

SEQ ID NO: 690339 - RNA, 19 nt, Artificial Sequence
  Description of Artificial Sequence: Synthetic oligonucleotide
aucuggcucaguuuauaac

SEQ ID NO: 690340 - RNA, 19 nt, Artificial Sequence
  Description of Artificial Sequence: Synthetic oligonucleotide
uuuuagcuuuacacagggg

SEQ ID NO: 690341 - RNA, 19 nt, Artificial Sequence
  Description of Artificial Sequence: Synthetic oligonucleotide
uuugugacggggcaccaca

SEQ ID NO: 690342 - RNA, 19 nt, Artificial Sequence
  Description of Artificial Sequence: Synthetic oligonucleotide
gauuuggcaggccgcaggg

SEQ ID NO: 690343 - RNA, 19 nt, Artificial Sequence
  Description of Artificial Sequence: Synthetic oligonucleotide
uucacccaauuccaaguag

SEQ ID NO: 690344 - RNA, 19 nt, Artificial Sequence
  Description of Artificial Sequence: Synthetic oligonucleotide
acauguggcggcucauugc

SEQ ID NO: 690345 - RNA, 19 nt, Artificial Sequence
  Description of Artificial Sequence: Synthetic oligonucleotide
uucaagaaccguggcagcg

SEQ ID NO: 690346 - RNA, 19 nt, Artificial Sequence
  Description of Artificial Sequence: Synthetic oligonucleotide
uacuucacccaauuccaag

SEQ ID NO: 690347 - RNA, 19 nt, Artificial Sequence
  Description of Artificial Sequence: Synthetic oligonucleotide
auguuucaagaaccguggc

SEQ ID NO: 690348 - RNA, 19 nt, Artificial Sequence
  Description of Artificial Sequence: Synthetic oligonucleotide
cuuaugagaacaaccucuc

SEQ ID NO: 690349 - RNA, 19 nt, Artificial Sequence
  Description of Artificial Sequence: Synthetic oligonucleotide
agacucugaaccagcaugc

SEQ ID NO: 690350 - RNA, 19 nt, Artificial Sequence
  Description of Artificial Sequence: Synthetic oligonucleotide
ucacccaauuccaaguagu

SEQ ID NO: 690351 - RNA, 19 nt, Artificial Sequence
  Description of Artificial Sequence: Synthetic oligonucleotide
acaugaaccagauguauuu

SEQ ID NO: 690352 - RNA, 19 nt, Artificial Sequence
  Description of Artificial Sequence: Synthetic oligonucleotide
aaccaaagauucaaggaga

SEQ ID NO: 690353 - RNA, 19 nt, Artificial Sequence
  Description of Artificial Sequence: Synthetic oligonucleotide
aaccaaacggacaggaugu

SEQ ID NO: 690354 - RNA, 19 nt, Artificial Sequence
  Description of Artificial Sequence: Synthetic oligonucleotide
uuagcuuuacacaggggua

SEQ ID NO: 690355 - RNA, 19 nt, Artificial Sequence
  Description of Artificial Sequence: Synthetic oligonucleotide
uuaugagaacaaccucucc

SEQ ID NO: 690356 - RNA, 19 nt, Artificial Sequence
  Description of Artificial Sequence: Synthetic oligonucleotide
agauuuggcaggccgcagg

SEQ ID NO: 690357 - RNA, 19 nt, Artificial Sequence
  Description of Artificial Sequence: Synthetic oligonucleotide
ucuagguccccucuagggu

SEQ ID NO: 690358 - RNA, 19 nt, Artificial Sequence
  Description of Artificial Sequence: Synthetic oligonucleotide
ugggaacuaacacacuuau

SEQ ID NO: 690359 - RNA, 19 nt, Artificial Sequence
  Description of Artificial Sequence: Synthetic oligonucleotide
gaugagaguagagucgcgc

SEQ ID NO: 690360 - RNA, 19 nt, Artificial Sequence
  Description of Artificial Sequence: Synthetic oligonucleotide
acucacacucccaauaguc

SEQ ID NO: 690361 - RNA, 19 nt, Artificial Sequence
  Description of Artificial Sequence: Synthetic oligonucleotide
ggcaaauugccucauggcc

SEQ ID NO: 690362 - RNA, 19 nt, Artificial Sequence
  Description of Artificial Sequence: Synthetic oligonucleotide
agcauuugacgaccgcugg

SEQ ID NO: 690363 - RNA, 19 nt, Artificial Sequence
  Description of Artificial Sequence: Synthetic oligonucleotide
caaauggccucuaaccuuc

SEQ ID NO: 690364 - RNA, 19 nt, Artificial Sequence
  Description of Artificial Sequence: Synthetic oligonucleotide
cagaccuugggcagcaggg

SEQ ID NO: 690365 - RNA, 19 nt, Artificial Sequence
  Description of Artificial Sequence: Synthetic oligonucleotide
cugucagccggccaggugc

SEQ ID NO: 690366 - RNA, 19 nt, Artificial Sequence
  Description of Artificial Sequence: Synthetic oligonucleotide
uugacgaccgcuggaaugc

SEQ ID NO: 690367 - RNA, 19 nt, Artificial Sequence
  Description of Artificial Sequence: Synthetic oligonucleotide
uuugccgaucgcuggauga

SEQ ID NO: 690368 - RNA, 19 nt, Artificial Sequence
  Description of Artificial Sequence: Synthetic oligonucleotide
aaacaaccaaagauucaag

SEQ ID NO: 690369 - RNA, 19 nt, Artificial Sequence
  Description of Artificial Sequence: Synthetic oligonucleotide
uuggcugcuaccaccccag

SEQ ID NO: 690370 - RNA, 19 nt, Artificial Sequence
  Description of Artificial Sequence: Synthetic oligonucleotide
ucaagaaccguggcagcgg

SEQ ID NO: 690371 - RNA, 19 nt, Artificial Sequence
  Description of Artificial Sequence: Synthetic oligonucleotide
uugccagggucuuuccugg

SEQ ID NO: 690372 - RNA, 19 nt, Artificial Sequence
  Description of Artificial Sequence: Synthetic oligonucleotide
ucaaauggccucuaaccuu

SEQ ID NO: 690373 - RNA, 19 nt, Artificial Sequence
  Description of Artificial Sequence: Synthetic oligonucleotide
ucuguucauccccugccug

SEQ ID NO: 690374 - RNA, 19 nt, Artificial Sequence
  Description of Artificial Sequence: Synthetic oligonucleotide
ucugaaccagcaugcuuag

SEQ ID NO: 690375 - RNA, 19 nt, Artificial Sequence
  Description of Artificial Sequence: Synthetic oligonucleotide
aaacagaacuugaaacagu

SEQ ID NO: 690376 - RNA, 19 nt, Artificial Sequence
  Description of Artificial Sequence: Synthetic oligonucleotide
ugaugagaguagagucgcg

SEQ ID NO: 690377 - RNA, 19 nt, Artificial Sequence
  Description of Artificial Sequence: Synthetic oligonucleotide
agaacaaccucuccaguuu

SEQ ID NO: 690378 - RNA, 19 nt, Artificial Sequence
  Description of Artificial Sequence: Synthetic oligonucleotide
ucccaauagucccggcagg

SEQ ID NO: 690379 - RNA, 19 nt, Artificial Sequence
  Description of Artificial Sequence: Synthetic oligonucleotide
acacacuuaugagaacaac

SEQ ID NO: 690380 - RNA, 19 nt, Artificial Sequence
  Description of Artificial Sequence: Synthetic oligonucleotide
cagaucaguauuuccacca

SEQ ID NO: 690381 - RNA, 19 nt, Artificial Sequence
  Description of Artificial Sequence: Synthetic oligonucleotide
cuaggguuccucucugagc

SEQ ID NO: 690382 - RNA, 19 nt, Artificial Sequence
  Description of Artificial Sequence: Synthetic oligonucleotide
cucccaauagucccggcag

SEQ ID NO: 690383 - RNA, 19 nt, Artificial Sequence
  Description of Artificial Sequence: Synthetic oligonucleotide
acggagggcuuugaguucc

SEQ ID NO: 690384 - RNA, 19 nt, Artificial Sequence
  Description of Artificial Sequence: Synthetic oligonucleotide
ugggccaagaagcagucuu

SEQ ID NO: 690385 - RNA, 19 nt, Artificial Sequence
  Description of Artificial Sequence: Synthetic oligonucleotide
acacuaucaaugguuggag

SEQ ID NO: 690386 - RNA, 19 nt, Artificial Sequence
  Description of Artificial Sequence: Synthetic oligonucleotide
uggccucuaaccuucucca

SEQ ID NO: 690387 - RNA, 19 nt, Artificial Sequence
  Description of Artificial Sequence: Synthetic oligonucleotide
cucucaaauggccucuaac

SEQ ID NO: 690388 - RNA, 19 nt, Artificial Sequence
  Description of Artificial Sequence: Synthetic oligonucleotide
ugcacggagggcuuugagu

SEQ ID NO: 690389 - RNA, 19 nt, Artificial Sequence
  Description of Artificial Sequence: Synthetic oligonucleotide
acuuuaagaccaaagucaa

SEQ ID NO: 690390 - RNA, 19 nt, Artificial Sequence
  Description of Artificial Sequence: Synthetic oligonucleotide
guaucaaauuccauagcca

SEQ ID NO: 690391 - RNA, 19 nt, Artificial Sequence
  Description of Artificial Sequence: Synthetic oligonucleotide
cucugaaccagcaugcuua

SEQ ID NO: 690392 - RNA, 19 nt, Artificial Sequence
  Description of Artificial Sequence: Synthetic oligonucleotide
uucaacagcauagcuuccu

SEQ ID NO: 690393 - RNA, 19 nt, Artificial Sequence
  Description of Artificial Sequence: Synthetic oligonucleotide
acggacaggaugucccagg

SEQ ID NO: 690394 - RNA, 19 nt, Artificial Sequence
  Description of Artificial Sequence: Synthetic oligonucleotide
uguucccaaggaaggagaa

SEQ ID NO: 690395 - RNA, 19 nt, Artificial Sequence
  Description of Artificial Sequence: Synthetic oligonucleotide
cagccgcaaagauggaugg

SEQ ID NO: 690396 - RNA, 19 nt, Artificial Sequence
  Description of Artificial Sequence: Synthetic oligonucleotide
uuuugccgaucgcuggaug

SEQ ID NO: 690397 - RNA, 19 nt, Artificial Sequence
  Description of Artificial Sequence: Synthetic oligonucleotide
ggcaccagaaauugaggag

SEQ ID NO: 690398 - RNA, 19 nt, Artificial Sequence
  Description of Artificial Sequence: Synthetic oligonucleotide
ugagcaugggaggaauaug

SEQ ID NO: 690399 - RNA, 19 nt, Artificial Sequence
  Description of Artificial Sequence: Synthetic oligonucleotide
aggcgcagcauuugacgac

SEQ ID NO: 690400 - RNA, 19 nt, Artificial Sequence
  Description of Artificial Sequence: Synthetic oligonucleotide
ucugccgguacacggucca

SEQ ID NO: 690401 - RNA, 19 nt, Artificial Sequence
  Description of Artificial Sequence: Synthetic oligonucleotide
caaccaguaucaaauucca

SEQ ID NO: 690402 - RNA, 19 nt, Artificial Sequence
  Description of Artificial Sequence: Synthetic oligonucleotide
guagagucgcgcugugcgg

SEQ ID NO: 690403 - RNA, 19 nt, Artificial Sequence
  Description of Artificial Sequence: Synthetic oligonucleotide
caagaaccguggcagcggg

SEQ ID NO: 690404 - RNA, 19 nt, Artificial Sequence
  Description of Artificial Sequence: Synthetic oligonucleotide
uaugggccaagaagcaguc

SEQ ID NO: 690405 - RNA, 19 nt, Artificial Sequence
  Description of Artificial Sequence: Synthetic oligonucleotide
cuccaagugagaggcaugc

SEQ ID NO: 690406 - RNA, 19 nt, Artificial Sequence
  Description of Artificial Sequence: Synthetic oligonucleotide
acucccaauagucccggca

SEQ ID NO: 690407 - RNA, 19 nt, Artificial Sequence
  Description of Artificial Sequence: Synthetic oligonucleotide
cagcauuugacgaccgcug

SEQ ID NO: 690408 - RNA, 19 nt, Artificial Sequence
  Description of Artificial Sequence: Synthetic oligonucleotide
cacuuaugagaacaaccuc

SEQ ID NO: 690409 - RNA, 19 nt, Artificial Sequence
  Description of Artificial Sequence: Synthetic oligonucleotide
uguuccgcaggccucucaa

SEQ ID NO: 690410 - RNA, 19 nt, Artificial Sequence
  Description of Artificial Sequence: Synthetic oligonucleotide
accgcuggaaugccagggg

SEQ ID NO: 690411 - RNA, 19 nt, Artificial Sequence
  Description of Artificial Sequence: Synthetic oligonucleotide
ucagagaaccaugggaaua

SEQ ID NO: 690412 - RNA, 19 nt, Artificial Sequence
  Description of Artificial Sequence: Synthetic oligonucleotide
uccuggaucgcugcugaag

SEQ ID NO: 690413 - RNA, 19 nt, Artificial Sequence
  Description of Artificial Sequence: Synthetic oligonucleotide
accacacuaucaaugguug

SEQ ID NO: 690414 - RNA, 19 nt, Artificial Sequence
  Description of Artificial Sequence: Synthetic oligonucleotide
uacacgguccacugucagc

SEQ ID NO: 690415 - RNA, 19 nt, Artificial Sequence
  Description of Artificial Sequence: Synthetic oligonucleotide
cuaacacacuuaugagaac

SEQ ID NO: 690416 - RNA, 19 nt, Artificial Sequence
  Description of Artificial Sequence: Synthetic oligonucleotide
agccauucagaaaggcugg

SEQ ID NO: 690417 - RNA, 19 nt, Artificial Sequence
  Description of Artificial Sequence: Synthetic oligonucleotide
uccgcaggccucucaaaug

SEQ ID NO: 690418 - RNA, 19 nt, Artificial Sequence
  Description of Artificial Sequence: Synthetic oligonucleotide
uugugacggggcaccacag

SEQ ID NO: 690419 - RNA, 19 nt, Artificial Sequence
  Description of Artificial Sequence: Synthetic oligonucleotide
uaagcucacugauccauuu

SEQ ID NO: 690420 - RNA, 19 nt, Artificial Sequence
  Description of Artificial Sequence: Synthetic oligonucleotide
uuccgcaggccucucaaau

SEQ ID NO: 690421 - RNA, 19 nt, Artificial Sequence
  Description of Artificial Sequence: Synthetic oligonucleotide
ugccggugggaacuaacac

SEQ ID NO: 690422 - RNA, 19 nt, Artificial Sequence
  Description of Artificial Sequence: Synthetic oligonucleotide
gaccgcuggaaugccaggg

SEQ ID NO: 690423 - RNA, 19 nt, Artificial Sequence
  Description of Artificial Sequence: Synthetic oligonucleotide
caauugcccagcaaaugca

SEQ ID NO: 690424 - RNA, 19 nt, Artificial Sequence
  Description of Artificial Sequence: Synthetic oligonucleotide
gaggcgcagcauuugacga

SEQ ID NO: 690425 - RNA, 19 nt, Artificial Sequence
  Description of Artificial Sequence: Synthetic oligonucleotide
aagagucccaugggcacug

SEQ ID NO: 690426 - RNA, 19 nt, Artificial Sequence
  Description of Artificial Sequence: Synthetic oligonucleotide
cacacuaucaaugguugga

SEQ ID NO: 690427 - RNA, 19 nt, Artificial Sequence
  Description of Artificial Sequence: Synthetic oligonucleotide
agaucaguauuuccaccau

SEQ ID NO: 690428 - RNA, 19 nt, Artificial Sequence
  Description of Artificial Sequence: Synthetic oligonucleotide
cauguggcggcucauugca

SEQ ID NO: 690429 - RNA, 19 nt, Artificial Sequence
  Description of Artificial Sequence: Synthetic oligonucleotide
cacauguggcggcucauug

SEQ ID NO: 690430 - RNA, 19 nt, Artificial Sequence
  Description of Artificial Sequence: Synthetic oligonucleotide
ccuggaucgcugcugaagg

SEQ ID NO: 690431 - RNA, 19 nt, Artificial Sequence
  Description of Artificial Sequence: Synthetic oligonucleotide
gaaagugaggcgcagcauu

SEQ ID NO: 690432 - RNA, 19 nt, Artificial Sequence
  Description of Artificial Sequence: Synthetic oligonucleotide
cuggguagccuugccaggg

SEQ ID NO: 690433 - RNA, 19 nt, Artificial Sequence
  Description of Artificial Sequence: Synthetic oligonucleotide
gaggcuaagcaggcagagg

SEQ ID NO: 690434 - RNA, 19 nt, Artificial Sequence
  Description of Artificial Sequence: Synthetic oligonucleotide
ugagugcuuccaucucugc

SEQ ID NO: 690435 - RNA, 19 nt, Artificial Sequence
  Description of Artificial Sequence: Synthetic oligonucleotide
acccaauuccaaguaguug

SEQ ID NO: 690436 - RNA, 19 nt, Artificial Sequence
  Description of Artificial Sequence: Synthetic oligonucleotide
caggugcaucauuuugccg

SEQ ID NO: 690437 - RNA, 19 nt, Artificial Sequence
  Description of Artificial Sequence: Synthetic oligonucleotide
gaggggagugucugaugag

SEQ ID NO: 690438 - RNA, 19 nt, Artificial Sequence
  Description of Artificial Sequence: Synthetic oligonucleotide
cagcaaaugcaaauguuua

SEQ ID NO: 690439 - RNA, 19 nt, Artificial Sequence
  Description of Artificial Sequence: Synthetic oligonucleotide
ugugacggggcaccacagu

SEQ ID NO: 690440 - RNA, 19 nt, Artificial Sequence
  Description of Artificial Sequence: Synthetic oligonucleotide
aaagugaggcgcagcauuu

SEQ ID NO: 690441 - RNA, 19 nt, Artificial Sequence
  Description of Artificial Sequence: Synthetic oligonucleotide
agucgcgcugugcggcugc

SEQ ID NO: 690442 - RNA, 19 nt, Artificial Sequence
  Description of Artificial Sequence: Synthetic oligonucleotide
agcuuuacacagggguagg

SEQ ID NO: 690443 - RNA, 19 nt, Artificial Sequence
  Description of Artificial Sequence: Synthetic oligonucleotide
ccugaauccccacugcagc

SEQ ID NO: 690444 - RNA, 19 nt, Artificial Sequence
  Description of Artificial Sequence: Synthetic oligonucleotide
gaucgcuggaugagagucc

SEQ ID NO: 690445 - RNA, 19 nt, Artificial Sequence
  Description of Artificial Sequence: Synthetic oligonucleotide
cucaaauggccucuaaccu

SEQ ID NO: 690446 - RNA, 19 nt, Artificial Sequence
  Description of Artificial Sequence: Synthetic oligonucleotide
ugacacugcucuacagcuc

SEQ ID NO: 690447 - RNA, 19 nt, Artificial Sequence
  Description of Artificial Sequence: Synthetic oligonucleotide
acagauuuggcaggccgca

SEQ ID NO: 690448 - RNA, 19 nt, Artificial Sequence
  Description of Artificial Sequence: Synthetic oligonucleotide
gccucuaaccuucuccaag

SEQ ID NO: 690449 - RNA, 19 nt, Artificial Sequence
  Description of Artificial Sequence: Synthetic oligonucleotide
ccagaaauugaggagccag

SEQ ID NO: 690450 - RNA, 19 nt, Artificial Sequence
  Description of Artificial Sequence: Synthetic oligonucleotide
uugccgaucgcuggaugag

SEQ ID NO: 690451 - RNA, 19 nt, Artificial Sequence
  Description of Artificial Sequence: Synthetic oligonucleotide
agcauagcuuccucuccca

SEQ ID NO: 690452 - RNA, 19 nt, Artificial Sequence
  Description of Artificial Sequence: Synthetic oligonucleotide
ccaagugagaggcaugcug

SEQ ID NO: 690453 - RNA, 19 nt, Artificial Sequence
  Description of Artificial Sequence: Synthetic oligonucleotide
ggcgucaggguccccaagg

SEQ ID NO: 690454 - RNA, 19 nt, Artificial Sequence
  Description of Artificial Sequence: Synthetic oligonucleotide
aacaaccucuccaguuucu

SEQ ID NO: 690455 - RNA, 19 nt, Artificial Sequence
  Description of Artificial Sequence: Synthetic oligonucleotide
ccggugggaacuaacacac

SEQ ID NO: 690456 - RNA, 19 nt, Artificial Sequence
  Description of Artificial Sequence: Synthetic oligonucleotide
ggcaaccaguaucaaauuc

SEQ ID NO: 690457 - RNA, 19 nt, Artificial Sequence
  Description of Artificial Sequence: Synthetic oligonucleotide
auaugcaauugcccagcaa

SEQ ID NO: 690458 - RNA, 19 nt, Artificial Sequence
  Description of Artificial Sequence: Synthetic oligonucleotide
ucaugagcaugggaggaau

SEQ ID NO: 690459 - RNA, 19 nt, Artificial Sequence
  Description of Artificial Sequence: Synthetic oligonucleotide
gggagaggagcuguggccg

SEQ ID NO: 690460 - RNA, 19 nt, Artificial Sequence
  Description of Artificial Sequence: Synthetic oligonucleotide
ggcccguuccuccaaauac

SEQ ID NO: 690461 - RNA, 19 nt, Artificial Sequence
  Description of Artificial Sequence: Synthetic oligonucleotide
ccaggugcaucauuuugcc

SEQ ID NO: 690462 - RNA, 19 nt, Artificial Sequence
  Description of Artificial Sequence: Synthetic oligonucleotide
aacaucugguggacccauc

SEQ ID NO: 690463 - RNA, 19 nt, Artificial Sequence
  Description of Artificial Sequence: Synthetic oligonucleotide
guaggcugccaguugggga

SEQ ID NO: 690464 - RNA, 19 nt, Artificial Sequence
  Description of Artificial Sequence: Synthetic oligonucleotide
ugucagccggccaggugca

SEQ ID NO: 690465 - RNA, 19 nt, Artificial Sequence
  Description of Artificial Sequence: Synthetic oligonucleotide
aggggagugucugaugaga

SEQ ID NO: 690466 - RNA, 19 nt, Artificial Sequence
  Description of Artificial Sequence: Synthetic oligonucleotide
accaaagauucaaggagaa

SEQ ID NO: 690467 - RNA, 19 nt, Artificial Sequence
  Description of Artificial Sequence: Synthetic oligonucleotide
ucggguucugaggcuaagc

SEQ ID NO: 690468 - RNA, 19 nt, Artificial Sequence
  Description of Artificial Sequence: Synthetic oligonucleotide
agaguagagucgcgcugug

SEQ ID NO: 690469 - RNA, 19 nt, Artificial Sequence
  Description of Artificial Sequence: Synthetic oligonucleotide
acacucccaauagucccgg

SEQ ID NO: 690470 - RNA, 19 nt, Artificial Sequence
  Description of Artificial Sequence: Synthetic oligonucleotide
aucgcuggaugagaguccu

SEQ ID NO: 690471 - RNA, 19 nt, Artificial Sequence
  Description of Artificial Sequence: Synthetic oligonucleotide
gcucaguuuauaaccaaac

SEQ ID NO: 690472 - RNA, 19 nt, Artificial Sequence
  Description of Artificial Sequence: Synthetic oligonucleotide
cauuuugccgaucgcugga

SEQ ID NO: 690473 - RNA, 19 nt, Artificial Sequence
  Description of Artificial Sequence: Synthetic oligonucleotide
cuaucaaugguuggagaaa

SEQ ID NO: 690474 - RNA, 19 nt, Artificial Sequence
  Description of Artificial Sequence: Synthetic oligonucleotide
agggucuuuccuggaucgc

SEQ ID NO: 690475 - RNA, 19 nt, Artificial Sequence
  Description of Artificial Sequence: Synthetic oligonucleotide
uggacccaucagauguuuc

SEQ ID NO: 690476 - RNA, 19 nt, Artificial Sequence
  Description of Artificial Sequence: Synthetic oligonucleotide
uguucauccccugccuguc

SEQ ID NO: 690477 - RNA, 19 nt, Artificial Sequence
  Description of Artificial Sequence: Synthetic oligonucleotide
ccgcaggccucucaaaugg

SEQ ID NO: 690478 - RNA, 19 nt, Artificial Sequence
  Description of Artificial Sequence: Synthetic oligonucleotide
cugguggacccaucagaug

SEQ ID NO: 690479 - RNA, 19 nt, Artificial Sequence
  Description of Artificial Sequence: Synthetic oligonucleotide
ggcggcucauugcaucugg

SEQ ID NO: 690480 - RNA, 19 nt, Artificial Sequence
  Description of Artificial Sequence: Synthetic oligonucleotide
cauuugacgaccgcuggaa

SEQ ID NO: 690481 - RNA, 19 nt, Artificial Sequence
  Description of Artificial Sequence: Synthetic oligonucleotide
accaaacggacaggauguc

SEQ ID NO: 690482 - RNA, 19 nt, Artificial Sequence
  Description of Artificial Sequence: Synthetic oligonucleotide
cagagaaccaugggaauaa

SEQ ID NO: 690483 - RNA, 19 nt, Artificial Sequence
  Description of Artificial Sequence: Synthetic oligonucleotide
aaccaguaucaaauuccau

SEQ ID NO: 690484 - RNA, 19 nt, Artificial Sequence
  Description of Artificial Sequence: Synthetic oligonucleotide
caucauuuugccgaucgcu

SEQ ID NO: 690485 - RNA, 19 nt, Artificial Sequence
  Description of Artificial Sequence: Synthetic oligonucleotide
gaguagagucgcgcugugc

SEQ ID NO: 690486 - RNA, 19 nt, Artificial Sequence
  Description of Artificial Sequence: Synthetic oligonucleotide
uggguagccuugccagggu

SEQ ID NO: 690487 - RNA, 19 nt, Artificial Sequence
  Description of Artificial Sequence: Synthetic oligonucleotide
cugaggggagugucugaug

SEQ ID NO: 690488 - RNA, 19 nt, Artificial Sequence
  Description of Artificial Sequence: Synthetic oligonucleotide
gccggugggaacuaacaca

SEQ ID NO: 690489 - RNA, 19 nt, Artificial Sequence
  Description of Artificial Sequence: Synthetic oligonucleotide
aucaaugguuggagaaagu

SEQ ID NO: 690490 - RNA, 19 nt, Artificial Sequence
  Description of Artificial Sequence: Synthetic oligonucleotide
agaaagugaggcgcagcau

SEQ ID NO: 690491 - RNA, 19 nt, Artificial Sequence
  Description of Artificial Sequence: Synthetic oligonucleotide
ccacacuaucaaugguugg

SEQ ID NO: 690492 - RNA, 19 nt, Artificial Sequence
  Description of Artificial Sequence: Synthetic oligonucleotide
uggugacaagagucccaug

SEQ ID NO: 690493 - RNA, 19 nt, Artificial Sequence
  Description of Artificial Sequence: Synthetic oligonucleotide
ucccggcaggacagagggg

SEQ ID NO: 690494 - RNA, 19 nt, Artificial Sequence
  Description of Artificial Sequence: Synthetic oligonucleotide
gacccaucagauguuucaa

SEQ ID NO: 690495 - RNA, 19 nt, Artificial Sequence
  Description of Artificial Sequence: Synthetic oligonucleotide
cuucacccaauuccaagua

SEQ ID NO: 690496 - RNA, 19 nt, Artificial Sequence
  Description of Artificial Sequence: Synthetic oligonucleotide
uggcccguuccuccaaaua

SEQ ID NO: 690497 - RNA, 19 nt, Artificial Sequence
  Description of Artificial Sequence: Synthetic oligonucleotide
cugccggugggaacuaaca

SEQ ID NO: 690498 - RNA, 19 nt, Artificial Sequence
  Description of Artificial Sequence: Synthetic oligonucleotide
ugcucccgugcuuggugug

SEQ ID NO: 690499 - RNA, 19 nt, Artificial Sequence
  Description of Artificial Sequence: Synthetic oligonucleotide
cuggaggcggaagaacauc

SEQ ID NO: 690500 - RNA, 19 nt, Artificial Sequence
  Description of Artificial Sequence: Synthetic oligonucleotide
uccaagugagaggcaugcu

SEQ ID NO: 690501 - RNA, 19 nt, Artificial Sequence
  Description of Artificial Sequence: Synthetic oligonucleotide
cacgguccacugucagccg

SEQ ID NO: 690502 - RNA, 19 nt, Artificial Sequence
  Description of Artificial Sequence: Synthetic oligonucleotide
ugccgguacacgguccacu

SEQ ID NO: 690503 - RNA, 19 nt, Artificial Sequence
  Description of Artificial Sequence: Synthetic oligonucleotide
gugcacggagggcuuugag

SEQ ID NO: 690504 - RNA, 19 nt, Artificial Sequence
  Description of Artificial Sequence: Synthetic oligonucleotide
auuuugccgaucgcuggau

SEQ ID NO: 690505 - RNA, 19 nt, Artificial Sequence
  Description of Artificial Sequence: Synthetic oligonucleotide
ggcgcagcauuugacgacc

SEQ ID NO: 690506 - RNA, 19 nt, Artificial Sequence
  Description of Artificial Sequence: Synthetic oligonucleotide
aaauggccucuaaccuucu

SEQ ID NO: 690507 - RNA, 19 nt, Artificial Sequence
  Description of Artificial Sequence: Synthetic oligonucleotide
ugccgaucgcuggaugaga

SEQ ID NO: 690508 - RNA, 19 nt, Artificial Sequence
  Description of Artificial Sequence: Synthetic oligonucleotide
cugguaguagccacagagu

SEQ ID NO: 690509 - RNA, 19 nt, Artificial Sequence
  Description of Artificial Sequence: Synthetic oligonucleotide
ugugcacggagggcuuuga

SEQ ID NO: 690510 - RNA, 19 nt, Artificial Sequence
  Description of Artificial Sequence: Synthetic oligonucleotide
ggagaaagugaggcgcagc

SEQ ID NO: 690511 - RNA, 19 nt, Artificial Sequence
  Description of Artificial Sequence: Synthetic oligonucleotide
cauagcuuccucucccagu

SEQ ID NO: 690512 - RNA, 19 nt, Artificial Sequence
  Description of Artificial Sequence: Synthetic oligonucleotide
gggauacuucacccaauuc

SEQ ID NO: 690513 - RNA, 19 nt, Artificial Sequence
  Description of Artificial Sequence: Synthetic oligonucleotide
cacggagggcuuugaguuc

SEQ ID NO: 690514 - RNA, 19 nt, Artificial Sequence
  Description of Artificial Sequence: Synthetic oligonucleotide
caugcuggugguucccaaa

SEQ ID NO: 690515 - RNA, 19 nt, Artificial Sequence
  Description of Artificial Sequence: Synthetic oligonucleotide
gugggaacuaacacacuua

SEQ ID NO: 690516 - RNA, 19 nt, Artificial Sequence
  Description of Artificial Sequence: Synthetic oligonucleotide
ccaaacggacaggaugucc

SEQ ID NO: 690517 - RNA, 19 nt, Artificial Sequence
  Description of Artificial Sequence: Synthetic oligonucleotide
ugacgaccgcuggaaugcc

SEQ ID NO: 690518 - RNA, 19 nt, Artificial Sequence
  Description of Artificial Sequence: Synthetic oligonucleotide
gguagcggcggcauccaug

SEQ ID NO: 690519 - RNA, 19 nt, Artificial Sequence
  Description of Artificial Sequence: Synthetic oligonucleotide
auacuucacccaauuccaa

SEQ ID NO: 690520 - RNA, 19 nt, Artificial Sequence
  Description of Artificial Sequence: Synthetic oligonucleotide
ccugugguugccugccagc

SEQ ID NO: 690521 - RNA, 19 nt, Artificial Sequence
  Description of Artificial Sequence: Synthetic oligonucleotide
cuggaucgcugcugaagga

SEQ ID NO: 690522 - RNA, 19 nt, Artificial Sequence
  Description of Artificial Sequence: Synthetic oligonucleotide
gccgguacacgguccacug

SEQ ID NO: 690523 - RNA, 19 nt, Artificial Sequence
  Description of Artificial Sequence: Synthetic oligonucleotide
ggaggaauaugggccaaga

SEQ ID NO: 690524 - RNA, 19 nt, Artificial Sequence
  Description of Artificial Sequence: Synthetic oligonucleotide
gggaacuaacacacuuaug

SEQ ID NO: 690525 - RNA, 19 nt, Artificial Sequence
  Description of Artificial Sequence: Synthetic oligonucleotide
ccuugccagcccugaaucc

SEQ ID NO: 690526 - RNA, 19 nt, Artificial Sequence
  Description of Artificial Sequence: Synthetic oligonucleotide
agguccccucuaggguucc

SEQ ID NO: 690527 - RNA, 19 nt, Artificial Sequence
  Description of Artificial Sequence: Synthetic oligonucleotide
ugggaggaauaugggccaa

SEQ ID NO: 690528 - RNA, 19 nt, Artificial Sequence
  Description of Artificial Sequence: Synthetic oligonucleotide
gccgaucgcuggaugagag

SEQ ID NO: 690529 - RNA, 19 nt, Artificial Sequence
  Description of Artificial Sequence: Synthetic oligonucleotide
cacucccaauagucccggc

SEQ ID NO: 690530 - RNA, 19 nt, Artificial Sequence
  Description of Artificial Sequence: Synthetic oligonucleotide
caugagcaugggaggaaua

SEQ ID NO: 690531 - RNA, 19 nt, Artificial Sequence
  Description of Artificial Sequence: Synthetic oligonucleotide
cuaccaccccaggaggcuc

SEQ ID NO: 690532 - RNA, 19 nt, Artificial Sequence
  Description of Artificial Sequence: Synthetic oligonucleotide
uggcggcucauugcaucug

SEQ ID NO: 690533 - RNA, 19 nt, Artificial Sequence
  Description of Artificial Sequence: Synthetic oligonucleotide
gcacggagggcuuugaguu

SEQ ID NO: 690534 - RNA, 19 nt, Artificial Sequence
  Description of Artificial Sequence: Synthetic oligonucleotide
ggaggcggaagaacaucug

SEQ ID NO: 690535 - RNA, 19 nt, Artificial Sequence
  Description of Artificial Sequence: Synthetic oligonucleotide
gggaggaauaugggccaag

SEQ ID NO: 690536 - RNA, 19 nt, Artificial Sequence
  Description of Artificial Sequence: Synthetic oligonucleotide
gacgaccgcuggaaugcca

SEQ ID NO: 690537 - RNA, 19 nt, Artificial Sequence
  Description of Artificial Sequence: Synthetic oligonucleotide
guggcggcucauugcaucu

SEQ ID NO: 690538 - RNA, 19 nt, Artificial Sequence
  Description of Artificial Sequence: Synthetic oligonucleotide
gaacaucugguggacccau

SEQ ID NO: 690539 - RNA, 19 nt, Artificial Sequence
  Description of Artificial Sequence: Synthetic oligonucleotide
ucccgugcuuggugugggu

SEQ ID NO: 690540 - RNA, 19 nt, Artificial Sequence
  Description of Artificial Sequence: Synthetic oligonucleotide
gcagcauuugacgaccgcu

SEQ ID NO: 690541 - RNA, 19 nt, Artificial Sequence
  Description of Artificial Sequence: Synthetic oligonucleotide
ccugccggugggaacuaac

SEQ ID NO: 690542 - RNA, 19 nt, Artificial Sequence
  Description of Artificial Sequence: Synthetic oligonucleotide
ccaaauacuucugcuccca

SEQ ID NO: 690543 - RNA, 19 nt, Artificial Sequence
  Description of Artificial Sequence: Synthetic oligonucleotide
cgguacacgguccacuguc

SEQ ID NO: 690544 - RNA, 19 nt, Artificial Sequence
  Description of Artificial Sequence: Synthetic oligonucleotide
gcucccgugcuuggugugg

SEQ ID NO: 690545 - RNA, 19 nt, Artificial Sequence
  Description of Artificial Sequence: Synthetic oligonucleotide
gcccugaauccccacugca

SEQ ID NO: 690546 - RNA, 19 nt, Artificial Sequence
  Description of Artificial Sequence: Synthetic oligonucleotide
ccucuaggguuccucucug

SEQ ID NO: 690547 - RNA, 19 nt, Artificial Sequence
  Description of Artificial Sequence: Synthetic oligonucleotide
agccagccucgugggugcc

SEQ ID NO: 690548 - RNA, 19 nt, Artificial Sequence
  Description of Artificial Sequence: Synthetic oligonucleotide
cacccaauuccaaguaguu

SEQ ID NO: 690549 - RNA, 19 nt, Artificial Sequence
  Description of Artificial Sequence: Synthetic oligonucleotide
ucgcgcugugcggcugcgg

SEQ ID NO: 690550 - RNA, 19 nt, Artificial Sequence
  Description of Artificial Sequence: Synthetic oligonucleotide
ccucuaaccuucuccaagu

SEQ ID NO: 690551 - RNA, 19 nt, Artificial Sequence
  Description of Artificial Sequence: Synthetic oligonucleotide
cugcugugcacggagggcu

SEQ ID NO: 690552 - RNA, 19 nt, Artificial Sequence
  Description of Artificial Sequence: Synthetic oligonucleotide
gcccagcaaaugcaaaugu

SEQ ID NO: 690553 - RNA, 19 nt, Artificial Sequence
  Description of Artificial Sequence: Synthetic oligonucleotide
gggccaagaagcagucuuc

SEQ ID NO: 690554 - RNA, 19 nt, Artificial Sequence
  Description of Artificial Sequence: Synthetic oligonucleotide
gagucgcgcugugcggcug

SEQ ID NO: 690555 - RNA, 19 nt, Artificial Sequence
  Description of Artificial Sequence: Synthetic oligonucleotide
ggugcaucauuuugccgau

SEQ ID NO: 690556 - RNA, 19 nt, Artificial Sequence
  Description of Artificial Sequence: Synthetic oligonucleotide
ucauugcaucuggcucagu

SEQ ID NO: 690557 - RNA, 19 nt, Artificial Sequence
  Description of Artificial Sequence: Synthetic oligonucleotide
gucgcgcugugcggcugcg

SEQ ID NO: 690558 - RNA, 19 nt, Artificial Sequence
  Description of Artificial Sequence: Synthetic oligonucleotide
gcuucaugcaccacacuau

SEQ ID NO: 690559 - RNA, 19 nt, Artificial Sequence
  Description of Artificial Sequence: Synthetic oligonucleotide
ccucaugagcaugggagga

SEQ ID NO: 690560 - RNA, 19 nt, Artificial Sequence
  Description of Artificial Sequence: Synthetic oligonucleotide
acacagggguaggggaauu

SEQ ID NO: 690561 - RNA, 19 nt, Artificial Sequence
  Description of Artificial Sequence: Synthetic oligonucleotide
ucgcuggaugagaguccuu

SEQ ID NO: 690562 - RNA, 19 nt, Artificial Sequence
  Description of Artificial Sequence: Synthetic oligonucleotide
cugcucccgugcuuggugu

SEQ ID NO: 690563 - RNA, 19 nt, Artificial Sequence
  Description of Artificial Sequence: Synthetic oligonucleotide
gguagccuugccagggucu

SEQ ID NO: 690564 - RNA, 19 nt, Artificial Sequence
  Description of Artificial Sequence: Synthetic oligonucleotide
ggagacucugaaccagcau

SEQ ID NO: 690565 - RNA, 19 nt, Artificial Sequence
  Description of Artificial Sequence: Synthetic oligonucleotide
gggucuuuccuggaucgcu

SEQ ID NO: 690566 - RNA, 19 nt, Artificial Sequence
  Description of Artificial Sequence: Synthetic oligonucleotide
gcgcagcauuugacgaccg

SEQ ID NO: 690567 - RNA, 19 nt, Artificial Sequence
  Description of Artificial Sequence: Synthetic oligonucleotide
cgcugugcggcugcgguag

SEQ ID NO: 690568 - RNA, 19 nt, Artificial Sequence
  Description of Artificial Sequence: Synthetic oligonucleotide
cugccgguacacgguccac

SEQ ID NO: 690569 - RNA, 19 nt, Artificial Sequence
  Description of Artificial Sequence: Synthetic oligonucleotide
auguggcggcucauugcau

SEQ ID NO: 690570 - RNA, 19 nt, Artificial Sequence
  Description of Artificial Sequence: Synthetic oligonucleotide
gcggcucauugcaucuggc

SEQ ID NO: 690571 - RNA, 19 nt, Artificial Sequence
  Description of Artificial Sequence: Synthetic oligonucleotide
cgcagcauuugacgaccgc

SEQ ID NO: 690572 - RNA, 19 nt, Artificial Sequence
  Description of Artificial Sequence: Synthetic oligonucleotide
cacagggguaggggaauua

SEQ ID NO: 690573 - RNA, 19 nt, Artificial Sequence
  Description of Artificial Sequence: Synthetic oligonucleotide
gggcauggagcaccuucaa

SEQ ID NO: 690574 - RNA, 19 nt, Artificial Sequence
  Description of Artificial Sequence: Synthetic oligonucleotide
ggguuacuuuaagaccaaa

SEQ ID NO: 690575 - RNA, 19 nt, Artificial Sequence
  Description of Artificial Sequence: Synthetic oligonucleotide
cugcgguagcggcggcauc

SEQ ID NO: 690576 - RNA, 19 nt, Artificial Sequence
  Description of Artificial Sequence: Synthetic oligonucleotide
guagccuugccagggucuu

SEQ ID NO: 690577 - RNA, 19 nt, Artificial Sequence
  Description of Artificial Sequence: Synthetic oligonucleotide
gcggcggcauccauggcaa

SEQ ID NO: 690578 - RNA, 19 nt, Artificial Sequence
  Description of Artificial Sequence: Synthetic oligonucleotide
gcccguuccuccaaauacu

SEQ ID NO: 690579 - RNA, 19 nt, Artificial Sequence
  Description of Artificial Sequence: Synthetic oligonucleotide
ccaaguacuggaggcggaa

SEQ ID NO: 690580 - RNA, 19 nt, Artificial Sequence
  Description of Artificial Sequence: Synthetic oligonucleotide
gccagccucgugggugccg

SEQ ID NO: 690581 - RNA, 19 nt, Artificial Sequence
  Description of Artificial Sequence: Synthetic oligonucleotide
ccaggcgucagggucccca

SEQ ID NO: 690582 - RNA, 19 nt, Artificial Sequence
  Description of Artificial Sequence: Synthetic oligonucleotide
ucccugccggugggaacua

SEQ ID NO: 690583 - RNA, 19 nt, Artificial Sequence
  Description of Artificial Sequence: Synthetic oligonucleotide
ggcggcauccauggcaaau

SEQ ID NO: 690584 - RNA, 19 nt, Artificial Sequence
  Description of Artificial Sequence: Synthetic oligonucleotide
cugaaccagcaugcuuagu

SEQ ID NO: 690585 - RNA, 19 nt, Artificial Sequence
  Description of Artificial Sequence: Synthetic oligonucleotide
ggcuggggcaccagaaauu

SEQ ID NO: 690586 - RNA, 19 nt, Artificial Sequence
  Description of Artificial Sequence: Synthetic oligonucleotide
gagaggcaugcuggugguu

SEQ ID NO: 690587 - RNA, 19 nt, Artificial Sequence
  Description of Artificial Sequence: Synthetic oligonucleotide
gcgugcgcagacgcagcuc

SEQ ID NO: 690588 - RNA, 19 nt, Artificial Sequence
  Description of Artificial Sequence: Synthetic oligonucleotide
ccgcagggugcccugggua

SEQ ID NO: 690589 - RNA, 19 nt, Artificial Sequence
  Description of Artificial Sequence: Synthetic oligonucleotide
ccgaucgcuggaugagagu

SEQ ID NO: 690590 - RNA, 19 nt, Artificial Sequence
  Description of Artificial Sequence: Synthetic oligonucleotide
cccgugcuuggugugggua

SEQ ID NO: 690591 - RNA, 19 nt, Artificial Sequence
  Description of Artificial Sequence: Synthetic oligonucleotide
gccucgugggugccguuuu

SEQ ID NO: 690592 - RNA, 19 nt, Artificial Sequence
  Description of Artificial Sequence: Synthetic oligonucleotide
gggugcccuggguagccuu

SEQ ID NO: 690593 - RNA, 19 nt, Artificial Sequence
  Description of Artificial Sequence: Synthetic oligonucleotide
ccgguacacgguccacugu

SEQ ID NO: 690594 - RNA, 19 nt, Artificial Sequence
  Description of Artificial Sequence: Synthetic oligonucleotide
cgcgcugugcggcugcggu

SEQ ID NO: 690595 - RNA, 19 nt, Artificial Sequence
  Description of Artificial Sequence: Synthetic oligonucleotide
ccauggcaaauugccucau

SEQ ID NO: 690596 - RNA, 19 nt, Artificial Sequence
  Description of Artificial Sequence: Synthetic oligonucleotide
gguccccucuaggguuccu

SEQ ID NO: 690597 - RNA, 19 nt, Artificial Sequence
  Description of Artificial Sequence: Synthetic oligonucleotide
cgcgugcgcagacgcagcu

SEQ ID NO: 690598 - RNA, 19 nt, Artificial Sequence
  Description of Artificial Sequence: Synthetic oligonucleotide
cagccucgugggugccguu

SEQ ID NO: 690599 - RNA, 19 nt, Artificial Sequence
  Description of Artificial Sequence: Synthetic oligonucleotide
ggcccucguugaagcugcu

SEQ ID NO: 690600 - RNA, 19 nt, Artificial Sequence
  Description of Artificial Sequence: Synthetic oligonucleotide
cccugccggugggaacuaa

SEQ ID NO: 690601 - RNA, 19 nt, Artificial Sequence
  Description of Artificial Sequence: Synthetic oligonucleotide
aaugaagguauccugcggc

SEQ ID NO: 690602 - RNA, 19 nt, Artificial Sequence
  Description of Artificial Sequence: Synthetic oligonucleotide
cauguuagaaaucaaaccc

SEQ ID NO: 690603 - RNA, 19 nt, Artificial Sequence
  Description of Artificial Sequence: Synthetic oligonucleotide
auuggucccaccuauaaac

SEQ ID NO: 690604 - RNA, 19 nt, Artificial Sequence
  Description of Artificial Sequence: Synthetic oligonucleotide
aaguugcccacauaaaacg

SEQ ID NO: 690605 - RNA, 19 nt, Artificial Sequence
  Description of Artificial Sequence: Synthetic oligonucleotide
uacuguuuaacuuggauga

SEQ ID NO: 690606 - RNA, 19 nt, Artificial Sequence
  Description of Artificial Sequence: Synthetic oligonucleotide
ucagaauugaucaaagguc

SEQ ID NO: 690607 - RNA, 19 nt, Artificial Sequence
  Description of Artificial Sequence: Synthetic oligonucleotide
uguguaaugggguucaccc

SEQ ID NO: 690608 - RNA, 19 nt, Artificial Sequence
  Description of Artificial Sequence: Synthetic oligonucleotide
gaaauauuccacgucacgg

SEQ ID NO: 690609 - RNA, 19 nt, Artificial Sequence
  Description of Artificial Sequence: Synthetic oligonucleotide
uucucuagcagccaagcag

SEQ ID NO: 690610 - RNA, 19 nt, Artificial Sequence
  Description of Artificial Sequence: Synthetic oligonucleotide
gugaaugaaauauuccacg

SEQ ID NO: 690611 - RNA, 19 nt, Artificial Sequence
  Description of Artificial Sequence: Synthetic oligonucleotide
uguaucgagacacggauga

SEQ ID NO: 690612 - RNA, 19 nt, Artificial Sequence
  Description of Artificial Sequence: Synthetic oligonucleotide
uuuccauaggcgaacuugg

SEQ ID NO: 690613 - RNA, 19 nt, Artificial Sequence
  Description of Artificial Sequence: Synthetic oligonucleotide
aguucgaagagccaaaggu

SEQ ID NO: 690614 - RNA, 19 nt, Artificial Sequence
  Description of Artificial Sequence: Synthetic oligonucleotide
uuuucauucgccccaucgg

SEQ ID NO: 690615 - RNA, 19 nt, Artificial Sequence
  Description of Artificial Sequence: Synthetic oligonucleotide
ucucuagcagccaagcagg

SEQ ID NO: 690616 - RNA, 19 nt, Artificial Sequence
  Description of Artificial Sequence: Synthetic oligonucleotide
cagaauugaucaaaggucc

SEQ ID NO: 690617 - RNA, 19 nt, Artificial Sequence
  Description of Artificial Sequence: Synthetic oligonucleotide
aaacucauauuguccuggc

SEQ ID NO: 690618 - RNA, 19 nt, Artificial Sequence
  Description of Artificial Sequence: Synthetic oligonucleotide
agaacaauagauucuuucu

SEQ ID NO: 690619 - RNA, 19 nt, Artificial Sequence
  Description of Artificial Sequence: Synthetic oligonucleotide
uguuguucgguacagcaca

SEQ ID NO: 690620 - RNA, 19 nt, Artificial Sequence
  Description of Artificial Sequence: Synthetic oligonucleotide
aauagaagcgagguauccg

SEQ ID NO: 690621 - RNA, 19 nt, Artificial Sequence
  Description of Artificial Sequence: Synthetic oligonucleotide
uguacaaguucacacuggc

SEQ ID NO: 690622 - RNA, 19 nt, Artificial Sequence
  Description of Artificial Sequence: Synthetic oligonucleotide
ggaaagauuguccaauugg

SEQ ID NO: 690623 - RNA, 19 nt, Artificial Sequence
  Description of Artificial Sequence: Synthetic oligonucleotide
uguaaugggguucacccca

SEQ ID NO: 690624 - RNA, 19 nt, Artificial Sequence
  Description of Artificial Sequence: Synthetic oligonucleotide
uucgaagagccaaagguca

SEQ ID NO: 690625 - RNA, 19 nt, Artificial Sequence
  Description of Artificial Sequence: Synthetic oligonucleotide
auaaucacaggcaaaguag

SEQ ID NO: 690626 - RNA, 19 nt, Artificial Sequence
  Description of Artificial Sequence: Synthetic oligonucleotide
cagaaaacucauauugucc

SEQ ID NO: 690627 - RNA, 19 nt, Artificial Sequence
  Description of Artificial Sequence: Synthetic oligonucleotide
accugauaaauccaccuuc

SEQ ID NO: 690628 - RNA, 19 nt, Artificial Sequence
  Description of Artificial Sequence: Synthetic oligonucleotide
ucauuuaugccucugccau

SEQ ID NO: 690629 - RNA, 19 nt, Artificial Sequence
  Description of Artificial Sequence: Synthetic oligonucleotide
gauaaauccaccuuccacu

SEQ ID NO: 690630 - RNA, 19 nt, Artificial Sequence
  Description of Artificial Sequence: Synthetic oligonucleotide
acggaugacccauuuggcc

SEQ ID NO: 690631 - RNA, 19 nt, Artificial Sequence
  Description of Artificial Sequence: Synthetic oligonucleotide
aagagccaaaggucaagcg

SEQ ID NO: 690632 - RNA, 19 nt, Artificial Sequence
  Description of Artificial Sequence: Synthetic oligonucleotide
agauuguccaauuggugag

SEQ ID NO: 690633 - RNA, 19 nt, Artificial Sequence
  Description of Artificial Sequence: Synthetic oligonucleotide
uucaugaaaguuccagggc

SEQ ID NO: 690634 - RNA, 19 nt, Artificial Sequence
  Description of Artificial Sequence: Synthetic oligonucleotide
augaaugucagcggguagc

SEQ ID NO: 690635 - RNA, 19 nt, Artificial Sequence
  Description of Artificial Sequence: Synthetic oligonucleotide
aaguucgaagagccaaagg

SEQ ID NO: 690636 - RNA, 19 nt, Artificial Sequence
  Description of Artificial Sequence: Synthetic oligonucleotide
aacuuuuccauaggcgaac

SEQ ID NO: 690637 - RNA, 19 nt, Artificial Sequence
  Description of Artificial Sequence: Synthetic oligonucleotide
ugggguucaugaaaguucc

SEQ ID NO: 690638 - RNA, 19 nt, Artificial Sequence
  Description of Artificial Sequence: Synthetic oligonucleotide
uccaauaggcaaaauuggu

SEQ ID NO: 690639 - RNA, 19 nt, Artificial Sequence
  Description of Artificial Sequence: Synthetic oligonucleotide
auagauucuuucucuagca

SEQ ID NO: 690640 - RNA, 19 nt, Artificial Sequence
  Description of Artificial Sequence: Synthetic oligonucleotide
acauaaaacguggggagcg

SEQ ID NO: 690641 - RNA, 19 nt, Artificial Sequence
  Description of Artificial Sequence: Synthetic oligonucleotide
aaauuggucccaccuauaa

SEQ ID NO: 690642 - RNA, 19 nt, Artificial Sequence
  Description of Artificial Sequence: Synthetic oligonucleotide
agcaccgugauguuguuug

SEQ ID NO: 690643 - RNA, 19 nt, Artificial Sequence
  Description of Artificial Sequence: Synthetic oligonucleotide
aguguuguucgguacagca

SEQ ID NO: 690644 - RNA, 19 nt, Artificial Sequence
  Description of Artificial Sequence: Synthetic oligonucleotide
uaacuuggaugaaugucag

SEQ ID NO: 690645 - RNA, 19 nt, Artificial Sequence
  Description of Artificial Sequence: Synthetic oligonucleotide
uaucacacgguuucgcuca

SEQ ID NO: 690646 - RNA, 19 nt, Artificial Sequence
  Description of Artificial Sequence: Synthetic oligonucleotide
ucgaauuuccucuggauua

SEQ ID NO: 690647 - RNA, 19 nt, Artificial Sequence
  Description of Artificial Sequence: Synthetic oligonucleotide
agcguaaaguucgaagagc

SEQ ID NO: 690648 - RNA, 19 nt, Artificial Sequence
  Description of Artificial Sequence: Synthetic oligonucleotide
guugauccacaccugaccc

SEQ ID NO: 690649 - RNA, 19 nt, Artificial Sequence
  Description of Artificial Sequence: Synthetic oligonucleotide
auaucacacgguuucgcuc

SEQ ID NO: 690650 - RNA, 19 nt, Artificial Sequence
  Description of Artificial Sequence: Synthetic oligonucleotide
ugauccuagaggcucaguc

SEQ ID NO: 690651 - RNA, 19 nt, Artificial Sequence
  Description of Artificial Sequence: Synthetic oligonucleotide
ugacccuugguccauccag

SEQ ID NO: 690652 - RNA, 19 nt, Artificial Sequence
  Description of Artificial Sequence: Synthetic oligonucleotide
caagcguccaucguggugg

SEQ ID NO: 690653 - RNA, 19 nt, Artificial Sequence
  Description of Artificial Sequence: Synthetic oligonucleotide
ucauucgccccaucggugg

SEQ ID NO: 690654 - RNA, 19 nt, Artificial Sequence
  Description of Artificial Sequence: Synthetic oligonucleotide
gacugucagccauuuaucc

SEQ ID NO: 690655 - RNA, 19 nt, Artificial Sequence
  Description of Artificial Sequence: Synthetic oligonucleotide
uauccugcggcagaucugg

SEQ ID NO: 690656 - RNA, 19 nt, Artificial Sequence
  Description of Artificial Sequence: Synthetic oligonucleotide
cauagagagaggcagccac

SEQ ID NO: 690657 - RNA, 19 nt, Artificial Sequence
  Description of Artificial Sequence: Synthetic oligonucleotide
agaaggacgucauugccca

SEQ ID NO: 690658 - RNA, 19 nt, Artificial Sequence
  Description of Artificial Sequence: Synthetic oligonucleotide
acuguaucgagacacggau

SEQ ID NO: 690659 - RNA, 19 nt, Artificial Sequence
  Description of Artificial Sequence: Synthetic oligonucleotide
auuuaugccucugccauag

SEQ ID NO: 690660 - RNA, 19 nt, Artificial Sequence
  Description of Artificial Sequence: Synthetic oligonucleotide
gaaguugcccacauaaaac

SEQ ID NO: 690661 - RNA, 19 nt, Artificial Sequence
  Description of Artificial Sequence: Synthetic oligonucleotide
uguuagaaaucaaacccuu

SEQ ID NO: 690662 - RNA, 19 nt, Artificial Sequence
  Description of Artificial Sequence: Synthetic oligonucleotide
gagcguaaaguucgaagag

SEQ ID NO: 690663 - RNA, 19 nt, Artificial Sequence
  Description of Artificial Sequence: Synthetic oligonucleotide
ugagaauacugaaguuaag

SEQ ID NO: 690664 - RNA, 19 nt, Artificial Sequence
  Description of Artificial Sequence: Synthetic oligonucleotide
uuauaaucggcccuccauu

SEQ ID NO: 690665 - RNA, 19 nt, Artificial Sequence
  Description of Artificial Sequence: Synthetic oligonucleotide
gacgucgucagaaugugcc

SEQ ID NO: 690666 - RNA, 19 nt, Artificial Sequence
  Description of Artificial Sequence: Synthetic oligonucleotide
uauuccacgucacgguccc

SEQ ID NO: 690667 - RNA, 19 nt, Artificial Sequence
  Description of Artificial Sequence: Synthetic oligonucleotide
acaguuauaaucggcccuc

SEQ ID NO: 690668 - RNA, 19 nt, Artificial Sequence
  Description of Artificial Sequence: Synthetic oligonucleotide
ugaaugucagcggguagcg

SEQ ID NO: 690669 - RNA, 19 nt, Artificial Sequence
  Description of Artificial Sequence: Synthetic oligonucleotide
aucauuuaugccucugcca

SEQ ID NO: 690670 - RNA, 19 nt, Artificial Sequence
  Description of Artificial Sequence: Synthetic oligonucleotide
gaagcgagguauccggaag

SEQ ID NO: 690671 - RNA, 19 nt, Artificial Sequence
  Description of Artificial Sequence: Synthetic oligonucleotide
agaccgaucuggaaaaggg

SEQ ID NO: 690672 - RNA, 19 nt, Artificial Sequence
  Description of Artificial Sequence: Synthetic oligonucleotide
aacggaagcggugugccag

SEQ ID NO: 690673 - RNA, 19 nt, Artificial Sequence
  Description of Artificial Sequence: Synthetic oligonucleotide
uauaaucggcccuccauuc

SEQ ID NO: 690674 - RNA, 19 nt, Artificial Sequence
  Description of Artificial Sequence: Synthetic oligonucleotide
aaucggccugucgacaaac

SEQ ID NO: 690675 - RNA, 19 nt, Artificial Sequence
  Description of Artificial Sequence: Synthetic oligonucleotide
uaaucggcccuccauucug

SEQ ID NO: 690676 - RNA, 19 nt, Artificial Sequence
  Description of Artificial Sequence: Synthetic oligonucleotide
aauuggucccaccuauaaa

SEQ ID NO: 690677 - RNA, 19 nt, Artificial Sequence
  Description of Artificial Sequence: Synthetic oligonucleotide
auauuccacgucacggucc

SEQ ID NO: 690678 - RNA, 19 nt, Artificial Sequence
  Description of Artificial Sequence: Synthetic oligonucleotide
uaucggccaagguuaaagc

SEQ ID NO: 690679 - RNA, 19 nt, Artificial Sequence
  Description of Artificial Sequence: Synthetic oligonucleotide
ucgcucaaggauuccuugg

SEQ ID NO: 690680 - RNA, 19 nt, Artificial Sequence
  Description of Artificial Sequence: Synthetic oligonucleotide
uuccauaggcgaacuuggg

SEQ ID NO: 690681 - RNA, 19 nt, Artificial Sequence
  Description of Artificial Sequence: Synthetic oligonucleotide
guggggagcguaaaguucg

SEQ ID NO: 690682 - RNA, 19 nt, Artificial Sequence
  Description of Artificial Sequence: Synthetic oligonucleotide
agaagaucgaagaacaaua

SEQ ID NO: 690683 - RNA, 19 nt, Artificial Sequence
  Description of Artificial Sequence: Synthetic oligonucleotide
aauaaucggccugucgaca

SEQ ID NO: 690684 - RNA, 19 nt, Artificial Sequence
  Description of Artificial Sequence: Synthetic oligonucleotide
gaugaaugucagcggguag

SEQ ID NO: 690685 - RNA, 19 nt, Artificial Sequence
  Description of Artificial Sequence: Synthetic oligonucleotide
aggucaagcguccaucgug

SEQ ID NO: 690686 - RNA, 19 nt, Artificial Sequence
  Description of Artificial Sequence: Synthetic oligonucleotide
uucucacggggccauuggg

SEQ ID NO: 690687 - RNA, 19 nt, Artificial Sequence
  Description of Artificial Sequence: Synthetic oligonucleotide
gauccuagaggcucaguca

SEQ ID NO: 690688 - RNA, 19 nt, Artificial Sequence
  Description of Artificial Sequence: Synthetic oligonucleotide
guuaaagccguugauccac

SEQ ID NO: 690689 - RNA, 19 nt, Artificial Sequence
  Description of Artificial Sequence: Synthetic oligonucleotide
guacacagcucugaggucc

SEQ ID NO: 690690 - RNA, 19 nt, Artificial Sequence
  Description of Artificial Sequence: Synthetic oligonucleotide
caauuggugagaauacuga

SEQ ID NO: 690691 - RNA, 19 nt, Artificial Sequence
  Description of Artificial Sequence: Synthetic oligonucleotide
augaaauauuccacgucac

SEQ ID NO: 690692 - RNA, 19 nt, Artificial Sequence
  Description of Artificial Sequence: Synthetic oligonucleotide
aguauagaacucagaauug

SEQ ID NO: 690693 - RNA, 19 nt, Artificial Sequence
  Description of Artificial Sequence: Synthetic oligonucleotide
acugucagccauuuaucca

SEQ ID NO: 690694 - RNA, 19 nt, Artificial Sequence
  Description of Artificial Sequence: Synthetic oligonucleotide
cucagaauugaucaaaggu

SEQ ID NO: 690695 - RNA, 19 nt, Artificial Sequence
  Description of Artificial Sequence: Synthetic oligonucleotide
uuccccuguauguccaggg

SEQ ID NO: 690696 - RNA, 19 nt, Artificial Sequence
  Description of Artificial Sequence: Synthetic oligonucleotide
aaguguuguucgguacagc

SEQ ID NO: 690697 - RNA, 19 nt, Artificial Sequence
  Description of Artificial Sequence: Synthetic oligonucleotide
guaucggccaagguuaaag

SEQ ID NO: 690698 - RNA, 19 nt, Artificial Sequence
  Description of Artificial Sequence: Synthetic oligonucleotide
caugaaaguuccagggcac

SEQ ID NO: 690699 - RNA, 19 nt, Artificial Sequence
  Description of Artificial Sequence: Synthetic oligonucleotide
auugcccagaugguaacgg

SEQ ID NO: 690700 - RNA, 19 nt, Artificial Sequence
  Description of Artificial Sequence: Synthetic oligonucleotide
aagcgagguauccggaagu

SEQ ID NO: 690701 - RNA, 19 nt, Artificial Sequence
  Description of Artificial Sequence: Synthetic oligonucleotide
uucauucgccccaucggug

SEQ ID NO: 690702 - RNA, 19 nt, Artificial Sequence
  Description of Artificial Sequence: Synthetic oligonucleotide
uuaggaaagccugugugau

SEQ ID NO: 690703 - RNA, 19 nt, Artificial Sequence
  Description of Artificial Sequence: Synthetic oligonucleotide
gaaguguuguucgguacag

SEQ ID NO: 690704 - RNA, 19 nt, Artificial Sequence
  Description of Artificial Sequence: Synthetic oligonucleotide
uaaaacguggggagcguaa

SEQ ID NO: 690705 - RNA, 19 nt, Artificial Sequence
  Description of Artificial Sequence: Synthetic oligonucleotide
auguuagaaaucaaacccu

SEQ ID NO: 690706 - RNA, 19 nt, Artificial Sequence
  Description of Artificial Sequence: Synthetic oligonucleotide
aacguggggagcguaaagu

SEQ ID NO: 690707 - RNA, 19 nt, Artificial Sequence
  Description of Artificial Sequence: Synthetic oligonucleotide
caauaaucggccugucgac

SEQ ID NO: 690708 - RNA, 19 nt, Artificial Sequence
  Description of Artificial Sequence: Synthetic oligonucleotide
gaugguaacggaagcggug

SEQ ID NO: 690709 - RNA, 19 nt, Artificial Sequence
  Description of Artificial Sequence: Synthetic oligonucleotide
uuucucuagcagccaagca

SEQ ID NO: 690710 - RNA, 19 nt, Artificial Sequence
  Description of Artificial Sequence: Synthetic oligonucleotide
auauuguccuggcuggggu

SEQ ID NO: 690711 - RNA, 19 nt, Artificial Sequence
  Description of Artificial Sequence: Synthetic oligonucleotide
uggauuaggaaagccugug

SEQ ID NO: 690712 - RNA, 19 nt, Artificial Sequence
  Description of Artificial Sequence: Synthetic oligonucleotide
uuaugccucugccauaguu

SEQ ID NO: 690713 - RNA, 19 nt, Artificial Sequence
  Description of Artificial Sequence: Synthetic oligonucleotide
ucaagcguccaucguggug

SEQ ID NO: 690714 - RNA, 19 nt, Artificial Sequence
  Description of Artificial Sequence: Synthetic oligonucleotide
cacauaagcccggucacgg

SEQ ID NO: 690715 - RNA, 19 nt, Artificial Sequence
  Description of Artificial Sequence: Synthetic oligonucleotide
ggagcguaaaguucgaaga

SEQ ID NO: 690716 - RNA, 19 nt, Artificial Sequence
  Description of Artificial Sequence: Synthetic oligonucleotide
ucucacggggccauuggga

SEQ ID NO: 690717 - RNA, 19 nt, Artificial Sequence
  Description of Artificial Sequence: Synthetic oligonucleotide
gucgucagaaugugccugg

SEQ ID NO: 690718 - RNA, 19 nt, Artificial Sequence
  Description of Artificial Sequence: Synthetic oligonucleotide
uucugguagagcagaggcu

SEQ ID NO: 690719 - RNA, 19 nt, Artificial Sequence
  Description of Artificial Sequence: Synthetic oligonucleotide
acaauagauucuuucucua

SEQ ID NO: 690720 - RNA, 19 nt, Artificial Sequence
  Description of Artificial Sequence: Synthetic oligonucleotide
gcugcauagggaauguugg

SEQ ID NO: 690721 - RNA, 19 nt, Artificial Sequence
  Description of Artificial Sequence: Synthetic oligonucleotide
cauaagcccggucacggac

SEQ ID NO: 690722 - RNA, 19 nt, Artificial Sequence
  Description of Artificial Sequence: Synthetic oligonucleotide
cucaucacgggccucccag

SEQ ID NO: 690723 - RNA, 19 nt, Artificial Sequence
  Description of Artificial Sequence: Synthetic oligonucleotide
acgguacacagcucugagg

SEQ ID NO: 690724 - RNA, 19 nt, Artificial Sequence
  Description of Artificial Sequence: Synthetic oligonucleotide
acggacaccauugaagggu

SEQ ID NO: 690725 - RNA, 19 nt, Artificial Sequence
  Description of Artificial Sequence: Synthetic oligonucleotide
ugucuugaacuuucucaga

SEQ ID NO: 690726 - RNA, 19 nt, Artificial Sequence
  Description of Artificial Sequence: Synthetic oligonucleotide
aggcaaaauuggucccacc

SEQ ID NO: 690727 - RNA, 19 nt, Artificial Sequence
  Description of Artificial Sequence: Synthetic oligonucleotide
gucauagagagaggcagcc

SEQ ID NO: 690728 - RNA, 19 nt, Artificial Sequence
  Description of Artificial Sequence: Synthetic oligonucleotide
agggaauggagaaguugcc

SEQ ID NO: 690729 - RNA, 19 nt, Artificial Sequence
  Description of Artificial Sequence: Synthetic oligonucleotide
agucauguuagaaaucaaa

SEQ ID NO: 690730 - RNA, 19 nt, Artificial Sequence
  Description of Artificial Sequence: Synthetic oligonucleotide
ugaaguuaagagucauguu

SEQ ID NO: 690731 - RNA, 19 nt, Artificial Sequence
  Description of Artificial Sequence: Synthetic oligonucleotide
cauauuguccuggcugggg

SEQ ID NO: 690732 - RNA, 19 nt, Artificial Sequence
  Description of Artificial Sequence: Synthetic oligonucleotide
ggugaaugaaauauuccac

SEQ ID NO: 690733 - RNA, 19 nt, Artificial Sequence
  Description of Artificial Sequence: Synthetic oligonucleotide
acauacccaaaauacuguu

SEQ ID NO: 690734 - RNA, 19 nt, Artificial Sequence
  Description of Artificial Sequence: Synthetic oligonucleotide
agggaccugccaauaaucg

SEQ ID NO: 690735 - RNA, 19 nt, Artificial Sequence
  Description of Artificial Sequence: Synthetic oligonucleotide
gggagcguaaaguucgaag

SEQ ID NO: 690736 - RNA, 19 nt, Artificial Sequence
  Description of Artificial Sequence: Synthetic oligonucleotide
auaaucggccugucgacaa

SEQ ID NO: 690737 - RNA, 19 nt, Artificial Sequence
  Description of Artificial Sequence: Synthetic oligonucleotide
augaaaguuccagggcacg

SEQ ID NO: 690738 - RNA, 19 nt, Artificial Sequence
  Description of Artificial Sequence: Synthetic oligonucleotide
gauggcguucagcccagcc

SEQ ID NO: 690739 - RNA, 19 nt, Artificial Sequence
  Description of Artificial Sequence: Synthetic oligonucleotide
aaggucaagcguccaucgu

SEQ ID NO: 690740 - RNA, 19 nt, Artificial Sequence
  Description of Artificial Sequence: Synthetic oligonucleotide
guaacggaagcggugugcc

SEQ ID NO: 690741 - RNA, 19 nt, Artificial Sequence
  Description of Artificial Sequence: Synthetic oligonucleotide
auaaucggcccuccauucu

SEQ ID NO: 690742 - RNA, 19 nt, Artificial Sequence
  Description of Artificial Sequence: Synthetic oligonucleotide
gcgucguagucauagcugg

SEQ ID NO: 690743 - RNA, 19 nt, Artificial Sequence
  Description of Artificial Sequence: Synthetic oligonucleotide
gauaucacacgguuucgcu

SEQ ID NO: 690744 - RNA, 19 nt, Artificial Sequence
  Description of Artificial Sequence: Synthetic oligonucleotide
cugcauagggaauguuggc

SEQ ID NO: 690745 - RNA, 19 nt, Artificial Sequence
  Description of Artificial Sequence: Synthetic oligonucleotide
guucgaagagccaaagguc

SEQ ID NO: 690746 - RNA, 19 nt, Artificial Sequence
  Description of Artificial Sequence: Synthetic oligonucleotide
gccaguauagaacucagaa

SEQ ID NO: 690747 - RNA, 19 nt, Artificial Sequence
  Description of Artificial Sequence: Synthetic oligonucleotide
cacggaugacccauuuggc

SEQ ID NO: 690748 - RNA, 19 nt, Artificial Sequence
  Description of Artificial Sequence: Synthetic oligonucleotide
agggugagcguuccagcuc

SEQ ID NO: 690749 - RNA, 19 nt, Artificial Sequence
  Description of Artificial Sequence: Synthetic oligonucleotide
gugagaauacugaaguuaa

SEQ ID NO: 690750 - RNA, 19 nt, Artificial Sequence
  Description of Artificial Sequence: Synthetic oligonucleotide
ugggacacaggacguccag

SEQ ID NO: 690751 - RNA, 19 nt, Artificial Sequence
  Description of Artificial Sequence: Synthetic oligonucleotide
cucacggggccauugggac

SEQ ID NO: 690752 - RNA, 19 nt, Artificial Sequence
  Description of Artificial Sequence: Synthetic oligonucleotide
aaucggcccuccauucugg

SEQ ID NO: 690753 - RNA, 19 nt, Artificial Sequence
  Description of Artificial Sequence: Synthetic oligonucleotide
aguuauaaucggcccucca

SEQ ID NO: 690754 - RNA, 19 nt, Artificial Sequence
  Description of Artificial Sequence: Synthetic oligonucleotide
guguaaugggguucacccc

SEQ ID NO: 690755 - RNA, 19 nt, Artificial Sequence
  Description of Artificial Sequence: Synthetic oligonucleotide
ugucagccauuuauccaca

SEQ ID NO: 690756 - RNA, 19 nt, Artificial Sequence
  Description of Artificial Sequence: Synthetic oligonucleotide
uccagggauaucacacggu

SEQ ID NO: 690757 - RNA, 19 nt, Artificial Sequence
  Description of Artificial Sequence: Synthetic oligonucleotide
agaacggcuccagcuuucc

SEQ ID NO: 690758 - RNA, 19 nt, Artificial Sequence
  Description of Artificial Sequence: Synthetic oligonucleotide
gaccgaucuggaaaagggc

SEQ ID NO: 690759 - RNA, 19 nt, Artificial Sequence
  Description of Artificial Sequence: Synthetic oligonucleotide
uuucgcucaaggauuccuu

SEQ ID NO: 690760 - RNA, 19 nt, Artificial Sequence
  Description of Artificial Sequence: Synthetic oligonucleotide
ugacugcuccaaaauccac

SEQ ID NO: 690761 - RNA, 19 nt, Artificial Sequence
  Description of Artificial Sequence: Synthetic oligonucleotide
cugaaguuaagagucaugu

SEQ ID NO: 690762 - RNA, 19 nt, Artificial Sequence
  Description of Artificial Sequence: Synthetic oligonucleotide
uggguucgaauuuccucug

SEQ ID NO: 690763 - RNA, 19 nt, Artificial Sequence
  Description of Artificial Sequence: Synthetic oligonucleotide
agccaaaggucaagcgucc

SEQ ID NO: 690764 - RNA, 19 nt, Artificial Sequence
  Description of Artificial Sequence: Synthetic oligonucleotide
aaaacguggggagcguaaa

SEQ ID NO: 690765 - RNA, 19 nt, Artificial Sequence
  Description of Artificial Sequence: Synthetic oligonucleotide
augguaacggaagcggugu

SEQ ID NO: 690766 - RNA, 19 nt, Artificial Sequence
  Description of Artificial Sequence: Synthetic oligonucleotide
gaguugauggagggauagg

SEQ ID NO: 690767 - RNA, 19 nt, Artificial Sequence
  Description of Artificial Sequence: Synthetic oligonucleotide
caaaggucaagcguccauc

SEQ ID NO: 690768 - RNA, 19 nt, Artificial Sequence
  Description of Artificial Sequence: Synthetic oligonucleotide
cagccaguauagaacucag

SEQ ID NO: 690769 - RNA, 19 nt, Artificial Sequence
  Description of Artificial Sequence: Synthetic oligonucleotide
ccgaaggaaguuuucauuc

SEQ ID NO: 690770 - RNA, 19 nt, Artificial Sequence
  Description of Artificial Sequence: Synthetic oligonucleotide
caagaugggugcguacugc

SEQ ID NO: 690771 - RNA, 19 nt, Artificial Sequence
  Description of Artificial Sequence: Synthetic oligonucleotide
ccugucgacaaacuccacg

SEQ ID NO: 690772 - RNA, 19 nt, Artificial Sequence
  Description of Artificial Sequence: Synthetic oligonucleotide
gaaacgcagguagucauaa

SEQ ID NO: 690773 - RNA, 19 nt, Artificial Sequence
  Description of Artificial Sequence: Synthetic oligonucleotide
cacggacaccauugaaggg

SEQ ID NO: 690774 - RNA, 19 nt, Artificial Sequence
  Description of Artificial Sequence: Synthetic oligonucleotide
ugacgucgucagaaugugc

SEQ ID NO: 690775 - RNA, 19 nt, Artificial Sequence
  Description of Artificial Sequence: Synthetic oligonucleotide
cagggaccugccaauaauc

SEQ ID NO: 690776 - RNA, 19 nt, Artificial Sequence
  Description of Artificial Sequence: Synthetic oligonucleotide
gcguaaaguucgaagagcc

SEQ ID NO: 690777 - RNA, 19 nt, Artificial Sequence
  Description of Artificial Sequence: Synthetic oligonucleotide
cacgguacacagcucugag

SEQ ID NO: 690778 - RNA, 19 nt, Artificial Sequence
  Description of Artificial Sequence: Synthetic oligonucleotide
ggguucaugaaaguuccag

SEQ ID NO: 690779 - RNA, 19 nt, Artificial Sequence
  Description of Artificial Sequence: Synthetic oligonucleotide
agcagccaagcagguaacc

SEQ ID NO: 690780 - RNA, 19 nt, Artificial Sequence
  Description of Artificial Sequence: Synthetic oligonucleotide
cuguaucgagacacggaug

SEQ ID NO: 690781 - RNA, 19 nt, Artificial Sequence
  Description of Artificial Sequence: Synthetic oligonucleotide
caccuauaaacauguacaa

SEQ ID NO: 690782 - RNA, 19 nt, Artificial Sequence
  Description of Artificial Sequence: Synthetic oligonucleotide
ggucaagcguccaucgugg

SEQ ID NO: 690783 - RNA, 19 nt, Artificial Sequence
  Description of Artificial Sequence: Synthetic oligonucleotide
ccaauaaucggccugucga

SEQ ID NO: 690784 - RNA, 19 nt, Artificial Sequence
  Description of Artificial Sequence: Synthetic oligonucleotide
agaagcgagguauccggaa

SEQ ID NO: 690785 - RNA, 19 nt, Artificial Sequence
  Description of Artificial Sequence: Synthetic oligonucleotide
uccacgguacacagcucug

SEQ ID NO: 690786 - RNA, 19 nt, Artificial Sequence
  Description of Artificial Sequence: Synthetic oligonucleotide
ugcccgagggaauggagaa

SEQ ID NO: 690787 - RNA, 19 nt, Artificial Sequence
  Description of Artificial Sequence: Synthetic oligonucleotide
gaagaugggcaucgagcca

SEQ ID NO: 690788 - RNA, 19 nt, Artificial Sequence
  Description of Artificial Sequence: Synthetic oligonucleotide
agcggugugccaggaaacg

SEQ ID NO: 690789 - RNA, 19 nt, Artificial Sequence
  Description of Artificial Sequence: Synthetic oligonucleotide
agguauccggaaguaacug

SEQ ID NO: 690790 - RNA, 19 nt, Artificial Sequence
  Description of Artificial Sequence: Synthetic oligonucleotide
cacacgucccauguucucc

SEQ ID NO: 690791 - RNA, 19 nt, Artificial Sequence
  Description of Artificial Sequence: Synthetic oligonucleotide
ucggccugucgacaaacuc

SEQ ID NO: 690792 - RNA, 19 nt, Artificial Sequence
  Description of Artificial Sequence: Synthetic oligonucleotide
ugugcugcauagggaaugu

SEQ ID NO: 690793 - RNA, 19 nt, Artificial Sequence
  Description of Artificial Sequence: Synthetic oligonucleotide
uccccuguauguccaggga

SEQ ID NO: 690794 - RNA, 19 nt, Artificial Sequence
  Description of Artificial Sequence: Synthetic oligonucleotide
acaccgaaggaaguuuuca

SEQ ID NO: 690795 - RNA, 19 nt, Artificial Sequence
  Description of Artificial Sequence: Synthetic oligonucleotide
guuauaaucggcccuccau

SEQ ID NO: 690796 - RNA, 19 nt, Artificial Sequence
  Description of Artificial Sequence: Synthetic oligonucleotide
uaagcccggucacggacac

SEQ ID NO: 690797 - RNA, 19 nt, Artificial Sequence
  Description of Artificial Sequence: Synthetic oligonucleotide
gaugcccgagggaauggag

SEQ ID NO: 690798 - RNA, 19 nt, Artificial Sequence
  Description of Artificial Sequence: Synthetic oligonucleotide
gucucuacugcuguaggga

SEQ ID NO: 690799 - RNA, 19 nt, Artificial Sequence
  Description of Artificial Sequence: Synthetic oligonucleotide
guucgguacagcacauacc

SEQ ID NO: 690800 - RNA, 19 nt, Artificial Sequence
  Description of Artificial Sequence: Synthetic oligonucleotide
guacaaguucacacuggcc

SEQ ID NO: 690801 - RNA, 19 nt, Artificial Sequence
  Description of Artificial Sequence: Synthetic oligonucleotide
agaauugaucaaagguccu

SEQ ID NO: 690802 - RNA, 19 nt, Artificial Sequence
  Description of Artificial Sequence: Synthetic oligonucleotide
gccaauaaucggccugucg

SEQ ID NO: 690803 - RNA, 19 nt, Artificial Sequence
  Description of Artificial Sequence: Synthetic oligonucleotide
gaaugucagcggguagcgg

SEQ ID NO: 690804 - RNA, 19 nt, Artificial Sequence
  Description of Artificial Sequence: Synthetic oligonucleotide
gcacaguuauaaucggccc

SEQ ID NO: 690805 - RNA, 19 nt, Artificial Sequence
  Description of Artificial Sequence: Synthetic oligonucleotide
ugguaacggaagcggugug

SEQ ID NO: 690806 - RNA, 19 nt, Artificial Sequence
  Description of Artificial Sequence: Synthetic oligonucleotide
ggaaguguuguucgguaca

SEQ ID NO: 690807 - RNA, 19 nt, Artificial Sequence
  Description of Artificial Sequence: Synthetic oligonucleotide
uaggcaaaauuggucccac

SEQ ID NO: 690808 - RNA, 19 nt, Artificial Sequence
  Description of Artificial Sequence: Synthetic oligonucleotide
cugugcugcauagggaaug

SEQ ID NO: 690809 - RNA, 19 nt, Artificial Sequence
  Description of Artificial Sequence: Synthetic oligonucleotide
ugauccacaccugacccuu

SEQ ID NO: 690810 - RNA, 19 nt, Artificial Sequence
  Description of Artificial Sequence: Synthetic oligonucleotide
acguacaucuggauggcgu

SEQ ID NO: 690811 - RNA, 19 nt, Artificial Sequence
  Description of Artificial Sequence: Synthetic oligonucleotide
gggugagcguuccagcucc

SEQ ID NO: 690812 - RNA, 19 nt, Artificial Sequence
  Description of Artificial Sequence: Synthetic oligonucleotide
caaaauuggucccaccuau

SEQ ID NO: 690813 - RNA, 19 nt, Artificial Sequence
  Description of Artificial Sequence: Synthetic oligonucleotide
aaaauuggucccaccuaua

SEQ ID NO: 690814 - RNA, 19 nt, Artificial Sequence
  Description of Artificial Sequence: Synthetic oligonucleotide
gauuguccaauuggugaga

SEQ ID NO: 690815 - RNA, 19 nt, Artificial Sequence
  Description of Artificial Sequence: Synthetic oligonucleotide
agcccggucacggacacca

SEQ ID NO: 690816 - RNA, 19 nt, Artificial Sequence
  Description of Artificial Sequence: Synthetic oligonucleotide
ucccaauagaagcgaggua

SEQ ID NO: 690817 - RNA, 19 nt, Artificial Sequence
  Description of Artificial Sequence: Synthetic oligonucleotide
caacuuuuccauaggcgaa

SEQ ID NO: 690818 - RNA, 19 nt, Artificial Sequence
  Description of Artificial Sequence: Synthetic oligonucleotide
ucgucagaaugugccuggg

SEQ ID NO: 690819 - RNA, 19 nt, Artificial Sequence
  Description of Artificial Sequence: Synthetic oligonucleotide
auguuguuuggggcugacg

SEQ ID NO: 690820 - RNA, 19 nt, Artificial Sequence
  Description of Artificial Sequence: Synthetic oligonucleotide
gguauccggaaguaacuga

SEQ ID NO: 690821 - RNA, 19 nt, Artificial Sequence
  Description of Artificial Sequence: Synthetic oligonucleotide
cugacgucgucagaaugug

SEQ ID NO: 690822 - RNA, 19 nt, Artificial Sequence
  Description of Artificial Sequence: Synthetic oligonucleotide
cacuguaucgagacacgga

SEQ ID NO: 690823 - RNA, 19 nt, Artificial Sequence
  Description of Artificial Sequence: Synthetic oligonucleotide
uggucuagccagccaguau

SEQ ID NO: 690824 - RNA, 19 nt, Artificial Sequence
  Description of Artificial Sequence: Synthetic oligonucleotide
caccgugauguuguuuggg

SEQ ID NO: 690825 - RNA, 19 nt, Artificial Sequence
  Description of Artificial Sequence: Synthetic oligonucleotide
agaugguaacggaagcggu

SEQ ID NO: 690826 - RNA, 19 nt, Artificial Sequence
  Description of Artificial Sequence: Synthetic oligonucleotide
acgucgucagaaugugccu

SEQ ID NO: 690827 - RNA, 19 nt, Artificial Sequence
  Description of Artificial Sequence: Synthetic oligonucleotide
ggcaaaauuggucccaccu

SEQ ID NO: 690828 - RNA, 19 nt, Artificial Sequence
  Description of Artificial Sequence: Synthetic oligonucleotide
acguggggagcguaaaguu

SEQ ID NO: 690829 - RNA, 19 nt, Artificial Sequence
  Description of Artificial Sequence: Synthetic oligonucleotide
uaacggaagcggugugcca

SEQ ID NO: 690830 - RNA, 19 nt, Artificial Sequence
  Description of Artificial Sequence: Synthetic oligonucleotide
acauaagcccggucacgga

SEQ ID NO: 690831 - RNA, 19 nt, Artificial Sequence
  Description of Artificial Sequence: Synthetic oligonucleotide
ggcaaugucucuacugcug

SEQ ID NO: 690832 - RNA, 19 nt, Artificial Sequence
  Description of Artificial Sequence: Synthetic oligonucleotide
agagaggcagccacuauuu

SEQ ID NO: 690833 - RNA, 19 nt, Artificial Sequence
  Description of Artificial Sequence: Synthetic oligonucleotide
ggcagaucugggaugcccg

SEQ ID NO: 690834 - RNA, 19 nt, Artificial Sequence
  Description of Artificial Sequence: Synthetic oligonucleotide
gguagcggcuucucacggg

SEQ ID NO: 690835 - RNA, 19 nt, Artificial Sequence
  Description of Artificial Sequence: Synthetic oligonucleotide
gucacgguccccagaaaac

SEQ ID NO: 690836 - RNA, 19 nt, Artificial Sequence
  Description of Artificial Sequence: Synthetic oligonucleotide
acauuucgaagagcaaaau

SEQ ID NO: 690837 - RNA, 19 nt, Artificial Sequence
  Description of Artificial Sequence: Synthetic oligonucleotide
ggauaucacacgguuucgc

SEQ ID NO: 690838 - RNA, 19 nt, Artificial Sequence
  Description of Artificial Sequence: Synthetic oligonucleotide
ucagcggggcgucguaguc

SEQ ID NO: 690839 - RNA, 19 nt, Artificial Sequence
  Description of Artificial Sequence: Synthetic oligonucleotide
guguuguucgguacagcac

SEQ ID NO: 690840 - RNA, 19 nt, Artificial Sequence
  Description of Artificial Sequence: Synthetic oligonucleotide
gaaggacgucauugcccag

SEQ ID NO: 690841 - RNA, 19 nt, Artificial Sequence
  Description of Artificial Sequence: Synthetic oligonucleotide
uuuaugccucugccauagu

SEQ ID NO: 690842 - RNA, 19 nt, Artificial Sequence
  Description of Artificial Sequence: Synthetic oligonucleotide
ucuagccagccaguauaga

SEQ ID NO: 690843 - RNA, 19 nt, Artificial Sequence
  Description of Artificial Sequence: Synthetic oligonucleotide
caggaaacugaaugaaggu

SEQ ID NO: 690844 - RNA, 19 nt, Artificial Sequence
  Description of Artificial Sequence: Synthetic oligonucleotide
guaaugggguucaccccag

SEQ ID NO: 690845 - RNA, 19 nt, Artificial Sequence
  Description of Artificial Sequence: Synthetic oligonucleotide
uccuagaggcucagucauc

SEQ ID NO: 690846 - RNA, 19 nt, Artificial Sequence
  Description of Artificial Sequence: Synthetic oligonucleotide
ccucccaauagaagcgagg

SEQ ID NO: 690847 - RNA, 19 nt, Artificial Sequence
  Description of Artificial Sequence: Synthetic oligonucleotide
aaagggccgcugauggcca

SEQ ID NO: 690848 - RNA, 19 nt, Artificial Sequence
  Description of Artificial Sequence: Synthetic oligonucleotide
uccacaccugacccuuggu

SEQ ID NO: 690849 - RNA, 19 nt, Artificial Sequence
  Description of Artificial Sequence: Synthetic oligonucleotide
aggacgucauugcccagau

SEQ ID NO: 690850 - RNA, 19 nt, Artificial Sequence
  Description of Artificial Sequence: Synthetic oligonucleotide
gguaacggaagcggugugc

SEQ ID NO: 690851 - RNA, 19 nt, Artificial Sequence
  Description of Artificial Sequence: Synthetic oligonucleotide
gacaccgguaggauacaca

SEQ ID NO: 690852 - RNA, 19 nt, Artificial Sequence
  Description of Artificial Sequence: Synthetic oligonucleotide
aagggccgcugauggccag

SEQ ID NO: 690853 - RNA, 19 nt, Artificial Sequence
  Description of Artificial Sequence: Synthetic oligonucleotide
uggggagcguaaaguucga

SEQ ID NO: 690854 - RNA, 19 nt, Artificial Sequence
  Description of Artificial Sequence: Synthetic oligonucleotide
ggguucgaauuuccucugg

SEQ ID NO: 690855 - RNA, 19 nt, Artificial Sequence
  Description of Artificial Sequence: Synthetic oligonucleotide
cuagaggcucagucaucac

SEQ ID NO: 690856 - RNA, 19 nt, Artificial Sequence
  Description of Artificial Sequence: Synthetic oligonucleotide
cagguaacccucccauguc

SEQ ID NO: 690857 - RNA, 19 nt, Artificial Sequence
  Description of Artificial Sequence: Synthetic oligonucleotide
gagccguacucauucucaa

SEQ ID NO: 690858 - RNA, 19 nt, Artificial Sequence
  Description of Artificial Sequence: Synthetic oligonucleotide
caguuauaaucggcccucc

SEQ ID NO: 690859 - RNA, 19 nt, Artificial Sequence
  Description of Artificial Sequence: Synthetic oligonucleotide
gcaucgagccauugcauuc

SEQ ID NO: 690860 - RNA, 19 nt, Artificial Sequence
  Description of Artificial Sequence: Synthetic oligonucleotide
auaagcccggucacggaca

SEQ ID NO: 690861 - RNA, 19 nt, Artificial Sequence
  Description of Artificial Sequence: Synthetic oligonucleotide
uaggagccguacucauucu

SEQ ID NO: 690862 - RNA, 19 nt, Artificial Sequence
  Description of Artificial Sequence: Synthetic oligonucleotide
cacaguuauaaucggcccu

SEQ ID NO: 690863 - RNA, 19 nt, Artificial Sequence
  Description of Artificial Sequence: Synthetic oligonucleotide
uucaccccaguggucuagc

SEQ ID NO: 690864 - RNA, 19 nt, Artificial Sequence
  Description of Artificial Sequence: Synthetic oligonucleotide
caucgguggugaagagaag

SEQ ID NO: 690865 - RNA, 19 nt, Artificial Sequence
  Description of Artificial Sequence: Synthetic oligonucleotide
uaggcgaacuugggaguug

SEQ ID NO: 690866 - RNA, 19 nt, Artificial Sequence
  Description of Artificial Sequence: Synthetic oligonucleotide
gauguuguuuggggcugac

SEQ ID NO: 690867 - RNA, 19 nt, Artificial Sequence
  Description of Artificial Sequence: Synthetic oligonucleotide
gccgcugauggccagggac

SEQ ID NO: 690868 - RNA, 19 nt, Artificial Sequence
  Description of Artificial Sequence: Synthetic oligonucleotide
gagguauccggaaguaacu

SEQ ID NO: 690869 - RNA, 19 nt, Artificial Sequence
  Description of Artificial Sequence: Synthetic oligonucleotide
gguaacccucccauguccc

SEQ ID NO: 690870 - RNA, 19 nt, Artificial Sequence
  Description of Artificial Sequence: Synthetic oligonucleotide
ccgugauguuguuuggggc

SEQ ID NO: 690871 - RNA, 19 nt, Artificial Sequence
  Description of Artificial Sequence: Synthetic oligonucleotide
ucuagcagccaagcaggua

SEQ ID NO: 690872 - RNA, 19 nt, Artificial Sequence
  Description of Artificial Sequence: Synthetic oligonucleotide
ggcugacgucgucagaaug

SEQ ID NO: 690873 - RNA, 19 nt, Artificial Sequence
  Description of Artificial Sequence: Synthetic oligonucleotide
agcggggcgucguagucau

SEQ ID NO: 690874 - RNA, 19 nt, Artificial Sequence
  Description of Artificial Sequence: Synthetic oligonucleotide
ggcgucguagucauagcug

SEQ ID NO: 690875 - RNA, 19 nt, Artificial Sequence
  Description of Artificial Sequence: Synthetic oligonucleotide
cacguacaucuggauggcg

SEQ ID NO: 690876 - RNA, 19 nt, Artificial Sequence
  Description of Artificial Sequence: Synthetic oligonucleotide
auaaaacguggggagcgua

SEQ ID NO: 690877 - RNA, 19 nt, Artificial Sequence
  Description of Artificial Sequence: Synthetic oligonucleotide
gaauugaucaaagguccuu

SEQ ID NO: 690878 - RNA, 19 nt, Artificial Sequence
  Description of Artificial Sequence: Synthetic oligonucleotide
agcggguagcggcuucuca

SEQ ID NO: 690879 - RNA, 19 nt, Artificial Sequence
  Description of Artificial Sequence: Synthetic oligonucleotide
acgguccccagaaaacuca

SEQ ID NO: 690880 - RNA, 19 nt, Artificial Sequence
  Description of Artificial Sequence: Synthetic oligonucleotide
auaggcgaacuugggaguu

SEQ ID NO: 690881 - RNA, 19 nt, Artificial Sequence
  Description of Artificial Sequence: Synthetic oligonucleotide
gcgaacuugggaguugaug

SEQ ID NO: 690882 - RNA, 19 nt, Artificial Sequence
  Description of Artificial Sequence: Synthetic oligonucleotide
ccauuuggccagugcaggc

SEQ ID NO: 690883 - RNA, 19 nt, Artificial Sequence
  Description of Artificial Sequence: Synthetic oligonucleotide
augcccgagggaauggaga

SEQ ID NO: 690884 - RNA, 19 nt, Artificial Sequence
  Description of Artificial Sequence: Synthetic oligonucleotide
gcaaaauuggucccaccua

SEQ ID NO: 690885 - RNA, 19 nt, Artificial Sequence
  Description of Artificial Sequence: Synthetic oligonucleotide
aagcccggucacggacacc

SEQ ID NO: 690886 - RNA, 19 nt, Artificial Sequence
  Description of Artificial Sequence: Synthetic oligonucleotide
cauaggcgaacuugggagu

SEQ ID NO: 690887 - RNA, 19 nt, Artificial Sequence
  Description of Artificial Sequence: Synthetic oligonucleotide
cucccaauagaagcgaggu

SEQ ID NO: 690888 - RNA, 19 nt, Artificial Sequence
  Description of Artificial Sequence: Synthetic oligonucleotide
cgcucaaggauuccuuggg

SEQ ID NO: 690889 - RNA, 19 nt, Artificial Sequence
  Description of Artificial Sequence: Synthetic oligonucleotide
aggcgaacuugggaguuga

SEQ ID NO: 690890 - RNA, 19 nt, Artificial Sequence
  Description of Artificial Sequence: Synthetic oligonucleotide
cagaagaucgaagaacaau

SEQ ID NO: 690891 - RNA, 19 nt, Artificial Sequence
  Description of Artificial Sequence: Synthetic oligonucleotide
gcggguagcggcuucucac

SEQ ID NO: 690892 - RNA, 19 nt, Artificial Sequence
  Description of Artificial Sequence: Synthetic oligonucleotide
ugccacaccgaaggaaguu

SEQ ID NO: 690893 - RNA, 19 nt, Artificial Sequence
  Description of Artificial Sequence: Synthetic oligonucleotide
gcaccgugauguuguuugg

SEQ ID NO: 690894 - RNA, 19 nt, Artificial Sequence
  Description of Artificial Sequence: Synthetic oligonucleotide
ggagccguacucauucuca

SEQ ID NO: 690895 - RNA, 19 nt, Artificial Sequence
  Description of Artificial Sequence: Synthetic oligonucleotide
ccacuguaucgagacacgg

SEQ ID NO: 690896 - RNA, 19 nt, Artificial Sequence
  Description of Artificial Sequence: Synthetic oligonucleotide
auaggaccuuuugggacau

SEQ ID NO: 690897 - RNA, 19 nt, Artificial Sequence
  Description of Artificial Sequence: Synthetic oligonucleotide
ucacacgguuucgcucaag

SEQ ID NO: 690898 - RNA, 19 nt, Artificial Sequence
  Description of Artificial Sequence: Synthetic oligonucleotide
cauuuaugccucugccaua

SEQ ID NO: 690899 - RNA, 19 nt, Artificial Sequence
  Description of Artificial Sequence: Synthetic oligonucleotide
gaacuuucucagagcaacu

SEQ ID NO: 690900 - RNA, 19 nt, Artificial Sequence
  Description of Artificial Sequence: Synthetic oligonucleotide
aucggcccuccauucuggu

SEQ ID NO: 690901 - RNA, 19 nt, Artificial Sequence
  Description of Artificial Sequence: Synthetic oligonucleotide
ggacugucagccauuuauc

SEQ ID NO: 690902 - RNA, 19 nt, Artificial Sequence
  Description of Artificial Sequence: Synthetic oligonucleotide
gccagaccgaucuggaaaa

SEQ ID NO: 690903 - RNA, 19 nt, Artificial Sequence
  Description of Artificial Sequence: Synthetic oligonucleotide
auuccacgucacggucccc

SEQ ID NO: 690904 - RNA, 19 nt, Artificial Sequence
  Description of Artificial Sequence: Synthetic oligonucleotide
cccgugcaggccaguaucg

SEQ ID NO: 690905 - RNA, 19 nt, Artificial Sequence
  Description of Artificial Sequence: Synthetic oligonucleotide
agccaguauagaacucaga

SEQ ID NO: 690906 - RNA, 19 nt, Artificial Sequence
  Description of Artificial Sequence: Synthetic oligonucleotide
agaaugugccugggcacaa

SEQ ID NO: 690907 - RNA, 19 nt, Artificial Sequence
  Description of Artificial Sequence: Synthetic oligonucleotide
agguauccugcggcagauc

SEQ ID NO: 690908 - RNA, 19 nt, Artificial Sequence
  Description of Artificial Sequence: Synthetic oligonucleotide
ggccugucgacaaacucca

SEQ ID NO: 690909 - RNA, 19 nt, Artificial Sequence
  Description of Artificial Sequence: Synthetic oligonucleotide
uuguucgguacagcacaua

SEQ ID NO: 690910 - RNA, 19 nt, Artificial Sequence
  Description of Artificial Sequence: Synthetic oligonucleotide
gccguugauccacaccuga

SEQ ID NO: 690911 - RNA, 19 nt, Artificial Sequence
  Description of Artificial Sequence: Synthetic oligonucleotide
aucgagccauugcauucuu

SEQ ID NO: 690912 - RNA, 19 nt, Artificial Sequence
  Description of Artificial Sequence: Synthetic oligonucleotide
ccuagaggcucagucauca

SEQ ID NO: 690913 - RNA, 19 nt, Artificial Sequence
  Description of Artificial Sequence: Synthetic oligonucleotide
ccucuggauuaggaaagcc

SEQ ID NO: 690914 - RNA, 19 nt, Artificial Sequence
  Description of Artificial Sequence: Synthetic oligonucleotide
agcgagguauccggaagua

SEQ ID NO: 690915 - RNA, 19 nt, Artificial Sequence
  Description of Artificial Sequence: Synthetic oligonucleotide
auucgccccaucgguggug

SEQ ID NO: 690916 - RNA, 19 nt, Artificial Sequence
  Description of Artificial Sequence: Synthetic oligonucleotide
cggaugacccauuuggcca

SEQ ID NO: 690917 - RNA, 19 nt, Artificial Sequence
  Description of Artificial Sequence: Synthetic oligonucleotide
gucaccugugggccccgug

SEQ ID NO: 690918 - RNA, 19 nt, Artificial Sequence
  Description of Artificial Sequence: Synthetic oligonucleotide
cucacucagcggggcgucg

SEQ ID NO: 690919 - RNA, 19 nt, Artificial Sequence
  Description of Artificial Sequence: Synthetic oligonucleotide
guccucccaauagaagcga

SEQ ID NO: 690920 - RNA, 19 nt, Artificial Sequence
  Description of Artificial Sequence: Synthetic oligonucleotide
ccguugauccacaccugac

SEQ ID NO: 690921 - RNA, 19 nt, Artificial Sequence
  Description of Artificial Sequence: Synthetic oligonucleotide
ggggcugacgucgucagaa

SEQ ID NO: 690922 - RNA, 19 nt, Artificial Sequence
  Description of Artificial Sequence: Synthetic oligonucleotide
aguaucggccaagguuaaa

SEQ ID NO: 690923 - RNA, 19 nt, Artificial Sequence
  Description of Artificial Sequence: Synthetic oligonucleotide
aggccaggcaaugucucua

SEQ ID NO: 690924 - RNA, 19 nt, Artificial Sequence
  Description of Artificial Sequence: Synthetic oligonucleotide
cguggggagcguaaaguuc

SEQ ID NO: 690925 - RNA, 19 nt, Artificial Sequence
  Description of Artificial Sequence: Synthetic oligonucleotide
caccgaaggaaguuuucau

SEQ ID NO: 690926 - RNA, 19 nt, Artificial Sequence
  Description of Artificial Sequence: Synthetic oligonucleotide
cggguagcggcuucucacg

SEQ ID NO: 690927 - RNA, 19 nt, Artificial Sequence
  Description of Artificial Sequence: Synthetic oligonucleotide
gggugcguacugcagccuc

SEQ ID NO: 690928 - RNA, 19 nt, Artificial Sequence
  Description of Artificial Sequence: Synthetic oligonucleotide
gcauucuugaggaaguguu

SEQ ID NO: 690929 - RNA, 19 nt, Artificial Sequence
  Description of Artificial Sequence: Synthetic oligonucleotide
aucggccugucgacaaacu

SEQ ID NO: 690930 - RNA, 19 nt, Artificial Sequence
  Description of Artificial Sequence: Synthetic oligonucleotide
gcugacgucgucagaaugu

SEQ ID NO: 690931 - RNA, 19 nt, Artificial Sequence
  Description of Artificial Sequence: Synthetic oligonucleotide
ccgguccucccaauagaag

SEQ ID NO: 690932 - RNA, 19 nt, Artificial Sequence
  Description of Artificial Sequence: Synthetic oligonucleotide
ccgguaggauacacacacc

SEQ ID NO: 690933 - RNA, 19 nt, Artificial Sequence
  Description of Artificial Sequence: Synthetic oligonucleotide
gguuucgcucaaggauucc

SEQ ID NO: 690934 - RNA, 19 nt, Artificial Sequence
  Description of Artificial Sequence: Synthetic oligonucleotide
caucgagccauugcauucu

SEQ ID NO: 690935 - RNA, 19 nt, Artificial Sequence
  Description of Artificial Sequence: Synthetic oligonucleotide
cauaaaacguggggagcgu

SEQ ID NO: 690936 - RNA, 19 nt, Artificial Sequence
  Description of Artificial Sequence: Synthetic oligonucleotide
cggacaccauugaagggug

SEQ ID NO: 690937 - RNA, 19 nt, Artificial Sequence
  Description of Artificial Sequence: Synthetic oligonucleotide
ggggcgucguagucauagc

SEQ ID NO: 690938 - RNA, 19 nt, Artificial Sequence
  Description of Artificial Sequence: Synthetic oligonucleotide
caccugauaaauccaccuu

SEQ ID NO: 690939 - RNA, 19 nt, Artificial Sequence
  Description of Artificial Sequence: Synthetic oligonucleotide
cccguccacagccacauaa

SEQ ID NO: 690940 - RNA, 19 nt, Artificial Sequence
  Description of Artificial Sequence: Synthetic oligonucleotide
ccccgugcaggccaguauc

SEQ ID NO: 690941 - RNA, 19 nt, Artificial Sequence
  Description of Artificial Sequence: Synthetic oligonucleotide
cggggcgucguagucauag

SEQ ID NO: 690942 - RNA, 19 nt, Artificial Sequence
  Description of Artificial Sequence: Synthetic oligonucleotide
acgucacgguccccagaaa

SEQ ID NO: 690943 - RNA, 19 nt, Artificial Sequence
  Description of Artificial Sequence: Synthetic oligonucleotide
cgugauguuguuuggggcu

SEQ ID NO: 690944 - RNA, 19 nt, Artificial Sequence
  Description of Artificial Sequence: Synthetic oligonucleotide
cccuguauguccagggaua

SEQ ID NO: 690945 - RNA, 19 nt, Artificial Sequence
  Description of Artificial Sequence: Synthetic oligonucleotide
ggacgucauugcccagaug

SEQ ID NO: 690946 - RNA, 19 nt, Artificial Sequence
  Description of Artificial Sequence: Synthetic oligonucleotide
cagggauaucacacgguuu

SEQ ID NO: 690947 - RNA, 19 nt, Artificial Sequence
  Description of Artificial Sequence: Synthetic oligonucleotide
gggccgcugauggccaggg

SEQ ID NO: 690948 - RNA, 19 nt, Artificial Sequence
  Description of Artificial Sequence: Synthetic oligonucleotide
ggcaucgagccauugcauu

SEQ ID NO: 690949 - RNA, 19 nt, Artificial Sequence
  Description of Artificial Sequence: Synthetic oligonucleotide
ggaaacgcagguagucaua

SEQ ID NO: 690950 - RNA, 19 nt, Artificial Sequence
  Description of Artificial Sequence: Synthetic oligonucleotide
ggacaccgguaggauacac

SEQ ID NO: 690951 - RNA, 19 nt, Artificial Sequence
  Description of Artificial Sequence: Synthetic oligonucleotide
ggaccccguccacagccac

SEQ ID NO: 690952 - RNA, 19 nt, Artificial Sequence
  Description of Artificial Sequence: Synthetic oligonucleotide
guuguucgguacagcacau

SEQ ID NO: 690953 - RNA, 19 nt, Artificial Sequence
  Description of Artificial Sequence: Synthetic oligonucleotide
gucaagcguccaucguggu

SEQ ID NO: 690954 - RNA, 19 nt, Artificial Sequence
  Description of Artificial Sequence: Synthetic oligonucleotide
cgguuucgcucaaggauuc

SEQ ID NO: 690955 - RNA, 19 nt, Artificial Sequence
  Description of Artificial Sequence: Synthetic oligonucleotide
cgguaggauacacacaccu

SEQ ID NO: 690956 - RNA, 19 nt, Artificial Sequence
  Description of Artificial Sequence: Synthetic oligonucleotide
ccgugcaggccaguaucgg

SEQ ID NO: 690957 - RNA, 19 nt, Artificial Sequence
  Description of Artificial Sequence: Synthetic oligonucleotide
cagcggggcgucguaguca

SEQ ID NO: 690958 - RNA, 19 nt, Artificial Sequence
  Description of Artificial Sequence: Synthetic oligonucleotide
ccagaccgaucuggaaaag

SEQ ID NO: 690959 - RNA, 19 nt, Artificial Sequence
  Description of Artificial Sequence: Synthetic oligonucleotide
gcccgagggaauggagaag

SEQ ID NO: 690960 - RNA, 19 nt, Artificial Sequence
  Description of Artificial Sequence: Synthetic oligonucleotide
gccagggaccugccaauaa

SEQ ID NO: 690961 - RNA, 19 nt, Artificial Sequence
  Description of Artificial Sequence: Synthetic oligonucleotide
ccagggauaucacacgguu

SEQ ID NO: 690962 - RNA, 19 nt, Artificial Sequence
  Description of Artificial Sequence: Synthetic oligonucleotide
gccgguccucccaauagaa

SEQ ID NO: 690963 - RNA, 19 nt, Artificial Sequence
  Description of Artificial Sequence: Synthetic oligonucleotide
cauucgccccaucgguggu

SEQ ID NO: 690964 - RNA, 19 nt, Artificial Sequence
  Description of Artificial Sequence: Synthetic oligonucleotide
cgacaaacuccacgguaca

SEQ ID NO: 690965 - RNA, 19 nt, Artificial Sequence
  Description of Artificial Sequence: Synthetic oligonucleotide
gguucaccccaguggucua

SEQ ID NO: 690966 - RNA, 19 nt, Artificial Sequence
  Description of Artificial Sequence: Synthetic oligonucleotide
gcgagguauccggaaguaa

SEQ ID NO: 690967 - RNA, 19 nt, Artificial Sequence
  Description of Artificial Sequence: Synthetic oligonucleotide
ccccaucgguggugaagag

SEQ ID NO: 690968 - RNA, 19 nt, Artificial Sequence
  Description of Artificial Sequence: Synthetic oligonucleotide
cagcggguagcggcuucuc

SEQ ID NO: 690969 - RNA, 19 nt, Artificial Sequence
  Description of Artificial Sequence: Synthetic oligonucleotide
ccacgguacacagcucuga

SEQ ID NO: 690970 - RNA, 19 nt, Artificial Sequence
  Description of Artificial Sequence: Synthetic oligonucleotide
cacucagcggggcgucgua

SEQ ID NO: 690971 - RNA, 19 nt, Artificial Sequence
  Description of Artificial Sequence: Synthetic oligonucleotide
gggguucaccccagugguc

SEQ ID NO: 690972 - RNA, 19 nt, Artificial Sequence
  Description of Artificial Sequence: Synthetic oligonucleotide
ccagggaccugccaauaau

SEQ ID NO: 690973 - RNA, 19 nt, Artificial Sequence
  Description of Artificial Sequence: Synthetic oligonucleotide
gccacaccgaaggaaguuu

SEQ ID NO: 690974 - RNA, 19 nt, Artificial Sequence
  Description of Artificial Sequence: Synthetic oligonucleotide
ggccaguaucggccaaggu

SEQ ID NO: 690975 - RNA, 19 nt, Artificial Sequence
  Description of Artificial Sequence: Synthetic oligonucleotide
ggugagcguuccagcucca

SEQ ID NO: 690976 - RNA, 19 nt, Artificial Sequence
  Description of Artificial Sequence: Synthetic oligonucleotide
ggauggcguucagcccagc

SEQ ID NO: 690977 - RNA, 19 nt, Artificial Sequence
  Description of Artificial Sequence: Synthetic oligonucleotide
cuggccccacgggcaagca

SEQ ID NO: 690978 - RNA, 19 nt, Artificial Sequence
  Description of Artificial Sequence: Synthetic oligonucleotide
gcggcagaucugggaugcc

SEQ ID NO: 690979 - RNA, 19 nt, Artificial Sequence
  Description of Artificial Sequence: Synthetic oligonucleotide
gggcugacgucgucagaau

SEQ ID NO: 690980 - RNA, 19 nt, Artificial Sequence
  Description of Artificial Sequence: Synthetic oligonucleotide
ggaccuuuugggacaucuu

SEQ ID NO: 690981 - RNA, 19 nt, Artificial Sequence
  Description of Artificial Sequence: Synthetic oligonucleotide
cgagacacggaugacccau

SEQ ID NO: 690982 - RNA, 19 nt, Artificial Sequence
  Description of Artificial Sequence: Synthetic oligonucleotide
gggcaucgagccauugcau

SEQ ID NO: 690983 - RNA, 19 nt, Artificial Sequence
  Description of Artificial Sequence: Synthetic oligonucleotide
cacgggcaagcaggucaua

SEQ ID NO: 690984 - RNA, 19 nt, Artificial Sequence
  Description of Artificial Sequence: Synthetic oligonucleotide
cgucguagucauagcuggu

SEQ ID NO: 690985 - RNA, 19 nt, Artificial Sequence
  Description of Artificial Sequence: Synthetic oligonucleotide
gccccgugcaggccaguau

SEQ ID NO: 690986 - RNA, 19 nt, Artificial Sequence
  Description of Artificial Sequence: Synthetic oligonucleotide
ggcgaacuugggaguugau

SEQ ID NO: 690987 - RNA, 19 nt, Artificial Sequence
  Description of Artificial Sequence: Synthetic oligonucleotide
ccccacgggcaagcagguc

SEQ ID NO: 690988 - RNA, 19 nt, Artificial Sequence
  Description of Artificial Sequence: Synthetic oligonucleotide
cccucccaugucccacucu

SEQ ID NO: 690989 - RNA, 19 nt, Artificial Sequence
  Description of Artificial Sequence: Synthetic oligonucleotide
gcggggcgucguagucaua

SEQ ID NO: 690990 - RNA, 19 nt, Artificial Sequence
  Description of Artificial Sequence: Synthetic oligonucleotide
uggaauauugguuagagug

SEQ ID NO: 690991 - RNA, 19 nt, Artificial Sequence
  Description of Artificial Sequence: Synthetic oligonucleotide
auauguggaagcuaaaugg

SEQ ID NO: 690992 - RNA, 19 nt, Artificial Sequence
  Description of Artificial Sequence: Synthetic oligonucleotide
aaacguuauucccaguucc

SEQ ID NO: 690993 - RNA, 19 nt, Artificial Sequence
  Description of Artificial Sequence: Synthetic oligonucleotide
cucauaaagacccagaaag

SEQ ID NO: 690994 - RNA, 19 nt, Artificial Sequence
  Description of Artificial Sequence: Synthetic oligonucleotide
agcaacaacaacuuuauag

SEQ ID NO: 690995 - RNA, 19 nt, Artificial Sequence
  Description of Artificial Sequence: Synthetic oligonucleotide
uuuauaucaacacuccacc

SEQ ID NO: 690996 - RNA, 19 nt, Artificial Sequence
  Description of Artificial Sequence: Synthetic oligonucleotide
gacuuuguaggcuacauag

SEQ ID NO: 690997 - RNA, 19 nt, Artificial Sequence
  Description of Artificial Sequence: Synthetic oligonucleotide
cugaacaucgguaagcucg

SEQ ID NO: 690998 - RNA, 19 nt, Artificial Sequence
  Description of Artificial Sequence: Synthetic oligonucleotide
aguaauaccaacugucagg

SEQ ID NO: 690999 - RNA, 19 nt, Artificial Sequence
  Description of Artificial Sequence: Synthetic oligonucleotide
uuagguaagaaaauauaug

SEQ ID NO: 691000 - RNA, 19 nt, Artificial Sequence
  Description of Artificial Sequence: Synthetic oligonucleotide
uguugaacaucuuaaggag

SEQ ID NO: 691001 - RNA, 19 nt, Artificial Sequence
  Description of Artificial Sequence: Synthetic oligonucleotide
aaccuauaauuccaccacc

SEQ ID NO: 691002 - RNA, 19 nt, Artificial Sequence
  Description of Artificial Sequence: Synthetic oligonucleotide
uauaucaacacuccacccc

SEQ ID NO: 691003 - RNA, 19 nt, Artificial Sequence
  Description of Artificial Sequence: Synthetic oligonucleotide
auuuauaucaacacuccac

SEQ ID NO: 691004 - RNA, 19 nt, Artificial Sequence
  Description of Artificial Sequence: Synthetic oligonucleotide
aauggaauauugguuagag

SEQ ID NO: 691005 - RNA, 19 nt, Artificial Sequence
  Description of Artificial Sequence: Synthetic oligonucleotide
uucuccucgaaccaaaugu

SEQ ID NO: 691006 - RNA, 19 nt, Artificial Sequence
  Description of Artificial Sequence: Synthetic oligonucleotide
ucuuaaggagaccagcacc

SEQ ID NO: 691007 - RNA, 19 nt, Artificial Sequence
  Description of Artificial Sequence: Synthetic oligonucleotide
auauuuauaucaacacucc

SEQ ID NO: 691008 - RNA, 19 nt, Artificial Sequence
  Description of Artificial Sequence: Synthetic oligonucleotide
aacuaagaguuuuggcugg

SEQ ID NO: 691009 - RNA, 19 nt, Artificial Sequence
  Description of Artificial Sequence: Synthetic oligonucleotide
aagcgcuacagccaccacc

SEQ ID NO: 691010 - RNA, 19 nt, Artificial Sequence
  Description of Artificial Sequence: Synthetic oligonucleotide
ucggacaauggcuaggagg

SEQ ID NO: 691011 - RNA, 19 nt, Artificial Sequence
  Description of Artificial Sequence: Synthetic oligonucleotide
gaugauucacaauucuuug

SEQ ID NO: 691012 - RNA, 19 nt, Artificial Sequence
  Description of Artificial Sequence: Synthetic oligonucleotide
ugucuuagcagaauuugug

SEQ ID NO: 691013 - RNA, 19 nt, Artificial Sequence
  Description of Artificial Sequence: Synthetic oligonucleotide
accccuaaccuauaauucc

SEQ ID NO: 691014 - RNA, 19 nt, Artificial Sequence
  Description of Artificial Sequence: Synthetic oligonucleotide
gauggguccaucgaggagg

SEQ ID NO: 691015 - RNA, 19 nt, Artificial Sequence
  Description of Artificial Sequence: Synthetic oligonucleotide
uucugauggagcaugagaa

SEQ ID NO: 691016 - RNA, 19 nt, Artificial Sequence
  Description of Artificial Sequence: Synthetic oligonucleotide
ucugguuccucauggaucc

SEQ ID NO: 691017 - RNA, 19 nt, Artificial Sequence
  Description of Artificial Sequence: Synthetic oligonucleotide
aucaguaauaccaacuguc

SEQ ID NO: 691018 - RNA, 19 nt, Artificial Sequence
  Description of Artificial Sequence: Synthetic oligonucleotide
uugacuagagucucuacca

SEQ ID NO: 691019 - RNA, 19 nt, Artificial Sequence
  Description of Artificial Sequence: Synthetic oligonucleotide
agcuaaauggaauauuggu

SEQ ID NO: 691020 - RNA, 19 nt, Artificial Sequence
  Description of Artificial Sequence: Synthetic oligonucleotide
uaacaugguaggaugauuc

SEQ ID NO: 691021 - RNA, 19 nt, Artificial Sequence
  Description of Artificial Sequence: Synthetic oligonucleotide
ucaguaauaccaacuguca

SEQ ID NO: 691022 - RNA, 19 nt, Artificial Sequence
  Description of Artificial Sequence: Synthetic oligonucleotide
gaagguaccuuuccaaagc

SEQ ID NO: 691023 - RNA, 19 nt, Artificial Sequence
  Description of Artificial Sequence: Synthetic oligonucleotide
agugcugcgagcaaagcgc

SEQ ID NO: 691024 - RNA, 19 nt, Artificial Sequence
  Description of Artificial Sequence: Synthetic oligonucleotide
uggagcaugagaacuaaga

SEQ ID NO: 691025 - RNA, 19 nt, Artificial Sequence
  Description of Artificial Sequence: Synthetic oligonucleotide
uauuuauaucaacacucca

SEQ ID NO: 691026 - RNA, 19 nt, Artificial Sequence
  Description of Artificial Sequence: Synthetic oligonucleotide
aucgaaucacuucuuuucg

SEQ ID NO: 691027 - RNA, 19 nt, Artificial Sequence
  Description of Artificial Sequence: Synthetic oligonucleotide
uccuauuaggcucuucuca

SEQ ID NO: 691028 - RNA, 19 nt, Artificial Sequence
  Description of Artificial Sequence: Synthetic oligonucleotide
auaggcauucauaccaucc

SEQ ID NO: 691029 - RNA, 19 nt, Artificial Sequence
  Description of Artificial Sequence: Synthetic oligonucleotide
ugagaacuaagaguuuugg

SEQ ID NO: 691030 - RNA, 19 nt, Artificial Sequence
  Description of Artificial Sequence: Synthetic oligonucleotide
ugaagguaccuuuccaaag

SEQ ID NO: 691031 - RNA, 19 nt, Artificial Sequence
  Description of Artificial Sequence: Synthetic oligonucleotide
acuuuugucauuccuauua

SEQ ID NO: 691032 - RNA, 19 nt, Artificial Sequence
  Description of Artificial Sequence: Synthetic oligonucleotide
cugaaagcuucucauaaag

SEQ ID NO: 691033 - RNA, 19 nt, Artificial Sequence
  Description of Artificial Sequence: Synthetic oligonucleotide
uucacaauucuuugaaggu

SEQ ID NO: 691034 - RNA, 19 nt, Artificial Sequence
  Description of Artificial Sequence: Synthetic oligonucleotide
uucauacugagucacccga

SEQ ID NO: 691035 - RNA, 19 nt, Artificial Sequence
  Description of Artificial Sequence: Synthetic oligonucleotide
uucgccucaggaaggaagg

SEQ ID NO: 691036 - RNA, 19 nt, Artificial Sequence
  Description of Artificial Sequence: Synthetic oligonucleotide
agcgccagugaaaauaucc

SEQ ID NO: 691037 - RNA, 19 nt, Artificial Sequence
  Description of Artificial Sequence: Synthetic oligonucleotide
aaauguccgauucauucau

SEQ ID NO: 691038 - RNA, 19 nt, Artificial Sequence
  Description of Artificial Sequence: Synthetic oligonucleotide
cuaaauggaauauugguua

SEQ ID NO: 691039 - RNA, 19 nt, Artificial Sequence
  Description of Artificial Sequence: Synthetic oligonucleotide
uuauaucaacacuccaccc

SEQ ID NO: 691040 - RNA, 19 nt, Artificial Sequence
  Description of Artificial Sequence: Synthetic oligonucleotide
gucauuguuggccuguucc

SEQ ID NO: 691041 - RNA, 19 nt, Artificial Sequence
  Description of Artificial Sequence: Synthetic oligonucleotide
uaggucuuuugcuuaaagc

SEQ ID NO: 691042 - RNA, 19 nt, Artificial Sequence
  Description of Artificial Sequence: Synthetic oligonucleotide
gucccuuucauacugaguc

SEQ ID NO: 691043 - RNA, 19 nt, Artificial Sequence
  Description of Artificial Sequence: Synthetic oligonucleotide
uuauuaugugugcugucca

SEQ ID NO: 691044 - RNA, 19 nt, Artificial Sequence
  Description of Artificial Sequence: Synthetic oligonucleotide
ucauaaagacccagaaagu

SEQ ID NO: 691045 - RNA, 19 nt, Artificial Sequence
  Description of Artificial Sequence: Synthetic oligonucleotide
uuugaagguaccuuuccaa

SEQ ID NO: 691046 - RNA, 19 nt, Artificial Sequence
  Description of Artificial Sequence: Synthetic oligonucleotide
uauuaggcucuucucaggu

SEQ ID NO: 691047 - RNA, 19 nt, Artificial Sequence
  Description of Artificial Sequence: Synthetic oligonucleotide
gagaacuaagaguuuuggc

SEQ ID NO: 691048 - RNA, 19 nt, Artificial Sequence
  Description of Artificial Sequence: Synthetic oligonucleotide
uauuaugugugcuguccag

SEQ ID NO: 691049 - RNA, 19 nt, Artificial Sequence
  Description of Artificial Sequence: Synthetic oligonucleotide
guuauuaugugugcugucc

SEQ ID NO: 691050 - RNA, 19 nt, Artificial Sequence
  Description of Artificial Sequence: Synthetic oligonucleotide
aaaaggcagcgucacgcag

SEQ ID NO: 691051 - RNA, 19 nt, Artificial Sequence
  Description of Artificial Sequence: Synthetic oligonucleotide
auaucaacacuccaccccu

SEQ ID NO: 691052 - RNA, 19 nt, Artificial Sequence
  Description of Artificial Sequence: Synthetic oligonucleotide
aacuuuauagacagugcug

SEQ ID NO: 691053 - RNA, 19 nt, Artificial Sequence
  Description of Artificial Sequence: Synthetic oligonucleotide
aaaucgaaucacuucuuuu

SEQ ID NO: 691054 - RNA, 19 nt, Artificial Sequence
  Description of Artificial Sequence: Synthetic oligonucleotide
uguggaagcuaaauggaau

SEQ ID NO: 691055 - RNA, 19 nt, Artificial Sequence
  Description of Artificial Sequence: Synthetic oligonucleotide
auacugagucacccgagac

SEQ ID NO: 691056 - RNA, 19 nt, Artificial Sequence
  Description of Artificial Sequence: Synthetic oligonucleotide
aacaucgguaagcucgucu

SEQ ID NO: 691057 - RNA, 19 nt, Artificial Sequence
  Description of Artificial Sequence: Synthetic oligonucleotide
ucgaaucacuucuuuucgg

SEQ ID NO: 691058 - RNA, 19 nt, Artificial Sequence
  Description of Artificial Sequence: Synthetic oligonucleotide
cuaaccuauaauuccacca

SEQ ID NO: 691059 - RNA, 19 nt, Artificial Sequence
  Description of Artificial Sequence: Synthetic oligonucleotide
cagaaaacguuauucccag

SEQ ID NO: 691060 - RNA, 19 nt, Artificial Sequence
  Description of Artificial Sequence: Synthetic oligonucleotide
gagggagucgcuccgaagc

SEQ ID NO: 691061 - RNA, 19 nt, Artificial Sequence
  Description of Artificial Sequence: Synthetic oligonucleotide
aauucugcagaagaagaau

SEQ ID NO: 691062 - RNA, 19 nt, Artificial Sequence
  Description of Artificial Sequence: Synthetic oligonucleotide
aacaugguaggaugauuca

SEQ ID NO: 691063 - RNA, 19 nt, Artificial Sequence
  Description of Artificial Sequence: Synthetic oligonucleotide
aucagauggguccaucgag

SEQ ID NO: 691064 - RNA, 19 nt, Artificial Sequence
  Description of Artificial Sequence: Synthetic oligonucleotide
uuuauagacagugcugcga

SEQ ID NO: 691065 - RNA, 19 nt, Artificial Sequence
  Description of Artificial Sequence: Synthetic oligonucleotide
auggaucccauuuucuuug

SEQ ID NO: 691066 - RNA, 19 nt, Artificial Sequence
  Description of Artificial Sequence: Synthetic oligonucleotide
ucagcuagcugggagagug

SEQ ID NO: 691067 - RNA, 19 nt, Artificial Sequence
  Description of Artificial Sequence: Synthetic oligonucleotide
ucuuuucggacaacuguug

SEQ ID NO: 691068 - RNA, 19 nt, Artificial Sequence
  Description of Artificial Sequence: Synthetic oligonucleotide
acucaaagccugcguaccc

SEQ ID NO: 691069 - RNA, 19 nt, Artificial Sequence
  Description of Artificial Sequence: Synthetic oligonucleotide
uuacuucugaacaucggua

SEQ ID NO: 691070 - RNA, 19 nt, Artificial Sequence
  Description of Artificial Sequence: Synthetic oligonucleotide
gagagugcucgugauaggg

SEQ ID NO: 691071 - RNA, 19 nt, Artificial Sequence
  Description of Artificial Sequence: Synthetic oligonucleotide
uguaggagugucuccaggu

SEQ ID NO: 691072 - RNA, 19 nt, Artificial Sequence
  Description of Artificial Sequence: Synthetic oligonucleotide
guuagagugacugggaaca

SEQ ID NO: 691073 - RNA, 19 nt, Artificial Sequence
  Description of Artificial Sequence: Synthetic oligonucleotide
aagucccuuucauacugag

SEQ ID NO: 691074 - RNA, 19 nt, Artificial Sequence
  Description of Artificial Sequence: Synthetic oligonucleotide
ugugagaggugcgcgaggg

SEQ ID NO: 691075 - RNA, 19 nt, Artificial Sequence
  Description of Artificial Sequence: Synthetic oligonucleotide
cuuaaggagaccagcacca

SEQ ID NO: 691076 - RNA, 19 nt, Artificial Sequence
  Description of Artificial Sequence: Synthetic oligonucleotide
acaucgguaagcucgucug

SEQ ID NO: 691077 - RNA, 19 nt, Artificial Sequence
  Description of Artificial Sequence: Synthetic oligonucleotide
uuguaacaugguaggauga

SEQ ID NO: 691078 - RNA, 19 nt, Artificial Sequence
  Description of Artificial Sequence: Synthetic oligonucleotide
gagugcucgugauagggcc

SEQ ID NO: 691079 - RNA, 19 nt, Artificial Sequence
  Description of Artificial Sequence: Synthetic oligonucleotide
auuaugugugcuguccagg

SEQ ID NO: 691080 - RNA, 19 nt, Artificial Sequence
  Description of Artificial Sequence: Synthetic oligonucleotide
aaaauauauguggaagcua

SEQ ID NO: 691081 - RNA, 19 nt, Artificial Sequence
  Description of Artificial Sequence: Synthetic oligonucleotide
ggagcaugagaacuaagag

SEQ ID NO: 691082 - RNA, 19 nt, Artificial Sequence
  Description of Artificial Sequence: Synthetic oligonucleotide
guauuuugccagcugcugc

SEQ ID NO: 691083 - RNA, 19 nt, Artificial Sequence
  Description of Artificial Sequence: Synthetic oligonucleotide
ucauacugagucacccgag

SEQ ID NO: 691084 - RNA, 19 nt, Artificial Sequence
  Description of Artificial Sequence: Synthetic oligonucleotide
aauggcuaggaggcgaaug

SEQ ID NO: 691085 - RNA, 19 nt, Artificial Sequence
  Description of Artificial Sequence: Synthetic oligonucleotide
agaguggaagggccgaguc

SEQ ID NO: 691086 - RNA, 19 nt, Artificial Sequence
  Description of Artificial Sequence: Synthetic oligonucleotide
guugaaauccuuucaaagu

SEQ ID NO: 691087 - RNA, 19 nt, Artificial Sequence
  Description of Artificial Sequence: Synthetic oligonucleotide
agcaaagcgcuccagcugu

SEQ ID NO: 691088 - RNA, 19 nt, Artificial Sequence
  Description of Artificial Sequence: Synthetic oligonucleotide
agaguuuuggcuggcauca

SEQ ID NO: 691089 - RNA, 19 nt, Artificial Sequence
  Description of Artificial Sequence: Synthetic oligonucleotide
cuauuaggcucuucucagg

SEQ ID NO: 691090 - RNA, 19 nt, Artificial Sequence
  Description of Artificial Sequence: Synthetic oligonucleotide
ucaggagauggccuucgcc

SEQ ID NO: 691091 - RNA, 19 nt, Artificial Sequence
  Description of Artificial Sequence: Synthetic oligonucleotide
aggaggcgaauguagucac

SEQ ID NO: 691092 - RNA, 19 nt, Artificial Sequence
  Description of Artificial Sequence: Synthetic oligonucleotide
acaugguaggaugauucac

SEQ ID NO: 691093 - RNA, 19 nt, Artificial Sequence
  Description of Artificial Sequence: Synthetic oligonucleotide
gaaucacuucuuuucggac

SEQ ID NO: 691094 - RNA, 19 nt, Artificial Sequence
  Description of Artificial Sequence: Synthetic oligonucleotide
uccagggauagcucuacug

SEQ ID NO: 691095 - RNA, 19 nt, Artificial Sequence
  Description of Artificial Sequence: Synthetic oligonucleotide
gaaaauauauguggaagcu

SEQ ID NO: 691096 - RNA, 19 nt, Artificial Sequence
  Description of Artificial Sequence: Synthetic oligonucleotide
aagccugcguacccacggc

SEQ ID NO: 691097 - RNA, 19 nt, Artificial Sequence
  Description of Artificial Sequence: Synthetic oligonucleotide
caguaauaccaacugucag

SEQ ID NO: 691098 - RNA, 19 nt, Artificial Sequence
  Description of Artificial Sequence: Synthetic oligonucleotide
acacaaucuuucauggcac

SEQ ID NO: 691099 - RNA, 19 nt, Artificial Sequence
  Description of Artificial Sequence: Synthetic oligonucleotide
agcgcuacagccaccaccg

SEQ ID NO: 691100 - RNA, 19 nt, Artificial Sequence
  Description of Artificial Sequence: Synthetic oligonucleotide
aacuauucucuuagguaag

SEQ ID NO: 691101 - RNA, 19 nt, Artificial Sequence
  Description of Artificial Sequence: Synthetic oligonucleotide
ugaacaucgguaagcucgu

SEQ ID NO: 691102 - RNA, 19 nt, Artificial Sequence
  Description of Artificial Sequence: Synthetic oligonucleotide
ccuauuguaggucuuuugc

SEQ ID NO: 691103 - RNA, 19 nt, Artificial Sequence
  Description of Artificial Sequence: Synthetic oligonucleotide
uuuucggacaacuguugaa

SEQ ID NO: 691104 - RNA, 19 nt, Artificial Sequence
  Description of Artificial Sequence: Synthetic oligonucleotide
gagucucuaccacagcaug

SEQ ID NO: 691105 - RNA, 19 nt, Artificial Sequence
  Description of Artificial Sequence: Synthetic oligonucleotide
cuucgccucaggaaggaag

SEQ ID NO: 691106 - RNA, 19 nt, Artificial Sequence
  Description of Artificial Sequence: Synthetic oligonucleotide
ucugcagcguggcuugugc

SEQ ID NO: 691107 - RNA, 19 nt, Artificial Sequence
  Description of Artificial Sequence: Synthetic oligonucleotide
ucugauggagcaugagaac

SEQ ID NO: 691108 - RNA, 19 nt, Artificial Sequence
  Description of Artificial Sequence: Synthetic oligonucleotide
ccaaauguccgauucauuc

SEQ ID NO: 691109 - RNA, 19 nt, Artificial Sequence
  Description of Artificial Sequence: Synthetic oligonucleotide
agagcucccaagcauggcu

SEQ ID NO: 691110 - RNA, 19 nt, Artificial Sequence
  Description of Artificial Sequence: Synthetic oligonucleotide
auccccaaucuuuucagga

SEQ ID NO: 691111 - RNA, 19 nt, Artificial Sequence
  Description of Artificial Sequence: Synthetic oligonucleotide
cagugcugcgagcaaagcg

SEQ ID NO: 691112 - RNA, 19 nt, Artificial Sequence
  Description of Artificial Sequence: Synthetic oligonucleotide
guaggucuuuugcuuaaag

SEQ ID NO: 691113 - RNA, 19 nt, Artificial Sequence
  Description of Artificial Sequence: Synthetic oligonucleotide
acugcuuacuucugaacau

SEQ ID NO: 691114 - RNA, 19 nt, Artificial Sequence
  Description of Artificial Sequence: Synthetic oligonucleotide
uaggaggcgaauguaguca

SEQ ID NO: 691115 - RNA, 19 nt, Artificial Sequence
  Description of Artificial Sequence: Synthetic oligonucleotide
auggcuaggaggcgaaugu

SEQ ID NO: 691116 - RNA, 19 nt, Artificial Sequence
  Description of Artificial Sequence: Synthetic oligonucleotide
auauauguggaagcuaaau

SEQ ID NO: 691117 - RNA, 19 nt, Artificial Sequence
  Description of Artificial Sequence: Synthetic oligonucleotide
ugacuagagucucuaccac

SEQ ID NO: 691118 - RNA, 19 nt, Artificial Sequence
  Description of Artificial Sequence: Synthetic oligonucleotide
ucauagguuggcugugucu

SEQ ID NO: 691119 - RNA, 19 nt, Artificial Sequence
  Description of Artificial Sequence: Synthetic oligonucleotide
gagcaugagaacuaagagu

SEQ ID NO: 691120 - RNA, 19 nt, Artificial Sequence
  Description of Artificial Sequence: Synthetic oligonucleotide
uucccaguuccuaaaccac

SEQ ID NO: 691121 - RNA, 19 nt, Artificial Sequence
  Description of Artificial Sequence: Synthetic oligonucleotide
agacucuuggcaaacugag

SEQ ID NO: 691122 - RNA, 19 nt, Artificial Sequence
  Description of Artificial Sequence: Synthetic oligonucleotide
ugggcucuggaauccuugg

SEQ ID NO: 691123 - RNA, 19 nt, Artificial Sequence
  Description of Artificial Sequence: Synthetic oligonucleotide
auuguaggucuuuugcuua

SEQ ID NO: 691124 - RNA, 19 nt, Artificial Sequence
  Description of Artificial Sequence: Synthetic oligonucleotide
uccgaagcgcuacagccac

SEQ ID NO: 691125 - RNA, 19 nt, Artificial Sequence
  Description of Artificial Sequence: Synthetic oligonucleotide
acuaagaguuuuggcuggc

SEQ ID NO: 691126 - RNA, 19 nt, Artificial Sequence
  Description of Artificial Sequence: Synthetic oligonucleotide
ugguuagagugacugggaa

SEQ ID NO: 691127 - RNA, 19 nt, Artificial Sequence
  Description of Artificial Sequence: Synthetic oligonucleotide
caucuuaaggagaccagca

SEQ ID NO: 691128 - RNA, 19 nt, Artificial Sequence
  Description of Artificial Sequence: Synthetic oligonucleotide
gaaaacguuauucccaguu

SEQ ID NO: 691129 - RNA, 19 nt, Artificial Sequence
  Description of Artificial Sequence: Synthetic oligonucleotide
ggguccaucagaugggucc

SEQ ID NO: 691130 - RNA, 19 nt, Artificial Sequence
  Description of Artificial Sequence: Synthetic oligonucleotide
caaauguccgauucauuca

SEQ ID NO: 691131 - RNA, 19 nt, Artificial Sequence
  Description of Artificial Sequence: Synthetic oligonucleotide
ucacccgagacucccacuc

SEQ ID NO: 691132 - RNA, 19 nt, Artificial Sequence
  Description of Artificial Sequence: Synthetic oligonucleotide
agggauagcucuacugugg

SEQ ID NO: 691133 - RNA, 19 nt, Artificial Sequence
  Description of Artificial Sequence: Synthetic oligonucleotide
agucacccgagacucccac

SEQ ID NO: 691134 - RNA, 19 nt, Artificial Sequence
  Description of Artificial Sequence: Synthetic oligonucleotide
cacaaucuuucauggcacc

SEQ ID NO: 691135 - RNA, 19 nt, Artificial Sequence
  Description of Artificial Sequence: Synthetic oligonucleotide
aauguccgauucauucauc

SEQ ID NO: 691136 - RNA, 19 nt, Artificial Sequence
  Description of Artificial Sequence: Synthetic oligonucleotide
gacuagagucucuaccaca

SEQ ID NO: 691137 - RNA, 19 nt, Artificial Sequence
  Description of Artificial Sequence: Synthetic oligonucleotide
agacucccgcuucuucugc

SEQ ID NO: 691138 - RNA, 19 nt, Artificial Sequence
  Description of Artificial Sequence: Synthetic oligonucleotide
uuguggggcagaguggaag

SEQ ID NO: 691139 - RNA, 19 nt, Artificial Sequence
  Description of Artificial Sequence: Synthetic oligonucleotide
caccccuaaccuauaauuc

SEQ ID NO: 691140 - RNA, 19 nt, Artificial Sequence
  Description of Artificial Sequence: Synthetic oligonucleotide
agagugcucgugauagggc

SEQ ID NO: 691141 - RNA, 19 nt, Artificial Sequence
  Description of Artificial Sequence: Synthetic oligonucleotide
gaagggccgaguccagccg

SEQ ID NO: 691142 - RNA, 19 nt, Artificial Sequence
  Description of Artificial Sequence: Synthetic oligonucleotide
uauagacagugcugcgagc

SEQ ID NO: 691143 - RNA, 19 nt, Artificial Sequence
  Description of Artificial Sequence: Synthetic oligonucleotide
ucggacaacuguugaaauc

SEQ ID NO: 691144 - RNA, 19 nt, Artificial Sequence
  Description of Artificial Sequence: Synthetic oligonucleotide
agggagucgcuccgaagcg

SEQ ID NO: 691145 - RNA, 19 nt, Artificial Sequence
  Description of Artificial Sequence: Synthetic oligonucleotide
ugcaaacugcuuacuucug

SEQ ID NO: 691146 - RNA, 19 nt, Artificial Sequence
  Description of Artificial Sequence: Synthetic oligonucleotide
auggaauauugguuagagu

SEQ ID NO: 691147 - RNA, 19 nt, Artificial Sequence
  Description of Artificial Sequence: Synthetic oligonucleotide
uuccuaaaccacagccuga

SEQ ID NO: 691148 - RNA, 19 nt, Artificial Sequence
  Description of Artificial Sequence: Synthetic oligonucleotide
aggaguaacagaaaacguu

SEQ ID NO: 691149 - RNA, 19 nt, Artificial Sequence
  Description of Artificial Sequence: Synthetic oligonucleotide
cauggcaccaucaggagua

SEQ ID NO: 691150 - RNA, 19 nt, Artificial Sequence
  Description of Artificial Sequence: Synthetic oligonucleotide
cuaggaggcgaauguaguc

SEQ ID NO: 691151 - RNA, 19 nt, Artificial Sequence
  Description of Artificial Sequence: Synthetic oligonucleotide
gcugccaugucuucaugcg

SEQ ID NO: 691152 - RNA, 19 nt, Artificial Sequence
  Description of Artificial Sequence: Synthetic oligonucleotide
aacguuauucccaguuccu

SEQ ID NO: 691153 - RNA, 19 nt, Artificial Sequence
  Description of Artificial Sequence: Synthetic oligonucleotide
cagcaugcagcuuccguag

SEQ ID NO: 691154 - RNA, 19 nt, Artificial Sequence
  Description of Artificial Sequence: Synthetic oligonucleotide
ggcgaauguagucacucag

SEQ ID NO: 691155 - RNA, 19 nt, Artificial Sequence
  Description of Artificial Sequence: Synthetic oligonucleotide
cagggauagcucuacugug

SEQ ID NO: 691156 - RNA, 19 nt, Artificial Sequence
  Description of Artificial Sequence: Synthetic oligonucleotide
ugugguugacuagagucuc

SEQ ID NO: 691157 - RNA, 19 nt, Artificial Sequence
  Description of Artificial Sequence: Synthetic oligonucleotide
ugauagggccguguugucc

SEQ ID NO: 691158 - RNA, 19 nt, Artificial Sequence
  Description of Artificial Sequence: Synthetic oligonucleotide
uccaucgaggaggagggca

SEQ ID NO: 691159 - RNA, 19 nt, Artificial Sequence
  Description of Artificial Sequence: Synthetic oligonucleotide
cagugaaaauauccucccc

SEQ ID NO: 691160 - RNA, 19 nt, Artificial Sequence
  Description of Artificial Sequence: Synthetic oligonucleotide
ucaaagccugcguacccac

SEQ ID NO: 691161 - RNA, 19 nt, Artificial Sequence
  Description of Artificial Sequence: Synthetic oligonucleotide
agucauuguuggccuguuc

SEQ ID NO: 691162 - RNA, 19 nt, Artificial Sequence
  Description of Artificial Sequence: Synthetic oligonucleotide
gcuccgaagcgcuacagcc

SEQ ID NO: 691163 - RNA, 19 nt, Artificial Sequence
  Description of Artificial Sequence: Synthetic oligonucleotide
gaucaguaauaccaacugu

SEQ ID NO: 691164 - RNA, 19 nt, Artificial Sequence
  Description of Artificial Sequence: Synthetic oligonucleotide
gggagagugcucgugauag

SEQ ID NO: 691165 - RNA, 19 nt, Artificial Sequence
  Description of Artificial Sequence: Synthetic oligonucleotide
ucaacacuccaccccuaac

SEQ ID NO: 691166 - RNA, 19 nt, Artificial Sequence
  Description of Artificial Sequence: Synthetic oligonucleotide
aauauauguggaagcuaaa

SEQ ID NO: 691167 - RNA, 19 nt, Artificial Sequence
  Description of Artificial Sequence: Synthetic oligonucleotide
uccggauccaugccaggga

SEQ ID NO: 691168 - RNA, 19 nt, Artificial Sequence
  Description of Artificial Sequence: Synthetic oligonucleotide
uagguuggcugugucuuag

SEQ ID NO: 691169 - RNA, 19 nt, Artificial Sequence
  Description of Artificial Sequence: Synthetic oligonucleotide
gccagugaaaauauccucc

SEQ ID NO: 691170 - RNA, 19 nt, Artificial Sequence
  Description of Artificial Sequence: Synthetic oligonucleotide
guugugacuuuguaggcua

SEQ ID NO: 691171 - RNA, 19 nt, Artificial Sequence
  Description of Artificial Sequence: Synthetic oligonucleotide
gucgaaggcagcucggaca

SEQ ID NO: 691172 - RNA, 19 nt, Artificial Sequence
  Description of Artificial Sequence: Synthetic oligonucleotide
guaauaccaacugucaggu

SEQ ID NO: 691173 - RNA, 19 nt, Artificial Sequence
  Description of Artificial Sequence: Synthetic oligonucleotide
uuguaggucuuuugcuuaa

SEQ ID NO: 691174 - RNA, 19 nt, Artificial Sequence
  Description of Artificial Sequence: Synthetic oligonucleotide
gauagggccguguuguccu

SEQ ID NO: 691175 - RNA, 19 nt, Artificial Sequence
  Description of Artificial Sequence: Synthetic oligonucleotide
gcuggucgaaggcagcucg

SEQ ID NO: 691176 - RNA, 19 nt, Artificial Sequence
  Description of Artificial Sequence: Synthetic oligonucleotide
guggaagcuaaauggaaua

SEQ ID NO: 691177 - RNA, 19 nt, Artificial Sequence
  Description of Artificial Sequence: Synthetic oligonucleotide
accucagcuagcugggaga

SEQ ID NO: 691178 - RNA, 19 nt, Artificial Sequence
  Description of Artificial Sequence: Synthetic oligonucleotide
gaggcgaauguagucacuc

SEQ ID NO: 691179 - RNA, 19 nt, Artificial Sequence
  Description of Artificial Sequence: Synthetic oligonucleotide
gauagcucuacuguggcau

SEQ ID NO: 691180 - RNA, 19 nt, Artificial Sequence
  Description of Artificial Sequence: Synthetic oligonucleotide
cuguaaucucauccuuagc

SEQ ID NO: 691181 - RNA, 19 nt, Artificial Sequence
  Description of Artificial Sequence: Synthetic oligonucleotide
aagggccgaguccagccga

SEQ ID NO: 691182 - RNA, 19 nt, Artificial Sequence
  Description of Artificial Sequence: Synthetic oligonucleotide
cuucuuuucggacaacugu

SEQ ID NO: 691183 - RNA, 19 nt, Artificial Sequence
  Description of Artificial Sequence: Synthetic oligonucleotide
ggguccaucgaggaggagg

SEQ ID NO: 691184 - RNA, 19 nt, Artificial Sequence
  Description of Artificial Sequence: Synthetic oligonucleotide
cagagcuagcucuuuccug

SEQ ID NO: 691185 - RNA, 19 nt, Artificial Sequence
  Description of Artificial Sequence: Synthetic oligonucleotide
acuauucucuuagguaaga

SEQ ID NO: 691186 - RNA, 19 nt, Artificial Sequence
  Description of Artificial Sequence: Synthetic oligonucleotide
cuucuccucgaaccaaaug

SEQ ID NO: 691187 - RNA, 19 nt, Artificial Sequence
  Description of Artificial Sequence: Synthetic oligonucleotide
ucugaacaucgguaagcuc

SEQ ID NO: 691188 - RNA, 19 nt, Artificial Sequence
  Description of Artificial Sequence: Synthetic oligonucleotide
ucgguaagcucgucugugu

SEQ ID NO: 691189 - RNA, 19 nt, Artificial Sequence
  Description of Artificial Sequence: Synthetic oligonucleotide
aagcucgucuguguuguga

SEQ ID NO: 691190 - RNA, 19 nt, Artificial Sequence
  Description of Artificial Sequence: Synthetic oligonucleotide
ugugacuuuguaggcuaca

SEQ ID NO: 691191 - RNA, 19 nt, Artificial Sequence
  Description of Artificial Sequence: Synthetic oligonucleotide
cuuuucggacaacuguuga

SEQ ID NO: 691192 - RNA, 19 nt, Artificial Sequence
  Description of Artificial Sequence: Synthetic oligonucleotide
cauaggcauucauaccauc

SEQ ID NO: 691193 - RNA, 19 nt, Artificial Sequence
  Description of Artificial Sequence: Synthetic oligonucleotide
guaggcuacauaggcauuc

SEQ ID NO: 691194 - RNA, 19 nt, Artificial Sequence
  Description of Artificial Sequence: Synthetic oligonucleotide
agacucccacucuguaauc

SEQ ID NO: 691195 - RNA, 19 nt, Artificial Sequence
  Description of Artificial Sequence: Synthetic oligonucleotide
ggaauauugguuagaguga

SEQ ID NO: 691196 - RNA, 19 nt, Artificial Sequence
  Description of Artificial Sequence: Synthetic oligonucleotide
aucgguaagcucgucugug

SEQ ID NO: 691197 - RNA, 19 nt, Artificial Sequence
  Description of Artificial Sequence: Synthetic oligonucleotide
cuauuguaggucuuuugcu

SEQ ID NO: 691198 - RNA, 19 nt, Artificial Sequence
  Description of Artificial Sequence: Synthetic oligonucleotide
gguaagcucgucuguguug

SEQ ID NO: 691199 - RNA, 19 nt, Artificial Sequence
  Description of Artificial Sequence: Synthetic oligonucleotide
auggccuucgccucaggaa

SEQ ID NO: 691200 - RNA, 19 nt, Artificial Sequence
  Description of Artificial Sequence: Synthetic oligonucleotide
agucgcuccgaagcgcuac

SEQ ID NO: 691201 - RNA, 19 nt, Artificial Sequence
  Description of Artificial Sequence: Synthetic oligonucleotide
uugugacuuuguaggcuac

SEQ ID NO: 691202 - RNA, 19 nt, Artificial Sequence
  Description of Artificial Sequence: Synthetic oligonucleotide
ccuaaccuauaauuccacc

SEQ ID NO: 691203 - RNA, 19 nt, Artificial Sequence
  Description of Artificial Sequence: Synthetic oligonucleotide
cauacugagucacccgaga

SEQ ID NO: 691204 - RNA, 19 nt, Artificial Sequence
  Description of Artificial Sequence: Synthetic oligonucleotide
ggaguaacagaaaacguua

SEQ ID NO: 691205 - RNA, 19 nt, Artificial Sequence
  Description of Artificial Sequence: Synthetic oligonucleotide
cauuguuggccuguuccug

SEQ ID NO: 691206 - RNA, 19 nt, Artificial Sequence
  Description of Artificial Sequence: Synthetic oligonucleotide
agugcucgugauagggccg

SEQ ID NO: 691207 - RNA, 19 nt, Artificial Sequence
  Description of Artificial Sequence: Synthetic oligonucleotide
ugcagcguggcuugugcau

SEQ ID NO: 691208 - RNA, 19 nt, Artificial Sequence
  Description of Artificial Sequence: Synthetic oligonucleotide
uucggacuccggauccaug

SEQ ID NO: 691209 - RNA, 19 nt, Artificial Sequence
  Description of Artificial Sequence: Synthetic oligonucleotide
gcgaauguagucacucagg

SEQ ID NO: 691210 - RNA, 19 nt, Artificial Sequence
  Description of Artificial Sequence: Synthetic oligonucleotide
caccucagcuagcugggag

SEQ ID NO: 691211 - RNA, 19 nt, Artificial Sequence
  Description of Artificial Sequence: Synthetic oligonucleotide
gauggagcaugagaacuaa

SEQ ID NO: 691212 - RNA, 19 nt, Artificial Sequence
  Description of Artificial Sequence: Synthetic oligonucleotide
agcucggacaauggcuagg

SEQ ID NO: 691213 - RNA, 19 nt, Artificial Sequence
  Description of Artificial Sequence: Synthetic oligonucleotide
cuggucgaaggcagcucgg

SEQ ID NO: 691214 - RNA, 19 nt, Artificial Sequence
  Description of Artificial Sequence: Synthetic oligonucleotide
cuugugcauccugccagcg

SEQ ID NO: 691215 - RNA, 19 nt, Artificial Sequence
  Description of Artificial Sequence: Synthetic oligonucleotide
guuuuggcuggcaucaucu

SEQ ID NO: 691216 - RNA, 19 nt, Artificial Sequence
  Description of Artificial Sequence: Synthetic oligonucleotide
gagaccagcaccacucaaa

SEQ ID NO: 691217 - RNA, 19 nt, Artificial Sequence
  Description of Artificial Sequence: Synthetic oligonucleotide
caggagauggccuucgccu

SEQ ID NO: 691218 - RNA, 19 nt, Artificial Sequence
  Description of Artificial Sequence: Synthetic oligonucleotide
ugugcuguccagggauagc

SEQ ID NO: 691219 - RNA, 19 nt, Artificial Sequence
  Description of Artificial Sequence: Synthetic oligonucleotide
caucagauggguccaucga

SEQ ID NO: 691220 - RNA, 19 nt, Artificial Sequence
  Description of Artificial Sequence: Synthetic oligonucleotide
cugcuuacuucugaacauc

SEQ ID NO: 691221 - RNA, 19 nt, Artificial Sequence
  Description of Artificial Sequence: Synthetic oligonucleotide
cucauagguuggcuguguc

SEQ ID NO: 691222 - RNA, 19 nt, Artificial Sequence
  Description of Artificial Sequence: Synthetic oligonucleotide
ugguaggaugauucacaau

SEQ ID NO: 691223 - RNA, 19 nt, Artificial Sequence
  Description of Artificial Sequence: Synthetic oligonucleotide
guggcaucugcaaagagau

SEQ ID NO: 691224 - RNA, 19 nt, Artificial Sequence
  Description of Artificial Sequence: Synthetic oligonucleotide
agccccuucggacuccgga

SEQ ID NO: 691225 - RNA, 19 nt, Artificial Sequence
  Description of Artificial Sequence: Synthetic oligonucleotide
agcgcugccaugucuucau

SEQ ID NO: 691226 - RNA, 19 nt, Artificial Sequence
  Description of Artificial Sequence: Synthetic oligonucleotide
gagcuagcucuuuccugug

SEQ ID NO: 691227 - RNA, 19 nt, Artificial Sequence
  Description of Artificial Sequence: Synthetic oligonucleotide
uggcuagacucuuggcaaa

SEQ ID NO: 691228 - RNA, 19 nt, Artificial Sequence
  Description of Artificial Sequence: Synthetic oligonucleotide
gcuuacuucugaacaucgg

SEQ ID NO: 691229 - RNA, 19 nt, Artificial Sequence
  Description of Artificial Sequence: Synthetic oligonucleotide
agccucggguucugacccc

SEQ ID NO: 691230 - RNA, 19 nt, Artificial Sequence
  Description of Artificial Sequence: Synthetic oligonucleotide
cugugagaggugcgcgagg

SEQ ID NO: 691231 - RNA, 19 nt, Artificial Sequence
  Description of Artificial Sequence: Synthetic oligonucleotide
gggaauguaggagugucuc

SEQ ID NO: 691232 - RNA, 19 nt, Artificial Sequence
  Description of Artificial Sequence: Synthetic oligonucleotide
uaucaacacuccaccccua

SEQ ID NO: 691233 - RNA, 19 nt, Artificial Sequence
  Description of Artificial Sequence: Synthetic oligonucleotide
agcuagcugggagagugcu

SEQ ID NO: 691234 - RNA, 19 nt, Artificial Sequence
  Description of Artificial Sequence: Synthetic oligonucleotide
gguuauuaugugugcuguc

SEQ ID NO: 691235 - RNA, 19 nt, Artificial Sequence
  Description of Artificial Sequence: Synthetic oligonucleotide
auagggccguguuguccuc

SEQ ID NO: 691236 - RNA, 19 nt, Artificial Sequence
  Description of Artificial Sequence: Synthetic oligonucleotide
gcaaacugcuuacuucuga

SEQ ID NO: 691237 - RNA, 19 nt, Artificial Sequence
  Description of Artificial Sequence: Synthetic oligonucleotide
cugugguugacuagagucu

SEQ ID NO: 691238 - RNA, 19 nt, Artificial Sequence
  Description of Artificial Sequence: Synthetic oligonucleotide
uguaggucuuuugcuuaaa

SEQ ID NO: 691239 - RNA, 19 nt, Artificial Sequence
  Description of Artificial Sequence: Synthetic oligonucleotide
uggaauccuuggucccuca

SEQ ID NO: 691240 - RNA, 19 nt, Artificial Sequence
  Description of Artificial Sequence: Synthetic oligonucleotide
guaagcucgucuguguugu

SEQ ID NO: 691241 - RNA, 19 nt, Artificial Sequence
  Description of Artificial Sequence: Synthetic oligonucleotide
ccuuucauacugagucacc

SEQ ID NO: 691242 - RNA, 19 nt, Artificial Sequence
  Description of Artificial Sequence: Synthetic oligonucleotide
guacccacggcacguggca

SEQ ID NO: 691243 - RNA, 19 nt, Artificial Sequence
  Description of Artificial Sequence: Synthetic oligonucleotide
guaggagugucuccaggua

SEQ ID NO: 691244 - RNA, 19 nt, Artificial Sequence
  Description of Artificial Sequence: Synthetic oligonucleotide
ggcucuucucagguggagg

SEQ ID NO: 691245 - RNA, 19 nt, Artificial Sequence
  Description of Artificial Sequence: Synthetic oligonucleotide
cuccgaagcgcuacagcca

SEQ ID NO: 691246 - RNA, 19 nt, Artificial Sequence
  Description of Artificial Sequence: Synthetic oligonucleotide
auagguuggcugugucuua

SEQ ID NO: 691247 - RNA, 19 nt, Artificial Sequence
  Description of Artificial Sequence: Synthetic oligonucleotide
cagcugugagaggugcgcg

SEQ ID NO: 691248 - RNA, 19 nt, Artificial Sequence
  Description of Artificial Sequence: Synthetic oligonucleotide
gugugcuguccagggauag

SEQ ID NO: 691249 - RNA, 19 nt, Artificial Sequence
  Description of Artificial Sequence: Synthetic oligonucleotide
cucggacaauggcuaggag

SEQ ID NO: 691250 - RNA, 19 nt, Artificial Sequence
  Description of Artificial Sequence: Synthetic oligonucleotide
auggagcaugagaacuaag

SEQ ID NO: 691251 - RNA, 19 nt, Artificial Sequence
  Description of Artificial Sequence: Synthetic oligonucleotide
caccgguggcggaagcagc

SEQ ID NO: 691252 - RNA, 19 nt, Artificial Sequence
  Description of Artificial Sequence: Synthetic oligonucleotide
ugccgcagcgccagugaaa

SEQ ID NO: 691253 - RNA, 19 nt, Artificial Sequence
  Description of Artificial Sequence: Synthetic oligonucleotide
ccacucaaagccugcguac

SEQ ID NO: 691254 - RNA, 19 nt, Artificial Sequence
  Description of Artificial Sequence: Synthetic oligonucleotide
uggccuguuccugguggag

SEQ ID NO: 691255 - RNA, 19 nt, Artificial Sequence
  Description of Artificial Sequence: Synthetic oligonucleotide
ccaacugucaggucaaacu

SEQ ID NO: 691256 - RNA, 19 nt, Artificial Sequence
  Description of Artificial Sequence: Synthetic oligonucleotide
cagcuagcugggagagugc

SEQ ID NO: 691257 - RNA, 19 nt, Artificial Sequence
  Description of Artificial Sequence: Synthetic oligonucleotide
aagucauuguuggccuguu

SEQ ID NO: 691258 - RNA, 19 nt, Artificial Sequence
  Description of Artificial Sequence: Synthetic oligonucleotide
cagcucggacaauggcuag

SEQ ID NO: 691259 - RNA, 19 nt, Artificial Sequence
  Description of Artificial Sequence: Synthetic oligonucleotide
uccaccgguggcggaagca

SEQ ID NO: 691260 - RNA, 19 nt, Artificial Sequence
  Description of Artificial Sequence: Synthetic oligonucleotide
gcuaaauggaauauugguu

SEQ ID NO: 691261 - RNA, 19 nt, Artificial Sequence
  Description of Artificial Sequence: Synthetic oligonucleotide
cguggcuugugcauccugc

SEQ ID NO: 691262 - RNA, 19 nt, Artificial Sequence
  Description of Artificial Sequence: Synthetic oligonucleotide
cucaaagccugcguaccca

SEQ ID NO: 691263 - RNA, 19 nt, Artificial Sequence
  Description of Artificial Sequence: Synthetic oligonucleotide
acguuauucccaguuccua

SEQ ID NO: 691264 - RNA, 19 nt, Artificial Sequence
  Description of Artificial Sequence: Synthetic oligonucleotide
gaagcgcuacagccaccac

SEQ ID NO: 691265 - RNA, 19 nt, Artificial Sequence
  Description of Artificial Sequence: Synthetic oligonucleotide
ucgcuccgaagcgcuacag

SEQ ID NO: 691266 - RNA, 19 nt, Artificial Sequence
  Description of Artificial Sequence: Synthetic oligonucleotide
agcuccucauagguuggcu

SEQ ID NO: 691267 - RNA, 19 nt, Artificial Sequence
  Description of Artificial Sequence: Synthetic oligonucleotide
ggcggagggagucgcuccg

SEQ ID NO: 691268 - RNA, 19 nt, Artificial Sequence
  Description of Artificial Sequence: Synthetic oligonucleotide
acacuccaccccuaaccua

SEQ ID NO: 691269 - RNA, 19 nt, Artificial Sequence
  Description of Artificial Sequence: Synthetic oligonucleotide
cccuaaccuauaauuccac

SEQ ID NO: 691270 - RNA, 19 nt, Artificial Sequence
  Description of Artificial Sequence: Synthetic oligonucleotide
cacuccaccccuaaccuau

SEQ ID NO: 691271 - RNA, 19 nt, Artificial Sequence
  Description of Artificial Sequence: Synthetic oligonucleotide
gucauuccuauuaggcucu

SEQ ID NO: 691272 - RNA, 19 nt, Artificial Sequence
  Description of Artificial Sequence: Synthetic oligonucleotide
ggucgaaggcagcucggac

SEQ ID NO: 691273 - RNA, 19 nt, Artificial Sequence
  Description of Artificial Sequence: Synthetic oligonucleotide
ugcugcgagcaaagcgcuc

SEQ ID NO: 691274 - RNA, 19 nt, Artificial Sequence
  Description of Artificial Sequence: Synthetic oligonucleotide
cuggaauccuuggucccuc

SEQ ID NO: 691275 - RNA, 19 nt, Artificial Sequence
  Description of Artificial Sequence: Synthetic oligonucleotide
cauagguuggcugugucuu

SEQ ID NO: 691276 - RNA, 19 nt, Artificial Sequence
  Description of Artificial Sequence: Synthetic oligonucleotide
ccugcguacccacggcacg

SEQ ID NO: 691277 - RNA, 19 nt, Artificial Sequence
  Description of Artificial Sequence: Synthetic oligonucleotide
cgaaucacuucuuuucgga

SEQ ID NO: 691278 - RNA, 19 nt, Artificial Sequence
  Description of Artificial Sequence: Synthetic oligonucleotide
ugcguacccacggcacgug

SEQ ID NO: 691279 - RNA, 19 nt, Artificial Sequence
  Description of Artificial Sequence: Synthetic oligonucleotide
ggacuccggauccaugcca

SEQ ID NO: 691280 - RNA, 19 nt, Artificial Sequence
  Description of Artificial Sequence: Synthetic oligonucleotide
uggcuaggaggcgaaugua

SEQ ID NO: 691281 - RNA, 19 nt, Artificial Sequence
  Description of Artificial Sequence: Synthetic oligonucleotide
ccagcugugagaggugcgc

SEQ ID NO: 691282 - RNA, 19 nt, Artificial Sequence
  Description of Artificial Sequence: Synthetic oligonucleotide
gaggcaggguccaucagau

SEQ ID NO: 691283 - RNA, 19 nt, Artificial Sequence
  Description of Artificial Sequence: Synthetic oligonucleotide
ggacaauggcuaggaggcg

SEQ ID NO: 691284 - RNA, 19 nt, Artificial Sequence
  Description of Artificial Sequence: Synthetic oligonucleotide
ggauagcucuacuguggca

SEQ ID NO: 691285 - RNA, 19 nt, Artificial Sequence
  Description of Artificial Sequence: Synthetic oligonucleotide
ccccuaaccuauaauucca

SEQ ID NO: 691286 - RNA, 19 nt, Artificial Sequence
  Description of Artificial Sequence: Synthetic oligonucleotide
ucgcuguccccagccucgg

SEQ ID NO: 691287 - RNA, 19 nt, Artificial Sequence
  Description of Artificial Sequence: Synthetic oligonucleotide
gugauagggccguguuguc

SEQ ID NO: 691288 - RNA, 19 nt, Artificial Sequence
  Description of Artificial Sequence: Synthetic oligonucleotide
ggcuacauaggcauucaua

SEQ ID NO: 691289 - RNA, 19 nt, Artificial Sequence
  Description of Artificial Sequence: Synthetic oligonucleotide
cauuccuauuaggcucuuc

SEQ ID NO: 691290 - RNA, 19 nt, Artificial Sequence
  Description of Artificial Sequence: Synthetic oligonucleotide
caccaccuauuguaggucu

SEQ ID NO: 691291 - RNA, 19 nt, Artificial Sequence
  Description of Artificial Sequence: Synthetic oligonucleotide
cccuucggacuccggaucc

SEQ ID NO: 691292 - RNA, 19 nt, Artificial Sequence
  Description of Artificial Sequence: Synthetic oligonucleotide
guaacaugguaggaugauu

SEQ ID NO: 691293 - RNA, 19 nt, Artificial Sequence
  Description of Artificial Sequence: Synthetic oligonucleotide
gcaaggaggaagaagucau

SEQ ID NO: 691294 - RNA, 19 nt, Artificial Sequence
  Description of Artificial Sequence: Synthetic oligonucleotide
ccucagcuagcugggagag

SEQ ID NO: 691295 - RNA, 19 nt, Artificial Sequence
  Description of Artificial Sequence: Synthetic oligonucleotide
gcguacccacggcacgugg

SEQ ID NO: 691296 - RNA, 19 nt, Artificial Sequence
  Description of Artificial Sequence: Synthetic oligonucleotide
ggcuagacucuuggcaaac

SEQ ID NO: 691297 - RNA, 19 nt, Artificial Sequence
  Description of Artificial Sequence: Synthetic oligonucleotide
cagcgccagugaaaauauc

SEQ ID NO: 691298 - RNA, 19 nt, Artificial Sequence
  Description of Artificial Sequence: Synthetic oligonucleotide
gucgcuccgaagcgcuaca

SEQ ID NO: 691299 - RNA, 19 nt, Artificial Sequence
  Description of Artificial Sequence: Synthetic oligonucleotide
cugcagcguggcuugugca

SEQ ID NO: 691300 - RNA, 19 nt, Artificial Sequence
  Description of Artificial Sequence: Synthetic oligonucleotide
ggccuguuccugguggagc

SEQ ID NO: 691301 - RNA, 19 nt, Artificial Sequence
  Description of Artificial Sequence: Synthetic oligonucleotide
ccagggauagcucuacugu

SEQ ID NO: 691302 - RNA, 19 nt, Artificial Sequence
  Description of Artificial Sequence: Synthetic oligonucleotide
gaacaucgguaagcucguc

SEQ ID NO: 691303 - RNA, 19 nt, Artificial Sequence
  Description of Artificial Sequence: Synthetic oligonucleotide
cuguccagggauagcucua

SEQ ID NO: 691304 - RNA, 19 nt, Artificial Sequence
  Description of Artificial Sequence: Synthetic oligonucleotide
cuccaccgguggcggaagc

SEQ ID NO: 691305 - RNA, 19 nt, Artificial Sequence
  Description of Artificial Sequence: Synthetic oligonucleotide
cacggcacguggcagcucu

SEQ ID NO: 691306 - RNA, 19 nt, Artificial Sequence
  Description of Artificial Sequence: Synthetic oligonucleotide
gccgaggcaggguccauca

SEQ ID NO: 691307 - RNA, 19 nt, Artificial Sequence
  Description of Artificial Sequence: Synthetic oligonucleotide
caaagcgcuccagcuguga

SEQ ID NO: 691308 - RNA, 19 nt, Artificial Sequence
  Description of Artificial Sequence: Synthetic oligonucleotide
gcucggacaauggcuagga

SEQ ID NO: 691309 - RNA, 19 nt, Artificial Sequence
  Description of Artificial Sequence: Synthetic oligonucleotide
cguacccacggcacguggc

SEQ ID NO: 691310 - RNA, 19 nt, Artificial Sequence
  Description of Artificial Sequence: Synthetic oligonucleotide
cugguuccucauggauccc

SEQ ID NO: 691311 - RNA, 19 nt, Artificial Sequence
  Description of Artificial Sequence: Synthetic oligonucleotide
caucgguaagcucgucugu

SEQ ID NO: 691312 - RNA, 19 nt, Artificial Sequence
  Description of Artificial Sequence: Synthetic oligonucleotide
ggucugguuccucauggau

SEQ ID NO: 691313 - RNA, 19 nt, Artificial Sequence
  Description of Artificial Sequence: Synthetic oligonucleotide
agcuuccguaggcgcugcu

SEQ ID NO: 691314 - RNA, 19 nt, Artificial Sequence
  Description of Artificial Sequence: Synthetic oligonucleotide
cugcgagcaaagcgcucca

SEQ ID NO: 691315 - RNA, 19 nt, Artificial Sequence
  Description of Artificial Sequence: Synthetic oligonucleotide
gcuaggaggcgaauguagu

SEQ ID NO: 691316 - RNA, 19 nt, Artificial Sequence
  Description of Artificial Sequence: Synthetic oligonucleotide
gccgcagcgccagugaaaa

SEQ ID NO: 691317 - RNA, 19 nt, Artificial Sequence
  Description of Artificial Sequence: Synthetic oligonucleotide
gcagcguggcuugugcauc

SEQ ID NO: 691318 - RNA, 19 nt, Artificial Sequence
  Description of Artificial Sequence: Synthetic oligonucleotide
cagcuuccguaggcgcugc

SEQ ID NO: 691319 - RNA, 19 nt, Artificial Sequence
  Description of Artificial Sequence: Synthetic oligonucleotide
cccagccucggguucugac

SEQ ID NO: 691320 - RNA, 19 nt, Artificial Sequence
  Description of Artificial Sequence: Synthetic oligonucleotide
caccacucaaagccugcgu

SEQ ID NO: 691321 - RNA, 19 nt, Artificial Sequence
  Description of Artificial Sequence: Synthetic oligonucleotide
cagcaacaacaacuuuaua

SEQ ID NO: 691322 - RNA, 19 nt, Artificial Sequence
  Description of Artificial Sequence: Synthetic oligonucleotide
gcuuccguaggcgcugcuc

SEQ ID NO: 691323 - RNA, 19 nt, Artificial Sequence
  Description of Artificial Sequence: Synthetic oligonucleotide
gucacccgagacucccacu

SEQ ID NO: 691324 - RNA, 19 nt, Artificial Sequence
  Description of Artificial Sequence: Synthetic oligonucleotide
gcgccagugaaaauauccu

SEQ ID NO: 691325 - RNA, 19 nt, Artificial Sequence
  Description of Artificial Sequence: Synthetic oligonucleotide
cgcuccgaagcgcuacagc

SEQ ID NO: 691326 - RNA, 19 nt, Artificial Sequence
  Description of Artificial Sequence: Synthetic oligonucleotide
gccugcguacccacggcac

SEQ ID NO: 691327 - RNA, 19 nt, Artificial Sequence
  Description of Artificial Sequence: Synthetic oligonucleotide
cggacuccggauccaugcc

SEQ ID NO: 691328 - RNA, 19 nt, Artificial Sequence
  Description of Artificial Sequence: Synthetic oligonucleotide
cgagcaaagcgcuccagcu

SEQ ID NO: 691329 - RNA, 19 nt, Artificial Sequence
  Description of Artificial Sequence: Synthetic oligonucleotide
ccccuucggacuccggauc

SEQ ID NO: 691330 - RNA, 19 nt, Artificial Sequence
  Description of Artificial Sequence: Synthetic oligonucleotide
gugcugcgagcaaagcgcu

SEQ ID NO: 691331 - RNA, 19 nt, Artificial Sequence
  Description of Artificial Sequence: Synthetic oligonucleotide
gugcucgugauagggccgu

SEQ ID NO: 691332 - RNA, 19 nt, Artificial Sequence
  Description of Artificial Sequence: Synthetic oligonucleotide
gucacgcaggugggcucug

SEQ ID NO: 691333 - RNA, 19 nt, Artificial Sequence
  Description of Artificial Sequence: Synthetic oligonucleotide
ccggauccaugccagggaa

SEQ ID NO: 691334 - RNA, 19 nt, Artificial Sequence
  Description of Artificial Sequence: Synthetic oligonucleotide
ccgaagcgcuacagccacc

SEQ ID NO: 691335 - RNA, 19 nt, Artificial Sequence
  Description of Artificial Sequence: Synthetic oligonucleotide
gcgucacgcaggugggcuc

SEQ ID NO: 691336 - RNA, 19 nt, Artificial Sequence
  Description of Artificial Sequence: Synthetic oligonucleotide
gggccgaguccagccgagg

SEQ ID NO: 691337 - RNA, 19 nt, Artificial Sequence
  Description of Artificial Sequence: Synthetic oligonucleotide
guguucagagcuagcucuu

SEQ ID NO: 691338 - RNA, 19 nt, Artificial Sequence
  Description of Artificial Sequence: Synthetic oligonucleotide
cgcagcgccagugaaaaua

SEQ ID NO: 691339 - RNA, 19 nt, Artificial Sequence
  Description of Artificial Sequence: Synthetic oligonucleotide
cugcguacccacggcacgu

SEQ ID NO: 691340 - RNA, 19 nt, Artificial Sequence
  Description of Artificial Sequence: Synthetic oligonucleotide
gcgcugccaugucuucaug

SEQ ID NO: 691341 - RNA, 19 nt, Artificial Sequence
  Description of Artificial Sequence: Synthetic oligonucleotide
cacccgagacucccacucu

SEQ ID NO: 691342 - RNA, 19 nt, Artificial Sequence
  Description of Artificial Sequence: Synthetic oligonucleotide
gccuucgccucaggaagga

SEQ ID NO: 691343 - RNA, 19 nt, Artificial Sequence
  Description of Artificial Sequence: Synthetic oligonucleotide
ccgaggcaggguccaucag

SEQ ID NO: 691344 - RNA, 19 nt, Artificial Sequence
  Description of Artificial Sequence: Synthetic oligonucleotide
gcugggaauguaggagugu

SEQ ID NO: 691345 - RNA, 19 nt, Artificial Sequence
  Description of Artificial Sequence: Synthetic oligonucleotide
gagucgcuccgaagcgcua

SEQ ID NO: 691346 - RNA, 19 nt, Artificial Sequence
  Description of Artificial Sequence: Synthetic oligonucleotide
gcucccaagcauggcuaga

SEQ ID NO: 691347 - RNA, 19 nt, Artificial Sequence
  Description of Artificial Sequence: Synthetic oligonucleotide
ggaguucagcaaggaggaa

SEQ ID NO: 691348 - RNA, 19 nt, Artificial Sequence
  Description of Artificial Sequence: Synthetic oligonucleotide
cuucggacuccggauccau

SEQ ID NO: 691349 - RNA, 19 nt, Artificial Sequence
  Description of Artificial Sequence: Synthetic oligonucleotide
gcgcuacagccaccaccgc

SEQ ID NO: 691350 - RNA, 19 nt, Artificial Sequence
  Description of Artificial Sequence: Synthetic oligonucleotide
ccuccaccgguggcggaag

SEQ ID NO: 691351 - RNA, 19 nt, Artificial Sequence
  Description of Artificial Sequence: Synthetic oligonucleotide
gccccuucggacuccggau

SEQ ID NO: 691352 - RNA, 19 nt, Artificial Sequence
  Description of Artificial Sequence: Synthetic oligonucleotide
ccguaggcgcugcuccuca

SEQ ID NO: 691353 - RNA, 19 nt, Artificial Sequence
  Description of Artificial Sequence: Synthetic oligonucleotide
cguaggcgcugcuccucac

SEQ ID NO: 691354 - RNA, 19 nt, Artificial Sequence
  Description of Artificial Sequence: Synthetic oligonucleotide
ccggcagccccuucggacu

SEQ ID NO: 691355 - RNA, 19 nt, Artificial Sequence
  Description of Artificial Sequence: Synthetic oligonucleotide
ccgacgccaucuuccucca

SEQ ID NO: 691356 - RNA, 19 nt, Artificial Sequence
  Description of Artificial Sequence: Synthetic oligonucleotide
caauggcuaggaggcgaau

SEQ ID NO: 691357 - RNA, 19 nt, Artificial Sequence
  Description of Artificial Sequence: Synthetic oligonucleotide
ccuucggacuccggaucca

SEQ ID NO: 691358 - RNA, 19 nt, Artificial Sequence
  Description of Artificial Sequence: Synthetic oligonucleotide
gcgcuggucgaaggcagcu

SEQ ID NO: 691359 - RNA, 19 nt, Artificial Sequence
  Description of Artificial Sequence: Synthetic oligonucleotide
gcggagggagucgcuccga

SEQ ID NO: 691360 - RNA, 19 nt, Artificial Sequence
  Description of Artificial Sequence: Synthetic oligonucleotide
acggcacguggcagcucuu

SEQ ID NO: 691361 - RNA, 19 nt, Artificial Sequence
  Description of Artificial Sequence: Synthetic oligonucleotide
cgcuggucgaaggcagcuc

SEQ ID NO: 691362 - RNA, 19 nt, Artificial Sequence
  Description of Artificial Sequence: Synthetic oligonucleotide
ccaccucagcuagcuggga

SEQ ID NO: 691363 - RNA, 19 nt, Artificial Sequence
  Description of Artificial Sequence: Synthetic oligonucleotide
ccuuagcuugcugcaguuu

SEQ ID NO: 691364 - RNA, 19 nt, Artificial Sequence
  Description of Artificial Sequence: Synthetic oligonucleotide
cgguaagcucgucuguguu

SEQ ID NO: 691365 - RNA, 19 nt, Artificial Sequence
  Description of Artificial Sequence: Synthetic oligonucleotide
cccacggcacguggcagcu

SEQ ID NO: 691366 - RNA, 19 nt, Artificial Sequence
  Description of Artificial Sequence: Synthetic oligonucleotide
ccacggcacguggcagcuc

SEQ ID NO: 691367 - RNA, 19 nt, Artificial Sequence
  Description of Artificial Sequence: Synthetic oligonucleotide
cgucacgcaggugggcucu

SEQ ID NO: 691368 - RNA, 19 nt, Artificial Sequence
  Description of Artificial Sequence: Synthetic oligonucleotide
ccgcagcgccagugaaaau

SEQ ID NO: 691369 - RNA, 19 nt, Artificial Sequence
  Description of Artificial Sequence: Synthetic oligonucleotide
aauaacaaaauucacacca

SEQ ID NO: 691370 - RNA, 19 nt, Artificial Sequence
  Description of Artificial Sequence: Synthetic oligonucleotide
aaagauguuggauauauuc

SEQ ID NO: 691371 - RNA, 19 nt, Artificial Sequence
  Description of Artificial Sequence: Synthetic oligonucleotide
aauaaaauaaggcucucuc

SEQ ID NO: 691372 - RNA, 19 nt, Artificial Sequence
  Description of Artificial Sequence: Synthetic oligonucleotide
aauaauaccuaucuaccuc

SEQ ID NO: 691373 - RNA, 19 nt, Artificial Sequence
  Description of Artificial Sequence: Synthetic oligonucleotide
uuuaagauaauacacggac

SEQ ID NO: 691374 - RNA, 19 nt, Artificial Sequence
  Description of Artificial Sequence: Synthetic oligonucleotide
ugauuuaaggcuuaacugg

SEQ ID NO: 691375 - RNA, 19 nt, Artificial Sequence
  Description of Artificial Sequence: Synthetic oligonucleotide
ugucuaaacaaaauuacag

SEQ ID NO: 691376 - RNA, 19 nt, Artificial Sequence
  Description of Artificial Sequence: Synthetic oligonucleotide
uguuauagaaauuaugaca

SEQ ID NO: 691377 - RNA, 19 nt, Artificial Sequence
  Description of Artificial Sequence: Synthetic oligonucleotide
auauauaacacauuguaca

SEQ ID NO: 691378 - RNA, 19 nt, Artificial Sequence
  Description of Artificial Sequence: Synthetic oligonucleotide
aauuuauagaauuauguuu

SEQ ID NO: 691379 - RNA, 19 nt, Artificial Sequence
  Description of Artificial Sequence: Synthetic oligonucleotide
aaacaaaacaaaacaaaac

SEQ ID NO: 691380 - RNA, 19 nt, Artificial Sequence
  Description of Artificial Sequence: Synthetic oligonucleotide
ucuaccacaaccuaugagc

SEQ ID NO: 691381 - RNA, 19 nt, Artificial Sequence
  Description of Artificial Sequence: Synthetic oligonucleotide
guuauagaaauuaugacag

SEQ ID NO: 691382 - RNA, 19 nt, Artificial Sequence
  Description of Artificial Sequence: Synthetic oligonucleotide
aaaccuacuaagaauuucc

SEQ ID NO: 691383 - RNA, 19 nt, Artificial Sequence
  Description of Artificial Sequence: Synthetic oligonucleotide
ugugauuuaaggcuuaacu

SEQ ID NO: 691384 - RNA, 19 nt, Artificial Sequence
  Description of Artificial Sequence: Synthetic oligonucleotide
aaauaaggcucucucagag

SEQ ID NO: 691385 - RNA, 19 nt, Artificial Sequence
  Description of Artificial Sequence: Synthetic oligonucleotide
ucuuaauauaucaaucuga

SEQ ID NO: 691386 - RNA, 19 nt, Artificial Sequence
  Description of Artificial Sequence: Synthetic oligonucleotide
uguuaggguacgaaaaggg

SEQ ID NO: 691387 - RNA, 19 nt, Artificial Sequence
  Description of Artificial Sequence: Synthetic oligonucleotide
uauagaauuauguuuuaca

SEQ ID NO: 691388 - RNA, 19 nt, Artificial Sequence
  Description of Artificial Sequence: Synthetic oligonucleotide
auuauaauuugccggguac

SEQ ID NO: 691389 - RNA, 19 nt, Artificial Sequence
  Description of Artificial Sequence: Synthetic oligonucleotide
gaacagauggcaaaggugg

SEQ ID NO: 691390 - RNA, 19 nt, Artificial Sequence
  Description of Artificial Sequence: Synthetic oligonucleotide
uuaagcacucaaaacaggc

SEQ ID NO: 691391 - RNA, 19 nt, Artificial Sequence
  Description of Artificial Sequence: Synthetic oligonucleotide
ucuucuaccaaaauggaau

SEQ ID NO: 691392 - RNA, 19 nt, Artificial Sequence
  Description of Artificial Sequence: Synthetic oligonucleotide
auguuauagaaauuaugac

SEQ ID NO: 691393 - RNA, 19 nt, Artificial Sequence
  Description of Artificial Sequence: Synthetic oligonucleotide
ugccauauaacuuacucug

SEQ ID NO: 691394 - RNA, 19 nt, Artificial Sequence
  Description of Artificial Sequence: Synthetic oligonucleotide
auuucuaggaccagaagcc

SEQ ID NO: 691395 - RNA, 19 nt, Artificial Sequence
  Description of Artificial Sequence: Synthetic oligonucleotide
guauuaagcacucaaaaca

SEQ ID NO: 691396 - RNA, 19 nt, Artificial Sequence
  Description of Artificial Sequence: Synthetic oligonucleotide
aaauaauaccuaucuaccu

SEQ ID NO: 691397 - RNA, 19 nt, Artificial Sequence
  Description of Artificial Sequence: Synthetic oligonucleotide
uaagauaauacacggacau

SEQ ID NO: 691398 - RNA, 19 nt, Artificial Sequence
  Description of Artificial Sequence: Synthetic oligonucleotide
auuuacuguucuucaagcc

SEQ ID NO: 691399 - RNA, 19 nt, Artificial Sequence
  Description of Artificial Sequence: Synthetic oligonucleotide
uagaaauuaugacagugug

SEQ ID NO: 691400 - RNA, 19 nt, Artificial Sequence
  Description of Artificial Sequence: Synthetic oligonucleotide
aaauaaccaucacaaguag

SEQ ID NO: 691401 - RNA, 19 nt, Artificial Sequence
  Description of Artificial Sequence: Synthetic oligonucleotide
uucauaaguuuaaacaugu

SEQ ID NO: 691402 - RNA, 19 nt, Artificial Sequence
  Description of Artificial Sequence: Synthetic oligonucleotide
uuuacuguucuucaagcca

SEQ ID NO: 691403 - RNA, 19 nt, Artificial Sequence
  Description of Artificial Sequence: Synthetic oligonucleotide
cauuucuaggaccagaagc

SEQ ID NO: 691404 - RNA, 19 nt, Artificial Sequence
  Description of Artificial Sequence: Synthetic oligonucleotide
uccaacguuauccggaggg

SEQ ID NO: 691405 - RNA, 19 nt, Artificial Sequence
  Description of Artificial Sequence: Synthetic oligonucleotide
cuaucuaccucucuuaggc

SEQ ID NO: 691406 - RNA, 19 nt, Artificial Sequence
  Description of Artificial Sequence: Synthetic oligonucleotide
uucaauuugacagauacau

SEQ ID NO: 691407 - RNA, 19 nt, Artificial Sequence
  Description of Artificial Sequence: Synthetic oligonucleotide
aaaacaaaacaaaacaaaa

SEQ ID NO: 691408 - RNA, 19 nt, Artificial Sequence
  Description of Artificial Sequence: Synthetic oligonucleotide
acaacaguaauuuuaagua

SEQ ID NO: 691409 - RNA, 19 nt, Artificial Sequence
  Description of Artificial Sequence: Synthetic oligonucleotide
uauaacacauuguacaguc

SEQ ID NO: 691410 - RNA, 19 nt, Artificial Sequence
  Description of Artificial Sequence: Synthetic oligonucleotide
uacucuauaaaccuacuaa

SEQ ID NO: 691411 - RNA, 19 nt, Artificial Sequence
  Description of Artificial Sequence: Synthetic oligonucleotide
ucucuuaauauaucaaucu

SEQ ID NO: 691412 - RNA, 19 nt, Artificial Sequence
  Description of Artificial Sequence: Synthetic oligonucleotide
uuaaacaagauccaacguu

SEQ ID NO: 691413 - RNA, 19 nt, Artificial Sequence
  Description of Artificial Sequence: Synthetic oligonucleotide
uguauuaagcacucaaaac

SEQ ID NO: 691414 - RNA, 19 nt, Artificial Sequence
  Description of Artificial Sequence: Synthetic oligonucleotide
uuuauaugugugacaaaag

SEQ ID NO: 691415 - RNA, 19 nt, Artificial Sequence
  Description of Artificial Sequence: Synthetic oligonucleotide
aauaaccaucacaaguagc

SEQ ID NO: 691416 - RNA, 19 nt, Artificial Sequence
  Description of Artificial Sequence: Synthetic oligonucleotide
uuggacaagaaucacugca

SEQ ID NO: 691417 - RNA, 19 nt, Artificial Sequence
  Description of Artificial Sequence: Synthetic oligonucleotide
uguacagucuauuaaaauu

SEQ ID NO: 691418 - RNA, 19 nt, Artificial Sequence
  Description of Artificial Sequence: Synthetic oligonucleotide
ugacuuauaaucacauuac

SEQ ID NO: 691419 - RNA, 19 nt, Artificial Sequence
  Description of Artificial Sequence: Synthetic oligonucleotide
augacuuauaaucacauua

SEQ ID NO: 691420 - RNA, 19 nt, Artificial Sequence
  Description of Artificial Sequence: Synthetic oligonucleotide
uuaaccuacacaauacaaa

SEQ ID NO: 691421 - RNA, 19 nt, Artificial Sequence
  Description of Artificial Sequence: Synthetic oligonucleotide
aauauaucaaucugagcuu

SEQ ID NO: 691422 - RNA, 19 nt, Artificial Sequence
  Description of Artificial Sequence: Synthetic oligonucleotide
ucacaaguagcuauucugc

SEQ ID NO: 691423 - RNA, 19 nt, Artificial Sequence
  Description of Artificial Sequence: Synthetic oligonucleotide
gagggaaugauuuaaaaua

SEQ ID NO: 691424 - RNA, 19 nt, Artificial Sequence
  Description of Artificial Sequence: Synthetic oligonucleotide
uuauguauuuggaacagau

SEQ ID NO: 691425 - RNA, 19 nt, Artificial Sequence
  Description of Artificial Sequence: Synthetic oligonucleotide
agaauuuauagaauuaugu

SEQ ID NO: 691426 - RNA, 19 nt, Artificial Sequence
  Description of Artificial Sequence: Synthetic oligonucleotide
uuaagauaauacacggaca

SEQ ID NO: 691427 - RNA, 19 nt, Artificial Sequence
  Description of Artificial Sequence: Synthetic oligonucleotide
caaugguuggacaagaauc

SEQ ID NO: 691428 - RNA, 19 nt, Artificial Sequence
  Description of Artificial Sequence: Synthetic oligonucleotide
cauauauaacacauuguac

SEQ ID NO: 691429 - RNA, 19 nt, Artificial Sequence
  Description of Artificial Sequence: Synthetic oligonucleotide
uauaacuuacucuggaaaa

SEQ ID NO: 691430 - RNA, 19 nt, Artificial Sequence
  Description of Artificial Sequence: Synthetic oligonucleotide
gugauuuaaggcuuaacug

SEQ ID NO: 691431 - RNA, 19 nt, Artificial Sequence
  Description of Artificial Sequence: Synthetic oligonucleotide
ucauuuauaugugugacaa

SEQ ID NO: 691432 - RNA, 19 nt, Artificial Sequence
  Description of Artificial Sequence: Synthetic oligonucleotide
auugcgcagcacuuuaacc

SEQ ID NO: 691433 - RNA, 19 nt, Artificial Sequence
  Description of Artificial Sequence: Synthetic oligonucleotide
auuaugacagugugauuac

SEQ ID NO: 691434 - RNA, 19 nt, Artificial Sequence
  Description of Artificial Sequence: Synthetic oligonucleotide
auaaguuuaaacauguuau

SEQ ID NO: 691435 - RNA, 19 nt, Artificial Sequence
  Description of Artificial Sequence: Synthetic oligonucleotide
auuguuaggguacgaaaag

SEQ ID NO: 691436 - RNA, 19 nt, Artificial Sequence
  Description of Artificial Sequence: Synthetic oligonucleotide
uuuaaggcuuaacugguac

SEQ ID NO: 691437 - RNA, 19 nt, Artificial Sequence
  Description of Artificial Sequence: Synthetic oligonucleotide
uaugacagugugauuacca

SEQ ID NO: 691438 - RNA, 19 nt, Artificial Sequence
  Description of Artificial Sequence: Synthetic oligonucleotide
aaacaggcauauuagguaa

SEQ ID NO: 691439 - RNA, 19 nt, Artificial Sequence
  Description of Artificial Sequence: Synthetic oligonucleotide
aacaagauccaacguuauc

SEQ ID NO: 691440 - RNA, 19 nt, Artificial Sequence
  Description of Artificial Sequence: Synthetic oligonucleotide
cauuuggacauauauaaca

SEQ ID NO: 691441 - RNA, 19 nt, Artificial Sequence
  Description of Artificial Sequence: Synthetic oligonucleotide
auaauaccuaucuaccucu

SEQ ID NO: 691442 - RNA, 19 nt, Artificial Sequence
  Description of Artificial Sequence: Synthetic oligonucleotide
agauaauacacggacauga

SEQ ID NO: 691443 - RNA, 19 nt, Artificial Sequence
  Description of Artificial Sequence: Synthetic oligonucleotide
auuuauaugugugacaaaa

SEQ ID NO: 691444 - RNA, 19 nt, Artificial Sequence
  Description of Artificial Sequence: Synthetic oligonucleotide
uucuacucuauaaaccuac

SEQ ID NO: 691445 - RNA, 19 nt, Artificial Sequence
  Description of Artificial Sequence: Synthetic oligonucleotide
ggacauauauaacacauug

SEQ ID NO: 691446 - RNA, 19 nt, Artificial Sequence
  Description of Artificial Sequence: Synthetic oligonucleotide
aaaauaaggcucucucaga

SEQ ID NO: 691447 - RNA, 19 nt, Artificial Sequence
  Description of Artificial Sequence: Synthetic oligonucleotide
agcuaucugugcaagagcc

SEQ ID NO: 691448 - RNA, 19 nt, Artificial Sequence
  Description of Artificial Sequence: Synthetic oligonucleotide
uaaaagguaucuaccacaa

SEQ ID NO: 691449 - RNA, 19 nt, Artificial Sequence
  Description of Artificial Sequence: Synthetic oligonucleotide
aaugguuggacaagaauca

SEQ ID NO: 691450 - RNA, 19 nt, Artificial Sequence
  Description of Artificial Sequence: Synthetic oligonucleotide
cuggggaauguaaauaacc

SEQ ID NO: 691451 - RNA, 19 nt, Artificial Sequence
  Description of Artificial Sequence: Synthetic oligonucleotide
auaaccaucacaaguagcu

SEQ ID NO: 691452 - RNA, 19 nt, Artificial Sequence
  Description of Artificial Sequence: Synthetic oligonucleotide
caaaacaaaacaaaacaaa

SEQ ID NO: 691453 - RNA, 19 nt, Artificial Sequence
  Description of Artificial Sequence: Synthetic oligonucleotide
aagauccaacguuauccgg

SEQ ID NO: 691454 - RNA, 19 nt, Artificial Sequence
  Description of Artificial Sequence: Synthetic oligonucleotide
gacauugauacaaaucaug

SEQ ID NO: 691455 - RNA, 19 nt, Artificial Sequence
  Description of Artificial Sequence: Synthetic oligonucleotide
aaucauucauucauucgag

SEQ ID NO: 691456 - RNA, 19 nt, Artificial Sequence
  Description of Artificial Sequence: Synthetic oligonucleotide
agugguacagauuaauuuu

SEQ ID NO: 691457 - RNA, 19 nt, Artificial Sequence
  Description of Artificial Sequence: Synthetic oligonucleotide
uugacuagcugcaacccug

SEQ ID NO: 691458 - RNA, 19 nt, Artificial Sequence
  Description of Artificial Sequence: Synthetic oligonucleotide
aggcuuaacugguacaguc

SEQ ID NO: 691459 - RNA, 19 nt, Artificial Sequence
  Description of Artificial Sequence: Synthetic oligonucleotide
uggaaaauuauacccgguc

SEQ ID NO: 691460 - RNA, 19 nt, Artificial Sequence
  Description of Artificial Sequence: Synthetic oligonucleotide
acguaucugugauuuaagg

SEQ ID NO: 691461 - RNA, 19 nt, Artificial Sequence
  Description of Artificial Sequence: Synthetic oligonucleotide
ucugcuagaauaacugguc

SEQ ID NO: 691462 - RNA, 19 nt, Artificial Sequence
  Description of Artificial Sequence: Synthetic oligonucleotide
ugacagugugauuaccagg

SEQ ID NO: 691463 - RNA, 19 nt, Artificial Sequence
  Description of Artificial Sequence: Synthetic oligonucleotide
aauuguuaggguacgaaaa

SEQ ID NO: 691464 - RNA, 19 nt, Artificial Sequence
  Description of Artificial Sequence: Synthetic oligonucleotide
aaaucauguaaaccucccu

SEQ ID NO: 691465 - RNA, 19 nt, Artificial Sequence
  Description of Artificial Sequence: Synthetic oligonucleotide
uucccagcgaaguaggcag

SEQ ID NO: 691466 - RNA, 19 nt, Artificial Sequence
  Description of Artificial Sequence: Synthetic oligonucleotide
aucacgugguccaagauuc

SEQ ID NO: 691467 - RNA, 19 nt, Artificial Sequence
  Description of Artificial Sequence: Synthetic oligonucleotide
uaacacauuguacagucua

SEQ ID NO: 691468 - RNA, 19 nt, Artificial Sequence
  Description of Artificial Sequence: Synthetic oligonucleotide
auauaucaaucugagcuuc

SEQ ID NO: 691469 - RNA, 19 nt, Artificial Sequence
  Description of Artificial Sequence: Synthetic oligonucleotide
guaucugugauuuaaggcu

SEQ ID NO: 691470 - RNA, 19 nt, Artificial Sequence
  Description of Artificial Sequence: Synthetic oligonucleotide
cuaccacaaccuaugagcc

SEQ ID NO: 691471 - RNA, 19 nt, Artificial Sequence
  Description of Artificial Sequence: Synthetic oligonucleotide
agaaauagccuuuaaccua

SEQ ID NO: 691472 - RNA, 19 nt, Artificial Sequence
  Description of Artificial Sequence: Synthetic oligonucleotide
caaaucauguaaaccuccc

SEQ ID NO: 691473 - RNA, 19 nt, Artificial Sequence
  Description of Artificial Sequence: Synthetic oligonucleotide
ucaacgaacauagucugga

SEQ ID NO: 691474 - RNA, 19 nt, Artificial Sequence
  Description of Artificial Sequence: Synthetic oligonucleotide
uguugagacuccauuuucu

SEQ ID NO: 691475 - RNA, 19 nt, Artificial Sequence
  Description of Artificial Sequence: Synthetic oligonucleotide
ggaaaauuauacccggucc

SEQ ID NO: 691476 - RNA, 19 nt, Artificial Sequence
  Description of Artificial Sequence: Synthetic oligonucleotide
uuuccuuauguauuuggaa

SEQ ID NO: 691477 - RNA, 19 nt, Artificial Sequence
  Description of Artificial Sequence: Synthetic oligonucleotide
aacuuacucuggaaaauag

SEQ ID NO: 691478 - RNA, 19 nt, Artificial Sequence
  Description of Artificial Sequence: Synthetic oligonucleotide
aacgaacauagucuggaaa

SEQ ID NO: 691479 - RNA, 19 nt, Artificial Sequence
  Description of Artificial Sequence: Synthetic oligonucleotide
uuuaucuuaucagugcaaa

SEQ ID NO: 691480 - RNA, 19 nt, Artificial Sequence
  Description of Artificial Sequence: Synthetic oligonucleotide
uaauuugccggguacacuu

SEQ ID NO: 691481 - RNA, 19 nt, Artificial Sequence
  Description of Artificial Sequence: Synthetic oligonucleotide
uacauuguauuaagcacuc

SEQ ID NO: 691482 - RNA, 19 nt, Artificial Sequence
  Description of Artificial Sequence: Synthetic oligonucleotide
agggaaugauuuaaaauag

SEQ ID NO: 691483 - RNA, 19 nt, Artificial Sequence
  Description of Artificial Sequence: Synthetic oligonucleotide
gagacuuuaauaagaauaa

SEQ ID NO: 691484 - RNA, 19 nt, Artificial Sequence
  Description of Artificial Sequence: Synthetic oligonucleotide
cuuguauguguugagacuc

SEQ ID NO: 691485 - RNA, 19 nt, Artificial Sequence
  Description of Artificial Sequence: Synthetic oligonucleotide
aguugacuagcugcaaccc

SEQ ID NO: 691486 - RNA, 19 nt, Artificial Sequence
  Description of Artificial Sequence: Synthetic oligonucleotide
acauugauacaaaucaugu

SEQ ID NO: 691487 - RNA, 19 nt, Artificial Sequence
  Description of Artificial Sequence: Synthetic oligonucleotide
cuacuaagaauuuccuaug

SEQ ID NO: 691488 - RNA, 19 nt, Artificial Sequence
  Description of Artificial Sequence: Synthetic oligonucleotide
uaggguacgaaaagggaaa

SEQ ID NO: 691489 - RNA, 19 nt, Artificial Sequence
  Description of Artificial Sequence: Synthetic oligonucleotide
ugcuagaauaacuggucca

SEQ ID NO: 691490 - RNA, 19 nt, Artificial Sequence
  Description of Artificial Sequence: Synthetic oligonucleotide
ucccuuggaaaauuauacc

SEQ ID NO: 691491 - RNA, 19 nt, Artificial Sequence
  Description of Artificial Sequence: Synthetic oligonucleotide
aguucuugagccucggccu

SEQ ID NO: 691492 - RNA, 19 nt, Artificial Sequence
  Description of Artificial Sequence: Synthetic oligonucleotide
auaaggcucucucagagua

SEQ ID NO: 691493 - RNA, 19 nt, Artificial Sequence
  Description of Artificial Sequence: Synthetic oligonucleotide
gauccaacguuauccggag

SEQ ID NO: 691494 - RNA, 19 nt, Artificial Sequence
  Description of Artificial Sequence: Synthetic oligonucleotide
uuaaggcuuaacugguaca

SEQ ID NO: 691495 - RNA, 19 nt, Artificial Sequence
  Description of Artificial Sequence: Synthetic oligonucleotide
guuggauauauucauauau

SEQ ID NO: 691496 - RNA, 19 nt, Artificial Sequence
  Description of Artificial Sequence: Synthetic oligonucleotide
gaaaauuauacccgguccu

SEQ ID NO: 691497 - RNA, 19 nt, Artificial Sequence
  Description of Artificial Sequence: Synthetic oligonucleotide
aauuauacccgguccucau

SEQ ID NO: 691498 - RNA, 19 nt, Artificial Sequence
  Description of Artificial Sequence: Synthetic oligonucleotide
uuauaauuugccggguaca

SEQ ID NO: 691499 - RNA, 19 nt, Artificial Sequence
  Description of Artificial Sequence: Synthetic oligonucleotide
caguugacuagcugcaacc

SEQ ID NO: 691500 - RNA, 19 nt, Artificial Sequence
  Description of Artificial Sequence: Synthetic oligonucleotide
augccauauaacuuacucu

SEQ ID NO: 691501 - RNA, 19 nt, Artificial Sequence
  Description of Artificial Sequence: Synthetic oligonucleotide
gauguaauuugaguuucug

SEQ ID NO: 691502 - RNA, 19 nt, Artificial Sequence
  Description of Artificial Sequence: Synthetic oligonucleotide
caguucuugagccucggcc

SEQ ID NO: 691503 - RNA, 19 nt, Artificial Sequence
  Description of Artificial Sequence: Synthetic oligonucleotide
acuuguauguguugagacu

SEQ ID NO: 691504 - RNA, 19 nt, Artificial Sequence
  Description of Artificial Sequence: Synthetic oligonucleotide
ccuuggaaaauuauacccg

SEQ ID NO: 691505 - RNA, 19 nt, Artificial Sequence
  Description of Artificial Sequence: Synthetic oligonucleotide
guaauuugaguuucugaga

SEQ ID NO: 691506 - RNA, 19 nt, Artificial Sequence
  Description of Artificial Sequence: Synthetic oligonucleotide
uuaucagugcaaaucuaua

SEQ ID NO: 691507 - RNA, 19 nt, Artificial Sequence
  Description of Artificial Sequence: Synthetic oligonucleotide
aacaguuagaucaccuccu

SEQ ID NO: 691508 - RNA, 19 nt, Artificial Sequence
  Description of Artificial Sequence: Synthetic oligonucleotide
accuaugagccaaucauuc

SEQ ID NO: 691509 - RNA, 19 nt, Artificial Sequence
  Description of Artificial Sequence: Synthetic oligonucleotide
uauacaggagggaaugauu

SEQ ID NO: 691510 - RNA, 19 nt, Artificial Sequence
  Description of Artificial Sequence: Synthetic oligonucleotide
auuaagcacucaaaacagg

SEQ ID NO: 691511 - RNA, 19 nt, Artificial Sequence
  Description of Artificial Sequence: Synthetic oligonucleotide
ucuggggaauguaaauaac

SEQ ID NO: 691512 - RNA, 19 nt, Artificial Sequence
  Description of Artificial Sequence: Synthetic oligonucleotide
aaauagguucaugacuuau

SEQ ID NO: 691513 - RNA, 19 nt, Artificial Sequence
  Description of Artificial Sequence: Synthetic oligonucleotide
uaaaccuacuaagaauuuc

SEQ ID NO: 691514 - RNA, 19 nt, Artificial Sequence
  Description of Artificial Sequence: Synthetic oligonucleotide
ugggguuuucaacuugaca

SEQ ID NO: 691515 - RNA, 19 nt, Artificial Sequence
  Description of Artificial Sequence: Synthetic oligonucleotide
uuauacccgguccucauuu

SEQ ID NO: 691516 - RNA, 19 nt, Artificial Sequence
  Description of Artificial Sequence: Synthetic oligonucleotide
ucuacucuauaaaccuacu

SEQ ID NO: 691517 - RNA, 19 nt, Artificial Sequence
  Description of Artificial Sequence: Synthetic oligonucleotide
gugugacaaaagucaaagg

SEQ ID NO: 691518 - RNA, 19 nt, Artificial Sequence
  Description of Artificial Sequence: Synthetic oligonucleotide
auguaaaccucccuuggaa

SEQ ID NO: 691519 - RNA, 19 nt, Artificial Sequence
  Description of Artificial Sequence: Synthetic oligonucleotide
ugagccaaucauucauuca

SEQ ID NO: 691520 - RNA, 19 nt, Artificial Sequence
  Description of Artificial Sequence: Synthetic oligonucleotide
uuggaaaauuauacccggu

SEQ ID NO: 691521 - RNA, 19 nt, Artificial Sequence
  Description of Artificial Sequence: Synthetic oligonucleotide
guuugcaucacguggucca

SEQ ID NO: 691522 - RNA, 19 nt, Artificial Sequence
  Description of Artificial Sequence: Synthetic oligonucleotide
gauugcgcagcacuuuaac

SEQ ID NO: 691523 - RNA, 19 nt, Artificial Sequence
  Description of Artificial Sequence: Synthetic oligonucleotide
cuuuaagauaauacacgga

SEQ ID NO: 691524 - RNA, 19 nt, Artificial Sequence
  Description of Artificial Sequence: Synthetic oligonucleotide
ggaacagaugcugugaaug

SEQ ID NO: 691525 - RNA, 19 nt, Artificial Sequence
  Description of Artificial Sequence: Synthetic oligonucleotide
ucaauuguuaggguacgaa

SEQ ID NO: 691526 - RNA, 19 nt, Artificial Sequence
  Description of Artificial Sequence: Synthetic oligonucleotide
gguuggacaagaaucacug

SEQ ID NO: 691527 - RNA, 19 nt, Artificial Sequence
  Description of Artificial Sequence: Synthetic oligonucleotide
uuuggcagaguguuugcau

SEQ ID NO: 691528 - RNA, 19 nt, Artificial Sequence
  Description of Artificial Sequence: Synthetic oligonucleotide
aaaauagguucaugacuua

SEQ ID NO: 691529 - RNA, 19 nt, Artificial Sequence
  Description of Artificial Sequence: Synthetic oligonucleotide
cuaucugugcaagagccac

SEQ ID NO: 691530 - RNA, 19 nt, Artificial Sequence
  Description of Artificial Sequence: Synthetic oligonucleotide
auaccuaucuaccucucuu

SEQ ID NO: 691531 - RNA, 19 nt, Artificial Sequence
  Description of Artificial Sequence: Synthetic oligonucleotide
uaucuaccacaaccuauga

SEQ ID NO: 691532 - RNA, 19 nt, Artificial Sequence
  Description of Artificial Sequence: Synthetic oligonucleotide
agaaauuaugacaguguga

SEQ ID NO: 691533 - RNA, 19 nt, Artificial Sequence
  Description of Artificial Sequence: Synthetic oligonucleotide
uguuggauauauucauaua

SEQ ID NO: 691534 - RNA, 19 nt, Artificial Sequence
  Description of Artificial Sequence: Synthetic oligonucleotide
auuuauagaaauagccuuu

SEQ ID NO: 691535 - RNA, 19 nt, Artificial Sequence
  Description of Artificial Sequence: Synthetic oligonucleotide
auaacuuacucuggaaaau

SEQ ID NO: 691536 - RNA, 19 nt, Artificial Sequence
  Description of Artificial Sequence: Synthetic oligonucleotide
aauagguucaugacuuaua

SEQ ID NO: 691537 - RNA, 19 nt, Artificial Sequence
  Description of Artificial Sequence: Synthetic oligonucleotide
ucgagguaccccuucugug

SEQ ID NO: 691538 - RNA, 19 nt, Artificial Sequence
  Description of Artificial Sequence: Synthetic oligonucleotide
gauuauaauuugccgggua

SEQ ID NO: 691539 - RNA, 19 nt, Artificial Sequence
  Description of Artificial Sequence: Synthetic oligonucleotide
ugacuagcugcaacccugc

SEQ ID NO: 691540 - RNA, 19 nt, Artificial Sequence
  Description of Artificial Sequence: Synthetic oligonucleotide
gguaccaucaaagccauga

SEQ ID NO: 691541 - RNA, 19 nt, Artificial Sequence
  Description of Artificial Sequence: Synthetic oligonucleotide
ucggccuaguuucucagau

SEQ ID NO: 691542 - RNA, 19 nt, Artificial Sequence
  Description of Artificial Sequence: Synthetic oligonucleotide
guaccaucaaagccaugag

SEQ ID NO: 691543 - RNA, 19 nt, Artificial Sequence
  Description of Artificial Sequence: Synthetic oligonucleotide
cugcuuaagugucaguuca

SEQ ID NO: 691544 - RNA, 19 nt, Artificial Sequence
  Description of Artificial Sequence: Synthetic oligonucleotide
agauacaucacugcgcauu

SEQ ID NO: 691545 - RNA, 19 nt, Artificial Sequence
  Description of Artificial Sequence: Synthetic oligonucleotide
cacguaucugugauuuaag

SEQ ID NO: 691546 - RNA, 19 nt, Artificial Sequence
  Description of Artificial Sequence: Synthetic oligonucleotide
gaccuugggacgcuccugc

SEQ ID NO: 691547 - RNA, 19 nt, Artificial Sequence
  Description of Artificial Sequence: Synthetic oligonucleotide
uuaugacagugugauuacc

SEQ ID NO: 691548 - RNA, 19 nt, Artificial Sequence
  Description of Artificial Sequence: Synthetic oligonucleotide
uggacauauauaacacauu

SEQ ID NO: 691549 - RNA, 19 nt, Artificial Sequence
  Description of Artificial Sequence: Synthetic oligonucleotide
gacagugugauuaccaggu

SEQ ID NO: 691550 - RNA, 19 nt, Artificial Sequence
  Description of Artificial Sequence: Synthetic oligonucleotide
acaaguagcuauucugcuu

SEQ ID NO: 691551 - RNA, 19 nt, Artificial Sequence
  Description of Artificial Sequence: Synthetic oligonucleotide
gagccaaucauucauucau

SEQ ID NO: 691552 - RNA, 19 nt, Artificial Sequence
  Description of Artificial Sequence: Synthetic oligonucleotide
aaccuacuaagaauuuccu

SEQ ID NO: 691553 - RNA, 19 nt, Artificial Sequence
  Description of Artificial Sequence: Synthetic oligonucleotide
gggguuuucaacuugacau

SEQ ID NO: 691554 - RNA, 19 nt, Artificial Sequence
  Description of Artificial Sequence: Synthetic oligonucleotide
uucauucauucgagguacc

SEQ ID NO: 691555 - RNA, 19 nt, Artificial Sequence
  Description of Artificial Sequence: Synthetic oligonucleotide
cguaucugugauuuaaggc

SEQ ID NO: 691556 - RNA, 19 nt, Artificial Sequence
  Description of Artificial Sequence: Synthetic oligonucleotide
uaucuaccucucuuaggca

SEQ ID NO: 691557 - RNA, 19 nt, Artificial Sequence
  Description of Artificial Sequence: Synthetic oligonucleotide
aggagggaaugauuuaaaa

SEQ ID NO: 691558 - RNA, 19 nt, Artificial Sequence
  Description of Artificial Sequence: Synthetic oligonucleotide
acauggaagucaacgaaca

SEQ ID NO: 691559 - RNA, 19 nt, Artificial Sequence
  Description of Artificial Sequence: Synthetic oligonucleotide
gggaaugauuuaaaauagg

SEQ ID NO: 691560 - RNA, 19 nt, Artificial Sequence
  Description of Artificial Sequence: Synthetic oligonucleotide
caauuguuaggguacgaaa

SEQ ID NO: 691561 - RNA, 19 nt, Artificial Sequence
  Description of Artificial Sequence: Synthetic oligonucleotide
caagauucaguucuuccaa

SEQ ID NO: 691562 - RNA, 19 nt, Artificial Sequence
  Description of Artificial Sequence: Synthetic oligonucleotide
guuggacaagaaucacugc

SEQ ID NO: 691563 - RNA, 19 nt, Artificial Sequence
  Description of Artificial Sequence: Synthetic oligonucleotide
gauuuaaggcuuaacuggu

SEQ ID NO: 691564 - RNA, 19 nt, Artificial Sequence
  Description of Artificial Sequence: Synthetic oligonucleotide
auauacaggagggaaugau

SEQ ID NO: 691565 - RNA, 19 nt, Artificial Sequence
  Description of Artificial Sequence: Synthetic oligonucleotide
auacacggacaugaacuuc

SEQ ID NO: 691566 - RNA, 19 nt, Artificial Sequence
  Description of Artificial Sequence: Synthetic oligonucleotide
ugccggguacacuuguaug

SEQ ID NO: 691567 - RNA, 19 nt, Artificial Sequence
  Description of Artificial Sequence: Synthetic oligonucleotide
uaauaccuaucuaccucuc

SEQ ID NO: 691568 - RNA, 19 nt, Artificial Sequence
  Description of Artificial Sequence: Synthetic oligonucleotide
caagacggggcauccacuc

SEQ ID NO: 691569 - RNA, 19 nt, Artificial Sequence
  Description of Artificial Sequence: Synthetic oligonucleotide
cauucauucauucgaggua

SEQ ID NO: 691570 - RNA, 19 nt, Artificial Sequence
  Description of Artificial Sequence: Synthetic oligonucleotide
uaaaagugguaggcucucc

SEQ ID NO: 691571 - RNA, 19 nt, Artificial Sequence
  Description of Artificial Sequence: Synthetic oligonucleotide
gcuuaacugguacagucac

SEQ ID NO: 691572 - RNA, 19 nt, Artificial Sequence
  Description of Artificial Sequence: Synthetic oligonucleotide
acaggagggaaugauuuaa

SEQ ID NO: 691573 - RNA, 19 nt, Artificial Sequence
  Description of Artificial Sequence: Synthetic oligonucleotide
auuugccggguacacuugu

SEQ ID NO: 691574 - RNA, 19 nt, Artificial Sequence
  Description of Artificial Sequence: Synthetic oligonucleotide
gguccucauuucuaggacc

SEQ ID NO: 691575 - RNA, 19 nt, Artificial Sequence
  Description of Artificial Sequence: Synthetic oligonucleotide
uaccacaaccuaugagcca

SEQ ID NO: 691576 - RNA, 19 nt, Artificial Sequence
  Description of Artificial Sequence: Synthetic oligonucleotide
gucaacgaacauagucugg

SEQ ID NO: 691577 - RNA, 19 nt, Artificial Sequence
  Description of Artificial Sequence: Synthetic oligonucleotide
accuacuaagaauuuccua

SEQ ID NO: 691578 - RNA, 19 nt, Artificial Sequence
  Description of Artificial Sequence: Synthetic oligonucleotide
guguugagacuccauuuuc

SEQ ID NO: 691579 - RNA, 19 nt, Artificial Sequence
  Description of Artificial Sequence: Synthetic oligonucleotide
caucaaagccaugagaugu

SEQ ID NO: 691580 - RNA, 19 nt, Artificial Sequence
  Description of Artificial Sequence: Synthetic oligonucleotide
auacccgguccucauuucu

SEQ ID NO: 691581 - RNA, 19 nt, Artificial Sequence
  Description of Artificial Sequence: Synthetic oligonucleotide
gacauauauaacacauugu

SEQ ID NO: 691582 - RNA, 19 nt, Artificial Sequence
  Description of Artificial Sequence: Synthetic oligonucleotide
uauccggagggguuucuuc

SEQ ID NO: 691583 - RNA, 19 nt, Artificial Sequence
  Description of Artificial Sequence: Synthetic oligonucleotide
cagcgaaguaggcagcaac

SEQ ID NO: 691584 - RNA, 19 nt, Artificial Sequence
  Description of Artificial Sequence: Synthetic oligonucleotide
ugauugcgcagcacuuuaa

SEQ ID NO: 691585 - RNA, 19 nt, Artificial Sequence
  Description of Artificial Sequence: Synthetic oligonucleotide
gacaaaagucaaaggaacu

SEQ ID NO: 691586 - RNA, 19 nt, Artificial Sequence
  Description of Artificial Sequence: Synthetic oligonucleotide
gauggcaaagguggcgcug

SEQ ID NO: 691587 - RNA, 19 nt, Artificial Sequence
  Description of Artificial Sequence: Synthetic oligonucleotide
aaccuaugagccaaucauu

SEQ ID NO: 691588 - RNA, 19 nt, Artificial Sequence
  Description of Artificial Sequence: Synthetic oligonucleotide
agugugauuaccaggucuu

SEQ ID NO: 691589 - RNA, 19 nt, Artificial Sequence
  Description of Artificial Sequence: Synthetic oligonucleotide
augcugugaaugcucaauu

SEQ ID NO: 691590 - RNA, 19 nt, Artificial Sequence
  Description of Artificial Sequence: Synthetic oligonucleotide
uugagccucggccuaguuu

SEQ ID NO: 691591 - RNA, 19 nt, Artificial Sequence
  Description of Artificial Sequence: Synthetic oligonucleotide
caaccuaugagccaaucau

SEQ ID NO: 691592 - RNA, 19 nt, Artificial Sequence
  Description of Artificial Sequence: Synthetic oligonucleotide
aggaacaguuagaucaccu

SEQ ID NO: 691593 - RNA, 19 nt, Artificial Sequence
  Description of Artificial Sequence: Synthetic oligonucleotide
guacagucuauuaaaauuu

SEQ ID NO: 691594 - RNA, 19 nt, Artificial Sequence
  Description of Artificial Sequence: Synthetic oligonucleotide
ucacugcgcauuuuaucau

SEQ ID NO: 691595 - RNA, 19 nt, Artificial Sequence
  Description of Artificial Sequence: Synthetic oligonucleotide
auccaacguuauccggagg

SEQ ID NO: 691596 - RNA, 19 nt, Artificial Sequence
  Description of Artificial Sequence: Synthetic oligonucleotide
agcgaaguaggcagcaaca

SEQ ID NO: 691597 - RNA, 19 nt, Artificial Sequence
  Description of Artificial Sequence: Synthetic oligonucleotide
gucaaaggaacuuuacauu

SEQ ID NO: 691598 - RNA, 19 nt, Artificial Sequence
  Description of Artificial Sequence: Synthetic oligonucleotide
gacauggaacugcuuaagu

SEQ ID NO: 691599 - RNA, 19 nt, Artificial Sequence
  Description of Artificial Sequence: Synthetic oligonucleotide
ccuaugaccacauguaaaa

SEQ ID NO: 691600 - RNA, 19 nt, Artificial Sequence
  Description of Artificial Sequence: Synthetic oligonucleotide
caccagaggcacacucugg

SEQ ID NO: 691601 - RNA, 19 nt, Artificial Sequence
  Description of Artificial Sequence: Synthetic oligonucleotide
aacguuauccggagggguu

SEQ ID NO: 691602 - RNA, 19 nt, Artificial Sequence
  Description of Artificial Sequence: Synthetic oligonucleotide
aaaccucccuuggaaaauu

SEQ ID NO: 691603 - RNA, 19 nt, Artificial Sequence
  Description of Artificial Sequence: Synthetic oligonucleotide
aggcagguuucauuguaaa

SEQ ID NO: 691604 - RNA, 19 nt, Artificial Sequence
  Description of Artificial Sequence: Synthetic oligonucleotide
ccuacuaagaauuuccuau

SEQ ID NO: 691605 - RNA, 19 nt, Artificial Sequence
  Description of Artificial Sequence: Synthetic oligonucleotide
uauacccgguccucauuuc

SEQ ID NO: 691606 - RNA, 19 nt, Artificial Sequence
  Description of Artificial Sequence: Synthetic oligonucleotide
gccaaucauucauucauuc

SEQ ID NO: 691607 - RNA, 19 nt, Artificial Sequence
  Description of Artificial Sequence: Synthetic oligonucleotide
auuauacccgguccucauu

SEQ ID NO: 691608 - RNA, 19 nt, Artificial Sequence
  Description of Artificial Sequence: Synthetic oligonucleotide
gagguaccccuucugugga

SEQ ID NO: 691609 - RNA, 19 nt, Artificial Sequence
  Description of Artificial Sequence: Synthetic oligonucleotide
uaaccaucacaaguagcua

SEQ ID NO: 691610 - RNA, 19 nt, Artificial Sequence
  Description of Artificial Sequence: Synthetic oligonucleotide
ucacgugguccaagauuca

SEQ ID NO: 691611 - RNA, 19 nt, Artificial Sequence
  Description of Artificial Sequence: Synthetic oligonucleotide
aggcacguaucugugauuu

SEQ ID NO: 691612 - RNA, 19 nt, Artificial Sequence
  Description of Artificial Sequence: Synthetic oligonucleotide
agguaucuaccacaaccua

SEQ ID NO: 691613 - RNA, 19 nt, Artificial Sequence
  Description of Artificial Sequence: Synthetic oligonucleotide
aaggcacguaucugugauu

SEQ ID NO: 691614 - RNA, 19 nt, Artificial Sequence
  Description of Artificial Sequence: Synthetic oligonucleotide
auaacacauuguacagucu

SEQ ID NO: 691615 - RNA, 19 nt, Artificial Sequence
  Description of Artificial Sequence: Synthetic oligonucleotide
gccuuuaaccuacacaaua

SEQ ID NO: 691616 - RNA, 19 nt, Artificial Sequence
  Description of Artificial Sequence: Synthetic oligonucleotide
cgagguaccccuucugugg

SEQ ID NO: 691617 - RNA, 19 nt, Artificial Sequence
  Description of Artificial Sequence: Synthetic oligonucleotide
uuugccggguacacuugua

SEQ ID NO: 691618 - RNA, 19 nt, Artificial Sequence
  Description of Artificial Sequence: Synthetic oligonucleotide
cacgugguccaagauucag

SEQ ID NO: 691619 - RNA, 19 nt, Artificial Sequence
  Description of Artificial Sequence: Synthetic oligonucleotide
cugagggaccuugggacgc

SEQ ID NO: 691620 - RNA, 19 nt, Artificial Sequence
  Description of Artificial Sequence: Synthetic oligonucleotide
auaaaccuacuaagaauuu

SEQ ID NO: 691621 - RNA, 19 nt, Artificial Sequence
  Description of Artificial Sequence: Synthetic oligonucleotide
ggagggaaugauuuaaaau

SEQ ID NO: 691622 - RNA, 19 nt, Artificial Sequence
  Description of Artificial Sequence: Synthetic oligonucleotide
cugugauuuaaggcuuaac

SEQ ID NO: 691623 - RNA, 19 nt, Artificial Sequence
  Description of Artificial Sequence: Synthetic oligonucleotide
ugguaggcucucccaaaua

SEQ ID NO: 691624 - RNA, 19 nt, Artificial Sequence
  Description of Artificial Sequence: Synthetic oligonucleotide
uaaaaggcauuuggacaua

SEQ ID NO: 691625 - RNA, 19 nt, Artificial Sequence
  Description of Artificial Sequence: Synthetic oligonucleotide
cauuuauaugugugacaaa

SEQ ID NO: 691626 - RNA, 19 nt, Artificial Sequence
  Description of Artificial Sequence: Synthetic oligonucleotide
guugacuagcugcaacccu

SEQ ID NO: 691627 - RNA, 19 nt, Artificial Sequence
  Description of Artificial Sequence: Synthetic oligonucleotide
agggaccuugggacgcucc

SEQ ID NO: 691628 - RNA, 19 nt, Artificial Sequence
  Description of Artificial Sequence: Synthetic oligonucleotide
cagugugauuaccaggucu

SEQ ID NO: 691629 - RNA, 19 nt, Artificial Sequence
  Description of Artificial Sequence: Synthetic oligonucleotide
acauuguauuaagcacuca

SEQ ID NO: 691630 - RNA, 19 nt, Artificial Sequence
  Description of Artificial Sequence: Synthetic oligonucleotide
cacaaguagcuauucugcu

SEQ ID NO: 691631 - RNA, 19 nt, Artificial Sequence
  Description of Artificial Sequence: Synthetic oligonucleotide
ggaccagaagccuugaauu

SEQ ID NO: 691632 - RNA, 19 nt, Artificial Sequence
  Description of Artificial Sequence: Synthetic oligonucleotide
auuuaaggcuuaacuggua

SEQ ID NO: 691633 - RNA, 19 nt, Artificial Sequence
  Description of Artificial Sequence: Synthetic oligonucleotide
acggggcauccacuccugg

SEQ ID NO: 691634 - RNA, 19 nt, Artificial Sequence
  Description of Artificial Sequence: Synthetic oligonucleotide
augugugacaaaagucaaa

SEQ ID NO: 691635 - RNA, 19 nt, Artificial Sequence
  Description of Artificial Sequence: Synthetic oligonucleotide
gcgaaguaggcagcaacag

SEQ ID NO: 691636 - RNA, 19 nt, Artificial Sequence
  Description of Artificial Sequence: Synthetic oligonucleotide
ccaguugacuagcugcaac

SEQ ID NO: 691637 - RNA, 19 nt, Artificial Sequence
  Description of Artificial Sequence: Synthetic oligonucleotide
acgugguccaagauucagu

SEQ ID NO: 691638 - RNA, 19 nt, Artificial Sequence
  Description of Artificial Sequence: Synthetic oligonucleotide
gcagagacuuuaauaagaa

SEQ ID NO: 691639 - RNA, 19 nt, Artificial Sequence
  Description of Artificial Sequence: Synthetic oligonucleotide
caggagggaaugauuuaaa

SEQ ID NO: 691640 - RNA, 19 nt, Artificial Sequence
  Description of Artificial Sequence: Synthetic oligonucleotide
uugggacgcuccugcuuca

SEQ ID NO: 691641 - RNA, 19 nt, Artificial Sequence
  Description of Artificial Sequence: Synthetic oligonucleotide
caucugagaaggcacguau

SEQ ID NO: 691642 - RNA, 19 nt, Artificial Sequence
  Description of Artificial Sequence: Synthetic oligonucleotide
aucaaagccaugagaugua

SEQ ID NO: 691643 - RNA, 19 nt, Artificial Sequence
  Description of Artificial Sequence: Synthetic oligonucleotide
cugauugcgcagcacuuua

SEQ ID NO: 691644 - RNA, 19 nt, Artificial Sequence
  Description of Artificial Sequence: Synthetic oligonucleotide
aggguacgaaaagggaaaa

SEQ ID NO: 691645 - RNA, 19 nt, Artificial Sequence
  Description of Artificial Sequence: Synthetic oligonucleotide
gguaaaagugguaggcucu

SEQ ID NO: 691646 - RNA, 19 nt, Artificial Sequence
  Description of Artificial Sequence: Synthetic oligonucleotide
caacgaacauagucuggaa

SEQ ID NO: 691647 - RNA, 19 nt, Artificial Sequence
  Description of Artificial Sequence: Synthetic oligonucleotide
gaauuuccuaugaccacau

SEQ ID NO: 691648 - RNA, 19 nt, Artificial Sequence
  Description of Artificial Sequence: Synthetic oligonucleotide
agugucaguucaagcugcu

SEQ ID NO: 691649 - RNA, 19 nt, Artificial Sequence
  Description of Artificial Sequence: Synthetic oligonucleotide
ggcuuaacugguacaguca

SEQ ID NO: 691650 - RNA, 19 nt, Artificial Sequence
  Description of Artificial Sequence: Synthetic oligonucleotide
ucaagccaagacggggcau

SEQ ID NO: 691651 - RNA, 19 nt, Artificial Sequence
  Description of Artificial Sequence: Synthetic oligonucleotide
ccaacguuauccggagggg

SEQ ID NO: 691652 - RNA, 19 nt, Artificial Sequence
  Description of Artificial Sequence: Synthetic oligonucleotide
ggggaauguaaauaaccau

SEQ ID NO: 691653 - RNA, 19 nt, Artificial Sequence
  Description of Artificial Sequence: Synthetic oligonucleotide
cacugcgcauuuuaucaua

SEQ ID NO: 691654 - RNA, 19 nt, Artificial Sequence
  Description of Artificial Sequence: Synthetic oligonucleotide
guggcgcugagggaccuug

SEQ ID NO: 691655 - RNA, 19 nt, Artificial Sequence
  Description of Artificial Sequence: Synthetic oligonucleotide
guuagaucaccuccuuguu

SEQ ID NO: 691656 - RNA, 19 nt, Artificial Sequence
  Description of Artificial Sequence: Synthetic oligonucleotide
cucaauuguuaggguacga

SEQ ID NO: 691657 - RNA, 19 nt, Artificial Sequence
  Description of Artificial Sequence: Synthetic oligonucleotide
uucacaccagaggcacacu

SEQ ID NO: 691658 - RNA, 19 nt, Artificial Sequence
  Description of Artificial Sequence: Synthetic oligonucleotide
uuauccggagggguuucuu

SEQ ID NO: 691659 - RNA, 19 nt, Artificial Sequence
  Description of Artificial Sequence: Synthetic oligonucleotide
gcacguaucugugauuuaa

SEQ ID NO: 691660 - RNA, 19 nt, Artificial Sequence
  Description of Artificial Sequence: Synthetic oligonucleotide
caucacgugguccaagauu

SEQ ID NO: 691661 - RNA, 19 nt, Artificial Sequence
  Description of Artificial Sequence: Synthetic oligonucleotide
agccaaucauucauucauu

SEQ ID NO: 691662 - RNA, 19 nt, Artificial Sequence
  Description of Artificial Sequence: Synthetic oligonucleotide
guaggcucucccaaauacu

SEQ ID NO: 691663 - RNA, 19 nt, Artificial Sequence
  Description of Artificial Sequence: Synthetic oligonucleotide
acguuauccggagggguuu

SEQ ID NO: 691664 - RNA, 19 nt, Artificial Sequence
  Description of Artificial Sequence: Synthetic oligonucleotide
ggacgcuccugcuucaaua

SEQ ID NO: 691665 - RNA, 19 nt, Artificial Sequence
  Description of Artificial Sequence: Synthetic oligonucleotide
accucccuuggaaaauuau

SEQ ID NO: 691666 - RNA, 19 nt, Artificial Sequence
  Description of Artificial Sequence: Synthetic oligonucleotide
cucggccuaguuucucaga

SEQ ID NO: 691667 - RNA, 19 nt, Artificial Sequence
  Description of Artificial Sequence: Synthetic oligonucleotide
agccagcuaaaaggcauuu

SEQ ID NO: 691668 - RNA, 19 nt, Artificial Sequence
  Description of Artificial Sequence: Synthetic oligonucleotide
cacucuggggaauguaaau

SEQ ID NO: 691669 - RNA, 19 nt, Artificial Sequence
  Description of Artificial Sequence: Synthetic oligonucleotide
ccuaguuucucagauuaua

SEQ ID NO: 691670 - RNA, 19 nt, Artificial Sequence
  Description of Artificial Sequence: Synthetic oligonucleotide
cuaacacaacugucaaauu

SEQ ID NO: 691671 - RNA, 19 nt, Artificial Sequence
  Description of Artificial Sequence: Synthetic oligonucleotide
gccagcuaaaaggcauuug

SEQ ID NO: 691672 - RNA, 19 nt, Artificial Sequence
  Description of Artificial Sequence: Synthetic oligonucleotide
auacaucacugcgcauuuu

SEQ ID NO: 691673 - RNA, 19 nt, Artificial Sequence
  Description of Artificial Sequence: Synthetic oligonucleotide
caacguuauccggaggggu

SEQ ID NO: 691674 - RNA, 19 nt, Artificial Sequence
  Description of Artificial Sequence: Synthetic oligonucleotide
cuaggaccagaagccuuga

SEQ ID NO: 691675 - RNA, 19 nt, Artificial Sequence
  Description of Artificial Sequence: Synthetic oligonucleotide
gcgcugagggaccuuggga

SEQ ID NO: 691676 - RNA, 19 nt, Artificial Sequence
  Description of Artificial Sequence: Synthetic oligonucleotide
cacggacaugaacuucuua

SEQ ID NO: 691677 - RNA, 19 nt, Artificial Sequence
  Description of Artificial Sequence: Synthetic oligonucleotide
ggaccuugggacgcuccug

SEQ ID NO: 691678 - RNA, 19 nt, Artificial Sequence
  Description of Artificial Sequence: Synthetic oligonucleotide
cgguccucauuucuaggac

SEQ ID NO: 691679 - RNA, 19 nt, Artificial Sequence
  Description of Artificial Sequence: Synthetic oligonucleotide
gcacucaaaacaggcauau

SEQ ID NO: 691680 - RNA, 19 nt, Artificial Sequence
  Description of Artificial Sequence: Synthetic oligonucleotide
cacccaccuucucaucaaa

SEQ ID NO: 691681 - RNA, 19 nt, Artificial Sequence
  Description of Artificial Sequence: Synthetic oligonucleotide
guuauccggagggguuucu

SEQ ID NO: 691682 - RNA, 19 nt, Artificial Sequence
  Description of Artificial Sequence: Synthetic oligonucleotide
uaccucucuuaggcagguu

SEQ ID NO: 691683 - RNA, 19 nt, Artificial Sequence
  Description of Artificial Sequence: Synthetic oligonucleotide
gggcauccacuccuggggu

SEQ ID NO: 691684 - RNA, 19 nt, Artificial Sequence
  Description of Artificial Sequence: Synthetic oligonucleotide
gccaguugacuagcugcaa

SEQ ID NO: 691685 - RNA, 19 nt, Artificial Sequence
  Description of Artificial Sequence: Synthetic oligonucleotide
ccaagacggggcauccacu

SEQ ID NO: 691686 - RNA, 19 nt, Artificial Sequence
  Description of Artificial Sequence: Synthetic oligonucleotide
cguuauccggagggguuuc

SEQ ID NO: 691687 - RNA, 19 nt, Artificial Sequence
  Description of Artificial Sequence: Synthetic oligonucleotide
gggacgcuccugcuucaau

SEQ ID NO: 691688 - RNA, 19 nt, Artificial Sequence
  Description of Artificial Sequence: Synthetic oligonucleotide
gccuaguuucucagauuau

SEQ ID NO: 691689 - RNA, 19 nt, Artificial Sequence
  Description of Artificial Sequence: Synthetic oligonucleotide
ccagcgaaguaggcagcaa

SEQ ID NO: 691690 - RNA, 19 nt, Artificial Sequence
  Description of Artificial Sequence: Synthetic oligonucleotide
cggccuaguuucucagauu

SEQ ID NO: 691691 - RNA, 19 nt, Artificial Sequence
  Description of Artificial Sequence: Synthetic oligonucleotide
aauaguguuacacugcccg

SEQ ID NO: 691692 - RNA, 19 nt, Artificial Sequence
  Description of Artificial Sequence: Synthetic oligonucleotide
uuaaaugugaucuugggug

SEQ ID NO: 691693 - RNA, 19 nt, Artificial Sequence
  Description of Artificial Sequence: Synthetic oligonucleotide
uucuuuauaggcaaaaccc

SEQ ID NO: 691694 - RNA, 19 nt, Artificial Sequence
  Description of Artificial Sequence: Synthetic oligonucleotide
aagcauaguucauuuaugc

SEQ ID NO: 691695 - RNA, 19 nt, Artificial Sequence
  Description of Artificial Sequence: Synthetic oligonucleotide
cuaacuguaacucugagug

SEQ ID NO: 691696 - RNA, 19 nt, Artificial Sequence
  Description of Artificial Sequence: Synthetic oligonucleotide
aaacuaaauaguguuacac

SEQ ID NO: 691697 - RNA, 19 nt, Artificial Sequence
  Description of Artificial Sequence: Synthetic oligonucleotide
auuuaugcaccacaggagc

SEQ ID NO: 691698 - RNA, 19 nt, Artificial Sequence
  Description of Artificial Sequence: Synthetic oligonucleotide
gauuuuaguccacaggucg

SEQ ID NO: 691699 - RNA, 19 nt, Artificial Sequence
  Description of Artificial Sequence: Synthetic oligonucleotide
agaacuaaagcauaguuca

SEQ ID NO: 691700 - RNA, 19 nt, Artificial Sequence
  Description of Artificial Sequence: Synthetic oligonucleotide
aaggauauuacugagugag

SEQ ID NO: 691701 - RNA, 19 nt, Artificial Sequence
  Description of Artificial Sequence: Synthetic oligonucleotide
uucaccagugcuaugaggg

SEQ ID NO: 691702 - RNA, 19 nt, Artificial Sequence
  Description of Artificial Sequence: Synthetic oligonucleotide
uugauuaagaaaacuguag

SEQ ID NO: 691703 - RNA, 19 nt, Artificial Sequence
  Description of Artificial Sequence: Synthetic oligonucleotide
auaggcaaaacccagagcu

SEQ ID NO: 691704 - RNA, 19 nt, Artificial Sequence
  Description of Artificial Sequence: Synthetic oligonucleotide
cuaagguuaaagcagaaag

SEQ ID NO: 691705 - RNA, 19 nt, Artificial Sequence
  Description of Artificial Sequence: Synthetic oligonucleotide
ucauuuaugcaccacagga

SEQ ID NO: 691706 - RNA, 19 nt, Artificial Sequence
  Description of Artificial Sequence: Synthetic oligonucleotide
uuuggaguagacuaaagca

SEQ ID NO: 691707 - RNA, 19 nt, Artificial Sequence
  Description of Artificial Sequence: Synthetic oligonucleotide
uuuucagcacuaauuaccg

SEQ ID NO: 691708 - RNA, 19 nt, Artificial Sequence
  Description of Artificial Sequence: Synthetic oligonucleotide
gaaaggauauuacugagug

SEQ ID NO: 691709 - RNA, 19 nt, Artificial Sequence
  Description of Artificial Sequence: Synthetic oligonucleotide
uagaguauucuucagcuag

SEQ ID NO: 691710 - RNA, 19 nt, Artificial Sequence
  Description of Artificial Sequence: Synthetic oligonucleotide
acuaaauaguguuacacug

SEQ ID NO: 691711 - RNA, 19 nt, Artificial Sequence
  Description of Artificial Sequence: Synthetic oligonucleotide
ugaguugacgaacauaggc

SEQ ID NO: 691712 - RNA, 19 nt, Artificial Sequence
  Description of Artificial Sequence: Synthetic oligonucleotide
acuaauuaccggcagacag

SEQ ID NO: 691713 - RNA, 19 nt, Artificial Sequence
  Description of Artificial Sequence: Synthetic oligonucleotide
ugauuaagaaaacuguaga

SEQ ID NO: 691714 - RNA, 19 nt, Artificial Sequence
  Description of Artificial Sequence: Synthetic oligonucleotide
ucuagauucagaaaagcaa

SEQ ID NO: 691715 - RNA, 19 nt, Artificial Sequence
  Description of Artificial Sequence: Synthetic oligonucleotide
uaacauucaaaucuugaca

SEQ ID NO: 691716 - RNA, 19 nt, Artificial Sequence
  Description of Artificial Sequence: Synthetic oligonucleotide
uuuuggaguagacuaaagc

SEQ ID NO: 691717 - RNA, 19 nt, Artificial Sequence
  Description of Artificial Sequence: Synthetic oligonucleotide
guuaguaacugccacaagc

SEQ ID NO: 691718 - RNA, 19 nt, Artificial Sequence
  Description of Artificial Sequence: Synthetic oligonucleotide
uguaucacuucuuuauagg

SEQ ID NO: 691719 - RNA, 19 nt, Artificial Sequence
  Description of Artificial Sequence: Synthetic oligonucleotide
ugccaagucaauaaauuag

SEQ ID NO: 691720 - RNA, 19 nt, Artificial Sequence
  Description of Artificial Sequence: Synthetic oligonucleotide
aacuaaauaguguuacacu

SEQ ID NO: 691721 - RNA, 19 nt, Artificial Sequence
  Description of Artificial Sequence: Synthetic oligonucleotide
aacaauaagcccuugccaa

SEQ ID NO: 691722 - RNA, 19 nt, Artificial Sequence
  Description of Artificial Sequence: Synthetic oligonucleotide
cauaccuagaacuaaagca

SEQ ID NO: 691723 - RNA, 19 nt, Artificial Sequence
  Description of Artificial Sequence: Synthetic oligonucleotide
uuuaaaugugaucuugggu

SEQ ID NO: 691724 - RNA, 19 nt, Artificial Sequence
  Description of Artificial Sequence: Synthetic oligonucleotide
agugaguugacgaacauag

SEQ ID NO: 691725 - RNA, 19 nt, Artificial Sequence
  Description of Artificial Sequence: Synthetic oligonucleotide
aaaccugccccaugcauac

SEQ ID NO: 691726 - RNA, 19 nt, Artificial Sequence
  Description of Artificial Sequence: Synthetic oligonucleotide
uucagcacuaauuaccggc

SEQ ID NO: 691727 - RNA, 19 nt, Artificial Sequence
  Description of Artificial Sequence: Synthetic oligonucleotide
gagagauucaaucacacaa

SEQ ID NO: 691728 - RNA, 19 nt, Artificial Sequence
  Description of Artificial Sequence: Synthetic oligonucleotide
aacuguagaaaguuaguaa

SEQ ID NO: 691729 - RNA, 19 nt, Artificial Sequence
  Description of Artificial Sequence: Synthetic oligonucleotide
cuaaauaguguuacacugc

SEQ ID NO: 691730 - RNA, 19 nt, Artificial Sequence
  Description of Artificial Sequence: Synthetic oligonucleotide
agcaagcagaacuagaaca

SEQ ID NO: 691731 - RNA, 19 nt, Artificial Sequence
  Description of Artificial Sequence: Synthetic oligonucleotide
cugaaguuaaagaacuaag

SEQ ID NO: 691732 - RNA, 19 nt, Artificial Sequence
  Description of Artificial Sequence: Synthetic oligonucleotide
uagaacuaaagcauaguuc

SEQ ID NO: 691733 - RNA, 19 nt, Artificial Sequence
  Description of Artificial Sequence: Synthetic oligonucleotide
cuuagucugugcaaguggg

SEQ ID NO: 691734 - RNA, 19 nt, Artificial Sequence
  Description of Artificial Sequence: Synthetic oligonucleotide
gucaauuuuccacagaguc

SEQ ID NO: 691735 - RNA, 19 nt, Artificial Sequence
  Description of Artificial Sequence: Synthetic oligonucleotide
aauguuagggugguagauc

SEQ ID NO: 691736 - RNA, 19 nt, Artificial Sequence
  Description of Artificial Sequence: Synthetic oligonucleotide
uucauuuaugcaccacagg

SEQ ID NO: 691737 - RNA, 19 nt, Artificial Sequence
  Description of Artificial Sequence: Synthetic oligonucleotide
ucuuagaaagccuauucuc

SEQ ID NO: 691738 - RNA, 19 nt, Artificial Sequence
  Description of Artificial Sequence: Synthetic oligonucleotide
uuuacagguuaccuagacc

SEQ ID NO: 691739 - RNA, 19 nt, Artificial Sequence
  Description of Artificial Sequence: Synthetic oligonucleotide
uuaauccuucuuuacaggu

SEQ ID NO: 691740 - RNA, 19 nt, Artificial Sequence
  Description of Artificial Sequence: Synthetic oligonucleotide
ugagaguacccucccauag

SEQ ID NO: 691741 - RNA, 19 nt, Artificial Sequence
  Description of Artificial Sequence: Synthetic oligonucleotide
aauucuaaggucaaauuuu

SEQ ID NO: 691742 - RNA, 19 nt, Artificial Sequence
  Description of Artificial Sequence: Synthetic oligonucleotide
agcaaugagacaguuggac

SEQ ID NO: 691743 - RNA, 19 nt, Artificial Sequence
  Description of Artificial Sequence: Synthetic oligonucleotide
uuggacuaucucuagauuc

SEQ ID NO: 691744 - RNA, 19 nt, Artificial Sequence
  Description of Artificial Sequence: Synthetic oligonucleotide
agcauaagugaguugacga

SEQ ID NO: 691745 - RNA, 19 nt, Artificial Sequence
  Description of Artificial Sequence: Synthetic oligonucleotide
aaucacucauggcagauuu

SEQ ID NO: 691746 - RNA, 19 nt, Artificial Sequence
  Description of Artificial Sequence: Synthetic oligonucleotide
aauccuucuuuacagguua

SEQ ID NO: 691747 - RNA, 19 nt, Artificial Sequence
  Description of Artificial Sequence: Synthetic oligonucleotide
aguugacgaacauaggcug

SEQ ID NO: 691748 - RNA, 19 nt, Artificial Sequence
  Description of Artificial Sequence: Synthetic oligonucleotide
uuuuacgguccuuagagua

SEQ ID NO: 691749 - RNA, 19 nt, Artificial Sequence
  Description of Artificial Sequence: Synthetic oligonucleotide
guaucacuucuuuauaggc

SEQ ID NO: 691750 - RNA, 19 nt, Artificial Sequence
  Description of Artificial Sequence: Synthetic oligonucleotide
ucauauggaggguugucag

SEQ ID NO: 691751 - RNA, 19 nt, Artificial Sequence
  Description of Artificial Sequence: Synthetic oligonucleotide
cauuuaugcaccacaggag

SEQ ID NO: 691752 - RNA, 19 nt, Artificial Sequence
  Description of Artificial Sequence: Synthetic oligonucleotide
uuuaugcaccacaggagcc

SEQ ID NO: 691753 - RNA, 19 nt, Artificial Sequence
  Description of Artificial Sequence: Synthetic oligonucleotide
augauaaauucuaagguca

SEQ ID NO: 691754 - RNA, 19 nt, Artificial Sequence
  Description of Artificial Sequence: Synthetic oligonucleotide
gauuucaauucugaaggcc

SEQ ID NO: 691755 - RNA, 19 nt, Artificial Sequence
  Description of Artificial Sequence: Synthetic oligonucleotide
uaguaacugccacaagcgg

SEQ ID NO: 691756 - RNA, 19 nt, Artificial Sequence
  Description of Artificial Sequence: Synthetic oligonucleotide
aauuagcuucaucaaccug

SEQ ID NO: 691757 - RNA, 19 nt, Artificial Sequence
  Description of Artificial Sequence: Synthetic oligonucleotide
uggaguagacuaaagcagu

SEQ ID NO: 691758 - RNA, 19 nt, Artificial Sequence
  Description of Artificial Sequence: Synthetic oligonucleotide
gguuaaagcagaaagcaag

SEQ ID NO: 691759 - RNA, 19 nt, Artificial Sequence
  Description of Artificial Sequence: Synthetic oligonucleotide
ugggcaagagaagaaaugc

SEQ ID NO: 691760 - RNA, 19 nt, Artificial Sequence
  Description of Artificial Sequence: Synthetic oligonucleotide
ugcaagugggaagugaaag

SEQ ID NO: 691761 - RNA, 19 nt, Artificial Sequence
  Description of Artificial Sequence: Synthetic oligonucleotide
agacaguuggacuaucucu

SEQ ID NO: 691762 - RNA, 19 nt, Artificial Sequence
  Description of Artificial Sequence: Synthetic oligonucleotide
cugaauguaaaugaaauaa

SEQ ID NO: 691763 - RNA, 19 nt, Artificial Sequence
  Description of Artificial Sequence: Synthetic oligonucleotide
aauacugggcugagugucc

SEQ ID NO: 691764 - RNA, 19 nt, Artificial Sequence
  Description of Artificial Sequence: Synthetic oligonucleotide
ugggcuaacuguaacucug

SEQ ID NO: 691765 - RNA, 19 nt, Artificial Sequence
  Description of Artificial Sequence: Synthetic oligonucleotide
guagaaaguuaguaacugc

SEQ ID NO: 691766 - RNA, 19 nt, Artificial Sequence
  Description of Artificial Sequence: Synthetic oligonucleotide
ggcacaugaagucagaaac

SEQ ID NO: 691767 - RNA, 19 nt, Artificial Sequence
  Description of Artificial Sequence: Synthetic oligonucleotide
cacauugaaaggauauuac

SEQ ID NO: 691768 - RNA, 19 nt, Artificial Sequence
  Description of Artificial Sequence: Synthetic oligonucleotide
ucacuugccuugaaaagac

SEQ ID NO: 691769 - RNA, 19 nt, Artificial Sequence
  Description of Artificial Sequence: Synthetic oligonucleotide
ugcauaccuagaacuaaag

SEQ ID NO: 691770 - RNA, 19 nt, Artificial Sequence
  Description of Artificial Sequence: Synthetic oligonucleotide
acaagcggacgccaggugg

SEQ ID NO: 691771 - RNA, 19 nt, Artificial Sequence
  Description of Artificial Sequence: Synthetic oligonucleotide
agucacuugccuugaaaag

SEQ ID NO: 691772 - RNA, 19 nt, Artificial Sequence
  Description of Artificial Sequence: Synthetic oligonucleotide
cucauggcagauuuuaguc

SEQ ID NO: 691773 - RNA, 19 nt, Artificial Sequence
  Description of Artificial Sequence: Synthetic oligonucleotide
aauuccugagccaacuugu

SEQ ID NO: 691774 - RNA, 19 nt, Artificial Sequence
  Description of Artificial Sequence: Synthetic oligonucleotide
aucacuucuuuauaggcaa

SEQ ID NO: 691775 - RNA, 19 nt, Artificial Sequence
  Description of Artificial Sequence: Synthetic oligonucleotide
acgaacauaggcugucagg

SEQ ID NO: 691776 - RNA, 19 nt, Artificial Sequence
  Description of Artificial Sequence: Synthetic oligonucleotide
ugaaucugggcaagagaag

SEQ ID NO: 691777 - RNA, 19 nt, Artificial Sequence
  Description of Artificial Sequence: Synthetic oligonucleotide
ugucaggaacaauaagccc

SEQ ID NO: 691778 - RNA, 19 nt, Artificial Sequence
  Description of Artificial Sequence: Synthetic oligonucleotide
aacuguaacucugagugaa

SEQ ID NO: 691779 - RNA, 19 nt, Artificial Sequence
  Description of Artificial Sequence: Synthetic oligonucleotide
gaacaauaagcccuugcca

SEQ ID NO: 691780 - RNA, 19 nt, Artificial Sequence
  Description of Artificial Sequence: Synthetic oligonucleotide
ucagcacuaauuaccggca

SEQ ID NO: 691781 - RNA, 19 nt, Artificial Sequence
  Description of Artificial Sequence: Synthetic oligonucleotide
uauaggcaaaacccagagc

SEQ ID NO: 691782 - RNA, 19 nt, Artificial Sequence
  Description of Artificial Sequence: Synthetic oligonucleotide
aacacuuggaaaacuaaau

SEQ ID NO: 691783 - RNA, 19 nt, Artificial Sequence
  Description of Artificial Sequence: Synthetic oligonucleotide
ugauaaauucuaaggucaa

SEQ ID NO: 691784 - RNA, 19 nt, Artificial Sequence
  Description of Artificial Sequence: Synthetic oligonucleotide
ucguggaaagagcaggaca

SEQ ID NO: 691785 - RNA, 19 nt, Artificial Sequence
  Description of Artificial Sequence: Synthetic oligonucleotide
acauuugcggaucucuuca

SEQ ID NO: 691786 - RNA, 19 nt, Artificial Sequence
  Description of Artificial Sequence: Synthetic oligonucleotide
aguuggacuaucucuagau

SEQ ID NO: 691787 - RNA, 19 nt, Artificial Sequence
  Description of Artificial Sequence: Synthetic oligonucleotide
aaacuguagaaaguuagua

SEQ ID NO: 691788 - RNA, 19 nt, Artificial Sequence
  Description of Artificial Sequence: Synthetic oligonucleotide
aaugcacggcguucucuac

SEQ ID NO: 691789 - RNA, 19 nt, Artificial Sequence
  Description of Artificial Sequence: Synthetic oligonucleotide
guucucuacuggcagaccc

SEQ ID NO: 691790 - RNA, 19 nt, Artificial Sequence
  Description of Artificial Sequence: Synthetic oligonucleotide
uagaaagccuauucucugc

SEQ ID NO: 691791 - RNA, 19 nt, Artificial Sequence
  Description of Artificial Sequence: Synthetic oligonucleotide
caucuuagaaagccuauuc

SEQ ID NO: 691792 - RNA, 19 nt, Artificial Sequence
  Description of Artificial Sequence: Synthetic oligonucleotide
ucucuagauucagaaaagc

SEQ ID NO: 691793 - RNA, 19 nt, Artificial Sequence
  Description of Artificial Sequence: Synthetic oligonucleotide
guauuugcacugcucgggg

SEQ ID NO: 691794 - RNA, 19 nt, Artificial Sequence
  Description of Artificial Sequence: Synthetic oligonucleotide
agcauaguucauuuaugca

SEQ ID NO: 691795 - RNA, 19 nt, Artificial Sequence
  Description of Artificial Sequence: Synthetic oligonucleotide
uuucagcacuaauuaccgg

SEQ ID NO: 691796 - RNA, 19 nt, Artificial Sequence
  Description of Artificial Sequence: Synthetic oligonucleotide
uuacugagugagcuucaag

SEQ ID NO: 691797 - RNA, 19 nt, Artificial Sequence
  Description of Artificial Sequence: Synthetic oligonucleotide
uuugcgggguauuugcacu

SEQ ID NO: 691798 - RNA, 19 nt, Artificial Sequence
  Description of Artificial Sequence: Synthetic oligonucleotide
gagcauaagugaguugacg

SEQ ID NO: 691799 - RNA, 19 nt, Artificial Sequence
  Description of Artificial Sequence: Synthetic oligonucleotide
uaauuaccggcagacagac

SEQ ID NO: 691800 - RNA, 19 nt, Artificial Sequence
  Description of Artificial Sequence: Synthetic oligonucleotide
uggacaacuucugacagaa

SEQ ID NO: 691801 - RNA, 19 nt, Artificial Sequence
  Description of Artificial Sequence: Synthetic oligonucleotide
gggaaguugauuucaauuc

SEQ ID NO: 691802 - RNA, 19 nt, Artificial Sequence
  Description of Artificial Sequence: Synthetic oligonucleotide
uuuacgguccuuagaguau

SEQ ID NO: 691803 - RNA, 19 nt, Artificial Sequence
  Description of Artificial Sequence: Synthetic oligonucleotide
ucugacagaauuuggcauu

SEQ ID NO: 691804 - RNA, 19 nt, Artificial Sequence
  Description of Artificial Sequence: Synthetic oligonucleotide
agugcuaagcaaugagaca

SEQ ID NO: 691805 - RNA, 19 nt, Artificial Sequence
  Description of Artificial Sequence: Synthetic oligonucleotide
agcuagaucggcucggagu

SEQ ID NO: 691806 - RNA, 19 nt, Artificial Sequence
  Description of Artificial Sequence: Synthetic oligonucleotide
cucuagauucagaaaagca

SEQ ID NO: 691807 - RNA, 19 nt, Artificial Sequence
  Description of Artificial Sequence: Synthetic oligonucleotide
aucggcucggagugggugc

SEQ ID NO: 691808 - RNA, 19 nt, Artificial Sequence
  Description of Artificial Sequence: Synthetic oligonucleotide
cagaguccugcuuugcggg

SEQ ID NO: 691809 - RNA, 19 nt, Artificial Sequence
  Description of Artificial Sequence: Synthetic oligonucleotide
cauagaaacacaggcccag

SEQ ID NO: 691810 - RNA, 19 nt, Artificial Sequence
  Description of Artificial Sequence: Synthetic oligonucleotide
cuaaggucaaauuuuauuu

SEQ ID NO: 691811 - RNA, 19 nt, Artificial Sequence
  Description of Artificial Sequence: Synthetic oligonucleotide
gagccaacuugugucaggg

SEQ ID NO: 691812 - RNA, 19 nt, Artificial Sequence
  Description of Artificial Sequence: Synthetic oligonucleotide
uggcacgugucaauuuucc

SEQ ID NO: 691813 - RNA, 19 nt, Artificial Sequence
  Description of Artificial Sequence: Synthetic oligonucleotide
cagaacuagaacaugugaa

SEQ ID NO: 691814 - RNA, 19 nt, Artificial Sequence
  Description of Artificial Sequence: Synthetic oligonucleotide
gacgaacauaggcugucag

SEQ ID NO: 691815 - RNA, 19 nt, Artificial Sequence
  Description of Artificial Sequence: Synthetic oligonucleotide
cauggcagauuuuagucca

SEQ ID NO: 691816 - RNA, 19 nt, Artificial Sequence
  Description of Artificial Sequence: Synthetic oligonucleotide
agacccucccuccaagguc

SEQ ID NO: 691817 - RNA, 19 nt, Artificial Sequence
  Description of Artificial Sequence: Synthetic oligonucleotide
uuuuaagccuucugggcua

SEQ ID NO: 691818 - RNA, 19 nt, Artificial Sequence
  Description of Artificial Sequence: Synthetic oligonucleotide
uaguguuacacugcccgag

SEQ ID NO: 691819 - RNA, 19 nt, Artificial Sequence
  Description of Artificial Sequence: Synthetic oligonucleotide
acugccacaagcggacgcc

SEQ ID NO: 691820 - RNA, 19 nt, Artificial Sequence
  Description of Artificial Sequence: Synthetic oligonucleotide
uggauguuacggaaguuuu

SEQ ID NO: 691821 - RNA, 19 nt, Artificial Sequence
  Description of Artificial Sequence: Synthetic oligonucleotide
gacaacuucugacagaauu

SEQ ID NO: 691822 - RNA, 19 nt, Artificial Sequence
  Description of Artificial Sequence: Synthetic oligonucleotide
cuuagaaagccuauucucu

SEQ ID NO: 691823 - RNA, 19 nt, Artificial Sequence
  Description of Artificial Sequence: Synthetic oligonucleotide
uacccucccauagugagca

SEQ ID NO: 691824 - RNA, 19 nt, Artificial Sequence
  Description of Artificial Sequence: Synthetic oligonucleotide
gguauuugcacugcucggg

SEQ ID NO: 691825 - RNA, 19 nt, Artificial Sequence
  Description of Artificial Sequence: Synthetic oligonucleotide
uaauccuucuuuacagguu

SEQ ID NO: 691826 - RNA, 19 nt, Artificial Sequence
  Description of Artificial Sequence: Synthetic oligonucleotide
cuaauuaccggcagacaga

SEQ ID NO: 691827 - RNA, 19 nt, Artificial Sequence
  Description of Artificial Sequence: Synthetic oligonucleotide
uccacauuugcggaucucu

SEQ ID NO: 691828 - RNA, 19 nt, Artificial Sequence
  Description of Artificial Sequence: Synthetic oligonucleotide
acacauugaaaggauauua

SEQ ID NO: 691829 - RNA, 19 nt, Artificial Sequence
  Description of Artificial Sequence: Synthetic oligonucleotide
gugaaucugggcaagagaa

SEQ ID NO: 691830 - RNA, 19 nt, Artificial Sequence
  Description of Artificial Sequence: Synthetic oligonucleotide
agaaaguuaguaacugcca

SEQ ID NO: 691831 - RNA, 19 nt, Artificial Sequence
  Description of Artificial Sequence: Synthetic oligonucleotide
uuuuaguccacaggucgcu

SEQ ID NO: 691832 - RNA, 19 nt, Artificial Sequence
  Description of Artificial Sequence: Synthetic oligonucleotide
cuuugcgggguauuugcac

SEQ ID NO: 691833 - RNA, 19 nt, Artificial Sequence
  Description of Artificial Sequence: Synthetic oligonucleotide
aggauauuacugagugagc

SEQ ID NO: 691834 - RNA, 19 nt, Artificial Sequence
  Description of Artificial Sequence: Synthetic oligonucleotide
gagacaguuggacuaucuc

SEQ ID NO: 691835 - RNA, 19 nt, Artificial Sequence
  Description of Artificial Sequence: Synthetic oligonucleotide
cuucagcuagaucggcucg

SEQ ID NO: 691836 - RNA, 19 nt, Artificial Sequence
  Description of Artificial Sequence: Synthetic oligonucleotide
aucucuagauucagaaaag

SEQ ID NO: 691837 - RNA, 19 nt, Artificial Sequence
  Description of Artificial Sequence: Synthetic oligonucleotide
ggggaugugaauuccugag

SEQ ID NO: 691838 - RNA, 19 nt, Artificial Sequence
  Description of Artificial Sequence: Synthetic oligonucleotide
uaacuguaacucugaguga

SEQ ID NO: 691839 - RNA, 19 nt, Artificial Sequence
  Description of Artificial Sequence: Synthetic oligonucleotide
uucucuacuggcagacccu

SEQ ID NO: 691840 - RNA, 19 nt, Artificial Sequence
  Description of Artificial Sequence: Synthetic oligonucleotide
guaacugccacaagcggac

SEQ ID NO: 691841 - RNA, 19 nt, Artificial Sequence
  Description of Artificial Sequence: Synthetic oligonucleotide
ugcacggcguucucuacug

SEQ ID NO: 691842 - RNA, 19 nt, Artificial Sequence
  Description of Artificial Sequence: Synthetic oligonucleotide
gcuaugagggacuggauca

SEQ ID NO: 691843 - RNA, 19 nt, Artificial Sequence
  Description of Artificial Sequence: Synthetic oligonucleotide
ucacucauggcagauuuua

SEQ ID NO: 691844 - RNA, 19 nt, Artificial Sequence
  Description of Artificial Sequence: Synthetic oligonucleotide
auggauacucugcugggaa

SEQ ID NO: 691845 - RNA, 19 nt, Artificial Sequence
  Description of Artificial Sequence: Synthetic oligonucleotide
caaugagacaguuggacua

SEQ ID NO: 691846 - RNA, 19 nt, Artificial Sequence
  Description of Artificial Sequence: Synthetic oligonucleotide
uacagguuaccuagaccac

SEQ ID NO: 691847 - RNA, 19 nt, Artificial Sequence
  Description of Artificial Sequence: Synthetic oligonucleotide
agauucagaaaagcaacaa

SEQ ID NO: 691848 - RNA, 19 nt, Artificial Sequence
  Description of Artificial Sequence: Synthetic oligonucleotide
agaaaccugccccaugcau

SEQ ID NO: 691849 - RNA, 19 nt, Artificial Sequence
  Description of Artificial Sequence: Synthetic oligonucleotide
aauuaccggcagacagacc

SEQ ID NO: 691850 - RNA, 19 nt, Artificial Sequence
  Description of Artificial Sequence: Synthetic oligonucleotide
aguguuacacugcccgaga

SEQ ID NO: 691851 - RNA, 19 nt, Artificial Sequence
  Description of Artificial Sequence: Synthetic oligonucleotide
accuagaacuaaagcauag

SEQ ID NO: 691852 - RNA, 19 nt, Artificial Sequence
  Description of Artificial Sequence: Synthetic oligonucleotide
gucacuugccuugaaaaga

SEQ ID NO: 691853 - RNA, 19 nt, Artificial Sequence
  Description of Artificial Sequence: Synthetic oligonucleotide
gcauaccuagaacuaaagc

SEQ ID NO: 691854 - RNA, 19 nt, Artificial Sequence
  Description of Artificial Sequence: Synthetic oligonucleotide
gaaaugccguucuuuugga

SEQ ID NO: 691855 - RNA, 19 nt, Artificial Sequence
  Description of Artificial Sequence: Synthetic oligonucleotide
auaagcccuugccaaguca

SEQ ID NO: 691856 - RNA, 19 nt, Artificial Sequence
  Description of Artificial Sequence: Synthetic oligonucleotide
auaguguuacacugcccga

SEQ ID NO: 691857 - RNA, 19 nt, Artificial Sequence
  Description of Artificial Sequence: Synthetic oligonucleotide
caacuugugucaggggugg

SEQ ID NO: 691858 - RNA, 19 nt, Artificial Sequence
  Description of Artificial Sequence: Synthetic oligonucleotide
uaagugaguugacgaacau

SEQ ID NO: 691859 - RNA, 19 nt, Artificial Sequence
  Description of Artificial Sequence: Synthetic oligonucleotide
uccacaggaucuagacccc

SEQ ID NO: 691860 - RNA, 19 nt, Artificial Sequence
  Description of Artificial Sequence: Synthetic oligonucleotide
cacuacugcuucaaggaca

SEQ ID NO: 691861 - RNA, 19 nt, Artificial Sequence
  Description of Artificial Sequence: Synthetic oligonucleotide
cacauuugcggaucucuuc

SEQ ID NO: 691862 - RNA, 19 nt, Artificial Sequence
  Description of Artificial Sequence: Synthetic oligonucleotide
agaguccugcuuugcgggg

SEQ ID NO: 691863 - RNA, 19 nt, Artificial Sequence
  Description of Artificial Sequence: Synthetic oligonucleotide
caauuuuccacagaguccu

SEQ ID NO: 691864 - RNA, 19 nt, Artificial Sequence
  Description of Artificial Sequence: Synthetic oligonucleotide
guagugcuaagcaaugaga

SEQ ID NO: 691865 - RNA, 19 nt, Artificial Sequence
  Description of Artificial Sequence: Synthetic oligonucleotide
uggaaucacucauggcaga

SEQ ID NO: 691866 - RNA, 19 nt, Artificial Sequence
  Description of Artificial Sequence: Synthetic oligonucleotide
ggcacuucaaggaaccaag

SEQ ID NO: 691867 - RNA, 19 nt, Artificial Sequence
  Description of Artificial Sequence: Synthetic oligonucleotide
aucguggaaagagcaggac

SEQ ID NO: 691868 - RNA, 19 nt, Artificial Sequence
  Description of Artificial Sequence: Synthetic oligonucleotide
aggguugucaggaacaaua

SEQ ID NO: 691869 - RNA, 19 nt, Artificial Sequence
  Description of Artificial Sequence: Synthetic oligonucleotide
gcacgugucaauuuuccac

SEQ ID NO: 691870 - RNA, 19 nt, Artificial Sequence
  Description of Artificial Sequence: Synthetic oligonucleotide
gacaguuggacuaucucua

SEQ ID NO: 691871 - RNA, 19 nt, Artificial Sequence
  Description of Artificial Sequence: Synthetic oligonucleotide
aggcaaaacccagagcugu

SEQ ID NO: 691872 - RNA, 19 nt, Artificial Sequence
  Description of Artificial Sequence: Synthetic oligonucleotide
cacggcguucucuacuggc

SEQ ID NO: 691873 - RNA, 19 nt, Artificial Sequence
  Description of Artificial Sequence: Synthetic oligonucleotide
cugccaucguggaaagagc

SEQ ID NO: 691874 - RNA, 19 nt, Artificial Sequence
  Description of Artificial Sequence: Synthetic oligonucleotide
gaguugacgaacauaggcu

SEQ ID NO: 691875 - RNA, 19 nt, Artificial Sequence
  Description of Artificial Sequence: Synthetic oligonucleotide
aagugaguugacgaacaua

SEQ ID NO: 691876 - RNA, 19 nt, Artificial Sequence
  Description of Artificial Sequence: Synthetic oligonucleotide
uugcgggguauuugcacug

SEQ ID NO: 691877 - RNA, 19 nt, Artificial Sequence
  Description of Artificial Sequence: Synthetic oligonucleotide
uuaccggcagacagaccug

SEQ ID NO: 691878 - RNA, 19 nt, Artificial Sequence
  Description of Artificial Sequence: Synthetic oligonucleotide
uaagccuucugggcuaacu

SEQ ID NO: 691879 - RNA, 19 nt, Artificial Sequence
  Description of Artificial Sequence: Synthetic oligonucleotide
gacgccaggugguggcacg

SEQ ID NO: 691880 - RNA, 19 nt, Artificial Sequence
  Description of Artificial Sequence: Synthetic oligonucleotide
uccuuggggugucacuacu

SEQ ID NO: 691881 - RNA, 19 nt, Artificial Sequence
  Description of Artificial Sequence: Synthetic oligonucleotide
ugccccaugcauaccuaga

SEQ ID NO: 691882 - RNA, 19 nt, Artificial Sequence
  Description of Artificial Sequence: Synthetic oligonucleotide
augccguucuuuuggagua

SEQ ID NO: 691883 - RNA, 19 nt, Artificial Sequence
  Description of Artificial Sequence: Synthetic oligonucleotide
uaggagcauaagugaguug

SEQ ID NO: 691884 - RNA, 19 nt, Artificial Sequence
  Description of Artificial Sequence: Synthetic oligonucleotide
ggagccaaacacuuggaaa

SEQ ID NO: 691885 - RNA, 19 nt, Artificial Sequence
  Description of Artificial Sequence: Synthetic oligonucleotide
gggaugugaauuccugagc

SEQ ID NO: 691886 - RNA, 19 nt, Artificial Sequence
  Description of Artificial Sequence: Synthetic oligonucleotide
cuagaacuaaagcauaguu

SEQ ID NO: 691887 - RNA, 19 nt, Artificial Sequence
  Description of Artificial Sequence: Synthetic oligonucleotide
cgaacauaggcugucaggc

SEQ ID NO: 691888 - RNA, 19 nt, Artificial Sequence
  Description of Artificial Sequence: Synthetic oligonucleotide
gauauuacugagugagcuu

SEQ ID NO: 691889 - RNA, 19 nt, Artificial Sequence
  Description of Artificial Sequence: Synthetic oligonucleotide
ggaagcuggggccuuaguc

SEQ ID NO: 691890 - RNA, 19 nt, Artificial Sequence
  Description of Artificial Sequence: Synthetic oligonucleotide
ugccacaagcggacgccag

SEQ ID NO: 691891 - RNA, 19 nt, Artificial Sequence
  Description of Artificial Sequence: Synthetic oligonucleotide
acacaaugcacggcguucu

SEQ ID NO: 691892 - RNA, 19 nt, Artificial Sequence
  Description of Artificial Sequence: Synthetic oligonucleotide
ggaaguugauuucaauucu

SEQ ID NO: 691893 - RNA, 19 nt, Artificial Sequence
  Description of Artificial Sequence: Synthetic oligonucleotide
caucguggaaagagcagga

SEQ ID NO: 691894 - RNA, 19 nt, Artificial Sequence
  Description of Artificial Sequence: Synthetic oligonucleotide
gucagaaaccugccccaug

SEQ ID NO: 691895 - RNA, 19 nt, Artificial Sequence
  Description of Artificial Sequence: Synthetic oligonucleotide
uggcagauuuuaguccaca

SEQ ID NO: 691896 - RNA, 19 nt, Artificial Sequence
  Description of Artificial Sequence: Synthetic oligonucleotide
ggauauuacugagugagcu

SEQ ID NO: 691897 - RNA, 19 nt, Artificial Sequence
  Description of Artificial Sequence: Synthetic oligonucleotide
augcacggcguucucuacu

SEQ ID NO: 691898 - RNA, 19 nt, Artificial Sequence
  Description of Artificial Sequence: Synthetic oligonucleotide
uaacugccacaagcggacg

SEQ ID NO: 691899 - RNA, 19 nt, Artificial Sequence
  Description of Artificial Sequence: Synthetic oligonucleotide
gaucggcucggagugggug

SEQ ID NO: 691900 - RNA, 19 nt, Artificial Sequence
  Description of Artificial Sequence: Synthetic oligonucleotide
ugacgaacauaggcuguca

SEQ ID NO: 691901 - RNA, 19 nt, Artificial Sequence
  Description of Artificial Sequence: Synthetic oligonucleotide
auccuucuuuacagguuac

SEQ ID NO: 691902 - RNA, 19 nt, Artificial Sequence
  Description of Artificial Sequence: Synthetic oligonucleotide
cuaugagggacuggaucac

SEQ ID NO: 691903 - RNA, 19 nt, Artificial Sequence
  Description of Artificial Sequence: Synthetic oligonucleotide
gcacuaauuaccggcagac

SEQ ID NO: 691904 - RNA, 19 nt, Artificial Sequence
  Description of Artificial Sequence: Synthetic oligonucleotide
gugagcuucaaguggggcu

SEQ ID NO: 691905 - RNA, 19 nt, Artificial Sequence
  Description of Artificial Sequence: Synthetic oligonucleotide
ucucuacuggcagacccuc

SEQ ID NO: 691906 - RNA, 19 nt, Artificial Sequence
  Description of Artificial Sequence: Synthetic oligonucleotide
cacacaaugcacggcguuc

SEQ ID NO: 691907 - RNA, 19 nt, Artificial Sequence
  Description of Artificial Sequence: Synthetic oligonucleotide
caccacaaaccugguauug

SEQ ID NO: 691908 - RNA, 19 nt, Artificial Sequence
  Description of Artificial Sequence: Synthetic oligonucleotide
auagaaacacaggcccagu

SEQ ID NO: 691909 - RNA, 19 nt, Artificial Sequence
  Description of Artificial Sequence: Synthetic oligonucleotide
uaccggcagacagaccugc

SEQ ID NO: 691910 - RNA, 19 nt, Artificial Sequence
  Description of Artificial Sequence: Synthetic oligonucleotide
ggaguagacuaaagcagug

SEQ ID NO: 691911 - RNA, 19 nt, Artificial Sequence
  Description of Artificial Sequence: Synthetic oligonucleotide
agacuaaagcagugauuuu

SEQ ID NO: 691912 - RNA, 19 nt, Artificial Sequence
  Description of Artificial Sequence: Synthetic oligonucleotide
uaugcaccacaggagccaa

SEQ ID NO: 691913 - RNA, 19 nt, Artificial Sequence
  Description of Artificial Sequence: Synthetic oligonucleotide
auuacugagugagcuucaa

SEQ ID NO: 691914 - RNA, 19 nt, Artificial Sequence
  Description of Artificial Sequence: Synthetic oligonucleotide
cacaggucgcuuuucccca

SEQ ID NO: 691915 - RNA, 19 nt, Artificial Sequence
  Description of Artificial Sequence: Synthetic oligonucleotide
aaguggggcuugacucugg

SEQ ID NO: 691916 - RNA, 19 nt, Artificial Sequence
  Description of Artificial Sequence: Synthetic oligonucleotide
ggacuggaucacuugguca

SEQ ID NO: 691917 - RNA, 19 nt, Artificial Sequence
  Description of Artificial Sequence: Synthetic oligonucleotide
gcauaagugaguugacgaa

SEQ ID NO: 691918 - RNA, 19 nt, Artificial Sequence
  Description of Artificial Sequence: Synthetic oligonucleotide
gagaguacccucccauagu

SEQ ID NO: 691919 - RNA, 19 nt, Artificial Sequence
  Description of Artificial Sequence: Synthetic oligonucleotide
ggggcuugacucugggaag

SEQ ID NO: 691920 - RNA, 19 nt, Artificial Sequence
  Description of Artificial Sequence: Synthetic oligonucleotide
cuagaucggcucggagugg

SEQ ID NO: 691921 - RNA, 19 nt, Artificial Sequence
  Description of Artificial Sequence: Synthetic oligonucleotide
agaccacuuuugauuaaga

SEQ ID NO: 691922 - RNA, 19 nt, Artificial Sequence
  Description of Artificial Sequence: Synthetic oligonucleotide
gguagaucuuuguuuuaaa

SEQ ID NO: 691923 - RNA, 19 nt, Artificial Sequence
  Description of Artificial Sequence: Synthetic oligonucleotide
gaccuguaucacuucuuua

SEQ ID NO: 691924 - RNA, 19 nt, Artificial Sequence
  Description of Artificial Sequence: Synthetic oligonucleotide
ugcgggguauuugcacugc

SEQ ID NO: 691925 - RNA, 19 nt, Artificial Sequence
  Description of Artificial Sequence: Synthetic oligonucleotide
caugagaguacccucccau

SEQ ID NO: 691926 - RNA, 19 nt, Artificial Sequence
  Description of Artificial Sequence: Synthetic oligonucleotide
gccacaagcggacgccagg

SEQ ID NO: 691927 - RNA, 19 nt, Artificial Sequence
  Description of Artificial Sequence: Synthetic oligonucleotide
gugcuggcaugagaguacc

SEQ ID NO: 691928 - RNA, 19 nt, Artificial Sequence
  Description of Artificial Sequence: Synthetic oligonucleotide
ccuagaccacuuuugauua

SEQ ID NO: 691929 - RNA, 19 nt, Artificial Sequence
  Description of Artificial Sequence: Synthetic oligonucleotide
gccaacuugugucaggggu

SEQ ID NO: 691930 - RNA, 19 nt, Artificial Sequence
  Description of Artificial Sequence: Synthetic oligonucleotide
acgguccuuagaguauucu

SEQ ID NO: 691931 - RNA, 19 nt, Artificial Sequence
  Description of Artificial Sequence: Synthetic oligonucleotide
gggccuuagucugugcaag

SEQ ID NO: 691932 - RNA, 19 nt, Artificial Sequence
  Description of Artificial Sequence: Synthetic oligonucleotide
gacaagaccugggcacuuc

SEQ ID NO: 691933 - RNA, 19 nt, Artificial Sequence
  Description of Artificial Sequence: Synthetic oligonucleotide
caagauuucuugaggcaau

SEQ ID NO: 691934 - RNA, 19 nt, Artificial Sequence
  Description of Artificial Sequence: Synthetic oligonucleotide
aggucgcuuuuccccauau

SEQ ID NO: 691935 - RNA, 19 nt, Artificial Sequence
  Description of Artificial Sequence: Synthetic oligonucleotide
gagaggggugcuggcauga

SEQ ID NO: 691936 - RNA, 19 nt, Artificial Sequence
  Description of Artificial Sequence: Synthetic oligonucleotide
cacaagcggacgccaggug

SEQ ID NO: 691937 - RNA, 19 nt, Artificial Sequence
  Description of Artificial Sequence: Synthetic oligonucleotide
acggcguucucuacuggca

SEQ ID NO: 691938 - RNA, 19 nt, Artificial Sequence
  Description of Artificial Sequence: Synthetic oligonucleotide
aagcggacgccagguggug

SEQ ID NO: 691939 - RNA, 19 nt, Artificial Sequence
  Description of Artificial Sequence: Synthetic oligonucleotide
cacaaugcacggcguucuc

SEQ ID NO: 691940 - RNA, 19 nt, Artificial Sequence
  Description of Artificial Sequence: Synthetic oligonucleotide
gggcacaugaagucagaaa

SEQ ID NO: 691941 - RNA, 19 nt, Artificial Sequence
  Description of Artificial Sequence: Synthetic oligonucleotide
ggugguuuguuuggacaac

SEQ ID NO: 691942 - RNA, 19 nt, Artificial Sequence
  Description of Artificial Sequence: Synthetic oligonucleotide
ggcacgugucaauuuucca

SEQ ID NO: 691943 - RNA, 19 nt, Artificial Sequence
  Description of Artificial Sequence: Synthetic oligonucleotide
guggcacgugucaauuuuc

SEQ ID NO: 691944 - RNA, 19 nt, Artificial Sequence
  Description of Artificial Sequence: Synthetic oligonucleotide
guugacgaacauaggcugu

SEQ ID NO: 691945 - RNA, 19 nt, Artificial Sequence
  Description of Artificial Sequence: Synthetic oligonucleotide
acaggucgcuuuuccccau

SEQ ID NO: 691946 - RNA, 19 nt, Artificial Sequence
  Description of Artificial Sequence: Synthetic oligonucleotide
cacuaauuaccggcagaca

SEQ ID NO: 691947 - RNA, 19 nt, Artificial Sequence
  Description of Artificial Sequence: Synthetic oligonucleotide
gucguucaccagugcuaug

SEQ ID NO: 691948 - RNA, 19 nt, Artificial Sequence
  Description of Artificial Sequence: Synthetic oligonucleotide
caaggggaugugaauuccu

SEQ ID NO: 691949 - RNA, 19 nt, Artificial Sequence
  Description of Artificial Sequence: Synthetic oligonucleotide
cuaggagcauaagugaguu

SEQ ID NO: 691950 - RNA, 19 nt, Artificial Sequence
  Description of Artificial Sequence: Synthetic oligonucleotide
ggagcauaagugaguugac

SEQ ID NO: 691951 - RNA, 19 nt, Artificial Sequence
  Description of Artificial Sequence: Synthetic oligonucleotide
gaacuaaagcauaguucau

SEQ ID NO: 691952 - RNA, 19 nt, Artificial Sequence
  Description of Artificial Sequence: Synthetic oligonucleotide
ucggcucggagugggugcu

SEQ ID NO: 691953 - RNA, 19 nt, Artificial Sequence
  Description of Artificial Sequence: Synthetic oligonucleotide
gccaucguggaaagagcag

SEQ ID NO: 691954 - RNA, 19 nt, Artificial Sequence
  Description of Artificial Sequence: Synthetic oligonucleotide
caagaccugggcacuucaa

SEQ ID NO: 691955 - RNA, 19 nt, Artificial Sequence
  Description of Artificial Sequence: Synthetic oligonucleotide
guagacuaaagcagugauu

SEQ ID NO: 691956 - RNA, 19 nt, Artificial Sequence
  Description of Artificial Sequence: Synthetic oligonucleotide
ccggcagacagaccugccc

SEQ ID NO: 691957 - RNA, 19 nt, Artificial Sequence
  Description of Artificial Sequence: Synthetic oligonucleotide
acugcccgagaggaccugu

SEQ ID NO: 691958 - RNA, 19 nt, Artificial Sequence
  Description of Artificial Sequence: Synthetic oligonucleotide
ccccaugcauaccuagaac

SEQ ID NO: 691959 - RNA, 19 nt, Artificial Sequence
  Description of Artificial Sequence: Synthetic oligonucleotide
gguuaccuagaccacuuuu

SEQ ID NO: 691960 - RNA, 19 nt, Artificial Sequence
  Description of Artificial Sequence: Synthetic oligonucleotide
cccuagguagcccugaagu

SEQ ID NO: 691961 - RNA, 19 nt, Artificial Sequence
  Description of Artificial Sequence: Synthetic oligonucleotide
ccaugcauaccuagaacua

SEQ ID NO: 691962 - RNA, 19 nt, Artificial Sequence
  Description of Artificial Sequence: Synthetic oligonucleotide
ggguugucaggaacaauaa

SEQ ID NO: 691963 - RNA, 19 nt, Artificial Sequence
  Description of Artificial Sequence: Synthetic oligonucleotide
gccccaugcauaccuagaa

SEQ ID NO: 691964 - RNA, 19 nt, Artificial Sequence
  Description of Artificial Sequence: Synthetic oligonucleotide
cugguauugcaggguucuc

SEQ ID NO: 691965 - RNA, 19 nt, Artificial Sequence
  Description of Artificial Sequence: Synthetic oligonucleotide
ggggccuuagucugugcaa

SEQ ID NO: 691966 - RNA, 19 nt, Artificial Sequence
  Description of Artificial Sequence: Synthetic oligonucleotide
gaaucacucauggcagauu

SEQ ID NO: 691967 - RNA, 19 nt, Artificial Sequence
  Description of Artificial Sequence: Synthetic oligonucleotide
gcacggcguucucuacugg

SEQ ID NO: 691968 - RNA, 19 nt, Artificial Sequence
  Description of Artificial Sequence: Synthetic oligonucleotide
aucacucauggcagauuuu

SEQ ID NO: 691969 - RNA, 19 nt, Artificial Sequence
  Description of Artificial Sequence: Synthetic oligonucleotide
gcaugagaguacccuccca

SEQ ID NO: 691970 - RNA, 19 nt, Artificial Sequence
  Description of Artificial Sequence: Synthetic oligonucleotide
cagcauucuuacagaauuu

SEQ ID NO: 691971 - RNA, 19 nt, Artificial Sequence
  Description of Artificial Sequence: Synthetic oligonucleotide
gaaggguaacaggcaggua

SEQ ID NO: 691972 - RNA, 19 nt, Artificial Sequence
  Description of Artificial Sequence: Synthetic oligonucleotide
gggcuaacuguaacucuga

SEQ ID NO: 691973 - RNA, 19 nt, Artificial Sequence
  Description of Artificial Sequence: Synthetic oligonucleotide
cugacagaauuuggcauuu

SEQ ID NO: 691974 - RNA, 19 nt, Artificial Sequence
  Description of Artificial Sequence: Synthetic oligonucleotide
ggaaucacucauggcagau

SEQ ID NO: 691975 - RNA, 19 nt, Artificial Sequence
  Description of Artificial Sequence: Synthetic oligonucleotide
caccggcagcugcucugag

SEQ ID NO: 691976 - RNA, 19 nt, Artificial Sequence
  Description of Artificial Sequence: Synthetic oligonucleotide
gcuuugcgggguauuugca

SEQ ID NO: 691977 - RNA, 19 nt, Artificial Sequence
  Description of Artificial Sequence: Synthetic oligonucleotide
cggcguucucuacuggcag

SEQ ID NO: 691978 - RNA, 19 nt, Artificial Sequence
  Description of Artificial Sequence: Synthetic oligonucleotide
agaucggcucggagugggu

SEQ ID NO: 691979 - RNA, 19 nt, Artificial Sequence
  Description of Artificial Sequence: Synthetic oligonucleotide
cgggguauuugcacugcuc

SEQ ID NO: 691980 - RNA, 19 nt, Artificial Sequence
  Description of Artificial Sequence: Synthetic oligonucleotide
cugccacaagcggacgcca

SEQ ID NO: 691981 - RNA, 19 nt, Artificial Sequence
  Description of Artificial Sequence: Synthetic oligonucleotide
ggacagucacuugccuuga

SEQ ID NO: 691982 - RNA, 19 nt, Artificial Sequence
  Description of Artificial Sequence: Synthetic oligonucleotide
ggucguucaccagugcuau

SEQ ID NO: 691983 - RNA, 19 nt, Artificial Sequence
  Description of Artificial Sequence: Synthetic oligonucleotide
ggugguggcacgugucaau

SEQ ID NO: 691984 - RNA, 19 nt, Artificial Sequence
  Description of Artificial Sequence: Synthetic oligonucleotide
ccuagaacuaaagcauagu

SEQ ID NO: 691985 - RNA, 19 nt, Artificial Sequence
  Description of Artificial Sequence: Synthetic oligonucleotide
cccuugccaagucaauaaa

SEQ ID NO: 691986 - RNA, 19 nt, Artificial Sequence
  Description of Artificial Sequence: Synthetic oligonucleotide
gcuaagcaaugagacaguu

SEQ ID NO: 691987 - RNA, 19 nt, Artificial Sequence
  Description of Artificial Sequence: Synthetic oligonucleotide
ggccuuagucugugcaagu

SEQ ID NO: 691988 - RNA, 19 nt, Artificial Sequence
  Description of Artificial Sequence: Synthetic oligonucleotide
gcaucuuagaaagccuauu

SEQ ID NO: 691989 - RNA, 19 nt, Artificial Sequence
  Description of Artificial Sequence: Synthetic oligonucleotide
cccugaaguuaaagaacua

SEQ ID NO: 691990 - RNA, 19 nt, Artificial Sequence
  Description of Artificial Sequence: Synthetic oligonucleotide
cgagaggaccuguaucacu

SEQ ID NO: 691991 - RNA, 19 nt, Artificial Sequence
  Description of Artificial Sequence: Synthetic oligonucleotide
ggucgcuuuuccccauauu

SEQ ID NO: 691992 - RNA, 19 nt, Artificial Sequence
  Description of Artificial Sequence: Synthetic oligonucleotide
gggaagcuggggccuuagu

SEQ ID NO: 691993 - RNA, 19 nt, Artificial Sequence
  Description of Artificial Sequence: Synthetic oligonucleotide
aaagauuugcaacagcuuc

SEQ ID NO: 691994 - RNA, 19 nt, Artificial Sequence
  Description of Artificial Sequence: Synthetic oligonucleotide
aagaauacaacuucuguag

SEQ ID NO: 691995 - RNA, 19 nt, Artificial Sequence
  Description of Artificial Sequence: Synthetic oligonucleotide
uguagaauagagaagaccu

SEQ ID NO: 691996 - RNA, 19 nt, Artificial Sequence
  Description of Artificial Sequence: Synthetic oligonucleotide
aaaaugacaaaggugugcc

SEQ ID NO: 691997 - RNA, 19 nt, Artificial Sequence
  Description of Artificial Sequence: Synthetic oligonucleotide
ucaacauuugcaaaaggcg

SEQ ID NO: 691998 - RNA, 19 nt, Artificial Sequence
  Description of Artificial Sequence: Synthetic oligonucleotide
aauagagaagaccucaaug

SEQ ID NO: 691999 - RNA, 19 nt, Artificial Sequence
  Description of Artificial Sequence: Synthetic oligonucleotide
uuuucuaaagcagaagucg

SEQ ID NO: 692000 - RNA, 19 nt, Artificial Sequence
  Description of Artificial Sequence: Synthetic oligonucleotide
uuagguaucauaucuaaug

SEQ ID NO: 692001 - RNA, 19 nt, Artificial Sequence
  Description of Artificial Sequence: Synthetic oligonucleotide
aggguaacuagucaaauac

SEQ ID NO: 692002 - RNA, 19 nt, Artificial Sequence
  Description of Artificial Sequence: Synthetic oligonucleotide
agagaucaaacuucaaacc

SEQ ID NO: 692003 - RNA, 19 nt, Artificial Sequence
  Description of Artificial Sequence: Synthetic oligonucleotide
agucuuuuggcaaagaugg

SEQ ID NO: 692004 - RNA, 19 nt, Artificial Sequence
  Description of Artificial Sequence: Synthetic oligonucleotide
aacaagauccuuuagccga

SEQ ID NO: 692005 - RNA, 19 nt, Artificial Sequence
  Description of Artificial Sequence: Synthetic oligonucleotide
ucuguagcgacacaaaugu

SEQ ID NO: 692006 - RNA, 19 nt, Artificial Sequence
  Description of Artificial Sequence: Synthetic oligonucleotide
uuugaguaaaggcacaugu

SEQ ID NO: 692007 - RNA, 19 nt, Artificial Sequence
  Description of Artificial Sequence: Synthetic oligonucleotide
agaaagaucuuccagcaag

SEQ ID NO: 692008 - RNA, 19 nt, Artificial Sequence
  Description of Artificial Sequence: Synthetic oligonucleotide
aaucgcaaacuacagaaca

SEQ ID NO: 692009 - RNA, 19 nt, Artificial Sequence
  Description of Artificial Sequence: Synthetic oligonucleotide
agcagauuucuccagaagg

SEQ ID NO: 692010 - RNA, 19 nt, Artificial Sequence
  Description of Artificial Sequence: Synthetic oligonucleotide
uguguaaaagauuugcaac

SEQ ID NO: 692011 - RNA, 19 nt, Artificial Sequence
  Description of Artificial Sequence: Synthetic oligonucleotide
ugcaaagcaagucaugcag

SEQ ID NO: 692012 - RNA, 19 nt, Artificial Sequence
  Description of Artificial Sequence: Synthetic oligonucleotide
gaagugaagauaaagacca

SEQ ID NO: 692013 - RNA, 19 nt, Artificial Sequence
  Description of Artificial Sequence: Synthetic oligonucleotide
ugaaucgcaaacuacagaa

SEQ ID NO: 692014 - RNA, 19 nt, Artificial Sequence
  Description of Artificial Sequence: Synthetic oligonucleotide
augaagaugugacgaaucc

SEQ ID NO: 692015 - RNA, 19 nt, Artificial Sequence
  Description of Artificial Sequence: Synthetic oligonucleotide
acguccauacuuuaaacac

SEQ ID NO: 692016 - RNA, 19 nt, Artificial Sequence
  Description of Artificial Sequence: Synthetic oligonucleotide
uguagcgacacaaaugucu

SEQ ID NO: 692017 - RNA, 19 nt, Artificial Sequence
  Description of Artificial Sequence: Synthetic oligonucleotide
uuucuaacuucugagaaag

SEQ ID NO: 692018 - RNA, 19 nt, Artificial Sequence
  Description of Artificial Sequence: Synthetic oligonucleotide
acaauuguugaggacaagc

SEQ ID NO: 692019 - RNA, 19 nt, Artificial Sequence
  Description of Artificial Sequence: Synthetic oligonucleotide
caacauuugcaaaaggcgg

SEQ ID NO: 692020 - RNA, 19 nt, Artificial Sequence
  Description of Artificial Sequence: Synthetic oligonucleotide
ugaauggugaguaaauccu

SEQ ID NO: 692021 - RNA, 19 nt, Artificial Sequence
  Description of Artificial Sequence: Synthetic oligonucleotide
ucuaauguauccaugucaa

SEQ ID NO: 692022 - RNA, 19 nt, Artificial Sequence
  Description of Artificial Sequence: Synthetic oligonucleotide
ugcaaaaggcggaacauag

SEQ ID NO: 692023 - RNA, 19 nt, Artificial Sequence
  Description of Artificial Sequence: Synthetic oligonucleotide
gaugcuaugguuggaaagg

SEQ ID NO: 692024 - RNA, 19 nt, Artificial Sequence
  Description of Artificial Sequence: Synthetic oligonucleotide
ugacgaauccaauauucgg

SEQ ID NO: 692025 - RNA, 19 nt, Artificial Sequence
  Description of Artificial Sequence: Synthetic oligonucleotide
agaauacaacuucuguagc

SEQ ID NO: 692026 - RNA, 19 nt, Artificial Sequence
  Description of Artificial Sequence: Synthetic oligonucleotide
uguuugguaagucuugugu

SEQ ID NO: 692027 - RNA, 19 nt, Artificial Sequence
  Description of Artificial Sequence: Synthetic oligonucleotide
acaaugaacaauguccugg

SEQ ID NO: 692028 - RNA, 19 nt, Artificial Sequence
  Description of Artificial Sequence: Synthetic oligonucleotide
gaguaaauccuuuccaagc

SEQ ID NO: 692029 - RNA, 19 nt, Artificial Sequence
  Description of Artificial Sequence: Synthetic oligonucleotide
gaauacaacuucuguagcc

SEQ ID NO: 692030 - RNA, 19 nt, Artificial Sequence
  Description of Artificial Sequence: Synthetic oligonucleotide
cagagaucaaacuucaaac

SEQ ID NO: 692031 - RNA, 19 nt, Artificial Sequence
  Description of Artificial Sequence: Synthetic oligonucleotide
aacauagggaacguagagg

SEQ ID NO: 692032 - RNA, 19 nt, Artificial Sequence
  Description of Artificial Sequence: Synthetic oligonucleotide
aaauugggaaugcaguggu

SEQ ID NO: 692033 - RNA, 19 nt, Artificial Sequence
  Description of Artificial Sequence: Synthetic oligonucleotide
guuagaaguguuucagugg

SEQ ID NO: 692034 - RNA, 19 nt, Artificial Sequence
  Description of Artificial Sequence: Synthetic oligonucleotide
agcacuuugcccuucaucu

SEQ ID NO: 692035 - RNA, 19 nt, Artificial Sequence
  Description of Artificial Sequence: Synthetic oligonucleotide
ugugacgaauccaauauuc

SEQ ID NO: 692036 - RNA, 19 nt, Artificial Sequence
  Description of Artificial Sequence: Synthetic oligonucleotide
uuugguaagucuugugucc

SEQ ID NO: 692037 - RNA, 19 nt, Artificial Sequence
  Description of Artificial Sequence: Synthetic oligonucleotide
auguagaauagagaagacc

SEQ ID NO: 692038 - RNA, 19 nt, Artificial Sequence
  Description of Artificial Sequence: Synthetic oligonucleotide
acauagggaacguagagga

SEQ ID NO: 692039 - RNA, 19 nt, Artificial Sequence
  Description of Artificial Sequence: Synthetic oligonucleotide
aucagauugaugaggauac

SEQ ID NO: 692040 - RNA, 19 nt, Artificial Sequence
  Description of Artificial Sequence: Synthetic oligonucleotide
uguuccgucugcuuuagcc

SEQ ID NO: 692041 - RNA, 19 nt, Artificial Sequence
  Description of Artificial Sequence: Synthetic oligonucleotide
aaugacaaaggugugccug

SEQ ID NO: 692042 - RNA, 19 nt, Artificial Sequence
  Description of Artificial Sequence: Synthetic oligonucleotide
aaacuaacagcuccaguga

SEQ ID NO: 692043 - RNA, 19 nt, Artificial Sequence
  Description of Artificial Sequence: Synthetic oligonucleotide
uuagcaguugaacaacaca

SEQ ID NO: 692044 - RNA, 19 nt, Artificial Sequence
  Description of Artificial Sequence: Synthetic oligonucleotide
caaaacauugucugugugc

SEQ ID NO: 692045 - RNA, 19 nt, Artificial Sequence
  Description of Artificial Sequence: Synthetic oligonucleotide
gaaauugggaaugcagugg

SEQ ID NO: 692046 - RNA, 19 nt, Artificial Sequence
  Description of Artificial Sequence: Synthetic oligonucleotide
uacacuguuucagaaaugc

SEQ ID NO: 692047 - RNA, 19 nt, Artificial Sequence
  Description of Artificial Sequence: Synthetic oligonucleotide
ucuguuagaaguguuucag

SEQ ID NO: 692048 - RNA, 19 nt, Artificial Sequence
  Description of Artificial Sequence: Synthetic oligonucleotide
ugagugcaggagaugaagg

SEQ ID NO: 692049 - RNA, 19 nt, Artificial Sequence
  Description of Artificial Sequence: Synthetic oligonucleotide
uuuccaagcaaagagugug

SEQ ID NO: 692050 - RNA, 19 nt, Artificial Sequence
  Description of Artificial Sequence: Synthetic oligonucleotide
uggugaaucgcaaacuaca

SEQ ID NO: 692051 - RNA, 19 nt, Artificial Sequence
  Description of Artificial Sequence: Synthetic oligonucleotide
aagacagaugcugggaaac

SEQ ID NO: 692052 - RNA, 19 nt, Artificial Sequence
  Description of Artificial Sequence: Synthetic oligonucleotide
uccagaugguuacacauug

SEQ ID NO: 692053 - RNA, 19 nt, Artificial Sequence
  Description of Artificial Sequence: Synthetic oligonucleotide
ugaguaaaggcacauguuu

SEQ ID NO: 692054 - RNA, 19 nt, Artificial Sequence
  Description of Artificial Sequence: Synthetic oligonucleotide
uacacauugggguuagcag

SEQ ID NO: 692055 - RNA, 19 nt, Artificial Sequence
  Description of Artificial Sequence: Synthetic oligonucleotide
ucacaaguccagaauguag

SEQ ID NO: 692056 - RNA, 19 nt, Artificial Sequence
  Description of Artificial Sequence: Synthetic oligonucleotide
aaccccaaagagaaaaggg

SEQ ID NO: 692057 - RNA, 19 nt, Artificial Sequence
  Description of Artificial Sequence: Synthetic oligonucleotide
aacgccagcaaucuccucu

SEQ ID NO: 692058 - RNA, 19 nt, Artificial Sequence
  Description of Artificial Sequence: Synthetic oligonucleotide
aaucuugagccagagaccu

SEQ ID NO: 692059 - RNA, 19 nt, Artificial Sequence
  Description of Artificial Sequence: Synthetic oligonucleotide
ugcagaacaggguaacuag

SEQ ID NO: 692060 - RNA, 19 nt, Artificial Sequence
  Description of Artificial Sequence: Synthetic oligonucleotide
aguaaauccuuuccaagca

SEQ ID NO: 692061 - RNA, 19 nt, Artificial Sequence
  Description of Artificial Sequence: Synthetic oligonucleotide
uuugacucugcaaacuaac

SEQ ID NO: 692062 - RNA, 19 nt, Artificial Sequence
  Description of Artificial Sequence: Synthetic oligonucleotide
gaugcuacacacuggaauc

SEQ ID NO: 692063 - RNA, 19 nt, Artificial Sequence
  Description of Artificial Sequence: Synthetic oligonucleotide
uucaugaaccugcugugag

SEQ ID NO: 692064 - RNA, 19 nt, Artificial Sequence
  Description of Artificial Sequence: Synthetic oligonucleotide
gaugguuacacauuggggu

SEQ ID NO: 692065 - RNA, 19 nt, Artificial Sequence
  Description of Artificial Sequence: Synthetic oligonucleotide
ugagccagagaccuggaug

SEQ ID NO: 692066 - RNA, 19 nt, Artificial Sequence
  Description of Artificial Sequence: Synthetic oligonucleotide
gaaaaggguaagaagcugc

SEQ ID NO: 692067 - RNA, 19 nt, Artificial Sequence
  Description of Artificial Sequence: Synthetic oligonucleotide
uucuaaagcagaagucgag

SEQ ID NO: 692068 - RNA, 19 nt, Artificial Sequence
  Description of Artificial Sequence: Synthetic oligonucleotide
agugguggaaauuuugccu

SEQ ID NO: 692069 - RNA, 19 nt, Artificial Sequence
  Description of Artificial Sequence: Synthetic oligonucleotide
cuaagaugaacuuggucac

SEQ ID NO: 692070 - RNA, 19 nt, Artificial Sequence
  Description of Artificial Sequence: Synthetic oligonucleotide
augaacaauguccuggaca

SEQ ID NO: 692071 - RNA, 19 nt, Artificial Sequence
  Description of Artificial Sequence: Synthetic oligonucleotide
ucuaccagaugucaccgug

SEQ ID NO: 692072 - RNA, 19 nt, Artificial Sequence
  Description of Artificial Sequence: Synthetic oligonucleotide
aagucgaggaguggcauac

SEQ ID NO: 692073 - RNA, 19 nt, Artificial Sequence
  Description of Artificial Sequence: Synthetic oligonucleotide
uuuucagaguacccaacca

SEQ ID NO: 692074 - RNA, 19 nt, Artificial Sequence
  Description of Artificial Sequence: Synthetic oligonucleotide
ucaacauagggaacguaga

SEQ ID NO: 692075 - RNA, 19 nt, Artificial Sequence
  Description of Artificial Sequence: Synthetic oligonucleotide
uggaaugacugccaaguac

SEQ ID NO: 692076 - RNA, 19 nt, Artificial Sequence
  Description of Artificial Sequence: Synthetic oligonucleotide
uccuuuagccgacuaagca

SEQ ID NO: 692077 - RNA, 19 nt, Artificial Sequence
  Description of Artificial Sequence: Synthetic oligonucleotide
ugaagguuugaauggugag

SEQ ID NO: 692078 - RNA, 19 nt, Artificial Sequence
  Description of Artificial Sequence: Synthetic oligonucleotide
ucuuagguaucauaucuaa

SEQ ID NO: 692079 - RNA, 19 nt, Artificial Sequence
  Description of Artificial Sequence: Synthetic oligonucleotide
accaacgccagcaaucucc

SEQ ID NO: 692080 - RNA, 19 nt, Artificial Sequence
  Description of Artificial Sequence: Synthetic oligonucleotide
aacaucuucccguauguuu

SEQ ID NO: 692081 - RNA, 19 nt, Artificial Sequence
  Description of Artificial Sequence: Synthetic oligonucleotide
auguucagcuccuaagcuc

SEQ ID NO: 692082 - RNA, 19 nt, Artificial Sequence
  Description of Artificial Sequence: Synthetic oligonucleotide
guguaaaagauuugcaaca

SEQ ID NO: 692083 - RNA, 19 nt, Artificial Sequence
  Description of Artificial Sequence: Synthetic oligonucleotide
agaucucugaugaagaugu

SEQ ID NO: 692084 - RNA, 19 nt, Artificial Sequence
  Description of Artificial Sequence: Synthetic oligonucleotide
caaaaggcggaacauaguc

SEQ ID NO: 692085 - RNA, 19 nt, Artificial Sequence
  Description of Artificial Sequence: Synthetic oligonucleotide
cuaacuucugagaaagauc

SEQ ID NO: 692086 - RNA, 19 nt, Artificial Sequence
  Description of Artificial Sequence: Synthetic oligonucleotide
uacccaaccagaaagccuc

SEQ ID NO: 692087 - RNA, 19 nt, Artificial Sequence
  Description of Artificial Sequence: Synthetic oligonucleotide
aaacaggaugcuaugguug

SEQ ID NO: 692088 - RNA, 19 nt, Artificial Sequence
  Description of Artificial Sequence: Synthetic oligonucleotide
auagggaacguagaggaag

SEQ ID NO: 692089 - RNA, 19 nt, Artificial Sequence
  Description of Artificial Sequence: Synthetic oligonucleotide
uauucgguucuuaucuuga

SEQ ID NO: 692090 - RNA, 19 nt, Artificial Sequence
  Description of Artificial Sequence: Synthetic oligonucleotide
ugcauuucagugucuaaga

SEQ ID NO: 692091 - RNA, 19 nt, Artificial Sequence
  Description of Artificial Sequence: Synthetic oligonucleotide
gucaacauagggaacguag

SEQ ID NO: 692092 - RNA, 19 nt, Artificial Sequence
  Description of Artificial Sequence: Synthetic oligonucleotide
ugaggauacugaagucucg

SEQ ID NO: 692093 - RNA, 19 nt, Artificial Sequence
  Description of Artificial Sequence: Synthetic oligonucleotide
ucauaucuaauguauccau

SEQ ID NO: 692094 - RNA, 19 nt, Artificial Sequence
  Description of Artificial Sequence: Synthetic oligonucleotide
caacaagauccuuuagccg

SEQ ID NO: 692095 - RNA, 19 nt, Artificial Sequence
  Description of Artificial Sequence: Synthetic oligonucleotide
aacaauguccuggacagau

SEQ ID NO: 692096 - RNA, 19 nt, Artificial Sequence
  Description of Artificial Sequence: Synthetic oligonucleotide
guagcaggaagacauggug

SEQ ID NO: 692097 - RNA, 19 nt, Artificial Sequence
  Description of Artificial Sequence: Synthetic oligonucleotide
ugggguuagcaguugaaca

SEQ ID NO: 692098 - RNA, 19 nt, Artificial Sequence
  Description of Artificial Sequence: Synthetic oligonucleotide
ugucccgggaucuaaucag

SEQ ID NO: 692099 - RNA, 19 nt, Artificial Sequence
  Description of Artificial Sequence: Synthetic oligonucleotide
guuccgucugcuuuagccg

SEQ ID NO: 692100 - RNA, 19 nt, Artificial Sequence
  Description of Artificial Sequence: Synthetic oligonucleotide
ggaacguagaggaagaggc

SEQ ID NO: 692101 - RNA, 19 nt, Artificial Sequence
  Description of Artificial Sequence: Synthetic oligonucleotide
cuggucaacauagggaacg

SEQ ID NO: 692102 - RNA, 19 nt, Artificial Sequence
  Description of Artificial Sequence: Synthetic oligonucleotide
auauucgguucuuaucuug

SEQ ID NO: 692103 - RNA, 19 nt, Artificial Sequence
  Description of Artificial Sequence: Synthetic oligonucleotide
ugcagacuccuucucuacg

SEQ ID NO: 692104 - RNA, 19 nt, Artificial Sequence
  Description of Artificial Sequence: Synthetic oligonucleotide
aguaguugugaauguucuc

SEQ ID NO: 692105 - RNA, 19 nt, Artificial Sequence
  Description of Artificial Sequence: Synthetic oligonucleotide
uuccgucugcuuuagccgg

SEQ ID NO: 692106 - RNA, 19 nt, Artificial Sequence
  Description of Artificial Sequence: Synthetic oligonucleotide
ugucacauucugaaguauc

SEQ ID NO: 692107 - RNA, 19 nt, Artificial Sequence
  Description of Artificial Sequence: Synthetic oligonucleotide
aaguaguugugaauguucu

SEQ ID NO: 692108 - RNA, 19 nt, Artificial Sequence
  Description of Artificial Sequence: Synthetic oligonucleotide
uaauucuguagcgacacaa

SEQ ID NO: 692109 - RNA, 19 nt, Artificial Sequence
  Description of Artificial Sequence: Synthetic oligonucleotide
ucacacggaagaaaaugac

SEQ ID NO: 692110 - RNA, 19 nt, Artificial Sequence
  Description of Artificial Sequence: Synthetic oligonucleotide
uugacucugcaaacuaaca

SEQ ID NO: 692111 - RNA, 19 nt, Artificial Sequence
  Description of Artificial Sequence: Synthetic oligonucleotide
gaggccaugcacgacagag

SEQ ID NO: 692112 - RNA, 19 nt, Artificial Sequence
  Description of Artificial Sequence: Synthetic oligonucleotide
uucucuacggggcuucuac

SEQ ID NO: 692113 - RNA, 19 nt, Artificial Sequence
  Description of Artificial Sequence: Synthetic oligonucleotide
aagauuugcaacagcuucu

SEQ ID NO: 692114 - RNA, 19 nt, Artificial Sequence
  Description of Artificial Sequence: Synthetic oligonucleotide
aacuagucaaauacuuuca

SEQ ID NO: 692115 - RNA, 19 nt, Artificial Sequence
  Description of Artificial Sequence: Synthetic oligonucleotide
caacauagggaacguagag

SEQ ID NO: 692116 - RNA, 19 nt, Artificial Sequence
  Description of Artificial Sequence: Synthetic oligonucleotide
agaacaggguaacuaguca

SEQ ID NO: 692117 - RNA, 19 nt, Artificial Sequence
  Description of Artificial Sequence: Synthetic oligonucleotide
uagaugcaaagcaagucau

SEQ ID NO: 692118 - RNA, 19 nt, Artificial Sequence
  Description of Artificial Sequence: Synthetic oligonucleotide
gacguccauacuuuaaaca

SEQ ID NO: 692119 - RNA, 19 nt, Artificial Sequence
  Description of Artificial Sequence: Synthetic oligonucleotide
ugugaauguucuccagaug

SEQ ID NO: 692120 - RNA, 19 nt, Artificial Sequence
  Description of Artificial Sequence: Synthetic oligonucleotide
aauauucgguucuuaucuu

SEQ ID NO: 692121 - RNA, 19 nt, Artificial Sequence
  Description of Artificial Sequence: Synthetic oligonucleotide
agcaaagaguguguaaaag

SEQ ID NO: 692122 - RNA, 19 nt, Artificial Sequence
  Description of Artificial Sequence: Synthetic oligonucleotide
cucugaugaagaugugacg

SEQ ID NO: 692123 - RNA, 19 nt, Artificial Sequence
  Description of Artificial Sequence: Synthetic oligonucleotide
aaaaggcggaacauagucu

SEQ ID NO: 692124 - RNA, 19 nt, Artificial Sequence
  Description of Artificial Sequence: Synthetic oligonucleotide
caucacacggaagaaaaug

SEQ ID NO: 692125 - RNA, 19 nt, Artificial Sequence
  Description of Artificial Sequence: Synthetic oligonucleotide
agugucuaagaugaacuug

SEQ ID NO: 692126 - RNA, 19 nt, Artificial Sequence
  Description of Artificial Sequence: Synthetic oligonucleotide
ucuacggggcuucuaccag

SEQ ID NO: 692127 - RNA, 19 nt, Artificial Sequence
  Description of Artificial Sequence: Synthetic oligonucleotide
uagccgacuaagcacuuug

SEQ ID NO: 692128 - RNA, 19 nt, Artificial Sequence
  Description of Artificial Sequence: Synthetic oligonucleotide
ggaaauugggaaugcagug

SEQ ID NO: 692129 - RNA, 19 nt, Artificial Sequence
  Description of Artificial Sequence: Synthetic oligonucleotide
gaugugacgaauccaauau

SEQ ID NO: 692130 - RNA, 19 nt, Artificial Sequence
  Description of Artificial Sequence: Synthetic oligonucleotide
agaugguuacacauugggg

SEQ ID NO: 692131 - RNA, 19 nt, Artificial Sequence
  Description of Artificial Sequence: Synthetic oligonucleotide
uuuggagcauugaccaacu

SEQ ID NO: 692132 - RNA, 19 nt, Artificial Sequence
  Description of Artificial Sequence: Synthetic oligonucleotide
caauauucgguucuuaucu

SEQ ID NO: 692133 - RNA, 19 nt, Artificial Sequence
  Description of Artificial Sequence: Synthetic oligonucleotide
aaaugacaaaggugugccu

SEQ ID NO: 692134 - RNA, 19 nt, Artificial Sequence
  Description of Artificial Sequence: Synthetic oligonucleotide
augaggauacugaagucuc

SEQ ID NO: 692135 - RNA, 19 nt, Artificial Sequence
  Description of Artificial Sequence: Synthetic oligonucleotide
guguguaaaagauuugcaa

SEQ ID NO: 692136 - RNA, 19 nt, Artificial Sequence
  Description of Artificial Sequence: Synthetic oligonucleotide
aaggcacauguuugguaag

SEQ ID NO: 692137 - RNA, 19 nt, Artificial Sequence
  Description of Artificial Sequence: Synthetic oligonucleotide
aucauaucuaauguaucca

SEQ ID NO: 692138 - RNA, 19 nt, Artificial Sequence
  Description of Artificial Sequence: Synthetic oligonucleotide
aagcaaagaguguguaaaa

SEQ ID NO: 692139 - RNA, 19 nt, Artificial Sequence
  Description of Artificial Sequence: Synthetic oligonucleotide
uagggaacguagaggaaga

SEQ ID NO: 692140 - RNA, 19 nt, Artificial Sequence
  Description of Artificial Sequence: Synthetic oligonucleotide
gugacgaauccaauauucg

SEQ ID NO: 692141 - RNA, 19 nt, Artificial Sequence
  Description of Artificial Sequence: Synthetic oligonucleotide
caagaauacaacuucugua

SEQ ID NO: 692142 - RNA, 19 nt, Artificial Sequence
  Description of Artificial Sequence: Synthetic oligonucleotide
gaugaacuuggucacaagu

SEQ ID NO: 692143 - RNA, 19 nt, Artificial Sequence
  Description of Artificial Sequence: Synthetic oligonucleotide
aguugugaauguucuccag

SEQ ID NO: 692144 - RNA, 19 nt, Artificial Sequence
  Description of Artificial Sequence: Synthetic oligonucleotide
gaaucuugagccagagacc

SEQ ID NO: 692145 - RNA, 19 nt, Artificial Sequence
  Description of Artificial Sequence: Synthetic oligonucleotide
ugguaauucuguagcgaca

SEQ ID NO: 692146 - RNA, 19 nt, Artificial Sequence
  Description of Artificial Sequence: Synthetic oligonucleotide
aacguagaggaagaggcau

SEQ ID NO: 692147 - RNA, 19 nt, Artificial Sequence
  Description of Artificial Sequence: Synthetic oligonucleotide
gaacaggguaacuagucaa

SEQ ID NO: 692148 - RNA, 19 nt, Artificial Sequence
  Description of Artificial Sequence: Synthetic oligonucleotide
ugagauguucagcuccuaa

SEQ ID NO: 692149 - RNA, 19 nt, Artificial Sequence
  Description of Artificial Sequence: Synthetic oligonucleotide
cuggacagaucucugauga

SEQ ID NO: 692150 - RNA, 19 nt, Artificial Sequence
  Description of Artificial Sequence: Synthetic oligonucleotide
agagucuuuuggcaaagau

SEQ ID NO: 692151 - RNA, 19 nt, Artificial Sequence
  Description of Artificial Sequence: Synthetic oligonucleotide
aaagauggagucaguacau

SEQ ID NO: 692152 - RNA, 19 nt, Artificial Sequence
  Description of Artificial Sequence: Synthetic oligonucleotide
cuuccacaaagugacgucc

SEQ ID NO: 692153 - RNA, 19 nt, Artificial Sequence
  Description of Artificial Sequence: Synthetic oligonucleotide
ugcuuuagccggcuuguga

SEQ ID NO: 692154 - RNA, 19 nt, Artificial Sequence
  Description of Artificial Sequence: Synthetic oligonucleotide
uuuugaguaaaggcacaug

SEQ ID NO: 692155 - RNA, 19 nt, Artificial Sequence
  Description of Artificial Sequence: Synthetic oligonucleotide
gaugaagaugugacgaauc

SEQ ID NO: 692156 - RNA, 19 nt, Artificial Sequence
  Description of Artificial Sequence: Synthetic oligonucleotide
cuucuaccagaugucaccg

SEQ ID NO: 692157 - RNA, 19 nt, Artificial Sequence
  Description of Artificial Sequence: Synthetic oligonucleotide
acacaugcagaacagggua

SEQ ID NO: 692158 - RNA, 19 nt, Artificial Sequence
  Description of Artificial Sequence: Synthetic oligonucleotide
ugacguccauacuuuaaac

SEQ ID NO: 692159 - RNA, 19 nt, Artificial Sequence
  Description of Artificial Sequence: Synthetic oligonucleotide
uccacugguuaauuaaaua

SEQ ID NO: 692160 - RNA, 19 nt, Artificial Sequence
  Description of Artificial Sequence: Synthetic oligonucleotide
auucgguucuuaucuugag

SEQ ID NO: 692161 - RNA, 19 nt, Artificial Sequence
  Description of Artificial Sequence: Synthetic oligonucleotide
agaaaaggguaagaagcug

SEQ ID NO: 692162 - RNA, 19 nt, Artificial Sequence
  Description of Artificial Sequence: Synthetic oligonucleotide
uugaguaaaggcacauguu

SEQ ID NO: 692163 - RNA, 19 nt, Artificial Sequence
  Description of Artificial Sequence: Synthetic oligonucleotide
cugccaaguacuucucuag

SEQ ID NO: 692164 - RNA, 19 nt, Artificial Sequence
  Description of Artificial Sequence: Synthetic oligonucleotide
gaugaagguuugaauggug

SEQ ID NO: 692165 - RNA, 19 nt, Artificial Sequence
  Description of Artificial Sequence: Synthetic oligonucleotide
aguggaggaugcuuugcug

SEQ ID NO: 692166 - RNA, 19 nt, Artificial Sequence
  Description of Artificial Sequence: Synthetic oligonucleotide
agaugugacgaauccaaua

SEQ ID NO: 692167 - RNA, 19 nt, Artificial Sequence
  Description of Artificial Sequence: Synthetic oligonucleotide
caacacaaugaacaauguc

SEQ ID NO: 692168 - RNA, 19 nt, Artificial Sequence
  Description of Artificial Sequence: Synthetic oligonucleotide
gagucaguacauuuucuaa

SEQ ID NO: 692169 - RNA, 19 nt, Artificial Sequence
  Description of Artificial Sequence: Synthetic oligonucleotide
aaagugacguccauacuuu

SEQ ID NO: 692170 - RNA, 19 nt, Artificial Sequence
  Description of Artificial Sequence: Synthetic oligonucleotide
gcuuuagccggcuugugag

SEQ ID NO: 692171 - RNA, 19 nt, Artificial Sequence
  Description of Artificial Sequence: Synthetic oligonucleotide
cucuauggccuucaaaaca

SEQ ID NO: 692172 - RNA, 19 nt, Artificial Sequence
  Description of Artificial Sequence: Synthetic oligonucleotide
cuuuagccggcuugugagg

SEQ ID NO: 692173 - RNA, 19 nt, Artificial Sequence
  Description of Artificial Sequence: Synthetic oligonucleotide
cuggugaaucgcaaacuac

SEQ ID NO: 692174 - RNA, 19 nt, Artificial Sequence
  Description of Artificial Sequence: Synthetic oligonucleotide
gaacagagucuuuuggcaa

SEQ ID NO: 692175 - RNA, 19 nt, Artificial Sequence
  Description of Artificial Sequence: Synthetic oligonucleotide
aguguguaaaagauuugca

SEQ ID NO: 692176 - RNA, 19 nt, Artificial Sequence
  Description of Artificial Sequence: Synthetic oligonucleotide
gaaggggcaguuguguccc

SEQ ID NO: 692177 - RNA, 19 nt, Artificial Sequence
  Description of Artificial Sequence: Synthetic oligonucleotide
cuucuguuagaaguguuuc

SEQ ID NO: 692178 - RNA, 19 nt, Artificial Sequence
  Description of Artificial Sequence: Synthetic oligonucleotide
cacugguuaauuaaauaaa

SEQ ID NO: 692179 - RNA, 19 nt, Artificial Sequence
  Description of Artificial Sequence: Synthetic oligonucleotide
aauguucuccagaugguua

SEQ ID NO: 692180 - RNA, 19 nt, Artificial Sequence
  Description of Artificial Sequence: Synthetic oligonucleotide
uuuagccggcuugugagga

SEQ ID NO: 692181 - RNA, 19 nt, Artificial Sequence
  Description of Artificial Sequence: Synthetic oligonucleotide
cagauugaugaggauacug

SEQ ID NO: 692182 - RNA, 19 nt, Artificial Sequence
  Description of Artificial Sequence: Synthetic oligonucleotide
acgaauccaauauucgguu

SEQ ID NO: 692183 - RNA, 19 nt, Artificial Sequence
  Description of Artificial Sequence: Synthetic oligonucleotide
aauggugaguaaauccuuu

SEQ ID NO: 692184 - RNA, 19 nt, Artificial Sequence
  Description of Artificial Sequence: Synthetic oligonucleotide
ucugcuuuagccggcuugu

SEQ ID NO: 692185 - RNA, 19 nt, Artificial Sequence
  Description of Artificial Sequence: Synthetic oligonucleotide
ucgaggaguggcauacacu

SEQ ID NO: 692186 - RNA, 19 nt, Artificial Sequence
  Description of Artificial Sequence: Synthetic oligonucleotide
caugaaccugcugugaguc

SEQ ID NO: 692187 - RNA, 19 nt, Artificial Sequence
  Description of Artificial Sequence: Synthetic oligonucleotide
ucuuguuccgucugcuuua

SEQ ID NO: 692188 - RNA, 19 nt, Artificial Sequence
  Description of Artificial Sequence: Synthetic oligonucleotide
ucccgggaucuaaucagag

SEQ ID NO: 692189 - RNA, 19 nt, Artificial Sequence
  Description of Artificial Sequence: Synthetic oligonucleotide
aaaggguaagaagcugcca

SEQ ID NO: 692190 - RNA, 19 nt, Artificial Sequence
  Description of Artificial Sequence: Synthetic oligonucleotide
gucaguacauuuucuaacu

SEQ ID NO: 692191 - RNA, 19 nt, Artificial Sequence
  Description of Artificial Sequence: Synthetic oligonucleotide
gguaauucuguagcgacac

SEQ ID NO: 692192 - RNA, 19 nt, Artificial Sequence
  Description of Artificial Sequence: Synthetic oligonucleotide
agguaucauaucuaaugua

SEQ ID NO: 692193 - RNA, 19 nt, Artificial Sequence
  Description of Artificial Sequence: Synthetic oligonucleotide
aucucugaugaagauguga

SEQ ID NO: 692194 - RNA, 19 nt, Artificial Sequence
  Description of Artificial Sequence: Synthetic oligonucleotide
agcaagaauacaacuucug

SEQ ID NO: 692195 - RNA, 19 nt, Artificial Sequence
  Description of Artificial Sequence: Synthetic oligonucleotide
auguuugguaagucuugug

SEQ ID NO: 692196 - RNA, 19 nt, Artificial Sequence
  Description of Artificial Sequence: Synthetic oligonucleotide
augaagguuugaaugguga

SEQ ID NO: 692197 - RNA, 19 nt, Artificial Sequence
  Description of Artificial Sequence: Synthetic oligonucleotide
ucgcaaacuacagaacauc

SEQ ID NO: 692198 - RNA, 19 nt, Artificial Sequence
  Description of Artificial Sequence: Synthetic oligonucleotide
uccuuuuguccaucacuug

SEQ ID NO: 692199 - RNA, 19 nt, Artificial Sequence
  Description of Artificial Sequence: Synthetic oligonucleotide
ggacagaucucugaugaag

SEQ ID NO: 692200 - RNA, 19 nt, Artificial Sequence
  Description of Artificial Sequence: Synthetic oligonucleotide
ucaucacacggaagaaaau

SEQ ID NO: 692201 - RNA, 19 nt, Artificial Sequence
  Description of Artificial Sequence: Synthetic oligonucleotide
uugggguuagcaguugaac

SEQ ID NO: 692202 - RNA, 19 nt, Artificial Sequence
  Description of Artificial Sequence: Synthetic oligonucleotide
agauccuuuagccgacuaa

SEQ ID NO: 692203 - RNA, 19 nt, Artificial Sequence
  Description of Artificial Sequence: Synthetic oligonucleotide
ucucuacggggcuucuacc

SEQ ID NO: 692204 - RNA, 19 nt, Artificial Sequence
  Description of Artificial Sequence: Synthetic oligonucleotide
acagaucucugaugaagau

SEQ ID NO: 692205 - RNA, 19 nt, Artificial Sequence
  Description of Artificial Sequence: Synthetic oligonucleotide
gaaucgcaaacuacagaac

SEQ ID NO: 692206 - RNA, 19 nt, Artificial Sequence
  Description of Artificial Sequence: Synthetic oligonucleotide
gacgaauccaauauucggu

SEQ ID NO: 692207 - RNA, 19 nt, Artificial Sequence
  Description of Artificial Sequence: Synthetic oligonucleotide
ccgacuaagcacuuugccc

SEQ ID NO: 692208 - RNA, 19 nt, Artificial Sequence
  Description of Artificial Sequence: Synthetic oligonucleotide
cuuuagccgacuaagcacu

SEQ ID NO: 692209 - RNA, 19 nt, Artificial Sequence
  Description of Artificial Sequence: Synthetic oligonucleotide
acauguuugguaagucuug

SEQ ID NO: 692210 - RNA, 19 nt, Artificial Sequence
  Description of Artificial Sequence: Synthetic oligonucleotide
gauaaagaccacacuggaa

SEQ ID NO: 692211 - RNA, 19 nt, Artificial Sequence
  Description of Artificial Sequence: Synthetic oligonucleotide
uccuaagcucuggaaguag

SEQ ID NO: 692212 - RNA, 19 nt, Artificial Sequence
  Description of Artificial Sequence: Synthetic oligonucleotide
cacaaugaacaauguccug

SEQ ID NO: 692213 - RNA, 19 nt, Artificial Sequence
  Description of Artificial Sequence: Synthetic oligonucleotide
gagcauugaccaacucugg

SEQ ID NO: 692214 - RNA, 19 nt, Artificial Sequence
  Description of Artificial Sequence: Synthetic oligonucleotide
gugaaucgcaaacuacaga

SEQ ID NO: 692215 - RNA, 19 nt, Artificial Sequence
  Description of Artificial Sequence: Synthetic oligonucleotide
gguucuuaucuugaggaac

SEQ ID NO: 692216 - RNA, 19 nt, Artificial Sequence
  Description of Artificial Sequence: Synthetic oligonucleotide
gaacuuggucacaagucca

SEQ ID NO: 692217 - RNA, 19 nt, Artificial Sequence
  Description of Artificial Sequence: Synthetic oligonucleotide
ggugaaucgcaaacuacag

SEQ ID NO: 692218 - RNA, 19 nt, Artificial Sequence
  Description of Artificial Sequence: Synthetic oligonucleotide
cuacaauuguugaggacaa

SEQ ID NO: 692219 - RNA, 19 nt, Artificial Sequence
  Description of Artificial Sequence: Synthetic oligonucleotide
gucuucucgaguucagcca

SEQ ID NO: 692220 - RNA, 19 nt, Artificial Sequence
  Description of Artificial Sequence: Synthetic oligonucleotide
cuaugguuggaaaggcaga

SEQ ID NO: 692221 - RNA, 19 nt, Artificial Sequence
  Description of Artificial Sequence: Synthetic oligonucleotide
uggcuuugacucugcaaac

SEQ ID NO: 692222 - RNA, 19 nt, Artificial Sequence
  Description of Artificial Sequence: Synthetic oligonucleotide
guuagcaguugaacaacac

SEQ ID NO: 692223 - RNA, 19 nt, Artificial Sequence
  Description of Artificial Sequence: Synthetic oligonucleotide
guagaauagagaagaccuc

SEQ ID NO: 692224 - RNA, 19 nt, Artificial Sequence
  Description of Artificial Sequence: Synthetic oligonucleotide
ccagaugucaccgugucac

SEQ ID NO: 692225 - RNA, 19 nt, Artificial Sequence
  Description of Artificial Sequence: Synthetic oligonucleotide
aggaagacauggugugcug

SEQ ID NO: 692226 - RNA, 19 nt, Artificial Sequence
  Description of Artificial Sequence: Synthetic oligonucleotide
ugguaagucuuguguccug

SEQ ID NO: 692227 - RNA, 19 nt, Artificial Sequence
  Description of Artificial Sequence: Synthetic oligonucleotide
ugugucccgggaucuaauc

SEQ ID NO: 692228 - RNA, 19 nt, Artificial Sequence
  Description of Artificial Sequence: Synthetic oligonucleotide
ggguaagaagcugccagcg

SEQ ID NO: 692229 - RNA, 19 nt, Artificial Sequence
  Description of Artificial Sequence: Synthetic oligonucleotide
acaaucugugaaauccacu

SEQ ID NO: 692230 - RNA, 19 nt, Artificial Sequence
  Description of Artificial Sequence: Synthetic oligonucleotide
guaagaagcugccagcgau

SEQ ID NO: 692231 - RNA, 19 nt, Artificial Sequence
  Description of Artificial Sequence: Synthetic oligonucleotide
gaagguuugaauggugagu

SEQ ID NO: 692232 - RNA, 19 nt, Artificial Sequence
  Description of Artificial Sequence: Synthetic oligonucleotide
cuuugacucugcaaacuaa

SEQ ID NO: 692233 - RNA, 19 nt, Artificial Sequence
  Description of Artificial Sequence: Synthetic oligonucleotide
cuccagaagggucaugaga

SEQ ID NO: 692234 - RNA, 19 nt, Artificial Sequence
  Description of Artificial Sequence: Synthetic oligonucleotide
uacaauuguugaggacaag

SEQ ID NO: 692235 - RNA, 19 nt, Artificial Sequence
  Description of Artificial Sequence: Synthetic oligonucleotide
gaagacauggugugcugcu

SEQ ID NO: 692236 - RNA, 19 nt, Artificial Sequence
  Description of Artificial Sequence: Synthetic oligonucleotide
caugguaauucuguagcga

SEQ ID NO: 692237 - RNA, 19 nt, Artificial Sequence
  Description of Artificial Sequence: Synthetic oligonucleotide
caucagauugaugaggaua

SEQ ID NO: 692238 - RNA, 19 nt, Artificial Sequence
  Description of Artificial Sequence: Synthetic oligonucleotide
gaagugcucucuggggaag

SEQ ID NO: 692239 - RNA, 19 nt, Artificial Sequence
  Description of Artificial Sequence: Synthetic oligonucleotide
cagcagauuucuccagaag

SEQ ID NO: 692240 - RNA, 19 nt, Artificial Sequence
  Description of Artificial Sequence: Synthetic oligonucleotide
gucaugagaagugaagaua

SEQ ID NO: 692241 - RNA, 19 nt, Artificial Sequence
  Description of Artificial Sequence: Synthetic oligonucleotide
uucaaaccccaaagagaaa

SEQ ID NO: 692242 - RNA, 19 nt, Artificial Sequence
  Description of Artificial Sequence: Synthetic oligonucleotide
agccgacuaagcacuuugc

SEQ ID NO: 692243 - RNA, 19 nt, Artificial Sequence
  Description of Artificial Sequence: Synthetic oligonucleotide
cuucacccuguaagucucg

SEQ ID NO: 692244 - RNA, 19 nt, Artificial Sequence
  Description of Artificial Sequence: Synthetic oligonucleotide
aagugacguccauacuuua

SEQ ID NO: 692245 - RNA, 19 nt, Artificial Sequence
  Description of Artificial Sequence: Synthetic oligonucleotide
uggaggaugcuuugcugau

SEQ ID NO: 692246 - RNA, 19 nt, Artificial Sequence
  Description of Artificial Sequence: Synthetic oligonucleotide
agaugcaaagcaagucaug

SEQ ID NO: 692247 - RNA, 19 nt, Artificial Sequence
  Description of Artificial Sequence: Synthetic oligonucleotide
gcagaagucgaggaguggc

SEQ ID NO: 692248 - RNA, 19 nt, Artificial Sequence
  Description of Artificial Sequence: Synthetic oligonucleotide
cucuacggggcuucuacca

SEQ ID NO: 692249 - RNA, 19 nt, Artificial Sequence
  Description of Artificial Sequence: Synthetic oligonucleotide
acguagaggaagaggcauc

SEQ ID NO: 692250 - RNA, 19 nt, Artificial Sequence
  Description of Artificial Sequence: Synthetic oligonucleotide
ccguauguuuucuaaagca

SEQ ID NO: 692251 - RNA, 19 nt, Artificial Sequence
  Description of Artificial Sequence: Synthetic oligonucleotide
cagaacugcucuuagguau

SEQ ID NO: 692252 - RNA, 19 nt, Artificial Sequence
  Description of Artificial Sequence: Synthetic oligonucleotide
aagaugugacgaauccaau

SEQ ID NO: 692253 - RNA, 19 nt, Artificial Sequence
  Description of Artificial Sequence: Synthetic oligonucleotide
augugacgaauccaauauu

SEQ ID NO: 692254 - RNA, 19 nt, Artificial Sequence
  Description of Artificial Sequence: Synthetic oligonucleotide
cauccuguguugcucuguc

SEQ ID NO: 692255 - RNA, 19 nt, Artificial Sequence
  Description of Artificial Sequence: Synthetic oligonucleotide
agaauagagaagaccucaa

SEQ ID NO: 692256 - RNA, 19 nt, Artificial Sequence
  Description of Artificial Sequence: Synthetic oligonucleotide
gggguuagcaguugaacaa

SEQ ID NO: 692257 - RNA, 19 nt, Artificial Sequence
  Description of Artificial Sequence: Synthetic oligonucleotide
aggacaagcauggcuuuga

SEQ ID NO: 692258 - RNA, 19 nt, Artificial Sequence
  Description of Artificial Sequence: Synthetic oligonucleotide
ucgaacagccauguuccaa

SEQ ID NO: 692259 - RNA, 19 nt, Artificial Sequence
  Description of Artificial Sequence: Synthetic oligonucleotide
aucgcaaacuacagaacau

SEQ ID NO: 692260 - RNA, 19 nt, Artificial Sequence
  Description of Artificial Sequence: Synthetic oligonucleotide
uucuaccagaugucaccgu

SEQ ID NO: 692261 - RNA, 19 nt, Artificial Sequence
  Description of Artificial Sequence: Synthetic oligonucleotide
cugcaaacuaacagcucca

SEQ ID NO: 692262 - RNA, 19 nt, Artificial Sequence
  Description of Artificial Sequence: Synthetic oligonucleotide
uacggggcuucuaccagau

SEQ ID NO: 692263 - RNA, 19 nt, Artificial Sequence
  Description of Artificial Sequence: Synthetic oligonucleotide
gacagaugcugggaaacaa

SEQ ID NO: 692264 - RNA, 19 nt, Artificial Sequence
  Description of Artificial Sequence: Synthetic oligonucleotide
ucagauugaugaggauacu

SEQ ID NO: 692265 - RNA, 19 nt, Artificial Sequence
  Description of Artificial Sequence: Synthetic oligonucleotide
augcagaacaggguaacua

SEQ ID NO: 692266 - RNA, 19 nt, Artificial Sequence
  Description of Artificial Sequence: Synthetic oligonucleotide
agcagaagucgaggagugg

SEQ ID NO: 692267 - RNA, 19 nt, Artificial Sequence
  Description of Artificial Sequence: Synthetic oligonucleotide
gccgacuaagcacuuugcc

SEQ ID NO: 692268 - RNA, 19 nt, Artificial Sequence
  Description of Artificial Sequence: Synthetic oligonucleotide
uggaugcuacacacuggaa

SEQ ID NO: 692269 - RNA, 19 nt, Artificial Sequence
  Description of Artificial Sequence: Synthetic oligonucleotide
ucacccuguaagucucggu

SEQ ID NO: 692270 - RNA, 19 nt, Artificial Sequence
  Description of Artificial Sequence: Synthetic oligonucleotide
gugucccgggaucuaauca

SEQ ID NO: 692271 - RNA, 19 nt, Artificial Sequence
  Description of Artificial Sequence: Synthetic oligonucleotide
uagccggcuugugaggacc

SEQ ID NO: 692272 - RNA, 19 nt, Artificial Sequence
  Description of Artificial Sequence: Synthetic oligonucleotide
uuuagccgacuaagcacuu

SEQ ID NO: 692273 - RNA, 19 nt, Artificial Sequence
  Description of Artificial Sequence: Synthetic oligonucleotide
cuuguuccgucugcuuuag

SEQ ID NO: 692274 - RNA, 19 nt, Artificial Sequence
  Description of Artificial Sequence: Synthetic oligonucleotide
cccguauguuuucuaaagc

SEQ ID NO: 692275 - RNA, 19 nt, Artificial Sequence
  Description of Artificial Sequence: Synthetic oligonucleotide
uggucaacauagggaacgu

SEQ ID NO: 692276 - RNA, 19 nt, Artificial Sequence
  Description of Artificial Sequence: Synthetic oligonucleotide
cucuuagguaucauaucua

SEQ ID NO: 692277 - RNA, 19 nt, Artificial Sequence
  Description of Artificial Sequence: Synthetic oligonucleotide
uggacagaucucugaugaa

SEQ ID NO: 692278 - RNA, 19 nt, Artificial Sequence
  Description of Artificial Sequence: Synthetic oligonucleotide
uuagccggcuugugaggac

SEQ ID NO: 692279 - RNA, 19 nt, Artificial Sequence
  Description of Artificial Sequence: Synthetic oligonucleotide
ucuucccguauguuuucua

SEQ ID NO: 692280 - RNA, 19 nt, Artificial Sequence
  Description of Artificial Sequence: Synthetic oligonucleotide
agcauggcuuugacucugc

SEQ ID NO: 692281 - RNA, 19 nt, Artificial Sequence
  Description of Artificial Sequence: Synthetic oligonucleotide
ugggaaugcagugguggaa

SEQ ID NO: 692282 - RNA, 19 nt, Artificial Sequence
  Description of Artificial Sequence: Synthetic oligonucleotide
gucacauucugaaguaucu

SEQ ID NO: 692283 - RNA, 19 nt, Artificial Sequence
  Description of Artificial Sequence: Synthetic oligonucleotide
agacagaugcugggaaaca

SEQ ID NO: 692284 - RNA, 19 nt, Artificial Sequence
  Description of Artificial Sequence: Synthetic oligonucleotide
caugcagguggucauuaaa

SEQ ID NO: 692285 - RNA, 19 nt, Artificial Sequence
  Description of Artificial Sequence: Synthetic oligonucleotide
ugguuacacauugggguua

SEQ ID NO: 692286 - RNA, 19 nt, Artificial Sequence
  Description of Artificial Sequence: Synthetic oligonucleotide
guaggugcagcagauuucu

SEQ ID NO: 692287 - RNA, 19 nt, Artificial Sequence
  Description of Artificial Sequence: Synthetic oligonucleotide
ugacaaaggugugccuggu

SEQ ID NO: 692288 - RNA, 19 nt, Artificial Sequence
  Description of Artificial Sequence: Synthetic oligonucleotide
gggucaugagaagugaaga

SEQ ID NO: 692289 - RNA, 19 nt, Artificial Sequence
  Description of Artificial Sequence: Synthetic oligonucleotide
guaauucuguagcgacaca

SEQ ID NO: 692290 - RNA, 19 nt, Artificial Sequence
  Description of Artificial Sequence: Synthetic oligonucleotide
aggcggaacauagucugga

SEQ ID NO: 692291 - RNA, 19 nt, Artificial Sequence
  Description of Artificial Sequence: Synthetic oligonucleotide
agugacguccauacuuuaa

SEQ ID NO: 692292 - RNA, 19 nt, Artificial Sequence
  Description of Artificial Sequence: Synthetic oligonucleotide
agguuugaauggugaguaa

SEQ ID NO: 692293 - RNA, 19 nt, Artificial Sequence
  Description of Artificial Sequence: Synthetic oligonucleotide
ggagacgugggaugucaug

SEQ ID NO: 692294 - RNA, 19 nt, Artificial Sequence
  Description of Artificial Sequence: Synthetic oligonucleotide
cuguagcgacacaaauguc

SEQ ID NO: 692295 - RNA, 19 nt, Artificial Sequence
  Description of Artificial Sequence: Synthetic oligonucleotide
gaagucgaggaguggcaua

SEQ ID NO: 692296 - RNA, 19 nt, Artificial Sequence
  Description of Artificial Sequence: Synthetic oligonucleotide
gguuacacauugggguuag

SEQ ID NO: 692297 - RNA, 19 nt, Artificial Sequence
  Description of Artificial Sequence: Synthetic oligonucleotide
cauugggguuagcaguuga

SEQ ID NO: 692298 - RNA, 19 nt, Artificial Sequence
  Description of Artificial Sequence: Synthetic oligonucleotide
ccccgugaggccaugcacg

SEQ ID NO: 692299 - RNA, 19 nt, Artificial Sequence
  Description of Artificial Sequence: Synthetic oligonucleotide
cuaagcacuuugcccuuca

SEQ ID NO: 692300 - RNA, 19 nt, Artificial Sequence
  Description of Artificial Sequence: Synthetic oligonucleotide
caaccagaaagccucucua

SEQ ID NO: 692301 - RNA, 19 nt, Artificial Sequence
  Description of Artificial Sequence: Synthetic oligonucleotide
caggguaacuagucaaaua

SEQ ID NO: 692302 - RNA, 19 nt, Artificial Sequence
  Description of Artificial Sequence: Synthetic oligonucleotide
cuuuccaagcaaagagugu

SEQ ID NO: 692303 - RNA, 19 nt, Artificial Sequence
  Description of Artificial Sequence: Synthetic oligonucleotide
agggaacguagaggaagag

SEQ ID NO: 692304 - RNA, 19 nt, Artificial Sequence
  Description of Artificial Sequence: Synthetic oligonucleotide
uuguuccgucugcuuuagc

SEQ ID NO: 692305 - RNA, 19 nt, Artificial Sequence
  Description of Artificial Sequence: Synthetic oligonucleotide
gaccaacucugggacacca

SEQ ID NO: 692306 - RNA, 19 nt, Artificial Sequence
  Description of Artificial Sequence: Synthetic oligonucleotide
gguaacuagucaaauacuu

SEQ ID NO: 692307 - RNA, 19 nt, Artificial Sequence
  Description of Artificial Sequence: Synthetic oligonucleotide
auugggguuagcaguugaa

SEQ ID NO: 692308 - RNA, 19 nt, Artificial Sequence
  Description of Artificial Sequence: Synthetic oligonucleotide
gguaagaagcugccagcga

SEQ ID NO: 692309 - RNA, 19 nt, Artificial Sequence
  Description of Artificial Sequence: Synthetic oligonucleotide
gcuuccacaaagugacguc

SEQ ID NO: 692310 - RNA, 19 nt, Artificial Sequence
  Description of Artificial Sequence: Synthetic oligonucleotide
guaacuagucaaauacuuu

SEQ ID NO: 692311 - RNA, 19 nt, Artificial Sequence
  Description of Artificial Sequence: Synthetic oligonucleotide
agcaagucaugcagguggu

SEQ ID NO: 692312 - RNA, 19 nt, Artificial Sequence
  Description of Artificial Sequence: Synthetic oligonucleotide
cauugucugugugcuccag

SEQ ID NO: 692313 - RNA, 19 nt, Artificial Sequence
  Description of Artificial Sequence: Synthetic oligonucleotide
ugcuacacacuggaaucuu

SEQ ID NO: 692314 - RNA, 19 nt, Artificial Sequence
  Description of Artificial Sequence: Synthetic oligonucleotide
cuacggggcuucuaccaga

SEQ ID NO: 692315 - RNA, 19 nt, Artificial Sequence
  Description of Artificial Sequence: Synthetic oligonucleotide
cauagggaacguagaggaa

SEQ ID NO: 692316 - RNA, 19 nt, Artificial Sequence
  Description of Artificial Sequence: Synthetic oligonucleotide
ggguuagcaguugaacaac

SEQ ID NO: 692317 - RNA, 19 nt, Artificial Sequence
  Description of Artificial Sequence: Synthetic oligonucleotide
gguuagcaguugaacaaca

SEQ ID NO: 692318 - RNA, 19 nt, Artificial Sequence
  Description of Artificial Sequence: Synthetic oligonucleotide
aacugcucuuagguaucau

SEQ ID NO: 692319 - RNA, 19 nt, Artificial Sequence
  Description of Artificial Sequence: Synthetic oligonucleotide
cuuuuggagcauugaccaa

SEQ ID NO: 692320 - RNA, 19 nt, Artificial Sequence
  Description of Artificial Sequence: Synthetic oligonucleotide
ugaccaacucugggacacc

SEQ ID NO: 692321 - RNA, 19 nt, Artificial Sequence
  Description of Artificial Sequence: Synthetic oligonucleotide
ccaagggcuguucuuguuc

SEQ ID NO: 692322 - RNA, 19 nt, Artificial Sequence
  Description of Artificial Sequence: Synthetic oligonucleotide
gcuuugacucugcaaacua

SEQ ID NO: 692323 - RNA, 19 nt, Artificial Sequence
  Description of Artificial Sequence: Synthetic oligonucleotide
uagcgacacaaaugucuuu

SEQ ID NO: 692324 - RNA, 19 nt, Artificial Sequence
  Description of Artificial Sequence: Synthetic oligonucleotide
ccuggacagaucucugaug

SEQ ID NO: 692325 - RNA, 19 nt, Artificial Sequence
  Description of Artificial Sequence: Synthetic oligonucleotide
cuggagacgugggauguca

SEQ ID NO: 692326 - RNA, 19 nt, Artificial Sequence
  Description of Artificial Sequence: Synthetic oligonucleotide
cccgggaucuaaucagagc

SEQ ID NO: 692327 - RNA, 19 nt, Artificial Sequence
  Description of Artificial Sequence: Synthetic oligonucleotide
gcuacacacuggaaucuug

SEQ ID NO: 692328 - RNA, 19 nt, Artificial Sequence
  Description of Artificial Sequence: Synthetic oligonucleotide
uuagccgacuaagcacuuu

SEQ ID NO: 692329 - RNA, 19 nt, Artificial Sequence
  Description of Artificial Sequence: Synthetic oligonucleotide
ccgggaucuaaucagagcu

SEQ ID NO: 692330 - RNA, 19 nt, Artificial Sequence
  Description of Artificial Sequence: Synthetic oligonucleotide
ccagguagaugcaaagcaa

SEQ ID NO: 692331 - RNA, 19 nt, Artificial Sequence
  Description of Artificial Sequence: Synthetic oligonucleotide
cagaagggucaugagaagu

SEQ ID NO: 692332 - RNA, 19 nt, Artificial Sequence
  Description of Artificial Sequence: Synthetic oligonucleotide
gaacaauguccuggacaga

SEQ ID NO: 692333 - RNA, 19 nt, Artificial Sequence
  Description of Artificial Sequence: Synthetic oligonucleotide
cauguuugguaagucuugu

SEQ ID NO: 692334 - RNA, 19 nt, Artificial Sequence
  Description of Artificial Sequence: Synthetic oligonucleotide
gcagcagauuucuccagaa

SEQ ID NO: 692335 - RNA, 19 nt, Artificial Sequence
  Description of Artificial Sequence: Synthetic oligonucleotide
gcacauguuugguaagucu

SEQ ID NO: 692336 - RNA, 19 nt, Artificial Sequence
  Description of Artificial Sequence: Synthetic oligonucleotide
guacccaaccagaaagccu

SEQ ID NO: 692337 - RNA, 19 nt, Artificial Sequence
  Description of Artificial Sequence: Synthetic oligonucleotide
caagcauggcuuugacucu

SEQ ID NO: 692338 - RNA, 19 nt, Artificial Sequence
  Description of Artificial Sequence: Synthetic oligonucleotide
gggaaugcagugguggaaa

SEQ ID NO: 692339 - RNA, 19 nt, Artificial Sequence
  Description of Artificial Sequence: Synthetic oligonucleotide
guagcgacacaaaugucuu

SEQ ID NO: 692340 - RNA, 19 nt, Artificial Sequence
  Description of Artificial Sequence: Synthetic oligonucleotide
ggcacauguuugguaaguc

SEQ ID NO: 692341 - RNA, 19 nt, Artificial Sequence
  Description of Artificial Sequence: Synthetic oligonucleotide
ccuggucaacauagggaac

SEQ ID NO: 692342 - RNA, 19 nt, Artificial Sequence
  Description of Artificial Sequence: Synthetic oligonucleotide
cacccuguaagucucgguu

SEQ ID NO: 692343 - RNA, 19 nt, Artificial Sequence
  Description of Artificial Sequence: Synthetic oligonucleotide
cgaauccaauauucgguuc

SEQ ID NO: 692344 - RNA, 19 nt, Artificial Sequence
  Description of Artificial Sequence: Synthetic oligonucleotide
cgacuaagcacuuugcccu

SEQ ID NO: 692345 - RNA, 19 nt, Artificial Sequence
  Description of Artificial Sequence: Synthetic oligonucleotide
cuggaaugacugccaagua

SEQ ID NO: 692346 - RNA, 19 nt, Artificial Sequence
  Description of Artificial Sequence: Synthetic oligonucleotide
gggaucuaaucagagcugu

SEQ ID NO: 692347 - RNA, 19 nt, Artificial Sequence
  Description of Artificial Sequence: Synthetic oligonucleotide
ggucacaaguccagaaugu

SEQ ID NO: 692348 - RNA, 19 nt, Artificial Sequence
  Description of Artificial Sequence: Synthetic oligonucleotide
gucccgggaucuaaucaga

SEQ ID NO: 692349 - RNA, 19 nt, Artificial Sequence
  Description of Artificial Sequence: Synthetic oligonucleotide
agucucgaacagccauguu

SEQ ID NO: 692350 - RNA, 19 nt, Artificial Sequence
  Description of Artificial Sequence: Synthetic oligonucleotide
gaaugcagugguggaaauu

SEQ ID NO: 692351 - RNA, 19 nt, Artificial Sequence
  Description of Artificial Sequence: Synthetic oligonucleotide
acggggcuucuaccagaug

SEQ ID NO: 692352 - RNA, 19 nt, Artificial Sequence
  Description of Artificial Sequence: Synthetic oligonucleotide
gacuaagcacuuugcccuu

SEQ ID NO: 692353 - RNA, 19 nt, Artificial Sequence
  Description of Artificial Sequence: Synthetic oligonucleotide
ggaucuaaucagagcuguc

SEQ ID NO: 692354 - RNA, 19 nt, Artificial Sequence
  Description of Artificial Sequence: Synthetic oligonucleotide
cgggaucuaaucagagcug

SEQ ID NO: 692355 - RNA, 19 nt, Artificial Sequence
  Description of Artificial Sequence: Synthetic oligonucleotide
ggguaacuagucaaauacu

SEQ ID NO: 692356 - RNA, 19 nt, Artificial Sequence
  Description of Artificial Sequence: Synthetic oligonucleotide
agucgaggaguggcauaca

SEQ ID NO: 692357 - RNA, 19 nt, Artificial Sequence
  Description of Artificial Sequence: Synthetic oligonucleotide
cugcuuuagccggcuugug

SEQ ID NO: 692358 - RNA, 19 nt, Artificial Sequence
  Description of Artificial Sequence: Synthetic oligonucleotide
cgugaggccaugcacgaca

SEQ ID NO: 692359 - RNA, 19 nt, Artificial Sequence
  Description of Artificial Sequence: Synthetic oligonucleotide
caccaacgccagcaaucuc

SEQ ID NO: 692360 - RNA, 19 nt, Artificial Sequence
  Description of Artificial Sequence: Synthetic oligonucleotide
ggcggaacauagucuggaa

SEQ ID NO: 692361 - RNA, 19 nt, Artificial Sequence
  Description of Artificial Sequence: Synthetic oligonucleotide
ggccuucaaaacauugucu

SEQ ID NO: 692362 - RNA, 19 nt, Artificial Sequence
  Description of Artificial Sequence: Synthetic oligonucleotide
ccuucaaaacauugucugu

SEQ ID NO: 692363 - RNA, 19 nt, Artificial Sequence
  Description of Artificial Sequence: Synthetic oligonucleotide
gaggaguggcauacacugu

SEQ ID NO: 692364 - RNA, 19 nt, Artificial Sequence
  Description of Artificial Sequence: Synthetic oligonucleotide
caacgccagcaaucuccuc

SEQ ID NO: 692365 - RNA, 19 nt, Artificial Sequence
  Description of Artificial Sequence: Synthetic oligonucleotide
ccggcuugugaggaccucc

SEQ ID NO: 692366 - RNA, 19 nt, Artificial Sequence
  Description of Artificial Sequence: Synthetic oligonucleotide
ccaugcacgacagagcagu

SEQ ID NO: 692367 - RNA, 19 nt, Artificial Sequence
  Description of Artificial Sequence: Synthetic oligonucleotide
ggaaguaguugugaauguu

SEQ ID NO: 692368 - RNA, 19 nt, Artificial Sequence
  Description of Artificial Sequence: Synthetic oligonucleotide
cacgacagagcaguuguuu

SEQ ID NO: 692369 - RNA, 19 nt, Artificial Sequence
  Description of Artificial Sequence: Synthetic oligonucleotide
gcggaacauagucuggaau

SEQ ID NO: 692370 - RNA, 19 nt, Artificial Sequence
  Description of Artificial Sequence: Synthetic oligonucleotide
ccuaagcucuggaaguagu

SEQ ID NO: 692371 - RNA, 19 nt, Artificial Sequence
  Description of Artificial Sequence: Synthetic oligonucleotide
gggcaguugugucccggga

SEQ ID NO: 692372 - RNA, 19 nt, Artificial Sequence
  Description of Artificial Sequence: Synthetic oligonucleotide
agccggcuugugaggaccu

SEQ ID NO: 692373 - RNA, 19 nt, Artificial Sequence
  Description of Artificial Sequence: Synthetic oligonucleotide
ccaaccagaaagccucucu

SEQ ID NO: 692374 - RNA, 19 nt, Artificial Sequence
  Description of Artificial Sequence: Synthetic oligonucleotide
cggggcuucuaccagaugu

SEQ ID NO: 692375 - RNA, 19 nt, Artificial Sequence
  Description of Artificial Sequence: Synthetic oligonucleotide
caguugugucccgggaucu

SEQ ID NO: 692376 - RNA, 19 nt, Artificial Sequence
  Description of Artificial Sequence: Synthetic oligonucleotide
ggucaacauagggaacgua

SEQ ID NO: 692377 - RNA, 19 nt, Artificial Sequence
  Description of Artificial Sequence: Synthetic oligonucleotide
cccgugaggccaugcacga

SEQ ID NO: 692378 - RNA, 19 nt, Artificial Sequence
  Description of Artificial Sequence: Synthetic oligonucleotide
caacuucuguagccucagu

SEQ ID NO: 692379 - RNA, 19 nt, Artificial Sequence
  Description of Artificial Sequence: Synthetic oligonucleotide
ggcagagaucaaacuucaa

SEQ ID NO: 692380 - RNA, 19 nt, Artificial Sequence
  Description of Artificial Sequence: Synthetic oligonucleotide
cuucucuacggggcuucua

SEQ ID NO: 692381 - RNA, 19 nt, Artificial Sequence
  Description of Artificial Sequence: Synthetic oligonucleotide
caagauccuuuagccgacu

SEQ ID NO: 692382 - RNA, 19 nt, Artificial Sequence
  Description of Artificial Sequence: Synthetic oligonucleotide
ccaacgccagcaaucuccu

SEQ ID NO: 692383 - RNA, 19 nt, Artificial Sequence
  Description of Artificial Sequence: Synthetic oligonucleotide
caugcacgacagagcaguu

SEQ ID NO: 692384 - RNA, 19 nt, Artificial Sequence
  Description of Artificial Sequence: Synthetic oligonucleotide
cgguucuuaucuugaggaa

SEQ ID NO: 692385 - RNA, 19 nt, Artificial Sequence
  Description of Artificial Sequence: Synthetic oligonucleotide
ccuggagacgugggauguc

SEQ ID NO: 692386 - RNA, 19 nt, Artificial Sequence
  Description of Artificial Sequence: Synthetic oligonucleotide
cccuguaagucucgguuuu

SEQ ID NO: 692387 - RNA, 19 nt, Artificial Sequence
  Description of Artificial Sequence: Synthetic oligonucleotide
ccgugaggccaugcacgac

SEQ ID NO: 692388 - RNA, 19 nt, Artificial Sequence
  Description of Artificial Sequence: Synthetic oligonucleotide
gccggcuugugaggaccuc

SEQ ID NO: 692389 - RNA, 19 nt, Artificial Sequence
  Description of Artificial Sequence: Synthetic oligonucleotide
ccgucugcuuuagccggcu

SEQ ID NO: 692390 - RNA, 19 nt, Artificial Sequence
  Description of Artificial Sequence: Synthetic oligonucleotide
cgucugcuuuagccggcuu

SEQ ID NO: 692391 - RNA, 19 nt, Artificial Sequence
  Description of Artificial Sequence: Synthetic oligonucleotide
uuaacuaagguccuguuag

SEQ ID NO: 692392 - RNA, 19 nt, Artificial Sequence
  Description of Artificial Sequence: Synthetic oligonucleotide
ugaguaucaacuugcaagg

SEQ ID NO: 692393 - RNA, 19 nt, Artificial Sequence
  Description of Artificial Sequence: Synthetic oligonucleotide
cugaguaucaacuugcaag

SEQ ID NO: 692394 - RNA, 19 nt, Artificial Sequence
  Description of Artificial Sequence: Synthetic oligonucleotide
auaccuacugcucaggcac

SEQ ID NO: 692395 - RNA, 19 nt, Artificial Sequence
  Description of Artificial Sequence: Synthetic oligonucleotide
ucuauauagacccuccucu

SEQ ID NO: 692396 - RNA, 19 nt, Artificial Sequence
  Description of Artificial Sequence: Synthetic oligonucleotide
ugucaugccaaccuaaccc

SEQ ID NO: 692397 - RNA, 19 nt, Artificial Sequence
  Description of Artificial Sequence: Synthetic oligonucleotide
uguaggauuagccccaaag

SEQ ID NO: 692398 - RNA, 19 nt, Artificial Sequence
  Description of Artificial Sequence: Synthetic oligonucleotide
aaccuaaccccucacaaag

SEQ ID NO: 692399 - RNA, 19 nt, Artificial Sequence
  Description of Artificial Sequence: Synthetic oligonucleotide
aauuuuggaagauuucagu

SEQ ID NO: 692400 - RNA, 19 nt, Artificial Sequence
  Description of Artificial Sequence: Synthetic oligonucleotide
aguaguuaguccuggcucc

SEQ ID NO: 692401 - RNA, 19 nt, Artificial Sequence
  Description of Artificial Sequence: Synthetic oligonucleotide
auauagacccuccucuucc

SEQ ID NO: 692402 - RNA, 19 nt, Artificial Sequence
  Description of Artificial Sequence: Synthetic oligonucleotide
agauggcccacccacaucc

SEQ ID NO: 692403 - RNA, 19 nt, Artificial Sequence
  Description of Artificial Sequence: Synthetic oligonucleotide
uggacaacccaauacagcc

SEQ ID NO: 692404 - RNA, 19 nt, Artificial Sequence
  Description of Artificial Sequence: Synthetic oligonucleotide
ucaacuugcaaggacaaag

SEQ ID NO: 692405 - RNA, 19 nt, Artificial Sequence
  Description of Artificial Sequence: Synthetic oligonucleotide
uuuaacuggcaaaggaaag

SEQ ID NO: 692406 - RNA, 19 nt, Artificial Sequence
  Description of Artificial Sequence: Synthetic oligonucleotide
aagugaacuguccaacuag

SEQ ID NO: 692407 - RNA, 19 nt, Artificial Sequence
  Description of Artificial Sequence: Synthetic oligonucleotide
ugaaguagggcucugcugu

SEQ ID NO: 692408 - RNA, 19 nt, Artificial Sequence
  Description of Artificial Sequence: Synthetic oligonucleotide
cuggaaacaggcuaguagg

SEQ ID NO: 692409 - RNA, 19 nt, Artificial Sequence
  Description of Artificial Sequence: Synthetic oligonucleotide
aagaacuauuccccacucc

SEQ ID NO: 692410 - RNA, 19 nt, Artificial Sequence
  Description of Artificial Sequence: Synthetic oligonucleotide
uuagaauucugucaacccu

SEQ ID NO: 692411 - RNA, 19 nt, Artificial Sequence
  Description of Artificial Sequence: Synthetic oligonucleotide
gucuccucuauauagaccc

SEQ ID NO: 692412 - RNA, 19 nt, Artificial Sequence
  Description of Artificial Sequence: Synthetic oligonucleotide
agugagauaaggcacagaa

SEQ ID NO: 692413 - RNA, 19 nt, Artificial Sequence
  Description of Artificial Sequence: Synthetic oligonucleotide
uuaacuggcaaaggaaagg

SEQ ID NO: 692414 - RNA, 19 nt, Artificial Sequence
  Description of Artificial Sequence: Synthetic oligonucleotide
caaaggaacguucagcccc

SEQ ID NO: 692415 - RNA, 19 nt, Artificial Sequence
  Description of Artificial Sequence: Synthetic oligonucleotide
agacaggaaugucuaaccc

SEQ ID NO: 692416 - RNA, 19 nt, Artificial Sequence
  Description of Artificial Sequence: Synthetic oligonucleotide
uccacuaacagaacaugcc

SEQ ID NO: 692417 - RNA, 19 nt, Artificial Sequence
  Description of Artificial Sequence: Synthetic oligonucleotide
ugaguugugagcaaccaaa

SEQ ID NO: 692418 - RNA, 19 nt, Artificial Sequence
  Description of Artificial Sequence: Synthetic oligonucleotide
ugggacauuuguaaggccc

SEQ ID NO: 692419 - RNA, 19 nt, Artificial Sequence
  Description of Artificial Sequence: Synthetic oligonucleotide
aauggagggaaccuaugca

SEQ ID NO: 692420 - RNA, 19 nt, Artificial Sequence
  Description of Artificial Sequence: Synthetic oligonucleotide
gaacuguccaacuaggaca

SEQ ID NO: 692421 - RNA, 19 nt, Artificial Sequence
  Description of Artificial Sequence: Synthetic oligonucleotide
ugccaaaugacaugcauac

SEQ ID NO: 692422 - RNA, 19 nt, Artificial Sequence
  Description of Artificial Sequence: Synthetic oligonucleotide
acuauuccccacuccaggc

SEQ ID NO: 692423 - RNA, 19 nt, Artificial Sequence
  Description of Artificial Sequence: Synthetic oligonucleotide
agaacuauuccccacucca

SEQ ID NO: 692424 - RNA, 19 nt, Artificial Sequence
  Description of Artificial Sequence: Synthetic oligonucleotide
aggagcuaucaucuggugc

SEQ ID NO: 692425 - RNA, 19 nt, Artificial Sequence
  Description of Artificial Sequence: Synthetic oligonucleotide
uuuacuaagcugcauccaa

SEQ ID NO: 692426 - RNA, 19 nt, Artificial Sequence
  Description of Artificial Sequence: Synthetic oligonucleotide
ugaacuguccaacuaggac

SEQ ID NO: 692427 - RNA, 19 nt, Artificial Sequence
  Description of Artificial Sequence: Synthetic oligonucleotide
cugagugcgagccagguag

SEQ ID NO: 692428 - RNA, 19 nt, Artificial Sequence
  Description of Artificial Sequence: Synthetic oligonucleotide
gacacauaaccccacgcag

SEQ ID NO: 692429 - RNA, 19 nt, Artificial Sequence
  Description of Artificial Sequence: Synthetic oligonucleotide
ugacaagcuguuaacuaag

SEQ ID NO: 692430 - RNA, 19 nt, Artificial Sequence
  Description of Artificial Sequence: Synthetic oligonucleotide
aauaccuacugcucaggca

SEQ ID NO: 692431 - RNA, 19 nt, Artificial Sequence
  Description of Artificial Sequence: Synthetic oligonucleotide
cuaagguccuguuaggaac

SEQ ID NO: 692432 - RNA, 19 nt, Artificial Sequence
  Description of Artificial Sequence: Synthetic oligonucleotide
ucagcugaaacagugagau

SEQ ID NO: 692433 - RNA, 19 nt, Artificial Sequence
  Description of Artificial Sequence: Synthetic oligonucleotide
uuacuaagcugcauccaag

SEQ ID NO: 692434 - RNA, 19 nt, Artificial Sequence
  Description of Artificial Sequence: Synthetic oligonucleotide
cauuguaacagcuugauau

SEQ ID NO: 692435 - RNA, 19 nt, Artificial Sequence
  Description of Artificial Sequence: Synthetic oligonucleotide
aacggagaccccuggcccc

SEQ ID NO: 692436 - RNA, 19 nt, Artificial Sequence
  Description of Artificial Sequence: Synthetic oligonucleotide
guaggauuagccccaaagc

SEQ ID NO: 692437 - RNA, 19 nt, Artificial Sequence
  Description of Artificial Sequence: Synthetic oligonucleotide
cacagacccacauaggaag

SEQ ID NO: 692438 - RNA, 19 nt, Artificial Sequence
  Description of Artificial Sequence: Synthetic oligonucleotide
uagaauucugucaacccuc

SEQ ID NO: 692439 - RNA, 19 nt, Artificial Sequence
  Description of Artificial Sequence: Synthetic oligonucleotide
acuaauagcuggucuaacu

SEQ ID NO: 692440 - RNA, 19 nt, Artificial Sequence
  Description of Artificial Sequence: Synthetic oligonucleotide
aggaaugucuaacccacag

SEQ ID NO: 692441 - RNA, 19 nt, Artificial Sequence
  Description of Artificial Sequence: Synthetic oligonucleotide
ggagcuaucaucuggugcc

SEQ ID NO: 692442 - RNA, 19 nt, Artificial Sequence
  Description of Artificial Sequence: Synthetic oligonucleotide
uucaugcuaaugcugagua

SEQ ID NO: 692443 - RNA, 19 nt, Artificial Sequence
  Description of Artificial Sequence: Synthetic oligonucleotide
aguccuuacuuccuuagcu

SEQ ID NO: 692444 - RNA, 19 nt, Artificial Sequence
  Description of Artificial Sequence: Synthetic oligonucleotide
uaagguccuguuaggaacc

SEQ ID NO: 692445 - RNA, 19 nt, Artificial Sequence
  Description of Artificial Sequence: Synthetic oligonucleotide
ugugcuuaagggcugggaa

SEQ ID NO: 692446 - RNA, 19 nt, Artificial Sequence
  Description of Artificial Sequence: Synthetic oligonucleotide
guuaggaaccaagaaaaug

SEQ ID NO: 692447 - RNA, 19 nt, Artificial Sequence
  Description of Artificial Sequence: Synthetic oligonucleotide
aaacaggcuaguaggauug

SEQ ID NO: 692448 - RNA, 19 nt, Artificial Sequence
  Description of Artificial Sequence: Synthetic oligonucleotide
ucauggauguguauuuuaa

SEQ ID NO: 692449 - RNA, 19 nt, Artificial Sequence
  Description of Artificial Sequence: Synthetic oligonucleotide
aaugccugcgauugguggu

SEQ ID NO: 692450 - RNA, 19 nt, Artificial Sequence
  Description of Artificial Sequence: Synthetic oligonucleotide
guugauaauggagggaacc

SEQ ID NO: 692451 - RNA, 19 nt, Artificial Sequence
  Description of Artificial Sequence: Synthetic oligonucleotide
aaagugaacuguccaacua

SEQ ID NO: 692452 - RNA, 19 nt, Artificial Sequence
  Description of Artificial Sequence: Synthetic oligonucleotide
ugucaacccucucacacca

SEQ ID NO: 692453 - RNA, 19 nt, Artificial Sequence
  Description of Artificial Sequence: Synthetic oligonucleotide
uaguugauaauggagggaa

SEQ ID NO: 692454 - RNA, 19 nt, Artificial Sequence
  Description of Artificial Sequence: Synthetic oligonucleotide
uuaguccuggcuccgacac

SEQ ID NO: 692455 - RNA, 19 nt, Artificial Sequence
  Description of Artificial Sequence: Synthetic oligonucleotide
uaacuaagguccuguuagg

SEQ ID NO: 692456 - RNA, 19 nt, Artificial Sequence
  Description of Artificial Sequence: Synthetic oligonucleotide
uauguccccaaagugaacu

SEQ ID NO: 692457 - RNA, 19 nt, Artificial Sequence
  Description of Artificial Sequence: Synthetic oligonucleotide
uagacacauaaccccacgc

SEQ ID NO: 692458 - RNA, 19 nt, Artificial Sequence
  Description of Artificial Sequence: Synthetic oligonucleotide
gaguaguuaguccuggcuc

SEQ ID NO: 692459 - RNA, 19 nt, Artificial Sequence
  Description of Artificial Sequence: Synthetic oligonucleotide
uucacucacccugugaagc

SEQ ID NO: 692460 - RNA, 19 nt, Artificial Sequence
  Description of Artificial Sequence: Synthetic oligonucleotide
uauauagacccuccucuuc

SEQ ID NO: 692461 - RNA, 19 nt, Artificial Sequence
  Description of Artificial Sequence: Synthetic oligonucleotide
aacgucucgagcucugcca

SEQ ID NO: 692462 - RNA, 19 nt, Artificial Sequence
  Description of Artificial Sequence: Synthetic oligonucleotide
caugcuaaugcugaguauc

SEQ ID NO: 692463 - RNA, 19 nt, Artificial Sequence
  Description of Artificial Sequence: Synthetic oligonucleotide
ugaggugaccauuguaaca

SEQ ID NO: 692464 - RNA, 19 nt, Artificial Sequence
  Description of Artificial Sequence: Synthetic oligonucleotide
aagucuagacaggaauguc

SEQ ID NO: 692465 - RNA, 19 nt, Artificial Sequence
  Description of Artificial Sequence: Synthetic oligonucleotide
uacuaagcugcauccaaga

SEQ ID NO: 692466 - RNA, 19 nt, Artificial Sequence
  Description of Artificial Sequence: Synthetic oligonucleotide
ugagcaaccaaaggaacgu

SEQ ID NO: 692467 - RNA, 19 nt, Artificial Sequence
  Description of Artificial Sequence: Synthetic oligonucleotide
agacacauaaccccacgca

SEQ ID NO: 692468 - RNA, 19 nt, Artificial Sequence
  Description of Artificial Sequence: Synthetic oligonucleotide
acacauaaccccacgcagc

SEQ ID NO: 692469 - RNA, 19 nt, Artificial Sequence
  Description of Artificial Sequence: Synthetic oligonucleotide
caagcuauagggagcaguc

SEQ ID NO: 692470 - RNA, 19 nt, Artificial Sequence
  Description of Artificial Sequence: Synthetic oligonucleotide
cagacaguccccucaacag

SEQ ID NO: 692471 - RNA, 19 nt, Artificial Sequence
  Description of Artificial Sequence: Synthetic oligonucleotide
ugucuaacccacaggagua

SEQ ID NO: 692472 - RNA, 19 nt, Artificial Sequence
  Description of Artificial Sequence: Synthetic oligonucleotide
uccaaaugugaggugacca

SEQ ID NO: 692473 - RNA, 19 nt, Artificial Sequence
  Description of Artificial Sequence: Synthetic oligonucleotide
aguuaguccuggcuccgac

SEQ ID NO: 692474 - RNA, 19 nt, Artificial Sequence
  Description of Artificial Sequence: Synthetic oligonucleotide
guagacacauaaccccacg

SEQ ID NO: 692475 - RNA, 19 nt, Artificial Sequence
  Description of Artificial Sequence: Synthetic oligonucleotide
gccagguagacacauaacc

SEQ ID NO: 692476 - RNA, 19 nt, Artificial Sequence
  Description of Artificial Sequence: Synthetic oligonucleotide
gaaccaagaaaauguagua

SEQ ID NO: 692477 - RNA, 19 nt, Artificial Sequence
  Description of Artificial Sequence: Synthetic oligonucleotide
ucaacccucucacaccaca

SEQ ID NO: 692478 - RNA, 19 nt, Artificial Sequence
  Description of Artificial Sequence: Synthetic oligonucleotide
agagaaccccucuggagag

SEQ ID NO: 692479 - RNA, 19 nt, Artificial Sequence
  Description of Artificial Sequence: Synthetic oligonucleotide
auagggagcagucucccgu

SEQ ID NO: 692480 - RNA, 19 nt, Artificial Sequence
  Description of Artificial Sequence: Synthetic oligonucleotide
aguuucaugcuaaugcuga

SEQ ID NO: 692481 - RNA, 19 nt, Artificial Sequence
  Description of Artificial Sequence: Synthetic oligonucleotide
cacuaacagaacaugccug

SEQ ID NO: 692482 - RNA, 19 nt, Artificial Sequence
  Description of Artificial Sequence: Synthetic oligonucleotide
acaugcauaccugaguugu

SEQ ID NO: 692483 - RNA, 19 nt, Artificial Sequence
  Description of Artificial Sequence: Synthetic oligonucleotide
agcaggacuggacuaacca

SEQ ID NO: 692484 - RNA, 19 nt, Artificial Sequence
  Description of Artificial Sequence: Synthetic oligonucleotide
auuuuggcccuccccacag

SEQ ID NO: 692485 - RNA, 19 nt, Artificial Sequence
  Description of Artificial Sequence: Synthetic oligonucleotide
acaagcuguuaacuaaggu

SEQ ID NO: 692486 - RNA, 19 nt, Artificial Sequence
  Description of Artificial Sequence: Synthetic oligonucleotide
uggccaagucacuuaaucu

SEQ ID NO: 692487 - RNA, 19 nt, Artificial Sequence
  Description of Artificial Sequence: Synthetic oligonucleotide
uuucacucacccugugaag

SEQ ID NO: 692488 - RNA, 19 nt, Artificial Sequence
  Description of Artificial Sequence: Synthetic oligonucleotide
aaaauggggagguggccau

SEQ ID NO: 692489 - RNA, 19 nt, Artificial Sequence
  Description of Artificial Sequence: Synthetic oligonucleotide
auccacucuggaccaaugg

SEQ ID NO: 692490 - RNA, 19 nt, Artificial Sequence
  Description of Artificial Sequence: Synthetic oligonucleotide
ugcauaccugaguugugag

SEQ ID NO: 692491 - RNA, 19 nt, Artificial Sequence
  Description of Artificial Sequence: Synthetic oligonucleotide
ugaugucaugccaaccuaa

SEQ ID NO: 692492 - RNA, 19 nt, Artificial Sequence
  Description of Artificial Sequence: Synthetic oligonucleotide
aacuaagguccuguuagga

SEQ ID NO: 692493 - RNA, 19 nt, Artificial Sequence
  Description of Artificial Sequence: Synthetic oligonucleotide
augacaugcauaccugagu

SEQ ID NO: 692494 - RNA, 19 nt, Artificial Sequence
  Description of Artificial Sequence: Synthetic oligonucleotide
aaccugaguucggagcucg

SEQ ID NO: 692495 - RNA, 19 nt, Artificial Sequence
  Description of Artificial Sequence: Synthetic oligonucleotide
cuuauguccccaaagugaa

SEQ ID NO: 692496 - RNA, 19 nt, Artificial Sequence
  Description of Artificial Sequence: Synthetic oligonucleotide
gucacuuaaucuccugggc

SEQ ID NO: 692497 - RNA, 19 nt, Artificial Sequence
  Description of Artificial Sequence: Synthetic oligonucleotide
uuuugugcuuaagggcugg

SEQ ID NO: 692498 - RNA, 19 nt, Artificial Sequence
  Description of Artificial Sequence: Synthetic oligonucleotide
uguccacuaacagaacaug

SEQ ID NO: 692499 - RNA, 19 nt, Artificial Sequence
  Description of Artificial Sequence: Synthetic oligonucleotide
acauacgggguuccucugg

SEQ ID NO: 692500 - RNA, 19 nt, Artificial Sequence
  Description of Artificial Sequence: Synthetic oligonucleotide
acuaagguccuguuaggaa

SEQ ID NO: 692501 - RNA, 19 nt, Artificial Sequence
  Description of Artificial Sequence: Synthetic oligonucleotide
cucuauauagacccuccuc

SEQ ID NO: 692502 - RNA, 19 nt, Artificial Sequence
  Description of Artificial Sequence: Synthetic oligonucleotide
aggcuuauguccccaaagu

SEQ ID NO: 692503 - RNA, 19 nt, Artificial Sequence
  Description of Artificial Sequence: Synthetic oligonucleotide
aaggagcuaucaucuggug

SEQ ID NO: 692504 - RNA, 19 nt, Artificial Sequence
  Description of Artificial Sequence: Synthetic oligonucleotide
ggaaugucuaacccacagg

SEQ ID NO: 692505 - RNA, 19 nt, Artificial Sequence
  Description of Artificial Sequence: Synthetic oligonucleotide
cucgguauuccagucuugg

SEQ ID NO: 692506 - RNA, 19 nt, Artificial Sequence
  Description of Artificial Sequence: Synthetic oligonucleotide
uaggauguuuguguuagaa

SEQ ID NO: 692507 - RNA, 19 nt, Artificial Sequence
  Description of Artificial Sequence: Synthetic oligonucleotide
gacaugcauaccugaguug

SEQ ID NO: 692508 - RNA, 19 nt, Artificial Sequence
  Description of Artificial Sequence: Synthetic oligonucleotide
agucuagacaggaaugucu

SEQ ID NO: 692509 - RNA, 19 nt, Artificial Sequence
  Description of Artificial Sequence: Synthetic oligonucleotide
ccuuuacuaagcugcaucc

SEQ ID NO: 692510 - RNA, 19 nt, Artificial Sequence
  Description of Artificial Sequence: Synthetic oligonucleotide
gguauuccagucuuggaca

SEQ ID NO: 692511 - RNA, 19 nt, Artificial Sequence
  Description of Artificial Sequence: Synthetic oligonucleotide
ugaguucggagcucgguau

SEQ ID NO: 692512 - RNA, 19 nt, Artificial Sequence
  Description of Artificial Sequence: Synthetic oligonucleotide
gcuguaguugauaauggag

SEQ ID NO: 692513 - RNA, 19 nt, Artificial Sequence
  Description of Artificial Sequence: Synthetic oligonucleotide
cuuggacucagcugaaaca

SEQ ID NO: 692514 - RNA, 19 nt, Artificial Sequence
  Description of Artificial Sequence: Synthetic oligonucleotide
uagccaagcaguccuuacu

SEQ ID NO: 692515 - RNA, 19 nt, Artificial Sequence
  Description of Artificial Sequence: Synthetic oligonucleotide
agaccuucugacaagcugu

SEQ ID NO: 692516 - RNA, 19 nt, Artificial Sequence
  Description of Artificial Sequence: Synthetic oligonucleotide
uucugacaagcuguuaacu

SEQ ID NO: 692517 - RNA, 19 nt, Artificial Sequence
  Description of Artificial Sequence: Synthetic oligonucleotide
gaacuauuccccacuccag

SEQ ID NO: 692518 - RNA, 19 nt, Artificial Sequence
  Description of Artificial Sequence: Synthetic oligonucleotide
agcaaccaaaggaacguuc

SEQ ID NO: 692519 - RNA, 19 nt, Artificial Sequence
  Description of Artificial Sequence: Synthetic oligonucleotide
gccagaagccaccaugugg

SEQ ID NO: 692520 - RNA, 19 nt, Artificial Sequence
  Description of Artificial Sequence: Synthetic oligonucleotide
uuccuaagagucgcugggg

SEQ ID NO: 692521 - RNA, 19 nt, Artificial Sequence
  Description of Artificial Sequence: Synthetic oligonucleotide
acaauuuaauaggauguuu

SEQ ID NO: 692522 - RNA, 19 nt, Artificial Sequence
  Description of Artificial Sequence: Synthetic oligonucleotide
ucacucacccugugaagca

SEQ ID NO: 692523 - RNA, 19 nt, Artificial Sequence
  Description of Artificial Sequence: Synthetic oligonucleotide
cucucacaccacaaguuuc

SEQ ID NO: 692524 - RNA, 19 nt, Artificial Sequence
  Description of Artificial Sequence: Synthetic oligonucleotide
cagagaaccccucuggaga

SEQ ID NO: 692525 - RNA, 19 nt, Artificial Sequence
  Description of Artificial Sequence: Synthetic oligonucleotide
ccuacucccagccacagac

SEQ ID NO: 692526 - RNA, 19 nt, Artificial Sequence
  Description of Artificial Sequence: Synthetic oligonucleotide
acuaagcugcauccaagaa

SEQ ID NO: 692527 - RNA, 19 nt, Artificial Sequence
  Description of Artificial Sequence: Synthetic oligonucleotide
ucacuaauagcuggucuaa

SEQ ID NO: 692528 - RNA, 19 nt, Artificial Sequence
  Description of Artificial Sequence: Synthetic oligonucleotide
ucaugccaaccuaaccccu

SEQ ID NO: 692529 - RNA, 19 nt, Artificial Sequence
  Description of Artificial Sequence: Synthetic oligonucleotide
guuaacuaagguccuguua

SEQ ID NO: 692530 - RNA, 19 nt, Artificial Sequence
  Description of Artificial Sequence: Synthetic oligonucleotide
guagcuguggggaaaaucu

SEQ ID NO: 692531 - RNA, 19 nt, Artificial Sequence
  Description of Artificial Sequence: Synthetic oligonucleotide
uugugauauccuuguucug

SEQ ID NO: 692532 - RNA, 19 nt, Artificial Sequence
  Description of Artificial Sequence: Synthetic oligonucleotide
acaggacaagaccuucuga

SEQ ID NO: 692533 - RNA, 19 nt, Artificial Sequence
  Description of Artificial Sequence: Synthetic oligonucleotide
ccaagcaguccuuacuucc

SEQ ID NO: 692534 - RNA, 19 nt, Artificial Sequence
  Description of Artificial Sequence: Synthetic oligonucleotide
cuauagggagcagucuccc

SEQ ID NO: 692535 - RNA, 19 nt, Artificial Sequence
  Description of Artificial Sequence: Synthetic oligonucleotide
gguacugagugcgagccag

SEQ ID NO: 692536 - RNA, 19 nt, Artificial Sequence
  Description of Artificial Sequence: Synthetic oligonucleotide
cuggacuaaccacuggcuc

SEQ ID NO: 692537 - RNA, 19 nt, Artificial Sequence
  Description of Artificial Sequence: Synthetic oligonucleotide
ggcuuauguccccaaagug

SEQ ID NO: 692538 - RNA, 19 nt, Artificial Sequence
  Description of Artificial Sequence: Synthetic oligonucleotide
cucacuaauagcuggucua

SEQ ID NO: 692539 - RNA, 19 nt, Artificial Sequence
  Description of Artificial Sequence: Synthetic oligonucleotide
acuauuugcuguguggcuu

SEQ ID NO: 692540 - RNA, 19 nt, Artificial Sequence
  Description of Artificial Sequence: Synthetic oligonucleotide
uguuaacuaagguccuguu

SEQ ID NO: 692541 - RNA, 19 nt, Artificial Sequence
  Description of Artificial Sequence: Synthetic oligonucleotide
ucugaguggucugccaacu

SEQ ID NO: 692542 - RNA, 19 nt, Artificial Sequence
  Description of Artificial Sequence: Synthetic oligonucleotide
gauuuuggcccuccccaca

SEQ ID NO: 692543 - RNA, 19 nt, Artificial Sequence
  Description of Artificial Sequence: Synthetic oligonucleotide
aguucggagcucgguauuc

SEQ ID NO: 692544 - RNA, 19 nt, Artificial Sequence
  Description of Artificial Sequence: Synthetic oligonucleotide
uuugugcuuaagggcuggg

SEQ ID NO: 692545 - RNA, 19 nt, Artificial Sequence
  Description of Artificial Sequence: Synthetic oligonucleotide
cacaaguuucaugcuaaug

SEQ ID NO: 692546 - RNA, 19 nt, Artificial Sequence
  Description of Artificial Sequence: Synthetic oligonucleotide
gaaacaggcuaguaggauu

SEQ ID NO: 692547 - RNA, 19 nt, Artificial Sequence
  Description of Artificial Sequence: Synthetic oligonucleotide
caacuaggacagagaaccc

SEQ ID NO: 692548 - RNA, 19 nt, Artificial Sequence
  Description of Artificial Sequence: Synthetic oligonucleotide
accuaaccccucacaaagc

SEQ ID NO: 692549 - RNA, 19 nt, Artificial Sequence
  Description of Artificial Sequence: Synthetic oligonucleotide
ucgguauuccagucuugga

SEQ ID NO: 692550 - RNA, 19 nt, Artificial Sequence
  Description of Artificial Sequence: Synthetic oligonucleotide
cacaggaguaguuaguccu

SEQ ID NO: 692551 - RNA, 19 nt, Artificial Sequence
  Description of Artificial Sequence: Synthetic oligonucleotide
guaguuaguccuggcuccg

SEQ ID NO: 692552 - RNA, 19 nt, Artificial Sequence
  Description of Artificial Sequence: Synthetic oligonucleotide
cuaaccccucacaaagcuc

SEQ ID NO: 692553 - RNA, 19 nt, Artificial Sequence
  Description of Artificial Sequence: Synthetic oligonucleotide
aagcuauagggagcagucu

SEQ ID NO: 692554 - RNA, 19 nt, Artificial Sequence
  Description of Artificial Sequence: Synthetic oligonucleotide
ucaugcuaaugcugaguau

SEQ ID NO: 692555 - RNA, 19 nt, Artificial Sequence
  Description of Artificial Sequence: Synthetic oligonucleotide
gcuuauguccccaaaguga

SEQ ID NO: 692556 - RNA, 19 nt, Artificial Sequence
  Description of Artificial Sequence: Synthetic oligonucleotide
agagucgcuggggccaagc

SEQ ID NO: 692557 - RNA, 19 nt, Artificial Sequence
  Description of Artificial Sequence: Synthetic oligonucleotide
aggaacguucagccccaac

SEQ ID NO: 692558 - RNA, 19 nt, Artificial Sequence
  Description of Artificial Sequence: Synthetic oligonucleotide
gguuccauccacucuggac

SEQ ID NO: 692559 - RNA, 19 nt, Artificial Sequence
  Description of Artificial Sequence: Synthetic oligonucleotide
uacauacgggguuccucug

SEQ ID NO: 692560 - RNA, 19 nt, Artificial Sequence
  Description of Artificial Sequence: Synthetic oligonucleotide
ucuccucuauauagacccu

SEQ ID NO: 692561 - RNA, 19 nt, Artificial Sequence
  Description of Artificial Sequence: Synthetic oligonucleotide
agcucgguauuccagucuu

SEQ ID NO: 692562 - RNA, 19 nt, Artificial Sequence
  Description of Artificial Sequence: Synthetic oligonucleotide
gguccuguuaggaaccaag

SEQ ID NO: 692563 - RNA, 19 nt, Artificial Sequence
  Description of Artificial Sequence: Synthetic oligonucleotide
ggaaccuaugcaaagaggu

SEQ ID NO: 692564 - RNA, 19 nt, Artificial Sequence
  Description of Artificial Sequence: Synthetic oligonucleotide
guagccaagcaguccuuac

SEQ ID NO: 692565 - RNA, 19 nt, Artificial Sequence
  Description of Artificial Sequence: Synthetic oligonucleotide
caugcauaccugaguugug

SEQ ID NO: 692566 - RNA, 19 nt, Artificial Sequence
  Description of Artificial Sequence: Synthetic oligonucleotide
gauaauggagggaaccuau

SEQ ID NO: 692567 - RNA, 19 nt, Artificial Sequence
  Description of Artificial Sequence: Synthetic oligonucleotide
ucuaacccacaggaguagu

SEQ ID NO: 692568 - RNA, 19 nt, Artificial Sequence
  Description of Artificial Sequence: Synthetic oligonucleotide
ucuaagcacccauccccac

SEQ ID NO: 692569 - RNA, 19 nt, Artificial Sequence
  Description of Artificial Sequence: Synthetic oligonucleotide
cuuuaagucuagacaggaa

SEQ ID NO: 692570 - RNA, 19 nt, Artificial Sequence
  Description of Artificial Sequence: Synthetic oligonucleotide
gagggaaccuaugcaaaga

SEQ ID NO: 692571 - RNA, 19 nt, Artificial Sequence
  Description of Artificial Sequence: Synthetic oligonucleotide
ugagugcgagccagguaga

SEQ ID NO: 692572 - RNA, 19 nt, Artificial Sequence
  Description of Artificial Sequence: Synthetic oligonucleotide
caugccaaccuaaccccuc

SEQ ID NO: 692573 - RNA, 19 nt, Artificial Sequence
  Description of Artificial Sequence: Synthetic oligonucleotide
cuaagagucgcuggggcca

SEQ ID NO: 692574 - RNA, 19 nt, Artificial Sequence
  Description of Artificial Sequence: Synthetic oligonucleotide
guaguugauaauggaggga

SEQ ID NO: 692575 - RNA, 19 nt, Artificial Sequence
  Description of Artificial Sequence: Synthetic oligonucleotide
uccaggucuccucuauaua

SEQ ID NO: 692576 - RNA, 19 nt, Artificial Sequence
  Description of Artificial Sequence: Synthetic oligonucleotide
cuacucccagccacagacc

SEQ ID NO: 692577 - RNA, 19 nt, Artificial Sequence
  Description of Artificial Sequence: Synthetic oligonucleotide
uugugcuuaagggcuggga

SEQ ID NO: 692578 - RNA, 19 nt, Artificial Sequence
  Description of Artificial Sequence: Synthetic oligonucleotide
ggcacagaacgucucgagc

SEQ ID NO: 692579 - RNA, 19 nt, Artificial Sequence
  Description of Artificial Sequence: Synthetic oligonucleotide
augcuaaugcugaguauca

SEQ ID NO: 692580 - RNA, 19 nt, Artificial Sequence
  Description of Artificial Sequence: Synthetic oligonucleotide
gggaaccuaugcaaagagg

SEQ ID NO: 692581 - RNA, 19 nt, Artificial Sequence
  Description of Artificial Sequence: Synthetic oligonucleotide
gugggacauuuguaaggcc

SEQ ID NO: 692582 - RNA, 19 nt, Artificial Sequence
  Description of Artificial Sequence: Synthetic oligonucleotide
cagguaacggagaccccug

SEQ ID NO: 692583 - RNA, 19 nt, Artificial Sequence
  Description of Artificial Sequence: Synthetic oligonucleotide
acaggaguaguuaguccug

SEQ ID NO: 692584 - RNA, 19 nt, Artificial Sequence
  Description of Artificial Sequence: Synthetic oligonucleotide
gccccucacuaauagcugg

SEQ ID NO: 692585 - RNA, 19 nt, Artificial Sequence
  Description of Artificial Sequence: Synthetic oligonucleotide
guuaguccuggcuccgaca

SEQ ID NO: 692586 - RNA, 19 nt, Artificial Sequence
  Description of Artificial Sequence: Synthetic oligonucleotide
gucuaacccacaggaguag

SEQ ID NO: 692587 - RNA, 19 nt, Artificial Sequence
  Description of Artificial Sequence: Synthetic oligonucleotide
ugcgauugguggugaagua

SEQ ID NO: 692588 - RNA, 19 nt, Artificial Sequence
  Description of Artificial Sequence: Synthetic oligonucleotide
cauccacucuggaccaaug

SEQ ID NO: 692589 - RNA, 19 nt, Artificial Sequence
  Description of Artificial Sequence: Synthetic oligonucleotide
gaccauuguaacagcuuga

SEQ ID NO: 692590 - RNA, 19 nt, Artificial Sequence
  Description of Artificial Sequence: Synthetic oligonucleotide
aggcccucucagccgcucc

SEQ ID NO: 692591 - RNA, 19 nt, Artificial Sequence
  Description of Artificial Sequence: Synthetic oligonucleotide
gcauaccugaguugugagc

SEQ ID NO: 692592 - RNA, 19 nt, Artificial Sequence
  Description of Artificial Sequence: Synthetic oligonucleotide
agaaccccucuggagagga

SEQ ID NO: 692593 - RNA, 19 nt, Artificial Sequence
  Description of Artificial Sequence: Synthetic oligonucleotide
uggcuccgacacuauuugc

SEQ ID NO: 692594 - RNA, 19 nt, Artificial Sequence
  Description of Artificial Sequence: Synthetic oligonucleotide
ggugccacaaagggaagug

SEQ ID NO: 692595 - RNA, 19 nt, Artificial Sequence
  Description of Artificial Sequence: Synthetic oligonucleotide
ccuaagagucgcuggggcc

SEQ ID NO: 692596 - RNA, 19 nt, Artificial Sequence
  Description of Artificial Sequence: Synthetic oligonucleotide
caggucuccucuauauaga

SEQ ID NO: 692597 - RNA, 19 nt, Artificial Sequence
  Description of Artificial Sequence: Synthetic oligonucleotide
gaagugaguagggaaugcu

SEQ ID NO: 692598 - RNA, 19 nt, Artificial Sequence
  Description of Artificial Sequence: Synthetic oligonucleotide
gguaacggagaccccuggc

SEQ ID NO: 692599 - RNA, 19 nt, Artificial Sequence
  Description of Artificial Sequence: Synthetic oligonucleotide
gggaaugcugcuccccaag

SEQ ID NO: 692600 - RNA, 19 nt, Artificial Sequence
  Description of Artificial Sequence: Synthetic oligonucleotide
agcuaucaucuggugccac

SEQ ID NO: 692601 - RNA, 19 nt, Artificial Sequence
  Description of Artificial Sequence: Synthetic oligonucleotide
ggauccaugugaaacagcu

SEQ ID NO: 692602 - RNA, 19 nt, Artificial Sequence
  Description of Artificial Sequence: Synthetic oligonucleotide
gcuccgacacuauuugcug

SEQ ID NO: 692603 - RNA, 19 nt, Artificial Sequence
  Description of Artificial Sequence: Synthetic oligonucleotide
cuggccccucacuaauagc

SEQ ID NO: 692604 - RNA, 19 nt, Artificial Sequence
  Description of Artificial Sequence: Synthetic oligonucleotide
uuccuuagcuugugauauc

SEQ ID NO: 692605 - RNA, 19 nt, Artificial Sequence
  Description of Artificial Sequence: Synthetic oligonucleotide
cucauggauguguauuuua

SEQ ID NO: 692606 - RNA, 19 nt, Artificial Sequence
  Description of Artificial Sequence: Synthetic oligonucleotide
uggcagacaguccccucaa

SEQ ID NO: 692607 - RNA, 19 nt, Artificial Sequence
  Description of Artificial Sequence: Synthetic oligonucleotide
uauuugcuguguggcuuug

SEQ ID NO: 692608 - RNA, 19 nt, Artificial Sequence
  Description of Artificial Sequence: Synthetic oligonucleotide
uaccuacugcucaggcacu

SEQ ID NO: 692609 - RNA, 19 nt, Artificial Sequence
  Description of Artificial Sequence: Synthetic oligonucleotide
ugcuaaugcugaguaucaa

SEQ ID NO: 692610 - RNA, 19 nt, Artificial Sequence
  Description of Artificial Sequence: Synthetic oligonucleotide
cccuuuacuaagcugcauc

SEQ ID NO: 692611 - RNA, 19 nt, Artificial Sequence
  Description of Artificial Sequence: Synthetic oligonucleotide
cuuccuuagcuugugauau

SEQ ID NO: 692612 - RNA, 19 nt, Artificial Sequence
  Description of Artificial Sequence: Synthetic oligonucleotide
ugcaaagaggugggcgcug

SEQ ID NO: 692613 - RNA, 19 nt, Artificial Sequence
  Description of Artificial Sequence: Synthetic oligonucleotide
uggugccacaaagggaagu

SEQ ID NO: 692614 - RNA, 19 nt, Artificial Sequence
  Description of Artificial Sequence: Synthetic oligonucleotide
caaccuaaccccucacaaa

SEQ ID NO: 692615 - RNA, 19 nt, Artificial Sequence
  Description of Artificial Sequence: Synthetic oligonucleotide
ggaagugaguagggaaugc

SEQ ID NO: 692616 - RNA, 19 nt, Artificial Sequence
  Description of Artificial Sequence: Synthetic oligonucleotide
gcgauugguggugaaguag

SEQ ID NO: 692617 - RNA, 19 nt, Artificial Sequence
  Description of Artificial Sequence: Synthetic oligonucleotide
cacuaauagcuggucuaac

SEQ ID NO: 692618 - RNA, 19 nt, Artificial Sequence
  Description of Artificial Sequence: Synthetic oligonucleotide
ugccaacuugguccuugcu

SEQ ID NO: 692619 - RNA, 19 nt, Artificial Sequence
  Description of Artificial Sequence: Synthetic oligonucleotide
cgguauuccagucuuggac

SEQ ID NO: 692620 - RNA, 19 nt, Artificial Sequence
  Description of Artificial Sequence: Synthetic oligonucleotide
agugcgagccagguagaca

SEQ ID NO: 692621 - RNA, 19 nt, Artificial Sequence
  Description of Artificial Sequence: Synthetic oligonucleotide
guucggagcucgguauucc

SEQ ID NO: 692622 - RNA, 19 nt, Artificial Sequence
  Description of Artificial Sequence: Synthetic oligonucleotide
ggggaaaaucuggaccagg

SEQ ID NO: 692623 - RNA, 19 nt, Artificial Sequence
  Description of Artificial Sequence: Synthetic oligonucleotide
auaccugaguugugagcaa

SEQ ID NO: 692624 - RNA, 19 nt, Artificial Sequence
  Description of Artificial Sequence: Synthetic oligonucleotide
agucgcuggggccaagcua

SEQ ID NO: 692625 - RNA, 19 nt, Artificial Sequence
  Description of Artificial Sequence: Synthetic oligonucleotide
gucucgagcucugccacug

SEQ ID NO: 692626 - RNA, 19 nt, Artificial Sequence
  Description of Artificial Sequence: Synthetic oligonucleotide
uaaggcccauggagucucc

SEQ ID NO: 692627 - RNA, 19 nt, Artificial Sequence
  Description of Artificial Sequence: Synthetic oligonucleotide
cugguaaggccuggugggc

SEQ ID NO: 692628 - RNA, 19 nt, Artificial Sequence
  Description of Artificial Sequence: Synthetic oligonucleotide
gcacagaacgucucgagcu

SEQ ID NO: 692629 - RNA, 19 nt, Artificial Sequence
  Description of Artificial Sequence: Synthetic oligonucleotide
gggaagugaguagggaaug

SEQ ID NO: 692630 - RNA, 19 nt, Artificial Sequence
  Description of Artificial Sequence: Synthetic oligonucleotide
cacugauuucuguguccac

SEQ ID NO: 692631 - RNA, 19 nt, Artificial Sequence
  Description of Artificial Sequence: Synthetic oligonucleotide
augcaaagaggugggcgcu

SEQ ID NO: 692632 - RNA, 19 nt, Artificial Sequence
  Description of Artificial Sequence: Synthetic oligonucleotide
auacgggguuccucuggca

SEQ ID NO: 692633 - RNA, 19 nt, Artificial Sequence
  Description of Artificial Sequence: Synthetic oligonucleotide
agcuguuaacuaagguccu

SEQ ID NO: 692634 - RNA, 19 nt, Artificial Sequence
  Description of Artificial Sequence: Synthetic oligonucleotide
cacucacccugugaagcag

SEQ ID NO: 692635 - RNA, 19 nt, Artificial Sequence
  Description of Artificial Sequence: Synthetic oligonucleotide
guacugagugcgagccagg

SEQ ID NO: 692636 - RNA, 19 nt, Artificial Sequence
  Description of Artificial Sequence: Synthetic oligonucleotide
ggauuagccccaaagcaaa

SEQ ID NO: 692637 - RNA, 19 nt, Artificial Sequence
  Description of Artificial Sequence: Synthetic oligonucleotide
acugagugcgagccaggua

SEQ ID NO: 692638 - RNA, 19 nt, Artificial Sequence
  Description of Artificial Sequence: Synthetic oligonucleotide
ggaguaguuaguccuggcu

SEQ ID NO: 692639 - RNA, 19 nt, Artificial Sequence
  Description of Artificial Sequence: Synthetic oligonucleotide
caccacaaguuucaugcua

SEQ ID NO: 692640 - RNA, 19 nt, Artificial Sequence
  Description of Artificial Sequence: Synthetic oligonucleotide
gugagauaaggcacagaaa

SEQ ID NO: 692641 - RNA, 19 nt, Artificial Sequence
  Description of Artificial Sequence: Synthetic oligonucleotide
ccacagguccaaaugccug

SEQ ID NO: 692642 - RNA, 19 nt, Artificial Sequence
  Description of Artificial Sequence: Synthetic oligonucleotide
agggcuggacaacccaaua

SEQ ID NO: 692643 - RNA, 19 nt, Artificial Sequence
  Description of Artificial Sequence: Synthetic oligonucleotide
cccacccuugucauacucc

SEQ ID NO: 692644 - RNA, 19 nt, Artificial Sequence
  Description of Artificial Sequence: Synthetic oligonucleotide
uaguuaguccuggcuccga

SEQ ID NO: 692645 - RNA, 19 nt, Artificial Sequence
  Description of Artificial Sequence: Synthetic oligonucleotide
gguacauacgggguuccuc

SEQ ID NO: 692646 - RNA, 19 nt, Artificial Sequence
  Description of Artificial Sequence: Synthetic oligonucleotide
accuacugcucaggcacug

SEQ ID NO: 692647 - RNA, 19 nt, Artificial Sequence
  Description of Artificial Sequence: Synthetic oligonucleotide
gguagacacauaaccccac

SEQ ID NO: 692648 - RNA, 19 nt, Artificial Sequence
  Description of Artificial Sequence: Synthetic oligonucleotide
gcuaucaucuggugccaca

SEQ ID NO: 692649 - RNA, 19 nt, Artificial Sequence
  Description of Artificial Sequence: Synthetic oligonucleotide
aaggcccauggagucuccu

SEQ ID NO: 692650 - RNA, 19 nt, Artificial Sequence
  Description of Artificial Sequence: Synthetic oligonucleotide
ggugaaguagggcucugcu

SEQ ID NO: 692651 - RNA, 19 nt, Artificial Sequence
  Description of Artificial Sequence: Synthetic oligonucleotide
uaagagucgcuggggccaa

SEQ ID NO: 692652 - RNA, 19 nt, Artificial Sequence
  Description of Artificial Sequence: Synthetic oligonucleotide
gagugcgagccagguagac

SEQ ID NO: 692653 - RNA, 19 nt, Artificial Sequence
  Description of Artificial Sequence: Synthetic oligonucleotide
gcuguuaacuaagguccug

SEQ ID NO: 692654 - RNA, 19 nt, Artificial Sequence
  Description of Artificial Sequence: Synthetic oligonucleotide
gaacaugccugggcuuuuc

SEQ ID NO: 692655 - RNA, 19 nt, Artificial Sequence
  Description of Artificial Sequence: Synthetic oligonucleotide
uccuggcuccgacacuauu

SEQ ID NO: 692656 - RNA, 19 nt, Artificial Sequence
  Description of Artificial Sequence: Synthetic oligonucleotide
ccaaccuaaccccucacaa

SEQ ID NO: 692657 - RNA, 19 nt, Artificial Sequence
  Description of Artificial Sequence: Synthetic oligonucleotide
cuguuaacuaagguccugu

SEQ ID NO: 692658 - RNA, 19 nt, Artificial Sequence
  Description of Artificial Sequence: Synthetic oligonucleotide
ggacuaaccacuggcucca

SEQ ID NO: 692659 - RNA, 19 nt, Artificial Sequence
  Description of Artificial Sequence: Synthetic oligonucleotide
gggacauuuguaaggccca

SEQ ID NO: 692660 - RNA, 19 nt, Artificial Sequence
  Description of Artificial Sequence: Synthetic oligonucleotide
caacccucucacaccacaa

SEQ ID NO: 692661 - RNA, 19 nt, Artificial Sequence
  Description of Artificial Sequence: Synthetic oligonucleotide
gagcuaucaucuggugcca

SEQ ID NO: 692662 - RNA, 19 nt, Artificial Sequence
  Description of Artificial Sequence: Synthetic oligonucleotide
ggagcagucucccguagcu

SEQ ID NO: 692663 - RNA, 19 nt, Artificial Sequence
  Description of Artificial Sequence: Synthetic oligonucleotide
caggaaugucuaacccaca

SEQ ID NO: 692664 - RNA, 19 nt, Artificial Sequence
  Description of Artificial Sequence: Synthetic oligonucleotide
gcugaguaucaacuugcaa

SEQ ID NO: 692665 - RNA, 19 nt, Artificial Sequence
  Description of Artificial Sequence: Synthetic oligonucleotide
gucgcuggggccaagcuau

SEQ ID NO: 692666 - RNA, 19 nt, Artificial Sequence
  Description of Artificial Sequence: Synthetic oligonucleotide
ucccguagcuguggggaaa

SEQ ID NO: 692667 - RNA, 19 nt, Artificial Sequence
  Description of Artificial Sequence: Synthetic oligonucleotide
gugccacaaagggaaguga

SEQ ID NO: 692668 - RNA, 19 nt, Artificial Sequence
  Description of Artificial Sequence: Synthetic oligonucleotide
guguccacuaacagaacau

SEQ ID NO: 692669 - RNA, 19 nt, Artificial Sequence
  Description of Artificial Sequence: Synthetic oligonucleotide
cugcgauugguggugaagu

SEQ ID NO: 692670 - RNA, 19 nt, Artificial Sequence
  Description of Artificial Sequence: Synthetic oligonucleotide
aagagucgcuggggccaag

SEQ ID NO: 692671 - RNA, 19 nt, Artificial Sequence
  Description of Artificial Sequence: Synthetic oligonucleotide
gacuaaccacuggcuccag

SEQ ID NO: 692672 - RNA, 19 nt, Artificial Sequence
  Description of Artificial Sequence: Synthetic oligonucleotide
ggccaagcuauagggagca

SEQ ID NO: 692673 - RNA, 19 nt, Artificial Sequence
  Description of Artificial Sequence: Synthetic oligonucleotide
gccaaccuaaccccucaca

SEQ ID NO: 692674 - RNA, 19 nt, Artificial Sequence
  Description of Artificial Sequence: Synthetic oligonucleotide
agcacccauccccacccuu

SEQ ID NO: 692675 - RNA, 19 nt, Artificial Sequence
  Description of Artificial Sequence: Synthetic oligonucleotide
gggccaagcuauagggagc

SEQ ID NO: 692676 - RNA, 19 nt, Artificial Sequence
  Description of Artificial Sequence: Synthetic oligonucleotide
cuacugcucaggcacugcu

SEQ ID NO: 692677 - RNA, 19 nt, Artificial Sequence
  Description of Artificial Sequence: Synthetic oligonucleotide
ccacuaacagaacaugccu

SEQ ID NO: 692678 - RNA, 19 nt, Artificial Sequence
  Description of Artificial Sequence: Synthetic oligonucleotide
gcugugggccugguaaggc

SEQ ID NO: 692679 - RNA, 19 nt, Artificial Sequence
  Description of Artificial Sequence: Synthetic oligonucleotide
guggccauggguacugagu

SEQ ID NO: 692680 - RNA, 19 nt, Artificial Sequence
  Description of Artificial Sequence: Synthetic oligonucleotide
cuccgacacuauuugcugu

SEQ ID NO: 692681 - RNA, 19 nt, Artificial Sequence
  Description of Artificial Sequence: Synthetic oligonucleotide
cuaacccacaggaguaguu

SEQ ID NO: 692682 - RNA, 19 nt, Artificial Sequence
  Description of Artificial Sequence: Synthetic oligonucleotide
ugccugcgauuggugguga

SEQ ID NO: 692683 - RNA, 19 nt, Artificial Sequence
  Description of Artificial Sequence: Synthetic oligonucleotide
agcugccaaaugacaugca

SEQ ID NO: 692684 - RNA, 19 nt, Artificial Sequence
  Description of Artificial Sequence: Synthetic oligonucleotide
aaggaacguucagccccaa

SEQ ID NO: 692685 - RNA, 19 nt, Artificial Sequence
  Description of Artificial Sequence: Synthetic oligonucleotide
cucacccugugaagcaggu

SEQ ID NO: 692686 - RNA, 19 nt, Artificial Sequence
  Description of Artificial Sequence: Synthetic oligonucleotide
gaguucggagcucgguauu

SEQ ID NO: 692687 - RNA, 19 nt, Artificial Sequence
  Description of Artificial Sequence: Synthetic oligonucleotide
gggguacauacgggguucc

SEQ ID NO: 692688 - RNA, 19 nt, Artificial Sequence
  Description of Artificial Sequence: Synthetic oligonucleotide
gcugcauccaagaacuauu

SEQ ID NO: 692689 - RNA, 19 nt, Artificial Sequence
  Description of Artificial Sequence: Synthetic oligonucleotide
ccugaguugugagcaacca

SEQ ID NO: 692690 - RNA, 19 nt, Artificial Sequence
  Description of Artificial Sequence: Synthetic oligonucleotide
gucaacccucucacaccac

SEQ ID NO: 692691 - RNA, 19 nt, Artificial Sequence
  Description of Artificial Sequence: Synthetic oligonucleotide
ccuacugcucaggcacugc

SEQ ID NO: 692692 - RNA, 19 nt, Artificial Sequence
  Description of Artificial Sequence: Synthetic oligonucleotide
cucccguagcuguggggaa

SEQ ID NO: 692693 - RNA, 19 nt, Artificial Sequence
  Description of Artificial Sequence: Synthetic oligonucleotide
ucgcuggggccaagcuaua

SEQ ID NO: 692694 - RNA, 19 nt, Artificial Sequence
  Description of Artificial Sequence: Synthetic oligonucleotide
guccuggccccucacuaau

SEQ ID NO: 692695 - RNA, 19 nt, Artificial Sequence
  Description of Artificial Sequence: Synthetic oligonucleotide
ccucacuaauagcuggucu

SEQ ID NO: 692696 - RNA, 19 nt, Artificial Sequence
  Description of Artificial Sequence: Synthetic oligonucleotide
gguagccaagcaguccuua

SEQ ID NO: 692697 - RNA, 19 nt, Artificial Sequence
  Description of Artificial Sequence: Synthetic oligonucleotide
gagcaaccaaaggaacguu

SEQ ID NO: 692698 - RNA, 19 nt, Artificial Sequence
  Description of Artificial Sequence: Synthetic oligonucleotide
accccucacaaagcucauu

SEQ ID NO: 692699 - RNA, 19 nt, Artificial Sequence
  Description of Artificial Sequence: Synthetic oligonucleotide
ccaaaugccugcgauuggu

SEQ ID NO: 692700 - RNA, 19 nt, Artificial Sequence
  Description of Artificial Sequence: Synthetic oligonucleotide
ccauuguaacagcuugaua

SEQ ID NO: 692701 - RNA, 19 nt, Artificial Sequence
  Description of Artificial Sequence: Synthetic oligonucleotide
cccacgcagcacacagcag

SEQ ID NO: 692702 - RNA, 19 nt, Artificial Sequence
  Description of Artificial Sequence: Synthetic oligonucleotide
ggguuccauccacucugga

SEQ ID NO: 692703 - RNA, 19 nt, Artificial Sequence
  Description of Artificial Sequence: Synthetic oligonucleotide
ccccacccuugucauacuc

SEQ ID NO: 692704 - RNA, 19 nt, Artificial Sequence
  Description of Artificial Sequence: Synthetic oligonucleotide
ggcagcaucucagcccugu

SEQ ID NO: 692705 - RNA, 19 nt, Artificial Sequence
  Description of Artificial Sequence: Synthetic oligonucleotide
ccucuauauagacccuccu

SEQ ID NO: 692706 - RNA, 19 nt, Artificial Sequence
  Description of Artificial Sequence: Synthetic oligonucleotide
gccuacucccagccacaga

SEQ ID NO: 692707 - RNA, 19 nt, Artificial Sequence
  Description of Artificial Sequence: Synthetic oligonucleotide
cccaagucuaagcacccau

SEQ ID NO: 692708 - RNA, 19 nt, Artificial Sequence
  Description of Artificial Sequence: Synthetic oligonucleotide
cugaguggucugccaacuu

SEQ ID NO: 692709 - RNA, 19 nt, Artificial Sequence
  Description of Artificial Sequence: Synthetic oligonucleotide
gccugcgauugguggugaa

SEQ ID NO: 692710 - RNA, 19 nt, Artificial Sequence
  Description of Artificial Sequence: Synthetic oligonucleotide
ggguacauacgggguuccu

SEQ ID NO: 692711 - RNA, 19 nt, Artificial Sequence
  Description of Artificial Sequence: Synthetic oligonucleotide
ccgagcccuccaaggcccu

SEQ ID NO: 692712 - RNA, 19 nt, Artificial Sequence
  Description of Artificial Sequence: Synthetic oligonucleotide
ccguagcuguggggaaaau

SEQ ID NO: 692713 - RNA, 19 nt, Artificial Sequence
  Description of Artificial Sequence: Synthetic oligonucleotide
caaacuaagggccagcugg

SEQ ID NO: 692714 - RNA, 19 nt, Artificial Sequence
  Description of Artificial Sequence: Synthetic oligonucleotide
gaagacgucggcaagaucc

SEQ ID NO: 692715 - RNA, 19 nt, Artificial Sequence
  Description of Artificial Sequence: Synthetic oligonucleotide
gauccguucuuccuuaucg

SEQ ID NO: 692716 - RNA, 19 nt, Artificial Sequence
  Description of Artificial Sequence: Synthetic oligonucleotide
ucuauagccaucugcagcc

SEQ ID NO: 692717 - RNA, 19 nt, Artificial Sequence
  Description of Artificial Sequence: Synthetic oligonucleotide
acucacaacacugaucucc

SEQ ID NO: 692718 - RNA, 19 nt, Artificial Sequence
  Description of Artificial Sequence: Synthetic oligonucleotide
aaugacuccggagucuucc

SEQ ID NO: 692719 - RNA, 19 nt, Artificial Sequence
  Description of Artificial Sequence: Synthetic oligonucleotide
ugagaauugccauuuauuc

SEQ ID NO: 692720 - RNA, 19 nt, Artificial Sequence
  Description of Artificial Sequence: Synthetic oligonucleotide
ucggcaagauccaugagag

SEQ ID NO: 692721 - RNA, 19 nt, Artificial Sequence
  Description of Artificial Sequence: Synthetic oligonucleotide
cuugcucuccucuauagcc

SEQ ID NO: 692722 - RNA, 19 nt, Artificial Sequence
  Description of Artificial Sequence: Synthetic oligonucleotide
ucaucgggaaggcaggacg

SEQ ID NO: 692723 - RNA, 19 nt, Artificial Sequence
  Description of Artificial Sequence: Synthetic oligonucleotide
gagaauugccauuuauucc

SEQ ID NO: 692724 - RNA, 19 nt, Artificial Sequence
  Description of Artificial Sequence: Synthetic oligonucleotide
ucucggcucaaacuaaggg

SEQ ID NO: 692725 - RNA, 19 nt, Artificial Sequence
  Description of Artificial Sequence: Synthetic oligonucleotide
ucggcucaaacuaagggcc

SEQ ID NO: 692726 - RNA, 19 nt, Artificial Sequence
  Description of Artificial Sequence: Synthetic oligonucleotide
uccucuauagccaucugca

SEQ ID NO: 692727 - RNA, 19 nt, Artificial Sequence
  Description of Artificial Sequence: Synthetic oligonucleotide
uguagugugagugggcccg

SEQ ID NO: 692728 - RNA, 19 nt, Artificial Sequence
  Description of Artificial Sequence: Synthetic oligonucleotide
uuuggagggaaguggaaug

SEQ ID NO: 692729 - RNA, 19 nt, Artificial Sequence
  Description of Artificial Sequence: Synthetic oligonucleotide
cucaucgcgaagcaaagcc

SEQ ID NO: 692730 - RNA, 19 nt, Artificial Sequence
  Description of Artificial Sequence: Synthetic oligonucleotide
ucaugucgaaugcaccugg

SEQ ID NO: 692731 - RNA, 19 nt, Artificial Sequence
  Description of Artificial Sequence: Synthetic oligonucleotide
ugucgaaugcaccugggcu

SEQ ID NO: 692732 - RNA, 19 nt, Artificial Sequence
  Description of Artificial Sequence: Synthetic oligonucleotide
cucggcucaaacuaagggc

SEQ ID NO: 692733 - RNA, 19 nt, Artificial Sequence
  Description of Artificial Sequence: Synthetic oligonucleotide
uggauuacaggaggaaggg

SEQ ID NO: 692734 - RNA, 19 nt, Artificial Sequence
  Description of Artificial Sequence: Synthetic oligonucleotide
cucuauagccaucugcagc

SEQ ID NO: 692735 - RNA, 19 nt, Artificial Sequence
  Description of Artificial Sequence: Synthetic oligonucleotide
aauggguuggaagccuugg

SEQ ID NO: 692736 - RNA, 19 nt, Artificial Sequence
  Description of Artificial Sequence: Synthetic oligonucleotide
ugcacagcguacauguucu

SEQ ID NO: 692737 - RNA, 19 nt, Artificial Sequence
  Description of Artificial Sequence: Synthetic oligonucleotide
augucgaaugcaccugggc

SEQ ID NO: 692738 - RNA, 19 nt, Artificial Sequence
  Description of Artificial Sequence: Synthetic oligonucleotide
agccagagaguccccaacc

SEQ ID NO: 692739 - RNA, 19 nt, Artificial Sequence
  Description of Artificial Sequence: Synthetic oligonucleotide
gugucaggaguuuggaggg

SEQ ID NO: 692740 - RNA, 19 nt, Artificial Sequence
  Description of Artificial Sequence: Synthetic oligonucleotide
agauguagguagguggcgc

SEQ ID NO: 692741 - RNA, 19 nt, Artificial Sequence
  Description of Artificial Sequence: Synthetic oligonucleotide
gugacacgcgcucagagcc

SEQ ID NO: 692742 - RNA, 19 nt, Artificial Sequence
  Description of Artificial Sequence: Synthetic oligonucleotide
uugagccgcuuccagauca

SEQ ID NO: 692743 - RNA, 19 nt, Artificial Sequence
  Description of Artificial Sequence: Synthetic oligonucleotide
uggguugggaacuugggaa

SEQ ID NO: 692744 - RNA, 19 nt, Artificial Sequence
  Description of Artificial Sequence: Synthetic oligonucleotide
acucaugucgaaugcaccu

SEQ ID NO: 692745 - RNA, 19 nt, Artificial Sequence
  Description of Artificial Sequence: Synthetic oligonucleotide
auuuauucccgaaguugcc

SEQ ID NO: 692746 - RNA, 19 nt, Artificial Sequence
  Description of Artificial Sequence: Synthetic oligonucleotide
aaggguucaccaagggcgc

SEQ ID NO: 692747 - RNA, 19 nt, Artificial Sequence
  Description of Artificial Sequence: Synthetic oligonucleotide
uuuauucccgaaguugcca

SEQ ID NO: 692748 - RNA, 19 nt, Artificial Sequence
  Description of Artificial Sequence: Synthetic oligonucleotide
acacugaucucccagggaa

SEQ ID NO: 692749 - RNA, 19 nt, Artificial Sequence
  Description of Artificial Sequence: Synthetic oligonucleotide
uagacgugucuccaguucu

SEQ ID NO: 692750 - RNA, 19 nt, Artificial Sequence
  Description of Artificial Sequence: Synthetic oligonucleotide
uuggucuugagcgcguggg

SEQ ID NO: 692751 - RNA, 19 nt, Artificial Sequence
  Description of Artificial Sequence: Synthetic oligonucleotide
ucaaacuaagggccagcug

SEQ ID NO: 692752 - RNA, 19 nt, Artificial Sequence
  Description of Artificial Sequence: Synthetic oligonucleotide
ugucauggccuuguagacg

SEQ ID NO: 692753 - RNA, 19 nt, Artificial Sequence
  Description of Artificial Sequence: Synthetic oligonucleotide
gaucugagaaggccggggc

SEQ ID NO: 692754 - RNA, 19 nt, Artificial Sequence
  Description of Artificial Sequence: Synthetic oligonucleotide
cugagaacucaucaggcuc

SEQ ID NO: 692755 - RNA, 19 nt, Artificial Sequence
  Description of Artificial Sequence: Synthetic oligonucleotide
ugugacacgcgcucagagc

SEQ ID NO: 692756 - RNA, 19 nt, Artificial Sequence
  Description of Artificial Sequence: Synthetic oligonucleotide
guacauguucucuuugcac

SEQ ID NO: 692757 - RNA, 19 nt, Artificial Sequence
  Description of Artificial Sequence: Synthetic oligonucleotide
aacacugaucucccaggga

SEQ ID NO: 692758 - RNA, 19 nt, Artificial Sequence
  Description of Artificial Sequence: Synthetic oligonucleotide
cagagugagcguugcaggg

SEQ ID NO: 692759 - RNA, 19 nt, Artificial Sequence
  Description of Artificial Sequence: Synthetic oligonucleotide
uccggagucuuccgugugg

SEQ ID NO: 692760 - RNA, 19 nt, Artificial Sequence
  Description of Artificial Sequence: Synthetic oligonucleotide
uccucaucgcgaagcaaag

SEQ ID NO: 692761 - RNA, 19 nt, Artificial Sequence
  Description of Artificial Sequence: Synthetic oligonucleotide
uggucguugagccgcuucc

SEQ ID NO: 692762 - RNA, 19 nt, Artificial Sequence
  Description of Artificial Sequence: Synthetic oligonucleotide
augggucaggugugggucc

SEQ ID NO: 692763 - RNA, 19 nt, Artificial Sequence
  Description of Artificial Sequence: Synthetic oligonucleotide
acgugucuccaguucuugc

SEQ ID NO: 692764 - RNA, 19 nt, Artificial Sequence
  Description of Artificial Sequence: Synthetic oligonucleotide
uuauucccgaaguugccaa

SEQ ID NO: 692765 - RNA, 19 nt, Artificial Sequence
  Description of Artificial Sequence: Synthetic oligonucleotide
gaauugccauuuauucccg

SEQ ID NO: 692766 - RNA, 19 nt, Artificial Sequence
  Description of Artificial Sequence: Synthetic oligonucleotide
caucgggaaggcaggacgg

SEQ ID NO: 692767 - RNA, 19 nt, Artificial Sequence
  Description of Artificial Sequence: Synthetic oligonucleotide
gucggcaagauccaugaga

SEQ ID NO: 692768 - RNA, 19 nt, Artificial Sequence
  Description of Artificial Sequence: Synthetic oligonucleotide
uccguucuuccuuaucgug

SEQ ID NO: 692769 - RNA, 19 nt, Artificial Sequence
  Description of Artificial Sequence: Synthetic oligonucleotide
cuacccuggauuacaggag

SEQ ID NO: 692770 - RNA, 19 nt, Artificial Sequence
  Description of Artificial Sequence: Synthetic oligonucleotide
uaucgugcuccucucggcu

SEQ ID NO: 692771 - RNA, 19 nt, Artificial Sequence
  Description of Artificial Sequence: Synthetic oligonucleotide
ugugaagacgucggcaaga

SEQ ID NO: 692772 - RNA, 19 nt, Artificial Sequence
  Description of Artificial Sequence: Synthetic oligonucleotide
cuuguagacgugucuccag

SEQ ID NO: 692773 - RNA, 19 nt, Artificial Sequence
  Description of Artificial Sequence: Synthetic oligonucleotide
caugcucaugaucucugag

SEQ ID NO: 692774 - RNA, 19 nt, Artificial Sequence
  Description of Artificial Sequence: Synthetic oligonucleotide
caaugucauggccuuguag

SEQ ID NO: 692775 - RNA, 19 nt, Artificial Sequence
  Description of Artificial Sequence: Synthetic oligonucleotide
ugagagaggacuccuccuu

SEQ ID NO: 692776 - RNA, 19 nt, Artificial Sequence
  Description of Artificial Sequence: Synthetic oligonucleotide
gagauguagguagguggcg

SEQ ID NO: 692777 - RNA, 19 nt, Artificial Sequence
  Description of Artificial Sequence: Synthetic oligonucleotide
acgucggcaagauccauga

SEQ ID NO: 692778 - RNA, 19 nt, Artificial Sequence
  Description of Artificial Sequence: Synthetic oligonucleotide
agccgcuuccagaucaugc

SEQ ID NO: 692779 - RNA, 19 nt, Artificial Sequence
  Description of Artificial Sequence: Synthetic oligonucleotide
cuaggaaugacuccggagu

SEQ ID NO: 692780 - RNA, 19 nt, Artificial Sequence
  Description of Artificial Sequence: Synthetic oligonucleotide
caugucgaaugcaccuggg

SEQ ID NO: 692781 - RNA, 19 nt, Artificial Sequence
  Description of Artificial Sequence: Synthetic oligonucleotide
acggcggauccguucuucc

SEQ ID NO: 692782 - RNA, 19 nt, Artificial Sequence
  Description of Artificial Sequence: Synthetic oligonucleotide
ugcugugacacgcgcucag

SEQ ID NO: 692783 - RNA, 19 nt, Artificial Sequence
  Description of Artificial Sequence: Synthetic oligonucleotide
gaggagagauguagguagg

SEQ ID NO: 692784 - RNA, 19 nt, Artificial Sequence
  Description of Artificial Sequence: Synthetic oligonucleotide
gauuacaggaggaagggau

SEQ ID NO: 692785 - RNA, 19 nt, Artificial Sequence
  Description of Artificial Sequence: Synthetic oligonucleotide
uguagguagguggcgcucc

SEQ ID NO: 692786 - RNA, 19 nt, Artificial Sequence
  Description of Artificial Sequence: Synthetic oligonucleotide
uccuacccuggauuacagg

SEQ ID NO: 692787 - RNA, 19 nt, Artificial Sequence
  Description of Artificial Sequence: Synthetic oligonucleotide
agugugagugggcccgagg

SEQ ID NO: 692788 - RNA, 19 nt, Artificial Sequence
  Description of Artificial Sequence: Synthetic oligonucleotide
cuccaucaaugucauggcc

SEQ ID NO: 692789 - RNA, 19 nt, Artificial Sequence
  Description of Artificial Sequence: Synthetic oligonucleotide
ugucccuccccgucuaaug

SEQ ID NO: 692790 - RNA, 19 nt, Artificial Sequence
  Description of Artificial Sequence: Synthetic oligonucleotide
cugcacagcguacauguuc

SEQ ID NO: 692791 - RNA, 19 nt, Artificial Sequence
  Description of Artificial Sequence: Synthetic oligonucleotide
agcguacauguucucuuug

SEQ ID NO: 692792 - RNA, 19 nt, Artificial Sequence
  Description of Artificial Sequence: Synthetic oligonucleotide
ucgaaugcaccugggcugc

SEQ ID NO: 692793 - RNA, 19 nt, Artificial Sequence
  Description of Artificial Sequence: Synthetic oligonucleotide
ucggcagaguggcucggag

SEQ ID NO: 692794 - RNA, 19 nt, Artificial Sequence
  Description of Artificial Sequence: Synthetic oligonucleotide
guagacgugucuccaguuc

SEQ ID NO: 692795 - RNA, 19 nt, Artificial Sequence
  Description of Artificial Sequence: Synthetic oligonucleotide
uccgcuuggcaggaauggg

SEQ ID NO: 692796 - RNA, 19 nt, Artificial Sequence
  Description of Artificial Sequence: Synthetic oligonucleotide
uggacgucgucaucgggaa

SEQ ID NO: 692797 - RNA, 19 nt, Artificial Sequence
  Description of Artificial Sequence: Synthetic oligonucleotide
gugacggaggggccggugg

SEQ ID NO: 692798 - RNA, 19 nt, Artificial Sequence
  Description of Artificial Sequence: Synthetic oligonucleotide
auccguucuuccuuaucgu

SEQ ID NO: 692799 - RNA, 19 nt, Artificial Sequence
  Description of Artificial Sequence: Synthetic oligonucleotide
agugucugcacagcguaca

SEQ ID NO: 692800 - RNA, 19 nt, Artificial Sequence
  Description of Artificial Sequence: Synthetic oligonucleotide
cuaagggccagcuggagcu

SEQ ID NO: 692801 - RNA, 19 nt, Artificial Sequence
  Description of Artificial Sequence: Synthetic oligonucleotide
aaucaucaccaaggguuca

SEQ ID NO: 692802 - RNA, 19 nt, Artificial Sequence
  Description of Artificial Sequence: Synthetic oligonucleotide
ucuugagcgcgugggcgcg

SEQ ID NO: 692803 - RNA, 19 nt, Artificial Sequence
  Description of Artificial Sequence: Synthetic oligonucleotide
gggccuaggaaugacuccg

SEQ ID NO: 692804 - RNA, 19 nt, Artificial Sequence
  Description of Artificial Sequence: Synthetic oligonucleotide
gugugagugggcccgagga

SEQ ID NO: 692805 - RNA, 19 nt, Artificial Sequence
  Description of Artificial Sequence: Synthetic oligonucleotide
uccccgucuaaugccacag

SEQ ID NO: 692806 - RNA, 19 nt, Artificial Sequence
  Description of Artificial Sequence: Synthetic oligonucleotide
uaggugaggucagcaaucu

SEQ ID NO: 692807 - RNA, 19 nt, Artificial Sequence
  Description of Artificial Sequence: Synthetic oligonucleotide
uggccuuguagacgugucu

SEQ ID NO: 692808 - RNA, 19 nt, Artificial Sequence
  Description of Artificial Sequence: Synthetic oligonucleotide
acguacuggaaguccuuca

SEQ ID NO: 692809 - RNA, 19 nt, Artificial Sequence
  Description of Artificial Sequence: Synthetic oligonucleotide
cuggacgucgucaucggga

SEQ ID NO: 692810 - RNA, 19 nt, Artificial Sequence
  Description of Artificial Sequence: Synthetic oligonucleotide
gaugagguacuccaucaau

SEQ ID NO: 692811 - RNA, 19 nt, Artificial Sequence
  Description of Artificial Sequence: Synthetic oligonucleotide
cccgaaguugccaaaauca

SEQ ID NO: 692812 - RNA, 19 nt, Artificial Sequence
  Description of Artificial Sequence: Synthetic oligonucleotide
ccucaggucauccccacgg

SEQ ID NO: 692813 - RNA, 19 nt, Artificial Sequence
  Description of Artificial Sequence: Synthetic oligonucleotide
ucgugcuccucucggcuca

SEQ ID NO: 692814 - RNA, 19 nt, Artificial Sequence
  Description of Artificial Sequence: Synthetic oligonucleotide
uggccggcucaccagcgag

SEQ ID NO: 692815 - RNA, 19 nt, Artificial Sequence
  Description of Artificial Sequence: Synthetic oligonucleotide
gucuugagcgcgugggcgc

SEQ ID NO: 692816 - RNA, 19 nt, Artificial Sequence
  Description of Artificial Sequence: Synthetic oligonucleotide
caugggucagguguggguc

SEQ ID NO: 692817 - RNA, 19 nt, Artificial Sequence
  Description of Artificial Sequence: Synthetic oligonucleotide
gucccuccccgucuaaugc

SEQ ID NO: 692818 - RNA, 19 nt, Artificial Sequence
  Description of Artificial Sequence: Synthetic oligonucleotide
ggguugggaacuugggaag

SEQ ID NO: 692819 - RNA, 19 nt, Artificial Sequence
  Description of Artificial Sequence: Synthetic oligonucleotide
gaaugcaccugggcugcgg

SEQ ID NO: 692820 - RNA, 19 nt, Artificial Sequence
  Description of Artificial Sequence: Synthetic oligonucleotide
aagacgucggcaagaucca

SEQ ID NO: 692821 - RNA, 19 nt, Artificial Sequence
  Description of Artificial Sequence: Synthetic oligonucleotide
ggaacgaggaggcuccaac

SEQ ID NO: 692822 - RNA, 19 nt, Artificial Sequence
  Description of Artificial Sequence: Synthetic oligonucleotide
guaggugaggucagcaauc

SEQ ID NO: 692823 - RNA, 19 nt, Artificial Sequence
  Description of Artificial Sequence: Synthetic oligonucleotide
uccucucggcucaaacuaa

SEQ ID NO: 692824 - RNA, 19 nt, Artificial Sequence
  Description of Artificial Sequence: Synthetic oligonucleotide
gacgucggcaagauccaug

SEQ ID NO: 692825 - RNA, 19 nt, Artificial Sequence
  Description of Artificial Sequence: Synthetic oligonucleotide
agagaguccccaaccccac

SEQ ID NO: 692826 - RNA, 19 nt, Artificial Sequence
  Description of Artificial Sequence: Synthetic oligonucleotide
cagaguggcucggagccgg

SEQ ID NO: 692827 - RNA, 19 nt, Artificial Sequence
  Description of Artificial Sequence: Synthetic oligonucleotide
ccuaggaaugacuccggag

SEQ ID NO: 692828 - RNA, 19 nt, Artificial Sequence
  Description of Artificial Sequence: Synthetic oligonucleotide
agguggguugggaacuugg

SEQ ID NO: 692829 - RNA, 19 nt, Artificial Sequence
  Description of Artificial Sequence: Synthetic oligonucleotide
ccuacccuggauuacagga

SEQ ID NO: 692830 - RNA, 19 nt, Artificial Sequence
  Description of Artificial Sequence: Synthetic oligonucleotide
cacugaucucccagggaac

SEQ ID NO: 692831 - RNA, 19 nt, Artificial Sequence
  Description of Artificial Sequence: Synthetic oligonucleotide
ggucuugagcgcgugggcg

SEQ ID NO: 692832 - RNA, 19 nt, Artificial Sequence
  Description of Artificial Sequence: Synthetic oligonucleotide
acuccggagucuuccgugu

SEQ ID NO: 692833 - RNA, 19 nt, Artificial Sequence
  Description of Artificial Sequence: Synthetic oligonucleotide
ucaaugucauggccuugua

SEQ ID NO: 692834 - RNA, 19 nt, Artificial Sequence
  Description of Artificial Sequence: Synthetic oligonucleotide
accaagggcgccaagggaa

SEQ ID NO: 692835 - RNA, 19 nt, Artificial Sequence
  Description of Artificial Sequence: Synthetic oligonucleotide
guguagugugagugggccc

SEQ ID NO: 692836 - RNA, 19 nt, Artificial Sequence
  Description of Artificial Sequence: Synthetic oligonucleotide
acguucacgcccugguccu

SEQ ID NO: 692837 - RNA, 19 nt, Artificial Sequence
  Description of Artificial Sequence: Synthetic oligonucleotide
gccaucucgguccacguac

SEQ ID NO: 692838 - RNA, 19 nt, Artificial Sequence
  Description of Artificial Sequence: Synthetic oligonucleotide
auguagguagguggcgcuc

SEQ ID NO: 692839 - RNA, 19 nt, Artificial Sequence
  Description of Artificial Sequence: Synthetic oligonucleotide
ucucccgcacguucacgcc

SEQ ID NO: 692840 - RNA, 19 nt, Artificial Sequence
  Description of Artificial Sequence: Synthetic oligonucleotide
uccaguucuugccgugguc

SEQ ID NO: 692841 - RNA, 19 nt, Artificial Sequence
  Description of Artificial Sequence: Synthetic oligonucleotide
aggccguggcagucugugc

SEQ ID NO: 692842 - RNA, 19 nt, Artificial Sequence
  Description of Artificial Sequence: Synthetic oligonucleotide
gcguacauguucucuuugc

SEQ ID NO: 692843 - RNA, 19 nt, Artificial Sequence
  Description of Artificial Sequence: Synthetic oligonucleotide
acgucgucaucgggaaggc

SEQ ID NO: 692844 - RNA, 19 nt, Artificial Sequence
  Description of Artificial Sequence: Synthetic oligonucleotide
caugagggagcuggauggg

SEQ ID NO: 692845 - RNA, 19 nt, Artificial Sequence
  Description of Artificial Sequence: Synthetic oligonucleotide
gacgugucuccaguucuug

SEQ ID NO: 692846 - RNA, 19 nt, Artificial Sequence
  Description of Artificial Sequence: Synthetic oligonucleotide
gacacgcgcucagagccag

SEQ ID NO: 692847 - RNA, 19 nt, Artificial Sequence
  Description of Artificial Sequence: Synthetic oligonucleotide
ggagagauguagguaggug

SEQ ID NO: 692848 - RNA, 19 nt, Artificial Sequence
  Description of Artificial Sequence: Synthetic oligonucleotide
gauuggugacggaggggcc

SEQ ID NO: 692849 - RNA, 19 nt, Artificial Sequence
  Description of Artificial Sequence: Synthetic oligonucleotide
ccagaggucggcagagugg

SEQ ID NO: 692850 - RNA, 19 nt, Artificial Sequence
  Description of Artificial Sequence: Synthetic oligonucleotide
auggccuuguagacguguc

SEQ ID NO: 692851 - RNA, 19 nt, Artificial Sequence
  Description of Artificial Sequence: Synthetic oligonucleotide
cucccgcacguucacgccc

SEQ ID NO: 692852 - RNA, 19 nt, Artificial Sequence
  Description of Artificial Sequence: Synthetic oligonucleotide
aaccccacucaugucgaau

SEQ ID NO: 692853 - RNA, 19 nt, Artificial Sequence
  Description of Artificial Sequence: Synthetic oligonucleotide
uggccggagcuccgcuugg

SEQ ID NO: 692854 - RNA, 19 nt, Artificial Sequence
  Description of Artificial Sequence: Synthetic oligonucleotide
cugagacggagcugguuca

SEQ ID NO: 692855 - RNA, 19 nt, Artificial Sequence
  Description of Artificial Sequence: Synthetic oligonucleotide
ucccuccuacccuggauua

SEQ ID NO: 692856 - RNA, 19 nt, Artificial Sequence
  Description of Artificial Sequence: Synthetic oligonucleotide
ggaggaagggauuaguguu

SEQ ID NO: 692857 - RNA, 19 nt, Artificial Sequence
  Description of Artificial Sequence: Synthetic oligonucleotide
gccggucaaagucugagaa

SEQ ID NO: 692858 - RNA, 19 nt, Artificial Sequence
  Description of Artificial Sequence: Synthetic oligonucleotide
gaacuugggaagagggugu

SEQ ID NO: 692859 - RNA, 19 nt, Artificial Sequence
  Description of Artificial Sequence: Synthetic oligonucleotide
gccuuguagacgugucucc

SEQ ID NO: 692860 - RNA, 19 nt, Artificial Sequence
  Description of Artificial Sequence: Synthetic oligonucleotide
ugagccgcuuccagaucau

SEQ ID NO: 692861 - RNA, 19 nt, Artificial Sequence
  Description of Artificial Sequence: Synthetic oligonucleotide
agccuuggcuccuggcggu

SEQ ID NO: 692862 - RNA, 19 nt, Artificial Sequence
  Description of Artificial Sequence: Synthetic oligonucleotide
ucauggccuuguagacgug

SEQ ID NO: 692863 - RNA, 19 nt, Artificial Sequence
  Description of Artificial Sequence: Synthetic oligonucleotide
gguucagagugagcguugc

SEQ ID NO: 692864 - RNA, 19 nt, Artificial Sequence
  Description of Artificial Sequence: Synthetic oligonucleotide
caucucgguccacguacug

SEQ ID NO: 692865 - RNA, 19 nt, Artificial Sequence
  Description of Artificial Sequence: Synthetic oligonucleotide
ccuuaucgugcuccucucg

SEQ ID NO: 692866 - RNA, 19 nt, Artificial Sequence
  Description of Artificial Sequence: Synthetic oligonucleotide
ggggccuaggaaugacucc

SEQ ID NO: 692867 - RNA, 19 nt, Artificial Sequence
  Description of Artificial Sequence: Synthetic oligonucleotide
caagggcgccaagggaacg

SEQ ID NO: 692868 - RNA, 19 nt, Artificial Sequence
  Description of Artificial Sequence: Synthetic oligonucleotide
gcaggugaaccuccccaag

SEQ ID NO: 692869 - RNA, 19 nt, Artificial Sequence
  Description of Artificial Sequence: Synthetic oligonucleotide
caccaucagaggaucccca

SEQ ID NO: 692870 - RNA, 19 nt, Artificial Sequence
  Description of Artificial Sequence: Synthetic oligonucleotide
acgcccugguccuugccau

SEQ ID NO: 692871 - RNA, 19 nt, Artificial Sequence
  Description of Artificial Sequence: Synthetic oligonucleotide
guggcgcuccaggaacugg

SEQ ID NO: 692872 - RNA, 19 nt, Artificial Sequence
  Description of Artificial Sequence: Synthetic oligonucleotide
gcagagggcccuguagggg

SEQ ID NO: 692873 - RNA, 19 nt, Artificial Sequence
  Description of Artificial Sequence: Synthetic oligonucleotide
gaaggccggggcaggggcc

SEQ ID NO: 692874 - RNA, 19 nt, Artificial Sequence
  Description of Artificial Sequence: Synthetic oligonucleotide
gcuggacgucgucaucggg

SEQ ID NO: 692875 - RNA, 19 nt, Artificial Sequence
  Description of Artificial Sequence: Synthetic oligonucleotide
guugagccgcuuccagauc

SEQ ID NO: 692876 - RNA, 19 nt, Artificial Sequence
  Description of Artificial Sequence: Synthetic oligonucleotide
ggaggcuccaacacugauc

SEQ ID NO: 692877 - RNA, 19 nt, Artificial Sequence
  Description of Artificial Sequence: Synthetic oligonucleotide
guagguagguggcgcucca

SEQ ID NO: 692878 - RNA, 19 nt, Artificial Sequence
  Description of Artificial Sequence: Synthetic oligonucleotide
ggcgccaagggaacgagga

SEQ ID NO: 692879 - RNA, 19 nt, Artificial Sequence
  Description of Artificial Sequence: Synthetic oligonucleotide
gagguggguugggaacuug

SEQ ID NO: 692880 - RNA, 19 nt, Artificial Sequence
  Description of Artificial Sequence: Synthetic oligonucleotide
gucaggaguuuggagggaa

SEQ ID NO: 692881 - RNA, 19 nt, Artificial Sequence
  Description of Artificial Sequence: Synthetic oligonucleotide
uggccggcuccccucccca

SEQ ID NO: 692882 - RNA, 19 nt, Artificial Sequence
  Description of Artificial Sequence: Synthetic oligonucleotide
gucaucgggaaggcaggac

SEQ ID NO: 692883 - RNA, 19 nt, Artificial Sequence
  Description of Artificial Sequence: Synthetic oligonucleotide
ccggucaaagucugagaac

SEQ ID NO: 692884 - RNA, 19 nt, Artificial Sequence
  Description of Artificial Sequence: Synthetic oligonucleotide
cuccggagucuuccgugug

SEQ ID NO: 692885 - RNA, 19 nt, Artificial Sequence
  Description of Artificial Sequence: Synthetic oligonucleotide
ggccuuguagacgugucuc

SEQ ID NO: 692886 - RNA, 19 nt, Artificial Sequence
  Description of Artificial Sequence: Synthetic oligonucleotide
cacucacaacacugaucuc

SEQ ID NO: 692887 - RNA, 19 nt, Artificial Sequence
  Description of Artificial Sequence: Synthetic oligonucleotide
acgcgcucagagccagucu

SEQ ID NO: 692888 - RNA, 19 nt, Artificial Sequence
  Description of Artificial Sequence: Synthetic oligonucleotide
guuuggccuucucccgcac

SEQ ID NO: 692889 - RNA, 19 nt, Artificial Sequence
  Description of Artificial Sequence: Synthetic oligonucleotide
ccguuucacaugcacucac

SEQ ID NO: 692890 - RNA, 19 nt, Artificial Sequence
  Description of Artificial Sequence: Synthetic oligonucleotide
gaaugacuccggagucuuc

SEQ ID NO: 692891 - RNA, 19 nt, Artificial Sequence
  Description of Artificial Sequence: Synthetic oligonucleotide
cucaaacuaagggccagcu

SEQ ID NO: 692892 - RNA, 19 nt, Artificial Sequence
  Description of Artificial Sequence: Synthetic oligonucleotide
gguugggaacuugggaaga

SEQ ID NO: 692893 - RNA, 19 nt, Artificial Sequence
  Description of Artificial Sequence: Synthetic oligonucleotide
acccuggauuacaggagga

SEQ ID NO: 692894 - RNA, 19 nt, Artificial Sequence
  Description of Artificial Sequence: Synthetic oligonucleotide
ggauccguucuuccuuauc

SEQ ID NO: 692895 - RNA, 19 nt, Artificial Sequence
  Description of Artificial Sequence: Synthetic oligonucleotide
cuggccggcuccccucccc

SEQ ID NO: 692896 - RNA, 19 nt, Artificial Sequence
  Description of Artificial Sequence: Synthetic oligonucleotide
ggauuacaggaggaaggga

SEQ ID NO: 692897 - RNA, 19 nt, Artificial Sequence
  Description of Artificial Sequence: Synthetic oligonucleotide
ggcucggagccggucaaag

SEQ ID NO: 692898 - RNA, 19 nt, Artificial Sequence
  Description of Artificial Sequence: Synthetic oligonucleotide
accagcgaguccaggucca

SEQ ID NO: 692899 - RNA, 19 nt, Artificial Sequence
  Description of Artificial Sequence: Synthetic oligonucleotide
ggcgguccagagcccacag

SEQ ID NO: 692900 - RNA, 19 nt, Artificial Sequence
  Description of Artificial Sequence: Synthetic oligonucleotide
ccaagggcgccaagggaac

SEQ ID NO: 692901 - RNA, 19 nt, Artificial Sequence
  Description of Artificial Sequence: Synthetic oligonucleotide
ggccuaggaaugacuccgg

SEQ ID NO: 692902 - RNA, 19 nt, Artificial Sequence
  Description of Artificial Sequence: Synthetic oligonucleotide
cauuggggccuaggaauga

SEQ ID NO: 692903 - RNA, 19 nt, Artificial Sequence
  Description of Artificial Sequence: Synthetic oligonucleotide
gcccgcccguuucacaugc

SEQ ID NO: 692904 - RNA, 19 nt, Artificial Sequence
  Description of Artificial Sequence: Synthetic oligonucleotide
ccggagucuuccguguggg

SEQ ID NO: 692905 - RNA, 19 nt, Artificial Sequence
  Description of Artificial Sequence: Synthetic oligonucleotide
agcugucccuccccgucua

SEQ ID NO: 692906 - RNA, 19 nt, Artificial Sequence
  Description of Artificial Sequence: Synthetic oligonucleotide
agggucggcagagggcccu

SEQ ID NO: 692907 - RNA, 19 nt, Artificial Sequence
  Description of Artificial Sequence: Synthetic oligonucleotide
ccaccaagaggagagaugu

SEQ ID NO: 692908 - RNA, 19 nt, Artificial Sequence
  Description of Artificial Sequence: Synthetic oligonucleotide
cuccccgucuaaugccaca

SEQ ID NO: 692909 - RNA, 19 nt, Artificial Sequence
  Description of Artificial Sequence: Synthetic oligonucleotide
gggcugugaagacgucggc

SEQ ID NO: 692910 - RNA, 19 nt, Artificial Sequence
  Description of Artificial Sequence: Synthetic oligonucleotide
agacgugucuccaguucuu

SEQ ID NO: 692911 - RNA, 19 nt, Artificial Sequence
  Description of Artificial Sequence: Synthetic oligonucleotide
cacggcggauccguucuuc

SEQ ID NO: 692912 - RNA, 19 nt, Artificial Sequence
  Description of Artificial Sequence: Synthetic oligonucleotide
cacagcguacauguucucu

SEQ ID NO: 692913 - RNA, 19 nt, Artificial Sequence
  Description of Artificial Sequence: Synthetic oligonucleotide
cauccccacggcggauccg

SEQ ID NO: 692914 - RNA, 19 nt, Artificial Sequence
  Description of Artificial Sequence: Synthetic oligonucleotide
ggacgucgucaucgggaag

SEQ ID NO: 692915 - RNA, 19 nt, Artificial Sequence
  Description of Artificial Sequence: Synthetic oligonucleotide
ccucaucgcgaagcaaagc

SEQ ID NO: 692916 - RNA, 19 nt, Artificial Sequence
  Description of Artificial Sequence: Synthetic oligonucleotide
caggaguuuggagggaagu

SEQ ID NO: 692917 - RNA, 19 nt, Artificial Sequence
  Description of Artificial Sequence: Synthetic oligonucleotide
ccggagggauggcaguagc

SEQ ID NO: 692918 - RNA, 19 nt, Artificial Sequence
  Description of Artificial Sequence: Synthetic oligonucleotide
ccccgugcugcucccagag

SEQ ID NO: 692919 - RNA, 19 nt, Artificial Sequence
  Description of Artificial Sequence: Synthetic oligonucleotide
cuugagcgcgugggcgcgc

SEQ ID NO: 692920 - RNA, 19 nt, Artificial Sequence
  Description of Artificial Sequence: Synthetic oligonucleotide
gaccaccccaagggucagc

SEQ ID NO: 692921 - RNA, 19 nt, Artificial Sequence
  Description of Artificial Sequence: Synthetic oligonucleotide
ccgucuaaugccacagaaa

SEQ ID NO: 692922 - RNA, 19 nt, Artificial Sequence
  Description of Artificial Sequence: Synthetic oligonucleotide
gccuaggaaugacuccgga

SEQ ID NO: 692923 - RNA, 19 nt, Artificial Sequence
  Description of Artificial Sequence: Synthetic oligonucleotide
gugaagacgucggcaagau

SEQ ID NO: 692924 - RNA, 19 nt, Artificial Sequence
  Description of Artificial Sequence: Synthetic oligonucleotide
ggcuuggcaggugaaccuc

SEQ ID NO: 692925 - RNA, 19 nt, Artificial Sequence
  Description of Artificial Sequence: Synthetic oligonucleotide
gcucccagaggucggcaga

SEQ ID NO: 692926 - RNA, 19 nt, Artificial Sequence
  Description of Artificial Sequence: Synthetic oligonucleotide
cugguucagagugagcguu

SEQ ID NO: 692927 - RNA, 19 nt, Artificial Sequence
  Description of Artificial Sequence: Synthetic oligonucleotide
agacgucggcaagauccau

SEQ ID NO: 692928 - RNA, 19 nt, Artificial Sequence
  Description of Artificial Sequence: Synthetic oligonucleotide
gguccacguacuggaaguc

SEQ ID NO: 692929 - RNA, 19 nt, Artificial Sequence
  Description of Artificial Sequence: Synthetic oligonucleotide
cucgguccacguacuggaa

SEQ ID NO: 692930 - RNA, 19 nt, Artificial Sequence
  Description of Artificial Sequence: Synthetic oligonucleotide
ccgcuuccagaucaugcuc

SEQ ID NO: 692931 - RNA, 19 nt, Artificial Sequence
  Description of Artificial Sequence: Synthetic oligonucleotide
ccuuguagacgugucucca

SEQ ID NO: 692932 - RNA, 19 nt, Artificial Sequence
  Description of Artificial Sequence: Synthetic oligonucleotide
ggugaaccuccccaaggau

SEQ ID NO: 692933 - RNA, 19 nt, Artificial Sequence
  Description of Artificial Sequence: Synthetic oligonucleotide
guagugugagugggcccga

SEQ ID NO: 692934 - RNA, 19 nt, Artificial Sequence
  Description of Artificial Sequence: Synthetic oligonucleotide
ucccaccccaagggucggc

SEQ ID NO: 692935 - RNA, 19 nt, Artificial Sequence
  Description of Artificial Sequence: Synthetic oligonucleotide
agccggagggauggcagua

SEQ ID NO: 692936 - RNA, 19 nt, Artificial Sequence
  Description of Artificial Sequence: Synthetic oligonucleotide
ccgcccguuucacaugcac

SEQ ID NO: 692937 - RNA, 19 nt, Artificial Sequence
  Description of Artificial Sequence: Synthetic oligonucleotide
cucccuccuacccuggauu

SEQ ID NO: 692938 - RNA, 19 nt, Artificial Sequence
  Description of Artificial Sequence: Synthetic oligonucleotide
ggucguugagccgcuucca

SEQ ID NO: 692939 - RNA, 19 nt, Artificial Sequence
  Description of Artificial Sequence: Synthetic oligonucleotide
gccggagggauggcaguag

SEQ ID NO: 692940 - RNA, 19 nt, Artificial Sequence
  Description of Artificial Sequence: Synthetic oligonucleotide
caccaagaggagagaugua

SEQ ID NO: 692941 - RNA, 19 nt, Artificial Sequence
  Description of Artificial Sequence: Synthetic oligonucleotide
ggucggcagaguggcucgg

SEQ ID NO: 692942 - RNA, 19 nt, Artificial Sequence
  Description of Artificial Sequence: Synthetic oligonucleotide
gggcgccaagggaacgagg

SEQ ID NO: 692943 - RNA, 19 nt, Artificial Sequence
  Description of Artificial Sequence: Synthetic oligonucleotide
gggagggcccgcccguuuc

SEQ ID NO: 692944 - RNA, 19 nt, Artificial Sequence
  Description of Artificial Sequence: Synthetic oligonucleotide
cuggccggcucaccagcga

SEQ ID NO: 692945 - RNA, 19 nt, Artificial Sequence
  Description of Artificial Sequence: Synthetic oligonucleotide
cagcguacauguucucuuu

SEQ ID NO: 692946 - RNA, 19 nt, Artificial Sequence
  Description of Artificial Sequence: Synthetic oligonucleotide
ggaaugacuccggagucuu

SEQ ID NO: 692947 - RNA, 19 nt, Artificial Sequence
  Description of Artificial Sequence: Synthetic oligonucleotide
cugcugugacacgcgcuca

SEQ ID NO: 692948 - RNA, 19 nt, Artificial Sequence
  Description of Artificial Sequence: Synthetic oligonucleotide
ggugacggaggggccggug

SEQ ID NO: 692949 - RNA, 19 nt, Artificial Sequence
  Description of Artificial Sequence: Synthetic oligonucleotide
gcucauggcuaaggccagc

SEQ ID NO: 692950 - RNA, 19 nt, Artificial Sequence
  Description of Artificial Sequence: Synthetic oligonucleotide
gucggcagaguggcucgga

SEQ ID NO: 692951 - RNA, 19 nt, Artificial Sequence
  Description of Artificial Sequence: Synthetic oligonucleotide
ggagcuccgcuuggcagga

SEQ ID NO: 692952 - RNA, 19 nt, Artificial Sequence
  Description of Artificial Sequence: Synthetic oligonucleotide
gcgcucagagccagucuug

SEQ ID NO: 692953 - RNA, 19 nt, Artificial Sequence
  Description of Artificial Sequence: Synthetic oligonucleotide
caaccccacucaugucgaa

SEQ ID NO: 692954 - RNA, 19 nt, Artificial Sequence
  Description of Artificial Sequence: Synthetic oligonucleotide
uggcucggagccggucaaa

SEQ ID NO: 692955 - RNA, 19 nt, Artificial Sequence
  Description of Artificial Sequence: Synthetic oligonucleotide
gcccaggggucagaagaug

SEQ ID NO: 692956 - RNA, 19 nt, Artificial Sequence
  Description of Artificial Sequence: Synthetic oligonucleotide
gucggcagagggcccugua

SEQ ID NO: 692957 - RNA, 19 nt, Artificial Sequence
  Description of Artificial Sequence: Synthetic oligonucleotide
ggcggauccguucuuccuu

SEQ ID NO: 692958 - RNA, 19 nt, Artificial Sequence
  Description of Artificial Sequence: Synthetic oligonucleotide
gcacagcguacauguucuc

SEQ ID NO: 692959 - RNA, 19 nt, Artificial Sequence
  Description of Artificial Sequence: Synthetic oligonucleotide
gacugagacggagcugguu

SEQ ID NO: 692960 - RNA, 19 nt, Artificial Sequence
  Description of Artificial Sequence: Synthetic oligonucleotide
ggcccgcccguuucacaug

SEQ ID NO: 692961 - RNA, 19 nt, Artificial Sequence
  Description of Artificial Sequence: Synthetic oligonucleotide
agaguggcucggagccggu

SEQ ID NO: 692962 - RNA, 19 nt, Artificial Sequence
  Description of Artificial Sequence: Synthetic oligonucleotide
ggucaggugugggucccuc

SEQ ID NO: 692963 - RNA, 19 nt, Artificial Sequence
  Description of Artificial Sequence: Synthetic oligonucleotide
uccuggcgguguggggccu

SEQ ID NO: 692964 - RNA, 19 nt, Artificial Sequence
  Description of Artificial Sequence: Synthetic oligonucleotide
gccggcucaccagcgaguc

SEQ ID NO: 692965 - RNA, 19 nt, Artificial Sequence
  Description of Artificial Sequence: Synthetic oligonucleotide
ccuccccgucuaaugccac

SEQ ID NO: 692966 - RNA, 19 nt, Artificial Sequence
  Description of Artificial Sequence: Synthetic oligonucleotide
cccuccccgucuaaugcca

SEQ ID NO: 692967 - RNA, 19 nt, Artificial Sequence
  Description of Artificial Sequence: Synthetic oligonucleotide
ggaccaccccaagggucag

SEQ ID NO: 692968 - RNA, 19 nt, Artificial Sequence
  Description of Artificial Sequence: Synthetic oligonucleotide
gguucaccaagggcgccaa

SEQ ID NO: 692969 - RNA, 19 nt, Artificial Sequence
  Description of Artificial Sequence: Synthetic oligonucleotide
gccgguccucaucgcgaag

SEQ ID NO: 692970 - RNA, 19 nt, Artificial Sequence
  Description of Artificial Sequence: Synthetic oligonucleotide
uggcgguguggggccuggc

SEQ ID NO: 692971 - RNA, 19 nt, Artificial Sequence
  Description of Artificial Sequence: Synthetic oligonucleotide
cguugagccgcuuccagau

SEQ ID NO: 692972 - RNA, 19 nt, Artificial Sequence
  Description of Artificial Sequence: Synthetic oligonucleotide
cagcugucccuccccgucu

SEQ ID NO: 692973 - RNA, 19 nt, Artificial Sequence
  Description of Artificial Sequence: Synthetic oligonucleotide
gguaggaguuggggucgca

SEQ ID NO: 692974 - RNA, 19 nt, Artificial Sequence
  Description of Artificial Sequence: Synthetic oligonucleotide
ccgcuuggcaggaaugggu

SEQ ID NO: 692975 - RNA, 19 nt, Artificial Sequence
  Description of Artificial Sequence: Synthetic oligonucleotide
gcucggagccggucaaagu

SEQ ID NO: 692976 - RNA, 19 nt, Artificial Sequence
  Description of Artificial Sequence: Synthetic oligonucleotide
cagccggagggauggcagu

SEQ ID NO: 692977 - RNA, 19 nt, Artificial Sequence
  Description of Artificial Sequence: Synthetic oligonucleotide
cccuccuacccuggauuac

SEQ ID NO: 692978 - RNA, 19 nt, Artificial Sequence
  Description of Artificial Sequence: Synthetic oligonucleotide
cccguuucacaugcacuca

SEQ ID NO: 692979 - RNA, 19 nt, Artificial Sequence
  Description of Artificial Sequence: Synthetic oligonucleotide
ggagccggucaaagucuga

SEQ ID NO: 692980 - RNA, 19 nt, Artificial Sequence
  Description of Artificial Sequence: Synthetic oligonucleotide
ccggcucaccagcgagucc

SEQ ID NO: 692981 - RNA, 19 nt, Artificial Sequence
  Description of Artificial Sequence: Synthetic oligonucleotide
ggccggagcuccgcuuggc

SEQ ID NO: 692982 - RNA, 19 nt, Artificial Sequence
  Description of Artificial Sequence: Synthetic oligonucleotide
ggaauggguuggaagccuu

SEQ ID NO: 692983 - RNA, 19 nt, Artificial Sequence
  Description of Artificial Sequence: Synthetic oligonucleotide
ccaagggucugaggcagaa

SEQ ID NO: 692984 - RNA, 19 nt, Artificial Sequence
  Description of Artificial Sequence: Synthetic oligonucleotide
cgucggcaagauccaugag

SEQ ID NO: 692985 - RNA, 19 nt, Artificial Sequence
  Description of Artificial Sequence: Synthetic oligonucleotide
cgugggcgcgcuccucccg

SEQ ID NO: 692986 - RNA, 19 nt, Artificial Sequence
  Description of Artificial Sequence: Synthetic oligonucleotide
ccuccccaaggaucugaga

SEQ ID NO: 692987 - RNA, 19 nt, Artificial Sequence
  Description of Artificial Sequence: Synthetic oligonucleotide
cggcucaaacuaagggcca

SEQ ID NO: 692988 - RNA, 19 nt, Artificial Sequence
  Description of Artificial Sequence: Synthetic oligonucleotide
ccgcacguucacgcccugg

SEQ ID NO: 692989 - RNA, 19 nt, Artificial Sequence
  Description of Artificial Sequence: Synthetic oligonucleotide
acacgcgcucagagccagu

SEQ ID NO: 692990 - RNA, 19 nt, Artificial Sequence
  Description of Artificial Sequence: Synthetic oligonucleotide
cccacggcggauccguucu

SEQ ID NO: 692991 - RNA, 19 nt, Artificial Sequence
  Description of Artificial Sequence: Synthetic oligonucleotide
gggaacgaggaggcuccaa

SEQ ID NO: 692992 - RNA, 19 nt, Artificial Sequence
  Description of Artificial Sequence: Synthetic oligonucleotide
ggccccaccaucagaggau

SEQ ID NO: 692993 - RNA, 19 nt, Artificial Sequence
  Description of Artificial Sequence: Synthetic oligonucleotide
ccgacugcugcagugccgu

SEQ ID NO: 692994 - RNA, 19 nt, Artificial Sequence
  Description of Artificial Sequence: Synthetic oligonucleotide
gggucggcagagggcccug

SEQ ID NO: 692995 - RNA, 19 nt, Artificial Sequence
  Description of Artificial Sequence: Synthetic oligonucleotide
cgaaugcaccugggcugcg

SEQ ID NO: 692996 - RNA, 19 nt, Artificial Sequence
  Description of Artificial Sequence: Synthetic oligonucleotide
cgcucagagccagucuuga

SEQ ID NO: 692997 - RNA, 19 nt, Artificial Sequence
  Description of Artificial Sequence: Synthetic oligonucleotide
ccccaagggucagcagcug

SEQ ID NO: 692998 - RNA, 19 nt, Artificial Sequence
  Description of Artificial Sequence: Synthetic oligonucleotide
gguggccggagcuccgcuu

SEQ ID NO: 692999 - RNA, 19 nt, Artificial Sequence
  Description of Artificial Sequence: Synthetic oligonucleotide
ggcccaggggucagaagau

SEQ ID NO: 693000 - RNA, 19 nt, Artificial Sequence
  Description of Artificial Sequence: Synthetic oligonucleotide
gagcuccgcuuggcaggaa

SEQ ID NO: 693001 - RNA, 19 nt, Artificial Sequence
  Description of Artificial Sequence: Synthetic oligonucleotide
ccuggcgguguggggccug

SEQ ID NO: 693002 - RNA, 19 nt, Artificial Sequence
  Description of Artificial Sequence: Synthetic oligonucleotide
cgucaucgggaaggcagga

SEQ ID NO: 693003 - RNA, 19 nt, Artificial Sequence
  Description of Artificial Sequence: Synthetic oligonucleotide
cgcgcucagagccagucuu

SEQ ID NO: 693004 - RNA, 19 nt, Artificial Sequence
  Description of Artificial Sequence: Synthetic oligonucleotide
ggacugagacggagcuggu

SEQ ID NO: 693005 - RNA, 19 nt, Artificial Sequence
  Description of Artificial Sequence: Synthetic oligonucleotide
gaugggccccagggaucau

SEQ ID NO: 693006 - RNA, 19 nt, Artificial Sequence
  Description of Artificial Sequence: Synthetic oligonucleotide
cccgcacguucacgcccug

SEQ ID NO: 693007 - RNA, 19 nt, Artificial Sequence
  Description of Artificial Sequence: Synthetic oligonucleotide
cccgcccguuucacaugca

SEQ ID NO: 693008 - RNA, 19 nt, Artificial Sequence
  Description of Artificial Sequence: Synthetic oligonucleotide
cgucgucaucgggaaggca

SEQ ID NO: 693009 - RNA, 19 nt, Artificial Sequence
  Description of Artificial Sequence: Synthetic oligonucleotide
ggucggcagagggcccugu

SEQ ID NO: 693010 - RNA, 19 nt, Artificial Sequence
  Description of Artificial Sequence: Synthetic oligonucleotide
ggggagggcccgcccguuu

SEQ ID NO: 693011 - RNA, 19 nt, Artificial Sequence
  Description of Artificial Sequence: Synthetic oligonucleotide
ccguggucguugagccgcu

SEQ ID NO: 693012 - RNA, 19 nt, Artificial Sequence
  Description of Artificial Sequence: Synthetic oligonucleotide
ucauuaauaaucaugguug

SEQ ID NO: 693013 - RNA, 19 nt, Artificial Sequence
  Description of Artificial Sequence: Synthetic oligonucleotide
uacacuaagauuaauaaac

SEQ ID NO: 693014 - RNA, 19 nt, Artificial Sequence
  Description of Artificial Sequence: Synthetic oligonucleotide
aaauuaaccgcaugagggc

SEQ ID NO: 693015 - RNA, 19 nt, Artificial Sequence
  Description of Artificial Sequence: Synthetic oligonucleotide
uauuuuaucagagaaagug

SEQ ID NO: 693016 - RNA, 19 nt, Artificial Sequence
  Description of Artificial Sequence: Synthetic oligonucleotide
aagauuaauaaacagcacu

SEQ ID NO: 693017 - RNA, 19 nt, Artificial Sequence
  Description of Artificial Sequence: Synthetic oligonucleotide
agcacuucaaaauuaaccg

SEQ ID NO: 693018 - RNA, 19 nt, Artificial Sequence
  Description of Artificial Sequence: Synthetic oligonucleotide
aagguaacuaacaugagac

SEQ ID NO: 693019 - RNA, 19 nt, Artificial Sequence
  Description of Artificial Sequence: Synthetic oligonucleotide
acuaagauuaauaaacagc

SEQ ID NO: 693020 - RNA, 19 nt, Artificial Sequence
  Description of Artificial Sequence: Synthetic oligonucleotide
aacaauacacguucugugg

SEQ ID NO: 693021 - RNA, 19 nt, Artificial Sequence
  Description of Artificial Sequence: Synthetic oligonucleotide
acuggggugauauauaggg

SEQ ID NO: 693022 - RNA, 19 nt, Artificial Sequence
  Description of Artificial Sequence: Synthetic oligonucleotide
uucaaaauuaaccgcauga

SEQ ID NO: 693023 - RNA, 19 nt, Artificial Sequence
  Description of Artificial Sequence: Synthetic oligonucleotide
aagacuaugagcaagcaug

SEQ ID NO: 693024 - RNA, 19 nt, Artificial Sequence
  Description of Artificial Sequence: Synthetic oligonucleotide
acaaauaucaguauuagga

SEQ ID NO: 693025 - RNA, 19 nt, Artificial Sequence
  Description of Artificial Sequence: Synthetic oligonucleotide
aaaguuaccaacuguuucu

SEQ ID NO: 693026 - RNA, 19 nt, Artificial Sequence
  Description of Artificial Sequence: Synthetic oligonucleotide
uuaaguggcacuaauuaca

SEQ ID NO: 693027 - RNA, 19 nt, Artificial Sequence
  Description of Artificial Sequence: Synthetic oligonucleotide
uagauaaaugaaaaggcca

SEQ ID NO: 693028 - RNA, 19 nt, Artificial Sequence
  Description of Artificial Sequence: Synthetic oligonucleotide
aacaugagaccacagaacu

SEQ ID NO: 693029 - RNA, 19 nt, Artificial Sequence
  Description of Artificial Sequence: Synthetic oligonucleotide
ucuguuaaggaguaaagcu

SEQ ID NO: 693030 - RNA, 19 nt, Artificial Sequence
  Description of Artificial Sequence: Synthetic oligonucleotide
gugacuuagagccagaccc

SEQ ID NO: 693031 - RNA, 19 nt, Artificial Sequence
  Description of Artificial Sequence: Synthetic oligonucleotide
auuaaguggcacuaauuac

SEQ ID NO: 693032 - RNA, 19 nt, Artificial Sequence
  Description of Artificial Sequence: Synthetic oligonucleotide
aaacaauacacguucugug

SEQ ID NO: 693033 - RNA, 19 nt, Artificial Sequence
  Description of Artificial Sequence: Synthetic oligonucleotide
uuucuaaacuaucagggcu

SEQ ID NO: 693034 - RNA, 19 nt, Artificial Sequence
  Description of Artificial Sequence: Synthetic oligonucleotide
aaaugaaaaggccaguaau

SEQ ID NO: 693035 - RNA, 19 nt, Artificial Sequence
  Description of Artificial Sequence: Synthetic oligonucleotide
aaggcgaccacuccaaguc

SEQ ID NO: 693036 - RNA, 19 nt, Artificial Sequence
  Description of Artificial Sequence: Synthetic oligonucleotide
augguuggcuucuaaauac

SEQ ID NO: 693037 - RNA, 19 nt, Artificial Sequence
  Description of Artificial Sequence: Synthetic oligonucleotide
cuuaguucagucuggaaag

SEQ ID NO: 693038 - RNA, 19 nt, Artificial Sequence
  Description of Artificial Sequence: Synthetic oligonucleotide
uauuaguuggaaaauuaac

SEQ ID NO: 693039 - RNA, 19 nt, Artificial Sequence
  Description of Artificial Sequence: Synthetic oligonucleotide
uguuaaggaguaaagcucu

SEQ ID NO: 693040 - RNA, 19 nt, Artificial Sequence
  Description of Artificial Sequence: Synthetic oligonucleotide
agguguaacugccucaggc

SEQ ID NO: 693041 - RNA, 19 nt, Artificial Sequence
  Description of Artificial Sequence: Synthetic oligonucleotide
uuagagcagugucagaaag

SEQ ID NO: 693042 - RNA, 19 nt, Artificial Sequence
  Description of Artificial Sequence: Synthetic oligonucleotide
gauacaguguggauaaagg

SEQ ID NO: 693043 - RNA, 19 nt, Artificial Sequence
  Description of Artificial Sequence: Synthetic oligonucleotide
agagagagcuguuagagca

SEQ ID NO: 693044 - RNA, 19 nt, Artificial Sequence
  Description of Artificial Sequence: Synthetic oligonucleotide
uggaaaauuaacugguaca

SEQ ID NO: 693045 - RNA, 19 nt, Artificial Sequence
  Description of Artificial Sequence: Synthetic oligonucleotide
aaaaccucccuugccaccc

SEQ ID NO: 693046 - RNA, 19 nt, Artificial Sequence
  Description of Artificial Sequence: Synthetic oligonucleotide
ggacauguuaguuauaaag

SEQ ID NO: 693047 - RNA, 19 nt, Artificial Sequence
  Description of Artificial Sequence: Synthetic oligonucleotide
ugauuuguaaucuuaggua

SEQ ID NO: 693048 - RNA, 19 nt, Artificial Sequence
  Description of Artificial Sequence: Synthetic oligonucleotide
gacaaauaucaguauuagg

SEQ ID NO: 693049 - RNA, 19 nt, Artificial Sequence
  Description of Artificial Sequence: Synthetic oligonucleotide
acuacaucuagucuggggu

SEQ ID NO: 693050 - RNA, 19 nt, Artificial Sequence
  Description of Artificial Sequence: Synthetic oligonucleotide
aucauuaauaaucaugguu

SEQ ID NO: 693051 - RNA, 19 nt, Artificial Sequence
  Description of Artificial Sequence: Synthetic oligonucleotide
ucuauuaguuggaaaauua

SEQ ID NO: 693052 - RNA, 19 nt, Artificial Sequence
  Description of Artificial Sequence: Synthetic oligonucleotide
gauaaaggagcacugugac

SEQ ID NO: 693053 - RNA, 19 nt, Artificial Sequence
  Description of Artificial Sequence: Synthetic oligonucleotide
aauugguccuugcugaaga

SEQ ID NO: 693054 - RNA, 19 nt, Artificial Sequence
  Description of Artificial Sequence: Synthetic oligonucleotide
acuaugagcaagcaugucu

SEQ ID NO: 693055 - RNA, 19 nt, Artificial Sequence
  Description of Artificial Sequence: Synthetic oligonucleotide
aaagcgccaauccuguuug

SEQ ID NO: 693056 - RNA, 19 nt, Artificial Sequence
  Description of Artificial Sequence: Synthetic oligonucleotide
acaauacacguucuguggg

SEQ ID NO: 693057 - RNA, 19 nt, Artificial Sequence
  Description of Artificial Sequence: Synthetic oligonucleotide
augucuuaccacaagcucc

SEQ ID NO: 693058 - RNA, 19 nt, Artificial Sequence
  Description of Artificial Sequence: Synthetic oligonucleotide
aguaaucauacacuaagau

SEQ ID NO: 693059 - RNA, 19 nt, Artificial Sequence
  Description of Artificial Sequence: Synthetic oligonucleotide
caucaguauaacaucagug

SEQ ID NO: 693060 - RNA, 19 nt, Artificial Sequence
  Description of Artificial Sequence: Synthetic oligonucleotide
uaaacuaucagggcuguca

SEQ ID NO: 693061 - RNA, 19 nt, Artificial Sequence
  Description of Artificial Sequence: Synthetic oligonucleotide
uacagccuaauucacaaaa

SEQ ID NO: 693062 - RNA, 19 nt, Artificial Sequence
  Description of Artificial Sequence: Synthetic oligonucleotide
gugggaaugacaaauauca

SEQ ID NO: 693063 - RNA, 19 nt, Artificial Sequence
  Description of Artificial Sequence: Synthetic oligonucleotide
gaaugccucagaugcaagg

SEQ ID NO: 693064 - RNA, 19 nt, Artificial Sequence
  Description of Artificial Sequence: Synthetic oligonucleotide
caugagaccacagaacugc

SEQ ID NO: 693065 - RNA, 19 nt, Artificial Sequence
  Description of Artificial Sequence: Synthetic oligonucleotide
uggggugauauauagggcu

SEQ ID NO: 693066 - RNA, 19 nt, Artificial Sequence
  Description of Artificial Sequence: Synthetic oligonucleotide
uguggauaaaggagcacug

SEQ ID NO: 693067 - RNA, 19 nt, Artificial Sequence
  Description of Artificial Sequence: Synthetic oligonucleotide
uuggauacaguguggauaa

SEQ ID NO: 693068 - RNA, 19 nt, Artificial Sequence
  Description of Artificial Sequence: Synthetic oligonucleotide
agagaaccgacggaggacc

SEQ ID NO: 693069 - RNA, 19 nt, Artificial Sequence
  Description of Artificial Sequence: Synthetic oligonucleotide
uguuagagcagugucagaa

SEQ ID NO: 693070 - RNA, 19 nt, Artificial Sequence
  Description of Artificial Sequence: Synthetic oligonucleotide
cuguuaaggaguaaagcuc

SEQ ID NO: 693071 - RNA, 19 nt, Artificial Sequence
  Description of Artificial Sequence: Synthetic oligonucleotide
uacuacaucuagucugggg

SEQ ID NO: 693072 - RNA, 19 nt, Artificial Sequence
  Description of Artificial Sequence: Synthetic oligonucleotide
aauucacaaaaguuaccaa

SEQ ID NO: 693073 - RNA, 19 nt, Artificial Sequence
  Description of Artificial Sequence: Synthetic oligonucleotide
cuaauucacaaaaguuacc

SEQ ID NO: 693074 - RNA, 19 nt, Artificial Sequence
  Description of Artificial Sequence: Synthetic oligonucleotide
acaaaguacuuggaaugcc

SEQ ID NO: 693075 - RNA, 19 nt, Artificial Sequence
  Description of Artificial Sequence: Synthetic oligonucleotide
acugccucaggcgugaaac

SEQ ID NO: 693076 - RNA, 19 nt, Artificial Sequence
  Description of Artificial Sequence: Synthetic oligonucleotide
cacccuuaagaacuggugg

SEQ ID NO: 693077 - RNA, 19 nt, Artificial Sequence
  Description of Artificial Sequence: Synthetic oligonucleotide
ugagcaagcaugucuuacc

SEQ ID NO: 693078 - RNA, 19 nt, Artificial Sequence
  Description of Artificial Sequence: Synthetic oligonucleotide
aaguuuagucagcuggaga

SEQ ID NO: 693079 - RNA, 19 nt, Artificial Sequence
  Description of Artificial Sequence: Synthetic oligonucleotide
aacucuaccuguuucccau

SEQ ID NO: 693080 - RNA, 19 nt, Artificial Sequence
  Description of Artificial Sequence: Synthetic oligonucleotide
aacauacauuaaguggcac

SEQ ID NO: 693081 - RNA, 19 nt, Artificial Sequence
  Description of Artificial Sequence: Synthetic oligonucleotide
ucaaagguguaacugccuc

SEQ ID NO: 693082 - RNA, 19 nt, Artificial Sequence
  Description of Artificial Sequence: Synthetic oligonucleotide
acaguaacuauaagguaac

SEQ ID NO: 693083 - RNA, 19 nt, Artificial Sequence
  Description of Artificial Sequence: Synthetic oligonucleotide
acuaucagggcugucaaug

SEQ ID NO: 693084 - RNA, 19 nt, Artificial Sequence
  Description of Artificial Sequence: Synthetic oligonucleotide
acauacauuaaguggcacu

SEQ ID NO: 693085 - RNA, 19 nt, Artificial Sequence
  Description of Artificial Sequence: Synthetic oligonucleotide
aaacacugugggcacauaa

SEQ ID NO: 693086 - RNA, 19 nt, Artificial Sequence
  Description of Artificial Sequence: Synthetic oligonucleotide
uaucaguauuaggaaaucc

SEQ ID NO: 693087 - RNA, 19 nt, Artificial Sequence
  Description of Artificial Sequence: Synthetic oligonucleotide
uuuuggcuaacucccgucu

SEQ ID NO: 693088 - RNA, 19 nt, Artificial Sequence
  Description of Artificial Sequence: Synthetic oligonucleotide
gcaacuuggauacagugug

SEQ ID NO: 693089 - RNA, 19 nt, Artificial Sequence
  Description of Artificial Sequence: Synthetic oligonucleotide
agguuuuaccggcuccugc

SEQ ID NO: 693090 - RNA, 19 nt, Artificial Sequence
  Description of Artificial Sequence: Synthetic oligonucleotide
ggaaguuuagaaaacugcc

SEQ ID NO: 693091 - RNA, 19 nt, Artificial Sequence
  Description of Artificial Sequence: Synthetic oligonucleotide
ccaguaaucauacacuaag

SEQ ID NO: 693092 - RNA, 19 nt, Artificial Sequence
  Description of Artificial Sequence: Synthetic oligonucleotide
agcaagaugacuucugauu

SEQ ID NO: 693093 - RNA, 19 nt, Artificial Sequence
  Description of Artificial Sequence: Synthetic oligonucleotide
aagacggcggacucagcag

SEQ ID NO: 693094 - RNA, 19 nt, Artificial Sequence
  Description of Artificial Sequence: Synthetic oligonucleotide
guacuggggugauauauag

SEQ ID NO: 693095 - RNA, 19 nt, Artificial Sequence
  Description of Artificial Sequence: Synthetic oligonucleotide
auauggccauauuuuauca

SEQ ID NO: 693096 - RNA, 19 nt, Artificial Sequence
  Description of Artificial Sequence: Synthetic oligonucleotide
aaccgcaugagggcugugc

SEQ ID NO: 693097 - RNA, 19 nt, Artificial Sequence
  Description of Artificial Sequence: Synthetic oligonucleotide
uguuaguuauaaaguaguu

SEQ ID NO: 693098 - RNA, 19 nt, Artificial Sequence
  Description of Artificial Sequence: Synthetic oligonucleotide
uacuggggugauauauagg

SEQ ID NO: 693099 - RNA, 19 nt, Artificial Sequence
  Description of Artificial Sequence: Synthetic oligonucleotide
agcgccuggugucaggugg

SEQ ID NO: 693100 - RNA, 19 nt, Artificial Sequence
  Description of Artificial Sequence: Synthetic oligonucleotide
aaaucugccacagcugcgu

SEQ ID NO: 693101 - RNA, 19 nt, Artificial Sequence
  Description of Artificial Sequence: Synthetic oligonucleotide
ucugggguagauauauuua

SEQ ID NO: 693102 - RNA, 19 nt, Artificial Sequence
  Description of Artificial Sequence: Synthetic oligonucleotide
aucuuagguaaauuauaga

SEQ ID NO: 693103 - RNA, 19 nt, Artificial Sequence
  Description of Artificial Sequence: Synthetic oligonucleotide
acugcaaaucugccacagc

SEQ ID NO: 693104 - RNA, 19 nt, Artificial Sequence
  Description of Artificial Sequence: Synthetic oligonucleotide
auaucaguauuaggaaauc

SEQ ID NO: 693105 - RNA, 19 nt, Artificial Sequence
  Description of Artificial Sequence: Synthetic oligonucleotide
gguguaacugccucaggcg

SEQ ID NO: 693106 - RNA, 19 nt, Artificial Sequence
  Description of Artificial Sequence: Synthetic oligonucleotide
uuaguucagucuggaaagg

SEQ ID NO: 693107 - RNA, 19 nt, Artificial Sequence
  Description of Artificial Sequence: Synthetic oligonucleotide
aggaguaaagcucugccuu

SEQ ID NO: 693108 - RNA, 19 nt, Artificial Sequence
  Description of Artificial Sequence: Synthetic oligonucleotide
ucugccuuagugacucacc

SEQ ID NO: 693109 - RNA, 19 nt, Artificial Sequence
  Description of Artificial Sequence: Synthetic oligonucleotide
aguucccugcagcugacag

SEQ ID NO: 693110 - RNA, 19 nt, Artificial Sequence
  Description of Artificial Sequence: Synthetic oligonucleotide
uagagcagugucagaaaga

SEQ ID NO: 693111 - RNA, 19 nt, Artificial Sequence
  Description of Artificial Sequence: Synthetic oligonucleotide
uagucagcuggagagaaga

SEQ ID NO: 693112 - RNA, 19 nt, Artificial Sequence
  Description of Artificial Sequence: Synthetic oligonucleotide
uuucaaacacugugggcac

SEQ ID NO: 693113 - RNA, 19 nt, Artificial Sequence
  Description of Artificial Sequence: Synthetic oligonucleotide
caugucuuaccacaagcuc

SEQ ID NO: 693114 - RNA, 19 nt, Artificial Sequence
  Description of Artificial Sequence: Synthetic oligonucleotide
augagcaagcaugucuuac

SEQ ID NO: 693115 - RNA, 19 nt, Artificial Sequence
  Description of Artificial Sequence: Synthetic oligonucleotide
ugguccuugcugaagacua

SEQ ID NO: 693116 - RNA, 19 nt, Artificial Sequence
  Description of Artificial Sequence: Synthetic oligonucleotide
gugagaaaggcuaugccac

SEQ ID NO: 693117 - RNA, 19 nt, Artificial Sequence
  Description of Artificial Sequence: Synthetic oligonucleotide
aaaaugaggcacccagauu

SEQ ID NO: 693118 - RNA, 19 nt, Artificial Sequence
  Description of Artificial Sequence: Synthetic oligonucleotide
ucccuuacaaaggugcuga

SEQ ID NO: 693119 - RNA, 19 nt, Artificial Sequence
  Description of Artificial Sequence: Synthetic oligonucleotide
auaacaucagugucuggau

SEQ ID NO: 693120 - RNA, 19 nt, Artificial Sequence
  Description of Artificial Sequence: Synthetic oligonucleotide
ucucguggccauuucaaaa

SEQ ID NO: 693121 - RNA, 19 nt, Artificial Sequence
  Description of Artificial Sequence: Synthetic oligonucleotide
aggcgugaaaccaaauuuc

SEQ ID NO: 693122 - RNA, 19 nt, Artificial Sequence
  Description of Artificial Sequence: Synthetic oligonucleotide
uacacguucugugggaaug

SEQ ID NO: 693123 - RNA, 19 nt, Artificial Sequence
  Description of Artificial Sequence: Synthetic oligonucleotide
aaggcuaugccaccucaaa

SEQ ID NO: 693124 - RNA, 19 nt, Artificial Sequence
  Description of Artificial Sequence: Synthetic oligonucleotide
aacgagggcgggcgguggc

SEQ ID NO: 693125 - RNA, 19 nt, Artificial Sequence
  Description of Artificial Sequence: Synthetic oligonucleotide
aaaguaguuacagccuaau

SEQ ID NO: 693126 - RNA, 19 nt, Artificial Sequence
  Description of Artificial Sequence: Synthetic oligonucleotide
guauuaggaaauccaauua

SEQ ID NO: 693127 - RNA, 19 nt, Artificial Sequence
  Description of Artificial Sequence: Synthetic oligonucleotide
gguaacuaacaugagacca

SEQ ID NO: 693128 - RNA, 19 nt, Artificial Sequence
  Description of Artificial Sequence: Synthetic oligonucleotide
uuaagaacugguggcuccc

SEQ ID NO: 693129 - RNA, 19 nt, Artificial Sequence
  Description of Artificial Sequence: Synthetic oligonucleotide
uuccgaagauccuucuugu

SEQ ID NO: 693130 - RNA, 19 nt, Artificial Sequence
  Description of Artificial Sequence: Synthetic oligonucleotide
acagguuggacaucauuaa

SEQ ID NO: 693131 - RNA, 19 nt, Artificial Sequence
  Description of Artificial Sequence: Synthetic oligonucleotide
gaacacuccauguacccaa

SEQ ID NO: 693132 - RNA, 19 nt, Artificial Sequence
  Description of Artificial Sequence: Synthetic oligonucleotide
ugacuuagcgccugguguc

SEQ ID NO: 693133 - RNA, 19 nt, Artificial Sequence
  Description of Artificial Sequence: Synthetic oligonucleotide
caaaucugccacagcugcg

SEQ ID NO: 693134 - RNA, 19 nt, Artificial Sequence
  Description of Artificial Sequence: Synthetic oligonucleotide
uuuaccggcuccugcuuca

SEQ ID NO: 693135 - RNA, 19 nt, Artificial Sequence
  Description of Artificial Sequence: Synthetic oligonucleotide
ucgauaucugccacauagu

SEQ ID NO: 693136 - RNA, 19 nt, Artificial Sequence
  Description of Artificial Sequence: Synthetic oligonucleotide
aaguaguuacagccuaauu

SEQ ID NO: 693137 - RNA, 19 nt, Artificial Sequence
  Description of Artificial Sequence: Synthetic oligonucleotide
uccgcaagcucggagacga

SEQ ID NO: 693138 - RNA, 19 nt, Artificial Sequence
  Description of Artificial Sequence: Synthetic oligonucleotide
caacuuggauacagugugg

SEQ ID NO: 693139 - RNA, 19 nt, Artificial Sequence
  Description of Artificial Sequence: Synthetic oligonucleotide
gagauauggccauauuuua

SEQ ID NO: 693140 - RNA, 19 nt, Artificial Sequence
  Description of Artificial Sequence: Synthetic oligonucleotide
uucuauuaguuggaaaauu

SEQ ID NO: 693141 - RNA, 19 nt, Artificial Sequence
  Description of Artificial Sequence: Synthetic oligonucleotide
ccaucccuuacaaaggugc

SEQ ID NO: 693142 - RNA, 19 nt, Artificial Sequence
  Description of Artificial Sequence: Synthetic oligonucleotide
uucuaaauacugguagcaa

SEQ ID NO: 693143 - RNA, 19 nt, Artificial Sequence
  Description of Artificial Sequence: Synthetic oligonucleotide
gaaccgacggaggaccgcg

SEQ ID NO: 693144 - RNA, 19 nt, Artificial Sequence
  Description of Artificial Sequence: Synthetic oligonucleotide
agcgccaauccuguuugcc

SEQ ID NO: 693145 - RNA, 19 nt, Artificial Sequence
  Description of Artificial Sequence: Synthetic oligonucleotide
aagcgccaauccuguuugc

SEQ ID NO: 693146 - RNA, 19 nt, Artificial Sequence
  Description of Artificial Sequence: Synthetic oligonucleotide
gagcuguuagagcaguguc

SEQ ID NO: 693147 - RNA, 19 nt, Artificial Sequence
  Description of Artificial Sequence: Synthetic oligonucleotide
ugccuuagugacucaccag

SEQ ID NO: 693148 - RNA, 19 nt, Artificial Sequence
  Description of Artificial Sequence: Synthetic oligonucleotide
aaacagcacuucaaaauua

SEQ ID NO: 693149 - RNA, 19 nt, Artificial Sequence
  Description of Artificial Sequence: Synthetic oligonucleotide
ugacucaccagaguucccu

SEQ ID NO: 693150 - RNA, 19 nt, Artificial Sequence
  Description of Artificial Sequence: Synthetic oligonucleotide
ucggagacgaggaccggca

SEQ ID NO: 693151 - RNA, 19 nt, Artificial Sequence
  Description of Artificial Sequence: Synthetic oligonucleotide
agggcggggagcgacgugc

SEQ ID NO: 693152 - RNA, 19 nt, Artificial Sequence
  Description of Artificial Sequence: Synthetic oligonucleotide
acagccuaauucacaaaag

SEQ ID NO: 693153 - RNA, 19 nt, Artificial Sequence
  Description of Artificial Sequence: Synthetic oligonucleotide
aacuaacaugagaccacag

SEQ ID NO: 693154 - RNA, 19 nt, Artificial Sequence
  Description of Artificial Sequence: Synthetic oligonucleotide
ucuaccuguuucccaucca

SEQ ID NO: 693155 - RNA, 19 nt, Artificial Sequence
  Description of Artificial Sequence: Synthetic oligonucleotide
ugggguagauauauuuauu

SEQ ID NO: 693156 - RNA, 19 nt, Artificial Sequence
  Description of Artificial Sequence: Synthetic oligonucleotide
ggauacaguguggauaaag

SEQ ID NO: 693157 - RNA, 19 nt, Artificial Sequence
  Description of Artificial Sequence: Synthetic oligonucleotide
aaggagcacugugacuuag

SEQ ID NO: 693158 - RNA, 19 nt, Artificial Sequence
  Description of Artificial Sequence: Synthetic oligonucleotide
ugcucaucauuccgaagau

SEQ ID NO: 693159 - RNA, 19 nt, Artificial Sequence
  Description of Artificial Sequence: Synthetic oligonucleotide
auaggggagauauggccau

SEQ ID NO: 693160 - RNA, 19 nt, Artificial Sequence
  Description of Artificial Sequence: Synthetic oligonucleotide
acuuagagccagacccugc

SEQ ID NO: 693161 - RNA, 19 nt, Artificial Sequence
  Description of Artificial Sequence: Synthetic oligonucleotide
caguaaucauacacuaaga

SEQ ID NO: 693162 - RNA, 19 nt, Artificial Sequence
  Description of Artificial Sequence: Synthetic oligonucleotide
auagggcugaauaggggag

SEQ ID NO: 693163 - RNA, 19 nt, Artificial Sequence
  Description of Artificial Sequence: Synthetic oligonucleotide
caggugagaaaggcuaugc

SEQ ID NO: 693164 - RNA, 19 nt, Artificial Sequence
  Description of Artificial Sequence: Synthetic oligonucleotide
ugagaccacagaacugcaa

SEQ ID NO: 693165 - RNA, 19 nt, Artificial Sequence
  Description of Artificial Sequence: Synthetic oligonucleotide
cuaugccaccucaaaggug

SEQ ID NO: 693166 - RNA, 19 nt, Artificial Sequence
  Description of Artificial Sequence: Synthetic oligonucleotide
agagcuguuagagcagugu

SEQ ID NO: 693167 - RNA, 19 nt, Artificial Sequence
  Description of Artificial Sequence: Synthetic oligonucleotide
gcuguuagagcagugucag

SEQ ID NO: 693168 - RNA, 19 nt, Artificial Sequence
  Description of Artificial Sequence: Synthetic oligonucleotide
auaagguaacuaacaugag

SEQ ID NO: 693169 - RNA, 19 nt, Artificial Sequence
  Description of Artificial Sequence: Synthetic oligonucleotide
caguauaacaucagugucu

SEQ ID NO: 693170 - RNA, 19 nt, Artificial Sequence
  Description of Artificial Sequence: Synthetic oligonucleotide
cuuggauacaguguggaua

SEQ ID NO: 693171 - RNA, 19 nt, Artificial Sequence
  Description of Artificial Sequence: Synthetic oligonucleotide
gagcgaacgagggcgggcg

SEQ ID NO: 693172 - RNA, 19 nt, Artificial Sequence
  Description of Artificial Sequence: Synthetic oligonucleotide
cugguagcaagaugacuuc

SEQ ID NO: 693173 - RNA, 19 nt, Artificial Sequence
  Description of Artificial Sequence: Synthetic oligonucleotide
cccaaaagcgccaauccug

SEQ ID NO: 693174 - RNA, 19 nt, Artificial Sequence
  Description of Artificial Sequence: Synthetic oligonucleotide
uucuuugacuuagcgccug

SEQ ID NO: 693175 - RNA, 19 nt, Artificial Sequence
  Description of Artificial Sequence: Synthetic oligonucleotide
agaaccgacggaggaccgc

SEQ ID NO: 693176 - RNA, 19 nt, Artificial Sequence
  Description of Artificial Sequence: Synthetic oligonucleotide
ccuggugucagguggagug

SEQ ID NO: 693177 - RNA, 19 nt, Artificial Sequence
  Description of Artificial Sequence: Synthetic oligonucleotide
agccuaauucacaaaaguu

SEQ ID NO: 693178 - RNA, 19 nt, Artificial Sequence
  Description of Artificial Sequence: Synthetic oligonucleotide
ugacuucuggaguccauuu

SEQ ID NO: 693179 - RNA, 19 nt, Artificial Sequence
  Description of Artificial Sequence: Synthetic oligonucleotide
gacucaccagaguucccug

SEQ ID NO: 693180 - RNA, 19 nt, Artificial Sequence
  Description of Artificial Sequence: Synthetic oligonucleotide
agacuaugagcaagcaugu

SEQ ID NO: 693181 - RNA, 19 nt, Artificial Sequence
  Description of Artificial Sequence: Synthetic oligonucleotide
ggaggcaacuuggauacag

SEQ ID NO: 693182 - RNA, 19 nt, Artificial Sequence
  Description of Artificial Sequence: Synthetic oligonucleotide
caauacacguucuguggga

SEQ ID NO: 693183 - RNA, 19 nt, Artificial Sequence
  Description of Artificial Sequence: Synthetic oligonucleotide
aaaggagcacugugacuua

SEQ ID NO: 693184 - RNA, 19 nt, Artificial Sequence
  Description of Artificial Sequence: Synthetic oligonucleotide
caaaguacuuggaaugccu

SEQ ID NO: 693185 - RNA, 19 nt, Artificial Sequence
  Description of Artificial Sequence: Synthetic oligonucleotide
aggccaguaaucauacacu

SEQ ID NO: 693186 - RNA, 19 nt, Artificial Sequence
  Description of Artificial Sequence: Synthetic oligonucleotide
acgccuguccgcgaguccg

SEQ ID NO: 693187 - RNA, 19 nt, Artificial Sequence
  Description of Artificial Sequence: Synthetic oligonucleotide
uuacagccuaauucacaaa

SEQ ID NO: 693188 - RNA, 19 nt, Artificial Sequence
  Description of Artificial Sequence: Synthetic oligonucleotide
cuguccgcgaguccgcaag

SEQ ID NO: 693189 - RNA, 19 nt, Artificial Sequence
  Description of Artificial Sequence: Synthetic oligonucleotide
gaggacgccuguccgcgag

SEQ ID NO: 693190 - RNA, 19 nt, Artificial Sequence
  Description of Artificial Sequence: Synthetic oligonucleotide
ugcgggcucgagcuggcgc

SEQ ID NO: 693191 - RNA, 19 nt, Artificial Sequence
  Description of Artificial Sequence: Synthetic oligonucleotide
uaacucccgucuugugugc

SEQ ID NO: 693192 - RNA, 19 nt, Artificial Sequence
  Description of Artificial Sequence: Synthetic oligonucleotide
cucuucgcgccgaggacgc

SEQ ID NO: 693193 - RNA, 19 nt, Artificial Sequence
  Description of Artificial Sequence: Synthetic oligonucleotide
ggauaaaggagcacuguga

SEQ ID NO: 693194 - RNA, 19 nt, Artificial Sequence
  Description of Artificial Sequence: Synthetic oligonucleotide
uuagcgccuggugucaggu

SEQ ID NO: 693195 - RNA, 19 nt, Artificial Sequence
  Description of Artificial Sequence: Synthetic oligonucleotide
guuagagcagugucagaaa

SEQ ID NO: 693196 - RNA, 19 nt, Artificial Sequence
  Description of Artificial Sequence: Synthetic oligonucleotide
ugcuugacuucuggagucc

SEQ ID NO: 693197 - RNA, 19 nt, Artificial Sequence
  Description of Artificial Sequence: Synthetic oligonucleotide
agcagagaaccgacggagg

SEQ ID NO: 693198 - RNA, 19 nt, Artificial Sequence
  Description of Artificial Sequence: Synthetic oligonucleotide
accgacggaggaccgcggg

SEQ ID NO: 693199 - RNA, 19 nt, Artificial Sequence
  Description of Artificial Sequence: Synthetic oligonucleotide
acucccgucuugugugcuc

SEQ ID NO: 693200 - RNA, 19 nt, Artificial Sequence
  Description of Artificial Sequence: Synthetic oligonucleotide
acaugagaccacagaacug

SEQ ID NO: 693201 - RNA, 19 nt, Artificial Sequence
  Description of Artificial Sequence: Synthetic oligonucleotide
caaguccggccucuucgcg

SEQ ID NO: 693202 - RNA, 19 nt, Artificial Sequence
  Description of Artificial Sequence: Synthetic oligonucleotide
aggacauguuaguuauaaa

SEQ ID NO: 693203 - RNA, 19 nt, Artificial Sequence
  Description of Artificial Sequence: Synthetic oligonucleotide
aucccuuacaaaggugcug

SEQ ID NO: 693204 - RNA, 19 nt, Artificial Sequence
  Description of Artificial Sequence: Synthetic oligonucleotide
uugccacccuuaagaacug

SEQ ID NO: 693205 - RNA, 19 nt, Artificial Sequence
  Description of Artificial Sequence: Synthetic oligonucleotide
agagagcuguuagagcagu

SEQ ID NO: 693206 - RNA, 19 nt, Artificial Sequence
  Description of Artificial Sequence: Synthetic oligonucleotide
acuucaaaauuaaccgcau

SEQ ID NO: 693207 - RNA, 19 nt, Artificial Sequence
  Description of Artificial Sequence: Synthetic oligonucleotide
cuucagguuuuaccggcuc

SEQ ID NO: 693208 - RNA, 19 nt, Artificial Sequence
  Description of Artificial Sequence: Synthetic oligonucleotide
cugccuuagugacucacca

SEQ ID NO: 693209 - RNA, 19 nt, Artificial Sequence
  Description of Artificial Sequence: Synthetic oligonucleotide
auacuacaucuagucuggg

SEQ ID NO: 693210 - RNA, 19 nt, Artificial Sequence
  Description of Artificial Sequence: Synthetic oligonucleotide
gagaaccgacggaggaccg

SEQ ID NO: 693211 - RNA, 19 nt, Artificial Sequence
  Description of Artificial Sequence: Synthetic oligonucleotide
gacggaggaccgcgggcgg

SEQ ID NO: 693212 - RNA, 19 nt, Artificial Sequence
  Description of Artificial Sequence: Synthetic oligonucleotide
aaaccucccuugccacccu

SEQ ID NO: 693213 - RNA, 19 nt, Artificial Sequence
  Description of Artificial Sequence: Synthetic oligonucleotide
guguggauaaaggagcacu

SEQ ID NO: 693214 - RNA, 19 nt, Artificial Sequence
  Description of Artificial Sequence: Synthetic oligonucleotide
aaugaggcacccagauuuu

SEQ ID NO: 693215 - RNA, 19 nt, Artificial Sequence
  Description of Artificial Sequence: Synthetic oligonucleotide
uccgcgaguccgcaagcuc

SEQ ID NO: 693216 - RNA, 19 nt, Artificial Sequence
  Description of Artificial Sequence: Synthetic oligonucleotide
auacacguucugugggaau

SEQ ID NO: 693217 - RNA, 19 nt, Artificial Sequence
  Description of Artificial Sequence: Synthetic oligonucleotide
cagugucagaaagacccug

SEQ ID NO: 693218 - RNA, 19 nt, Artificial Sequence
  Description of Artificial Sequence: Synthetic oligonucleotide
agugcagagagagcuguua

SEQ ID NO: 693219 - RNA, 19 nt, Artificial Sequence
  Description of Artificial Sequence: Synthetic oligonucleotide
cugggguagauauauuuau

SEQ ID NO: 693220 - RNA, 19 nt, Artificial Sequence
  Description of Artificial Sequence: Synthetic oligonucleotide
uucgcgccgaggacgccug

SEQ ID NO: 693221 - RNA, 19 nt, Artificial Sequence
  Description of Artificial Sequence: Synthetic oligonucleotide
cucggagacgaggaccggc

SEQ ID NO: 693222 - RNA, 19 nt, Artificial Sequence
  Description of Artificial Sequence: Synthetic oligonucleotide
guguaacugccucaggcgu

SEQ ID NO: 693223 - RNA, 19 nt, Artificial Sequence
  Description of Artificial Sequence: Synthetic oligonucleotide
cucaaggcgaccacuccaa

SEQ ID NO: 693224 - RNA, 19 nt, Artificial Sequence
  Description of Artificial Sequence: Synthetic oligonucleotide
cuacaucuagucuggggua

SEQ ID NO: 693225 - RNA, 19 nt, Artificial Sequence
  Description of Artificial Sequence: Synthetic oligonucleotide
gucugggguagauauauuu

SEQ ID NO: 693226 - RNA, 19 nt, Artificial Sequence
  Description of Artificial Sequence: Synthetic oligonucleotide
ggagacgaggaccggcagc

SEQ ID NO: 693227 - RNA, 19 nt, Artificial Sequence
  Description of Artificial Sequence: Synthetic oligonucleotide
uccgaagauccuucuuguu

SEQ ID NO: 693228 - RNA, 19 nt, Artificial Sequence
  Description of Artificial Sequence: Synthetic oligonucleotide
ccgcgaguccgcaagcucg

SEQ ID NO: 693229 - RNA, 19 nt, Artificial Sequence
  Description of Artificial Sequence: Synthetic oligonucleotide
agcgaacgagggcgggcgg

SEQ ID NO: 693230 - RNA, 19 nt, Artificial Sequence
  Description of Artificial Sequence: Synthetic oligonucleotide
guaacugccucaggcguga

SEQ ID NO: 693231 - RNA, 19 nt, Artificial Sequence
  Description of Artificial Sequence: Synthetic oligonucleotide
gcgcgagcgaacgagggcg

SEQ ID NO: 693232 - RNA, 19 nt, Artificial Sequence
  Description of Artificial Sequence: Synthetic oligonucleotide
caacucuaccuguuuccca

SEQ ID NO: 693233 - RNA, 19 nt, Artificial Sequence
  Description of Artificial Sequence: Synthetic oligonucleotide
gagagcuguuagagcagug

SEQ ID NO: 693234 - RNA, 19 nt, Artificial Sequence
  Description of Artificial Sequence: Synthetic oligonucleotide
caguauuaggaaauccaau

SEQ ID NO: 693235 - RNA, 19 nt, Artificial Sequence
  Description of Artificial Sequence: Synthetic oligonucleotide
ggccauauuuuaucagaga

SEQ ID NO: 693236 - RNA, 19 nt, Artificial Sequence
  Description of Artificial Sequence: Synthetic oligonucleotide
gggguagauauauuuauuu

SEQ ID NO: 693237 - RNA, 19 nt, Artificial Sequence
  Description of Artificial Sequence: Synthetic oligonucleotide
caggcgugaaaccaaauuu

SEQ ID NO: 693238 - RNA, 19 nt, Artificial Sequence
  Description of Artificial Sequence: Synthetic oligonucleotide
gaacgagggcgggcggugg

SEQ ID NO: 693239 - RNA, 19 nt, Artificial Sequence
  Description of Artificial Sequence: Synthetic oligonucleotide
gcaagaugacuucugauuu

SEQ ID NO: 693240 - RNA, 19 nt, Artificial Sequence
  Description of Artificial Sequence: Synthetic oligonucleotide
cacuucgauaucugccaca

SEQ ID NO: 693241 - RNA, 19 nt, Artificial Sequence
  Description of Artificial Sequence: Synthetic oligonucleotide
aacucccgucuugugugcu

SEQ ID NO: 693242 - RNA, 19 nt, Artificial Sequence
  Description of Artificial Sequence: Synthetic oligonucleotide
acagcugcguggacuucgg

SEQ ID NO: 693243 - RNA, 19 nt, Artificial Sequence
  Description of Artificial Sequence: Synthetic oligonucleotide
cuuagugacucaccagagu

SEQ ID NO: 693244 - RNA, 19 nt, Artificial Sequence
  Description of Artificial Sequence: Synthetic oligonucleotide
gacuaugagcaagcauguc

SEQ ID NO: 693245 - RNA, 19 nt, Artificial Sequence
  Description of Artificial Sequence: Synthetic oligonucleotide
ggccaguaaucauacacua

SEQ ID NO: 693246 - RNA, 19 nt, Artificial Sequence
  Description of Artificial Sequence: Synthetic oligonucleotide
gcuugcagagcagcucucg

SEQ ID NO: 693247 - RNA, 19 nt, Artificial Sequence
  Description of Artificial Sequence: Synthetic oligonucleotide
ccaacucuaccuguuuccc

SEQ ID NO: 693248 - RNA, 19 nt, Artificial Sequence
  Description of Artificial Sequence: Synthetic oligonucleotide
ggacuucggccuuucuggc

SEQ ID NO: 693249 - RNA, 19 nt, Artificial Sequence
  Description of Artificial Sequence: Synthetic oligonucleotide
gacuuagcgccugguguca

SEQ ID NO: 693250 - RNA, 19 nt, Artificial Sequence
  Description of Artificial Sequence: Synthetic oligonucleotide
gacgccuguccgcgagucc

SEQ ID NO: 693251 - RNA, 19 nt, Artificial Sequence
  Description of Artificial Sequence: Synthetic oligonucleotide
aaccgacggaggaccgcgg

SEQ ID NO: 693252 - RNA, 19 nt, Artificial Sequence
  Description of Artificial Sequence: Synthetic oligonucleotide
cugggauguuuucuaaacu

SEQ ID NO: 693253 - RNA, 19 nt, Artificial Sequence
  Description of Artificial Sequence: Synthetic oligonucleotide
ggcugaauaggggagauau

SEQ ID NO: 693254 - RNA, 19 nt, Artificial Sequence
  Description of Artificial Sequence: Synthetic oligonucleotide
aggggagauauggccauau

SEQ ID NO: 693255 - RNA, 19 nt, Artificial Sequence
  Description of Artificial Sequence: Synthetic oligonucleotide
acuuagcgccuggugucag

SEQ ID NO: 693256 - RNA, 19 nt, Artificial Sequence
  Description of Artificial Sequence: Synthetic oligonucleotide
gcucaaggcgaccacucca

SEQ ID NO: 693257 - RNA, 19 nt, Artificial Sequence
  Description of Artificial Sequence: Synthetic oligonucleotide
cucaaaacccuggaugccu

SEQ ID NO: 693258 - RNA, 19 nt, Artificial Sequence
  Description of Artificial Sequence: Synthetic oligonucleotide
cauuuuggcuaacucccgu

SEQ ID NO: 693259 - RNA, 19 nt, Artificial Sequence
  Description of Artificial Sequence: Synthetic oligonucleotide
acguucugugggaaugaca

SEQ ID NO: 693260 - RNA, 19 nt, Artificial Sequence
  Description of Artificial Sequence: Synthetic oligonucleotide
ccucuucgcgccgaggacg

SEQ ID NO: 693261 - RNA, 19 nt, Artificial Sequence
  Description of Artificial Sequence: Synthetic oligonucleotide
ggaguaaagcucugccuua

SEQ ID NO: 693262 - RNA, 19 nt, Artificial Sequence
  Description of Artificial Sequence: Synthetic oligonucleotide
ggacucagcagagaaccga

SEQ ID NO: 693263 - RNA, 19 nt, Artificial Sequence
  Description of Artificial Sequence: Synthetic oligonucleotide
gagagaggccucaagcgau

SEQ ID NO: 693264 - RNA, 19 nt, Artificial Sequence
  Description of Artificial Sequence: Synthetic oligonucleotide
gcuaugccaccucaaaggu

SEQ ID NO: 693265 - RNA, 19 nt, Artificial Sequence
  Description of Artificial Sequence: Synthetic oligonucleotide
aggccucaagcgaucauaa

SEQ ID NO: 693266 - RNA, 19 nt, Artificial Sequence
  Description of Artificial Sequence: Synthetic oligonucleotide
gcaagcucggagacgagga

SEQ ID NO: 693267 - RNA, 19 nt, Artificial Sequence
  Description of Artificial Sequence: Synthetic oligonucleotide
caucccuuacaaaggugcu

SEQ ID NO: 693268 - RNA, 19 nt, Artificial Sequence
  Description of Artificial Sequence: Synthetic oligonucleotide
ggccucuucgcgccgagga

SEQ ID NO: 693269 - RNA, 19 nt, Artificial Sequence
  Description of Artificial Sequence: Synthetic oligonucleotide
caaggcgaccacuccaagu

SEQ ID NO: 693270 - RNA, 19 nt, Artificial Sequence
  Description of Artificial Sequence: Synthetic oligonucleotide
guaaucuguuaaggaguaa

SEQ ID NO: 693271 - RNA, 19 nt, Artificial Sequence
  Description of Artificial Sequence: Synthetic oligonucleotide
gcgccaauccuguuugcca

SEQ ID NO: 693272 - RNA, 19 nt, Artificial Sequence
  Description of Artificial Sequence: Synthetic oligonucleotide
gcugaauaggggagauaug

SEQ ID NO: 693273 - RNA, 19 nt, Artificial Sequence
  Description of Artificial Sequence: Synthetic oligonucleotide
aggagcacugugacuuaga

SEQ ID NO: 693274 - RNA, 19 nt, Artificial Sequence
  Description of Artificial Sequence: Synthetic oligonucleotide
gcgggcucgagcuggcgcc

SEQ ID NO: 693275 - RNA, 19 nt, Artificial Sequence
  Description of Artificial Sequence: Synthetic oligonucleotide
cuguuagagcagugucaga

SEQ ID NO: 693276 - RNA, 19 nt, Artificial Sequence
  Description of Artificial Sequence: Synthetic oligonucleotide
ggcaacuuggauacagugu

SEQ ID NO: 693277 - RNA, 19 nt, Artificial Sequence
  Description of Artificial Sequence: Synthetic oligonucleotide
uccgcggaagacggcggac

SEQ ID NO: 693278 - RNA, 19 nt, Artificial Sequence
  Description of Artificial Sequence: Synthetic oligonucleotide
aggacgccuguccgcgagu

SEQ ID NO: 693279 - RNA, 19 nt, Artificial Sequence
  Description of Artificial Sequence: Synthetic oligonucleotide
ggagcgacgugcgcgcccc

SEQ ID NO: 693280 - RNA, 19 nt, Artificial Sequence
  Description of Artificial Sequence: Synthetic oligonucleotide
cucugccaauguaaucugu

SEQ ID NO: 693281 - RNA, 19 nt, Artificial Sequence
  Description of Artificial Sequence: Synthetic oligonucleotide
cuggcgccagucgcggccc

SEQ ID NO: 693282 - RNA, 19 nt, Artificial Sequence
  Description of Artificial Sequence: Synthetic oligonucleotide
ccaaaagcgccaauccugu

SEQ ID NO: 693283 - RNA, 19 nt, Artificial Sequence
  Description of Artificial Sequence: Synthetic oligonucleotide
gcgccgaggacgccugucc

SEQ ID NO: 693284 - RNA, 19 nt, Artificial Sequence
  Description of Artificial Sequence: Synthetic oligonucleotide
guuuuaccggcuccugcuu

SEQ ID NO: 693285 - RNA, 19 nt, Artificial Sequence
  Description of Artificial Sequence: Synthetic oligonucleotide
gcgaccacuccaaguccgg

SEQ ID NO: 693286 - RNA, 19 nt, Artificial Sequence
  Description of Artificial Sequence: Synthetic oligonucleotide
ccaggugagaaaggcuaug

SEQ ID NO: 693287 - RNA, 19 nt, Artificial Sequence
  Description of Artificial Sequence: Synthetic oligonucleotide
cuucggccuuucuggcuga

SEQ ID NO: 693288 - RNA, 19 nt, Artificial Sequence
  Description of Artificial Sequence: Synthetic oligonucleotide
cgcaagcucggagacgagg

SEQ ID NO: 693289 - RNA, 19 nt, Artificial Sequence
  Description of Artificial Sequence: Synthetic oligonucleotide
gccaguaaucauacacuaa

SEQ ID NO: 693290 - RNA, 19 nt, Artificial Sequence
  Description of Artificial Sequence: Synthetic oligonucleotide
gaguucccugcagcugaca

SEQ ID NO: 693291 - RNA, 19 nt, Artificial Sequence
  Description of Artificial Sequence: Synthetic oligonucleotide
ucuucgcgccgaggacgcc

SEQ ID NO: 693292 - RNA, 19 nt, Artificial Sequence
  Description of Artificial Sequence: Synthetic oligonucleotide
gggagcgacgugcgcgccc

SEQ ID NO: 693293 - RNA, 19 nt, Artificial Sequence
  Description of Artificial Sequence: Synthetic oligonucleotide
cucaagcgaucauaaucuu

SEQ ID NO: 693294 - RNA, 19 nt, Artificial Sequence
  Description of Artificial Sequence: Synthetic oligonucleotide
cauuccgaagauccuucuu

SEQ ID NO: 693295 - RNA, 19 nt, Artificial Sequence
  Description of Artificial Sequence: Synthetic oligonucleotide
gccucuucgcgccgaggac

SEQ ID NO: 693296 - RNA, 19 nt, Artificial Sequence
  Description of Artificial Sequence: Synthetic oligonucleotide
caguaacuauaagguaacu

SEQ ID NO: 693297 - RNA, 19 nt, Artificial Sequence
  Description of Artificial Sequence: Synthetic oligonucleotide
ccgacggaggaccgcgggc

SEQ ID NO: 693298 - RNA, 19 nt, Artificial Sequence
  Description of Artificial Sequence: Synthetic oligonucleotide
ugcguggacuucggccuuu

SEQ ID NO: 693299 - RNA, 19 nt, Artificial Sequence
  Description of Artificial Sequence: Synthetic oligonucleotide
gcgagcgaacgagggcggg

SEQ ID NO: 693300 - RNA, 19 nt, Artificial Sequence
  Description of Artificial Sequence: Synthetic oligonucleotide
ccucaggcgugaaaccaaa

SEQ ID NO: 693301 - RNA, 19 nt, Artificial Sequence
  Description of Artificial Sequence: Synthetic oligonucleotide
ucgcgccgaggacgccugu

SEQ ID NO: 693302 - RNA, 19 nt, Artificial Sequence
  Description of Artificial Sequence: Synthetic oligonucleotide
cgcgagcgaacgagggcgg

SEQ ID NO: 693303 - RNA, 19 nt, Artificial Sequence
  Description of Artificial Sequence: Synthetic oligonucleotide
ggacgccuguccgcgaguc

SEQ ID NO: 693304 - RNA, 19 nt, Artificial Sequence
  Description of Artificial Sequence: Synthetic oligonucleotide
cuucgcgccgaggacgccu

SEQ ID NO: 693305 - RNA, 19 nt, Artificial Sequence
  Description of Artificial Sequence: Synthetic oligonucleotide
caucuagucugggguagau

SEQ ID NO: 693306 - RNA, 19 nt, Artificial Sequence
  Description of Artificial Sequence: Synthetic oligonucleotide
ggcugucaauggagaaaca

SEQ ID NO: 693307 - RNA, 19 nt, Artificial Sequence
  Description of Artificial Sequence: Synthetic oligonucleotide
gcucggagacgaggaccgg

SEQ ID NO: 693308 - RNA, 19 nt, Artificial Sequence
  Description of Artificial Sequence: Synthetic oligonucleotide
gcucgagcuggcgccaguc

SEQ ID NO: 693309 - RNA, 19 nt, Artificial Sequence
  Description of Artificial Sequence: Synthetic oligonucleotide
gccacccuuaagaacuggu

SEQ ID NO: 693310 - RNA, 19 nt, Artificial Sequence
  Description of Artificial Sequence: Synthetic oligonucleotide
ccaccucaaagguguaacu

SEQ ID NO: 693311 - RNA, 19 nt, Artificial Sequence
  Description of Artificial Sequence: Synthetic oligonucleotide
cgagcgaacgagggcgggc

SEQ ID NO: 693312 - RNA, 19 nt, Artificial Sequence
  Description of Artificial Sequence: Synthetic oligonucleotide
agcgcccugcgggcucgag

SEQ ID NO: 693313 - RNA, 19 nt, Artificial Sequence
  Description of Artificial Sequence: Synthetic oligonucleotide
guccgcgaguccgcaagcu

SEQ ID NO: 693314 - RNA, 19 nt, Artificial Sequence
  Description of Artificial Sequence: Synthetic oligonucleotide
cgcggaagacggcggacuc

SEQ ID NO: 693315 - RNA, 19 nt, Artificial Sequence
  Description of Artificial Sequence: Synthetic oligonucleotide
gggguacuggggugauaua

SEQ ID NO: 693316 - RNA, 19 nt, Artificial Sequence
  Description of Artificial Sequence: Synthetic oligonucleotide
cgaacgagggcgggcggug

SEQ ID NO: 693317 - RNA, 19 nt, Artificial Sequence
  Description of Artificial Sequence: Synthetic oligonucleotide
ggggagauauggccauauu

SEQ ID NO: 693318 - RNA, 19 nt, Artificial Sequence
  Description of Artificial Sequence: Synthetic oligonucleotide
gcgccuggugucaggugga

SEQ ID NO: 693319 - RNA, 19 nt, Artificial Sequence
  Description of Artificial Sequence: Synthetic oligonucleotide
gggcugaauaggggagaua

SEQ ID NO: 693320 - RNA, 19 nt, Artificial Sequence
  Description of Artificial Sequence: Synthetic oligonucleotide
cgccaauccuguuugccau

SEQ ID NO: 693321 - RNA, 19 nt, Artificial Sequence
  Description of Artificial Sequence: Synthetic oligonucleotide
ccgagcgcccugcgggcuc

SEQ ID NO: 693322 - RNA, 19 nt, Artificial Sequence
  Description of Artificial Sequence: Synthetic oligonucleotide
cgagcgcccugcgggcucg

SEQ ID NO: 693323 - RNA, 19 nt, Artificial Sequence
  Description of Artificial Sequence: Synthetic oligonucleotide
cgaggaccggcagcuccgc

SEQ ID NO: 693324 - RNA, 19 nt, Artificial Sequence
  Description of Artificial Sequence: Synthetic oligonucleotide
ggagggcggggagcgacgu

SEQ ID NO: 693325 - RNA, 19 nt, Artificial Sequence
  Description of Artificial Sequence: Synthetic oligonucleotide
gccauaucucugccuucuu

SEQ ID NO: 693326 - RNA, 19 nt, Artificial Sequence
  Description of Artificial Sequence: Synthetic oligonucleotide
ccuguccgcgaguccgcaa

SEQ ID NO: 693327 - RNA, 19 nt, Artificial Sequence
  Description of Artificial Sequence: Synthetic oligonucleotide
gcgaacgagggcgggcggu

SEQ ID NO: 693328 - RNA, 19 nt, Artificial Sequence
  Description of Artificial Sequence: Synthetic oligonucleotide
cgucuugugugcucaucau

SEQ ID NO: 693329 - RNA, 19 nt, Artificial Sequence
  Description of Artificial Sequence: Synthetic oligonucleotide
gcgaguccgcaagcucgga

SEQ ID NO: 693330 - RNA, 19 nt, Artificial Sequence
  Description of Artificial Sequence: Synthetic oligonucleotide
ggcucgagcuggcgccagu

SEQ ID NO: 693331 - RNA, 19 nt, Artificial Sequence
  Description of Artificial Sequence: Synthetic oligonucleotide
gagcgcccugcgggcucga

SEQ ID NO: 693332 - RNA, 19 nt, Artificial Sequence
  Description of Artificial Sequence: Synthetic oligonucleotide
ccgcggaagacggcggacu

SEQ ID NO: 693333 - RNA, 19 nt, Artificial Sequence
  Description of Artificial Sequence: Synthetic oligonucleotide
cccgagcgcccugcgggcu

SEQ ID NO: 693334 - RNA, 19 nt, Artificial Sequence
  Description of Artificial Sequence: Synthetic oligonucleotide
aaugaaacgguccggaugc

SEQ ID NO: 693335 - RNA, 19 nt, Artificial Sequence
  Description of Artificial Sequence: Synthetic oligonucleotide
aaagcgaucauugugaggg

SEQ ID NO: 693336 - RNA, 19 nt, Artificial Sequence
  Description of Artificial Sequence: Synthetic oligonucleotide
aauugaccgaaacauggcc

SEQ ID NO: 693337 - RNA, 19 nt, Artificial Sequence
  Description of Artificial Sequence: Synthetic oligonucleotide
uugacaugggaauugaccg

SEQ ID NO: 693338 - RNA, 19 nt, Artificial Sequence
  Description of Artificial Sequence: Synthetic oligonucleotide
uguaaauuccggcaaaggc

SEQ ID NO: 693339 - RNA, 19 nt, Artificial Sequence
  Description of Artificial Sequence: Synthetic oligonucleotide
aaaggccuugcacaguucc

SEQ ID NO: 693340 - RNA, 19 nt, Artificial Sequence
  Description of Artificial Sequence: Synthetic oligonucleotide
auaccaaacaucuucaaca

SEQ ID NO: 693341 - RNA, 19 nt, Artificial Sequence
  Description of Artificial Sequence: Synthetic oligonucleotide
uuggguaaaagacaguuga

SEQ ID NO: 693342 - RNA, 19 nt, Artificial Sequence
  Description of Artificial Sequence: Synthetic oligonucleotide
accuucauaguagugaucc

SEQ ID NO: 693343 - RNA, 19 nt, Artificial Sequence
  Description of Artificial Sequence: Synthetic oligonucleotide
ugccaugcgaaucuggucg

SEQ ID NO: 693344 - RNA, 19 nt, Artificial Sequence
  Description of Artificial Sequence: Synthetic oligonucleotide
uaaaucuccugaauaaucu

SEQ ID NO: 693345 - RNA, 19 nt, Artificial Sequence
  Description of Artificial Sequence: Synthetic oligonucleotide
aacgagguugucuagcuug

SEQ ID NO: 693346 - RNA, 19 nt, Artificial Sequence
  Description of Artificial Sequence: Synthetic oligonucleotide
aaguauuugccuguguagg

SEQ ID NO: 693347 - RNA, 19 nt, Artificial Sequence
  Description of Artificial Sequence: Synthetic oligonucleotide
aguauuugccuguguaggc

SEQ ID NO: 693348 - RNA, 19 nt, Artificial Sequence
  Description of Artificial Sequence: Synthetic oligonucleotide
guccggaugaaacagaugc

SEQ ID NO: 693349 - RNA, 19 nt, Artificial Sequence
  Description of Artificial Sequence: Synthetic oligonucleotide
aaugauucggucacuggcg

SEQ ID NO: 693350 - RNA, 19 nt, Artificial Sequence
  Description of Artificial Sequence: Synthetic oligonucleotide
uaugucuccucucaguaca

SEQ ID NO: 693351 - RNA, 19 nt, Artificial Sequence
  Description of Artificial Sequence: Synthetic oligonucleotide
guaaauuccggcaaaggcc

SEQ ID NO: 693352 - RNA, 19 nt, Artificial Sequence
  Description of Artificial Sequence: Synthetic oligonucleotide
auaguagugauccuccacu

SEQ ID NO: 693353 - RNA, 19 nt, Artificial Sequence
  Description of Artificial Sequence: Synthetic oligonucleotide
gaagauauccgagaaggug

SEQ ID NO: 693354 - RNA, 19 nt, Artificial Sequence
  Description of Artificial Sequence: Synthetic oligonucleotide
uuggagagcacaaagcgau

SEQ ID NO: 693355 - RNA, 19 nt, Artificial Sequence
  Description of Artificial Sequence: Synthetic oligonucleotide
uggcgugccaaccaaaggc

SEQ ID NO: 693356 - RNA, 19 nt, Artificial Sequence
  Description of Artificial Sequence: Synthetic oligonucleotide
uguggcgcagccuacagca

SEQ ID NO: 693357 - RNA, 19 nt, Artificial Sequence
  Description of Artificial Sequence: Synthetic oligonucleotide
uugucuagcuuguaaauuc

SEQ ID NO: 693358 - RNA, 19 nt, Artificial Sequence
  Description of Artificial Sequence: Synthetic oligonucleotide
caaugauucggucacuggc

SEQ ID NO: 693359 - RNA, 19 nt, Artificial Sequence
  Description of Artificial Sequence: Synthetic oligonucleotide
uccaaucaccgucacuugg

SEQ ID NO: 693360 - RNA, 19 nt, Artificial Sequence
  Description of Artificial Sequence: Synthetic oligonucleotide
acgauagcuggcuuugucg

SEQ ID NO: 693361 - RNA, 19 nt, Artificial Sequence
  Description of Artificial Sequence: Synthetic oligonucleotide
cacucaaugaaacgguccg

SEQ ID NO: 693362 - RNA, 19 nt, Artificial Sequence
  Description of Artificial Sequence: Synthetic oligonucleotide
ugugguaaccuuccauugc

SEQ ID NO: 693363 - RNA, 19 nt, Artificial Sequence
  Description of Artificial Sequence: Synthetic oligonucleotide
guuucggggauccagggcc

SEQ ID NO: 693364 - RNA, 19 nt, Artificial Sequence
  Description of Artificial Sequence: Synthetic oligonucleotide
guaaagaaggcugcaaaag

SEQ ID NO: 693365 - RNA, 19 nt, Artificial Sequence
  Description of Artificial Sequence: Synthetic oligonucleotide
ugagcaccuugccagaacc

SEQ ID NO: 693366 - RNA, 19 nt, Artificial Sequence
  Description of Artificial Sequence: Synthetic oligonucleotide
uuuucugggcggcuggucc

SEQ ID NO: 693367 - RNA, 19 nt, Artificial Sequence
  Description of Artificial Sequence: Synthetic oligonucleotide
ugggaauugaccgaaacau

SEQ ID NO: 693368 - RNA, 19 nt, Artificial Sequence
  Description of Artificial Sequence: Synthetic oligonucleotide
gugguaaccuuccauugcg

SEQ ID NO: 693369 - RNA, 19 nt, Artificial Sequence
  Description of Artificial Sequence: Synthetic oligonucleotide
ugucuagcuuguaaauucc

SEQ ID NO: 693370 - RNA, 19 nt, Artificial Sequence
  Description of Artificial Sequence: Synthetic oligonucleotide
ugcacgggcacacucaaga

SEQ ID NO: 693371 - RNA, 19 nt, Artificial Sequence
  Description of Artificial Sequence: Synthetic oligonucleotide
uccuugucaauaccaaaca

SEQ ID NO: 693372 - RNA, 19 nt, Artificial Sequence
  Description of Artificial Sequence: Synthetic oligonucleotide
uugaccgaaacauggccag

SEQ ID NO: 693373 - RNA, 19 nt, Artificial Sequence
  Description of Artificial Sequence: Synthetic oligonucleotide
auauuggcaauguccacug

SEQ ID NO: 693374 - RNA, 19 nt, Artificial Sequence
  Description of Artificial Sequence: Synthetic oligonucleotide
aacuaccuuggcuuggcca

SEQ ID NO: 693375 - RNA, 19 nt, Artificial Sequence
  Description of Artificial Sequence: Synthetic oligonucleotide
guagugauccuccacugug

SEQ ID NO: 693376 - RNA, 19 nt, Artificial Sequence
  Description of Artificial Sequence: Synthetic oligonucleotide
cucacagcguuucugguag

SEQ ID NO: 693377 - RNA, 19 nt, Artificial Sequence
  Description of Artificial Sequence: Synthetic oligonucleotide
uuucggguggcuaucuugu

SEQ ID NO: 693378 - RNA, 19 nt, Artificial Sequence
  Description of Artificial Sequence: Synthetic oligonucleotide
aaggcccguguaaagaagg

SEQ ID NO: 693379 - RNA, 19 nt, Artificial Sequence
  Description of Artificial Sequence: Synthetic oligonucleotide
ucugucgccacuccgucac

SEQ ID NO: 693380 - RNA, 19 nt, Artificial Sequence
  Description of Artificial Sequence: Synthetic oligonucleotide
caaugaaacgguccggaug

SEQ ID NO: 693381 - RNA, 19 nt, Artificial Sequence
  Description of Artificial Sequence: Synthetic oligonucleotide
aauguagcacucaaugaaa

SEQ ID NO: 693382 - RNA, 19 nt, Artificial Sequence
  Description of Artificial Sequence: Synthetic oligonucleotide
cacgcuguguccauccacg

SEQ ID NO: 693383 - RNA, 19 nt, Artificial Sequence
  Description of Artificial Sequence: Synthetic oligonucleotide
guagacguccagcuggugc

SEQ ID NO: 693384 - RNA, 19 nt, Artificial Sequence
  Description of Artificial Sequence: Synthetic oligonucleotide
caauguagcacucaaugaa

SEQ ID NO: 693385 - RNA, 19 nt, Artificial Sequence
  Description of Artificial Sequence: Synthetic oligonucleotide
augggaauugaccgaaaca

SEQ ID NO: 693386 - RNA, 19 nt, Artificial Sequence
  Description of Artificial Sequence: Synthetic oligonucleotide
uauuugccuguguaggcca

SEQ ID NO: 693387 - RNA, 19 nt, Artificial Sequence
  Description of Artificial Sequence: Synthetic oligonucleotide
gaaacgguccggaugcucc

SEQ ID NO: 693388 - RNA, 19 nt, Artificial Sequence
  Description of Artificial Sequence: Synthetic oligonucleotide
ucagaacuaccuuggcuug

SEQ ID NO: 693389 - RNA, 19 nt, Artificial Sequence
  Description of Artificial Sequence: Synthetic oligonucleotide
ugcucggcaauguagcacu

SEQ ID NO: 693390 - RNA, 19 nt, Artificial Sequence
  Description of Artificial Sequence: Synthetic oligonucleotide
uagcacucaaugaaacggu

SEQ ID NO: 693391 - RNA, 19 nt, Artificial Sequence
  Description of Artificial Sequence: Synthetic oligonucleotide
agugauccuccacugugag

SEQ ID NO: 693392 - RNA, 19 nt, Artificial Sequence
  Description of Artificial Sequence: Synthetic oligonucleotide
ucguauuggcugcuaauuc

SEQ ID NO: 693393 - RNA, 19 nt, Artificial Sequence
  Description of Artificial Sequence: Synthetic oligonucleotide
auguagcacucaaugaaac

SEQ ID NO: 693394 - RNA, 19 nt, Artificial Sequence
  Description of Artificial Sequence: Synthetic oligonucleotide
uguuuugggacagggugcc

SEQ ID NO: 693395 - RNA, 19 nt, Artificial Sequence
  Description of Artificial Sequence: Synthetic oligonucleotide
agcucagcuggcuuuccac

SEQ ID NO: 693396 - RNA, 19 nt, Artificial Sequence
  Description of Artificial Sequence: Synthetic oligonucleotide
guuuugcucggcaauguag

SEQ ID NO: 693397 - RNA, 19 nt, Artificial Sequence
  Description of Artificial Sequence: Synthetic oligonucleotide
uaguagugauccuccacug

SEQ ID NO: 693398 - RNA, 19 nt, Artificial Sequence
  Description of Artificial Sequence: Synthetic oligonucleotide
gguaaccuuccauugcgcg

SEQ ID NO: 693399 - RNA, 19 nt, Artificial Sequence
  Description of Artificial Sequence: Synthetic oligonucleotide
uggguaaaagacaguugac

SEQ ID NO: 693400 - RNA, 19 nt, Artificial Sequence
  Description of Artificial Sequence: Synthetic oligonucleotide
gaauaaucugaucagccau

SEQ ID NO: 693401 - RNA, 19 nt, Artificial Sequence
  Description of Artificial Sequence: Synthetic oligonucleotide
cacucaagaaugagcuucc

SEQ ID NO: 693402 - RNA, 19 nt, Artificial Sequence
  Description of Artificial Sequence: Synthetic oligonucleotide
cuuguaaauuccggcaaag

SEQ ID NO: 693403 - RNA, 19 nt, Artificial Sequence
  Description of Artificial Sequence: Synthetic oligonucleotide
aagggccuguccauaggcc

SEQ ID NO: 693404 - RNA, 19 nt, Artificial Sequence
  Description of Artificial Sequence: Synthetic oligonucleotide
ugucgaaguauuugccugu

SEQ ID NO: 693405 - RNA, 19 nt, Artificial Sequence
  Description of Artificial Sequence: Synthetic oligonucleotide
uuaugucuccucucaguac

SEQ ID NO: 693406 - RNA, 19 nt, Artificial Sequence
  Description of Artificial Sequence: Synthetic oligonucleotide
ugaaacagaugcccuucgu

SEQ ID NO: 693407 - RNA, 19 nt, Artificial Sequence
  Description of Artificial Sequence: Synthetic oligonucleotide
cuuucggguggcuaucuug

SEQ ID NO: 693408 - RNA, 19 nt, Artificial Sequence
  Description of Artificial Sequence: Synthetic oligonucleotide
ugacaugggaauugaccga

SEQ ID NO: 693409 - RNA, 19 nt, Artificial Sequence
  Description of Artificial Sequence: Synthetic oligonucleotide
acuuggguaaaagacaguu

SEQ ID NO: 693410 - RNA, 19 nt, Artificial Sequence
  Description of Artificial Sequence: Synthetic oligonucleotide
uagcgcaugguauggaaaa

SEQ ID NO: 693411 - RNA, 19 nt, Artificial Sequence
  Description of Artificial Sequence: Synthetic oligonucleotide
ucggugaaggcuuguuuug

SEQ ID NO: 693412 - RNA, 19 nt, Artificial Sequence
  Description of Artificial Sequence: Synthetic oligonucleotide
uagugauccuccacuguga

SEQ ID NO: 693413 - RNA, 19 nt, Artificial Sequence
  Description of Artificial Sequence: Synthetic oligonucleotide
gauggcgugccaaccaaag

SEQ ID NO: 693414 - RNA, 19 nt, Artificial Sequence
  Description of Artificial Sequence: Synthetic oligonucleotide
guaggcaugcggauauugg

SEQ ID NO: 693415 - RNA, 19 nt, Artificial Sequence
  Description of Artificial Sequence: Synthetic oligonucleotide
uaaccuuccauugcgcggu

SEQ ID NO: 693416 - RNA, 19 nt, Artificial Sequence
  Description of Artificial Sequence: Synthetic oligonucleotide
aggcgggugacagugacuc

SEQ ID NO: 693417 - RNA, 19 nt, Artificial Sequence
  Description of Artificial Sequence: Synthetic oligonucleotide
gauggagcugaugcgcagg

SEQ ID NO: 693418 - RNA, 19 nt, Artificial Sequence
  Description of Artificial Sequence: Synthetic oligonucleotide
caaagcgaucauugugagg

SEQ ID NO: 693419 - RNA, 19 nt, Artificial Sequence
  Description of Artificial Sequence: Synthetic oligonucleotide
agguugucuagcuuguaaa

SEQ ID NO: 693420 - RNA, 19 nt, Artificial Sequence
  Description of Artificial Sequence: Synthetic oligonucleotide
auagacacgauagcuggcu

SEQ ID NO: 693421 - RNA, 19 nt, Artificial Sequence
  Description of Artificial Sequence: Synthetic oligonucleotide
uuuugggacagggugccca

SEQ ID NO: 693422 - RNA, 19 nt, Artificial Sequence
  Description of Artificial Sequence: Synthetic oligonucleotide
uggcgaugauggcuguugg

SEQ ID NO: 693423 - RNA, 19 nt, Artificial Sequence
  Description of Artificial Sequence: Synthetic oligonucleotide
uguagcgcaugguauggaa

SEQ ID NO: 693424 - RNA, 19 nt, Artificial Sequence
  Description of Artificial Sequence: Synthetic oligonucleotide
uuugcucggcaauguagca

SEQ ID NO: 693425 - RNA, 19 nt, Artificial Sequence
  Description of Artificial Sequence: Synthetic oligonucleotide
caugcaggguuacaccagc

SEQ ID NO: 693426 - RNA, 19 nt, Artificial Sequence
  Description of Artificial Sequence: Synthetic oligonucleotide
auuccggcaaaggccaugg

SEQ ID NO: 693427 - RNA, 19 nt, Artificial Sequence
  Description of Artificial Sequence: Synthetic oligonucleotide
agcuuguaaauuccggcaa

SEQ ID NO: 693428 - RNA, 19 nt, Artificial Sequence
  Description of Artificial Sequence: Synthetic oligonucleotide
aucggugaaggcuuguuuu

SEQ ID NO: 693429 - RNA, 19 nt, Artificial Sequence
  Description of Artificial Sequence: Synthetic oligonucleotide
ucgccacuccgucacuugg

SEQ ID NO: 693430 - RNA, 19 nt, Artificial Sequence
  Description of Artificial Sequence: Synthetic oligonucleotide
gacacgauagcuggcuuug

SEQ ID NO: 693431 - RNA, 19 nt, Artificial Sequence
  Description of Artificial Sequence: Synthetic oligonucleotide
auugaccgaaacauggcca

SEQ ID NO: 693432 - RNA, 19 nt, Artificial Sequence
  Description of Artificial Sequence: Synthetic oligonucleotide
acgggcacacucaagaaug

SEQ ID NO: 693433 - RNA, 19 nt, Artificial Sequence
  Description of Artificial Sequence: Synthetic oligonucleotide
agggccuuguagcgcaugg

SEQ ID NO: 693434 - RNA, 19 nt, Artificial Sequence
  Description of Artificial Sequence: Synthetic oligonucleotide
agcaaugcucaccauguuu

SEQ ID NO: 693435 - RNA, 19 nt, Artificial Sequence
  Description of Artificial Sequence: Synthetic oligonucleotide
cacuuuguagcuggguggg

SEQ ID NO: 693436 - RNA, 19 nt, Artificial Sequence
  Description of Artificial Sequence: Synthetic oligonucleotide
ugguaaccuuccauugcgc

SEQ ID NO: 693437 - RNA, 19 nt, Artificial Sequence
  Description of Artificial Sequence: Synthetic oligonucleotide
uucguauuggcugcuaauu

SEQ ID NO: 693438 - RNA, 19 nt, Artificial Sequence
  Description of Artificial Sequence: Synthetic oligonucleotide
gucuagcuuguaaauuccg

SEQ ID NO: 693439 - RNA, 19 nt, Artificial Sequence
  Description of Artificial Sequence: Synthetic oligonucleotide
ugcuaauuccacugccuuc

SEQ ID NO: 693440 - RNA, 19 nt, Artificial Sequence
  Description of Artificial Sequence: Synthetic oligonucleotide
agcaccuugccagaaccuc

SEQ ID NO: 693441 - RNA, 19 nt, Artificial Sequence
  Description of Artificial Sequence: Synthetic oligonucleotide
accgaaacauggccagauc

SEQ ID NO: 693442 - RNA, 19 nt, Artificial Sequence
  Description of Artificial Sequence: Synthetic oligonucleotide
acucaaugaaacgguccgg

SEQ ID NO: 693443 - RNA, 19 nt, Artificial Sequence
  Description of Artificial Sequence: Synthetic oligonucleotide
aggauccggccuuugguug

SEQ ID NO: 693444 - RNA, 19 nt, Artificial Sequence
  Description of Artificial Sequence: Synthetic oligonucleotide
ugguccggaugaaacagau

SEQ ID NO: 693445 - RNA, 19 nt, Artificial Sequence
  Description of Artificial Sequence: Synthetic oligonucleotide
aaacgguccggaugcuccu

SEQ ID NO: 693446 - RNA, 19 nt, Artificial Sequence
  Description of Artificial Sequence: Synthetic oligonucleotide
gaaucuggucgaaggcccg

SEQ ID NO: 693447 - RNA, 19 nt, Artificial Sequence
  Description of Artificial Sequence: Synthetic oligonucleotide
agcacucaaugaaacgguc

SEQ ID NO: 693448 - RNA, 19 nt, Artificial Sequence
  Description of Artificial Sequence: Synthetic oligonucleotide
gguaaaagacaguugacau

SEQ ID NO: 693449 - RNA, 19 nt, Artificial Sequence
  Description of Artificial Sequence: Synthetic oligonucleotide
auauccgagaagguggaau

SEQ ID NO: 693450 - RNA, 19 nt, Artificial Sequence
  Description of Artificial Sequence: Synthetic oligonucleotide
cuaacagccaggcggguga

SEQ ID NO: 693451 - RNA, 19 nt, Artificial Sequence
  Description of Artificial Sequence: Synthetic oligonucleotide
acagcguuucugguagacg

SEQ ID NO: 693452 - RNA, 19 nt, Artificial Sequence
  Description of Artificial Sequence: Synthetic oligonucleotide
uugagcaccuugccagaac

SEQ ID NO: 693453 - RNA, 19 nt, Artificial Sequence
  Description of Artificial Sequence: Synthetic oligonucleotide
uggucgaaggcccguguaa

SEQ ID NO: 693454 - RNA, 19 nt, Artificial Sequence
  Description of Artificial Sequence: Synthetic oligonucleotide
cguauuggcugcuaauucc

SEQ ID NO: 693455 - RNA, 19 nt, Artificial Sequence
  Description of Artificial Sequence: Synthetic oligonucleotide
agggccuguccauaggccu

SEQ ID NO: 693456 - RNA, 19 nt, Artificial Sequence
  Description of Artificial Sequence: Synthetic oligonucleotide
cacugccucaccuaugcca

SEQ ID NO: 693457 - RNA, 19 nt, Artificial Sequence
  Description of Artificial Sequence: Synthetic oligonucleotide
cagagguugauguugcucu

SEQ ID NO: 693458 - RNA, 19 nt, Artificial Sequence
  Description of Artificial Sequence: Synthetic oligonucleotide
uuccauugcgcggucgggc

SEQ ID NO: 693459 - RNA, 19 nt, Artificial Sequence
  Description of Artificial Sequence: Synthetic oligonucleotide
agggguccaacacacggau

SEQ ID NO: 693460 - RNA, 19 nt, Artificial Sequence
  Description of Artificial Sequence: Synthetic oligonucleotide
gucgaaggcccguguaaag

SEQ ID NO: 693461 - RNA, 19 nt, Artificial Sequence
  Description of Artificial Sequence: Synthetic oligonucleotide
cacuccgucacuuggguaa

SEQ ID NO: 693462 - RNA, 19 nt, Artificial Sequence
  Description of Artificial Sequence: Synthetic oligonucleotide
ucucggguaggaagccagc

SEQ ID NO: 693463 - RNA, 19 nt, Artificial Sequence
  Description of Artificial Sequence: Synthetic oligonucleotide
gcuguaaaucuccugaaua

SEQ ID NO: 693464 - RNA, 19 nt, Artificial Sequence
  Description of Artificial Sequence: Synthetic oligonucleotide
ucuccucucaguacaucuu

SEQ ID NO: 693465 - RNA, 19 nt, Artificial Sequence
  Description of Artificial Sequence: Synthetic oligonucleotide
ucccacuacugcagcagac

SEQ ID NO: 693466 - RNA, 19 nt, Artificial Sequence
  Description of Artificial Sequence: Synthetic oligonucleotide
ggguaaaagacaguugaca

SEQ ID NO: 693467 - RNA, 19 nt, Artificial Sequence
  Description of Artificial Sequence: Synthetic oligonucleotide
uggugcuuagccuggccaa

SEQ ID NO: 693468 - RNA, 19 nt, Artificial Sequence
  Description of Artificial Sequence: Synthetic oligonucleotide
uccggccuuugguugcacg

SEQ ID NO: 693469 - RNA, 19 nt, Artificial Sequence
  Description of Artificial Sequence: Synthetic oligonucleotide
uggcuguaaaucuccugaa

SEQ ID NO: 693470 - RNA, 19 nt, Artificial Sequence
  Description of Artificial Sequence: Synthetic oligonucleotide
aagcgaucauugugagggu

SEQ ID NO: 693471 - RNA, 19 nt, Artificial Sequence
  Description of Artificial Sequence: Synthetic oligonucleotide
ucuggucgaaggcccgugu

SEQ ID NO: 693472 - RNA, 19 nt, Artificial Sequence
  Description of Artificial Sequence: Synthetic oligonucleotide
ugugaucccacggcccuug

SEQ ID NO: 693473 - RNA, 19 nt, Artificial Sequence
  Description of Artificial Sequence: Synthetic oligonucleotide
auuuucugggcggcugguc

SEQ ID NO: 693474 - RNA, 19 nt, Artificial Sequence
  Description of Artificial Sequence: Synthetic oligonucleotide
ucgggcgaggacgaagacc

SEQ ID NO: 693475 - RNA, 19 nt, Artificial Sequence
  Description of Artificial Sequence: Synthetic oligonucleotide
aaccuuccauugcgcgguc

SEQ ID NO: 693476 - RNA, 19 nt, Artificial Sequence
  Description of Artificial Sequence: Synthetic oligonucleotide
aggcccguguaaagaaggc

SEQ ID NO: 693477 - RNA, 19 nt, Artificial Sequence
  Description of Artificial Sequence: Synthetic oligonucleotide
gcuuagccuggccaaaggc

SEQ ID NO: 693478 - RNA, 19 nt, Artificial Sequence
  Description of Artificial Sequence: Synthetic oligonucleotide
caugcgaaucuggucgaag

SEQ ID NO: 693479 - RNA, 19 nt, Artificial Sequence
  Description of Artificial Sequence: Synthetic oligonucleotide
cacgauagcuggcuuuguc

SEQ ID NO: 693480 - RNA, 19 nt, Artificial Sequence
  Description of Artificial Sequence: Synthetic oligonucleotide
gcauuuucugggcggcugg

SEQ ID NO: 693481 - RNA, 19 nt, Artificial Sequence
  Description of Artificial Sequence: Synthetic oligonucleotide
agauauccgagaaggugga

SEQ ID NO: 693482 - RNA, 19 nt, Artificial Sequence
  Description of Artificial Sequence: Synthetic oligonucleotide
aggcgauuggcuguguccu

SEQ ID NO: 693483 - RNA, 19 nt, Artificial Sequence
  Description of Artificial Sequence: Synthetic oligonucleotide
gucucggguaggaagccag

SEQ ID NO: 693484 - RNA, 19 nt, Artificial Sequence
  Description of Artificial Sequence: Synthetic oligonucleotide
caaggcccuucacagcuug

SEQ ID NO: 693485 - RNA, 19 nt, Artificial Sequence
  Description of Artificial Sequence: Synthetic oligonucleotide
ugggcggcugguccggaug

SEQ ID NO: 693486 - RNA, 19 nt, Artificial Sequence
  Description of Artificial Sequence: Synthetic oligonucleotide
aaucuggucgaaggcccgu

SEQ ID NO: 693487 - RNA, 19 nt, Artificial Sequence
  Description of Artificial Sequence: Synthetic oligonucleotide
aggcaugcggauauuggca

SEQ ID NO: 693488 - RNA, 19 nt, Artificial Sequence
  Description of Artificial Sequence: Synthetic oligonucleotide
ucggguaggaagccagcuu

SEQ ID NO: 693489 - RNA, 19 nt, Artificial Sequence
  Description of Artificial Sequence: Synthetic oligonucleotide
gagauggcugccaugcgaa

SEQ ID NO: 693490 - RNA, 19 nt, Artificial Sequence
  Description of Artificial Sequence: Synthetic oligonucleotide
uggcgcagccuacagcaau

SEQ ID NO: 693491 - RNA, 19 nt, Artificial Sequence
  Description of Artificial Sequence: Synthetic oligonucleotide
gcugguccggaugaaacag

SEQ ID NO: 693492 - RNA, 19 nt, Artificial Sequence
  Description of Artificial Sequence: Synthetic oligonucleotide
cgaaucuggucgaaggccc

SEQ ID NO: 693493 - RNA, 19 nt, Artificial Sequence
  Description of Artificial Sequence: Synthetic oligonucleotide
ugauccggcuugugguaac

SEQ ID NO: 693494 - RNA, 19 nt, Artificial Sequence
  Description of Artificial Sequence: Synthetic oligonucleotide
ugaugugggguggccggag

SEQ ID NO: 693495 - RNA, 19 nt, Artificial Sequence
  Description of Artificial Sequence: Synthetic oligonucleotide
cuccaaucaccgucacuug

SEQ ID NO: 693496 - RNA, 19 nt, Artificial Sequence
  Description of Artificial Sequence: Synthetic oligonucleotide
agcguuucugguagacguc

SEQ ID NO: 693497 - RNA, 19 nt, Artificial Sequence
  Description of Artificial Sequence: Synthetic oligonucleotide
uagacacgauagcuggcuu

SEQ ID NO: 693498 - RNA, 19 nt, Artificial Sequence
  Description of Artificial Sequence: Synthetic oligonucleotide
gucuccucucaguacaucu

SEQ ID NO: 693499 - RNA, 19 nt, Artificial Sequence
  Description of Artificial Sequence: Synthetic oligonucleotide
agcccuucuagggcucccc

SEQ ID NO: 693500 - RNA, 19 nt, Artificial Sequence
  Description of Artificial Sequence: Synthetic oligonucleotide
cagcguuucugguagacgu

SEQ ID NO: 693501 - RNA, 19 nt, Artificial Sequence
  Description of Artificial Sequence: Synthetic oligonucleotide
acuuuguagcugggugggg

SEQ ID NO: 693502 - RNA, 19 nt, Artificial Sequence
  Description of Artificial Sequence: Synthetic oligonucleotide
cuuccauugcgcggucggg

SEQ ID NO: 693503 - RNA, 19 nt, Artificial Sequence
  Description of Artificial Sequence: Synthetic oligonucleotide
uggcaacgagguugucuag

SEQ ID NO: 693504 - RNA, 19 nt, Artificial Sequence
  Description of Artificial Sequence: Synthetic oligonucleotide
gugaggguuucggggaucc

SEQ ID NO: 693505 - RNA, 19 nt, Artificial Sequence
  Description of Artificial Sequence: Synthetic oligonucleotide
gauccggcuugugguaacc

SEQ ID NO: 693506 - RNA, 19 nt, Artificial Sequence
  Description of Artificial Sequence: Synthetic oligonucleotide
gucgaaguauuugccugug

SEQ ID NO: 693507 - RNA, 19 nt, Artificial Sequence
  Description of Artificial Sequence: Synthetic oligonucleotide
cagaugcccuucguauugg

SEQ ID NO: 693508 - RNA, 19 nt, Artificial Sequence
  Description of Artificial Sequence: Synthetic oligonucleotide
cccguguaaagaaggcugc

SEQ ID NO: 693509 - RNA, 19 nt, Artificial Sequence
  Description of Artificial Sequence: Synthetic oligonucleotide
gguaggcaugcggauauug

SEQ ID NO: 693510 - RNA, 19 nt, Artificial Sequence
  Description of Artificial Sequence: Synthetic oligonucleotide
cugccaugcgaaucugguc

SEQ ID NO: 693511 - RNA, 19 nt, Artificial Sequence
  Description of Artificial Sequence: Synthetic oligonucleotide
gcgaaucuggucgaaggcc

SEQ ID NO: 693512 - RNA, 19 nt, Artificial Sequence
  Description of Artificial Sequence: Synthetic oligonucleotide
uccccguccagggcaauga

SEQ ID NO: 693513 - RNA, 19 nt, Artificial Sequence
  Description of Artificial Sequence: Synthetic oligonucleotide
cacagcguuucugguagac

SEQ ID NO: 693514 - RNA, 19 nt, Artificial Sequence
  Description of Artificial Sequence: Synthetic oligonucleotide
uuguagcgcaugguaugga

SEQ ID NO: 693515 - RNA, 19 nt, Artificial Sequence
  Description of Artificial Sequence: Synthetic oligonucleotide
ugaucccacggcccuugaa

SEQ ID NO: 693516 - RNA, 19 nt, Artificial Sequence
  Description of Artificial Sequence: Synthetic oligonucleotide
ucaccauguuuugcucggc

SEQ ID NO: 693517 - RNA, 19 nt, Artificial Sequence
  Description of Artificial Sequence: Synthetic oligonucleotide
guugcacgggcacacucaa

SEQ ID NO: 693518 - RNA, 19 nt, Artificial Sequence
  Description of Artificial Sequence: Synthetic oligonucleotide
ggcaacgagguugucuagc

SEQ ID NO: 693519 - RNA, 19 nt, Artificial Sequence
  Description of Artificial Sequence: Synthetic oligonucleotide
augcggauauuggcaaugu

SEQ ID NO: 693520 - RNA, 19 nt, Artificial Sequence
  Description of Artificial Sequence: Synthetic oligonucleotide
ggacgaagaccagaggcac

SEQ ID NO: 693521 - RNA, 19 nt, Artificial Sequence
  Description of Artificial Sequence: Synthetic oligonucleotide
guguggcgcagccuacagc

SEQ ID NO: 693522 - RNA, 19 nt, Artificial Sequence
  Description of Artificial Sequence: Synthetic oligonucleotide
gucgccacuccgucacuug

SEQ ID NO: 693523 - RNA, 19 nt, Artificial Sequence
  Description of Artificial Sequence: Synthetic oligonucleotide
ugaccgaaacauggccaga

SEQ ID NO: 693524 - RNA, 19 nt, Artificial Sequence
  Description of Artificial Sequence: Synthetic oligonucleotide
cagacgguugacgucaaaa

SEQ ID NO: 693525 - RNA, 19 nt, Artificial Sequence
  Description of Artificial Sequence: Synthetic oligonucleotide
caagacuccuugucuucga

SEQ ID NO: 693526 - RNA, 19 nt, Artificial Sequence
  Description of Artificial Sequence: Synthetic oligonucleotide
uuccggcaaaggccauggc

SEQ ID NO: 693527 - RNA, 19 nt, Artificial Sequence
  Description of Artificial Sequence: Synthetic oligonucleotide
gcugaugcgcaggcgauug

SEQ ID NO: 693528 - RNA, 19 nt, Artificial Sequence
  Description of Artificial Sequence: Synthetic oligonucleotide
cauugcgcggucgggcgag

SEQ ID NO: 693529 - RNA, 19 nt, Artificial Sequence
  Description of Artificial Sequence: Synthetic oligonucleotide
caccauguuuugcucggca

SEQ ID NO: 693530 - RNA, 19 nt, Artificial Sequence
  Description of Artificial Sequence: Synthetic oligonucleotide
ugcgcggucgggcgaggac

SEQ ID NO: 693531 - RNA, 19 nt, Artificial Sequence
  Description of Artificial Sequence: Synthetic oligonucleotide
acgcuguguccauccacga

SEQ ID NO: 693532 - RNA, 19 nt, Artificial Sequence
  Description of Artificial Sequence: Synthetic oligonucleotide
acgagguugucuagcuugu

SEQ ID NO: 693533 - RNA, 19 nt, Artificial Sequence
  Description of Artificial Sequence: Synthetic oligonucleotide
guagcgcaugguauggaaa

SEQ ID NO: 693534 - RNA, 19 nt, Artificial Sequence
  Description of Artificial Sequence: Synthetic oligonucleotide
cauccacgaugauggcgug

SEQ ID NO: 693535 - RNA, 19 nt, Artificial Sequence
  Description of Artificial Sequence: Synthetic oligonucleotide
cugguccggaugaaacaga

SEQ ID NO: 693536 - RNA, 19 nt, Artificial Sequence
  Description of Artificial Sequence: Synthetic oligonucleotide
accuuccauugcgcggucg

SEQ ID NO: 693537 - RNA, 19 nt, Artificial Sequence
  Description of Artificial Sequence: Synthetic oligonucleotide
ccuugccagaaccucucag

SEQ ID NO: 693538 - RNA, 19 nt, Artificial Sequence
  Description of Artificial Sequence: Synthetic oligonucleotide
gucuucgaucccugugauc

SEQ ID NO: 693539 - RNA, 19 nt, Artificial Sequence
  Description of Artificial Sequence: Synthetic oligonucleotide
aucuggucgaaggcccgug

SEQ ID NO: 693540 - RNA, 19 nt, Artificial Sequence
  Description of Artificial Sequence: Synthetic oligonucleotide
cuuugguugcacgggcaca

SEQ ID NO: 693541 - RNA, 19 nt, Artificial Sequence
  Description of Artificial Sequence: Synthetic oligonucleotide
ccggcuugugguaaccuuc

SEQ ID NO: 693542 - RNA, 19 nt, Artificial Sequence
  Description of Artificial Sequence: Synthetic oligonucleotide
cuucguauuggcugcuaau

SEQ ID NO: 693543 - RNA, 19 nt, Artificial Sequence
  Description of Artificial Sequence: Synthetic oligonucleotide
acaucggugaaggcuuguu

SEQ ID NO: 693544 - RNA, 19 nt, Artificial Sequence
  Description of Artificial Sequence: Synthetic oligonucleotide
cacgaugauggcgugccaa

SEQ ID NO: 693545 - RNA, 19 nt, Artificial Sequence
  Description of Artificial Sequence: Synthetic oligonucleotide
gauauccgagaagguggaa

SEQ ID NO: 693546 - RNA, 19 nt, Artificial Sequence
  Description of Artificial Sequence: Synthetic oligonucleotide
gcuaacagccaggcgggug

SEQ ID NO: 693547 - RNA, 19 nt, Artificial Sequence
  Description of Artificial Sequence: Synthetic oligonucleotide
uugguugcacgggcacacu

SEQ ID NO: 693548 - RNA, 19 nt, Artificial Sequence
  Description of Artificial Sequence: Synthetic oligonucleotide
ccucucaguacaucuuuga

SEQ ID NO: 693549 - RNA, 19 nt, Artificial Sequence
  Description of Artificial Sequence: Synthetic oligonucleotide
ugucgccacuccgucacuu

SEQ ID NO: 693550 - RNA, 19 nt, Artificial Sequence
  Description of Artificial Sequence: Synthetic oligonucleotide
ggccuuguagcgcauggua

SEQ ID NO: 693551 - RNA, 19 nt, Artificial Sequence
  Description of Artificial Sequence: Synthetic oligonucleotide
gcaacgagguugucuagcu

SEQ ID NO: 693552 - RNA, 19 nt, Artificial Sequence
  Description of Artificial Sequence: Synthetic oligonucleotide
caaggccucaugcaggguu

SEQ ID NO: 693553 - RNA, 19 nt, Artificial Sequence
  Description of Artificial Sequence: Synthetic oligonucleotide
augcaggguuacaccagcu

SEQ ID NO: 693554 - RNA, 19 nt, Artificial Sequence
  Description of Artificial Sequence: Synthetic oligonucleotide
cucugucgccacuccguca

SEQ ID NO: 693555 - RNA, 19 nt, Artificial Sequence
  Description of Artificial Sequence: Synthetic oligonucleotide
ggaugaaacagaugcccuu

SEQ ID NO: 693556 - RNA, 19 nt, Artificial Sequence
  Description of Artificial Sequence: Synthetic oligonucleotide
gcccagacgguugacguca

SEQ ID NO: 693557 - RNA, 19 nt, Artificial Sequence
  Description of Artificial Sequence: Synthetic oligonucleotide
gcgggugacagugacucca

SEQ ID NO: 693558 - RNA, 19 nt, Artificial Sequence
  Description of Artificial Sequence: Synthetic oligonucleotide
acacgauagcuggcuuugu

SEQ ID NO: 693559 - RNA, 19 nt, Artificial Sequence
  Description of Artificial Sequence: Synthetic oligonucleotide
ucaccgucacuuggucauc

SEQ ID NO: 693560 - RNA, 19 nt, Artificial Sequence
  Description of Artificial Sequence: Synthetic oligonucleotide
cugcuaauuccacugccuu

SEQ ID NO: 693561 - RNA, 19 nt, Artificial Sequence
  Description of Artificial Sequence: Synthetic oligonucleotide
gguccggaugaaacagaug

SEQ ID NO: 693562 - RNA, 19 nt, Artificial Sequence
  Description of Artificial Sequence: Synthetic oligonucleotide
gucgggcgaggacgaagac

SEQ ID NO: 693563 - RNA, 19 nt, Artificial Sequence
  Description of Artificial Sequence: Synthetic oligonucleotide
ccggcaaaggccauggccu

SEQ ID NO: 693564 - RNA, 19 nt, Artificial Sequence
  Description of Artificial Sequence: Synthetic oligonucleotide
accgucacuuggucaucuu

SEQ ID NO: 693565 - RNA, 19 nt, Artificial Sequence
  Description of Artificial Sequence: Synthetic oligonucleotide
acuccgucacuuggguaaa

SEQ ID NO: 693566 - RNA, 19 nt, Artificial Sequence
  Description of Artificial Sequence: Synthetic oligonucleotide
auugcgcggucgggcgagg

SEQ ID NO: 693567 - RNA, 19 nt, Artificial Sequence
  Description of Artificial Sequence: Synthetic oligonucleotide
cacgggcacacucaagaau

SEQ ID NO: 693568 - RNA, 19 nt, Artificial Sequence
  Description of Artificial Sequence: Synthetic oligonucleotide
cggugaaggcuuguuuugg

SEQ ID NO: 693569 - RNA, 19 nt, Artificial Sequence
  Description of Artificial Sequence: Synthetic oligonucleotide
ggaaauccucauuguugcu

SEQ ID NO: 693570 - RNA, 19 nt, Artificial Sequence
  Description of Artificial Sequence: Synthetic oligonucleotide
cugauccggcuugugguaa

SEQ ID NO: 693571 - RNA, 19 nt, Artificial Sequence
  Description of Artificial Sequence: Synthetic oligonucleotide
gccaugcgaaucuggucga

SEQ ID NO: 693572 - RNA, 19 nt, Artificial Sequence
  Description of Artificial Sequence: Synthetic oligonucleotide
caccuaugccaccuucaua

SEQ ID NO: 693573 - RNA, 19 nt, Artificial Sequence
  Description of Artificial Sequence: Synthetic oligonucleotide
cuggucgaaggcccgugua

SEQ ID NO: 693574 - RNA, 19 nt, Artificial Sequence
  Description of Artificial Sequence: Synthetic oligonucleotide
auccggccuuugguugcac

SEQ ID NO: 693575 - RNA, 19 nt, Artificial Sequence
  Description of Artificial Sequence: Synthetic oligonucleotide
cauggcccuuggagagcac

SEQ ID NO: 693576 - RNA, 19 nt, Artificial Sequence
  Description of Artificial Sequence: Synthetic oligonucleotide
gcugauccggcuuguggua

SEQ ID NO: 693577 - RNA, 19 nt, Artificial Sequence
  Description of Artificial Sequence: Synthetic oligonucleotide
caucggugaaggcuuguuu

SEQ ID NO: 693578 - RNA, 19 nt, Artificial Sequence
  Description of Artificial Sequence: Synthetic oligonucleotide
gcgauuggcuguguccuuc

SEQ ID NO: 693579 - RNA, 19 nt, Artificial Sequence
  Description of Artificial Sequence: Synthetic oligonucleotide
cacuuggguaaaagacagu

SEQ ID NO: 693580 - RNA, 19 nt, Artificial Sequence
  Description of Artificial Sequence: Synthetic oligonucleotide
gagcaccuugccagaaccu

SEQ ID NO: 693581 - RNA, 19 nt, Artificial Sequence
  Description of Artificial Sequence: Synthetic oligonucleotide
ggcgggugacagugacucc

SEQ ID NO: 693582 - RNA, 19 nt, Artificial Sequence
  Description of Artificial Sequence: Synthetic oligonucleotide
gcguggcccagcuuggcaa

SEQ ID NO: 693583 - RNA, 19 nt, Artificial Sequence
  Description of Artificial Sequence: Synthetic oligonucleotide
uugcgcggucgggcgagga

SEQ ID NO: 693584 - RNA, 19 nt, Artificial Sequence
  Description of Artificial Sequence: Synthetic oligonucleotide
cagcccuucuagggcuccc

SEQ ID NO: 693585 - RNA, 19 nt, Artificial Sequence
  Description of Artificial Sequence: Synthetic oligonucleotide
gcugccaugcgaaucuggu

SEQ ID NO: 693586 - RNA, 19 nt, Artificial Sequence
  Description of Artificial Sequence: Synthetic oligonucleotide
ggcccagacgguugacguc

SEQ ID NO: 693587 - RNA, 19 nt, Artificial Sequence
  Description of Artificial Sequence: Synthetic oligonucleotide
gggacagggugcccaucca

SEQ ID NO: 693588 - RNA, 19 nt, Artificial Sequence
  Description of Artificial Sequence: Synthetic oligonucleotide
ccuucguauuggcugcuaa

SEQ ID NO: 693589 - RNA, 19 nt, Artificial Sequence
  Description of Artificial Sequence: Synthetic oligonucleotide
gguagacguccagcuggug

SEQ ID NO: 693590 - RNA, 19 nt, Artificial Sequence
  Description of Artificial Sequence: Synthetic oligonucleotide
cguguggcgcagccuacag

SEQ ID NO: 693591 - RNA, 19 nt, Artificial Sequence
  Description of Artificial Sequence: Synthetic oligonucleotide
cuguugcguguggcgcagc

SEQ ID NO: 693592 - RNA, 19 nt, Artificial Sequence
  Description of Artificial Sequence: Synthetic oligonucleotide
ggcgaugauggcuguuggu

SEQ ID NO: 693593 - RNA, 19 nt, Artificial Sequence
  Description of Artificial Sequence: Synthetic oligonucleotide
gcgaugauggcuguugguu

SEQ ID NO: 693594 - RNA, 19 nt, Artificial Sequence
  Description of Artificial Sequence: Synthetic oligonucleotide
gggguccaacacacggaug

SEQ ID NO: 693595 - RNA, 19 nt, Artificial Sequence
  Description of Artificial Sequence: Synthetic oligonucleotide
cccacggcccuugaagguc

SEQ ID NO: 693596 - RNA, 19 nt, Artificial Sequence
  Description of Artificial Sequence: Synthetic oligonucleotide
cauuuucugggcggcuggu

SEQ ID NO: 693597 - RNA, 19 nt, Artificial Sequence
  Description of Artificial Sequence: Synthetic oligonucleotide
gccacuccgucacuugggu

SEQ ID NO: 693598 - RNA, 19 nt, Artificial Sequence
  Description of Artificial Sequence: Synthetic oligonucleotide
ggcccguguaaagaaggcu

SEQ ID NO: 693599 - RNA, 19 nt, Artificial Sequence
  Description of Artificial Sequence: Synthetic oligonucleotide
gcaccuugccagaaccucu

SEQ ID NO: 693600 - RNA, 19 nt, Artificial Sequence
  Description of Artificial Sequence: Synthetic oligonucleotide
caacgagguugucuagcuu

SEQ ID NO: 693601 - RNA, 19 nt, Artificial Sequence
  Description of Artificial Sequence: Synthetic oligonucleotide
ccuagcccuuggugacaag

SEQ ID NO: 693602 - RNA, 19 nt, Artificial Sequence
  Description of Artificial Sequence: Synthetic oligonucleotide
ggccuuucggguggcuauc

SEQ ID NO: 693603 - RNA, 19 nt, Artificial Sequence
  Description of Artificial Sequence: Synthetic oligonucleotide
caccgucacuuggucaucu

SEQ ID NO: 693604 - RNA, 19 nt, Artificial Sequence
  Description of Artificial Sequence: Synthetic oligonucleotide
cuacagcaaugcucaccau

SEQ ID NO: 693605 - RNA, 19 nt, Artificial Sequence
  Description of Artificial Sequence: Synthetic oligonucleotide
cgggcacacucaagaauga

SEQ ID NO: 693606 - RNA, 19 nt, Artificial Sequence
  Description of Artificial Sequence: Synthetic oligonucleotide
cacaucggugaaggcuugu

SEQ ID NO: 693607 - RNA, 19 nt, Artificial Sequence
  Description of Artificial Sequence: Synthetic oligonucleotide
gcucggcaauguagcacuc

SEQ ID NO: 693608 - RNA, 19 nt, Artificial Sequence
  Description of Artificial Sequence: Synthetic oligonucleotide
cagcaaugcucaccauguu

SEQ ID NO: 693609 - RNA, 19 nt, Artificial Sequence
  Description of Artificial Sequence: Synthetic oligonucleotide
cuccgucacuuggguaaaa

SEQ ID NO: 693610 - RNA, 19 nt, Artificial Sequence
  Description of Artificial Sequence: Synthetic oligonucleotide
gcguguggcgcagccuaca

SEQ ID NO: 693611 - RNA, 19 nt, Artificial Sequence
  Description of Artificial Sequence: Synthetic oligonucleotide
ccauugcgcggucgggcga

SEQ ID NO: 693612 - RNA, 19 nt, Artificial Sequence
  Description of Artificial Sequence: Synthetic oligonucleotide
gcgugccaaccaaaggccu

SEQ ID NO: 693613 - RNA, 19 nt, Artificial Sequence
  Description of Artificial Sequence: Synthetic oligonucleotide
cuuggcgaugauggcuguu

SEQ ID NO: 693614 - RNA, 19 nt, Artificial Sequence
  Description of Artificial Sequence: Synthetic oligonucleotide
ccaugccaagacuccuugu

SEQ ID NO: 693615 - RNA, 19 nt, Artificial Sequence
  Description of Artificial Sequence: Synthetic oligonucleotide
ggguuacaccagcuccaau

SEQ ID NO: 693616 - RNA, 19 nt, Artificial Sequence
  Description of Artificial Sequence: Synthetic oligonucleotide
ccacuccgucacuugggua

SEQ ID NO: 693617 - RNA, 19 nt, Artificial Sequence
  Description of Artificial Sequence: Synthetic oligonucleotide
ccacgaugauggcgugcca

SEQ ID NO: 693618 - RNA, 19 nt, Artificial Sequence
  Description of Artificial Sequence: Synthetic oligonucleotide
gccuuucggguggcuaucu

SEQ ID NO: 693619 - RNA, 19 nt, Artificial Sequence
  Description of Artificial Sequence: Synthetic oligonucleotide
cugucgccacuccgucacu

SEQ ID NO: 693620 - RNA, 19 nt, Artificial Sequence
  Description of Artificial Sequence: Synthetic oligonucleotide
ggcgauuggcuguguccuu

SEQ ID NO: 693621 - RNA, 19 nt, Artificial Sequence
  Description of Artificial Sequence: Synthetic oligonucleotide
cugggcggcugguccggau

SEQ ID NO: 693622 - RNA, 19 nt, Artificial Sequence
  Description of Artificial Sequence: Synthetic oligonucleotide
ccaugcgaaucuggucgaa

SEQ ID NO: 693623 - RNA, 19 nt, Artificial Sequence
  Description of Artificial Sequence: Synthetic oligonucleotide
ccagacgguugacgucaaa

SEQ ID NO: 693624 - RNA, 19 nt, Artificial Sequence
  Description of Artificial Sequence: Synthetic oligonucleotide
cccagacgguugacgucaa

SEQ ID NO: 693625 - RNA, 19 nt, Artificial Sequence
  Description of Artificial Sequence: Synthetic oligonucleotide
cugugaucccacggcccuu

SEQ ID NO: 693626 - RNA, 19 nt, Artificial Sequence
  Description of Artificial Sequence: Synthetic oligonucleotide
cacggcccuugaaggucuu

SEQ ID NO: 693627 - RNA, 19 nt, Artificial Sequence
  Description of Artificial Sequence: Synthetic oligonucleotide
ccuuucggguggcuaucuu

SEQ ID NO: 693628 - RNA, 19 nt, Artificial Sequence
  Description of Artificial Sequence: Synthetic oligonucleotide
cccuucguauuggcugcua

SEQ ID NO: 693629 - RNA, 19 nt, Artificial Sequence
  Description of Artificial Sequence: Synthetic oligonucleotide
cacuggcguggcccagcuu

SEQ ID NO: 693630 - RNA, 19 nt, Artificial Sequence
  Description of Artificial Sequence: Synthetic oligonucleotide
ucaaauaggucuuagaucu

SEQ ID NO: 693631 - RNA, 19 nt, Artificial Sequence
  Description of Artificial Sequence: Synthetic oligonucleotide
aagaucuuguguuccaucc

SEQ ID NO: 693632 - RNA, 19 nt, Artificial Sequence
  Description of Artificial Sequence: Synthetic oligonucleotide
aaaauucuaccaccgaagg

SEQ ID NO: 693633 - RNA, 19 nt, Artificial Sequence
  Description of Artificial Sequence: Synthetic oligonucleotide
aauaaggauccuucaaaac

SEQ ID NO: 693634 - RNA, 19 nt, Artificial Sequence
  Description of Artificial Sequence: Synthetic oligonucleotide
aagacuuuugcucagauua

SEQ ID NO: 693635 - RNA, 19 nt, Artificial Sequence
  Description of Artificial Sequence: Synthetic oligonucleotide
agcaacucaacucaacucc

SEQ ID NO: 693636 - RNA, 19 nt, Artificial Sequence
  Description of Artificial Sequence: Synthetic oligonucleotide
uaaugcaggaauaugagga

SEQ ID NO: 693637 - RNA, 19 nt, Artificial Sequence
  Description of Artificial Sequence: Synthetic oligonucleotide
acuaagaggauccauuugg

SEQ ID NO: 693638 - RNA, 19 nt, Artificial Sequence
  Description of Artificial Sequence: Synthetic oligonucleotide
aauuaugucuacaugauca

SEQ ID NO: 693639 - RNA, 19 nt, Artificial Sequence
  Description of Artificial Sequence: Synthetic oligonucleotide
uuucuuaugagguacuugc

SEQ ID NO: 693640 - RNA, 19 nt, Artificial Sequence
  Description of Artificial Sequence: Synthetic oligonucleotide
aauucuaccaccgaaggug

SEQ ID NO: 693641 - RNA, 19 nt, Artificial Sequence
  Description of Artificial Sequence: Synthetic oligonucleotide
ucagguacgaaggagaggg

SEQ ID NO: 693642 - RNA, 19 nt, Artificial Sequence
  Description of Artificial Sequence: Synthetic oligonucleotide
auaaccaucugaucggccc

SEQ ID NO: 693643 - RNA, 19 nt, Artificial Sequence
  Description of Artificial Sequence: Synthetic oligonucleotide
ucucauauuuuccaaaugu

SEQ ID NO: 693644 - RNA, 19 nt, Artificial Sequence
  Description of Artificial Sequence: Synthetic oligonucleotide
ugguuuauccacuaaaaug

SEQ ID NO: 693645 - RNA, 19 nt, Artificial Sequence
  Description of Artificial Sequence: Synthetic oligonucleotide
aagucaucuagucucaucu

SEQ ID NO: 693646 - RNA, 19 nt, Artificial Sequence
  Description of Artificial Sequence: Synthetic oligonucleotide
aaacacggaacuccgacuc

SEQ ID NO: 693647 - RNA, 19 nt, Artificial Sequence
  Description of Artificial Sequence: Synthetic oligonucleotide
ucagaaucaaguacugggg

SEQ ID NO: 693648 - RNA, 19 nt, Artificial Sequence
  Description of Artificial Sequence: Synthetic oligonucleotide
uuuauucaccuaaugcagg

SEQ ID NO: 693649 - RNA, 19 nt, Artificial Sequence
  Description of Artificial Sequence: Synthetic oligonucleotide
ucuagucucaucuuuggag

SEQ ID NO: 693650 - RNA, 19 nt, Artificial Sequence
  Description of Artificial Sequence: Synthetic oligonucleotide
uuacaugucaaaauucuac

SEQ ID NO: 693651 - RNA, 19 nt, Artificial Sequence
  Description of Artificial Sequence: Synthetic oligonucleotide
aaugucauaacgguagaag

SEQ ID NO: 693652 - RNA, 19 nt, Artificial Sequence
  Description of Artificial Sequence: Synthetic oligonucleotide
uccaauucgagacuggaug

SEQ ID NO: 693653 - RNA, 19 nt, Artificial Sequence
  Description of Artificial Sequence: Synthetic oligonucleotide
uuuacuaaggugucaaaga

SEQ ID NO: 693654 - RNA, 19 nt, Artificial Sequence
  Description of Artificial Sequence: Synthetic oligonucleotide
ugucaaaauucuaccaccg

SEQ ID NO: 693655 - RNA, 19 nt, Artificial Sequence
  Description of Artificial Sequence: Synthetic oligonucleotide
cuuuauucaccuaaugcag

SEQ ID NO: 693656 - RNA, 19 nt, Artificial Sequence
  Description of Artificial Sequence: Synthetic oligonucleotide
aauccauacacaucugaug

SEQ ID NO: 693657 - RNA, 19 nt, Artificial Sequence
  Description of Artificial Sequence: Synthetic oligonucleotide
uugaucauuugguuuaucc

SEQ ID NO: 693658 - RNA, 19 nt, Artificial Sequence
  Description of Artificial Sequence: Synthetic oligonucleotide
uagaagucacuuuucagag

SEQ ID NO: 693659 - RNA, 19 nt, Artificial Sequence
  Description of Artificial Sequence: Synthetic oligonucleotide
cugacugauauacugauug

SEQ ID NO: 693660 - RNA, 19 nt, Artificial Sequence
  Description of Artificial Sequence: Synthetic oligonucleotide
uaaguaaucuuuugaaggu

SEQ ID NO: 693661 - RNA, 19 nt, Artificial Sequence
  Description of Artificial Sequence: Synthetic oligonucleotide
agauaagacauguauuuca

SEQ ID NO: 693662 - RNA, 19 nt, Artificial Sequence
  Description of Artificial Sequence: Synthetic oligonucleotide
ucagauuaucuuuugcagc

SEQ ID NO: 693663 - RNA, 19 nt, Artificial Sequence
  Description of Artificial Sequence: Synthetic oligonucleotide
ugucauaaauccagaauga

SEQ ID NO: 693664 - RNA, 19 nt, Artificial Sequence
  Description of Artificial Sequence: Synthetic oligonucleotide
aguugaaacucuuuugucu

SEQ ID NO: 693665 - RNA, 19 nt, Artificial Sequence
  Description of Artificial Sequence: Synthetic oligonucleotide
ucauaaacgagcugaugag

SEQ ID NO: 693666 - RNA, 19 nt, Artificial Sequence
  Description of Artificial Sequence: Synthetic oligonucleotide
aguugaaugcaaacaagcc

SEQ ID NO: 693667 - RNA, 19 nt, Artificial Sequence
  Description of Artificial Sequence: Synthetic oligonucleotide
uucgcaagcaucaaaguau

SEQ ID NO: 693668 - RNA, 19 nt, Artificial Sequence
  Description of Artificial Sequence: Synthetic oligonucleotide
uuugguuuauccacuaaaa

SEQ ID NO: 693669 - RNA, 19 nt, Artificial Sequence
  Description of Artificial Sequence: Synthetic oligonucleotide
aaaccuuggacauggcucu

SEQ ID NO: 693670 - RNA, 19 nt, Artificial Sequence
  Description of Artificial Sequence: Synthetic oligonucleotide
uguagauuugccuccguug

SEQ ID NO: 693671 - RNA, 19 nt, Artificial Sequence
  Description of Artificial Sequence: Synthetic oligonucleotide
auauacugauugaacaagc

SEQ ID NO: 693672 - RNA, 19 nt, Artificial Sequence
  Description of Artificial Sequence: Synthetic oligonucleotide
cuugaucauucuuauagac

SEQ ID NO: 693673 - RNA, 19 nt, Artificial Sequence
  Description of Artificial Sequence: Synthetic oligonucleotide
uguaauauucugaacuaua

SEQ ID NO: 693674 - RNA, 19 nt, Artificial Sequence
  Description of Artificial Sequence: Synthetic oligonucleotide
aaacaaauaaacagucucu

SEQ ID NO: 693675 - RNA, 19 nt, Artificial Sequence
  Description of Artificial Sequence: Synthetic oligonucleotide
uucaaauaggucuuagauc

SEQ ID NO: 693676 - RNA, 19 nt, Artificial Sequence
  Description of Artificial Sequence: Synthetic oligonucleotide
aacacauauaagcaacgau

SEQ ID NO: 693677 - RNA, 19 nt, Artificial Sequence
  Description of Artificial Sequence: Synthetic oligonucleotide
aacuccccaguuuacagug

SEQ ID NO: 693678 - RNA, 19 nt, Artificial Sequence
  Description of Artificial Sequence: Synthetic oligonucleotide
uuucggaggagucaugcug

SEQ ID NO: 693679 - RNA, 19 nt, Artificial Sequence
  Description of Artificial Sequence: Synthetic oligonucleotide
ugaucauuugguuuaucca

SEQ ID NO: 693680 - RNA, 19 nt, Artificial Sequence
  Description of Artificial Sequence: Synthetic oligonucleotide
aacgguagaagucacuuuu

SEQ ID NO: 693681 - RNA, 19 nt, Artificial Sequence
  Description of Artificial Sequence: Synthetic oligonucleotide
aucguaacuaaagaaauca

SEQ ID NO: 693682 - RNA, 19 nt, Artificial Sequence
  Description of Artificial Sequence: Synthetic oligonucleotide
uucaaauugcagacauggg

SEQ ID NO: 693683 - RNA, 19 nt, Artificial Sequence
  Description of Artificial Sequence: Synthetic oligonucleotide
uaugacacgaucuggcacu

SEQ ID NO: 693684 - RNA, 19 nt, Artificial Sequence
  Description of Artificial Sequence: Synthetic oligonucleotide
aaugaaccuuguguaauuc

SEQ ID NO: 693685 - RNA, 19 nt, Artificial Sequence
  Description of Artificial Sequence: Synthetic oligonucleotide
gaagguguagaucauaugu

SEQ ID NO: 693686 - RNA, 19 nt, Artificial Sequence
  Description of Artificial Sequence: Synthetic oligonucleotide
agaaucaaguacuggggag

SEQ ID NO: 693687 - RNA, 19 nt, Artificial Sequence
  Description of Artificial Sequence: Synthetic oligonucleotide
caaacacauauaagcaacg

SEQ ID NO: 693688 - RNA, 19 nt, Artificial Sequence
  Description of Artificial Sequence: Synthetic oligonucleotide
gaaucaaguacuggggagg

SEQ ID NO: 693689 - RNA, 19 nt, Artificial Sequence
  Description of Artificial Sequence: Synthetic oligonucleotide
agaggguuaaaacuuguga

SEQ ID NO: 693690 - RNA, 19 nt, Artificial Sequence
  Description of Artificial Sequence: Synthetic oligonucleotide
auuaugucuacaugaucag

SEQ ID NO: 693691 - RNA, 19 nt, Artificial Sequence
  Description of Artificial Sequence: Synthetic oligonucleotide
ugaauuucuaacguucucu

SEQ ID NO: 693692 - RNA, 19 nt, Artificial Sequence
  Description of Artificial Sequence: Synthetic oligonucleotide
uagagauacauguccacug

SEQ ID NO: 693693 - RNA, 19 nt, Artificial Sequence
  Description of Artificial Sequence: Synthetic oligonucleotide
uccacaucguaacuaaaga

SEQ ID NO: 693694 - RNA, 19 nt, Artificial Sequence
  Description of Artificial Sequence: Synthetic oligonucleotide
aaguaaucuuuugaagguc

SEQ ID NO: 693695 - RNA, 19 nt, Artificial Sequence
  Description of Artificial Sequence: Synthetic oligonucleotide
ugugaaaucugauccagau

SEQ ID NO: 693696 - RNA, 19 nt, Artificial Sequence
  Description of Artificial Sequence: Synthetic oligonucleotide
uucucgaagaagcuuccag

SEQ ID NO: 693697 - RNA, 19 nt, Artificial Sequence
  Description of Artificial Sequence: Synthetic oligonucleotide
aacuauagcaggccuuuca

SEQ ID NO: 693698 - RNA, 19 nt, Artificial Sequence
  Description of Artificial Sequence: Synthetic oligonucleotide
uacuaaggugucaaagagc

SEQ ID NO: 693699 - RNA, 19 nt, Artificial Sequence
  Description of Artificial Sequence: Synthetic oligonucleotide
ugugauccacaucugaaaa

SEQ ID NO: 693700 - RNA, 19 nt, Artificial Sequence
  Description of Artificial Sequence: Synthetic oligonucleotide
agcuauuccucacaauguc

SEQ ID NO: 693701 - RNA, 19 nt, Artificial Sequence
  Description of Artificial Sequence: Synthetic oligonucleotide
gacacgaucuggcacuagg

SEQ ID NO: 693702 - RNA, 19 nt, Artificial Sequence
  Description of Artificial Sequence: Synthetic oligonucleotide
agaucuuguguuccauccc

SEQ ID NO: 693703 - RNA, 19 nt, Artificial Sequence
  Description of Artificial Sequence: Synthetic oligonucleotide
aguccuuuucaaucaacuc

SEQ ID NO: 693704 - RNA, 19 nt, Artificial Sequence
  Description of Artificial Sequence: Synthetic oligonucleotide
aaauucuaccaccgaaggu

SEQ ID NO: 693705 - RNA, 19 nt, Artificial Sequence
  Description of Artificial Sequence: Synthetic oligonucleotide
cucuucgcaagcaucaaag

SEQ ID NO: 693706 - RNA, 19 nt, Artificial Sequence
  Description of Artificial Sequence: Synthetic oligonucleotide
cuaagaggauccauuuggg

SEQ ID NO: 693707 - RNA, 19 nt, Artificial Sequence
  Description of Artificial Sequence: Synthetic oligonucleotide
aguaacauccagguauugg

SEQ ID NO: 693708 - RNA, 19 nt, Artificial Sequence
  Description of Artificial Sequence: Synthetic oligonucleotide
accagauugccuuucggag

SEQ ID NO: 693709 - RNA, 19 nt, Artificial Sequence
  Description of Artificial Sequence: Synthetic oligonucleotide
uugcgcauaggugugaucc

SEQ ID NO: 693710 - RNA, 19 nt, Artificial Sequence
  Description of Artificial Sequence: Synthetic oligonucleotide
uuacaguccuuuucaauca

SEQ ID NO: 693711 - RNA, 19 nt, Artificial Sequence
  Description of Artificial Sequence: Synthetic oligonucleotide
gauacauguccacugguuc

SEQ ID NO: 693712 - RNA, 19 nt, Artificial Sequence
  Description of Artificial Sequence: Synthetic oligonucleotide
aauccugucauuggcacca

SEQ ID NO: 693713 - RNA, 19 nt, Artificial Sequence
  Description of Artificial Sequence: Synthetic oligonucleotide
auuuuaugacacgaucugg

SEQ ID NO: 693714 - RNA, 19 nt, Artificial Sequence
  Description of Artificial Sequence: Synthetic oligonucleotide
guuuacuaaggugucaaag

SEQ ID NO: 693715 - RNA, 19 nt, Artificial Sequence
  Description of Artificial Sequence: Synthetic oligonucleotide
agauugaucauuugguuua

SEQ ID NO: 693716 - RNA, 19 nt, Artificial Sequence
  Description of Artificial Sequence: Synthetic oligonucleotide
uuuauccacuaaaauguuc

SEQ ID NO: 693717 - RNA, 19 nt, Artificial Sequence
  Description of Artificial Sequence: Synthetic oligonucleotide
aaauaggucuuagaucucu

SEQ ID NO: 693718 - RNA, 19 nt, Artificial Sequence
  Description of Artificial Sequence: Synthetic oligonucleotide
ucuaccagauugccuuucg

SEQ ID NO: 693719 - RNA, 19 nt, Artificial Sequence
  Description of Artificial Sequence: Synthetic oligonucleotide
aacucaacuccccaguuua

SEQ ID NO: 693720 - RNA, 19 nt, Artificial Sequence
  Description of Artificial Sequence: Synthetic oligonucleotide
uuaugacacgaucuggcac

SEQ ID NO: 693721 - RNA, 19 nt, Artificial Sequence
  Description of Artificial Sequence: Synthetic oligonucleotide
aauaaccaucugaucggcc

SEQ ID NO: 693722 - RNA, 19 nt, Artificial Sequence
  Description of Artificial Sequence: Synthetic oligonucleotide
caaguaacggcccaaugug

SEQ ID NO: 693723 - RNA, 19 nt, Artificial Sequence
  Description of Artificial Sequence: Synthetic oligonucleotide
ugaugaucaaacaccaguu

SEQ ID NO: 693724 - RNA, 19 nt, Artificial Sequence
  Description of Artificial Sequence: Synthetic oligonucleotide
ugaaccuuguguaauucau

SEQ ID NO: 693725 - RNA, 19 nt, Artificial Sequence
  Description of Artificial Sequence: Synthetic oligonucleotide
uuugaacagagcugaggcc

SEQ ID NO: 693726 - RNA, 19 nt, Artificial Sequence
  Description of Artificial Sequence: Synthetic oligonucleotide
ucugaacuauagcaggccu

SEQ ID NO: 693727 - RNA, 19 nt, Artificial Sequence
  Description of Artificial Sequence: Synthetic oligonucleotide
agaggauccauuugggccu

SEQ ID NO: 693728 - RNA, 19 nt, Artificial Sequence
  Description of Artificial Sequence: Synthetic oligonucleotide
aaagccuagagcugugaaa

SEQ ID NO: 693729 - RNA, 19 nt, Artificial Sequence
  Description of Artificial Sequence: Synthetic oligonucleotide
aaacagucucugucugaac

SEQ ID NO: 693730 - RNA, 19 nt, Artificial Sequence
  Description of Artificial Sequence: Synthetic oligonucleotide
uugguuuauccacuaaaau

SEQ ID NO: 693731 - RNA, 19 nt, Artificial Sequence
  Description of Artificial Sequence: Synthetic oligonucleotide
ugaauccugucauuggcac

SEQ ID NO: 693732 - RNA, 19 nt, Artificial Sequence
  Description of Artificial Sequence: Synthetic oligonucleotide
aaacacauauaagcaacga

SEQ ID NO: 693733 - RNA, 19 nt, Artificial Sequence
  Description of Artificial Sequence: Synthetic oligonucleotide
acauuuuaugacacgaucu

SEQ ID NO: 693734 - RNA, 19 nt, Artificial Sequence
  Description of Artificial Sequence: Synthetic oligonucleotide
ugcaggaauaugaggaaaa

SEQ ID NO: 693735 - RNA, 19 nt, Artificial Sequence
  Description of Artificial Sequence: Synthetic oligonucleotide
aacucaacucaacucccca

SEQ ID NO: 693736 - RNA, 19 nt, Artificial Sequence
  Description of Artificial Sequence: Synthetic oligonucleotide
ggugucaaugucauaacgg

SEQ ID NO: 693737 - RNA, 19 nt, Artificial Sequence
  Description of Artificial Sequence: Synthetic oligonucleotide
uacaggagucuucucgaag

SEQ ID NO: 693738 - RNA, 19 nt, Artificial Sequence
  Description of Artificial Sequence: Synthetic oligonucleotide
ucagugucucuagagauac

SEQ ID NO: 693739 - RNA, 19 nt, Artificial Sequence
  Description of Artificial Sequence: Synthetic oligonucleotide
ggaauaugaggaaaagggg

SEQ ID NO: 693740 - RNA, 19 nt, Artificial Sequence
  Description of Artificial Sequence: Synthetic oligonucleotide
cuagacaacagcucuguca

SEQ ID NO: 693741 - RNA, 19 nt, Artificial Sequence
  Description of Artificial Sequence: Synthetic oligonucleotide
ucggcuuauacuccugcug

SEQ ID NO: 693742 - RNA, 19 nt, Artificial Sequence
  Description of Artificial Sequence: Synthetic oligonucleotide
ucuagagauacauguccac

SEQ ID NO: 693743 - RNA, 19 nt, Artificial Sequence
  Description of Artificial Sequence: Synthetic oligonucleotide
ucugaugaucaaacaccag

SEQ ID NO: 693744 - RNA, 19 nt, Artificial Sequence
  Description of Artificial Sequence: Synthetic oligonucleotide
ucgcaagcaucaaaguaug

SEQ ID NO: 693745 - RNA, 19 nt, Artificial Sequence
  Description of Artificial Sequence: Synthetic oligonucleotide
uaccagauugccuuucgga

SEQ ID NO: 693746 - RNA, 19 nt, Artificial Sequence
  Description of Artificial Sequence: Synthetic oligonucleotide
ugcgacgucaccucugccc

SEQ ID NO: 693747 - RNA, 19 nt, Artificial Sequence
  Description of Artificial Sequence: Synthetic oligonucleotide
agaaugaauuucuaacguu

SEQ ID NO: 693748 - RNA, 19 nt, Artificial Sequence
  Description of Artificial Sequence: Synthetic oligonucleotide
cacaucguaacuaaagaaa

SEQ ID NO: 693749 - RNA, 19 nt, Artificial Sequence
  Description of Artificial Sequence: Synthetic oligonucleotide
caggaauaugaggaaaagg

SEQ ID NO: 693750 - RNA, 19 nt, Artificial Sequence
  Description of Artificial Sequence: Synthetic oligonucleotide
uucggaggagucaugcugu

SEQ ID NO: 693751 - RNA, 19 nt, Artificial Sequence
  Description of Artificial Sequence: Synthetic oligonucleotide
uuacagugugaugaggucu

SEQ ID NO: 693752 - RNA, 19 nt, Artificial Sequence
  Description of Artificial Sequence: Synthetic oligonucleotide
acacauauaagcaacgauu

SEQ ID NO: 693753 - RNA, 19 nt, Artificial Sequence
  Description of Artificial Sequence: Synthetic oligonucleotide
cacgcaaacacggaacucc

SEQ ID NO: 693754 - RNA, 19 nt, Artificial Sequence
  Description of Artificial Sequence: Synthetic oligonucleotide
auaaacgagcugaugagca

SEQ ID NO: 693755 - RNA, 19 nt, Artificial Sequence
  Description of Artificial Sequence: Synthetic oligonucleotide
ucauucaaauaggucuuag

SEQ ID NO: 693756 - RNA, 19 nt, Artificial Sequence
  Description of Artificial Sequence: Synthetic oligonucleotide
guagauuugccuccguuga

SEQ ID NO: 693757 - RNA, 19 nt, Artificial Sequence
  Description of Artificial Sequence: Synthetic oligonucleotide
agccaccaaacaaauaaac

SEQ ID NO: 693758 - RNA, 19 nt, Artificial Sequence
  Description of Artificial Sequence: Synthetic oligonucleotide
cauaaacgagcugaugagc

SEQ ID NO: 693759 - RNA, 19 nt, Artificial Sequence
  Description of Artificial Sequence: Synthetic oligonucleotide
uuucaagguaaaugucucu

SEQ ID NO: 693760 - RNA, 19 nt, Artificial Sequence
  Description of Artificial Sequence: Synthetic oligonucleotide
ugcucuuaggaugaucuga

SEQ ID NO: 693761 - RNA, 19 nt, Artificial Sequence
  Description of Artificial Sequence: Synthetic oligonucleotide
aacgagcugaugagcaaac

SEQ ID NO: 693762 - RNA, 19 nt, Artificial Sequence
  Description of Artificial Sequence: Synthetic oligonucleotide
uggucgguuaucuucucca

SEQ ID NO: 693763 - RNA, 19 nt, Artificial Sequence
  Description of Artificial Sequence: Synthetic oligonucleotide
uucuuaugagguacuugca

SEQ ID NO: 693764 - RNA, 19 nt, Artificial Sequence
  Description of Artificial Sequence: Synthetic oligonucleotide
aguaaucuuuugaaggucu

SEQ ID NO: 693765 - RNA, 19 nt, Artificial Sequence
  Description of Artificial Sequence: Synthetic oligonucleotide
ugugauaauaaggauccuu

SEQ ID NO: 693766 - RNA, 19 nt, Artificial Sequence
  Description of Artificial Sequence: Synthetic oligonucleotide
uaaacagucucugucugaa

SEQ ID NO: 693767 - RNA, 19 nt, Artificial Sequence
  Description of Artificial Sequence: Synthetic oligonucleotide
auagcaggccuuucaagcu

SEQ ID NO: 693768 - RNA, 19 nt, Artificial Sequence
  Description of Artificial Sequence: Synthetic oligonucleotide
ucuaacguucucuucccuc

SEQ ID NO: 693769 - RNA, 19 nt, Artificial Sequence
  Description of Artificial Sequence: Synthetic oligonucleotide
accuaaugcaggaauauga

SEQ ID NO: 693770 - RNA, 19 nt, Artificial Sequence
  Description of Artificial Sequence: Synthetic oligonucleotide
auucaccuaaugcaggaau

SEQ ID NO: 693771 - RNA, 19 nt, Artificial Sequence
  Description of Artificial Sequence: Synthetic oligonucleotide
agcaucaaaguauguuuca

SEQ ID NO: 693772 - RNA, 19 nt, Artificial Sequence
  Description of Artificial Sequence: Synthetic oligonucleotide
augagcaaaccuuggacau

SEQ ID NO: 693773 - RNA, 19 nt, Artificial Sequence
  Description of Artificial Sequence: Synthetic oligonucleotide
ucaaaacucugaugcaguc

SEQ ID NO: 693774 - RNA, 19 nt, Artificial Sequence
  Description of Artificial Sequence: Synthetic oligonucleotide
ugccauuacaugucaaaau

SEQ ID NO: 693775 - RNA, 19 nt, Artificial Sequence
  Description of Artificial Sequence: Synthetic oligonucleotide
agcaagauuuuccuggauu

SEQ ID NO: 693776 - RNA, 19 nt, Artificial Sequence
  Description of Artificial Sequence: Synthetic oligonucleotide
cuauagcaggccuuucaag

SEQ ID NO: 693777 - RNA, 19 nt, Artificial Sequence
  Description of Artificial Sequence: Synthetic oligonucleotide
uucuuugcgcauaggugug

SEQ ID NO: 693778 - RNA, 19 nt, Artificial Sequence
  Description of Artificial Sequence: Synthetic oligonucleotide
aagccacuagacaacagcu

SEQ ID NO: 693779 - RNA, 19 nt, Artificial Sequence
  Description of Artificial Sequence: Synthetic oligonucleotide
acucaacucaacuccccag

SEQ ID NO: 693780 - RNA, 19 nt, Artificial Sequence
  Description of Artificial Sequence: Synthetic oligonucleotide
cuacacaacuucagugacc

SEQ ID NO: 693781 - RNA, 19 nt, Artificial Sequence
  Description of Artificial Sequence: Synthetic oligonucleotide
ucguaacuaaagaaaucau

SEQ ID NO: 693782 - RNA, 19 nt, Artificial Sequence
  Description of Artificial Sequence: Synthetic oligonucleotide
caucguaacuaaagaaauc

SEQ ID NO: 693783 - RNA, 19 nt, Artificial Sequence
  Description of Artificial Sequence: Synthetic oligonucleotide
aguucuuugcgcauaggug

SEQ ID NO: 693784 - RNA, 19 nt, Artificial Sequence
  Description of Artificial Sequence: Synthetic oligonucleotide
gguuuauccacuaaaaugu

SEQ ID NO: 693785 - RNA, 19 nt, Artificial Sequence
  Description of Artificial Sequence: Synthetic oligonucleotide
guucuuugcgcauaggugu

SEQ ID NO: 693786 - RNA, 19 nt, Artificial Sequence
  Description of Artificial Sequence: Synthetic oligonucleotide
aaucaaguacuggggagga

SEQ ID NO: 693787 - RNA, 19 nt, Artificial Sequence
  Description of Artificial Sequence: Synthetic oligonucleotide
uuaggaugaucugacucca

SEQ ID NO: 693788 - RNA, 19 nt, Artificial Sequence
  Description of Artificial Sequence: Synthetic oligonucleotide
gucauaacgguagaaguca

SEQ ID NO: 693789 - RNA, 19 nt, Artificial Sequence
  Description of Artificial Sequence: Synthetic oligonucleotide
ugauugaacaagccaucau

SEQ ID NO: 693790 - RNA, 19 nt, Artificial Sequence
  Description of Artificial Sequence: Synthetic oligonucleotide
auaaugaaccuuguguaau

SEQ ID NO: 693791 - RNA, 19 nt, Artificial Sequence
  Description of Artificial Sequence: Synthetic oligonucleotide
acuauagcaggccuuucaa

SEQ ID NO: 693792 - RNA, 19 nt, Artificial Sequence
  Description of Artificial Sequence: Synthetic oligonucleotide
cuccauccaccuuuggugc

SEQ ID NO: 693793 - RNA, 19 nt, Artificial Sequence
  Description of Artificial Sequence: Synthetic oligonucleotide
ucaucauaaacgagcugau

SEQ ID NO: 693794 - RNA, 19 nt, Artificial Sequence
  Description of Artificial Sequence: Synthetic oligonucleotide
aguuuacagugugaugagg

SEQ ID NO: 693795 - RNA, 19 nt, Artificial Sequence
  Description of Artificial Sequence: Synthetic oligonucleotide
ugaaaagccuagagcugug

SEQ ID NO: 693796 - RNA, 19 nt, Artificial Sequence
  Description of Artificial Sequence: Synthetic oligonucleotide
cauacacaucugaugauca

SEQ ID NO: 693797 - RNA, 19 nt, Artificial Sequence
  Description of Artificial Sequence: Synthetic oligonucleotide
ucauaacgguagaagucac

SEQ ID NO: 693798 - RNA, 19 nt, Artificial Sequence
  Description of Artificial Sequence: Synthetic oligonucleotide
aacucugaugcaguccuca

SEQ ID NO: 693799 - RNA, 19 nt, Artificial Sequence
  Description of Artificial Sequence: Synthetic oligonucleotide
agcauuacaggagucuucu

SEQ ID NO: 693800 - RNA, 19 nt, Artificial Sequence
  Description of Artificial Sequence: Synthetic oligonucleotide
agguguagaucauauguuu

SEQ ID NO: 693801 - RNA, 19 nt, Artificial Sequence
  Description of Artificial Sequence: Synthetic oligonucleotide
acaucguaacuaaagaaau

SEQ ID NO: 693802 - RNA, 19 nt, Artificial Sequence
  Description of Artificial Sequence: Synthetic oligonucleotide
augaaccuuguguaauuca

SEQ ID NO: 693803 - RNA, 19 nt, Artificial Sequence
  Description of Artificial Sequence: Synthetic oligonucleotide
ucuuagaucucuggccacc

SEQ ID NO: 693804 - RNA, 19 nt, Artificial Sequence
  Description of Artificial Sequence: Synthetic oligonucleotide
agaagcuuccagguuugac

SEQ ID NO: 693805 - RNA, 19 nt, Artificial Sequence
  Description of Artificial Sequence: Synthetic oligonucleotide
aauaggucuuagaucucug

SEQ ID NO: 693806 - RNA, 19 nt, Artificial Sequence
  Description of Artificial Sequence: Synthetic oligonucleotide
ugcugacugauauacugau

SEQ ID NO: 693807 - RNA, 19 nt, Artificial Sequence
  Description of Artificial Sequence: Synthetic oligonucleotide
uccaaguaacggcccaaug

SEQ ID NO: 693808 - RNA, 19 nt, Artificial Sequence
  Description of Artificial Sequence: Synthetic oligonucleotide
uuugccuccguugaauguc

SEQ ID NO: 693809 - RNA, 19 nt, Artificial Sequence
  Description of Artificial Sequence: Synthetic oligonucleotide
cugucugaacaucaauaac

SEQ ID NO: 693810 - RNA, 19 nt, Artificial Sequence
  Description of Artificial Sequence: Synthetic oligonucleotide
aggauaguugcucucugaa

SEQ ID NO: 693811 - RNA, 19 nt, Artificial Sequence
  Description of Artificial Sequence: Synthetic oligonucleotide
uaaugaaccuuguguaauu

SEQ ID NO: 693812 - RNA, 19 nt, Artificial Sequence
  Description of Artificial Sequence: Synthetic oligonucleotide
auaacgguagaagucacuu

SEQ ID NO: 693813 - RNA, 19 nt, Artificial Sequence
  Description of Artificial Sequence: Synthetic oligonucleotide
uacacaucugaugaucaaa

SEQ ID NO: 693814 - RNA, 19 nt, Artificial Sequence
  Description of Artificial Sequence: Synthetic oligonucleotide
aggucuacacaacuucagu

SEQ ID NO: 693815 - RNA, 19 nt, Artificial Sequence
  Description of Artificial Sequence: Synthetic oligonucleotide
gaccagaagucaucuaguc

SEQ ID NO: 693816 - RNA, 19 nt, Artificial Sequence
  Description of Artificial Sequence: Synthetic oligonucleotide
aggccuuucaagcuucaga

SEQ ID NO: 693817 - RNA, 19 nt, Artificial Sequence
  Description of Artificial Sequence: Synthetic oligonucleotide
aaacgagcugaugagcaaa

SEQ ID NO: 693818 - RNA, 19 nt, Artificial Sequence
  Description of Artificial Sequence: Synthetic oligonucleotide
ugaacuauagcaggccuuu

SEQ ID NO: 693819 - RNA, 19 nt, Artificial Sequence
  Description of Artificial Sequence: Synthetic oligonucleotide
ugagcccagcaacucaacu

SEQ ID NO: 693820 - RNA, 19 nt, Artificial Sequence
  Description of Artificial Sequence: Synthetic oligonucleotide
gagauuugcuguuccucac

SEQ ID NO: 693821 - RNA, 19 nt, Artificial Sequence
  Description of Artificial Sequence: Synthetic oligonucleotide
acuagacaacagcucuguc

SEQ ID NO: 693822 - RNA, 19 nt, Artificial Sequence
  Description of Artificial Sequence: Synthetic oligonucleotide
auugaacaagccaucauuu

SEQ ID NO: 693823 - RNA, 19 nt, Artificial Sequence
  Description of Artificial Sequence: Synthetic oligonucleotide
uugaaugucaaugcacauu

SEQ ID NO: 693824 - RNA, 19 nt, Artificial Sequence
  Description of Artificial Sequence: Synthetic oligonucleotide
ugaggucuaccagauugcc

SEQ ID NO: 693825 - RNA, 19 nt, Artificial Sequence
  Description of Artificial Sequence: Synthetic oligonucleotide
caacucaacucaacucccc

SEQ ID NO: 693826 - RNA, 19 nt, Artificial Sequence
  Description of Artificial Sequence: Synthetic oligonucleotide
uaaacgagcugaugagcaa

SEQ ID NO: 693827 - RNA, 19 nt, Artificial Sequence
  Description of Artificial Sequence: Synthetic oligonucleotide
gaaggucuacacaacuuca

SEQ ID NO: 693828 - RNA, 19 nt, Artificial Sequence
  Description of Artificial Sequence: Synthetic oligonucleotide
aagguguagaucauauguu

SEQ ID NO: 693829 - RNA, 19 nt, Artificial Sequence
  Description of Artificial Sequence: Synthetic oligonucleotide
gaauccaaguaacggccca

SEQ ID NO: 693830 - RNA, 19 nt, Artificial Sequence
  Description of Artificial Sequence: Synthetic oligonucleotide
cugaugaucaaacaccagu

SEQ ID NO: 693831 - RNA, 19 nt, Artificial Sequence
  Description of Artificial Sequence: Synthetic oligonucleotide
cagauuaucuuuugcagcu

SEQ ID NO: 693832 - RNA, 19 nt, Artificial Sequence
  Description of Artificial Sequence: Synthetic oligonucleotide
cuaccagauugccuuucgg

SEQ ID NO: 693833 - RNA, 19 nt, Artificial Sequence
  Description of Artificial Sequence: Synthetic oligonucleotide
uugcaaugccucaguaagu

SEQ ID NO: 693834 - RNA, 19 nt, Artificial Sequence
  Description of Artificial Sequence: Synthetic oligonucleotide
cucuagagauacaugucca

SEQ ID NO: 693835 - RNA, 19 nt, Artificial Sequence
  Description of Artificial Sequence: Synthetic oligonucleotide
ggauaguugcucucugaag

SEQ ID NO: 693836 - RNA, 19 nt, Artificial Sequence
  Description of Artificial Sequence: Synthetic oligonucleotide
caauaaccaucugaucggc

SEQ ID NO: 693837 - RNA, 19 nt, Artificial Sequence
  Description of Artificial Sequence: Synthetic oligonucleotide
cagcaacucaacucaacuc

SEQ ID NO: 693838 - RNA, 19 nt, Artificial Sequence
  Description of Artificial Sequence: Synthetic oligonucleotide
aaggauccuucaaaacucu

SEQ ID NO: 693839 - RNA, 19 nt, Artificial Sequence
  Description of Artificial Sequence: Synthetic oligonucleotide
acauauaagcaacgauuuu

SEQ ID NO: 693840 - RNA, 19 nt, Artificial Sequence
  Description of Artificial Sequence: Synthetic oligonucleotide
agcaagaucuuguguucca

SEQ ID NO: 693841 - RNA, 19 nt, Artificial Sequence
  Description of Artificial Sequence: Synthetic oligonucleotide
ucaccuaaugcaggaauau

SEQ ID NO: 693842 - RNA, 19 nt, Artificial Sequence
  Description of Artificial Sequence: Synthetic oligonucleotide
gaagauugaucauuugguu

SEQ ID NO: 693843 - RNA, 19 nt, Artificial Sequence
  Description of Artificial Sequence: Synthetic oligonucleotide
ggucuuagaucucuggcca

SEQ ID NO: 693844 - RNA, 19 nt, Artificial Sequence
  Description of Artificial Sequence: Synthetic oligonucleotide
cacuaagaggauccauuug

SEQ ID NO: 693845 - RNA, 19 nt, Artificial Sequence
  Description of Artificial Sequence: Synthetic oligonucleotide
uccgacuccugucuccacu

SEQ ID NO: 693846 - RNA, 19 nt, Artificial Sequence
  Description of Artificial Sequence: Synthetic oligonucleotide
ugcaaacaagccacugaau

SEQ ID NO: 693847 - RNA, 19 nt, Artificial Sequence
  Description of Artificial Sequence: Synthetic oligonucleotide
aucaacucuucgcaagcau

SEQ ID NO: 693848 - RNA, 19 nt, Artificial Sequence
  Description of Artificial Sequence: Synthetic oligonucleotide
acgagcugaugagcaaacc

SEQ ID NO: 693849 - RNA, 19 nt, Artificial Sequence
  Description of Artificial Sequence: Synthetic oligonucleotide
ccagauugccuuucggagg

SEQ ID NO: 693850 - RNA, 19 nt, Artificial Sequence
  Description of Artificial Sequence: Synthetic oligonucleotide
agcugaugagcaaaccuug

SEQ ID NO: 693851 - RNA, 19 nt, Artificial Sequence
  Description of Artificial Sequence: Synthetic oligonucleotide
ugagcaaaccuuggacaug

SEQ ID NO: 693852 - RNA, 19 nt, Artificial Sequence
  Description of Artificial Sequence: Synthetic oligonucleotide
cagauaagacauguauuuc

SEQ ID NO: 693853 - RNA, 19 nt, Artificial Sequence
  Description of Artificial Sequence: Synthetic oligonucleotide
auguaauauucugaacuau

SEQ ID NO: 693854 - RNA, 19 nt, Artificial Sequence
  Description of Artificial Sequence: Synthetic oligonucleotide
uagauuugccuccguugaa

SEQ ID NO: 693855 - RNA, 19 nt, Artificial Sequence
  Description of Artificial Sequence: Synthetic oligonucleotide
caguuuugguccaccauca

SEQ ID NO: 693856 - RNA, 19 nt, Artificial Sequence
  Description of Artificial Sequence: Synthetic oligonucleotide
caaauugcagacauggguu

SEQ ID NO: 693857 - RNA, 19 nt, Artificial Sequence
  Description of Artificial Sequence: Synthetic oligonucleotide
gcaaacacggaacuccgac

SEQ ID NO: 693858 - RNA, 19 nt, Artificial Sequence
  Description of Artificial Sequence: Synthetic oligonucleotide
auguguagauuugccuccg

SEQ ID NO: 693859 - RNA, 19 nt, Artificial Sequence
  Description of Artificial Sequence: Synthetic oligonucleotide
gggaaguauaucaauuuca

SEQ ID NO: 693860 - RNA, 19 nt, Artificial Sequence
  Description of Artificial Sequence: Synthetic oligonucleotide
cagaaugaauuucuaacgu

SEQ ID NO: 693861 - RNA, 19 nt, Artificial Sequence
  Description of Artificial Sequence: Synthetic oligonucleotide
ucgaagaagcuuccagguu

SEQ ID NO: 693862 - RNA, 19 nt, Artificial Sequence
  Description of Artificial Sequence: Synthetic oligonucleotide
caaugucauaaauccagaa

SEQ ID NO: 693863 - RNA, 19 nt, Artificial Sequence
  Description of Artificial Sequence: Synthetic oligonucleotide
cagauugccuuucggagga

SEQ ID NO: 693864 - RNA, 19 nt, Artificial Sequence
  Description of Artificial Sequence: Synthetic oligonucleotide
cuucgcaagcaucaaagua

SEQ ID NO: 693865 - RNA, 19 nt, Artificial Sequence
  Description of Artificial Sequence: Synthetic oligonucleotide
gaauuucuaacguucucuu

SEQ ID NO: 693866 - RNA, 19 nt, Artificial Sequence
  Description of Artificial Sequence: Synthetic oligonucleotide
ggccuuucaagcuucagaa

SEQ ID NO: 693867 - RNA, 19 nt, Artificial Sequence
  Description of Artificial Sequence: Synthetic oligonucleotide
gacgucaccucugcccacg

SEQ ID NO: 693868 - RNA, 19 nt, Artificial Sequence
  Description of Artificial Sequence: Synthetic oligonucleotide
uuacaggagucuucucgaa

SEQ ID NO: 693869 - RNA, 19 nt, Artificial Sequence
  Description of Artificial Sequence: Synthetic oligonucleotide
uaacggcccaauguguaga

SEQ ID NO: 693870 - RNA, 19 nt, Artificial Sequence
  Description of Artificial Sequence: Synthetic oligonucleotide
ugaguucuuugcgcauagg

SEQ ID NO: 693871 - RNA, 19 nt, Artificial Sequence
  Description of Artificial Sequence: Synthetic oligonucleotide
aucagaguccacaucguaa

SEQ ID NO: 693872 - RNA, 19 nt, Artificial Sequence
  Description of Artificial Sequence: Synthetic oligonucleotide
cccaauguguagauuugcc

SEQ ID NO: 693873 - RNA, 19 nt, Artificial Sequence
  Description of Artificial Sequence: Synthetic oligonucleotide
acguucucuucccucuucu

SEQ ID NO: 693874 - RNA, 19 nt, Artificial Sequence
  Description of Artificial Sequence: Synthetic oligonucleotide
ugcccacgcaaacacggaa

SEQ ID NO: 693875 - RNA, 19 nt, Artificial Sequence
  Description of Artificial Sequence: Synthetic oligonucleotide
gggauugaggucagguacg

SEQ ID NO: 693876 - RNA, 19 nt, Artificial Sequence
  Description of Artificial Sequence: Synthetic oligonucleotide
cuggucgguuaucuucucc

SEQ ID NO: 693877 - RNA, 19 nt, Artificial Sequence
  Description of Artificial Sequence: Synthetic oligonucleotide
uauucaccuaaugcaggaa

SEQ ID NO: 693878 - RNA, 19 nt, Artificial Sequence
  Description of Artificial Sequence: Synthetic oligonucleotide
uccccaguuuacaguguga

SEQ ID NO: 693879 - RNA, 19 nt, Artificial Sequence
  Description of Artificial Sequence: Synthetic oligonucleotide
aaacucugaugcaguccuc

SEQ ID NO: 693880 - RNA, 19 nt, Artificial Sequence
  Description of Artificial Sequence: Synthetic oligonucleotide
cacaucugaugaucaaaca

SEQ ID NO: 693881 - RNA, 19 nt, Artificial Sequence
  Description of Artificial Sequence: Synthetic oligonucleotide
ugcgcauaggugugaucca

SEQ ID NO: 693882 - RNA, 19 nt, Artificial Sequence
  Description of Artificial Sequence: Synthetic oligonucleotide
acgcaaacacggaacuccg

SEQ ID NO: 693883 - RNA, 19 nt, Artificial Sequence
  Description of Artificial Sequence: Synthetic oligonucleotide
ggguuaaaacuugugauaa

SEQ ID NO: 693884 - RNA, 19 nt, Artificial Sequence
  Description of Artificial Sequence: Synthetic oligonucleotide
caagauuuuccuggauuuc

SEQ ID NO: 693885 - RNA, 19 nt, Artificial Sequence
  Description of Artificial Sequence: Synthetic oligonucleotide
acgguagaagucacuuuuc

SEQ ID NO: 693886 - RNA, 19 nt, Artificial Sequence
  Description of Artificial Sequence: Synthetic oligonucleotide
acgaaggagaggguuaaaa

SEQ ID NO: 693887 - RNA, 19 nt, Artificial Sequence
  Description of Artificial Sequence: Synthetic oligonucleotide
gcaguugaaugcaaacaag

SEQ ID NO: 693888 - RNA, 19 nt, Artificial Sequence
  Description of Artificial Sequence: Synthetic oligonucleotide
aggagaggguuaaaacuug

SEQ ID NO: 693889 - RNA, 19 nt, Artificial Sequence
  Description of Artificial Sequence: Synthetic oligonucleotide
cuaacguucucuucccucu

SEQ ID NO: 693890 - RNA, 19 nt, Artificial Sequence
  Description of Artificial Sequence: Synthetic oligonucleotide
gucagguacgaaggagagg

SEQ ID NO: 693891 - RNA, 19 nt, Artificial Sequence
  Description of Artificial Sequence: Synthetic oligonucleotide
guacuggggaggauaguug

SEQ ID NO: 693892 - RNA, 19 nt, Artificial Sequence
  Description of Artificial Sequence: Synthetic oligonucleotide
ugugguucacuggcucugc

SEQ ID NO: 693893 - RNA, 19 nt, Artificial Sequence
  Description of Artificial Sequence: Synthetic oligonucleotide
uagcaggccuuucaagcuu

SEQ ID NO: 693894 - RNA, 19 nt, Artificial Sequence
  Description of Artificial Sequence: Synthetic oligonucleotide
cugauugaacaagccauca

SEQ ID NO: 693895 - RNA, 19 nt, Artificial Sequence
  Description of Artificial Sequence: Synthetic oligonucleotide
acucaacuccccaguuuac

SEQ ID NO: 693896 - RNA, 19 nt, Artificial Sequence
  Description of Artificial Sequence: Synthetic oligonucleotide
agauacauguccacugguu

SEQ ID NO: 693897 - RNA, 19 nt, Artificial Sequence
  Description of Artificial Sequence: Synthetic oligonucleotide
gcuugaucauucuuauaga

SEQ ID NO: 693898 - RNA, 19 nt, Artificial Sequence
  Description of Artificial Sequence: Synthetic oligonucleotide
gcaggaauaugaggaaaag

SEQ ID NO: 693899 - RNA, 19 nt, Artificial Sequence
  Description of Artificial Sequence: Synthetic oligonucleotide
acgucaccucugcccacgc

SEQ ID NO: 693900 - RNA, 19 nt, Artificial Sequence
  Description of Artificial Sequence: Synthetic oligonucleotide
ccguugaaugucaaugcac

SEQ ID NO: 693901 - RNA, 19 nt, Artificial Sequence
  Description of Artificial Sequence: Synthetic oligonucleotide
uuggugccgucugaaauua

SEQ ID NO: 693902 - RNA, 19 nt, Artificial Sequence
  Description of Artificial Sequence: Synthetic oligonucleotide
auaugaggaaaaggggauu

SEQ ID NO: 693903 - RNA, 19 nt, Artificial Sequence
  Description of Artificial Sequence: Synthetic oligonucleotide
gugaauccugucauuggca

SEQ ID NO: 693904 - RNA, 19 nt, Artificial Sequence
  Description of Artificial Sequence: Synthetic oligonucleotide
caguccuuuucaaucaacu

SEQ ID NO: 693905 - RNA, 19 nt, Artificial Sequence
  Description of Artificial Sequence: Synthetic oligonucleotide
ucuuugcgcauagguguga

SEQ ID NO: 693906 - RNA, 19 nt, Artificial Sequence
  Description of Artificial Sequence: Synthetic oligonucleotide
ugccuuucggaggagucau

SEQ ID NO: 693907 - RNA, 19 nt, Artificial Sequence
  Description of Artificial Sequence: Synthetic oligonucleotide
aacucuucgcaagcaucaa

SEQ ID NO: 693908 - RNA, 19 nt, Artificial Sequence
  Description of Artificial Sequence: Synthetic oligonucleotide
ggugcucuuaggaugaucu

SEQ ID NO: 693909 - RNA, 19 nt, Artificial Sequence
  Description of Artificial Sequence: Synthetic oligonucleotide
cugaaaagccuagagcugu

SEQ ID NO: 693910 - RNA, 19 nt, Artificial Sequence
  Description of Artificial Sequence: Synthetic oligonucleotide
caaaccuguguuuucuuau

SEQ ID NO: 693911 - RNA, 19 nt, Artificial Sequence
  Description of Artificial Sequence: Synthetic oligonucleotide
gcucuuaggaugaucugac

SEQ ID NO: 693912 - RNA, 19 nt, Artificial Sequence
  Description of Artificial Sequence: Synthetic oligonucleotide
ggcacuaggaccauucucu

SEQ ID NO: 693913 - RNA, 19 nt, Artificial Sequence
  Description of Artificial Sequence: Synthetic oligonucleotide
guguccaauucgagacugg

SEQ ID NO: 693914 - RNA, 19 nt, Artificial Sequence
  Description of Artificial Sequence: Synthetic oligonucleotide
agguacgaaggagaggguu

SEQ ID NO: 693915 - RNA, 19 nt, Artificial Sequence
  Description of Artificial Sequence: Synthetic oligonucleotide
cucagugucucuagagaua

SEQ ID NO: 693916 - RNA, 19 nt, Artificial Sequence
  Description of Artificial Sequence: Synthetic oligonucleotide
cuagagauacauguccacu

SEQ ID NO: 693917 - RNA, 19 nt, Artificial Sequence
  Description of Artificial Sequence: Synthetic oligonucleotide
ccuuucggaggagucaugc

SEQ ID NO: 693918 - RNA, 19 nt, Artificial Sequence
  Description of Artificial Sequence: Synthetic oligonucleotide
ccugaagacuuuugcucag

SEQ ID NO: 693919 - RNA, 19 nt, Artificial Sequence
  Description of Artificial Sequence: Synthetic oligonucleotide
ccauacacaucugaugauc

SEQ ID NO: 693920 - RNA, 19 nt, Artificial Sequence
  Description of Artificial Sequence: Synthetic oligonucleotide
cugccauuacaugucaaaa

SEQ ID NO: 693921 - RNA, 19 nt, Artificial Sequence
  Description of Artificial Sequence: Synthetic oligonucleotide
agacuuuugcucagauuau

SEQ ID NO: 693922 - RNA, 19 nt, Artificial Sequence
  Description of Artificial Sequence: Synthetic oligonucleotide
cacugcgacgucaccucug

SEQ ID NO: 693923 - RNA, 19 nt, Artificial Sequence
  Description of Artificial Sequence: Synthetic oligonucleotide
agcaaaccuuggacauggc

SEQ ID NO: 693924 - RNA, 19 nt, Artificial Sequence
  Description of Artificial Sequence: Synthetic oligonucleotide
cucaacuccccaguuuaca

SEQ ID NO: 693925 - RNA, 19 nt, Artificial Sequence
  Description of Artificial Sequence: Synthetic oligonucleotide
cucaacucaacuccccagu

SEQ ID NO: 693926 - RNA, 19 nt, Artificial Sequence
  Description of Artificial Sequence: Synthetic oligonucleotide
ccagauaagacauguauuu

SEQ ID NO: 693927 - RNA, 19 nt, Artificial Sequence
  Description of Artificial Sequence: Synthetic oligonucleotide
cagcuauuccucacaaugu

SEQ ID NO: 693928 - RNA, 19 nt, Artificial Sequence
  Description of Artificial Sequence: Synthetic oligonucleotide
cagccaccaaacaaauaaa

SEQ ID NO: 693929 - RNA, 19 nt, Artificial Sequence
  Description of Artificial Sequence: Synthetic oligonucleotide
caaacacggaacuccgacu

SEQ ID NO: 693930 - RNA, 19 nt, Artificial Sequence
  Description of Artificial Sequence: Synthetic oligonucleotide
ggaugaucugacuccaccu

SEQ ID NO: 693931 - RNA, 19 nt, Artificial Sequence
  Description of Artificial Sequence: Synthetic oligonucleotide
gagcugaugagcaaaccuu

SEQ ID NO: 693932 - RNA, 19 nt, Artificial Sequence
  Description of Artificial Sequence: Synthetic oligonucleotide
gcaagauuuuccuggauuu

SEQ ID NO: 693933 - RNA, 19 nt, Artificial Sequence
  Description of Artificial Sequence: Synthetic oligonucleotide
ccacaucguaacuaaagaa

SEQ ID NO: 693934 - RNA, 19 nt, Artificial Sequence
  Description of Artificial Sequence: Synthetic oligonucleotide
guacgaaggagaggguuaa

SEQ ID NO: 693935 - RNA, 19 nt, Artificial Sequence
  Description of Artificial Sequence: Synthetic oligonucleotide
guaaucuuuugaaggucua

SEQ ID NO: 693936 - RNA, 19 nt, Artificial Sequence
  Description of Artificial Sequence: Synthetic oligonucleotide
cauaacgguagaagucacu

SEQ ID NO: 693937 - RNA, 19 nt, Artificial Sequence
  Description of Artificial Sequence: Synthetic oligonucleotide
gaacuauagcaggccuuuc

SEQ ID NO: 693938 - RNA, 19 nt, Artificial Sequence
  Description of Artificial Sequence: Synthetic oligonucleotide
cuuggugccgucugaaauu

SEQ ID NO: 693939 - RNA, 19 nt, Artificial Sequence
  Description of Artificial Sequence: Synthetic oligonucleotide
agaccaucuggaagauuga

SEQ ID NO: 693940 - RNA, 19 nt, Artificial Sequence
  Description of Artificial Sequence: Synthetic oligonucleotide
gaauugugguucacuggcu

SEQ ID NO: 693941 - RNA, 19 nt, Artificial Sequence
  Description of Artificial Sequence: Synthetic oligonucleotide
auccaaguaacggcccaau

SEQ ID NO: 693942 - RNA, 19 nt, Artificial Sequence
  Description of Artificial Sequence: Synthetic oligonucleotide
aucauucuucaagccacua

SEQ ID NO: 693943 - RNA, 19 nt, Artificial Sequence
  Description of Artificial Sequence: Synthetic oligonucleotide
ggaucaauaguugcucucu

SEQ ID NO: 693944 - RNA, 19 nt, Artificial Sequence
  Description of Artificial Sequence: Synthetic oligonucleotide
ccgucugaaauuaugucua

SEQ ID NO: 693945 - RNA, 19 nt, Artificial Sequence
  Description of Artificial Sequence: Synthetic oligonucleotide
ccaaguaacggcccaaugu

SEQ ID NO: 693946 - RNA, 19 nt, Artificial Sequence
  Description of Artificial Sequence: Synthetic oligonucleotide
caccucugcccacgcaaac

SEQ ID NO: 693947 - RNA, 19 nt, Artificial Sequence
  Description of Artificial Sequence: Synthetic oligonucleotide
cuaccaccgaagguguaga

SEQ ID NO: 693948 - RNA, 19 nt, Artificial Sequence
  Description of Artificial Sequence: Synthetic oligonucleotide
gcgacgucaccucugccca

SEQ ID NO: 693949 - RNA, 19 nt, Artificial Sequence
  Description of Artificial Sequence: Synthetic oligonucleotide
gguacgaaggagaggguua

SEQ ID NO: 693950 - RNA, 19 nt, Artificial Sequence
  Description of Artificial Sequence: Synthetic oligonucleotide
gugccgucugaaauuaugu

SEQ ID NO: 693951 - RNA, 19 nt, Artificial Sequence
  Description of Artificial Sequence: Synthetic oligonucleotide
gcccaauguguagauuugc

SEQ ID NO: 693952 - RNA, 19 nt, Artificial Sequence
  Description of Artificial Sequence: Synthetic oligonucleotide
cauuccuggucgguuaucu

SEQ ID NO: 693953 - RNA, 19 nt, Artificial Sequence
  Description of Artificial Sequence: Synthetic oligonucleotide
uccugucauuggcaccauu

SEQ ID NO: 693954 - RNA, 19 nt, Artificial Sequence
  Description of Artificial Sequence: Synthetic oligonucleotide
accgaagguguagaucaua

SEQ ID NO: 693955 - RNA, 19 nt, Artificial Sequence
  Description of Artificial Sequence: Synthetic oligonucleotide
uacgaaggagaggguuaaa

SEQ ID NO: 693956 - RNA, 19 nt, Artificial Sequence
  Description of Artificial Sequence: Synthetic oligonucleotide
caacuccccaguuuacagu

SEQ ID NO: 693957 - RNA, 19 nt, Artificial Sequence
  Description of Artificial Sequence: Synthetic oligonucleotide
ugccuccguugaaugucaa

SEQ ID NO: 693958 - RNA, 19 nt, Artificial Sequence
  Description of Artificial Sequence: Synthetic oligonucleotide
gaggucuaccagauugccu

SEQ ID NO: 693959 - RNA, 19 nt, Artificial Sequence
  Description of Artificial Sequence: Synthetic oligonucleotide
cugaacuauagcaggccuu

SEQ ID NO: 693960 - RNA, 19 nt, Artificial Sequence
  Description of Artificial Sequence: Synthetic oligonucleotide
cuuucggaggagucaugcu

SEQ ID NO: 693961 - RNA, 19 nt, Artificial Sequence
  Description of Artificial Sequence: Synthetic oligonucleotide
agauugccuuucggaggag

SEQ ID NO: 693962 - RNA, 19 nt, Artificial Sequence
  Description of Artificial Sequence: Synthetic oligonucleotide
cgaagguguagaucauaug

SEQ ID NO: 693963 - RNA, 19 nt, Artificial Sequence
  Description of Artificial Sequence: Synthetic oligonucleotide
ggauugaggucagguacga

SEQ ID NO: 693964 - RNA, 19 nt, Artificial Sequence
  Description of Artificial Sequence: Synthetic oligonucleotide
gguuaaaacuugugauaau

SEQ ID NO: 693965 - RNA, 19 nt, Artificial Sequence
  Description of Artificial Sequence: Synthetic oligonucleotide
aucaaguacuggggaggau

SEQ ID NO: 693966 - RNA, 19 nt, Artificial Sequence
  Description of Artificial Sequence: Synthetic oligonucleotide
cugcgacgucaccucugcc

SEQ ID NO: 693967 - RNA, 19 nt, Artificial Sequence
  Description of Artificial Sequence: Synthetic oligonucleotide
cucuuaggaugaucugacu

SEQ ID NO: 693968 - RNA, 19 nt, Artificial Sequence
  Description of Artificial Sequence: Synthetic oligonucleotide
cucggcuuauacuccugcu

SEQ ID NO: 693969 - RNA, 19 nt, Artificial Sequence
  Description of Artificial Sequence: Synthetic oligonucleotide
cacugaauugugguucacu

SEQ ID NO: 693970 - RNA, 19 nt, Artificial Sequence
  Description of Artificial Sequence: Synthetic oligonucleotide
cugcccacgcaaacacgga

SEQ ID NO: 693971 - RNA, 19 nt, Artificial Sequence
  Description of Artificial Sequence: Synthetic oligonucleotide
gguguagaucauauguuuu

SEQ ID NO: 693972 - RNA, 19 nt, Artificial Sequence
  Description of Artificial Sequence: Synthetic oligonucleotide
augacacgaucuggcacua

SEQ ID NO: 693973 - RNA, 19 nt, Artificial Sequence
  Description of Artificial Sequence: Synthetic oligonucleotide
gcccacgcaaacacggaac

SEQ ID NO: 693974 - RNA, 19 nt, Artificial Sequence
  Description of Artificial Sequence: Synthetic oligonucleotide
cuccaccucggcuuauacu

SEQ ID NO: 693975 - RNA, 19 nt, Artificial Sequence
  Description of Artificial Sequence: Synthetic oligonucleotide
gcgcauaggugugauccac

SEQ ID NO: 693976 - RNA, 19 nt, Artificial Sequence
  Description of Artificial Sequence: Synthetic oligonucleotide
cagaguccacaucguaacu

SEQ ID NO: 693977 - RNA, 19 nt, Artificial Sequence
  Description of Artificial Sequence: Synthetic oligonucleotide
caacucaacuccccaguuu

SEQ ID NO: 693978 - RNA, 19 nt, Artificial Sequence
  Description of Artificial Sequence: Synthetic oligonucleotide
aggauccauuugggccuuc

SEQ ID NO: 693979 - RNA, 19 nt, Artificial Sequence
  Description of Artificial Sequence: Synthetic oligonucleotide
cgguagaagucacuuuuca

SEQ ID NO: 693980 - RNA, 19 nt, Artificial Sequence
  Description of Artificial Sequence: Synthetic oligonucleotide
guccaauucgagacuggau

SEQ ID NO: 693981 - RNA, 19 nt, Artificial Sequence
  Description of Artificial Sequence: Synthetic oligonucleotide
cgagcugaugagcaaaccu

SEQ ID NO: 693982 - RNA, 19 nt, Artificial Sequence
  Description of Artificial Sequence: Synthetic oligonucleotide
cacuaggaccauucucuuu

SEQ ID NO: 693983 - RNA, 19 nt, Artificial Sequence
  Description of Artificial Sequence: Synthetic oligonucleotide
ccacgcaaacacggaacuc

SEQ ID NO: 693984 - RNA, 19 nt, Artificial Sequence
  Description of Artificial Sequence: Synthetic oligonucleotide
auccugucauuggcaccau

SEQ ID NO: 693985 - RNA, 19 nt, Artificial Sequence
  Description of Artificial Sequence: Synthetic oligonucleotide
cccacgcaaacacggaacu

SEQ ID NO: 693986 - RNA, 19 nt, Artificial Sequence
  Description of Artificial Sequence: Synthetic oligonucleotide
cagguacgaaggagagggu

SEQ ID NO: 693987 - RNA, 19 nt, Artificial Sequence
  Description of Artificial Sequence: Synthetic oligonucleotide
gccuuucggaggagucaug

SEQ ID NO: 693988 - RNA, 19 nt, Artificial Sequence
  Description of Artificial Sequence: Synthetic oligonucleotide
gaggauccauuugggccuu

SEQ ID NO: 693989 - RNA, 19 nt, Artificial Sequence
  Description of Artificial Sequence: Synthetic oligonucleotide
gcacuaggaccauucucuu

SEQ ID NO: 693990 - RNA, 19 nt, Artificial Sequence
  Description of Artificial Sequence: Synthetic oligonucleotide
caccgaagguguagaucau

SEQ ID NO: 693991 - RNA, 19 nt, Artificial Sequence
  Description of Artificial Sequence: Synthetic oligonucleotide
gccuccguugaaugucaau

SEQ ID NO: 693992 - RNA, 19 nt, Artificial Sequence
  Description of Artificial Sequence: Synthetic oligonucleotide
cgacgucaccucugcccac

SEQ ID NO: 693993 - RNA, 19 nt, Artificial Sequence
  Description of Artificial Sequence: Synthetic oligonucleotide
gccaucauuuacaguccuu

SEQ ID NO: 693994 - RNA, 19 nt, Artificial Sequence
  Description of Artificial Sequence: Synthetic oligonucleotide
ccgacuccugucuccacuu

SEQ ID NO: 693995 - RNA, 19 nt, Artificial Sequence
  Description of Artificial Sequence: Synthetic oligonucleotide
cggaggagucaugcuguca

SEQ ID NO: 693996 - RNA, 19 nt, Artificial Sequence
  Description of Artificial Sequence: Synthetic oligonucleotide
ccucucauuccuggucggu

SEQ ID NO: 693997 - RNA, 19 nt, Artificial Sequence
  Description of Artificial Sequence: Synthetic oligonucleotide
aagaauuacugccaggugc

SEQ ID NO: 693998 - RNA, 19 nt, Artificial Sequence
  Description of Artificial Sequence: Synthetic oligonucleotide
ucuuuagauaauaauaagg

SEQ ID NO: 693999 - RNA, 19 nt, Artificial Sequence
  Description of Artificial Sequence: Synthetic oligonucleotide
agugauacguuucaaaucg

SEQ ID NO: 694000 - RNA, 19 nt, Artificial Sequence
  Description of Artificial Sequence: Synthetic oligonucleotide
ucuuacuuauuuuaaaagg

SEQ ID NO: 694001 - RNA, 19 nt, Artificial Sequence
  Description of Artificial Sequence: Synthetic oligonucleotide
uuauaugcuauacagaugu

SEQ ID NO: 694002 - RNA, 19 nt, Artificial Sequence
  Description of Artificial Sequence: Synthetic oligonucleotide
uagauaauaauaaggauug

SEQ ID NO: 694003 - RNA, 19 nt, Artificial Sequence
  Description of Artificial Sequence: Synthetic oligonucleotide
aaaacuguaucauugguca

SEQ ID NO: 694004 - RNA, 19 nt, Artificial Sequence
  Description of Artificial Sequence: Synthetic oligonucleotide
aaugagacuauauauggug

SEQ ID NO: 694005 - RNA, 19 nt, Artificial Sequence
  Description of Artificial Sequence: Synthetic oligonucleotide
aauaauaaggauuguugag

SEQ ID NO: 694006 - RNA, 19 nt, Artificial Sequence
  Description of Artificial Sequence: Synthetic oligonucleotide
ucauauaccaacuggaaag

SEQ ID NO: 694007 - RNA, 19 nt, Artificial Sequence
  Description of Artificial Sequence: Synthetic oligonucleotide
uauaagaagauguugguca

SEQ ID NO: 694008 - RNA, 19 nt, Artificial Sequence
  Description of Artificial Sequence: Synthetic oligonucleotide
aagagguaaaauuaugaag

SEQ ID NO: 694009 - RNA, 19 nt, Artificial Sequence
  Description of Artificial Sequence: Synthetic oligonucleotide
aauaacaggagauguggcg

SEQ ID NO: 694010 - RNA, 19 nt, Artificial Sequence
  Description of Artificial Sequence: Synthetic oligonucleotide
gaagauguuggucagaacc

SEQ ID NO: 694011 - RNA, 19 nt, Artificial Sequence
  Description of Artificial Sequence: Synthetic oligonucleotide
ugaauauuaaaucaugauc

SEQ ID NO: 694012 - RNA, 19 nt, Artificial Sequence
  Description of Artificial Sequence: Synthetic oligonucleotide
ucuaauaaaucgagcaugg

SEQ ID NO: 694013 - RNA, 19 nt, Artificial Sequence
  Description of Artificial Sequence: Synthetic oligonucleotide
aaucccauacauuauuuuc

SEQ ID NO: 694014 - RNA, 19 nt, Artificial Sequence
  Description of Artificial Sequence: Synthetic oligonucleotide
uauuaaaucaugaucugug

SEQ ID NO: 694015 - RNA, 19 nt, Artificial Sequence
  Description of Artificial Sequence: Synthetic oligonucleotide
aaacugagcuguaagaagc

SEQ ID NO: 694016 - RNA, 19 nt, Artificial Sequence
  Description of Artificial Sequence: Synthetic oligonucleotide
aaacaugugcaauacagcu

SEQ ID NO: 694017 - RNA, 19 nt, Artificial Sequence
  Description of Artificial Sequence: Synthetic oligonucleotide
aauaaggauuguugagugc

SEQ ID NO: 694018 - RNA, 19 nt, Artificial Sequence
  Description of Artificial Sequence: Synthetic oligonucleotide
uuucguagguuuuauaaag

SEQ ID NO: 694019 - RNA, 19 nt, Artificial Sequence
  Description of Artificial Sequence: Synthetic oligonucleotide
auaaggauuguugagugcc

SEQ ID NO: 694020 - RNA, 19 nt, Artificial Sequence
  Description of Artificial Sequence: Synthetic oligonucleotide
uguaagaagcagcugauca

SEQ ID NO: 694021 - RNA, 19 nt, Artificial Sequence
  Description of Artificial Sequence: Synthetic oligonucleotide
uaugcuauacagaugucag

SEQ ID NO: 694022 - RNA, 19 nt, Artificial Sequence
  Description of Artificial Sequence: Synthetic oligonucleotide
uauacuaccucaugcaaag

SEQ ID NO: 694023 - RNA, 19 nt, Artificial Sequence
  Description of Artificial Sequence: Synthetic oligonucleotide
cuuuagauaauaauaagga

SEQ ID NO: 694024 - RNA, 19 nt, Artificial Sequence
  Description of Artificial Sequence: Synthetic oligonucleotide
agcacugaaguauacuacc

SEQ ID NO: 694025 - RNA, 19 nt, Artificial Sequence
  Description of Artificial Sequence: Synthetic oligonucleotide
ucuuccaguaauaauugag

SEQ ID NO: 694026 - RNA, 19 nt, Artificial Sequence
  Description of Artificial Sequence: Synthetic oligonucleotide
aagugauacguuucaaauc

SEQ ID NO: 694027 - RNA, 19 nt, Artificial Sequence
  Description of Artificial Sequence: Synthetic oligonucleotide
gaaguauacuaccucaugc

SEQ ID NO: 694028 - RNA, 19 nt, Artificial Sequence
  Description of Artificial Sequence: Synthetic oligonucleotide
aauaauugaguuucuuccu

SEQ ID NO: 694029 - RNA, 19 nt, Artificial Sequence
  Description of Artificial Sequence: Synthetic oligonucleotide
aaagccuaaaagcucaagu

SEQ ID NO: 694030 - RNA, 19 nt, Artificial Sequence
  Description of Artificial Sequence: Synthetic oligonucleotide
ucaugguauaagaagaugu

SEQ ID NO: 694031 - RNA, 19 nt, Artificial Sequence
  Description of Artificial Sequence: Synthetic oligonucleotide
agauaaucacaacaggcgg

SEQ ID NO: 694032 - RNA, 19 nt, Artificial Sequence
  Description of Artificial Sequence: Synthetic oligonucleotide
gaauccauugaauaauuug

SEQ ID NO: 694033 - RNA, 19 nt, Artificial Sequence
  Description of Artificial Sequence: Synthetic oligonucleotide
uaauagagaaagcuuaagu

SEQ ID NO: 694034 - RNA, 19 nt, Artificial Sequence
  Description of Artificial Sequence: Synthetic oligonucleotide
gaucugucgacccaguggg

SEQ ID NO: 694035 - RNA, 19 nt, Artificial Sequence
  Description of Artificial Sequence: Synthetic oligonucleotide
uguucuaauagagaaagcu

SEQ ID NO: 694036 - RNA, 19 nt, Artificial Sequence
  Description of Artificial Sequence: Synthetic oligonucleotide
auacguuucaaaucgaagu

SEQ ID NO: 694037 - RNA, 19 nt, Artificial Sequence
  Description of Artificial Sequence: Synthetic oligonucleotide
aguagaggaauguaaaacu

SEQ ID NO: 694038 - RNA, 19 nt, Artificial Sequence
  Description of Artificial Sequence: Synthetic oligonucleotide
aaaucgaaguuuacugucc

SEQ ID NO: 694039 - RNA, 19 nt, Artificial Sequence
  Description of Artificial Sequence: Synthetic oligonucleotide
cacaccaagaauaagagca

SEQ ID NO: 694040 - RNA, 19 nt, Artificial Sequence
  Description of Artificial Sequence: Synthetic oligonucleotide
uaauaaaucgagcauggau

SEQ ID NO: 694041 - RNA, 19 nt, Artificial Sequence
  Description of Artificial Sequence: Synthetic oligonucleotide
auaauuaugaagucuugga

SEQ ID NO: 694042 - RNA, 19 nt, Artificial Sequence
  Description of Artificial Sequence: Synthetic oligonucleotide
ucgauggauaauaacagga

SEQ ID NO: 694043 - RNA, 19 nt, Artificial Sequence
  Description of Artificial Sequence: Synthetic oligonucleotide
uucuauacacagaagagau

SEQ ID NO: 694044 - RNA, 19 nt, Artificial Sequence
  Description of Artificial Sequence: Synthetic oligonucleotide
aucaguggaaauucaugcc

SEQ ID NO: 694045 - RNA, 19 nt, Artificial Sequence
  Description of Artificial Sequence: Synthetic oligonucleotide
uguaucauuggucaacagu

SEQ ID NO: 694046 - RNA, 19 nt, Artificial Sequence
  Description of Artificial Sequence: Synthetic oligonucleotide
uucuaauagagaaagcuua

SEQ ID NO: 694047 - RNA, 19 nt, Artificial Sequence
  Description of Artificial Sequence: Synthetic oligonucleotide
aauaaaucgagcauggaua

SEQ ID NO: 694048 - RNA, 19 nt, Artificial Sequence
  Description of Artificial Sequence: Synthetic oligonucleotide
ugaucugucgacccagugg

SEQ ID NO: 694049 - RNA, 19 nt, Artificial Sequence
  Description of Artificial Sequence: Synthetic oligonucleotide
ucgacaagguuaauuagcc

SEQ ID NO: 694050 - RNA, 19 nt, Artificial Sequence
  Description of Artificial Sequence: Synthetic oligonucleotide
aauaaggacuucugaaggu

SEQ ID NO: 694051 - RNA, 19 nt, Artificial Sequence
  Description of Artificial Sequence: Synthetic oligonucleotide
uuuagauaauaauaaggau

SEQ ID NO: 694052 - RNA, 19 nt, Artificial Sequence
  Description of Artificial Sequence: Synthetic oligonucleotide
uguaguagaggaauguaaa

SEQ ID NO: 694053 - RNA, 19 nt, Artificial Sequence
  Description of Artificial Sequence: Synthetic oligonucleotide
uuaaaucaugaucugugac

SEQ ID NO: 694054 - RNA, 19 nt, Artificial Sequence
  Description of Artificial Sequence: Synthetic oligonucleotide
aacuguaucauuggucaac

SEQ ID NO: 694055 - RNA, 19 nt, Artificial Sequence
  Description of Artificial Sequence: Synthetic oligonucleotide
ucauccguuguccauagca

SEQ ID NO: 694056 - RNA, 19 nt, Artificial Sequence
  Description of Artificial Sequence: Synthetic oligonucleotide
uaaaacuguaucauugguc

SEQ ID NO: 694057 - RNA, 19 nt, Artificial Sequence
  Description of Artificial Sequence: Synthetic oligonucleotide
uuagcuugcaaugagacua

SEQ ID NO: 694058 - RNA, 19 nt, Artificial Sequence
  Description of Artificial Sequence: Synthetic oligonucleotide
ugaucaagaauuacugcca

SEQ ID NO: 694059 - RNA, 19 nt, Artificial Sequence
  Description of Artificial Sequence: Synthetic oligonucleotide
uaaaagcucaaguucagaa

SEQ ID NO: 694060 - RNA, 19 nt, Artificial Sequence
  Description of Artificial Sequence: Synthetic oligonucleotide
guaucauuggucaacagug

SEQ ID NO: 694061 - RNA, 19 nt, Artificial Sequence
  Description of Artificial Sequence: Synthetic oligonucleotide
accuguaaugccuucuuac

SEQ ID NO: 694062 - RNA, 19 nt, Artificial Sequence
  Description of Artificial Sequence: Synthetic oligonucleotide
agguuaauuagccggcuac

SEQ ID NO: 694063 - RNA, 19 nt, Artificial Sequence
  Description of Artificial Sequence: Synthetic oligonucleotide
uaauuagccggcuacacuc

SEQ ID NO: 694064 - RNA, 19 nt, Artificial Sequence
  Description of Artificial Sequence: Synthetic oligonucleotide
uuuauaugcuauacagaug

SEQ ID NO: 694065 - RNA, 19 nt, Artificial Sequence
  Description of Artificial Sequence: Synthetic oligonucleotide
ugagcuguaagaagcagcu

SEQ ID NO: 694066 - RNA, 19 nt, Artificial Sequence
  Description of Artificial Sequence: Synthetic oligonucleotide
ugugcgacagucauauacc

SEQ ID NO: 694067 - RNA, 19 nt, Artificial Sequence
  Description of Artificial Sequence: Synthetic oligonucleotide
uuagggguugcaaauaaaa

SEQ ID NO: 694068 - RNA, 19 nt, Artificial Sequence
  Description of Artificial Sequence: Synthetic oligonucleotide
uaagugcucacgaagugug

SEQ ID NO: 694069 - RNA, 19 nt, Artificial Sequence
  Description of Artificial Sequence: Synthetic oligonucleotide
ucaagaauuacugccaggu

SEQ ID NO: 694070 - RNA, 19 nt, Artificial Sequence
  Description of Artificial Sequence: Synthetic oligonucleotide
cauuuaagugcucacgaag

SEQ ID NO: 694071 - RNA, 19 nt, Artificial Sequence
  Description of Artificial Sequence: Synthetic oligonucleotide
acugaaguauacuaccuca

SEQ ID NO: 694072 - RNA, 19 nt, Artificial Sequence
  Description of Artificial Sequence: Synthetic oligonucleotide
uacauggucagucuucugu

SEQ ID NO: 694073 - RNA, 19 nt, Artificial Sequence
  Description of Artificial Sequence: Synthetic oligonucleotide
aauucaugccgaugcugac

SEQ ID NO: 694074 - RNA, 19 nt, Artificial Sequence
  Description of Artificial Sequence: Synthetic oligonucleotide
ugaauugagaaaucauggu

SEQ ID NO: 694075 - RNA, 19 nt, Artificial Sequence
  Description of Artificial Sequence: Synthetic oligonucleotide
ugaaguauacuaccucaug

SEQ ID NO: 694076 - RNA, 19 nt, Artificial Sequence
  Description of Artificial Sequence: Synthetic oligonucleotide
gauaauaacaggagaugug

SEQ ID NO: 694077 - RNA, 19 nt, Artificial Sequence
  Description of Artificial Sequence: Synthetic oligonucleotide
ugcucuuugcaugacaaag

SEQ ID NO: 694078 - RNA, 19 nt, Artificial Sequence
  Description of Artificial Sequence: Synthetic oligonucleotide
aacuugguuugcuucuuag

SEQ ID NO: 694079 - RNA, 19 nt, Artificial Sequence
  Description of Artificial Sequence: Synthetic oligonucleotide
aaggcugaugcauauuccu

SEQ ID NO: 694080 - RNA, 19 nt, Artificial Sequence
  Description of Artificial Sequence: Synthetic oligonucleotide
ucuaauagagaaagcuuaa

SEQ ID NO: 694081 - RNA, 19 nt, Artificial Sequence
  Description of Artificial Sequence: Synthetic oligonucleotide
ugcuauacagaugucagga

SEQ ID NO: 694082 - RNA, 19 nt, Artificial Sequence
  Description of Artificial Sequence: Synthetic oligonucleotide
uggugugacauuauucuga

SEQ ID NO: 694083 - RNA, 19 nt, Artificial Sequence
  Description of Artificial Sequence: Synthetic oligonucleotide
auuuggaauacagccuucc

SEQ ID NO: 694084 - RNA, 19 nt, Artificial Sequence
  Description of Artificial Sequence: Synthetic oligonucleotide
uugcaaugagacuauauau

SEQ ID NO: 694085 - RNA, 19 nt, Artificial Sequence
  Description of Artificial Sequence: Synthetic oligonucleotide
uucaugccgaugcugacug

SEQ ID NO: 694086 - RNA, 19 nt, Artificial Sequence
  Description of Artificial Sequence: Synthetic oligonucleotide
ugauaauuaugaagucuug

SEQ ID NO: 694087 - RNA, 19 nt, Artificial Sequence
  Description of Artificial Sequence: Synthetic oligonucleotide
guuuauaugcuauacagau

SEQ ID NO: 694088 - RNA, 19 nt, Artificial Sequence
  Description of Artificial Sequence: Synthetic oligonucleotide
gaauugagaaaucauggua

SEQ ID NO: 694089 - RNA, 19 nt, Artificial Sequence
  Description of Artificial Sequence: Synthetic oligonucleotide
cacaacuguugcaaaagcc

SEQ ID NO: 694090 - RNA, 19 nt, Artificial Sequence
  Description of Artificial Sequence: Synthetic oligonucleotide
gauacguuucaaaucgaag

SEQ ID NO: 694091 - RNA, 19 nt, Artificial Sequence
  Description of Artificial Sequence: Synthetic oligonucleotide
uaaggauuguugagugccg

SEQ ID NO: 694092 - RNA, 19 nt, Artificial Sequence
  Description of Artificial Sequence: Synthetic oligonucleotide
uaguagaggaauguaaaac

SEQ ID NO: 694093 - RNA, 19 nt, Artificial Sequence
  Description of Artificial Sequence: Synthetic oligonucleotide
uccacguaccuccuaaaug

SEQ ID NO: 694094 - RNA, 19 nt, Artificial Sequence
  Description of Artificial Sequence: Synthetic oligonucleotide
acaucucaaaacaaggaag

SEQ ID NO: 694095 - RNA, 19 nt, Artificial Sequence
  Description of Artificial Sequence: Synthetic oligonucleotide
ugugcaauacagcucccug

SEQ ID NO: 694096 - RNA, 19 nt, Artificial Sequence
  Description of Artificial Sequence: Synthetic oligonucleotide
cuucugaaggugauagagg

SEQ ID NO: 694097 - RNA, 19 nt, Artificial Sequence
  Description of Artificial Sequence: Synthetic oligonucleotide
cagaagguaacuucucacc

SEQ ID NO: 694098 - RNA, 19 nt, Artificial Sequence
  Description of Artificial Sequence: Synthetic oligonucleotide
aacaugugcaauacagcuc

SEQ ID NO: 694099 - RNA, 19 nt, Artificial Sequence
  Description of Artificial Sequence: Synthetic oligonucleotide
caguccaucaacugugagg

SEQ ID NO: 694100 - RNA, 19 nt, Artificial Sequence
  Description of Artificial Sequence: Synthetic oligonucleotide
caaaucgaaguuuacuguc

SEQ ID NO: 694101 - RNA, 19 nt, Artificial Sequence
  Description of Artificial Sequence: Synthetic oligonucleotide
auaaaucgagcauggauaa

SEQ ID NO: 694102 - RNA, 19 nt, Artificial Sequence
  Description of Artificial Sequence: Synthetic oligonucleotide
cagucgauggauaauaaca

SEQ ID NO: 694103 - RNA, 19 nt, Artificial Sequence
  Description of Artificial Sequence: Synthetic oligonucleotide
aauuagccggcuacacucc

SEQ ID NO: 694104 - RNA, 19 nt, Artificial Sequence
  Description of Artificial Sequence: Synthetic oligonucleotide
cucuaauaaaucgagcaug

SEQ ID NO: 694105 - RNA, 19 nt, Artificial Sequence
  Description of Artificial Sequence: Synthetic oligonucleotide
aaugauggaagccgccgga

SEQ ID NO: 694106 - RNA, 19 nt, Artificial Sequence
  Description of Artificial Sequence: Synthetic oligonucleotide
cugugcgacagucauauac

SEQ ID NO: 694107 - RNA, 19 nt, Artificial Sequence
  Description of Artificial Sequence: Synthetic oligonucleotide
ucaauuaggcuaucaaaua

SEQ ID NO: 694108 - RNA, 19 nt, Artificial Sequence
  Description of Artificial Sequence: Synthetic oligonucleotide
uggauaauaacaggagaug

SEQ ID NO: 694109 - RNA, 19 nt, Artificial Sequence
  Description of Artificial Sequence: Synthetic oligonucleotide
auuguugagugccgugugg

SEQ ID NO: 694110 - RNA, 19 nt, Artificial Sequence
  Description of Artificial Sequence: Synthetic oligonucleotide
gucgauggauaauaacagg

SEQ ID NO: 694111 - RNA, 19 nt, Artificial Sequence
  Description of Artificial Sequence: Synthetic oligonucleotide
aauaagagcagcaguugga

SEQ ID NO: 694112 - RNA, 19 nt, Artificial Sequence
  Description of Artificial Sequence: Synthetic oligonucleotide
gacaucucaaaacaaggaa

SEQ ID NO: 694113 - RNA, 19 nt, Artificial Sequence
  Description of Artificial Sequence: Synthetic oligonucleotide
uguggagggcgauucgugg

SEQ ID NO: 694114 - RNA, 19 nt, Artificial Sequence
  Description of Artificial Sequence: Synthetic oligonucleotide
uuuuccacguaccuccuaa

SEQ ID NO: 694115 - RNA, 19 nt, Artificial Sequence
  Description of Artificial Sequence: Synthetic oligonucleotide
uacguuucaaaucgaaguu

SEQ ID NO: 694116 - RNA, 19 nt, Artificial Sequence
  Description of Artificial Sequence: Synthetic oligonucleotide
ucauuugacagccccaguu

SEQ ID NO: 694117 - RNA, 19 nt, Artificial Sequence
  Description of Artificial Sequence: Synthetic oligonucleotide
uaccucaugcaaaggcugg

SEQ ID NO: 694118 - RNA, 19 nt, Artificial Sequence
  Description of Artificial Sequence: Synthetic oligonucleotide
acuauauauggugugacau

SEQ ID NO: 694119 - RNA, 19 nt, Artificial Sequence
  Description of Artificial Sequence: Synthetic oligonucleotide
agaaacagcucuaauaaau

SEQ ID NO: 694120 - RNA, 19 nt, Artificial Sequence
  Description of Artificial Sequence: Synthetic oligonucleotide
agucgauggauaauaacag

SEQ ID NO: 694121 - RNA, 19 nt, Artificial Sequence
  Description of Artificial Sequence: Synthetic oligonucleotide
acaagagguaaaauuauga

SEQ ID NO: 694122 - RNA, 19 nt, Artificial Sequence
  Description of Artificial Sequence: Synthetic oligonucleotide
uuacuuucuggguugugcu

SEQ ID NO: 694123 - RNA, 19 nt, Artificial Sequence
  Description of Artificial Sequence: Synthetic oligonucleotide
uaaggacuucugaagguga

SEQ ID NO: 694124 - RNA, 19 nt, Artificial Sequence
  Description of Artificial Sequence: Synthetic oligonucleotide
ugauacguuucaaaucgaa

SEQ ID NO: 694125 - RNA, 19 nt, Artificial Sequence
  Description of Artificial Sequence: Synthetic oligonucleotide
uguccauagcaagugauac

SEQ ID NO: 694126 - RNA, 19 nt, Artificial Sequence
  Description of Artificial Sequence: Synthetic oligonucleotide
cuaaaugauggaagccgcc

SEQ ID NO: 694127 - RNA, 19 nt, Artificial Sequence
  Description of Artificial Sequence: Synthetic oligonucleotide
auaugcuauacagauguca

SEQ ID NO: 694128 - RNA, 19 nt, Artificial Sequence
  Description of Artificial Sequence: Synthetic oligonucleotide
ugacauucacaccaagaau

SEQ ID NO: 694129 - RNA, 19 nt, Artificial Sequence
  Description of Artificial Sequence: Synthetic oligonucleotide
aauccuuagcuugcaauga

SEQ ID NO: 694130 - RNA, 19 nt, Artificial Sequence
  Description of Artificial Sequence: Synthetic oligonucleotide
aauugcucuguuucggauu

SEQ ID NO: 694131 - RNA, 19 nt, Artificial Sequence
  Description of Artificial Sequence: Synthetic oligonucleotide
aauugaguuucuuccuuua

SEQ ID NO: 694132 - RNA, 19 nt, Artificial Sequence
  Description of Artificial Sequence: Synthetic oligonucleotide
agucgacaagguuaauuag

SEQ ID NO: 694133 - RNA, 19 nt, Artificial Sequence
  Description of Artificial Sequence: Synthetic oligonucleotide
aaugaggaucaguggaaau

SEQ ID NO: 694134 - RNA, 19 nt, Artificial Sequence
  Description of Artificial Sequence: Synthetic oligonucleotide
aguauacuaccucaugcaa

SEQ ID NO: 694135 - RNA, 19 nt, Artificial Sequence
  Description of Artificial Sequence: Synthetic oligonucleotide
uuucggauuucauccguug

SEQ ID NO: 694136 - RNA, 19 nt, Artificial Sequence
  Description of Artificial Sequence: Synthetic oligonucleotide
uucauaugauaaacaugca

SEQ ID NO: 694137 - RNA, 19 nt, Artificial Sequence
  Description of Artificial Sequence: Synthetic oligonucleotide
ucguggugcagcauuuaag

SEQ ID NO: 694138 - RNA, 19 nt, Artificial Sequence
  Description of Artificial Sequence: Synthetic oligonucleotide
aaaaugaggaucaguggaa

SEQ ID NO: 694139 - RNA, 19 nt, Artificial Sequence
  Description of Artificial Sequence: Synthetic oligonucleotide
gacaagagguaaaauuaug

SEQ ID NO: 694140 - RNA, 19 nt, Artificial Sequence
  Description of Artificial Sequence: Synthetic oligonucleotide
ucucuguuagacuucugaa

SEQ ID NO: 694141 - RNA, 19 nt, Artificial Sequence
  Description of Artificial Sequence: Synthetic oligonucleotide
uuaagugcucacgaagugu

SEQ ID NO: 694142 - RNA, 19 nt, Artificial Sequence
  Description of Artificial Sequence: Synthetic oligonucleotide
ucaugcaaaggcuggcucu

SEQ ID NO: 694143 - RNA, 19 nt, Artificial Sequence
  Description of Artificial Sequence: Synthetic oligonucleotide
ugaggaucaguggaaauuc

SEQ ID NO: 694144 - RNA, 19 nt, Artificial Sequence
  Description of Artificial Sequence: Synthetic oligonucleotide
cuaauagagaaagcuuaag

SEQ ID NO: 694145 - RNA, 19 nt, Artificial Sequence
  Description of Artificial Sequence: Synthetic oligonucleotide
auggauaauaacaggagau

SEQ ID NO: 694146 - RNA, 19 nt, Artificial Sequence
  Description of Artificial Sequence: Synthetic oligonucleotide
aaauguucuaauagagaaa

SEQ ID NO: 694147 - RNA, 19 nt, Artificial Sequence
  Description of Artificial Sequence: Synthetic oligonucleotide
gucgacaagguuaauuagc

SEQ ID NO: 694148 - RNA, 19 nt, Artificial Sequence
  Description of Artificial Sequence: Synthetic oligonucleotide
agaauaagagcagcaguug

SEQ ID NO: 694149 - RNA, 19 nt, Artificial Sequence
  Description of Artificial Sequence: Synthetic oligonucleotide
gauuguugagugccgugug

SEQ ID NO: 694150 - RNA, 19 nt, Artificial Sequence
  Description of Artificial Sequence: Synthetic oligonucleotide
ugcuuuguaguagaggaau

SEQ ID NO: 694151 - RNA, 19 nt, Artificial Sequence
  Description of Artificial Sequence: Synthetic oligonucleotide
ucuuaguuguucuccuuaa

SEQ ID NO: 694152 - RNA, 19 nt, Artificial Sequence
  Description of Artificial Sequence: Synthetic oligonucleotide
gauaaucacaacaggcgga

SEQ ID NO: 694153 - RNA, 19 nt, Artificial Sequence
  Description of Artificial Sequence: Synthetic oligonucleotide
cacaacaggcggaaauugc

SEQ ID NO: 694154 - RNA, 19 nt, Artificial Sequence
  Description of Artificial Sequence: Synthetic oligonucleotide
aucgagcauggauaauuuc

SEQ ID NO: 694155 - RNA, 19 nt, Artificial Sequence
  Description of Artificial Sequence: Synthetic oligonucleotide
aaucaugguauaagaagau

SEQ ID NO: 694156 - RNA, 19 nt, Artificial Sequence
  Description of Artificial Sequence: Synthetic oligonucleotide
uccuuagcuugcaaugaga

SEQ ID NO: 694157 - RNA, 19 nt, Artificial Sequence
  Description of Artificial Sequence: Synthetic oligonucleotide
auccguuguccauagcaag

SEQ ID NO: 694158 - RNA, 19 nt, Artificial Sequence
  Description of Artificial Sequence: Synthetic oligonucleotide
guucuauacacagaagaga

SEQ ID NO: 694159 - RNA, 19 nt, Artificial Sequence
  Description of Artificial Sequence: Synthetic oligonucleotide
gauagaggucuguuuucug

SEQ ID NO: 694160 - RNA, 19 nt, Artificial Sequence
  Description of Artificial Sequence: Synthetic oligonucleotide
ugacugugauccacaagca

SEQ ID NO: 694161 - RNA, 19 nt, Artificial Sequence
  Description of Artificial Sequence: Synthetic oligonucleotide
cuugcaaugagacuauaua

SEQ ID NO: 694162 - RNA, 19 nt, Artificial Sequence
  Description of Artificial Sequence: Synthetic oligonucleotide
ugacaaagacuggaaaagu

SEQ ID NO: 694163 - RNA, 19 nt, Artificial Sequence
  Description of Artificial Sequence: Synthetic oligonucleotide
gacuauauauggugugaca

SEQ ID NO: 694164 - RNA, 19 nt, Artificial Sequence
  Description of Artificial Sequence: Synthetic oligonucleotide
aaaugaggaucaguggaaa

SEQ ID NO: 694165 - RNA, 19 nt, Artificial Sequence
  Description of Artificial Sequence: Synthetic oligonucleotide
auugagaaaucaugguaua

SEQ ID NO: 694166 - RNA, 19 nt, Artificial Sequence
  Description of Artificial Sequence: Synthetic oligonucleotide
uguugagugccguguggag

SEQ ID NO: 694167 - RNA, 19 nt, Artificial Sequence
  Description of Artificial Sequence: Synthetic oligonucleotide
uuuguaguagaggaaugua

SEQ ID NO: 694168 - RNA, 19 nt, Artificial Sequence
  Description of Artificial Sequence: Synthetic oligonucleotide
gaaaaguucuauacacaga

SEQ ID NO: 694169 - RNA, 19 nt, Artificial Sequence
  Description of Artificial Sequence: Synthetic oligonucleotide
aucaugguauaagaagaug

SEQ ID NO: 694170 - RNA, 19 nt, Artificial Sequence
  Description of Artificial Sequence: Synthetic oligonucleotide
aaacuguaucauuggucaa

SEQ ID NO: 694171 - RNA, 19 nt, Artificial Sequence
  Description of Artificial Sequence: Synthetic oligonucleotide
gaaauugccauuggcuaga

SEQ ID NO: 694172 - RNA, 19 nt, Artificial Sequence
  Description of Artificial Sequence: Synthetic oligonucleotide
cagcacugaaguauacuac

SEQ ID NO: 694173 - RNA, 19 nt, Artificial Sequence
  Description of Artificial Sequence: Synthetic oligonucleotide
ugcugauaauuaugaaguc

SEQ ID NO: 694174 - RNA, 19 nt, Artificial Sequence
  Description of Artificial Sequence: Synthetic oligonucleotide
gagacuauauaugguguga

SEQ ID NO: 694175 - RNA, 19 nt, Artificial Sequence
  Description of Artificial Sequence: Synthetic oligonucleotide
gcgacagucauauaccaac

SEQ ID NO: 694176 - RNA, 19 nt, Artificial Sequence
  Description of Artificial Sequence: Synthetic oligonucleotide
guuaauuagccggcuacac

SEQ ID NO: 694177 - RNA, 19 nt, Artificial Sequence
  Description of Artificial Sequence: Synthetic oligonucleotide
ugccauuggcuagaaguag

SEQ ID NO: 694178 - RNA, 19 nt, Artificial Sequence
  Description of Artificial Sequence: Synthetic oligonucleotide
uauuuggaauacagccuuc

SEQ ID NO: 694179 - RNA, 19 nt, Artificial Sequence
  Description of Artificial Sequence: Synthetic oligonucleotide
uacuuucuggguugugcug

SEQ ID NO: 694180 - RNA, 19 nt, Artificial Sequence
  Description of Artificial Sequence: Synthetic oligonucleotide
aagcagucgauggauaaua

SEQ ID NO: 694181 - RNA, 19 nt, Artificial Sequence
  Description of Artificial Sequence: Synthetic oligonucleotide
guaguagaggaauguaaaa

SEQ ID NO: 694182 - RNA, 19 nt, Artificial Sequence
  Description of Artificial Sequence: Synthetic oligonucleotide
auaaucacaacaggcggaa

SEQ ID NO: 694183 - RNA, 19 nt, Artificial Sequence
  Description of Artificial Sequence: Synthetic oligonucleotide
acuaccucaugcaaaggcu

SEQ ID NO: 694184 - RNA, 19 nt, Artificial Sequence
  Description of Artificial Sequence: Synthetic oligonucleotide
ccuaaaugauggaagccgc

SEQ ID NO: 694185 - RNA, 19 nt, Artificial Sequence
  Description of Artificial Sequence: Synthetic oligonucleotide
uucguggugcagcauuuaa

SEQ ID NO: 694186 - RNA, 19 nt, Artificial Sequence
  Description of Artificial Sequence: Synthetic oligonucleotide
acauuauucugaagggucu

SEQ ID NO: 694187 - RNA, 19 nt, Artificial Sequence
  Description of Artificial Sequence: Synthetic oligonucleotide
caagaauuacugccaggug

SEQ ID NO: 694188 - RNA, 19 nt, Artificial Sequence
  Description of Artificial Sequence: Synthetic oligonucleotide
ggaaagugaauccauugaa

SEQ ID NO: 694189 - RNA, 19 nt, Artificial Sequence
  Description of Artificial Sequence: Synthetic oligonucleotide
cagcucuaauaaaucgagc

SEQ ID NO: 694190 - RNA, 19 nt, Artificial Sequence
  Description of Artificial Sequence: Synthetic oligonucleotide
uuguugagugccgugugga

SEQ ID NO: 694191 - RNA, 19 nt, Artificial Sequence
  Description of Artificial Sequence: Synthetic oligonucleotide
cugauaauuaugaagucuu

SEQ ID NO: 694192 - RNA, 19 nt, Artificial Sequence
  Description of Artificial Sequence: Synthetic oligonucleotide
ccuccuaaaugauggaagc

SEQ ID NO: 694193 - RNA, 19 nt, Artificial Sequence
  Description of Artificial Sequence: Synthetic oligonucleotide
uuccacguaccuccuaaau

SEQ ID NO: 694194 - RNA, 19 nt, Artificial Sequence
  Description of Artificial Sequence: Synthetic oligonucleotide
auuauucugaagggucucu

SEQ ID NO: 694195 - RNA, 19 nt, Artificial Sequence
  Description of Artificial Sequence: Synthetic oligonucleotide
ccuuagcuugcaaugagac

SEQ ID NO: 694196 - RNA, 19 nt, Artificial Sequence
  Description of Artificial Sequence: Synthetic oligonucleotide
uuggucaacagugcaacuu

SEQ ID NO: 694197 - RNA, 19 nt, Artificial Sequence
  Description of Artificial Sequence: Synthetic oligonucleotide
agugcucacgaagugugug

SEQ ID NO: 694198 - RNA, 19 nt, Artificial Sequence
  Description of Artificial Sequence: Synthetic oligonucleotide
ugcgacagucauauaccaa

SEQ ID NO: 694199 - RNA, 19 nt, Artificial Sequence
  Description of Artificial Sequence: Synthetic oligonucleotide
gauggaagccgccggaugu

SEQ ID NO: 694200 - RNA, 19 nt, Artificial Sequence
  Description of Artificial Sequence: Synthetic oligonucleotide
auuggucaacagugcaacu

SEQ ID NO: 694201 - RNA, 19 nt, Artificial Sequence
  Description of Artificial Sequence: Synthetic oligonucleotide
ggggucuuaacacuuuuca

SEQ ID NO: 694202 - RNA, 19 nt, Artificial Sequence
  Description of Artificial Sequence: Synthetic oligonucleotide
ucuuaacacuuuucaccuc

SEQ ID NO: 694203 - RNA, 19 nt, Artificial Sequence
  Description of Artificial Sequence: Synthetic oligonucleotide
agaucacagcacagaacac

SEQ ID NO: 694204 - RNA, 19 nt, Artificial Sequence
  Description of Artificial Sequence: Synthetic oligonucleotide
agaaccuguaaugccuucu

SEQ ID NO: 694205 - RNA, 19 nt, Artificial Sequence
  Description of Artificial Sequence: Synthetic oligonucleotide
uuaggggucuuaacacuuu

SEQ ID NO: 694206 - RNA, 19 nt, Artificial Sequence
  Description of Artificial Sequence: Synthetic oligonucleotide
gcuauacagaugucaggag

SEQ ID NO: 694207 - RNA, 19 nt, Artificial Sequence
  Description of Artificial Sequence: Synthetic oligonucleotide
cauugaauaauuugucuuu

SEQ ID NO: 694208 - RNA, 19 nt, Artificial Sequence
  Description of Artificial Sequence: Synthetic oligonucleotide
ccggcuacacuccaggugc

SEQ ID NO: 694209 - RNA, 19 nt, Artificial Sequence
  Description of Artificial Sequence: Synthetic oligonucleotide
augucagccuugcuacaug

SEQ ID NO: 694210 - RNA, 19 nt, Artificial Sequence
  Description of Artificial Sequence: Synthetic oligonucleotide
ccacguaccuccuaaauga

SEQ ID NO: 694211 - RNA, 19 nt, Artificial Sequence
  Description of Artificial Sequence: Synthetic oligonucleotide
guauacuaccucaugcaaa

SEQ ID NO: 694212 - RNA, 19 nt, Artificial Sequence
  Description of Artificial Sequence: Synthetic oligonucleotide
cauuauucugaagggucuc

SEQ ID NO: 694213 - RNA, 19 nt, Artificial Sequence
  Description of Artificial Sequence: Synthetic oligonucleotide
auacuaccucaugcaaagg

SEQ ID NO: 694214 - RNA, 19 nt, Artificial Sequence
  Description of Artificial Sequence: Synthetic oligonucleotide
uagcuugcaaugagacuau

SEQ ID NO: 694215 - RNA, 19 nt, Artificial Sequence
  Description of Artificial Sequence: Synthetic oligonucleotide
cugucgacccaguggguac

SEQ ID NO: 694216 - RNA, 19 nt, Artificial Sequence
  Description of Artificial Sequence: Synthetic oligonucleotide
caacaggcggaaauugcca

SEQ ID NO: 694217 - RNA, 19 nt, Artificial Sequence
  Description of Artificial Sequence: Synthetic oligonucleotide
gggucuuaacacuuuucac

SEQ ID NO: 694218 - RNA, 19 nt, Artificial Sequence
  Description of Artificial Sequence: Synthetic oligonucleotide
uuuccacguaccuccuaaa

SEQ ID NO: 694219 - RNA, 19 nt, Artificial Sequence
  Description of Artificial Sequence: Synthetic oligonucleotide
uaggggucuuaacacuuuu

SEQ ID NO: 694220 - RNA, 19 nt, Artificial Sequence
  Description of Artificial Sequence: Synthetic oligonucleotide
ucugucgacccagugggua

SEQ ID NO: 694221 - RNA, 19 nt, Artificial Sequence
  Description of Artificial Sequence: Synthetic oligonucleotide
cucacgaagugugugggca

SEQ ID NO: 694222 - RNA, 19 nt, Artificial Sequence
  Description of Artificial Sequence: Synthetic oligonucleotide
gggucagaaaauccuuuac

SEQ ID NO: 694223 - RNA, 19 nt, Artificial Sequence
  Description of Artificial Sequence: Synthetic oligonucleotide
cauccguuguccauagcaa

SEQ ID NO: 694224 - RNA, 19 nt, Artificial Sequence
  Description of Artificial Sequence: Synthetic oligonucleotide
gugcgacagucauauacca

SEQ ID NO: 694225 - RNA, 19 nt, Artificial Sequence
  Description of Artificial Sequence: Synthetic oligonucleotide
aggaaguaauucauaugau

SEQ ID NO: 694226 - RNA, 19 nt, Artificial Sequence
  Description of Artificial Sequence: Synthetic oligonucleotide
cugaucugucgacccagug

SEQ ID NO: 694227 - RNA, 19 nt, Artificial Sequence
  Description of Artificial Sequence: Synthetic oligonucleotide
gugugacauuauucugaag

SEQ ID NO: 694228 - RNA, 19 nt, Artificial Sequence
  Description of Artificial Sequence: Synthetic oligonucleotide
gcagucgauggauaauaac

SEQ ID NO: 694229 - RNA, 19 nt, Artificial Sequence
  Description of Artificial Sequence: Synthetic oligonucleotide
ggugauagaggucuguuuu

SEQ ID NO: 694230 - RNA, 19 nt, Artificial Sequence
  Description of Artificial Sequence: Synthetic oligonucleotide
cuuagggguugcaaauaaa

SEQ ID NO: 694231 - RNA, 19 nt, Artificial Sequence
  Description of Artificial Sequence: Synthetic oligonucleotide
cuuuguaguagaggaaugu

SEQ ID NO: 694232 - RNA, 19 nt, Artificial Sequence
  Description of Artificial Sequence: Synthetic oligonucleotide
acagaacacuuagggguug

SEQ ID NO: 694233 - RNA, 19 nt, Artificial Sequence
  Description of Artificial Sequence: Synthetic oligonucleotide
augugcaauacagcucccu

SEQ ID NO: 694234 - RNA, 19 nt, Artificial Sequence
  Description of Artificial Sequence: Synthetic oligonucleotide
gaggaucaguggaaauuca

SEQ ID NO: 694235 - RNA, 19 nt, Artificial Sequence
  Description of Artificial Sequence: Synthetic oligonucleotide
gaccagucgacaagguuaa

SEQ ID NO: 694236 - RNA, 19 nt, Artificial Sequence
  Description of Artificial Sequence: Synthetic oligonucleotide
uaaaucgagcauggauaau

SEQ ID NO: 694237 - RNA, 19 nt, Artificial Sequence
  Description of Artificial Sequence: Synthetic oligonucleotide
aguaugcucaucaguucau

SEQ ID NO: 694238 - RNA, 19 nt, Artificial Sequence
  Description of Artificial Sequence: Synthetic oligonucleotide
cuuagcuugcaaugagacu

SEQ ID NO: 694239 - RNA, 19 nt, Artificial Sequence
  Description of Artificial Sequence: Synthetic oligonucleotide
gagugccguguggagggcg

SEQ ID NO: 694240 - RNA, 19 nt, Artificial Sequence
  Description of Artificial Sequence: Synthetic oligonucleotide
cuacauggucagucuucug

SEQ ID NO: 694241 - RNA, 19 nt, Artificial Sequence
  Description of Artificial Sequence: Synthetic oligonucleotide
aagugcucacgaagugugu

SEQ ID NO: 694242 - RNA, 19 nt, Artificial Sequence
  Description of Artificial Sequence: Synthetic oligonucleotide
guaccuccuaaaugaugga

SEQ ID NO: 694243 - RNA, 19 nt, Artificial Sequence
  Description of Artificial Sequence: Synthetic oligonucleotide
cuauauauggugugacauu

SEQ ID NO: 694244 - RNA, 19 nt, Artificial Sequence
  Description of Artificial Sequence: Synthetic oligonucleotide
auacagaugucaggagcaa

SEQ ID NO: 694245 - RNA, 19 nt, Artificial Sequence
  Description of Artificial Sequence: Synthetic oligonucleotide
auauauggugugacauuau

SEQ ID NO: 694246 - RNA, 19 nt, Artificial Sequence
  Description of Artificial Sequence: Synthetic oligonucleotide
ucaugccgaugcugacugc

SEQ ID NO: 694247 - RNA, 19 nt, Artificial Sequence
  Description of Artificial Sequence: Synthetic oligonucleotide
gguuaauuagccggcuaca

SEQ ID NO: 694248 - RNA, 19 nt, Artificial Sequence
  Description of Artificial Sequence: Synthetic oligonucleotide
ugucgacccaguggguacu

SEQ ID NO: 694249 - RNA, 19 nt, Artificial Sequence
  Description of Artificial Sequence: Synthetic oligonucleotide
ggucaacagugcaacuugc

SEQ ID NO: 694250 - RNA, 19 nt, Artificial Sequence
  Description of Artificial Sequence: Synthetic oligonucleotide
guguggagggcgauucgug

SEQ ID NO: 694251 - RNA, 19 nt, Artificial Sequence
  Description of Artificial Sequence: Synthetic oligonucleotide
ggauuucauccguugucca

SEQ ID NO: 694252 - RNA, 19 nt, Artificial Sequence
  Description of Artificial Sequence: Synthetic oligonucleotide
gcuugcuuuuccacguacc

SEQ ID NO: 694253 - RNA, 19 nt, Artificial Sequence
  Description of Artificial Sequence: Synthetic oligonucleotide
ccuugcuacauggucaguc

SEQ ID NO: 694254 - RNA, 19 nt, Artificial Sequence
  Description of Artificial Sequence: Synthetic oligonucleotide
cgacaagguuaauuagccg

SEQ ID NO: 694255 - RNA, 19 nt, Artificial Sequence
  Description of Artificial Sequence: Synthetic oligonucleotide
auaaagccuaaaagcucaa

SEQ ID NO: 694256 - RNA, 19 nt, Artificial Sequence
  Description of Artificial Sequence: Synthetic oligonucleotide
gaaccuguaaugccuucuu

SEQ ID NO: 694257 - RNA, 19 nt, Artificial Sequence
  Description of Artificial Sequence: Synthetic oligonucleotide
gccggcuacacuccaggug

SEQ ID NO: 694258 - RNA, 19 nt, Artificial Sequence
  Description of Artificial Sequence: Synthetic oligonucleotide
gaaggugauagaggucugu

SEQ ID NO: 694259 - RNA, 19 nt, Artificial Sequence
  Description of Artificial Sequence: Synthetic oligonucleotide
agcagucgauggauaauaa

SEQ ID NO: 694260 - RNA, 19 nt, Artificial Sequence
  Description of Artificial Sequence: Synthetic oligonucleotide
augauggaagccgccggau

SEQ ID NO: 694261 - RNA, 19 nt, Artificial Sequence
  Description of Artificial Sequence: Synthetic oligonucleotide
cuguaaugccuucuuacuu

SEQ ID NO: 694262 - RNA, 19 nt, Artificial Sequence
  Description of Artificial Sequence: Synthetic oligonucleotide
agccggcuacacuccaggu

SEQ ID NO: 694263 - RNA, 19 nt, Artificial Sequence
  Description of Artificial Sequence: Synthetic oligonucleotide
gcucuaauaaaucgagcau

SEQ ID NO: 694264 - RNA, 19 nt, Artificial Sequence
  Description of Artificial Sequence: Synthetic oligonucleotide
ggcgauucguggugcagca

SEQ ID NO: 694265 - RNA, 19 nt, Artificial Sequence
  Description of Artificial Sequence: Synthetic oligonucleotide
agcaguccaucaacuguga

SEQ ID NO: 694266 - RNA, 19 nt, Artificial Sequence
  Description of Artificial Sequence: Synthetic oligonucleotide
gagggcgauucguggugca

SEQ ID NO: 694267 - RNA, 19 nt, Artificial Sequence
  Description of Artificial Sequence: Synthetic oligonucleotide
gaagcagucgauggauaau

SEQ ID NO: 694268 - RNA, 19 nt, Artificial Sequence
  Description of Artificial Sequence: Synthetic oligonucleotide
gcuucuuaguuguucuccu

SEQ ID NO: 694269 - RNA, 19 nt, Artificial Sequence
  Description of Artificial Sequence: Synthetic oligonucleotide
gcucacgaagugugugggc

SEQ ID NO: 694270 - RNA, 19 nt, Artificial Sequence
  Description of Artificial Sequence: Synthetic oligonucleotide
ucgacccaguggguacuug

SEQ ID NO: 694271 - RNA, 19 nt, Artificial Sequence
  Description of Artificial Sequence: Synthetic oligonucleotide
cacagaacacuuagggguu

SEQ ID NO: 694272 - RNA, 19 nt, Artificial Sequence
  Description of Artificial Sequence: Synthetic oligonucleotide
gugcucuuugcaugacaaa

SEQ ID NO: 694273 - RNA, 19 nt, Artificial Sequence
  Description of Artificial Sequence: Synthetic oligonucleotide
cuguuucguagguuuuaua

SEQ ID NO: 694274 - RNA, 19 nt, Artificial Sequence
  Description of Artificial Sequence: Synthetic oligonucleotide
caguaauaauugaguuucu

SEQ ID NO: 694275 - RNA, 19 nt, Artificial Sequence
  Description of Artificial Sequence: Synthetic oligonucleotide
gucaacagugcaacuugcu

SEQ ID NO: 694276 - RNA, 19 nt, Artificial Sequence
  Description of Artificial Sequence: Synthetic oligonucleotide
ggauuguugagugccgugu

SEQ ID NO: 694277 - RNA, 19 nt, Artificial Sequence
  Description of Artificial Sequence: Synthetic oligonucleotide
guggaagcagucgauggau

SEQ ID NO: 694278 - RNA, 19 nt, Artificial Sequence
  Description of Artificial Sequence: Synthetic oligonucleotide
ccguuguccauagcaagug

SEQ ID NO: 694279 - RNA, 19 nt, Artificial Sequence
  Description of Artificial Sequence: Synthetic oligonucleotide
gguaacuucucaccagguu

SEQ ID NO: 694280 - RNA, 19 nt, Artificial Sequence
  Description of Artificial Sequence: Synthetic oligonucleotide
uggaagccgccggauguuu

SEQ ID NO: 694281 - RNA, 19 nt, Artificial Sequence
  Description of Artificial Sequence: Synthetic oligonucleotide
ccaggugcucuuugcauga

SEQ ID NO: 694282 - RNA, 19 nt, Artificial Sequence
  Description of Artificial Sequence: Synthetic oligonucleotide
cguggugcagcauuuaagu

SEQ ID NO: 694283 - RNA, 19 nt, Artificial Sequence
  Description of Artificial Sequence: Synthetic oligonucleotide
cccuuugacugugauccac

SEQ ID NO: 694284 - RNA, 19 nt, Artificial Sequence
  Description of Artificial Sequence: Synthetic oligonucleotide
gggccugucgccugugcga

SEQ ID NO: 694285 - RNA, 19 nt, Artificial Sequence
  Description of Artificial Sequence: Synthetic oligonucleotide
gucgccugugcgacaguca

SEQ ID NO: 694286 - RNA, 19 nt, Artificial Sequence
  Description of Artificial Sequence: Synthetic oligonucleotide
cagugcaacuugcuuuccu

SEQ ID NO: 694287 - RNA, 19 nt, Artificial Sequence
  Description of Artificial Sequence: Synthetic oligonucleotide
ccggauguuuucacauuga

SEQ ID NO: 694288 - RNA, 19 nt, Artificial Sequence
  Description of Artificial Sequence: Synthetic oligonucleotide
gccguguggagggcgauuc

SEQ ID NO: 694289 - RNA, 19 nt, Artificial Sequence
  Description of Artificial Sequence: Synthetic oligonucleotide
cacguaccuccuaaaugau

SEQ ID NO: 694290 - RNA, 19 nt, Artificial Sequence
  Description of Artificial Sequence: Synthetic oligonucleotide
gccgccggauguuuucaca

SEQ ID NO: 694291 - RNA, 19 nt, Artificial Sequence
  Description of Artificial Sequence: Synthetic oligonucleotide
ggccugucgccugugcgac

SEQ ID NO: 694292 - RNA, 19 nt, Artificial Sequence
  Description of Artificial Sequence: Synthetic oligonucleotide
gccauuggcuagaaguagu

SEQ ID NO: 694293 - RNA, 19 nt, Artificial Sequence
  Description of Artificial Sequence: Synthetic oligonucleotide
ccguguggagggcgauucg

SEQ ID NO: 694294 - RNA, 19 nt, Artificial Sequence
  Description of Artificial Sequence: Synthetic oligonucleotide
gcuugcaaugagacuauau

SEQ ID NO: 694295 - RNA, 19 nt, Artificial Sequence
  Description of Artificial Sequence: Synthetic oligonucleotide
ugccguguggagggcgauu

SEQ ID NO: 694296 - RNA, 19 nt, Artificial Sequence
  Description of Artificial Sequence: Synthetic oligonucleotide
cgacagucauauaccaacu

SEQ ID NO: 694297 - RNA, 19 nt, Artificial Sequence
  Description of Artificial Sequence: Synthetic oligonucleotide
ggcuagaaguaguccucuu

SEQ ID NO: 694298 - RNA, 19 nt, Artificial Sequence
  Description of Artificial Sequence: Synthetic oligonucleotide
gccgaugcugacugcugau

SEQ ID NO: 694299 - RNA, 19 nt, Artificial Sequence
  Description of Artificial Sequence: Synthetic oligonucleotide
cgauucguggugcagcauu

SEQ ID NO: 694300 - RNA, 19 nt, Artificial Sequence
  Description of Artificial Sequence: Synthetic oligonucleotide
ccgaugcugacugcugaua

SEQ ID NO: 694301 - RNA, 19 nt, Artificial Sequence
  Description of Artificial Sequence: Synthetic oligonucleotide
gccugucgccugugcgaca

SEQ ID NO: 694302 - RNA, 19 nt, Artificial Sequence
  Description of Artificial Sequence: Synthetic oligonucleotide
gccuccccaugucagccuu

SEQ ID NO: 694303 - RNA, 19 nt, Artificial Sequence
  Description of Artificial Sequence: Synthetic oligonucleotide
gucgacccaguggguacuu

SEQ ID NO: 694304 - RNA, 19 nt, Artificial Sequence
  Description of Artificial Sequence: Synthetic oligonucleotide
cguguggagggcgauucgu

SEQ ID NO: 694305 - RNA, 19 nt, Artificial Sequence
  Description of Artificial Sequence: Synthetic oligonucleotide
gugccguguggagggcgau

SEQ ID NO: 694306 - RNA, 19 nt, Artificial Sequence
  Description of Artificial Sequence: Synthetic oligonucleotide
ccugugcgacagucauaua

SEQ ID NO: 694307 - RNA, 19 nt, Artificial Sequence
  Description of Artificial Sequence: Synthetic oligonucleotide
gcgauucguggugcagcau

SEQ ID NO: 694308 - RNA, 19 nt, Artificial Sequence
  Description of Artificial Sequence: Synthetic oligonucleotide
uguauggcugucaaaaggg

SEQ ID NO: 694309 - RNA, 19 nt, Artificial Sequence
  Description of Artificial Sequence: Synthetic oligonucleotide
aaagugacuaggcuauggc

SEQ ID NO: 694310 - RNA, 19 nt, Artificial Sequence
  Description of Artificial Sequence: Synthetic oligonucleotide
aaauuauuacagcagagau

SEQ ID NO: 694311 - RNA, 19 nt, Artificial Sequence
  Description of Artificial Sequence: Synthetic oligonucleotide
agaaauguaauacaauggu

SEQ ID NO: 694312 - RNA, 19 nt, Artificial Sequence
  Description of Artificial Sequence: Synthetic oligonucleotide
aaccuaaauuauuacagca

SEQ ID NO: 694313 - RNA, 19 nt, Artificial Sequence
  Description of Artificial Sequence: Synthetic oligonucleotide
ucuaaggaguccuacaaug

SEQ ID NO: 694314 - RNA, 19 nt, Artificial Sequence
  Description of Artificial Sequence: Synthetic oligonucleotide
augcugauuacacaggagg

SEQ ID NO: 694315 - RNA, 19 nt, Artificial Sequence
  Description of Artificial Sequence: Synthetic oligonucleotide
ugaguugucguaauagcag

SEQ ID NO: 694316 - RNA, 19 nt, Artificial Sequence
  Description of Artificial Sequence: Synthetic oligonucleotide
cagaaauguaauacaaugg

SEQ ID NO: 694317 - RNA, 19 nt, Artificial Sequence
  Description of Artificial Sequence: Synthetic oligonucleotide
cuaaguagaaccuaaauua

SEQ ID NO: 694318 - RNA, 19 nt, Artificial Sequence
  Description of Artificial Sequence: Synthetic oligonucleotide
uccacaaggagucaaggug

SEQ ID NO: 694319 - RNA, 19 nt, Artificial Sequence
  Description of Artificial Sequence: Synthetic oligonucleotide
uuuauaucugggaacacau

SEQ ID NO: 694320 - RNA, 19 nt, Artificial Sequence
  Description of Artificial Sequence: Synthetic oligonucleotide
aacagcagaggguuaaucu

SEQ ID NO: 694321 - RNA, 19 nt, Artificial Sequence
  Description of Artificial Sequence: Synthetic oligonucleotide
uugcaugugaugaaguaug

SEQ ID NO: 694322 - RNA, 19 nt, Artificial Sequence
  Description of Artificial Sequence: Synthetic oligonucleotide
aaugccaguagggugacag

SEQ ID NO: 694323 - RNA, 19 nt, Artificial Sequence
  Description of Artificial Sequence: Synthetic oligonucleotide
aguugugcaccacucgugc

SEQ ID NO: 694324 - RNA, 19 nt, Artificial Sequence
  Description of Artificial Sequence: Synthetic oligonucleotide
caagaaaagcuccacagac

SEQ ID NO: 694325 - RNA, 19 nt, Artificial Sequence
  Description of Artificial Sequence: Synthetic oligonucleotide
ucuaggagaacccggauau

SEQ ID NO: 694326 - RNA, 19 nt, Artificial Sequence
  Description of Artificial Sequence: Synthetic oligonucleotide
ugauuuauaucugggaaca

SEQ ID NO: 694327 - RNA, 19 nt, Artificial Sequence
  Description of Artificial Sequence: Synthetic oligonucleotide
uagaaccuaaauuauuaca

SEQ ID NO: 694328 - RNA, 19 nt, Artificial Sequence
  Description of Artificial Sequence: Synthetic oligonucleotide
uugaguugucguaauagca

SEQ ID NO: 694329 - RNA, 19 nt, Artificial Sequence
  Description of Artificial Sequence: Synthetic oligonucleotide
cugcuagucauuuacuugc

SEQ ID NO: 694330 - RNA, 19 nt, Artificial Sequence
  Description of Artificial Sequence: Synthetic oligonucleotide
ugggaagucauacccaagc

SEQ ID NO: 694331 - RNA, 19 nt, Artificial Sequence
  Description of Artificial Sequence: Synthetic oligonucleotide
cuaaccuuggagcugacac

SEQ ID NO: 694332 - RNA, 19 nt, Artificial Sequence
  Description of Artificial Sequence: Synthetic oligonucleotide
gaacacaugaugcugauua

SEQ ID NO: 694333 - RNA, 19 nt, Artificial Sequence
  Description of Artificial Sequence: Synthetic oligonucleotide
uaucgcaugcugcagcggg

SEQ ID NO: 694334 - RNA, 19 nt, Artificial Sequence
  Description of Artificial Sequence: Synthetic oligonucleotide
uccacguaguuaaacagca

SEQ ID NO: 694335 - RNA, 19 nt, Artificial Sequence
  Description of Artificial Sequence: Synthetic oligonucleotide
uauagaagcgguguucuag

SEQ ID NO: 694336 - RNA, 19 nt, Artificial Sequence
  Description of Artificial Sequence: Synthetic oligonucleotide
uuacacaggaggcucagga

SEQ ID NO: 694337 - RNA, 19 nt, Artificial Sequence
  Description of Artificial Sequence: Synthetic oligonucleotide
aucguucuccacaaaaugc

SEQ ID NO: 694338 - RNA, 19 nt, Artificial Sequence
  Description of Artificial Sequence: Synthetic oligonucleotide
cuaaggaguccuacaaugg

SEQ ID NO: 694339 - RNA, 19 nt, Artificial Sequence
  Description of Artificial Sequence: Synthetic oligonucleotide
aaagggaacagcacaucac

SEQ ID NO: 694340 - RNA, 19 nt, Artificial Sequence
  Description of Artificial Sequence: Synthetic oligonucleotide
uuaagacccucuuuaacac

SEQ ID NO: 694341 - RNA, 19 nt, Artificial Sequence
  Description of Artificial Sequence: Synthetic oligonucleotide
ucccuauuguaugaaaggg

SEQ ID NO: 694342 - RNA, 19 nt, Artificial Sequence
  Description of Artificial Sequence: Synthetic oligonucleotide
ucguguugcacuuaucaca

SEQ ID NO: 694343 - RNA, 19 nt, Artificial Sequence
  Description of Artificial Sequence: Synthetic oligonucleotide
gaucguguugcacuuauca

SEQ ID NO: 694344 - RNA, 19 nt, Artificial Sequence
  Description of Artificial Sequence: Synthetic oligonucleotide
acuaugauuuauaucuggg

SEQ ID NO: 694345 - RNA, 19 nt, Artificial Sequence
  Description of Artificial Sequence: Synthetic oligonucleotide
ugcugauuacacaggaggc

SEQ ID NO: 694346 - RNA, 19 nt, Artificial Sequence
  Description of Artificial Sequence: Synthetic oligonucleotide
acagguuugcuugacacuc

SEQ ID NO: 694347 - RNA, 19 nt, Artificial Sequence
  Description of Artificial Sequence: Synthetic oligonucleotide
cucccuauuguaugaaagg

SEQ ID NO: 694348 - RNA, 19 nt, Artificial Sequence
  Description of Artificial Sequence: Synthetic oligonucleotide
aucugggaacacaugaugc

SEQ ID NO: 694349 - RNA, 19 nt, Artificial Sequence
  Description of Artificial Sequence: Synthetic oligonucleotide
ucagugagcgagcagcuga

SEQ ID NO: 694350 - RNA, 19 nt, Artificial Sequence
  Description of Artificial Sequence: Synthetic oligonucleotide
ucguucuccacaaaaugcu

SEQ ID NO: 694351 - RNA, 19 nt, Artificial Sequence
  Description of Artificial Sequence: Synthetic oligonucleotide
aguacacuaugauuuauau

SEQ ID NO: 694352 - RNA, 19 nt, Artificial Sequence
  Description of Artificial Sequence: Synthetic oligonucleotide
aucguguugcacuuaucac

SEQ ID NO: 694353 - RNA, 19 nt, Artificial Sequence
  Description of Artificial Sequence: Synthetic oligonucleotide
caggauaaagugacuaggc

SEQ ID NO: 694354 - RNA, 19 nt, Artificial Sequence
  Description of Artificial Sequence: Synthetic oligonucleotide
ggaaugagaguccugguag

SEQ ID NO: 694355 - RNA, 19 nt, Artificial Sequence
  Description of Artificial Sequence: Synthetic oligonucleotide
uaguuaaacagcagagggu

SEQ ID NO: 694356 - RNA, 19 nt, Artificial Sequence
  Description of Artificial Sequence: Synthetic oligonucleotide
aggacagaaauguaauaca

SEQ ID NO: 694357 - RNA, 19 nt, Artificial Sequence
  Description of Artificial Sequence: Synthetic oligonucleotide
agauaaaacucagucagga

SEQ ID NO: 694358 - RNA, 19 nt, Artificial Sequence
  Description of Artificial Sequence: Synthetic oligonucleotide
cuugcguggcucaaagucc

SEQ ID NO: 694359 - RNA, 19 nt, Artificial Sequence
  Description of Artificial Sequence: Synthetic oligonucleotide
agcacacccaauaaacagc

SEQ ID NO: 694360 - RNA, 19 nt, Artificial Sequence
  Description of Artificial Sequence: Synthetic oligonucleotide
agguaucgcaugcugcagc

SEQ ID NO: 694361 - RNA, 19 nt, Artificial Sequence
  Description of Artificial Sequence: Synthetic oligonucleotide
uggaauagugacugcuucc

SEQ ID NO: 694362 - RNA, 19 nt, Artificial Sequence
  Description of Artificial Sequence: Synthetic oligonucleotide
auacaggacugacagacga

SEQ ID NO: 694363 - RNA, 19 nt, Artificial Sequence
  Description of Artificial Sequence: Synthetic oligonucleotide
auagaguacaucucaucgu

SEQ ID NO: 694364 - RNA, 19 nt, Artificial Sequence
  Description of Artificial Sequence: Synthetic oligonucleotide
agaugggaaaacugaaaca

SEQ ID NO: 694365 - RNA, 19 nt, Artificial Sequence
  Description of Artificial Sequence: Synthetic oligonucleotide
acaccucgcagagagaugg

SEQ ID NO: 694366 - RNA, 19 nt, Artificial Sequence
  Description of Artificial Sequence: Synthetic oligonucleotide
gagcgagcagcugagacgg

SEQ ID NO: 694367 - RNA, 19 nt, Artificial Sequence
  Description of Artificial Sequence: Synthetic oligonucleotide
cuacaucacacucaaagga

SEQ ID NO: 694368 - RNA, 19 nt, Artificial Sequence
  Description of Artificial Sequence: Synthetic oligonucleotide
cuuggcaaagagugugugg

SEQ ID NO: 694369 - RNA, 19 nt, Artificial Sequence
  Description of Artificial Sequence: Synthetic oligonucleotide
uagaguacaucucaucguu

SEQ ID NO: 694370 - RNA, 19 nt, Artificial Sequence
  Description of Artificial Sequence: Synthetic oligonucleotide
accaggauaaagugacuag

SEQ ID NO: 694371 - RNA, 19 nt, Artificial Sequence
  Description of Artificial Sequence: Synthetic oligonucleotide
auuuauaucugggaacaca

SEQ ID NO: 694372 - RNA, 19 nt, Artificial Sequence
  Description of Artificial Sequence: Synthetic oligonucleotide
uguuccacccugagguagg

SEQ ID NO: 694373 - RNA, 19 nt, Artificial Sequence
  Description of Artificial Sequence: Synthetic oligonucleotide
caugagcaggauauccugg

SEQ ID NO: 694374 - RNA, 19 nt, Artificial Sequence
  Description of Artificial Sequence: Synthetic oligonucleotide
aaggagucaaggugcuaag

SEQ ID NO: 694375 - RNA, 19 nt, Artificial Sequence
  Description of Artificial Sequence: Synthetic oligonucleotide
aggauaaagugacuaggcu

SEQ ID NO: 694376 - RNA, 19 nt, Artificial Sequence
  Description of Artificial Sequence: Synthetic oligonucleotide
uuuaguacacuaugauuua

SEQ ID NO: 694377 - RNA, 19 nt, Artificial Sequence
  Description of Artificial Sequence: Synthetic oligonucleotide
acagcgguaguccuggcug

SEQ ID NO: 694378 - RNA, 19 nt, Artificial Sequence
  Description of Artificial Sequence: Synthetic oligonucleotide
aguuaaacagcagaggguu

SEQ ID NO: 694379 - RNA, 19 nt, Artificial Sequence
  Description of Artificial Sequence: Synthetic oligonucleotide
guagaaccuaaauuauuac

SEQ ID NO: 694380 - RNA, 19 nt, Artificial Sequence
  Description of Artificial Sequence: Synthetic oligonucleotide
accuaaauuauuacagcag

SEQ ID NO: 694381 - RNA, 19 nt, Artificial Sequence
  Description of Artificial Sequence: Synthetic oligonucleotide
uaggucaacuccacuuucc

SEQ ID NO: 694382 - RNA, 19 nt, Artificial Sequence
  Description of Artificial Sequence: Synthetic oligonucleotide
uuaaacagcagaggguuaa

SEQ ID NO: 694383 - RNA, 19 nt, Artificial Sequence
  Description of Artificial Sequence: Synthetic oligonucleotide
aagucauacccaagcuccc

SEQ ID NO: 694384 - RNA, 19 nt, Artificial Sequence
  Description of Artificial Sequence: Synthetic oligonucleotide
acacaaaccccuuggcuug

SEQ ID NO: 694385 - RNA, 19 nt, Artificial Sequence
  Description of Artificial Sequence: Synthetic oligonucleotide
gccaagaaaagcuccacag

SEQ ID NO: 694386 - RNA, 19 nt, Artificial Sequence
  Description of Artificial Sequence: Synthetic oligonucleotide
gugacuaggcuauggcagg

SEQ ID NO: 694387 - RNA, 19 nt, Artificial Sequence
  Description of Artificial Sequence: Synthetic oligonucleotide
ggagucaaggugcuaagag

SEQ ID NO: 694388 - RNA, 19 nt, Artificial Sequence
  Description of Artificial Sequence: Synthetic oligonucleotide
gacuccuuauuguuccacc

SEQ ID NO: 694389 - RNA, 19 nt, Artificial Sequence
  Description of Artificial Sequence: Synthetic oligonucleotide
aggacugacagacgaggag

SEQ ID NO: 694390 - RNA, 19 nt, Artificial Sequence
  Description of Artificial Sequence: Synthetic oligonucleotide
uaagacccucuuuaacacc

SEQ ID NO: 694391 - RNA, 19 nt, Artificial Sequence
  Description of Artificial Sequence: Synthetic oligonucleotide
cucgcagagagaugggagc

SEQ ID NO: 694392 - RNA, 19 nt, Artificial Sequence
  Description of Artificial Sequence: Synthetic oligonucleotide
ugauuacacaggaggcuca

SEQ ID NO: 694393 - RNA, 19 nt, Artificial Sequence
  Description of Artificial Sequence: Synthetic oligonucleotide
ugcuaagagggaugggagc

SEQ ID NO: 694394 - RNA, 19 nt, Artificial Sequence
  Description of Artificial Sequence: Synthetic oligonucleotide
gagacagcccaugugacac

SEQ ID NO: 694395 - RNA, 19 nt, Artificial Sequence
  Description of Artificial Sequence: Synthetic oligonucleotide
uaguacacuaugauuuaua

SEQ ID NO: 694396 - RNA, 19 nt, Artificial Sequence
  Description of Artificial Sequence: Synthetic oligonucleotide
uccaaaccagucucggggc

SEQ ID NO: 694397 - RNA, 19 nt, Artificial Sequence
  Description of Artificial Sequence: Synthetic oligonucleotide
caugguuuggagaugaggu

SEQ ID NO: 694398 - RNA, 19 nt, Artificial Sequence
  Description of Artificial Sequence: Synthetic oligonucleotide
ccuacaucacacucaaagg

SEQ ID NO: 694399 - RNA, 19 nt, Artificial Sequence
  Description of Artificial Sequence: Synthetic oligonucleotide
ugacuaaccuuggagcuga

SEQ ID NO: 694400 - RNA, 19 nt, Artificial Sequence
  Description of Artificial Sequence: Synthetic oligonucleotide
aagaguguguggaucucag

SEQ ID NO: 694401 - RNA, 19 nt, Artificial Sequence
  Description of Artificial Sequence: Synthetic oligonucleotide
gaaaauggcauuugguuuu

SEQ ID NO: 694402 - RNA, 19 nt, Artificial Sequence
  Description of Artificial Sequence: Synthetic oligonucleotide
gguugaguugucguaauag

SEQ ID NO: 694403 - RNA, 19 nt, Artificial Sequence
  Description of Artificial Sequence: Synthetic oligonucleotide
cacguaguuaaacagcaga

SEQ ID NO: 694404 - RNA, 19 nt, Artificial Sequence
  Description of Artificial Sequence: Synthetic oligonucleotide
aaccuuggagcugacacau

SEQ ID NO: 694405 - RNA, 19 nt, Artificial Sequence
  Description of Artificial Sequence: Synthetic oligonucleotide
uuaucacagguuugcuuga

SEQ ID NO: 694406 - RNA, 19 nt, Artificial Sequence
  Description of Artificial Sequence: Synthetic oligonucleotide
cacauccagaccagguucc

SEQ ID NO: 694407 - RNA, 19 nt, Artificial Sequence
  Description of Artificial Sequence: Synthetic oligonucleotide
ccagaggauacacucaggg

SEQ ID NO: 694408 - RNA, 19 nt, Artificial Sequence
  Description of Artificial Sequence: Synthetic oligonucleotide
gaggaggaugacucucagg

SEQ ID NO: 694409 - RNA, 19 nt, Artificial Sequence
  Description of Artificial Sequence: Synthetic oligonucleotide
gguaucgcaugcugcagcg

SEQ ID NO: 694410 - RNA, 19 nt, Artificial Sequence
  Description of Artificial Sequence: Synthetic oligonucleotide
ugagacagcccaugugaca

SEQ ID NO: 694411 - RNA, 19 nt, Artificial Sequence
  Description of Artificial Sequence: Synthetic oligonucleotide
ggagaacccggauauuggg

SEQ ID NO: 694412 - RNA, 19 nt, Artificial Sequence
  Description of Artificial Sequence: Synthetic oligonucleotide
ggguauagaacuccaaguc

SEQ ID NO: 694413 - RNA, 19 nt, Artificial Sequence
  Description of Artificial Sequence: Synthetic oligonucleotide
ugcugagacagcccaugug

SEQ ID NO: 694414 - RNA, 19 nt, Artificial Sequence
  Description of Artificial Sequence: Synthetic oligonucleotide
agcgguaauaacauccugu

SEQ ID NO: 694415 - RNA, 19 nt, Artificial Sequence
  Description of Artificial Sequence: Synthetic oligonucleotide
gucguaauagcagucccug

SEQ ID NO: 694416 - RNA, 19 nt, Artificial Sequence
  Description of Artificial Sequence: Synthetic oligonucleotide
uccuugcaugugaugaagu

SEQ ID NO: 694417 - RNA, 19 nt, Artificial Sequence
  Description of Artificial Sequence: Synthetic oligonucleotide
uccuggaauagugacugcu

SEQ ID NO: 694418 - RNA, 19 nt, Artificial Sequence
  Description of Artificial Sequence: Synthetic oligonucleotide
gauuacacaggaggcucag

SEQ ID NO: 694419 - RNA, 19 nt, Artificial Sequence
  Description of Artificial Sequence: Synthetic oligonucleotide
cugauuacacaggaggcuc

SEQ ID NO: 694420 - RNA, 19 nt, Artificial Sequence
  Description of Artificial Sequence: Synthetic oligonucleotide
ugugcaccacucgugcagg

SEQ ID NO: 694421 - RNA, 19 nt, Artificial Sequence
  Description of Artificial Sequence: Synthetic oligonucleotide
ggauaaagugacuaggcua

SEQ ID NO: 694422 - RNA, 19 nt, Artificial Sequence
  Description of Artificial Sequence: Synthetic oligonucleotide
uugacaccgcucacagucc

SEQ ID NO: 694423 - RNA, 19 nt, Artificial Sequence
  Description of Artificial Sequence: Synthetic oligonucleotide
augccaguagggugacagc

SEQ ID NO: 694424 - RNA, 19 nt, Artificial Sequence
  Description of Artificial Sequence: Synthetic oligonucleotide
agcaagaguaaagccaccu

SEQ ID NO: 694425 - RNA, 19 nt, Artificial Sequence
  Description of Artificial Sequence: Synthetic oligonucleotide
auaacauccugugcaggug

SEQ ID NO: 694426 - RNA, 19 nt, Artificial Sequence
  Description of Artificial Sequence: Synthetic oligonucleotide
ccuaaauuauuacagcaga

SEQ ID NO: 694427 - RNA, 19 nt, Artificial Sequence
  Description of Artificial Sequence: Synthetic oligonucleotide
cugaccuacaucacacuca

SEQ ID NO: 694428 - RNA, 19 nt, Artificial Sequence
  Description of Artificial Sequence: Synthetic oligonucleotide
gcgguaauaacauccugug

SEQ ID NO: 694429 - RNA, 19 nt, Artificial Sequence
  Description of Artificial Sequence: Synthetic oligonucleotide
agccuggugacuaaccuug

SEQ ID NO: 694430 - RNA, 19 nt, Artificial Sequence
  Description of Artificial Sequence: Synthetic oligonucleotide
uuaguacacuaugauuuau

SEQ ID NO: 694431 - RNA, 19 nt, Artificial Sequence
  Description of Artificial Sequence: Synthetic oligonucleotide
augaucguguugcacuuau

SEQ ID NO: 694432 - RNA, 19 nt, Artificial Sequence
  Description of Artificial Sequence: Synthetic oligonucleotide
gaaugaacaccuggcuggc

SEQ ID NO: 694433 - RNA, 19 nt, Artificial Sequence
  Description of Artificial Sequence: Synthetic oligonucleotide
acccucuuuaacaccaaag

SEQ ID NO: 694434 - RNA, 19 nt, Artificial Sequence
  Description of Artificial Sequence: Synthetic oligonucleotide
uuguaugaaagggcaggga

SEQ ID NO: 694435 - RNA, 19 nt, Artificial Sequence
  Description of Artificial Sequence: Synthetic oligonucleotide
ugacaccgcucacagucca

SEQ ID NO: 694436 - RNA, 19 nt, Artificial Sequence
  Description of Artificial Sequence: Synthetic oligonucleotide
cuaggcuauggcaggagca

SEQ ID NO: 694437 - RNA, 19 nt, Artificial Sequence
  Description of Artificial Sequence: Synthetic oligonucleotide
uccuuauagaagcgguguu

SEQ ID NO: 694438 - RNA, 19 nt, Artificial Sequence
  Description of Artificial Sequence: Synthetic oligonucleotide
ucggggcagauguucagcu

SEQ ID NO: 694439 - RNA, 19 nt, Artificial Sequence
  Description of Artificial Sequence: Synthetic oligonucleotide
gcagauguucagcucauac

SEQ ID NO: 694440 - RNA, 19 nt, Artificial Sequence
  Description of Artificial Sequence: Synthetic oligonucleotide
augggagcacggcacucgg

SEQ ID NO: 694441 - RNA, 19 nt, Artificial Sequence
  Description of Artificial Sequence: Synthetic oligonucleotide
ccaggauaaagugacuagg

SEQ ID NO: 694442 - RNA, 19 nt, Artificial Sequence
  Description of Artificial Sequence: Synthetic oligonucleotide
agaguacaucucaucguuc

SEQ ID NO: 694443 - RNA, 19 nt, Artificial Sequence
  Description of Artificial Sequence: Synthetic oligonucleotide
guagaaugaacaccuggcu

SEQ ID NO: 694444 - RNA, 19 nt, Artificial Sequence
  Description of Artificial Sequence: Synthetic oligonucleotide
ucaggcacuugcugugaca

SEQ ID NO: 694445 - RNA, 19 nt, Artificial Sequence
  Description of Artificial Sequence: Synthetic oligonucleotide
gugcuaagagggaugggag

SEQ ID NO: 694446 - RNA, 19 nt, Artificial Sequence
  Description of Artificial Sequence: Synthetic oligonucleotide
gguguucuaggagaacccg

SEQ ID NO: 694447 - RNA, 19 nt, Artificial Sequence
  Description of Artificial Sequence: Synthetic oligonucleotide
agaugaucguguugcacuu

SEQ ID NO: 694448 - RNA, 19 nt, Artificial Sequence
  Description of Artificial Sequence: Synthetic oligonucleotide
gaucucagugagcgagcag

SEQ ID NO: 694449 - RNA, 19 nt, Artificial Sequence
  Description of Artificial Sequence: Synthetic oligonucleotide
gaguugucguaauagcagu

SEQ ID NO: 694450 - RNA, 19 nt, Artificial Sequence
  Description of Artificial Sequence: Synthetic oligonucleotide
gagacggcccaugugcacc

SEQ ID NO: 694451 - RNA, 19 nt, Artificial Sequence
  Description of Artificial Sequence: Synthetic oligonucleotide
ccucccuauuguaugaaag

SEQ ID NO: 694452 - RNA, 19 nt, Artificial Sequence
  Description of Artificial Sequence: Synthetic oligonucleotide
caguugugcaccacucgug

SEQ ID NO: 694453 - RNA, 19 nt, Artificial Sequence
  Description of Artificial Sequence: Synthetic oligonucleotide
ccggauauuggguuccucc

SEQ ID NO: 694454 - RNA, 19 nt, Artificial Sequence
  Description of Artificial Sequence: Synthetic oligonucleotide
guaggucaacuccacuuuc

SEQ ID NO: 694455 - RNA, 19 nt, Artificial Sequence
  Description of Artificial Sequence: Synthetic oligonucleotide
ucguaauagcagucccugu

SEQ ID NO: 694456 - RNA, 19 nt, Artificial Sequence
  Description of Artificial Sequence: Synthetic oligonucleotide
ccuugcguggcucaaaguc

SEQ ID NO: 694457 - RNA, 19 nt, Artificial Sequence
  Description of Artificial Sequence: Synthetic oligonucleotide
ggcuugacaccgcucacag

SEQ ID NO: 694458 - RNA, 19 nt, Artificial Sequence
  Description of Artificial Sequence: Synthetic oligonucleotide
uuauagaagcgguguucua

SEQ ID NO: 694459 - RNA, 19 nt, Artificial Sequence
  Description of Artificial Sequence: Synthetic oligonucleotide
uggcgcaguuuccggaucu

SEQ ID NO: 694460 - RNA, 19 nt, Artificial Sequence
  Description of Artificial Sequence: Synthetic oligonucleotide
cagugagcgagcagcugag

SEQ ID NO: 694461 - RNA, 19 nt, Artificial Sequence
  Description of Artificial Sequence: Synthetic oligonucleotide
gcacacccaauaaacagcc

SEQ ID NO: 694462 - RNA, 19 nt, Artificial Sequence
  Description of Artificial Sequence: Synthetic oligonucleotide
gugacuaaccuuggagcug

SEQ ID NO: 694463 - RNA, 19 nt, Artificial Sequence
  Description of Artificial Sequence: Synthetic oligonucleotide
ggucaacuccacuuucccc

SEQ ID NO: 694464 - RNA, 19 nt, Artificial Sequence
  Description of Artificial Sequence: Synthetic oligonucleotide
cuggccgagacaccaucag

SEQ ID NO: 694465 - RNA, 19 nt, Artificial Sequence
  Description of Artificial Sequence: Synthetic oligonucleotide
guaugaaagggcagggaaa

SEQ ID NO: 694466 - RNA, 19 nt, Artificial Sequence
  Description of Artificial Sequence: Synthetic oligonucleotide
ugagacggcccaugugcac

SEQ ID NO: 694467 - RNA, 19 nt, Artificial Sequence
  Description of Artificial Sequence: Synthetic oligonucleotide
ugguugaguugucguaaua

SEQ ID NO: 694468 - RNA, 19 nt, Artificial Sequence
  Description of Artificial Sequence: Synthetic oligonucleotide
cguaauagcagucccugug

SEQ ID NO: 694469 - RNA, 19 nt, Artificial Sequence
  Description of Artificial Sequence: Synthetic oligonucleotide
uaucacagguuugcuugac

SEQ ID NO: 694470 - RNA, 19 nt, Artificial Sequence
  Description of Artificial Sequence: Synthetic oligonucleotide
uccuacaauggggcagaag

SEQ ID NO: 694471 - RNA, 19 nt, Artificial Sequence
  Description of Artificial Sequence: Synthetic oligonucleotide
ccggguauagaacuccaag

SEQ ID NO: 694472 - RNA, 19 nt, Artificial Sequence
  Description of Artificial Sequence: Synthetic oligonucleotide
gcugcagcgggacaccuug

SEQ ID NO: 694473 - RNA, 19 nt, Artificial Sequence
  Description of Artificial Sequence: Synthetic oligonucleotide
ugacuaggcuauggcagga

SEQ ID NO: 694474 - RNA, 19 nt, Artificial Sequence
  Description of Artificial Sequence: Synthetic oligonucleotide
ugaucguguugcacuuauc

SEQ ID NO: 694475 - RNA, 19 nt, Artificial Sequence
  Description of Artificial Sequence: Synthetic oligonucleotide
acagccggguauagaacuc

SEQ ID NO: 694476 - RNA, 19 nt, Artificial Sequence
  Description of Artificial Sequence: Synthetic oligonucleotide
ggcacagcgguaguccugg

SEQ ID NO: 694477 - RNA, 19 nt, Artificial Sequence
  Description of Artificial Sequence: Synthetic oligonucleotide
ugacagcgguaauaacauc

SEQ ID NO: 694478 - RNA, 19 nt, Artificial Sequence
  Description of Artificial Sequence: Synthetic oligonucleotide
acccaauaaacagccgggu

SEQ ID NO: 694479 - RNA, 19 nt, Artificial Sequence
  Description of Artificial Sequence: Synthetic oligonucleotide
cacacaaaccccuuggcuu

SEQ ID NO: 694480 - RNA, 19 nt, Artificial Sequence
  Description of Artificial Sequence: Synthetic oligonucleotide
ccaguagggugacagccgg

SEQ ID NO: 694481 - RNA, 19 nt, Artificial Sequence
  Description of Artificial Sequence: Synthetic oligonucleotide
cccuguuagcagcacaccc

SEQ ID NO: 694482 - RNA, 19 nt, Artificial Sequence
  Description of Artificial Sequence: Synthetic oligonucleotide
uccccugucuaaggagucc

SEQ ID NO: 694483 - RNA, 19 nt, Artificial Sequence
  Description of Artificial Sequence: Synthetic oligonucleotide
uaaacagcagaggguuaau

SEQ ID NO: 694484 - RNA, 19 nt, Artificial Sequence
  Description of Artificial Sequence: Synthetic oligonucleotide
auacucagccuggugacua

SEQ ID NO: 694485 - RNA, 19 nt, Artificial Sequence
  Description of Artificial Sequence: Synthetic oligonucleotide
guauggcugucaaaaggga

SEQ ID NO: 694486 - RNA, 19 nt, Artificial Sequence
  Description of Artificial Sequence: Synthetic oligonucleotide
ggauauuggguuccuccuc

SEQ ID NO: 694487 - RNA, 19 nt, Artificial Sequence
  Description of Artificial Sequence: Synthetic oligonucleotide
acgugguugaguugucgua

SEQ ID NO: 694488 - RNA, 19 nt, Artificial Sequence
  Description of Artificial Sequence: Synthetic oligonucleotide
agggaacagcacaucaccu

SEQ ID NO: 694489 - RNA, 19 nt, Artificial Sequence
  Description of Artificial Sequence: Synthetic oligonucleotide
cagcgguaauaacauccug

SEQ ID NO: 694490 - RNA, 19 nt, Artificial Sequence
  Description of Artificial Sequence: Synthetic oligonucleotide
gauggccuagcugcccagc

SEQ ID NO: 694491 - RNA, 19 nt, Artificial Sequence
  Description of Artificial Sequence: Synthetic oligonucleotide
auauuggguuccuccucau

SEQ ID NO: 694492 - RNA, 19 nt, Artificial Sequence
  Description of Artificial Sequence: Synthetic oligonucleotide
agcgguguucuaggagaac

SEQ ID NO: 694493 - RNA, 19 nt, Artificial Sequence
  Description of Artificial Sequence: Synthetic oligonucleotide
caggaagggccaauagcca

SEQ ID NO: 694494 - RNA, 19 nt, Artificial Sequence
  Description of Artificial Sequence: Synthetic oligonucleotide
accuacugcugaccuacau

SEQ ID NO: 694495 - RNA, 19 nt, Artificial Sequence
  Description of Artificial Sequence: Synthetic oligonucleotide
aggauauccuggcgcaguu

SEQ ID NO: 694496 - RNA, 19 nt, Artificial Sequence
  Description of Artificial Sequence: Synthetic oligonucleotide
ccucgcagagagaugggag

SEQ ID NO: 694497 - RNA, 19 nt, Artificial Sequence
  Description of Artificial Sequence: Synthetic oligonucleotide
ugccuggcgucuccuccag

SEQ ID NO: 694498 - RNA, 19 nt, Artificial Sequence
  Description of Artificial Sequence: Synthetic oligonucleotide
aggagucaaggugcuaaga

SEQ ID NO: 694499 - RNA, 19 nt, Artificial Sequence
  Description of Artificial Sequence: Synthetic oligonucleotide
cagucgcgcuuccauggcc

SEQ ID NO: 694500 - RNA, 19 nt, Artificial Sequence
  Description of Artificial Sequence: Synthetic oligonucleotide
agacggcccaugugcaccu

SEQ ID NO: 694501 - RNA, 19 nt, Artificial Sequence
  Description of Artificial Sequence: Synthetic oligonucleotide
guaucgcaugcugcagcgg

SEQ ID NO: 694502 - RNA, 19 nt, Artificial Sequence
  Description of Artificial Sequence: Synthetic oligonucleotide
ccuacugcugaccuacauc

SEQ ID NO: 694503 - RNA, 19 nt, Artificial Sequence
  Description of Artificial Sequence: Synthetic oligonucleotide
caggacugacagacgagga

SEQ ID NO: 694504 - RNA, 19 nt, Artificial Sequence
  Description of Artificial Sequence: Synthetic oligonucleotide
caagcacccggggaaugag

SEQ ID NO: 694505 - RNA, 19 nt, Artificial Sequence
  Description of Artificial Sequence: Synthetic oligonucleotide
acuaaccuuggagcugaca

SEQ ID NO: 694506 - RNA, 19 nt, Artificial Sequence
  Description of Artificial Sequence: Synthetic oligonucleotide
gaccccuguuagcagcaca

SEQ ID NO: 694507 - RNA, 19 nt, Artificial Sequence
  Description of Artificial Sequence: Synthetic oligonucleotide
caaagaguguguggaucuc

SEQ ID NO: 694508 - RNA, 19 nt, Artificial Sequence
  Description of Artificial Sequence: Synthetic oligonucleotide
gcuguccaaaccagucucg

SEQ ID NO: 694509 - RNA, 19 nt, Artificial Sequence
  Description of Artificial Sequence: Synthetic oligonucleotide
agccggagguggaucaguc

SEQ ID NO: 694510 - RNA, 19 nt, Artificial Sequence
  Description of Artificial Sequence: Synthetic oligonucleotide
cacaccucgcagagagaug

SEQ ID NO: 694511 - RNA, 19 nt, Artificial Sequence
  Description of Artificial Sequence: Synthetic oligonucleotide
gugacagcgguaauaacau

SEQ ID NO: 694512 - RNA, 19 nt, Artificial Sequence
  Description of Artificial Sequence: Synthetic oligonucleotide
cagguaucgcaugcugcag

SEQ ID NO: 694513 - RNA, 19 nt, Artificial Sequence
  Description of Artificial Sequence: Synthetic oligonucleotide
aagcgguguucuaggagaa

SEQ ID NO: 694514 - RNA, 19 nt, Artificial Sequence
  Description of Artificial Sequence: Synthetic oligonucleotide
cuccccugucuaaggaguc

SEQ ID NO: 694515 - RNA, 19 nt, Artificial Sequence
  Description of Artificial Sequence: Synthetic oligonucleotide
ucgcaugcugcagcgggac

SEQ ID NO: 694516 - RNA, 19 nt, Artificial Sequence
  Description of Artificial Sequence: Synthetic oligonucleotide
caucagugccagguaucgc

SEQ ID NO: 694517 - RNA, 19 nt, Artificial Sequence
  Description of Artificial Sequence: Synthetic oligonucleotide
agucgcgcuuccauggccu

SEQ ID NO: 694518 - RNA, 19 nt, Artificial Sequence
  Description of Artificial Sequence: Synthetic oligonucleotide
agucucaccacagcaucuu

SEQ ID NO: 694519 - RNA, 19 nt, Artificial Sequence
  Description of Artificial Sequence: Synthetic oligonucleotide
ccgagacaccaucagugcc

SEQ ID NO: 694520 - RNA, 19 nt, Artificial Sequence
  Description of Artificial Sequence: Synthetic oligonucleotide
cuugcaugugaugaaguau

SEQ ID NO: 694521 - RNA, 19 nt, Artificial Sequence
  Description of Artificial Sequence: Synthetic oligonucleotide
gggguguaggaaaauggca

SEQ ID NO: 694522 - RNA, 19 nt, Artificial Sequence
  Description of Artificial Sequence: Synthetic oligonucleotide
cacuggccgagacaccauc

SEQ ID NO: 694523 - RNA, 19 nt, Artificial Sequence
  Description of Artificial Sequence: Synthetic oligonucleotide
cuguugggaacagccccag

SEQ ID NO: 694524 - RNA, 19 nt, Artificial Sequence
  Description of Artificial Sequence: Synthetic oligonucleotide
gugccaagaaaagcuccac

SEQ ID NO: 694525 - RNA, 19 nt, Artificial Sequence
  Description of Artificial Sequence: Synthetic oligonucleotide
gguuuggagaugagguuca

SEQ ID NO: 694526 - RNA, 19 nt, Artificial Sequence
  Description of Artificial Sequence: Synthetic oligonucleotide
cuccuuauagaagcggugu

SEQ ID NO: 694527 - RNA, 19 nt, Artificial Sequence
  Description of Artificial Sequence: Synthetic oligonucleotide
cugaccccuguuagcagca

SEQ ID NO: 694528 - RNA, 19 nt, Artificial Sequence
  Description of Artificial Sequence: Synthetic oligonucleotide
agcgguaguccuggcuguc

SEQ ID NO: 694529 - RNA, 19 nt, Artificial Sequence
  Description of Artificial Sequence: Synthetic oligonucleotide
ggaauagugacugcuuccu

SEQ ID NO: 694530 - RNA, 19 nt, Artificial Sequence
  Description of Artificial Sequence: Synthetic oligonucleotide
gagaacccggauauugggu

SEQ ID NO: 694531 - RNA, 19 nt, Artificial Sequence
  Description of Artificial Sequence: Synthetic oligonucleotide
aggugcuaagagggauggg

SEQ ID NO: 694532 - RNA, 19 nt, Artificial Sequence
  Description of Artificial Sequence: Synthetic oligonucleotide
gucaaggugcuaagaggga

SEQ ID NO: 694533 - RNA, 19 nt, Artificial Sequence
  Description of Artificial Sequence: Synthetic oligonucleotide
cauccagaccagguuccug

SEQ ID NO: 694534 - RNA, 19 nt, Artificial Sequence
  Description of Artificial Sequence: Synthetic oligonucleotide
agcaagcacccggggaaug

SEQ ID NO: 694535 - RNA, 19 nt, Artificial Sequence
  Description of Artificial Sequence: Synthetic oligonucleotide
ccacguaguuaaacagcag

SEQ ID NO: 694536 - RNA, 19 nt, Artificial Sequence
  Description of Artificial Sequence: Synthetic oligonucleotide
gcagcacacccaauaaaca

SEQ ID NO: 694537 - RNA, 19 nt, Artificial Sequence
  Description of Artificial Sequence: Synthetic oligonucleotide
cacgugguugaguugucgu

SEQ ID NO: 694538 - RNA, 19 nt, Artificial Sequence
  Description of Artificial Sequence: Synthetic oligonucleotide
cuuggagcugacacauggu

SEQ ID NO: 694539 - RNA, 19 nt, Artificial Sequence
  Description of Artificial Sequence: Synthetic oligonucleotide
gcacgugguugaguugucg

SEQ ID NO: 694540 - RNA, 19 nt, Artificial Sequence
  Description of Artificial Sequence: Synthetic oligonucleotide
gaugaucguguugcacuua

SEQ ID NO: 694541 - RNA, 19 nt, Artificial Sequence
  Description of Artificial Sequence: Synthetic oligonucleotide
guucaggcacuugcuguga

SEQ ID NO: 694542 - RNA, 19 nt, Artificial Sequence
  Description of Artificial Sequence: Synthetic oligonucleotide
gcagggaaacauacaggac

SEQ ID NO: 694543 - RNA, 19 nt, Artificial Sequence
  Description of Artificial Sequence: Synthetic oligonucleotide
cuggcgcaguuuccggauc

SEQ ID NO: 694544 - RNA, 19 nt, Artificial Sequence
  Description of Artificial Sequence: Synthetic oligonucleotide
gcugauuacacaggaggcu

SEQ ID NO: 694545 - RNA, 19 nt, Artificial Sequence
  Description of Artificial Sequence: Synthetic oligonucleotide
ggaucucagugagcgagca

SEQ ID NO: 694546 - RNA, 19 nt, Artificial Sequence
  Description of Artificial Sequence: Synthetic oligonucleotide
aucgcaugcugcagcggga

SEQ ID NO: 694547 - RNA, 19 nt, Artificial Sequence
  Description of Artificial Sequence: Synthetic oligonucleotide
agccggguauagaacucca

SEQ ID NO: 694548 - RNA, 19 nt, Artificial Sequence
  Description of Artificial Sequence: Synthetic oligonucleotide
cugaauccacaaggaguca

SEQ ID NO: 694549 - RNA, 19 nt, Artificial Sequence
  Description of Artificial Sequence: Synthetic oligonucleotide
ugaccccuguuagcagcac

SEQ ID NO: 694550 - RNA, 19 nt, Artificial Sequence
  Description of Artificial Sequence: Synthetic oligonucleotide
aggccccagaugaucgugu

SEQ ID NO: 694551 - RNA, 19 nt, Artificial Sequence
  Description of Artificial Sequence: Synthetic oligonucleotide
gcaggauauccuggcgcag

SEQ ID NO: 694552 - RNA, 19 nt, Artificial Sequence
  Description of Artificial Sequence: Synthetic oligonucleotide
cacuugcugugacagcggu

SEQ ID NO: 694553 - RNA, 19 nt, Artificial Sequence
  Description of Artificial Sequence: Synthetic oligonucleotide
agcagcagucgcgcuucca

SEQ ID NO: 694554 - RNA, 19 nt, Artificial Sequence
  Description of Artificial Sequence: Synthetic oligonucleotide
gucgcgcuuccauggccuc

SEQ ID NO: 694555 - RNA, 19 nt, Artificial Sequence
  Description of Artificial Sequence: Synthetic oligonucleotide
acuugcugugacagcggua

SEQ ID NO: 694556 - RNA, 19 nt, Artificial Sequence
  Description of Artificial Sequence: Synthetic oligonucleotide
acaccuugcguggcucaaa

SEQ ID NO: 694557 - RNA, 19 nt, Artificial Sequence
  Description of Artificial Sequence: Synthetic oligonucleotide
cagguuugcuugacacucu

SEQ ID NO: 694558 - RNA, 19 nt, Artificial Sequence
  Description of Artificial Sequence: Synthetic oligonucleotide
gacuaaccuuggagcugac

SEQ ID NO: 694559 - RNA, 19 nt, Artificial Sequence
  Description of Artificial Sequence: Synthetic oligonucleotide
gccuggugacuaaccuugg

SEQ ID NO: 694560 - RNA, 19 nt, Artificial Sequence
  Description of Artificial Sequence: Synthetic oligonucleotide
ccucaaguugagccgggca

SEQ ID NO: 694561 - RNA, 19 nt, Artificial Sequence
  Description of Artificial Sequence: Synthetic oligonucleotide
agacccucuuuaacaccaa

SEQ ID NO: 694562 - RNA, 19 nt, Artificial Sequence
  Description of Artificial Sequence: Synthetic oligonucleotide
gcaagcacccggggaauga

SEQ ID NO: 694563 - RNA, 19 nt, Artificial Sequence
  Description of Artificial Sequence: Synthetic oligonucleotide
ccaguugugcaccacucgu

SEQ ID NO: 694564 - RNA, 19 nt, Artificial Sequence
  Description of Artificial Sequence: Synthetic oligonucleotide
cggguauagaacuccaagu

SEQ ID NO: 694565 - RNA, 19 nt, Artificial Sequence
  Description of Artificial Sequence: Synthetic oligonucleotide
gccgggccucacuaggcac

SEQ ID NO: 694566 - RNA, 19 nt, Artificial Sequence
  Description of Artificial Sequence: Synthetic oligonucleotide
gcaagaguaaagccaccuu

SEQ ID NO: 694567 - RNA, 19 nt, Artificial Sequence
  Description of Artificial Sequence: Synthetic oligonucleotide
gcgguaguccuggcugucc

SEQ ID NO: 694568 - RNA, 19 nt, Artificial Sequence
  Description of Artificial Sequence: Synthetic oligonucleotide
acccggauauuggguuccu

SEQ ID NO: 694569 - RNA, 19 nt, Artificial Sequence
  Description of Artificial Sequence: Synthetic oligonucleotide
gggaacagccccagucaga

SEQ ID NO: 694570 - RNA, 19 nt, Artificial Sequence
  Description of Artificial Sequence: Synthetic oligonucleotide
ccuccagcauucuaggcau

SEQ ID NO: 694571 - RNA, 19 nt, Artificial Sequence
  Description of Artificial Sequence: Synthetic oligonucleotide
ccuuggcuugacaccgcuc

SEQ ID NO: 694572 - RNA, 19 nt, Artificial Sequence
  Description of Artificial Sequence: Synthetic oligonucleotide
ccuggugacuaaccuugga

SEQ ID NO: 694573 - RNA, 19 nt, Artificial Sequence
  Description of Artificial Sequence: Synthetic oligonucleotide
cagccuggugacuaaccuu

SEQ ID NO: 694574 - RNA, 19 nt, Artificial Sequence
  Description of Artificial Sequence: Synthetic oligonucleotide
ccccuguuagcagcacacc

SEQ ID NO: 694575 - RNA, 19 nt, Artificial Sequence
  Description of Artificial Sequence: Synthetic oligonucleotide
cagguguaccaggucugaa

SEQ ID NO: 694576 - RNA, 19 nt, Artificial Sequence
  Description of Artificial Sequence: Synthetic oligonucleotide
cagcgguaguccuggcugu

SEQ ID NO: 694577 - RNA, 19 nt, Artificial Sequence
  Description of Artificial Sequence: Synthetic oligonucleotide
cugguagcugcuagucauu

SEQ ID NO: 694578 - RNA, 19 nt, Artificial Sequence
  Description of Artificial Sequence: Synthetic oligonucleotide
cagcucagagcaccaggau

SEQ ID NO: 694579 - RNA, 19 nt, Artificial Sequence
  Description of Artificial Sequence: Synthetic oligonucleotide
ccccuuggcuugacaccgc

SEQ ID NO: 694580 - RNA, 19 nt, Artificial Sequence
  Description of Artificial Sequence: Synthetic oligonucleotide
guuccacccugagguaggu

SEQ ID NO: 694581 - RNA, 19 nt, Artificial Sequence
  Description of Artificial Sequence: Synthetic oligonucleotide
cggauauuggguuccuccu

SEQ ID NO: 694582 - RNA, 19 nt, Artificial Sequence
  Description of Artificial Sequence: Synthetic oligonucleotide
cccucccuauuguaugaaa

SEQ ID NO: 694583 - RNA, 19 nt, Artificial Sequence
  Description of Artificial Sequence: Synthetic oligonucleotide
ggcgcaguuuccggaucuc

SEQ ID NO: 694584 - RNA, 19 nt, Artificial Sequence
  Description of Artificial Sequence: Synthetic oligonucleotide
ccgggcacacuuggggcac

SEQ ID NO: 694585 - RNA, 19 nt, Artificial Sequence
  Description of Artificial Sequence: Synthetic oligonucleotide
gccggguauagaacuccaa

SEQ ID NO: 694586 - RNA, 19 nt, Artificial Sequence
  Description of Artificial Sequence: Synthetic oligonucleotide
cuggcgucuccuccagcau

SEQ ID NO: 694587 - RNA, 19 nt, Artificial Sequence
  Description of Artificial Sequence: Synthetic oligonucleotide
gcgggacaccuugcguggc

SEQ ID NO: 694588 - RNA, 19 nt, Artificial Sequence
  Description of Artificial Sequence: Synthetic oligonucleotide
cuaggagaacccggauauu

SEQ ID NO: 694589 - RNA, 19 nt, Artificial Sequence
  Description of Artificial Sequence: Synthetic oligonucleotide
gguccuggauagaguacau

SEQ ID NO: 694590 - RNA, 19 nt, Artificial Sequence
  Description of Artificial Sequence: Synthetic oligonucleotide
cccggauauuggguuccuc

SEQ ID NO: 694591 - RNA, 19 nt, Artificial Sequence
  Description of Artificial Sequence: Synthetic oligonucleotide
cagccggagguggaucagu

SEQ ID NO: 694592 - RNA, 19 nt, Artificial Sequence
  Description of Artificial Sequence: Synthetic oligonucleotide
ccuggcgcaguuuccggau

SEQ ID NO: 694593 - RNA, 19 nt, Artificial Sequence
  Description of Artificial Sequence: Synthetic oligonucleotide
cggagcacuggccgagaca

SEQ ID NO: 694594 - RNA, 19 nt, Artificial Sequence
  Description of Artificial Sequence: Synthetic oligonucleotide
ggccccagaugaucguguu

SEQ ID NO: 694595 - RNA, 19 nt, Artificial Sequence
  Description of Artificial Sequence: Synthetic oligonucleotide
cagcaagcacccggggaau

SEQ ID NO: 694596 - RNA, 19 nt, Artificial Sequence
  Description of Artificial Sequence: Synthetic oligonucleotide
ccacucgugcagggauaac

SEQ ID NO: 694597 - RNA, 19 nt, Artificial Sequence
  Description of Artificial Sequence: Synthetic oligonucleotide
gcacuggccgagacaccau

SEQ ID NO: 694598 - RNA, 19 nt, Artificial Sequence
  Description of Artificial Sequence: Synthetic oligonucleotide
agaucuuugaacuuuaucc

SEQ ID NO: 694599 - RNA, 19 nt, Artificial Sequence
  Description of Artificial Sequence: Synthetic oligonucleotide
aaaauugucaccaaagccg

SEQ ID NO: 694600 - RNA, 19 nt, Artificial Sequence
  Description of Artificial Sequence: Synthetic oligonucleotide
aauacaguaacacaggcga

SEQ ID NO: 694601 - RNA, 19 nt, Artificial Sequence
  Description of Artificial Sequence: Synthetic oligonucleotide
gaaacuaucaaauauaucu

SEQ ID NO: 694602 - RNA, 19 nt, Artificial Sequence
  Description of Artificial Sequence: Synthetic oligonucleotide
uaaagugucuaucaagucg

SEQ ID NO: 694603 - RNA, 19 nt, Artificial Sequence
  Description of Artificial Sequence: Synthetic oligonucleotide
aaauguguaacuuagcuuu

SEQ ID NO: 694604 - RNA, 19 nt, Artificial Sequence
  Description of Artificial Sequence: Synthetic oligonucleotide
aauuucuauucagauaccc

SEQ ID NO: 694605 - RNA, 19 nt, Artificial Sequence
  Description of Artificial Sequence: Synthetic oligonucleotide
gaugccuauagucaggugg

SEQ ID NO: 694606 - RNA, 19 nt, Artificial Sequence
  Description of Artificial Sequence: Synthetic oligonucleotide
uuauuagccagaaauuucc

SEQ ID NO: 694607 - RNA, 19 nt, Artificial Sequence
  Description of Artificial Sequence: Synthetic oligonucleotide
uaucaagucgucuaaagca

SEQ ID NO: 694608 - RNA, 19 nt, Artificial Sequence
  Description of Artificial Sequence: Synthetic oligonucleotide
uacaggugaagucagauga

SEQ ID NO: 694609 - RNA, 19 nt, Artificial Sequence
  Description of Artificial Sequence: Synthetic oligonucleotide
uguuuaagaugucaaaaga

SEQ ID NO: 694610 - RNA, 19 nt, Artificial Sequence
  Description of Artificial Sequence: Synthetic oligonucleotide
uuaaaggcaauuaaagauc

SEQ ID NO: 694611 - RNA, 19 nt, Artificial Sequence
  Description of Artificial Sequence: Synthetic oligonucleotide
cuagucuauaaucaggagg

SEQ ID NO: 694612 - RNA, 19 nt, Artificial Sequence
  Description of Artificial Sequence: Synthetic oligonucleotide
ugaacuuuauccauacuca

SEQ ID NO: 694613 - RNA, 19 nt, Artificial Sequence
  Description of Artificial Sequence: Synthetic oligonucleotide
caauuaaagaucuuugaac

SEQ ID NO: 694614 - RNA, 19 nt, Artificial Sequence
  Description of Artificial Sequence: Synthetic oligonucleotide
ucuucaaaagucaccaccc

SEQ ID NO: 694615 - RNA, 19 nt, Artificial Sequence
  Description of Artificial Sequence: Synthetic oligonucleotide
guagguagaauccauuggg

SEQ ID NO: 694616 - RNA, 19 nt, Artificial Sequence
  Description of Artificial Sequence: Synthetic oligonucleotide
uucucuuauacccaaugcc

SEQ ID NO: 694617 - RNA, 19 nt, Artificial Sequence
  Description of Artificial Sequence: Synthetic oligonucleotide
uguagguagaauccauugg

SEQ ID NO: 694618 - RNA, 19 nt, Artificial Sequence
  Description of Artificial Sequence: Synthetic oligonucleotide
uaucaaauauaucucuuac

SEQ ID NO: 694619 - RNA, 19 nt, Artificial Sequence
  Description of Artificial Sequence: Synthetic oligonucleotide
ugcagaucggccaaaaucu

SEQ ID NO: 694620 - RNA, 19 nt, Artificial Sequence
  Description of Artificial Sequence: Synthetic oligonucleotide
aaacuaucaaauauaucuc

SEQ ID NO: 694621 - RNA, 19 nt, Artificial Sequence
  Description of Artificial Sequence: Synthetic oligonucleotide
uucagguuccccuaaagug

SEQ ID NO: 694622 - RNA, 19 nt, Artificial Sequence
  Description of Artificial Sequence: Synthetic oligonucleotide
uccaaaucuugugagaggg

SEQ ID NO: 694623 - RNA, 19 nt, Artificial Sequence
  Description of Artificial Sequence: Synthetic oligonucleotide
uucuagucuauaaucagga

SEQ ID NO: 694624 - RNA, 19 nt, Artificial Sequence
  Description of Artificial Sequence: Synthetic oligonucleotide
gacauaacaaauagcauug

SEQ ID NO: 694625 - RNA, 19 nt, Artificial Sequence
  Description of Artificial Sequence: Synthetic oligonucleotide
aggcgaaccagacaaauuc

SEQ ID NO: 694626 - RNA, 19 nt, Artificial Sequence
  Description of Artificial Sequence: Synthetic oligonucleotide
gugcuuuggaauuugaacc

SEQ ID NO: 694627 - RNA, 19 nt, Artificial Sequence
  Description of Artificial Sequence: Synthetic oligonucleotide
uacuuugucaucuacuggu

SEQ ID NO: 694628 - RNA, 19 nt, Artificial Sequence
  Description of Artificial Sequence: Synthetic oligonucleotide
ucaauacaguaacacaggc

SEQ ID NO: 694629 - RNA, 19 nt, Artificial Sequence
  Description of Artificial Sequence: Synthetic oligonucleotide
uuugaacccaucuucuugc

SEQ ID NO: 694630 - RNA, 19 nt, Artificial Sequence
  Description of Artificial Sequence: Synthetic oligonucleotide
augcagaucggccaaaauc

SEQ ID NO: 694631 - RNA, 19 nt, Artificial Sequence
  Description of Artificial Sequence: Synthetic oligonucleotide
uuuauccauacucaauaca

SEQ ID NO: 694632 - RNA, 19 nt, Artificial Sequence
  Description of Artificial Sequence: Synthetic oligonucleotide
uguauuguggcucaucuuu

SEQ ID NO: 694633 - RNA, 19 nt, Artificial Sequence
  Description of Artificial Sequence: Synthetic oligonucleotide
agacauaacaaauagcauu

SEQ ID NO: 694634 - RNA, 19 nt, Artificial Sequence
  Description of Artificial Sequence: Synthetic oligonucleotide
uuucuauucagauacccaa

SEQ ID NO: 694635 - RNA, 19 nt, Artificial Sequence
  Description of Artificial Sequence: Synthetic oligonucleotide
auacucaauacaguaacac

SEQ ID NO: 694636 - RNA, 19 nt, Artificial Sequence
  Description of Artificial Sequence: Synthetic oligonucleotide
uuugucagccuuuggauug

SEQ ID NO: 694637 - RNA, 19 nt, Artificial Sequence
  Description of Artificial Sequence: Synthetic oligonucleotide
aaacuauugguccagugua

SEQ ID NO: 694638 - RNA, 19 nt, Artificial Sequence
  Description of Artificial Sequence: Synthetic oligonucleotide
uuugacuuguucagcuugg

SEQ ID NO: 694639 - RNA, 19 nt, Artificial Sequence
  Description of Artificial Sequence: Synthetic oligonucleotide
uaacaaauagcauugucua

SEQ ID NO: 694640 - RNA, 19 nt, Artificial Sequence
  Description of Artificial Sequence: Synthetic oligonucleotide
uuuagauuucuccuugagu

SEQ ID NO: 694641 - RNA, 19 nt, Artificial Sequence
  Description of Artificial Sequence: Synthetic oligonucleotide
cuucuagucuauaaucagg

SEQ ID NO: 694642 - RNA, 19 nt, Artificial Sequence
  Description of Artificial Sequence: Synthetic oligonucleotide
ugagaguuguccaaccagc

SEQ ID NO: 694643 - RNA, 19 nt, Artificial Sequence
  Description of Artificial Sequence: Synthetic oligonucleotide
uccauagcuggcuuuaacc

SEQ ID NO: 694644 - RNA, 19 nt, Artificial Sequence
  Description of Artificial Sequence: Synthetic oligonucleotide
uuugucuugauaugcagau

SEQ ID NO: 694645 - RNA, 19 nt, Artificial Sequence
  Description of Artificial Sequence: Synthetic oligonucleotide
aaagugucuaucaagucgu

SEQ ID NO: 694646 - RNA, 19 nt, Artificial Sequence
  Description of Artificial Sequence: Synthetic oligonucleotide
ucggccaaaaucuucugag

SEQ ID NO: 694647 - RNA, 19 nt, Artificial Sequence
  Description of Artificial Sequence: Synthetic oligonucleotide
auuugaacccaucuucuug

SEQ ID NO: 694648 - RNA, 19 nt, Artificial Sequence
  Description of Artificial Sequence: Synthetic oligonucleotide
agcucugcuucacucaggc

SEQ ID NO: 694649 - RNA, 19 nt, Artificial Sequence
  Description of Artificial Sequence: Synthetic oligonucleotide
ucaggcucuggcaauagug

SEQ ID NO: 694650 - RNA, 19 nt, Artificial Sequence
  Description of Artificial Sequence: Synthetic oligonucleotide
uuuacccugcccgucaucg

SEQ ID NO: 694651 - RNA, 19 nt, Artificial Sequence
  Description of Artificial Sequence: Synthetic oligonucleotide
gaaguuguuccuuaagcuc

SEQ ID NO: 694652 - RNA, 19 nt, Artificial Sequence
  Description of Artificial Sequence: Synthetic oligonucleotide
uugaaaacguccccuguug

SEQ ID NO: 694653 - RNA, 19 nt, Artificial Sequence
  Description of Artificial Sequence: Synthetic oligonucleotide
cuaucaagucgucuaaagc

SEQ ID NO: 694654 - RNA, 19 nt, Artificial Sequence
  Description of Artificial Sequence: Synthetic oligonucleotide
auagucccuucucuuauac

SEQ ID NO: 694655 - RNA, 19 nt, Artificial Sequence
  Description of Artificial Sequence: Synthetic oligonucleotide
aguguauuguggcucaucu

SEQ ID NO: 694656 - RNA, 19 nt, Artificial Sequence
  Description of Artificial Sequence: Synthetic oligonucleotide
cuguauacugcacauggag

SEQ ID NO: 694657 - RNA, 19 nt, Artificial Sequence
  Description of Artificial Sequence: Synthetic oligonucleotide
ucaugaucaggcuucuuug

SEQ ID NO: 694658 - RNA, 19 nt, Artificial Sequence
  Description of Artificial Sequence: Synthetic oligonucleotide
gcuaagguggaucucaggg

SEQ ID NO: 694659 - RNA, 19 nt, Artificial Sequence
  Description of Artificial Sequence: Synthetic oligonucleotide
aaucuugugagagggcauc

SEQ ID NO: 694660 - RNA, 19 nt, Artificial Sequence
  Description of Artificial Sequence: Synthetic oligonucleotide
ucuauagcaucaucaggcc

SEQ ID NO: 694661 - RNA, 19 nt, Artificial Sequence
  Description of Artificial Sequence: Synthetic oligonucleotide
gagaggguauguuuucagg

SEQ ID NO: 694662 - RNA, 19 nt, Artificial Sequence
  Description of Artificial Sequence: Synthetic oligonucleotide
cuuaaaggcaauuaaagau

SEQ ID NO: 694663 - RNA, 19 nt, Artificial Sequence
  Description of Artificial Sequence: Synthetic oligonucleotide
auccauuggguccaaaacu

SEQ ID NO: 694664 - RNA, 19 nt, Artificial Sequence
  Description of Artificial Sequence: Synthetic oligonucleotide
agaggguauguuuucagga

SEQ ID NO: 694665 - RNA, 19 nt, Artificial Sequence
  Description of Artificial Sequence: Synthetic oligonucleotide
caucuauagcaucaucagg

SEQ ID NO: 694666 - RNA, 19 nt, Artificial Sequence
  Description of Artificial Sequence: Synthetic oligonucleotide
cauugucuagaaaccaccc

SEQ ID NO: 694667 - RNA, 19 nt, Artificial Sequence
  Description of Artificial Sequence: Synthetic oligonucleotide
agacugagcuuugaaaacg

SEQ ID NO: 694668 - RNA, 19 nt, Artificial Sequence
  Description of Artificial Sequence: Synthetic oligonucleotide
ugaacugagaaggaacugu

SEQ ID NO: 694669 - RNA, 19 nt, Artificial Sequence
  Description of Artificial Sequence: Synthetic oligonucleotide
uauaucucuuacaaauaua

SEQ ID NO: 694670 - RNA, 19 nt, Artificial Sequence
  Description of Artificial Sequence: Synthetic oligonucleotide
uucacuccauucuugggug

SEQ ID NO: 694671 - RNA, 19 nt, Artificial Sequence
  Description of Artificial Sequence: Synthetic oligonucleotide
aaauugucaccaaagccgu

SEQ ID NO: 694672 - RNA, 19 nt, Artificial Sequence
  Description of Artificial Sequence: Synthetic oligonucleotide
acacaggcgaaccagacaa

SEQ ID NO: 694673 - RNA, 19 nt, Artificial Sequence
  Description of Artificial Sequence: Synthetic oligonucleotide
guagagaugguuugucuug

SEQ ID NO: 694674 - RNA, 19 nt, Artificial Sequence
  Description of Artificial Sequence: Synthetic oligonucleotide
aauucaagagaggguaugu

SEQ ID NO: 694675 - RNA, 19 nt, Artificial Sequence
  Description of Artificial Sequence: Synthetic oligonucleotide
cuucucuuauacccaaugc

SEQ ID NO: 694676 - RNA, 19 nt, Artificial Sequence
  Description of Artificial Sequence: Synthetic oligonucleotide
aguccugagacaaugcauc

SEQ ID NO: 694677 - RNA, 19 nt, Artificial Sequence
  Description of Artificial Sequence: Synthetic oligonucleotide
acugacuguauacugcaca

SEQ ID NO: 694678 - RNA, 19 nt, Artificial Sequence
  Description of Artificial Sequence: Synthetic oligonucleotide
uggaaaaguccugagacaa

SEQ ID NO: 694679 - RNA, 19 nt, Artificial Sequence
  Description of Artificial Sequence: Synthetic oligonucleotide
cagccuuuggauuggacgc

SEQ ID NO: 694680 - RNA, 19 nt, Artificial Sequence
  Description of Artificial Sequence: Synthetic oligonucleotide
agauacccaaauguguaac

SEQ ID NO: 694681 - RNA, 19 nt, Artificial Sequence
  Description of Artificial Sequence: Synthetic oligonucleotide
auacccaaugccucaaugu

SEQ ID NO: 694682 - RNA, 19 nt, Artificial Sequence
  Description of Artificial Sequence: Synthetic oligonucleotide
gguccaaaacuauuggucc

SEQ ID NO: 694683 - RNA, 19 nt, Artificial Sequence
  Description of Artificial Sequence: Synthetic oligonucleotide
ucaagaaggaagucaucac

SEQ ID NO: 694684 - RNA, 19 nt, Artificial Sequence
  Description of Artificial Sequence: Synthetic oligonucleotide
cauaacaaauagcauuguc

SEQ ID NO: 694685 - RNA, 19 nt, Artificial Sequence
  Description of Artificial Sequence: Synthetic oligonucleotide
uccauacucaauacaguaa

SEQ ID NO: 694686 - RNA, 19 nt, Artificial Sequence
  Description of Artificial Sequence: Synthetic oligonucleotide
ucuacagcaucaucuggca

SEQ ID NO: 694687 - RNA, 19 nt, Artificial Sequence
  Description of Artificial Sequence: Synthetic oligonucleotide
ucaagucgucuaaagcagc

SEQ ID NO: 694688 - RNA, 19 nt, Artificial Sequence
  Description of Artificial Sequence: Synthetic oligonucleotide
ugugaucccuuccuuauua

SEQ ID NO: 694689 - RNA, 19 nt, Artificial Sequence
  Description of Artificial Sequence: Synthetic oligonucleotide
ucuagaaaccacccagaaa

SEQ ID NO: 694690 - RNA, 19 nt, Artificial Sequence
  Description of Artificial Sequence: Synthetic oligonucleotide
uuucacuauguucugcuuu

SEQ ID NO: 694691 - RNA, 19 nt, Artificial Sequence
  Description of Artificial Sequence: Synthetic oligonucleotide
uuugaaaacguccccuguu

SEQ ID NO: 694692 - RNA, 19 nt, Artificial Sequence
  Description of Artificial Sequence: Synthetic oligonucleotide
uccccuaaagugucuauca

SEQ ID NO: 694693 - RNA, 19 nt, Artificial Sequence
  Description of Artificial Sequence: Synthetic oligonucleotide
ugucuagaaaccacccaga

SEQ ID NO: 694694 - RNA, 19 nt, Artificial Sequence
  Description of Artificial Sequence: Synthetic oligonucleotide
aauguguaacuuagcuuuc

SEQ ID NO: 694695 - RNA, 19 nt, Artificial Sequence
  Description of Artificial Sequence: Synthetic oligonucleotide
ucugagaguuguccaacca

SEQ ID NO: 694696 - RNA, 19 nt, Artificial Sequence
  Description of Artificial Sequence: Synthetic oligonucleotide
ugcccaaugaugcugguuu

SEQ ID NO: 694697 - RNA, 19 nt, Artificial Sequence
  Description of Artificial Sequence: Synthetic oligonucleotide
uguugguuggacuccacuc

SEQ ID NO: 694698 - RNA, 19 nt, Artificial Sequence
  Description of Artificial Sequence: Synthetic oligonucleotide
agaguuguccaaccagcuc

SEQ ID NO: 694699 - RNA, 19 nt, Artificial Sequence
  Description of Artificial Sequence: Synthetic oligonucleotide
ugaaaacguccccuguuga

SEQ ID NO: 694700 - RNA, 19 nt, Artificial Sequence
  Description of Artificial Sequence: Synthetic oligonucleotide
cuuuccuguaugcugugag

SEQ ID NO: 694701 - RNA, 19 nt, Artificial Sequence
  Description of Artificial Sequence: Synthetic oligonucleotide
gagaacuacaggugaaguc

SEQ ID NO: 694702 - RNA, 19 nt, Artificial Sequence
  Description of Artificial Sequence: Synthetic oligonucleotide
gaggguauguuuucaggac

SEQ ID NO: 694703 - RNA, 19 nt, Artificial Sequence
  Description of Artificial Sequence: Synthetic oligonucleotide
uucaagagaggguauguuu

SEQ ID NO: 694704 - RNA, 19 nt, Artificial Sequence
  Description of Artificial Sequence: Synthetic oligonucleotide
uauugguccaguguauugu

SEQ ID NO: 694705 - RNA, 19 nt, Artificial Sequence
  Description of Artificial Sequence: Synthetic oligonucleotide
uucuauucagauacccaaa

SEQ ID NO: 694706 - RNA, 19 nt, Artificial Sequence
  Description of Artificial Sequence: Synthetic oligonucleotide
auugucuagaaaccaccca

SEQ ID NO: 694707 - RNA, 19 nt, Artificial Sequence
  Description of Artificial Sequence: Synthetic oligonucleotide
agagaggguauguuuucag

SEQ ID NO: 694708 - RNA, 19 nt, Artificial Sequence
  Description of Artificial Sequence: Synthetic oligonucleotide
gagggcaucaauggggucc

SEQ ID NO: 694709 - RNA, 19 nt, Artificial Sequence
  Description of Artificial Sequence: Synthetic oligonucleotide
agcauugucuagaaaccac

SEQ ID NO: 694710 - RNA, 19 nt, Artificial Sequence
  Description of Artificial Sequence: Synthetic oligonucleotide
uauaaucaggaggaauugu

SEQ ID NO: 694711 - RNA, 19 nt, Artificial Sequence
  Description of Artificial Sequence: Synthetic oligonucleotide
aucaagucgucuaaagcag

SEQ ID NO: 694712 - RNA, 19 nt, Artificial Sequence
  Description of Artificial Sequence: Synthetic oligonucleotide
ugguuugucuugauaugca

SEQ ID NO: 694713 - RNA, 19 nt, Artificial Sequence
  Description of Artificial Sequence: Synthetic oligonucleotide
caguuugcuucccagucgg

SEQ ID NO: 694714 - RNA, 19 nt, Artificial Sequence
  Description of Artificial Sequence: Synthetic oligonucleotide
agccagaaauuuccuguac

SEQ ID NO: 694715 - RNA, 19 nt, Artificial Sequence
  Description of Artificial Sequence: Synthetic oligonucleotide
uucacuauguucugcuuua

SEQ ID NO: 694716 - RNA, 19 nt, Artificial Sequence
  Description of Artificial Sequence: Synthetic oligonucleotide
uucuggucacuccagcaga

SEQ ID NO: 694717 - RNA, 19 nt, Artificial Sequence
  Description of Artificial Sequence: Synthetic oligonucleotide
acaaaccaauguuuaagau

SEQ ID NO: 694718 - RNA, 19 nt, Artificial Sequence
  Description of Artificial Sequence: Synthetic oligonucleotide
uacaguaacacaggcgaac

SEQ ID NO: 694719 - RNA, 19 nt, Artificial Sequence
  Description of Artificial Sequence: Synthetic oligonucleotide
aggagcuggggaugugucc

SEQ ID NO: 694720 - RNA, 19 nt, Artificial Sequence
  Description of Artificial Sequence: Synthetic oligonucleotide
ugucuaucaagucgucuaa

SEQ ID NO: 694721 - RNA, 19 nt, Artificial Sequence
  Description of Artificial Sequence: Synthetic oligonucleotide
ggccaaaaucuucugagag

SEQ ID NO: 694722 - RNA, 19 nt, Artificial Sequence
  Description of Artificial Sequence: Synthetic oligonucleotide
aaacguccccuguugauuu

SEQ ID NO: 694723 - RNA, 19 nt, Artificial Sequence
  Description of Artificial Sequence: Synthetic oligonucleotide
ggcuugaucacucaugaca

SEQ ID NO: 694724 - RNA, 19 nt, Artificial Sequence
  Description of Artificial Sequence: Synthetic oligonucleotide
cuucuggucacuccagcag

SEQ ID NO: 694725 - RNA, 19 nt, Artificial Sequence
  Description of Artificial Sequence: Synthetic oligonucleotide
uacccaaugccucaaugua

SEQ ID NO: 694726 - RNA, 19 nt, Artificial Sequence
  Description of Artificial Sequence: Synthetic oligonucleotide
caaaacuauugguccagug

SEQ ID NO: 694727 - RNA, 19 nt, Artificial Sequence
  Description of Artificial Sequence: Synthetic oligonucleotide
acggucuucuucuuuagau

SEQ ID NO: 694728 - RNA, 19 nt, Artificial Sequence
  Description of Artificial Sequence: Synthetic oligonucleotide
cuauugguccaguguauug

SEQ ID NO: 694729 - RNA, 19 nt, Artificial Sequence
  Description of Artificial Sequence: Synthetic oligonucleotide
aagacauaacaaauagcau

SEQ ID NO: 694730 - RNA, 19 nt, Artificial Sequence
  Description of Artificial Sequence: Synthetic oligonucleotide
cuuuggauuggacgcuucc

SEQ ID NO: 694731 - RNA, 19 nt, Artificial Sequence
  Description of Artificial Sequence: Synthetic oligonucleotide
uauacugcacauggaggcc

SEQ ID NO: 694732 - RNA, 19 nt, Artificial Sequence
  Description of Artificial Sequence: Synthetic oligonucleotide
uguagguggcuucucuggu

SEQ ID NO: 694733 - RNA, 19 nt, Artificial Sequence
  Description of Artificial Sequence: Synthetic oligonucleotide
uguguaacuuagcuuucau

SEQ ID NO: 694734 - RNA, 19 nt, Artificial Sequence
  Description of Artificial Sequence: Synthetic oligonucleotide
aagcucuuucggcaggagu

SEQ ID NO: 694735 - RNA, 19 nt, Artificial Sequence
  Description of Artificial Sequence: Synthetic oligonucleotide
auuggacgcuuccucugac

SEQ ID NO: 694736 - RNA, 19 nt, Artificial Sequence
  Description of Artificial Sequence: Synthetic oligonucleotide
uauuguggcucaucuuugu

SEQ ID NO: 694737 - RNA, 19 nt, Artificial Sequence
  Description of Artificial Sequence: Synthetic oligonucleotide
aaauagcauugucuagaaa

SEQ ID NO: 694738 - RNA, 19 nt, Artificial Sequence
  Description of Artificial Sequence: Synthetic oligonucleotide
augccuauagucagguggg

SEQ ID NO: 694739 - RNA, 19 nt, Artificial Sequence
  Description of Artificial Sequence: Synthetic oligonucleotide
aguugaggggcagcugucc

SEQ ID NO: 694740 - RNA, 19 nt, Artificial Sequence
  Description of Artificial Sequence: Synthetic oligonucleotide
ugacuuguucagcuuggcu

SEQ ID NO: 694741 - RNA, 19 nt, Artificial Sequence
  Description of Artificial Sequence: Synthetic oligonucleotide
cacucaauggaggaaguug

SEQ ID NO: 694742 - RNA, 19 nt, Artificial Sequence
  Description of Artificial Sequence: Synthetic oligonucleotide
ugaucacucaugacauccu

SEQ ID NO: 694743 - RNA, 19 nt, Artificial Sequence
  Description of Artificial Sequence: Synthetic oligonucleotide
uccaguguauuguggcuca

SEQ ID NO: 694744 - RNA, 19 nt, Artificial Sequence
  Description of Artificial Sequence: Synthetic oligonucleotide
aacuuuauccauacucaau

SEQ ID NO: 694745 - RNA, 19 nt, Artificial Sequence
  Description of Artificial Sequence: Synthetic oligonucleotide
auuucuauucagauaccca

SEQ ID NO: 694746 - RNA, 19 nt, Artificial Sequence
  Description of Artificial Sequence: Synthetic oligonucleotide
ucaauggaggaaguuguuc

SEQ ID NO: 694747 - RNA, 19 nt, Artificial Sequence
  Description of Artificial Sequence: Synthetic oligonucleotide
agcagacugagcuuugaaa

SEQ ID NO: 694748 - RNA, 19 nt, Artificial Sequence
  Description of Artificial Sequence: Synthetic oligonucleotide
acucaauggaggaaguugu

SEQ ID NO: 694749 - RNA, 19 nt, Artificial Sequence
  Description of Artificial Sequence: Synthetic oligonucleotide
guacugacuguauacugca

SEQ ID NO: 694750 - RNA, 19 nt, Artificial Sequence
  Description of Artificial Sequence: Synthetic oligonucleotide
uggacuccacucgugaagc

SEQ ID NO: 694751 - RNA, 19 nt, Artificial Sequence
  Description of Artificial Sequence: Synthetic oligonucleotide
aaaacguccccuguugauu

SEQ ID NO: 694752 - RNA, 19 nt, Artificial Sequence
  Description of Artificial Sequence: Synthetic oligonucleotide
ugguagagaugguuugucu

SEQ ID NO: 694753 - RNA, 19 nt, Artificial Sequence
  Description of Artificial Sequence: Synthetic oligonucleotide
gaacuacaggugaagucag

SEQ ID NO: 694754 - RNA, 19 nt, Artificial Sequence
  Description of Artificial Sequence: Synthetic oligonucleotide
uggggauguguccuuagau

SEQ ID NO: 694755 - RNA, 19 nt, Artificial Sequence
  Description of Artificial Sequence: Synthetic oligonucleotide
ucccuuccuuauuagccag

SEQ ID NO: 694756 - RNA, 19 nt, Artificial Sequence
  Description of Artificial Sequence: Synthetic oligonucleotide
accucuucuagucuauaau

SEQ ID NO: 694757 - RNA, 19 nt, Artificial Sequence
  Description of Artificial Sequence: Synthetic oligonucleotide
uguacucuggaggaauagu

SEQ ID NO: 694758 - RNA, 19 nt, Artificial Sequence
  Description of Artificial Sequence: Synthetic oligonucleotide
caaaagucaccacccauca

SEQ ID NO: 694759 - RNA, 19 nt, Artificial Sequence
  Description of Artificial Sequence: Synthetic oligonucleotide
aggcaauuaaagaucuuug

SEQ ID NO: 694760 - RNA, 19 nt, Artificial Sequence
  Description of Artificial Sequence: Synthetic oligonucleotide
aauagugguuuuccaucuu

SEQ ID NO: 694761 - RNA, 19 nt, Artificial Sequence
  Description of Artificial Sequence: Synthetic oligonucleotide
caaaucuugugagagggca

SEQ ID NO: 694762 - RNA, 19 nt, Artificial Sequence
  Description of Artificial Sequence: Synthetic oligonucleotide
uuuggauuggacgcuuccu

SEQ ID NO: 694763 - RNA, 19 nt, Artificial Sequence
  Description of Artificial Sequence: Synthetic oligonucleotide
gagcuuugaaaacgucccc

SEQ ID NO: 694764 - RNA, 19 nt, Artificial Sequence
  Description of Artificial Sequence: Synthetic oligonucleotide
uacccaaauguguaacuua

SEQ ID NO: 694765 - RNA, 19 nt, Artificial Sequence
  Description of Artificial Sequence: Synthetic oligonucleotide
uuguucagcuuggcuaagg

SEQ ID NO: 694766 - RNA, 19 nt, Artificial Sequence
  Description of Artificial Sequence: Synthetic oligonucleotide
agccguuguucuucaaaag

SEQ ID NO: 694767 - RNA, 19 nt, Artificial Sequence
  Description of Artificial Sequence: Synthetic oligonucleotide
uucucccacuuaaaggcaa

SEQ ID NO: 694768 - RNA, 19 nt, Artificial Sequence
  Description of Artificial Sequence: Synthetic oligonucleotide
agaucggccaaaaucuucu

SEQ ID NO: 694769 - RNA, 19 nt, Artificial Sequence
  Description of Artificial Sequence: Synthetic oligonucleotide
gaauuucuauucagauacc

SEQ ID NO: 694770 - RNA, 19 nt, Artificial Sequence
  Description of Artificial Sequence: Synthetic oligonucleotide
guuugcuucccagucggag

SEQ ID NO: 694771 - RNA, 19 nt, Artificial Sequence
  Description of Artificial Sequence: Synthetic oligonucleotide
gguacugacuguauacugc

SEQ ID NO: 694772 - RNA, 19 nt, Artificial Sequence
  Description of Artificial Sequence: Synthetic oligonucleotide
gcaauagugguuuuccauc

SEQ ID NO: 694773 - RNA, 19 nt, Artificial Sequence
  Description of Artificial Sequence: Synthetic oligonucleotide
auaaucaggaggaauuguu

SEQ ID NO: 694774 - RNA, 19 nt, Artificial Sequence
  Description of Artificial Sequence: Synthetic oligonucleotide
aacguccccuguugauuuc

SEQ ID NO: 694775 - RNA, 19 nt, Artificial Sequence
  Description of Artificial Sequence: Synthetic oligonucleotide
cauacucaauacaguaaca

SEQ ID NO: 694776 - RNA, 19 nt, Artificial Sequence
  Description of Artificial Sequence: Synthetic oligonucleotide
ugaucaggcuucuuugauu

SEQ ID NO: 694777 - RNA, 19 nt, Artificial Sequence
  Description of Artificial Sequence: Synthetic oligonucleotide
caagagaggguauguuuuc

SEQ ID NO: 694778 - RNA, 19 nt, Artificial Sequence
  Description of Artificial Sequence: Synthetic oligonucleotide
cacuuagacuuuucuucag

SEQ ID NO: 694779 - RNA, 19 nt, Artificial Sequence
  Description of Artificial Sequence: Synthetic oligonucleotide
uagugguuuuccaucuuua

SEQ ID NO: 694780 - RNA, 19 nt, Artificial Sequence
  Description of Artificial Sequence: Synthetic oligonucleotide
uuauccauagcuggcuuua

SEQ ID NO: 694781 - RNA, 19 nt, Artificial Sequence
  Description of Artificial Sequence: Synthetic oligonucleotide
agcuuugaaaacguccccu

SEQ ID NO: 694782 - RNA, 19 nt, Artificial Sequence
  Description of Artificial Sequence: Synthetic oligonucleotide
gucggagaacuacagguga

SEQ ID NO: 694783 - RNA, 19 nt, Artificial Sequence
  Description of Artificial Sequence: Synthetic oligonucleotide
agcagaaaguuuggcaucu

SEQ ID NO: 694784 - RNA, 19 nt, Artificial Sequence
  Description of Artificial Sequence: Synthetic oligonucleotide
aaguccugagacaaugcau

SEQ ID NO: 694785 - RNA, 19 nt, Artificial Sequence
  Description of Artificial Sequence: Synthetic oligonucleotide
uggcuuuaaccugaacuga

SEQ ID NO: 694786 - RNA, 19 nt, Artificial Sequence
  Description of Artificial Sequence: Synthetic oligonucleotide
aucggccaaaaucuucuga

SEQ ID NO: 694787 - RNA, 19 nt, Artificial Sequence
  Description of Artificial Sequence: Synthetic oligonucleotide
uggcuaagguggaucucag

SEQ ID NO: 694788 - RNA, 19 nt, Artificial Sequence
  Description of Artificial Sequence: Synthetic oligonucleotide
acuacaggugaagucagau

SEQ ID NO: 694789 - RNA, 19 nt, Artificial Sequence
  Description of Artificial Sequence: Synthetic oligonucleotide
ucggagaacuacaggugaa

SEQ ID NO: 694790 - RNA, 19 nt, Artificial Sequence
  Description of Artificial Sequence: Synthetic oligonucleotide
agaugucaaaagacauaac

SEQ ID NO: 694791 - RNA, 19 nt, Artificial Sequence
  Description of Artificial Sequence: Synthetic oligonucleotide
gauacccaaauguguaacu

SEQ ID NO: 694792 - RNA, 19 nt, Artificial Sequence
  Description of Artificial Sequence: Synthetic oligonucleotide
gagcaggcgucuuggaaac

SEQ ID NO: 694793 - RNA, 19 nt, Artificial Sequence
  Description of Artificial Sequence: Synthetic oligonucleotide
ccuauagucaggugggaug

SEQ ID NO: 694794 - RNA, 19 nt, Artificial Sequence
  Description of Artificial Sequence: Synthetic oligonucleotide
uucccagucggagaacuac

SEQ ID NO: 694795 - RNA, 19 nt, Artificial Sequence
  Description of Artificial Sequence: Synthetic oligonucleotide
uggacgcuuccucugacuu

SEQ ID NO: 694796 - RNA, 19 nt, Artificial Sequence
  Description of Artificial Sequence: Synthetic oligonucleotide
uugucaucuacugguuugu

SEQ ID NO: 694797 - RNA, 19 nt, Artificial Sequence
  Description of Artificial Sequence: Synthetic oligonucleotide
cagggcuugaucacucaug

SEQ ID NO: 694798 - RNA, 19 nt, Artificial Sequence
  Description of Artificial Sequence: Synthetic oligonucleotide
uccuguaugcugugaguuc

SEQ ID NO: 694799 - RNA, 19 nt, Artificial Sequence
  Description of Artificial Sequence: Synthetic oligonucleotide
ucgucuaaagcagcaucca

SEQ ID NO: 694800 - RNA, 19 nt, Artificial Sequence
  Description of Artificial Sequence: Synthetic oligonucleotide
cuucaccacacuucuccug

SEQ ID NO: 694801 - RNA, 19 nt, Artificial Sequence
  Description of Artificial Sequence: Synthetic oligonucleotide
caaauagcauugucuagaa

SEQ ID NO: 694802 - RNA, 19 nt, Artificial Sequence
  Description of Artificial Sequence: Synthetic oligonucleotide
ccucuucuagucuauaauc

SEQ ID NO: 694803 - RNA, 19 nt, Artificial Sequence
  Description of Artificial Sequence: Synthetic oligonucleotide
caagucgucuaaagcagca

SEQ ID NO: 694804 - RNA, 19 nt, Artificial Sequence
  Description of Artificial Sequence: Synthetic oligonucleotide
ugacuguauacugcacaug

SEQ ID NO: 694805 - RNA, 19 nt, Artificial Sequence
  Description of Artificial Sequence: Synthetic oligonucleotide
aguuuauccaccacagguu

SEQ ID NO: 694806 - RNA, 19 nt, Artificial Sequence
  Description of Artificial Sequence: Synthetic oligonucleotide
aaccugaacugagaaggaa

SEQ ID NO: 694807 - RNA, 19 nt, Artificial Sequence
  Description of Artificial Sequence: Synthetic oligonucleotide
gucuugauaugcagaucgg

SEQ ID NO: 694808 - RNA, 19 nt, Artificial Sequence
  Description of Artificial Sequence: Synthetic oligonucleotide
guaugcugugaguucucug

SEQ ID NO: 694809 - RNA, 19 nt, Artificial Sequence
  Description of Artificial Sequence: Synthetic oligonucleotide
cccuaaagugucuaucaag

SEQ ID NO: 694810 - RNA, 19 nt, Artificial Sequence
  Description of Artificial Sequence: Synthetic oligonucleotide
aacuauugguccaguguau

SEQ ID NO: 694811 - RNA, 19 nt, Artificial Sequence
  Description of Artificial Sequence: Synthetic oligonucleotide
acccaaugccucaauguag

SEQ ID NO: 694812 - RNA, 19 nt, Artificial Sequence
  Description of Artificial Sequence: Synthetic oligonucleotide
gcuggcuuuaaccugaacu

SEQ ID NO: 694813 - RNA, 19 nt, Artificial Sequence
  Description of Artificial Sequence: Synthetic oligonucleotide
agugucuaucaagucgucu

SEQ ID NO: 694814 - RNA, 19 nt, Artificial Sequence
  Description of Artificial Sequence: Synthetic oligonucleotide
aagugucuaucaagucguc

SEQ ID NO: 694815 - RNA, 19 nt, Artificial Sequence
  Description of Artificial Sequence: Synthetic oligonucleotide
accaugcccaaugaugcug

SEQ ID NO: 694816 - RNA, 19 nt, Artificial Sequence
  Description of Artificial Sequence: Synthetic oligonucleotide
cagacuuccagccaaaguu

SEQ ID NO: 694817 - RNA, 19 nt, Artificial Sequence
  Description of Artificial Sequence: Synthetic oligonucleotide
uugaacccaucuucuugcu

SEQ ID NO: 694818 - RNA, 19 nt, Artificial Sequence
  Description of Artificial Sequence: Synthetic oligonucleotide
uuauacccaaugccucaau

SEQ ID NO: 694819 - RNA, 19 nt, Artificial Sequence
  Description of Artificial Sequence: Synthetic oligonucleotide
cugagacaaugcaucaaga

SEQ ID NO: 694820 - RNA, 19 nt, Artificial Sequence
  Description of Artificial Sequence: Synthetic oligonucleotide
ugguuggacuccacucgug

SEQ ID NO: 694821 - RNA, 19 nt, Artificial Sequence
  Description of Artificial Sequence: Synthetic oligonucleotide
ggcuuuaaccugaacugag

SEQ ID NO: 694822 - RNA, 19 nt, Artificial Sequence
  Description of Artificial Sequence: Synthetic oligonucleotide
ucguccagaagaugccuau

SEQ ID NO: 694823 - RNA, 19 nt, Artificial Sequence
  Description of Artificial Sequence: Synthetic oligonucleotide
ucaggcacuuagacuuuuc

SEQ ID NO: 694824 - RNA, 19 nt, Artificial Sequence
  Description of Artificial Sequence: Synthetic oligonucleotide
uuggacgcuuccucugacu

SEQ ID NO: 694825 - RNA, 19 nt, Artificial Sequence
  Description of Artificial Sequence: Synthetic oligonucleotide
ggguccaaaacuauugguc

SEQ ID NO: 694826 - RNA, 19 nt, Artificial Sequence
  Description of Artificial Sequence: Synthetic oligonucleotide
gcauccaugccugacuugc

SEQ ID NO: 694827 - RNA, 19 nt, Artificial Sequence
  Description of Artificial Sequence: Synthetic oligonucleotide
ucccacuuaaaggcaauua

SEQ ID NO: 694828 - RNA, 19 nt, Artificial Sequence
  Description of Artificial Sequence: Synthetic oligonucleotide
cccgucaucguccagaaga

SEQ ID NO: 694829 - RNA, 19 nt, Artificial Sequence
  Description of Artificial Sequence: Synthetic oligonucleotide
ucucccacuuaaaggcaau

SEQ ID NO: 694830 - RNA, 19 nt, Artificial Sequence
  Description of Artificial Sequence: Synthetic oligonucleotide
agagggcaucaaugggguc

SEQ ID NO: 694831 - RNA, 19 nt, Artificial Sequence
  Description of Artificial Sequence: Synthetic oligonucleotide
uccuguacucuggaggaau

SEQ ID NO: 694832 - RNA, 19 nt, Artificial Sequence
  Description of Artificial Sequence: Synthetic oligonucleotide
ugggugcuuuggaauuuga

SEQ ID NO: 694833 - RNA, 19 nt, Artificial Sequence
  Description of Artificial Sequence: Synthetic oligonucleotide
gcacuuagacuuuucuuca

SEQ ID NO: 694834 - RNA, 19 nt, Artificial Sequence
  Description of Artificial Sequence: Synthetic oligonucleotide
caauagugguuuuccaucu

SEQ ID NO: 694835 - RNA, 19 nt, Artificial Sequence
  Description of Artificial Sequence: Synthetic oligonucleotide
cauccaugccugacuugcc

SEQ ID NO: 694836 - RNA, 19 nt, Artificial Sequence
  Description of Artificial Sequence: Synthetic oligonucleotide
gaauggcacuucuggucac

SEQ ID NO: 694837 - RNA, 19 nt, Artificial Sequence
  Description of Artificial Sequence: Synthetic oligonucleotide
ccuaaagugucuaucaagu

SEQ ID NO: 694838 - RNA, 19 nt, Artificial Sequence
  Description of Artificial Sequence: Synthetic oligonucleotide
ccauggguuuagaagaguc

SEQ ID NO: 694839 - RNA, 19 nt, Artificial Sequence
  Description of Artificial Sequence: Synthetic oligonucleotide
uaguugaggggcagcuguc

SEQ ID NO: 694840 - RNA, 19 nt, Artificial Sequence
  Description of Artificial Sequence: Synthetic oligonucleotide
acaggcgaaccagacaaau

SEQ ID NO: 694841 - RNA, 19 nt, Artificial Sequence
  Description of Artificial Sequence: Synthetic oligonucleotide
agaugccuauagucaggug

SEQ ID NO: 694842 - RNA, 19 nt, Artificial Sequence
  Description of Artificial Sequence: Synthetic oligonucleotide
ucggcaggagugguuuucc

SEQ ID NO: 694843 - RNA, 19 nt, Artificial Sequence
  Description of Artificial Sequence: Synthetic oligonucleotide
uccuggucaugaucaggcu

SEQ ID NO: 694844 - RNA, 19 nt, Artificial Sequence
  Description of Artificial Sequence: Synthetic oligonucleotide
ucuuucggcaggagugguu

SEQ ID NO: 694845 - RNA, 19 nt, Artificial Sequence
  Description of Artificial Sequence: Synthetic oligonucleotide
guaacacaggcgaaccaga

SEQ ID NO: 694846 - RNA, 19 nt, Artificial Sequence
  Description of Artificial Sequence: Synthetic oligonucleotide
ggguauguuuucaggacug

SEQ ID NO: 694847 - RNA, 19 nt, Artificial Sequence
  Description of Artificial Sequence: Synthetic oligonucleotide
acucgugaagcuggaguug

SEQ ID NO: 694848 - RNA, 19 nt, Artificial Sequence
  Description of Artificial Sequence: Synthetic oligonucleotide
gaaaacguccccuguugau

SEQ ID NO: 694849 - RNA, 19 nt, Artificial Sequence
  Description of Artificial Sequence: Synthetic oligonucleotide
acuauugguccaguguauu

SEQ ID NO: 694850 - RNA, 19 nt, Artificial Sequence
  Description of Artificial Sequence: Synthetic oligonucleotide
agcauccaugccugacuug

SEQ ID NO: 694851 - RNA, 19 nt, Artificial Sequence
  Description of Artificial Sequence: Synthetic oligonucleotide
gaggaauggcacuucuggu

SEQ ID NO: 694852 - RNA, 19 nt, Artificial Sequence
  Description of Artificial Sequence: Synthetic oligonucleotide
cuaagguggaucucagggu

SEQ ID NO: 694853 - RNA, 19 nt, Artificial Sequence
  Description of Artificial Sequence: Synthetic oligonucleotide
acuguauacugcacaugga

SEQ ID NO: 694854 - RNA, 19 nt, Artificial Sequence
  Description of Artificial Sequence: Synthetic oligonucleotide
ugcagggcuugaucacuca

SEQ ID NO: 694855 - RNA, 19 nt, Artificial Sequence
  Description of Artificial Sequence: Synthetic oligonucleotide
auucaagagaggguauguu

SEQ ID NO: 694856 - RNA, 19 nt, Artificial Sequence
  Description of Artificial Sequence: Synthetic oligonucleotide
ucuugugagagggcaucaa

SEQ ID NO: 694857 - RNA, 19 nt, Artificial Sequence
  Description of Artificial Sequence: Synthetic oligonucleotide
gacgcuuccucugacuucu

SEQ ID NO: 694858 - RNA, 19 nt, Artificial Sequence
  Description of Artificial Sequence: Synthetic oligonucleotide
ugcguucguguugggagca

SEQ ID NO: 694859 - RNA, 19 nt, Artificial Sequence
  Description of Artificial Sequence: Synthetic oligonucleotide
uuugccucuuugacuuguu

SEQ ID NO: 694860 - RNA, 19 nt, Artificial Sequence
  Description of Artificial Sequence: Synthetic oligonucleotide
uccccaagacugucagaga

SEQ ID NO: 694861 - RNA, 19 nt, Artificial Sequence
  Description of Artificial Sequence: Synthetic oligonucleotide
agagaugguuugucuugau

SEQ ID NO: 694862 - RNA, 19 nt, Artificial Sequence
  Description of Artificial Sequence: Synthetic oligonucleotide
cagauacccaaauguguaa

SEQ ID NO: 694863 - RNA, 19 nt, Artificial Sequence
  Description of Artificial Sequence: Synthetic oligonucleotide
ccaaauguguaacuuagcu

SEQ ID NO: 694864 - RNA, 19 nt, Artificial Sequence
  Description of Artificial Sequence: Synthetic oligonucleotide
ggcuaagguggaucucagg

SEQ ID NO: 694865 - RNA, 19 nt, Artificial Sequence
  Description of Artificial Sequence: Synthetic oligonucleotide
aaaggcaauuaaagaucuu

SEQ ID NO: 694866 - RNA, 19 nt, Artificial Sequence
  Description of Artificial Sequence: Synthetic oligonucleotide
ugggugguacugacuguau

SEQ ID NO: 694867 - RNA, 19 nt, Artificial Sequence
  Description of Artificial Sequence: Synthetic oligonucleotide
gcugguuugggugguacug

SEQ ID NO: 694868 - RNA, 19 nt, Artificial Sequence
  Description of Artificial Sequence: Synthetic oligonucleotide
aucuugugagagggcauca

SEQ ID NO: 694869 - RNA, 19 nt, Artificial Sequence
  Description of Artificial Sequence: Synthetic oligonucleotide
aucacucaauggaggaagu

SEQ ID NO: 694870 - RNA, 19 nt, Artificial Sequence
  Description of Artificial Sequence: Synthetic oligonucleotide
caagacugucagagaguuc

SEQ ID NO: 694871 - RNA, 19 nt, Artificial Sequence
  Description of Artificial Sequence: Synthetic oligonucleotide
cagaugacaaggcaucuau

SEQ ID NO: 694872 - RNA, 19 nt, Artificial Sequence
  Description of Artificial Sequence: Synthetic oligonucleotide
gagauggcagcagaaaguu

SEQ ID NO: 694873 - RNA, 19 nt, Artificial Sequence
  Description of Artificial Sequence: Synthetic oligonucleotide
cccaaauguguaacuuagc

SEQ ID NO: 694874 - RNA, 19 nt, Artificial Sequence
  Description of Artificial Sequence: Synthetic oligonucleotide
ugcugcguucguguuggga

SEQ ID NO: 694875 - RNA, 19 nt, Artificial Sequence
  Description of Artificial Sequence: Synthetic oligonucleotide
auaugcagaucggccaaaa

SEQ ID NO: 694876 - RNA, 19 nt, Artificial Sequence
  Description of Artificial Sequence: Synthetic oligonucleotide
cugacuguauacugcacau

SEQ ID NO: 694877 - RNA, 19 nt, Artificial Sequence
  Description of Artificial Sequence: Synthetic oligonucleotide
ucacucaauggaggaaguu

SEQ ID NO: 694878 - RNA, 19 nt, Artificial Sequence
  Description of Artificial Sequence: Synthetic oligonucleotide
uccuuauccuugaccucuu

SEQ ID NO: 694879 - RNA, 19 nt, Artificial Sequence
  Description of Artificial Sequence: Synthetic oligonucleotide
gacugagcuuugaaaacgu

SEQ ID NO: 694880 - RNA, 19 nt, Artificial Sequence
  Description of Artificial Sequence: Synthetic oligonucleotide
gagagggcaucaauggggu

SEQ ID NO: 694881 - RNA, 19 nt, Artificial Sequence
  Description of Artificial Sequence: Synthetic oligonucleotide
gauaugcagaucggccaaa

SEQ ID NO: 694882 - RNA, 19 nt, Artificial Sequence
  Description of Artificial Sequence: Synthetic oligonucleotide
cuuauacccaaugccucaa

SEQ ID NO: 694883 - RNA, 19 nt, Artificial Sequence
  Description of Artificial Sequence: Synthetic oligonucleotide
caguaacacaggcgaacca

SEQ ID NO: 694884 - RNA, 19 nt, Artificial Sequence
  Description of Artificial Sequence: Synthetic oligonucleotide
cagacaaauucauuuuguu

SEQ ID NO: 694885 - RNA, 19 nt, Artificial Sequence
  Description of Artificial Sequence: Synthetic oligonucleotide
agucuauaaucaggaggaa

SEQ ID NO: 694886 - RNA, 19 nt, Artificial Sequence
  Description of Artificial Sequence: Synthetic oligonucleotide
acuuugucaucuacugguu

SEQ ID NO: 694887 - RNA, 19 nt, Artificial Sequence
  Description of Artificial Sequence: Synthetic oligonucleotide
agccuuuggauuggacgcu

SEQ ID NO: 694888 - RNA, 19 nt, Artificial Sequence
  Description of Artificial Sequence: Synthetic oligonucleotide
gucuauaaucaggaggaau

SEQ ID NO: 694889 - RNA, 19 nt, Artificial Sequence
  Description of Artificial Sequence: Synthetic oligonucleotide
gccguuguucuucaaaagu

SEQ ID NO: 694890 - RNA, 19 nt, Artificial Sequence
  Description of Artificial Sequence: Synthetic oligonucleotide
ucgugaagcuggaguugau

SEQ ID NO: 694891 - RNA, 19 nt, Artificial Sequence
  Description of Artificial Sequence: Synthetic oligonucleotide
cuuggaggaauccuuuguu

SEQ ID NO: 694892 - RNA, 19 nt, Artificial Sequence
  Description of Artificial Sequence: Synthetic oligonucleotide
guggcuuguugguuggacu

SEQ ID NO: 694893 - RNA, 19 nt, Artificial Sequence
  Description of Artificial Sequence: Synthetic oligonucleotide
guguaacuuagcuuucauu

SEQ ID NO: 694894 - RNA, 19 nt, Artificial Sequence
  Description of Artificial Sequence: Synthetic oligonucleotide
caguguauuguggcucauc

SEQ ID NO: 694895 - RNA, 19 nt, Artificial Sequence
  Description of Artificial Sequence: Synthetic oligonucleotide
caaugccucaauguaggua

SEQ ID NO: 694896 - RNA, 19 nt, Artificial Sequence
  Description of Artificial Sequence: Synthetic oligonucleotide
gucaucuacugguuuguuu

SEQ ID NO: 694897 - RNA, 19 nt, Artificial Sequence
  Description of Artificial Sequence: Synthetic oligonucleotide
ggcgaaccagacaaauuca

SEQ ID NO: 694898 - RNA, 19 nt, Artificial Sequence
  Description of Artificial Sequence: Synthetic oligonucleotide
cuugugagagggcaucaau

SEQ ID NO: 694899 - RNA, 19 nt, Artificial Sequence
  Description of Artificial Sequence: Synthetic oligonucleotide
gcucagugucagguggugg

SEQ ID NO: 694900 - RNA, 19 nt, Artificial Sequence
  Description of Artificial Sequence: Synthetic oligonucleotide
gcuuuaaccugaacugaga

SEQ ID NO: 694901 - RNA, 19 nt, Artificial Sequence
  Description of Artificial Sequence: Synthetic oligonucleotide
agaugacaaggcaucuaua

SEQ ID NO: 694902 - RNA, 19 nt, Artificial Sequence
  Description of Artificial Sequence: Synthetic oligonucleotide
ggcuuguugguuggacucc

SEQ ID NO: 694903 - RNA, 19 nt, Artificial Sequence
  Description of Artificial Sequence: Synthetic oligonucleotide
cugguuugggugguacuga

SEQ ID NO: 694904 - RNA, 19 nt, Artificial Sequence
  Description of Artificial Sequence: Synthetic oligonucleotide
ugucagccuuuggauugga

SEQ ID NO: 694905 - RNA, 19 nt, Artificial Sequence
  Description of Artificial Sequence: Synthetic oligonucleotide
cauuggguccaaaacuauu

SEQ ID NO: 694906 - RNA, 19 nt, Artificial Sequence
  Description of Artificial Sequence: Synthetic oligonucleotide
acccaucagcugaagaauu

SEQ ID NO: 694907 - RNA, 19 nt, Artificial Sequence
  Description of Artificial Sequence: Synthetic oligonucleotide
ccugaacugagaaggaacu

SEQ ID NO: 694908 - RNA, 19 nt, Artificial Sequence
  Description of Artificial Sequence: Synthetic oligonucleotide
cuuccuuauuagccagaaa

SEQ ID NO: 694909 - RNA, 19 nt, Artificial Sequence
  Description of Artificial Sequence: Synthetic oligonucleotide
acguccccuguugauuucu

SEQ ID NO: 694910 - RNA, 19 nt, Artificial Sequence
  Description of Artificial Sequence: Synthetic oligonucleotide
caggcacuuagacuuuucu

SEQ ID NO: 694911 - RNA, 19 nt, Artificial Sequence
  Description of Artificial Sequence: Synthetic oligonucleotide
gguccugugaucccuuccu

SEQ ID NO: 694912 - RNA, 19 nt, Artificial Sequence
  Description of Artificial Sequence: Synthetic oligonucleotide
aggcgucuuggaaacuacu

SEQ ID NO: 694913 - RNA, 19 nt, Artificial Sequence
  Description of Artificial Sequence: Synthetic oligonucleotide
gcccaaugaugcugguuug

SEQ ID NO: 694914 - RNA, 19 nt, Artificial Sequence
  Description of Artificial Sequence: Synthetic oligonucleotide
gcuuggcuaagguggaucu

SEQ ID NO: 694915 - RNA, 19 nt, Artificial Sequence
  Description of Artificial Sequence: Synthetic oligonucleotide
cccuguugauuucucuuuc

SEQ ID NO: 694916 - RNA, 19 nt, Artificial Sequence
  Description of Artificial Sequence: Synthetic oligonucleotide
ggagaacuacaggugaagu

SEQ ID NO: 694917 - RNA, 19 nt, Artificial Sequence
  Description of Artificial Sequence: Synthetic oligonucleotide
uagaauccauuggguccaa

SEQ ID NO: 694918 - RNA, 19 nt, Artificial Sequence
  Description of Artificial Sequence: Synthetic oligonucleotide
ugcuucccagucggagaac

SEQ ID NO: 694919 - RNA, 19 nt, Artificial Sequence
  Description of Artificial Sequence: Synthetic oligonucleotide
cugccgggugcccagugaa

SEQ ID NO: 694920 - RNA, 19 nt, Artificial Sequence
  Description of Artificial Sequence: Synthetic oligonucleotide
guagguggcuucucugguu

SEQ ID NO: 694921 - RNA, 19 nt, Artificial Sequence
  Description of Artificial Sequence: Synthetic oligonucleotide
ugcuucacucaggcacuua

SEQ ID NO: 694922 - RNA, 19 nt, Artificial Sequence
  Description of Artificial Sequence: Synthetic oligonucleotide
cuccacucgugaagcugga

SEQ ID NO: 694923 - RNA, 19 nt, Artificial Sequence
  Description of Artificial Sequence: Synthetic oligonucleotide
cuucccagucggagaacua

SEQ ID NO: 694924 - RNA, 19 nt, Artificial Sequence
  Description of Artificial Sequence: Synthetic oligonucleotide
guguauuguggcucaucuu

SEQ ID NO: 694925 - RNA, 19 nt, Artificial Sequence
  Description of Artificial Sequence: Synthetic oligonucleotide
cacaggcgaaccagacaaa

SEQ ID NO: 694926 - RNA, 19 nt, Artificial Sequence
  Description of Artificial Sequence: Synthetic oligonucleotide
cucaauggaggaaguuguu

SEQ ID NO: 694927 - RNA, 19 nt, Artificial Sequence
  Description of Artificial Sequence: Synthetic oligonucleotide
ccuuuggauuggacgcuuc

SEQ ID NO: 694928 - RNA, 19 nt, Artificial Sequence
  Description of Artificial Sequence: Synthetic oligonucleotide
gggugguacugacuguaua

SEQ ID NO: 694929 - RNA, 19 nt, Artificial Sequence
  Description of Artificial Sequence: Synthetic oligonucleotide
cacccaucagcugaagaau

SEQ ID NO: 694930 - RNA, 19 nt, Artificial Sequence
  Description of Artificial Sequence: Synthetic oligonucleotide
caucguccagaagaugccu

SEQ ID NO: 694931 - RNA, 19 nt, Artificial Sequence
  Description of Artificial Sequence: Synthetic oligonucleotide
caaugggguccuggucaug

SEQ ID NO: 694932 - RNA, 19 nt, Artificial Sequence
  Description of Artificial Sequence: Synthetic oligonucleotide
gggugcuuuggaauuugaa

SEQ ID NO: 694933 - RNA, 19 nt, Artificial Sequence
  Description of Artificial Sequence: Synthetic oligonucleotide
cugcugcguucguguuggg

SEQ ID NO: 694934 - RNA, 19 nt, Artificial Sequence
  Description of Artificial Sequence: Synthetic oligonucleotide
acugcacauggaggcccga

SEQ ID NO: 694935 - RNA, 19 nt, Artificial Sequence
  Description of Artificial Sequence: Synthetic oligonucleotide
agcaggcgucuuggaaacu

SEQ ID NO: 694936 - RNA, 19 nt, Artificial Sequence
  Description of Artificial Sequence: Synthetic oligonucleotide
gguuccccuaaagugucua

SEQ ID NO: 694937 - RNA, 19 nt, Artificial Sequence
  Description of Artificial Sequence: Synthetic oligonucleotide
ccuguaugcugugaguucu

SEQ ID NO: 694938 - RNA, 19 nt, Artificial Sequence
  Description of Artificial Sequence: Synthetic oligonucleotide
caggcgaaccagacaaauu

SEQ ID NO: 694939 - RNA, 19 nt, Artificial Sequence
  Description of Artificial Sequence: Synthetic oligonucleotide
caccaugcccaaugaugcu

SEQ ID NO: 694940 - RNA, 19 nt, Artificial Sequence
  Description of Artificial Sequence: Synthetic oligonucleotide
ccuuauccuugaccucuuc

SEQ ID NO: 694941 - RNA, 19 nt, Artificial Sequence
  Description of Artificial Sequence: Synthetic oligonucleotide
ccuuccuuauuagccagaa

SEQ ID NO: 694942 - RNA, 19 nt, Artificial Sequence
  Description of Artificial Sequence: Synthetic oligonucleotide
ccugugaucccuuccuuau

SEQ ID NO: 694943 - RNA, 19 nt, Artificial Sequence
  Description of Artificial Sequence: Synthetic oligonucleotide
aucaggccccauggguuua

SEQ ID NO: 694944 - RNA, 19 nt, Artificial Sequence
  Description of Artificial Sequence: Synthetic oligonucleotide
gcugccgggugcccaguga

SEQ ID NO: 694945 - RNA, 19 nt, Artificial Sequence
  Description of Artificial Sequence: Synthetic oligonucleotide
cugacuugccagguggcuu

SEQ ID NO: 694946 - RNA, 19 nt, Artificial Sequence
  Description of Artificial Sequence: Synthetic oligonucleotide
gcgaaccagacaaauucau

SEQ ID NO: 694947 - RNA, 19 nt, Artificial Sequence
  Description of Artificial Sequence: Synthetic oligonucleotide
ggaaaaguccugagacaau

SEQ ID NO: 694948 - RNA, 19 nt, Artificial Sequence
  Description of Artificial Sequence: Synthetic oligonucleotide
caugcccaaugaugcuggu

SEQ ID NO: 694949 - RNA, 19 nt, Artificial Sequence
  Description of Artificial Sequence: Synthetic oligonucleotide
cccaagacugucagagagu

SEQ ID NO: 694950 - RNA, 19 nt, Artificial Sequence
  Description of Artificial Sequence: Synthetic oligonucleotide
cucuuucggcaggaguggu

SEQ ID NO: 694951 - RNA, 19 nt, Artificial Sequence
  Description of Artificial Sequence: Synthetic oligonucleotide
gcccgucaucguccagaag

SEQ ID NO: 694952 - RNA, 19 nt, Artificial Sequence
  Description of Artificial Sequence: Synthetic oligonucleotide
gcguucguguugggagcag

SEQ ID NO: 694953 - RNA, 19 nt, Artificial Sequence
  Description of Artificial Sequence: Synthetic oligonucleotide
ggacuccacucgugaagcu

SEQ ID NO: 694954 - RNA, 19 nt, Artificial Sequence
  Description of Artificial Sequence: Synthetic oligonucleotide
cccgaggcacagccucagc

SEQ ID NO: 694955 - RNA, 19 nt, Artificial Sequence
  Description of Artificial Sequence: Synthetic oligonucleotide
gccuauagucaggugggau

SEQ ID NO: 694956 - RNA, 19 nt, Artificial Sequence
  Description of Artificial Sequence: Synthetic oligonucleotide
gaggcccgaggcacagccu

SEQ ID NO: 694957 - RNA, 19 nt, Artificial Sequence
  Description of Artificial Sequence: Synthetic oligonucleotide
cgaaccagacaaauucauu

SEQ ID NO: 694958 - RNA, 19 nt, Artificial Sequence
  Description of Artificial Sequence: Synthetic oligonucleotide
ccaaaacuauugguccagu

SEQ ID NO: 694959 - RNA, 19 nt, Artificial Sequence
  Description of Artificial Sequence: Synthetic oligonucleotide
caggccccauggguuuaga

SEQ ID NO: 694960 - RNA, 19 nt, Artificial Sequence
  Description of Artificial Sequence: Synthetic oligonucleotide
ggcccgaggcacagccuca

SEQ ID NO: 694961 - RNA, 19 nt, Artificial Sequence
  Description of Artificial Sequence: Synthetic oligonucleotide
gcagaucggccaaaaucuu

SEQ ID NO: 694962 - RNA, 19 nt, Artificial Sequence
  Description of Artificial Sequence: Synthetic oligonucleotide
ccgggugcccagugaaucu

SEQ ID NO: 694963 - RNA, 19 nt, Artificial Sequence
  Description of Artificial Sequence: Synthetic oligonucleotide
cgucuaaagcagcauccau

SEQ ID NO: 694964 - RNA, 19 nt, Artificial Sequence
  Description of Artificial Sequence: Synthetic oligonucleotide
cccauggguuuagaagagu

SEQ ID NO: 694965 - RNA, 19 nt, Artificial Sequence
  Description of Artificial Sequence: Synthetic oligonucleotide
cugcuucacucaggcacuu

SEQ ID NO: 694966 - RNA, 19 nt, Artificial Sequence
  Description of Artificial Sequence: Synthetic oligonucleotide
gggcagcuguccaaaucuu

SEQ ID NO: 694967 - RNA, 19 nt, Artificial Sequence
  Description of Artificial Sequence: Synthetic oligonucleotide
ccaguguauuguggcucau

SEQ ID NO: 694968 - RNA, 19 nt, Artificial Sequence
  Description of Artificial Sequence: Synthetic oligonucleotide
aauccagugaauuaugugc

SEQ ID NO: 694969 - RNA, 19 nt, Artificial Sequence
  Description of Artificial Sequence: Synthetic oligonucleotide
auuaugacuaucuauaaac

SEQ ID NO: 694970 - RNA, 19 nt, Artificial Sequence
  Description of Artificial Sequence: Synthetic oligonucleotide
gauauguuugucuagagag

SEQ ID NO: 694971 - RNA, 19 nt, Artificial Sequence
  Description of Artificial Sequence: Synthetic oligonucleotide
uuuaauauguuucugguac

SEQ ID NO: 694972 - RNA, 19 nt, Artificial Sequence
  Description of Artificial Sequence: Synthetic oligonucleotide
aaaauaguggccaacauug

SEQ ID NO: 694973 - RNA, 19 nt, Artificial Sequence
  Description of Artificial Sequence: Synthetic oligonucleotide
aacuaacugugucagagac

SEQ ID NO: 694974 - RNA, 19 nt, Artificial Sequence
  Description of Artificial Sequence: Synthetic oligonucleotide
ugucuaacuuauuugaggg

SEQ ID NO: 694975 - RNA, 19 nt, Artificial Sequence
  Description of Artificial Sequence: Synthetic oligonucleotide
uuaaagugaauaaauacaa

SEQ ID NO: 694976 - RNA, 19 nt, Artificial Sequence
  Description of Artificial Sequence: Synthetic oligonucleotide
uguuauaagauuauuuggu

SEQ ID NO: 694977 - RNA, 19 nt, Artificial Sequence
  Description of Artificial Sequence: Synthetic oligonucleotide
uuauaacagacuuggaggg

SEQ ID NO: 694978 - RNA, 19 nt, Artificial Sequence
  Description of Artificial Sequence: Synthetic oligonucleotide
aagcugacgauuuauaaug

SEQ ID NO: 694979 - RNA, 19 nt, Artificial Sequence
  Description of Artificial Sequence: Synthetic oligonucleotide
uuguuauaagauuauuugg

SEQ ID NO: 694980 - RNA, 19 nt, Artificial Sequence
  Description of Artificial Sequence: Synthetic oligonucleotide
gauguuuugcuucugacug

SEQ ID NO: 694981 - RNA, 19 nt, Artificial Sequence
  Description of Artificial Sequence: Synthetic oligonucleotide
ugugcuauggcauaaggug

SEQ ID NO: 694982 - RNA, 19 nt, Artificial Sequence
  Description of Artificial Sequence: Synthetic oligonucleotide
uauaauuauuuuauugaug

SEQ ID NO: 694983 - RNA, 19 nt, Artificial Sequence
  Description of Artificial Sequence: Synthetic oligonucleotide
uuauacuucagaaaaguaa

SEQ ID NO: 694984 - RNA, 19 nt, Artificial Sequence
  Description of Artificial Sequence: Synthetic oligonucleotide
uuuaaggugagaucaaaug

SEQ ID NO: 694985 - RNA, 19 nt, Artificial Sequence
  Description of Artificial Sequence: Synthetic oligonucleotide
uuaaggugagaucaaaugu

SEQ ID NO: 694986 - RNA, 19 nt, Artificial Sequence
  Description of Artificial Sequence: Synthetic oligonucleotide
ucaaauaaccuuuaugaaa

SEQ ID NO: 694987 - RNA, 19 nt, Artificial Sequence
  Description of Artificial Sequence: Synthetic oligonucleotide
aaaguaacauugcuuccgg

SEQ ID NO: 694988 - RNA, 19 nt, Artificial Sequence
  Description of Artificial Sequence: Synthetic oligonucleotide
uauaaacuaacugugucag

SEQ ID NO: 694989 - RNA, 19 nt, Artificial Sequence
  Description of Artificial Sequence: Synthetic oligonucleotide
ugucauagcccuuugcacg

SEQ ID NO: 694990 - RNA, 19 nt, Artificial Sequence
  Description of Artificial Sequence: Synthetic oligonucleotide
aauuaugugcccuuccaca

SEQ ID NO: 694991 - RNA, 19 nt, Artificial Sequence
  Description of Artificial Sequence: Synthetic oligonucleotide
cauacagagagagagagag

SEQ ID NO: 694992 - RNA, 19 nt, Artificial Sequence
  Description of Artificial Sequence: Synthetic oligonucleotide
ugguaauaacuuucaaucg

SEQ ID NO: 694993 - RNA, 19 nt, Artificial Sequence
  Description of Artificial Sequence: Synthetic oligonucleotide
uacagagagagagagagag

SEQ ID NO: 694994 - RNA, 19 nt, Artificial Sequence
  Description of Artificial Sequence: Synthetic oligonucleotide
uguucaguguacaaggaga

SEQ ID NO: 694995 - RNA, 19 nt, Artificial Sequence
  Description of Artificial Sequence: Synthetic oligonucleotide
uuuacccauacagagagag

SEQ ID NO: 694996 - RNA, 19 nt, Artificial Sequence
  Description of Artificial Sequence: Synthetic oligonucleotide
ucuauaaacuaacuguguc

SEQ ID NO: 694997 - RNA, 19 nt, Artificial Sequence
  Description of Artificial Sequence: Synthetic oligonucleotide
accaauagaugaccaagcc

SEQ ID NO: 694998 - RNA, 19 nt, Artificial Sequence
  Description of Artificial Sequence: Synthetic oligonucleotide
agcauucaugucuaaaggg

SEQ ID NO: 694999 - RNA, 19 nt, Artificial Sequence
  Description of Artificial Sequence: Synthetic oligonucleotide
uuaguaccaaaguuuaccc

SEQ ID NO: 695000 - RNA, 19 nt, Artificial Sequence
  Description of Artificial Sequence: Synthetic oligonucleotide
uauucccugauguuaaugc

SEQ ID NO: 695001 - RNA, 19 nt, Artificial Sequence
  Description of Artificial Sequence: Synthetic oligonucleotide
uuagucccaaaccaaagca

SEQ ID NO: 695002 - RNA, 19 nt, Artificial Sequence
  Description of Artificial Sequence: Synthetic oligonucleotide
aauccgagccauuaaugag

SEQ ID NO: 695003 - RNA, 19 nt, Artificial Sequence
  Description of Artificial Sequence: Synthetic oligonucleotide
uuaaugagggugcauaguc

SEQ ID NO: 695004 - RNA, 19 nt, Artificial Sequence
  Description of Artificial Sequence: Synthetic oligonucleotide
uguacaaggagaaagccuu

SEQ ID NO: 695005 - RNA, 19 nt, Artificial Sequence
  Description of Artificial Sequence: Synthetic oligonucleotide
uauaagauuauuugguaua

SEQ ID NO: 695006 - RNA, 19 nt, Artificial Sequence
  Description of Artificial Sequence: Synthetic oligonucleotide
cuuaguaccaaaguuuacc

SEQ ID NO: 695007 - RNA, 19 nt, Artificial Sequence
  Description of Artificial Sequence: Synthetic oligonucleotide
gagagagagagagagagag

SEQ ID NO: 695008 - RNA, 19 nt, Artificial Sequence
  Description of Artificial Sequence: Synthetic oligonucleotide
aaugaguggguuguguccg

SEQ ID NO: 695009 - RNA, 19 nt, Artificial Sequence
  Description of Artificial Sequence: Synthetic oligonucleotide
auuuauaaugucuaacuua

SEQ ID NO: 695010 - RNA, 19 nt, Artificial Sequence
  Description of Artificial Sequence: Synthetic oligonucleotide
aaagcugacgauuuauaau

SEQ ID NO: 695011 - RNA, 19 nt, Artificial Sequence
  Description of Artificial Sequence: Synthetic oligonucleotide
auguuaaugcaacacuuag

SEQ ID NO: 695012 - RNA, 19 nt, Artificial Sequence
  Description of Artificial Sequence: Synthetic oligonucleotide
uuaugacuaucuauaaacu

SEQ ID NO: 695013 - RNA, 19 nt, Artificial Sequence
  Description of Artificial Sequence: Synthetic oligonucleotide
ugaagucuggucuucagga

SEQ ID NO: 695014 - RNA, 19 nt, Artificial Sequence
  Description of Artificial Sequence: Synthetic oligonucleotide
uucaggauauaaaagugaa

SEQ ID NO: 695015 - RNA, 19 nt, Artificial Sequence
  Description of Artificial Sequence: Synthetic oligonucleotide
acuauaaacagggaggcug

SEQ ID NO: 695016 - RNA, 19 nt, Artificial Sequence
  Description of Artificial Sequence: Synthetic oligonucleotide
ucggaaggaagcaagauua

SEQ ID NO: 695017 - RNA, 19 nt, Artificial Sequence
  Description of Artificial Sequence: Synthetic oligonucleotide
ucugccuuagucccaaacc

SEQ ID NO: 695018 - RNA, 19 nt, Artificial Sequence
  Description of Artificial Sequence: Synthetic oligonucleotide
aaccuuuaugaaaagagga

SEQ ID NO: 695019 - RNA, 19 nt, Artificial Sequence
  Description of Artificial Sequence: Synthetic oligonucleotide
ucagagacagagaugcuga

SEQ ID NO: 695020 - RNA, 19 nt, Artificial Sequence
  Description of Artificial Sequence: Synthetic oligonucleotide
cuaaagggccacuauaaac

SEQ ID NO: 695021 - RNA, 19 nt, Artificial Sequence
  Description of Artificial Sequence: Synthetic oligonucleotide
aguguacaaggagaaagcc

SEQ ID NO: 695022 - RNA, 19 nt, Artificial Sequence
  Description of Artificial Sequence: Synthetic oligonucleotide
gguaauaacuuucaaucgc

SEQ ID NO: 695023 - RNA, 19 nt, Artificial Sequence
  Description of Artificial Sequence: Synthetic oligonucleotide
uucuucagaagcaagucuc

SEQ ID NO: 695024 - RNA, 19 nt, Artificial Sequence
  Description of Artificial Sequence: Synthetic oligonucleotide
uaauccgagccauuaauga

SEQ ID NO: 695025 - RNA, 19 nt, Artificial Sequence
  Description of Artificial Sequence: Synthetic oligonucleotide
uuugucuagagagguaggg

SEQ ID NO: 695026 - RNA, 19 nt, Artificial Sequence
  Description of Artificial Sequence: Synthetic oligonucleotide
uucgauaacagggaggaga

SEQ ID NO: 695027 - RNA, 19 nt, Artificial Sequence
  Description of Artificial Sequence: Synthetic oligonucleotide
ugaauuaugugcccuucca

SEQ ID NO: 695028 - RNA, 19 nt, Artificial Sequence
  Description of Artificial Sequence: Synthetic oligonucleotide
ugacuaucuauaaacuaac

SEQ ID NO: 695029 - RNA, 19 nt, Artificial Sequence
  Description of Artificial Sequence: Synthetic oligonucleotide
auuaugugcccuuccacag

SEQ ID NO: 695030 - RNA, 19 nt, Artificial Sequence
  Description of Artificial Sequence: Synthetic oligonucleotide
uuugcacggaggcugaucu

SEQ ID NO: 695031 - RNA, 19 nt, Artificial Sequence
  Description of Artificial Sequence: Synthetic oligonucleotide
uuucaaucgcuucuggagu

SEQ ID NO: 695032 - RNA, 19 nt, Artificial Sequence
  Description of Artificial Sequence: Synthetic oligonucleotide
aguaccaaaguuuacccau

SEQ ID NO: 695033 - RNA, 19 nt, Artificial Sequence
  Description of Artificial Sequence: Synthetic oligonucleotide
ugauguuaaugcaacacuu

SEQ ID NO: 695034 - RNA, 19 nt, Artificial Sequence
  Description of Artificial Sequence: Synthetic oligonucleotide
gagagagagagagagauuc

SEQ ID NO: 695035 - RNA, 19 nt, Artificial Sequence
  Description of Artificial Sequence: Synthetic oligonucleotide
gauucgauaacagggagga

SEQ ID NO: 695036 - RNA, 19 nt, Artificial Sequence
  Description of Artificial Sequence: Synthetic oligonucleotide
uaugacuaucuauaaacua

SEQ ID NO: 695037 - RNA, 19 nt, Artificial Sequence
  Description of Artificial Sequence: Synthetic oligonucleotide
aauguuugguguucaaaua

SEQ ID NO: 695038 - RNA, 19 nt, Artificial Sequence
  Description of Artificial Sequence: Synthetic oligonucleotide
acgauuuauaaugucuaac

SEQ ID NO: 695039 - RNA, 19 nt, Artificial Sequence
  Description of Artificial Sequence: Synthetic oligonucleotide
uauguuugucuagagaggu

SEQ ID NO: 695040 - RNA, 19 nt, Artificial Sequence
  Description of Artificial Sequence: Synthetic oligonucleotide
uuuauacuucagaaaagua

SEQ ID NO: 695041 - RNA, 19 nt, Artificial Sequence
  Description of Artificial Sequence: Synthetic oligonucleotide
uguuugguguucaaauaac

SEQ ID NO: 695042 - RNA, 19 nt, Artificial Sequence
  Description of Artificial Sequence: Synthetic oligonucleotide
uccgagccauuaaugaggg

SEQ ID NO: 695043 - RNA, 19 nt, Artificial Sequence
  Description of Artificial Sequence: Synthetic oligonucleotide
auccagugaauuaugugcc

SEQ ID NO: 695044 - RNA, 19 nt, Artificial Sequence
  Description of Artificial Sequence: Synthetic oligonucleotide
auaccaauagaugaccaag

SEQ ID NO: 695045 - RNA, 19 nt, Artificial Sequence
  Description of Artificial Sequence: Synthetic oligonucleotide
acuagcgguccauaacagc

SEQ ID NO: 695046 - RNA, 19 nt, Artificial Sequence
  Description of Artificial Sequence: Synthetic oligonucleotide
auacuuacagacuucccgu

SEQ ID NO: 695047 - RNA, 19 nt, Artificial Sequence
  Description of Artificial Sequence: Synthetic oligonucleotide
cagagagagagagagagag

SEQ ID NO: 695048 - RNA, 19 nt, Artificial Sequence
  Description of Artificial Sequence: Synthetic oligonucleotide
ggugagaaggaacacauac

SEQ ID NO: 695049 - RNA, 19 nt, Artificial Sequence
  Description of Artificial Sequence: Synthetic oligonucleotide
ugugcuagguuauucccug

SEQ ID NO: 695050 - RNA, 19 nt, Artificial Sequence
  Description of Artificial Sequence: Synthetic oligonucleotide
auaacagcagucguucacg

SEQ ID NO: 695051 - RNA, 19 nt, Artificial Sequence
  Description of Artificial Sequence: Synthetic oligonucleotide
ugacgauuuauaaugucua

SEQ ID NO: 695052 - RNA, 19 nt, Artificial Sequence
  Description of Artificial Sequence: Synthetic oligonucleotide
auauguuucugguacuccu

SEQ ID NO: 695053 - RNA, 19 nt, Artificial Sequence
  Description of Artificial Sequence: Synthetic oligonucleotide
gagauucgauaacagggag

SEQ ID NO: 695054 - RNA, 19 nt, Artificial Sequence
  Description of Artificial Sequence: Synthetic oligonucleotide
aauaguggccaacauugua

SEQ ID NO: 695055 - RNA, 19 nt, Artificial Sequence
  Description of Artificial Sequence: Synthetic oligonucleotide
cauuaaugagggugcauag

SEQ ID NO: 695056 - RNA, 19 nt, Artificial Sequence
  Description of Artificial Sequence: Synthetic oligonucleotide
gacagagaugcugauaaug

SEQ ID NO: 695057 - RNA, 19 nt, Artificial Sequence
  Description of Artificial Sequence: Synthetic oligonucleotide
caucagcuagggaugaagg

SEQ ID NO: 695058 - RNA, 19 nt, Artificial Sequence
  Description of Artificial Sequence: Synthetic oligonucleotide
cauuuacaagcacuggggc

SEQ ID NO: 695059 - RNA, 19 nt, Artificial Sequence
  Description of Artificial Sequence: Synthetic oligonucleotide
uccaggauaauccgagcca

SEQ ID NO: 695060 - RNA, 19 nt, Artificial Sequence
  Description of Artificial Sequence: Synthetic oligonucleotide
auaguggccaacauuguag

SEQ ID NO: 695061 - RNA, 19 nt, Artificial Sequence
  Description of Artificial Sequence: Synthetic oligonucleotide
ucuaacuuauuugaggguu

SEQ ID NO: 695062 - RNA, 19 nt, Artificial Sequence
  Description of Artificial Sequence: Synthetic oligonucleotide
uguucaaagcugacgauuu

SEQ ID NO: 695063 - RNA, 19 nt, Artificial Sequence
  Description of Artificial Sequence: Synthetic oligonucleotide
uuaaugcaacacuuaguac

SEQ ID NO: 695064 - RNA, 19 nt, Artificial Sequence
  Description of Artificial Sequence: Synthetic oligonucleotide
uccaaaccuauuccaguag

SEQ ID NO: 695065 - RNA, 19 nt, Artificial Sequence
  Description of Artificial Sequence: Synthetic oligonucleotide
aaacuaacugugucagaga

SEQ ID NO: 695066 - RNA, 19 nt, Artificial Sequence
  Description of Artificial Sequence: Synthetic oligonucleotide
uuaauauguuucugguacu

SEQ ID NO: 695067 - RNA, 19 nt, Artificial Sequence
  Description of Artificial Sequence: Synthetic oligonucleotide
acaucuauuuaacauuuua

SEQ ID NO: 695068 - RNA, 19 nt, Artificial Sequence
  Description of Artificial Sequence: Synthetic oligonucleotide
acaaggagaaagccuucgg

SEQ ID NO: 695069 - RNA, 19 nt, Artificial Sequence
  Description of Artificial Sequence: Synthetic oligonucleotide
agaaacuccugauauguuu

SEQ ID NO: 695070 - RNA, 19 nt, Artificial Sequence
  Description of Artificial Sequence: Synthetic oligonucleotide
gaauuaugugcccuuccac

SEQ ID NO: 695071 - RNA, 19 nt, Artificial Sequence
  Description of Artificial Sequence: Synthetic oligonucleotide
uucaaucgcuucuggagug

SEQ ID NO: 695072 - RNA, 19 nt, Artificial Sequence
  Description of Artificial Sequence: Synthetic oligonucleotide
cuaacuuauuugaggguug

SEQ ID NO: 695073 - RNA, 19 nt, Artificial Sequence
  Description of Artificial Sequence: Synthetic oligonucleotide
ugucuaaagggccacuaua

SEQ ID NO: 695074 - RNA, 19 nt, Artificial Sequence
  Description of Artificial Sequence: Synthetic oligonucleotide
gauuaugacuaucuauaaa

SEQ ID NO: 695075 - RNA, 19 nt, Artificial Sequence
  Description of Artificial Sequence: Synthetic oligonucleotide
auauguuugucuagagagg

SEQ ID NO: 695076 - RNA, 19 nt, Artificial Sequence
  Description of Artificial Sequence: Synthetic oligonucleotide
augacuaucuauaaacuaa

SEQ ID NO: 695077 - RNA, 19 nt, Artificial Sequence
  Description of Artificial Sequence: Synthetic oligonucleotide
aucauucuaggauuuuccu

SEQ ID NO: 695078 - RNA, 19 nt, Artificial Sequence
  Description of Artificial Sequence: Synthetic oligonucleotide
cuagcgguccauaacagca

SEQ ID NO: 695079 - RNA, 19 nt, Artificial Sequence
  Description of Artificial Sequence: Synthetic oligonucleotide
guagcauauuauuuauaac

SEQ ID NO: 695080 - RNA, 19 nt, Artificial Sequence
  Description of Artificial Sequence: Synthetic oligonucleotide
ucuaaagggccacuauaaa

SEQ ID NO: 695081 - RNA, 19 nt, Artificial Sequence
  Description of Artificial Sequence: Synthetic oligonucleotide
cauaaugcuggacagguaa

SEQ ID NO: 695082 - RNA, 19 nt, Artificial Sequence
  Description of Artificial Sequence: Synthetic oligonucleotide
gccacuauaaacagggagg

SEQ ID NO: 695083 - RNA, 19 nt, Artificial Sequence
  Description of Artificial Sequence: Synthetic oligonucleotide
ugcuauggcauaaggugac

SEQ ID NO: 695084 - RNA, 19 nt, Artificial Sequence
  Description of Artificial Sequence: Synthetic oligonucleotide
agauuaugacuaucuauaa

SEQ ID NO: 695085 - RNA, 19 nt, Artificial Sequence
  Description of Artificial Sequence: Synthetic oligonucleotide
auccgagccauuaaugagg

SEQ ID NO: 695086 - RNA, 19 nt, Artificial Sequence
  Description of Artificial Sequence: Synthetic oligonucleotide
guuugguguucaaauaacc

SEQ ID NO: 695087 - RNA, 19 nt, Artificial Sequence
  Description of Artificial Sequence: Synthetic oligonucleotide
cauaacagcagucguucac

SEQ ID NO: 695088 - RNA, 19 nt, Artificial Sequence
  Description of Artificial Sequence: Synthetic oligonucleotide
uaaaagucccuguccaguc

SEQ ID NO: 695089 - RNA, 19 nt, Artificial Sequence
  Description of Artificial Sequence: Synthetic oligonucleotide
aggaagcaagauuaugacu

SEQ ID NO: 695090 - RNA, 19 nt, Artificial Sequence
  Description of Artificial Sequence: Synthetic oligonucleotide
uccauaacagcagucguuc

SEQ ID NO: 695091 - RNA, 19 nt, Artificial Sequence
  Description of Artificial Sequence: Synthetic oligonucleotide
aagcaagauuaugacuauc

SEQ ID NO: 695092 - RNA, 19 nt, Artificial Sequence
  Description of Artificial Sequence: Synthetic oligonucleotide
acuggcaccuguaaaauga

SEQ ID NO: 695093 - RNA, 19 nt, Artificial Sequence
  Description of Artificial Sequence: Synthetic oligonucleotide
agauucgauaacagggagg

SEQ ID NO: 695094 - RNA, 19 nt, Artificial Sequence
  Description of Artificial Sequence: Synthetic oligonucleotide
cuuggcuauucacaucagc

SEQ ID NO: 695095 - RNA, 19 nt, Artificial Sequence
  Description of Artificial Sequence: Synthetic oligonucleotide
auaaacagggaggcugaac

SEQ ID NO: 695096 - RNA, 19 nt, Artificial Sequence
  Description of Artificial Sequence: Synthetic oligonucleotide
uaaggugacgauguccgug

SEQ ID NO: 695097 - RNA, 19 nt, Artificial Sequence
  Description of Artificial Sequence: Synthetic oligonucleotide
agugaauuaugugcccuuc

SEQ ID NO: 695098 - RNA, 19 nt, Artificial Sequence
  Description of Artificial Sequence: Synthetic oligonucleotide
uggccugcgauugacuggg

SEQ ID NO: 695099 - RNA, 19 nt, Artificial Sequence
  Description of Artificial Sequence: Synthetic oligonucleotide
cuguucaguguacaaggag

SEQ ID NO: 695100 - RNA, 19 nt, Artificial Sequence
  Description of Artificial Sequence: Synthetic oligonucleotide
agagaugcugauaaugagu

SEQ ID NO: 695101 - RNA, 19 nt, Artificial Sequence
  Description of Artificial Sequence: Synthetic oligonucleotide
uccacuagcgguccauaac

SEQ ID NO: 695102 - RNA, 19 nt, Artificial Sequence
  Description of Artificial Sequence: Synthetic oligonucleotide
uuccccacgccauucaggu

SEQ ID NO: 695103 - RNA, 19 nt, Artificial Sequence
  Description of Artificial Sequence: Synthetic oligonucleotide
cugauauguuugucuagag

SEQ ID NO: 695104 - RNA, 19 nt, Artificial Sequence
  Description of Artificial Sequence: Synthetic oligonucleotide
ucccguagcauauuauuua

SEQ ID NO: 695105 - RNA, 19 nt, Artificial Sequence
  Description of Artificial Sequence: Synthetic oligonucleotide
auaacagggaggagaauug

SEQ ID NO: 695106 - RNA, 19 nt, Artificial Sequence
  Description of Artificial Sequence: Synthetic oligonucleotide
auaauccgagccauuaaug

SEQ ID NO: 695107 - RNA, 19 nt, Artificial Sequence
  Description of Artificial Sequence: Synthetic oligonucleotide
acuuauuugaggguuguua

SEQ ID NO: 695108 - RNA, 19 nt, Artificial Sequence
  Description of Artificial Sequence: Synthetic oligonucleotide
aucagcuagggaugaagga

SEQ ID NO: 695109 - RNA, 19 nt, Artificial Sequence
  Description of Artificial Sequence: Synthetic oligonucleotide
agagauucgauaacaggga

SEQ ID NO: 695110 - RNA, 19 nt, Artificial Sequence
  Description of Artificial Sequence: Synthetic oligonucleotide
ggaagcaagauuaugacua

SEQ ID NO: 695111 - RNA, 19 nt, Artificial Sequence
  Description of Artificial Sequence: Synthetic oligonucleotide
ucuagagagguagggcugc

SEQ ID NO: 695112 - RNA, 19 nt, Artificial Sequence
  Description of Artificial Sequence: Synthetic oligonucleotide
acuuacagacuucccgucu

SEQ ID NO: 695113 - RNA, 19 nt, Artificial Sequence
  Description of Artificial Sequence: Synthetic oligonucleotide
gagagagagagauucgaua

SEQ ID NO: 695114 - RNA, 19 nt, Artificial Sequence
  Description of Artificial Sequence: Synthetic oligonucleotide
guggagucuguucacgccc

SEQ ID NO: 695115 - RNA, 19 nt, Artificial Sequence
  Description of Artificial Sequence: Synthetic oligonucleotide
gauaauccgagccauuaau

SEQ ID NO: 695116 - RNA, 19 nt, Artificial Sequence
  Description of Artificial Sequence: Synthetic oligonucleotide
uagcgguccauaacagcag

SEQ ID NO: 695117 - RNA, 19 nt, Artificial Sequence
  Description of Artificial Sequence: Synthetic oligonucleotide
gugaauuaugugcccuucc

SEQ ID NO: 695118 - RNA, 19 nt, Artificial Sequence
  Description of Artificial Sequence: Synthetic oligonucleotide
guuggcuagaacuccaucu

SEQ ID NO: 695119 - RNA, 19 nt, Artificial Sequence
  Description of Artificial Sequence: Synthetic oligonucleotide
gcucauagccaauagcaug

SEQ ID NO: 695120 - RNA, 19 nt, Artificial Sequence
  Description of Artificial Sequence: Synthetic oligonucleotide
ugcucauagccaauagcau

SEQ ID NO: 695121 - RNA, 19 nt, Artificial Sequence
  Description of Artificial Sequence: Synthetic oligonucleotide
agguaccucugguaauaac

SEQ ID NO: 695122 - RNA, 19 nt, Artificial Sequence
  Description of Artificial Sequence: Synthetic oligonucleotide
ugagggugcauaguccacc

SEQ ID NO: 695123 - RNA, 19 nt, Artificial Sequence
  Description of Artificial Sequence: Synthetic oligonucleotide
guugccagaaguuuauacu

SEQ ID NO: 695124 - RNA, 19 nt, Artificial Sequence
  Description of Artificial Sequence: Synthetic oligonucleotide
auggcauaaggugacgaug

SEQ ID NO: 695125 - RNA, 19 nt, Artificial Sequence
  Description of Artificial Sequence: Synthetic oligonucleotide
acacuuaguaccaaaguuu

SEQ ID NO: 695126 - RNA, 19 nt, Artificial Sequence
  Description of Artificial Sequence: Synthetic oligonucleotide
auuaaugagggugcauagu

SEQ ID NO: 695127 - RNA, 19 nt, Artificial Sequence
  Description of Artificial Sequence: Synthetic oligonucleotide
cuuacagacuucccgucuc

SEQ ID NO: 695128 - RNA, 19 nt, Artificial Sequence
  Description of Artificial Sequence: Synthetic oligonucleotide
agucguucacgaugcacug

SEQ ID NO: 695129 - RNA, 19 nt, Artificial Sequence
  Description of Artificial Sequence: Synthetic oligonucleotide
auaaacuaacugugucaga

SEQ ID NO: 695130 - RNA, 19 nt, Artificial Sequence
  Description of Artificial Sequence: Synthetic oligonucleotide
gacgauuuauaaugucuaa

SEQ ID NO: 695131 - RNA, 19 nt, Artificial Sequence
  Description of Artificial Sequence: Synthetic oligonucleotide
gcugauaaugaguggguug

SEQ ID NO: 695132 - RNA, 19 nt, Artificial Sequence
  Description of Artificial Sequence: Synthetic oligonucleotide
acuuaguaccaaaguuuac

SEQ ID NO: 695133 - RNA, 19 nt, Artificial Sequence
  Description of Artificial Sequence: Synthetic oligonucleotide
uggcuauucacaucagcua

SEQ ID NO: 695134 - RNA, 19 nt, Artificial Sequence
  Description of Artificial Sequence: Synthetic oligonucleotide
cugacgauuuauaaugucu

SEQ ID NO: 695135 - RNA, 19 nt, Artificial Sequence
  Description of Artificial Sequence: Synthetic oligonucleotide
acggaggcugaucuucauc

SEQ ID NO: 695136 - RNA, 19 nt, Artificial Sequence
  Description of Artificial Sequence: Synthetic oligonucleotide
gagagagagagagagagau

SEQ ID NO: 695137 - RNA, 19 nt, Artificial Sequence
  Description of Artificial Sequence: Synthetic oligonucleotide
gagagagagagagauucga

SEQ ID NO: 695138 - RNA, 19 nt, Artificial Sequence
  Description of Artificial Sequence: Synthetic oligonucleotide
agucuguucacgccccugu

SEQ ID NO: 695139 - RNA, 19 nt, Artificial Sequence
  Description of Artificial Sequence: Synthetic oligonucleotide
ugccuuagucccaaaccaa

SEQ ID NO: 695140 - RNA, 19 nt, Artificial Sequence
  Description of Artificial Sequence: Synthetic oligonucleotide
agagagagagagagauucg

SEQ ID NO: 695141 - RNA, 19 nt, Artificial Sequence
  Description of Artificial Sequence: Synthetic oligonucleotide
gauguuaaugcaacacuua

SEQ ID NO: 695142 - RNA, 19 nt, Artificial Sequence
  Description of Artificial Sequence: Synthetic oligonucleotide
uacuuacagacuucccguc

SEQ ID NO: 695143 - RNA, 19 nt, Artificial Sequence
  Description of Artificial Sequence: Synthetic oligonucleotide
cugccuuagucccaaacca

SEQ ID NO: 695144 - RNA, 19 nt, Artificial Sequence
  Description of Artificial Sequence: Synthetic oligonucleotide
guaauaacuuucaaucgcu

SEQ ID NO: 695145 - RNA, 19 nt, Artificial Sequence
  Description of Artificial Sequence: Synthetic oligonucleotide
uucaugucuaaagggccac

SEQ ID NO: 695146 - RNA, 19 nt, Artificial Sequence
  Description of Artificial Sequence: Synthetic oligonucleotide
uucaguccccacauuucuc

SEQ ID NO: 695147 - RNA, 19 nt, Artificial Sequence
  Description of Artificial Sequence: Synthetic oligonucleotide
uguccggaguucuuggcua

SEQ ID NO: 695148 - RNA, 19 nt, Artificial Sequence
  Description of Artificial Sequence: Synthetic oligonucleotide
uguagacacaaagcaguau

SEQ ID NO: 695149 - RNA, 19 nt, Artificial Sequence
  Description of Artificial Sequence: Synthetic oligonucleotide
cauaccaauagaugaccaa

SEQ ID NO: 695150 - RNA, 19 nt, Artificial Sequence
  Description of Artificial Sequence: Synthetic oligonucleotide
gcugugcuauggcauaagg

SEQ ID NO: 695151 - RNA, 19 nt, Artificial Sequence
  Description of Artificial Sequence: Synthetic oligonucleotide
auguucaaagcugacgauu

SEQ ID NO: 695152 - RNA, 19 nt, Artificial Sequence
  Description of Artificial Sequence: Synthetic oligonucleotide
gauguccguggggaaacag

SEQ ID NO: 695153 - RNA, 19 nt, Artificial Sequence
  Description of Artificial Sequence: Synthetic oligonucleotide
ccaaaccuauuccaguagc

SEQ ID NO: 695154 - RNA, 19 nt, Artificial Sequence
  Description of Artificial Sequence: Synthetic oligonucleotide
augucuaaagggccacuau

SEQ ID NO: 695155 - RNA, 19 nt, Artificial Sequence
  Description of Artificial Sequence: Synthetic oligonucleotide
caugcuugaugcaguccac

SEQ ID NO: 695156 - RNA, 19 nt, Artificial Sequence
  Description of Artificial Sequence: Synthetic oligonucleotide
gaguggguuguguccggag

SEQ ID NO: 695157 - RNA, 19 nt, Artificial Sequence
  Description of Artificial Sequence: Synthetic oligonucleotide
auagcaugcuugaugcagu

SEQ ID NO: 695158 - RNA, 19 nt, Artificial Sequence
  Description of Artificial Sequence: Synthetic oligonucleotide
agguaggcgugguggcuac

SEQ ID NO: 695159 - RNA, 19 nt, Artificial Sequence
  Description of Artificial Sequence: Synthetic oligonucleotide
cugauguuaaugcaacacu

SEQ ID NO: 695160 - RNA, 19 nt, Artificial Sequence
  Description of Artificial Sequence: Synthetic oligonucleotide
ugauaaugaguggguugug

SEQ ID NO: 695161 - RNA, 19 nt, Artificial Sequence
  Description of Artificial Sequence: Synthetic oligonucleotide
ccgguugcaguccaguucc

SEQ ID NO: 695162 - RNA, 19 nt, Artificial Sequence
  Description of Artificial Sequence: Synthetic oligonucleotide
ugggcgguacagacacuag

SEQ ID NO: 695163 - RNA, 19 nt, Artificial Sequence
  Description of Artificial Sequence: Synthetic oligonucleotide
aggauaauccgagccauua

SEQ ID NO: 695164 - RNA, 19 nt, Artificial Sequence
  Description of Artificial Sequence: Synthetic oligonucleotide
cccauacagagagagagag

SEQ ID NO: 695165 - RNA, 19 nt, Artificial Sequence
  Description of Artificial Sequence: Synthetic oligonucleotide
augcaguccacuagcgguc

SEQ ID NO: 695166 - RNA, 19 nt, Artificial Sequence
  Description of Artificial Sequence: Synthetic oligonucleotide
cagcugaaguucagggcag

SEQ ID NO: 695167 - RNA, 19 nt, Artificial Sequence
  Description of Artificial Sequence: Synthetic oligonucleotide
gcaacuggcaccuguaaaa

SEQ ID NO: 695168 - RNA, 19 nt, Artificial Sequence
  Description of Artificial Sequence: Synthetic oligonucleotide
agcgguccauaacagcagu

SEQ ID NO: 695169 - RNA, 19 nt, Artificial Sequence
  Description of Artificial Sequence: Synthetic oligonucleotide
ggcgguacagacacuaggc

SEQ ID NO: 695170 - RNA, 19 nt, Artificial Sequence
  Description of Artificial Sequence: Synthetic oligonucleotide
ugucagagacagagaugcu

SEQ ID NO: 695171 - RNA, 19 nt, Artificial Sequence
  Description of Artificial Sequence: Synthetic oligonucleotide
gguggagucuguucacgcc

SEQ ID NO: 695172 - RNA, 19 nt, Artificial Sequence
  Description of Artificial Sequence: Synthetic oligonucleotide
agauagguuuauaauuauu

SEQ ID NO: 695173 - RNA, 19 nt, Artificial Sequence
  Description of Artificial Sequence: Synthetic oligonucleotide
gugcuauggcauaagguga

SEQ ID NO: 695174 - RNA, 19 nt, Artificial Sequence
  Description of Artificial Sequence: Synthetic oligonucleotide
cauagcccuuugcacggag

SEQ ID NO: 695175 - RNA, 19 nt, Artificial Sequence
  Description of Artificial Sequence: Synthetic oligonucleotide
uccggcuucucuucaggau

SEQ ID NO: 695176 - RNA, 19 nt, Artificial Sequence
  Description of Artificial Sequence: Synthetic oligonucleotide
agauguugccagaaguuua

SEQ ID NO: 695177 - RNA, 19 nt, Artificial Sequence
  Description of Artificial Sequence: Synthetic oligonucleotide
cugggcuaucuccucguac

SEQ ID NO: 695178 - RNA, 19 nt, Artificial Sequence
  Description of Artificial Sequence: Synthetic oligonucleotide
cugauaaugaguggguugu

SEQ ID NO: 695179 - RNA, 19 nt, Artificial Sequence
  Description of Artificial Sequence: Synthetic oligonucleotide
gcuagguuauucccugaug

SEQ ID NO: 695180 - RNA, 19 nt, Artificial Sequence
  Description of Artificial Sequence: Synthetic oligonucleotide
auagaugaccaagccuggu

SEQ ID NO: 695181 - RNA, 19 nt, Artificial Sequence
  Description of Artificial Sequence: Synthetic oligonucleotide
aaucgcuucuggaguguga

SEQ ID NO: 695182 - RNA, 19 nt, Artificial Sequence
  Description of Artificial Sequence: Synthetic oligonucleotide
cagucguucacgaugcacu

SEQ ID NO: 695183 - RNA, 19 nt, Artificial Sequence
  Description of Artificial Sequence: Synthetic oligonucleotide
ugcaguccacuagcggucc

SEQ ID NO: 695184 - RNA, 19 nt, Artificial Sequence
  Description of Artificial Sequence: Synthetic oligonucleotide
gguaccucugguaauaacu

SEQ ID NO: 695185 - RNA, 19 nt, Artificial Sequence
  Description of Artificial Sequence: Synthetic oligonucleotide
ugcugauaaugaguggguu

SEQ ID NO: 695186 - RNA, 19 nt, Artificial Sequence
  Description of Artificial Sequence: Synthetic oligonucleotide
gcaguauguaugaaugcac

SEQ ID NO: 695187 - RNA, 19 nt, Artificial Sequence
  Description of Artificial Sequence: Synthetic oligonucleotide
uuucccgguugcaguccag

SEQ ID NO: 695188 - RNA, 19 nt, Artificial Sequence
  Description of Artificial Sequence: Synthetic oligonucleotide
gaagcaagauuaugacuau

SEQ ID NO: 695189 - RNA, 19 nt, Artificial Sequence
  Description of Artificial Sequence: Synthetic oligonucleotide
agagagagagagauucgau

SEQ ID NO: 695190 - RNA, 19 nt, Artificial Sequence
  Description of Artificial Sequence: Synthetic oligonucleotide
agcugacgauuuauaaugu

SEQ ID NO: 695191 - RNA, 19 nt, Artificial Sequence
  Description of Artificial Sequence: Synthetic oligonucleotide
ucaugucuaaagggccacu

SEQ ID NO: 695192 - RNA, 19 nt, Artificial Sequence
  Description of Artificial Sequence: Synthetic oligonucleotide
ccccacgccauucagguac

SEQ ID NO: 695193 - RNA, 19 nt, Artificial Sequence
  Description of Artificial Sequence: Synthetic oligonucleotide
cuauggcauaaggugacga

SEQ ID NO: 695194 - RNA, 19 nt, Artificial Sequence
  Description of Artificial Sequence: Synthetic oligonucleotide
gauguugccagaaguuuau

SEQ ID NO: 695195 - RNA, 19 nt, Artificial Sequence
  Description of Artificial Sequence: Synthetic oligonucleotide
gguuauucccugauguuaa

SEQ ID NO: 695196 - RNA, 19 nt, Artificial Sequence
  Description of Artificial Sequence: Synthetic oligonucleotide
gcugacgauuuauaauguc

SEQ ID NO: 695197 - RNA, 19 nt, Artificial Sequence
  Description of Artificial Sequence: Synthetic oligonucleotide
cuagagagguagggcugcg

SEQ ID NO: 695198 - RNA, 19 nt, Artificial Sequence
  Description of Artificial Sequence: Synthetic oligonucleotide
aggguuguuauaagauuau

SEQ ID NO: 695199 - RNA, 19 nt, Artificial Sequence
  Description of Artificial Sequence: Synthetic oligonucleotide
auaaugcuggacagguaaa

SEQ ID NO: 695200 - RNA, 19 nt, Artificial Sequence
  Description of Artificial Sequence: Synthetic oligonucleotide
aacuuauuugaggguuguu

SEQ ID NO: 695201 - RNA, 19 nt, Artificial Sequence
  Description of Artificial Sequence: Synthetic oligonucleotide
auucgauaacagggaggag

SEQ ID NO: 695202 - RNA, 19 nt, Artificial Sequence
  Description of Artificial Sequence: Synthetic oligonucleotide
gcgacugcagcagccaggg

SEQ ID NO: 695203 - RNA, 19 nt, Artificial Sequence
  Description of Artificial Sequence: Synthetic oligonucleotide
cugugcuauggcauaaggu

SEQ ID NO: 695204 - RNA, 19 nt, Artificial Sequence
  Description of Artificial Sequence: Synthetic oligonucleotide
agagagagagagagagaga

SEQ ID NO: 695205 - RNA, 19 nt, Artificial Sequence
  Description of Artificial Sequence: Synthetic oligonucleotide
cgauuuauaaugucuaacu

SEQ ID NO: 695206 - RNA, 19 nt, Artificial Sequence
  Description of Artificial Sequence: Synthetic oligonucleotide
cagcuuggcuggaugccac

SEQ ID NO: 695207 - RNA, 19 nt, Artificial Sequence
  Description of Artificial Sequence: Synthetic oligonucleotide
gguuguuauaagauuauuu

SEQ ID NO: 695208 - RNA, 19 nt, Artificial Sequence
  Description of Artificial Sequence: Synthetic oligonucleotide
ggcaccuguaaaaugaagu

SEQ ID NO: 695209 - RNA, 19 nt, Artificial Sequence
  Description of Artificial Sequence: Synthetic oligonucleotide
acagagagagagagagaga

SEQ ID NO: 695210 - RNA, 19 nt, Artificial Sequence
  Description of Artificial Sequence: Synthetic oligonucleotide
gguacagacacuaggcacu

SEQ ID NO: 695211 - RNA, 19 nt, Artificial Sequence
  Description of Artificial Sequence: Synthetic oligonucleotide
auacagagagagagagaga

SEQ ID NO: 695212 - RNA, 19 nt, Artificial Sequence
  Description of Artificial Sequence: Synthetic oligonucleotide
gacgauguccguggggaaa

SEQ ID NO: 695213 - RNA, 19 nt, Artificial Sequence
  Description of Artificial Sequence: Synthetic oligonucleotide
caagccugguccaaaccua

SEQ ID NO: 695214 - RNA, 19 nt, Artificial Sequence
  Description of Artificial Sequence: Synthetic oligonucleotide
cuuugcacggaggcugauc

SEQ ID NO: 695215 - RNA, 19 nt, Artificial Sequence
  Description of Artificial Sequence: Synthetic oligonucleotide
ccacuagcgguccauaaca

SEQ ID NO: 695216 - RNA, 19 nt, Artificial Sequence
  Description of Artificial Sequence: Synthetic oligonucleotide
uucccgguugcaguccagu

SEQ ID NO: 695217 - RNA, 19 nt, Artificial Sequence
  Description of Artificial Sequence: Synthetic oligonucleotide
cugcgacugcagcagccag

SEQ ID NO: 695218 - RNA, 19 nt, Artificial Sequence
  Description of Artificial Sequence: Synthetic oligonucleotide
gagucuguucacgccccug

SEQ ID NO: 695219 - RNA, 19 nt, Artificial Sequence
  Description of Artificial Sequence: Synthetic oligonucleotide
agggucccguagcauauua

SEQ ID NO: 695220 - RNA, 19 nt, Artificial Sequence
  Description of Artificial Sequence: Synthetic oligonucleotide
cgguacagacacuaggcac

SEQ ID NO: 695221 - RNA, 19 nt, Artificial Sequence
  Description of Artificial Sequence: Synthetic oligonucleotide
ccugauauguuugucuaga

SEQ ID NO: 695222 - RNA, 19 nt, Artificial Sequence
  Description of Artificial Sequence: Synthetic oligonucleotide
ggauaauccgagccauuaa

SEQ ID NO: 695223 - RNA, 19 nt, Artificial Sequence
  Description of Artificial Sequence: Synthetic oligonucleotide
gggucaggcugugcuaugg

SEQ ID NO: 695224 - RNA, 19 nt, Artificial Sequence
  Description of Artificial Sequence: Synthetic oligonucleotide
gcccuuugcacggaggcug

SEQ ID NO: 695225 - RNA, 19 nt, Artificial Sequence
  Description of Artificial Sequence: Synthetic oligonucleotide
gguuggcuagaacuccauc

SEQ ID NO: 695226 - RNA, 19 nt, Artificial Sequence
  Description of Artificial Sequence: Synthetic oligonucleotide
gcuagggaugaaggaaagc

SEQ ID NO: 695227 - RNA, 19 nt, Artificial Sequence
  Description of Artificial Sequence: Synthetic oligonucleotide
caugucuaaagggccacua

SEQ ID NO: 695228 - RNA, 19 nt, Artificial Sequence
  Description of Artificial Sequence: Synthetic oligonucleotide
ucauagcccuuugcacgga

SEQ ID NO: 695229 - RNA, 19 nt, Artificial Sequence
  Description of Artificial Sequence: Synthetic oligonucleotide
cuggcaccuguaaaaugaa

SEQ ID NO: 695230 - RNA, 19 nt, Artificial Sequence
  Description of Artificial Sequence: Synthetic oligonucleotide
ccauaccaauagaugacca

SEQ ID NO: 695231 - RNA, 19 nt, Artificial Sequence
  Description of Artificial Sequence: Synthetic oligonucleotide
gcgguacagacacuaggca

SEQ ID NO: 695232 - RNA, 19 nt, Artificial Sequence
  Description of Artificial Sequence: Synthetic oligonucleotide
ucccgguugcaguccaguu

SEQ ID NO: 695233 - RNA, 19 nt, Artificial Sequence
  Description of Artificial Sequence: Synthetic oligonucleotide
guccacuagcgguccauaa

SEQ ID NO: 695234 - RNA, 19 nt, Artificial Sequence
  Description of Artificial Sequence: Synthetic oligonucleotide
uaggcgugguggcuacauu

SEQ ID NO: 695235 - RNA, 19 nt, Artificial Sequence
  Description of Artificial Sequence: Synthetic oligonucleotide
guaccaaaguuuacccaua

SEQ ID NO: 695236 - RNA, 19 nt, Artificial Sequence
  Description of Artificial Sequence: Synthetic oligonucleotide
cauugcuuccggcuucucu

SEQ ID NO: 695237 - RNA, 19 nt, Artificial Sequence
  Description of Artificial Sequence: Synthetic oligonucleotide
agagagagagagagagauu

SEQ ID NO: 695238 - RNA, 19 nt, Artificial Sequence
  Description of Artificial Sequence: Synthetic oligonucleotide
guucacgccccuguagaaa

SEQ ID NO: 695239 - RNA, 19 nt, Artificial Sequence
  Description of Artificial Sequence: Synthetic oligonucleotide
guaccucugguaauaacuu

SEQ ID NO: 695240 - RNA, 19 nt, Artificial Sequence
  Description of Artificial Sequence: Synthetic oligonucleotide
augaccaagccugguccaa

SEQ ID NO: 695241 - RNA, 19 nt, Artificial Sequence
  Description of Artificial Sequence: Synthetic oligonucleotide
ggagugugauguuuggcau

SEQ ID NO: 695242 - RNA, 19 nt, Artificial Sequence
  Description of Artificial Sequence: Synthetic oligonucleotide
gugggcgguacagacacua

SEQ ID NO: 695243 - RNA, 19 nt, Artificial Sequence
  Description of Artificial Sequence: Synthetic oligonucleotide
gugcuagguuauucccuga

SEQ ID NO: 695244 - RNA, 19 nt, Artificial Sequence
  Description of Artificial Sequence: Synthetic oligonucleotide
agcccuuugcacggaggcu

SEQ ID NO: 695245 - RNA, 19 nt, Artificial Sequence
  Description of Artificial Sequence: Synthetic oligonucleotide
gguugcaguccaguuccug

SEQ ID NO: 695246 - RNA, 19 nt, Artificial Sequence
  Description of Artificial Sequence: Synthetic oligonucleotide
gcagucguucacgaugcac

SEQ ID NO: 695247 - RNA, 19 nt, Artificial Sequence
  Description of Artificial Sequence: Synthetic oligonucleotide
ccugcgauugacuggggaa

SEQ ID NO: 695248 - RNA, 19 nt, Artificial Sequence
  Description of Artificial Sequence: Synthetic oligonucleotide
uggcuacauucaucaccaa

SEQ ID NO: 695249 - RNA, 19 nt, Artificial Sequence
  Description of Artificial Sequence: Synthetic oligonucleotide
auguuugugcuagguuauu

SEQ ID NO: 695250 - RNA, 19 nt, Artificial Sequence
  Description of Artificial Sequence: Synthetic oligonucleotide
cccgguugcaguccaguuc

SEQ ID NO: 695251 - RNA, 19 nt, Artificial Sequence
  Description of Artificial Sequence: Synthetic oligonucleotide
ggucccguagcauauuauu

SEQ ID NO: 695252 - RNA, 19 nt, Artificial Sequence
  Description of Artificial Sequence: Synthetic oligonucleotide
uugcacggaggcugaucuu

SEQ ID NO: 695253 - RNA, 19 nt, Artificial Sequence
  Description of Artificial Sequence: Synthetic oligonucleotide
aagggucccguagcauauu

SEQ ID NO: 695254 - RNA, 19 nt, Artificial Sequence
  Description of Artificial Sequence: Synthetic oligonucleotide
guggguuguguccggaguu

SEQ ID NO: 695255 - RNA, 19 nt, Artificial Sequence
  Description of Artificial Sequence: Synthetic oligonucleotide
gccuuagucccaaaccaaa

SEQ ID NO: 695256 - RNA, 19 nt, Artificial Sequence
  Description of Artificial Sequence: Synthetic oligonucleotide
gucccguagcauauuauuu

SEQ ID NO: 695257 - RNA, 19 nt, Artificial Sequence
  Description of Artificial Sequence: Synthetic oligonucleotide
ccauacagagagagagaga

SEQ ID NO: 695258 - RNA, 19 nt, Artificial Sequence
  Description of Artificial Sequence: Synthetic oligonucleotide
ccaagccugguccaaaccu

SEQ ID NO: 695259 - RNA, 19 nt, Artificial Sequence
  Description of Artificial Sequence: Synthetic oligonucleotide
gaaaucucuccaggauaau

SEQ ID NO: 695260 - RNA, 19 nt, Artificial Sequence
  Description of Artificial Sequence: Synthetic oligonucleotide
caacuggcaccuguaaaau

SEQ ID NO: 695261 - RNA, 19 nt, Artificial Sequence
  Description of Artificial Sequence: Synthetic oligonucleotide
gccugcgauugacugggga

SEQ ID NO: 695262 - RNA, 19 nt, Artificial Sequence
  Description of Artificial Sequence: Synthetic oligonucleotide
ccauaacagcagucguuca

SEQ ID NO: 695263 - RNA, 19 nt, Artificial Sequence
  Description of Artificial Sequence: Synthetic oligonucleotide
cagguaccucugguaauaa

SEQ ID NO: 695264 - RNA, 19 nt, Artificial Sequence
  Description of Artificial Sequence: Synthetic oligonucleotide
guaggcgugguggcuacau

SEQ ID NO: 695265 - RNA, 19 nt, Artificial Sequence
  Description of Artificial Sequence: Synthetic oligonucleotide
cccguagcauauuauuuau

SEQ ID NO: 695266 - RNA, 19 nt, Artificial Sequence
  Description of Artificial Sequence: Synthetic oligonucleotide
cuucccgucuccagcuuuu

SEQ ID NO: 695267 - RNA, 19 nt, Artificial Sequence
  Description of Artificial Sequence: Synthetic oligonucleotide
gaguggccugcgauugacu

SEQ ID NO: 695268 - RNA, 19 nt, Artificial Sequence
  Description of Artificial Sequence: Synthetic oligonucleotide
ccguagcauauuauuuaua

SEQ ID NO: 695269 - RNA, 19 nt, Artificial Sequence
  Description of Artificial Sequence: Synthetic oligonucleotide
gcgguccauaacagcaguc

SEQ ID NO: 695270 - RNA, 19 nt, Artificial Sequence
  Description of Artificial Sequence: Synthetic oligonucleotide
ggguuguuauaagauuauu

SEQ ID NO: 695271 - RNA, 19 nt, Artificial Sequence
  Description of Artificial Sequence: Synthetic oligonucleotide
ccauaaugcuggacaggua

SEQ ID NO: 695272 - RNA, 19 nt, Artificial Sequence
  Description of Artificial Sequence: Synthetic oligonucleotide
ggccugcgauugacugggg

SEQ ID NO: 695273 - RNA, 19 nt, Artificial Sequence
  Description of Artificial Sequence: Synthetic oligonucleotide
gguaggcgugguggcuaca

SEQ ID NO: 695274 - RNA, 19 nt, Artificial Sequence
  Description of Artificial Sequence: Synthetic oligonucleotide
gcgugguggcuacauucau

SEQ ID NO: 695275 - RNA, 19 nt, Artificial Sequence
  Description of Artificial Sequence: Synthetic oligonucleotide
gggucccguagcauauuau

SEQ ID NO: 695276 - RNA, 19 nt, Artificial Sequence
  Description of Artificial Sequence: Synthetic oligonucleotide
cgauguccguggggaaaca

SEQ ID NO: 695277 - RNA, 19 nt, Artificial Sequence
  Description of Artificial Sequence: Synthetic oligonucleotide
ccgagccauuaaugagggu

SEQ ID NO: 695278 - RNA, 19 nt, Artificial Sequence
  Description of Artificial Sequence: Synthetic oligonucleotide
ccacgccauucagguaccu

SEQ ID NO: 695279 - RNA, 19 nt, Artificial Sequence
  Description of Artificial Sequence: Synthetic oligonucleotide
ccuuugcacggaggcugau

SEQ ID NO: 695280 - RNA, 19 nt, Artificial Sequence
  Description of Artificial Sequence: Synthetic oligonucleotide
aacauaugcugugagaccc

SEQ ID NO: 695281 - RNA, 19 nt, Artificial Sequence
  Description of Artificial Sequence: Synthetic oligonucleotide
uaugcugugagacccacgg

SEQ ID NO: 695282 - RNA, 19 nt, Artificial Sequence
  Description of Artificial Sequence: Synthetic oligonucleotide
agugaagggucauagcggc

SEQ ID NO: 695283 - RNA, 19 nt, Artificial Sequence
  Description of Artificial Sequence: Synthetic oligonucleotide
aacgaugccagccuuggag

SEQ ID NO: 695284 - RNA, 19 nt, Artificial Sequence
  Description of Artificial Sequence: Synthetic oligonucleotide
uucaguaugaagagcagga

SEQ ID NO: 695285 - RNA, 19 nt, Artificial Sequence
  Description of Artificial Sequence: Synthetic oligonucleotide
uaguuauugugguaaaugc

SEQ ID NO: 695286 - RNA, 19 nt, Artificial Sequence
  Description of Artificial Sequence: Synthetic oligonucleotide
aaagcgguugcguugauau

SEQ ID NO: 695287 - RNA, 19 nt, Artificial Sequence
  Description of Artificial Sequence: Synthetic oligonucleotide
auguugaucucaaagggcc

SEQ ID NO: 695288 - RNA, 19 nt, Artificial Sequence
  Description of Artificial Sequence: Synthetic oligonucleotide
cuuaggucacuguacaucc

SEQ ID NO: 695289 - RNA, 19 nt, Artificial Sequence
  Description of Artificial Sequence: Synthetic oligonucleotide
ugauaugucaccugcucag

SEQ ID NO: 695290 - RNA, 19 nt, Artificial Sequence
  Description of Artificial Sequence: Synthetic oligonucleotide
guugauucugaagaguucg

SEQ ID NO: 695291 - RNA, 19 nt, Artificial Sequence
  Description of Artificial Sequence: Synthetic oligonucleotide
ugaacauaugcugugagac

SEQ ID NO: 695292 - RNA, 19 nt, Artificial Sequence
  Description of Artificial Sequence: Synthetic oligonucleotide
aguuauugugguaaaugcc

SEQ ID NO: 695293 - RNA, 19 nt, Artificial Sequence
  Description of Artificial Sequence: Synthetic oligonucleotide
auagauuccuuccuuaggu

SEQ ID NO: 695294 - RNA, 19 nt, Artificial Sequence
  Description of Artificial Sequence: Synthetic oligonucleotide
cucauuguuaucucgccgg

SEQ ID NO: 695295 - RNA, 19 nt, Artificial Sequence
  Description of Artificial Sequence: Synthetic oligonucleotide
gauucggauacgcugguag

SEQ ID NO: 695296 - RNA, 19 nt, Artificial Sequence
  Description of Artificial Sequence: Synthetic oligonucleotide
agugcagcuagucaccacg

SEQ ID NO: 695297 - RNA, 19 nt, Artificial Sequence
  Description of Artificial Sequence: Synthetic oligonucleotide
auuguuaucucgccggaag

SEQ ID NO: 695298 - RNA, 19 nt, Artificial Sequence
  Description of Artificial Sequence: Synthetic oligonucleotide
aguucgcugucguagaagg

SEQ ID NO: 695299 - RNA, 19 nt, Artificial Sequence
  Description of Artificial Sequence: Synthetic oligonucleotide
ugagccaucguaguuauug

SEQ ID NO: 695300 - RNA, 19 nt, Artificial Sequence
  Description of Artificial Sequence: Synthetic oligonucleotide
ucgguuagcucaccgacgg

SEQ ID NO: 695301 - RNA, 19 nt, Artificial Sequence
  Description of Artificial Sequence: Synthetic oligonucleotide
gugauagggauacugcccg

SEQ ID NO: 695302 - RNA, 19 nt, Artificial Sequence
  Description of Artificial Sequence: Synthetic oligonucleotide
aagucuugcgcaugcuacg

SEQ ID NO: 695303 - RNA, 19 nt, Artificial Sequence
  Description of Artificial Sequence: Synthetic oligonucleotide
acuugcuacaguuauacuu

SEQ ID NO: 695304 - RNA, 19 nt, Artificial Sequence
  Description of Artificial Sequence: Synthetic oligonucleotide
gaaaugaugggcucuguga

SEQ ID NO: 695305 - RNA, 19 nt, Artificial Sequence
  Description of Artificial Sequence: Synthetic oligonucleotide
gaucauggacucaaugugg

SEQ ID NO: 695306 - RNA, 19 nt, Artificial Sequence
  Description of Artificial Sequence: Synthetic oligonucleotide
auauugauuugccuggccu

SEQ ID NO: 695307 - RNA, 19 nt, Artificial Sequence
  Description of Artificial Sequence: Synthetic oligonucleotide
ugucccucaccacacacag

SEQ ID NO: 695308 - RNA, 19 nt, Artificial Sequence
  Description of Artificial Sequence: Synthetic oligonucleotide
agagguaccgggcaaaagu

SEQ ID NO: 695309 - RNA, 19 nt, Artificial Sequence
  Description of Artificial Sequence: Synthetic oligonucleotide
uuguuaucucgccggaagg

SEQ ID NO: 695310 - RNA, 19 nt, Artificial Sequence
  Description of Artificial Sequence: Synthetic oligonucleotide
uauuugaggaacugagacu

SEQ ID NO: 695311 - RNA, 19 nt, Artificial Sequence
  Description of Artificial Sequence: Synthetic oligonucleotide
gcugguacggaucagcugg

SEQ ID NO: 695312 - RNA, 19 nt, Artificial Sequence
  Description of Artificial Sequence: Synthetic oligonucleotide
guuaagugagccaucguag

SEQ ID NO: 695313 - RNA, 19 nt, Artificial Sequence
  Description of Artificial Sequence: Synthetic oligonucleotide
caucacguagucccgaagg

SEQ ID NO: 695314 - RNA, 19 nt, Artificial Sequence
  Description of Artificial Sequence: Synthetic oligonucleotide
cuacaguuauacuugacca

SEQ ID NO: 695315 - RNA, 19 nt, Artificial Sequence
  Description of Artificial Sequence: Synthetic oligonucleotide
agggcagccucauacaaag

SEQ ID NO: 695316 - RNA, 19 nt, Artificial Sequence
  Description of Artificial Sequence: Synthetic oligonucleotide
cucaauguauuugaggaac

SEQ ID NO: 695317 - RNA, 19 nt, Artificial Sequence
  Description of Artificial Sequence: Synthetic oligonucleotide
cuuggcguagaugauauac

SEQ ID NO: 695318 - RNA, 19 nt, Artificial Sequence
  Description of Artificial Sequence: Synthetic oligonucleotide
ugcguuucaggucacggcu

SEQ ID NO: 695319 - RNA, 19 nt, Artificial Sequence
  Description of Artificial Sequence: Synthetic oligonucleotide
auguauuugaggaacugag

SEQ ID NO: 695320 - RNA, 19 nt, Artificial Sequence
  Description of Artificial Sequence: Synthetic oligonucleotide
uaucucgccggaaggagag

SEQ ID NO: 695321 - RNA, 19 nt, Artificial Sequence
  Description of Artificial Sequence: Synthetic oligonucleotide
uccccggucggccagaacc

SEQ ID NO: 695322 - RNA, 19 nt, Artificial Sequence
  Description of Artificial Sequence: Synthetic oligonucleotide
gaacauaugcugugagacc

SEQ ID NO: 695323 - RNA, 19 nt, Artificial Sequence
  Description of Artificial Sequence: Synthetic oligonucleotide
agggauacugcccguugcc

SEQ ID NO: 695324 - RNA, 19 nt, Artificial Sequence
  Description of Artificial Sequence: Synthetic oligonucleotide
aucauggacucaauguggc

SEQ ID NO: 695325 - RNA, 19 nt, Artificial Sequence
  Description of Artificial Sequence: Synthetic oligonucleotide
ugauuuugagacuggcaga

SEQ ID NO: 695326 - RNA, 19 nt, Artificial Sequence
  Description of Artificial Sequence: Synthetic oligonucleotide
gaugcggucguaguugggg

SEQ ID NO: 695327 - RNA, 19 nt, Artificial Sequence
  Description of Artificial Sequence: Synthetic oligonucleotide
caugcuacgcaugacacug

SEQ ID NO: 695328 - RNA, 19 nt, Artificial Sequence
  Description of Artificial Sequence: Synthetic oligonucleotide
aaugucaccccgaaccuug

SEQ ID NO: 695329 - RNA, 19 nt, Artificial Sequence
  Description of Artificial Sequence: Synthetic oligonucleotide
ucguccuucuuguuacugg

SEQ ID NO: 695330 - RNA, 19 nt, Artificial Sequence
  Description of Artificial Sequence: Synthetic oligonucleotide
aaggcggagagguugugga

SEQ ID NO: 695331 - RNA, 19 nt, Artificial Sequence
  Description of Artificial Sequence: Synthetic oligonucleotide
cagugaagggucauagcgg

SEQ ID NO: 695332 - RNA, 19 nt, Artificial Sequence
  Description of Artificial Sequence: Synthetic oligonucleotide
agugagguaacgaugccag

SEQ ID NO: 695333 - RNA, 19 nt, Artificial Sequence
  Description of Artificial Sequence: Synthetic oligonucleotide
gaaugugguggugaugcgg

SEQ ID NO: 695334 - RNA, 19 nt, Artificial Sequence
  Description of Artificial Sequence: Synthetic oligonucleotide
aggaacugagacuuugcug

SEQ ID NO: 695335 - RNA, 19 nt, Artificial Sequence
  Description of Artificial Sequence: Synthetic oligonucleotide
uguggauauugauuugccu

SEQ ID NO: 695336 - RNA, 19 nt, Artificial Sequence
  Description of Artificial Sequence: Synthetic oligonucleotide
aacgcaacuccuccaccag

SEQ ID NO: 695337 - RNA, 19 nt, Artificial Sequence
  Description of Artificial Sequence: Synthetic oligonucleotide
uugcagugagguaacgaug

SEQ ID NO: 695338 - RNA, 19 nt, Artificial Sequence
  Description of Artificial Sequence: Synthetic oligonucleotide
ucuaucucgucuccuggcu

SEQ ID NO: 695339 - RNA, 19 nt, Artificial Sequence
  Description of Artificial Sequence: Synthetic oligonucleotide
acauccuagccacuuuguc

SEQ ID NO: 695340 - RNA, 19 nt, Artificial Sequence
  Description of Artificial Sequence: Synthetic oligonucleotide
uuggcguagaugauauacu

SEQ ID NO: 695341 - RNA, 19 nt, Artificial Sequence
  Description of Artificial Sequence: Synthetic oligonucleotide
ugccaugcggaucauggac

SEQ ID NO: 695342 - RNA, 19 nt, Artificial Sequence
  Description of Artificial Sequence: Synthetic oligonucleotide
guugauaugucaccugcuc

SEQ ID NO: 695343 - RNA, 19 nt, Artificial Sequence
  Description of Artificial Sequence: Synthetic oligonucleotide
cuuggguuccccuccaaac

SEQ ID NO: 695344 - RNA, 19 nt, Artificial Sequence
  Description of Artificial Sequence: Synthetic oligonucleotide
aagaguucgcugucguaga

SEQ ID NO: 695345 - RNA, 19 nt, Artificial Sequence
  Description of Artificial Sequence: Synthetic oligonucleotide
uguugauucugaagaguuc

SEQ ID NO: 695346 - RNA, 19 nt, Artificial Sequence
  Description of Artificial Sequence: Synthetic oligonucleotide
ucaguaugaagagcaggag

SEQ ID NO: 695347 - RNA, 19 nt, Artificial Sequence
  Description of Artificial Sequence: Synthetic oligonucleotide
agacccacggcugaugcac

SEQ ID NO: 695348 - RNA, 19 nt, Artificial Sequence
  Description of Artificial Sequence: Synthetic oligonucleotide
uuaucucgccggaaggaga

SEQ ID NO: 695349 - RNA, 19 nt, Artificial Sequence
  Description of Artificial Sequence: Synthetic oligonucleotide
uugugguaaaugccaguca

SEQ ID NO: 695350 - RNA, 19 nt, Artificial Sequence
  Description of Artificial Sequence: Synthetic oligonucleotide
aucguaguuauugugguaa

SEQ ID NO: 695351 - RNA, 19 nt, Artificial Sequence
  Description of Artificial Sequence: Synthetic oligonucleotide
uaucucgucuccuggcuug

SEQ ID NO: 695352 - RNA, 19 nt, Artificial Sequence
  Description of Artificial Sequence: Synthetic oligonucleotide
cuagcaccaccuccgaggg

SEQ ID NO: 695353 - RNA, 19 nt, Artificial Sequence
  Description of Artificial Sequence: Synthetic oligonucleotide
agucuugcgcaugcuacgc

SEQ ID NO: 695354 - RNA, 19 nt, Artificial Sequence
  Description of Artificial Sequence: Synthetic oligonucleotide
ucauuguuaucucgccgga

SEQ ID NO: 695355 - RNA, 19 nt, Artificial Sequence
  Description of Artificial Sequence: Synthetic oligonucleotide
uauugugguaaaugccagu

SEQ ID NO: 695356 - RNA, 19 nt, Artificial Sequence
  Description of Artificial Sequence: Synthetic oligonucleotide
gaugcugguccuguccugg

SEQ ID NO: 695357 - RNA, 19 nt, Artificial Sequence
  Description of Artificial Sequence: Synthetic oligonucleotide
ggaacugagacuuugcugu

SEQ ID NO: 695358 - RNA, 19 nt, Artificial Sequence
  Description of Artificial Sequence: Synthetic oligonucleotide
uagggauacugcccguugc

SEQ ID NO: 695359 - RNA, 19 nt, Artificial Sequence
  Description of Artificial Sequence: Synthetic oligonucleotide
gugggaaaugcgcacauga

SEQ ID NO: 695360 - RNA, 19 nt, Artificial Sequence
  Description of Artificial Sequence: Synthetic oligonucleotide
guacauccuagccacuuug

SEQ ID NO: 695361 - RNA, 19 nt, Artificial Sequence
  Description of Artificial Sequence: Synthetic oligonucleotide
caucgguuagcucaccgac

SEQ ID NO: 695362 - RNA, 19 nt, Artificial Sequence
  Description of Artificial Sequence: Synthetic oligonucleotide
ggugccgcugaacauaugc

SEQ ID NO: 695363 - RNA, 19 nt, Artificial Sequence
  Description of Artificial Sequence: Synthetic oligonucleotide
guacggaucagcugguuca

SEQ ID NO: 695364 - RNA, 19 nt, Artificial Sequence
  Description of Artificial Sequence: Synthetic oligonucleotide
ucaauguggcgcacuguga

SEQ ID NO: 695365 - RNA, 19 nt, Artificial Sequence
  Description of Artificial Sequence: Synthetic oligonucleotide
uguuaucucgccggaagga

SEQ ID NO: 695366 - RNA, 19 nt, Artificial Sequence
  Description of Artificial Sequence: Synthetic oligonucleotide
caucuugcguuucagguca

SEQ ID NO: 695367 - RNA, 19 nt, Artificial Sequence
  Description of Artificial Sequence: Synthetic oligonucleotide
auccuagccacuuugucuu

SEQ ID NO: 695368 - RNA, 19 nt, Artificial Sequence
  Description of Artificial Sequence: Synthetic oligonucleotide
agcgguugcguugauaugu

SEQ ID NO: 695369 - RNA, 19 nt, Artificial Sequence
  Description of Artificial Sequence: Synthetic oligonucleotide
uugcguuucaggucacggc

SEQ ID NO: 695370 - RNA, 19 nt, Artificial Sequence
  Description of Artificial Sequence: Synthetic oligonucleotide
aagauggcacggcuagaca

SEQ ID NO: 695371 - RNA, 19 nt, Artificial Sequence
  Description of Artificial Sequence: Synthetic oligonucleotide
gaacgcaacuccuccacca

SEQ ID NO: 695372 - RNA, 19 nt, Artificial Sequence
  Description of Artificial Sequence: Synthetic oligonucleotide
auguggcgcacugugauag

SEQ ID NO: 695373 - RNA, 19 nt, Artificial Sequence
  Description of Artificial Sequence: Synthetic oligonucleotide
gcacauuaaugucaccccg

SEQ ID NO: 695374 - RNA, 19 nt, Artificial Sequence
  Description of Artificial Sequence: Synthetic oligonucleotide
auagggauacugcccguug

SEQ ID NO: 695375 - RNA, 19 nt, Artificial Sequence
  Description of Artificial Sequence: Synthetic oligonucleotide
ggccuugucuacuaagucc

SEQ ID NO: 695376 - RNA, 19 nt, Artificial Sequence
  Description of Artificial Sequence: Synthetic oligonucleotide
uacauccuagccacuuugu

SEQ ID NO: 695377 - RNA, 19 nt, Artificial Sequence
  Description of Artificial Sequence: Synthetic oligonucleotide
acauuaaugucaccccgaa

SEQ ID NO: 695378 - RNA, 19 nt, Artificial Sequence
  Description of Artificial Sequence: Synthetic oligonucleotide
agcgaugacagugcagcgg

SEQ ID NO: 695379 - RNA, 19 nt, Artificial Sequence
  Description of Artificial Sequence: Synthetic oligonucleotide
gucaccccgaaccuugugc

SEQ ID NO: 695380 - RNA, 19 nt, Artificial Sequence
  Description of Artificial Sequence: Synthetic oligonucleotide
gcgcacaugaauguggugg

SEQ ID NO: 695381 - RNA, 19 nt, Artificial Sequence
  Description of Artificial Sequence: Synthetic oligonucleotide
aggauaucaaagcgggaaa

SEQ ID NO: 695382 - RNA, 19 nt, Artificial Sequence
  Description of Artificial Sequence: Synthetic oligonucleotide
cucuaucucgucuccuggc

SEQ ID NO: 695383 - RNA, 19 nt, Artificial Sequence
  Description of Artificial Sequence: Synthetic oligonucleotide
uugcgcaugcuacgcauga

SEQ ID NO: 695384 - RNA, 19 nt, Artificial Sequence
  Description of Artificial Sequence: Synthetic oligonucleotide
aucacguagucccgaaggu

SEQ ID NO: 695385 - RNA, 19 nt, Artificial Sequence
  Description of Artificial Sequence: Synthetic oligonucleotide
agcgggaaaugaugggcuc

SEQ ID NO: 695386 - RNA, 19 nt, Artificial Sequence
  Description of Artificial Sequence: Synthetic oligonucleotide
agccaucguaguuauugug

SEQ ID NO: 695387 - RNA, 19 nt, Artificial Sequence
  Description of Artificial Sequence: Synthetic oligonucleotide
ucccgaaggugcaugcgug

SEQ ID NO: 695388 - RNA, 19 nt, Artificial Sequence
  Description of Artificial Sequence: Synthetic oligonucleotide
cucaccgacggccacuuug

SEQ ID NO: 695389 - RNA, 19 nt, Artificial Sequence
  Description of Artificial Sequence: Synthetic oligonucleotide
gcagcuagucaccacgccg

SEQ ID NO: 695390 - RNA, 19 nt, Artificial Sequence
  Description of Artificial Sequence: Synthetic oligonucleotide
uggcguagaugauauacuu

SEQ ID NO: 695391 - RNA, 19 nt, Artificial Sequence
  Description of Artificial Sequence: Synthetic oligonucleotide
ugggaaaugcgcacaugaa

SEQ ID NO: 695392 - RNA, 19 nt, Artificial Sequence
  Description of Artificial Sequence: Synthetic oligonucleotide
gaaggcggagagguugugg

SEQ ID NO: 695393 - RNA, 19 nt, Artificial Sequence
  Description of Artificial Sequence: Synthetic oligonucleotide
uagauuccuuccuuagguc

SEQ ID NO: 695394 - RNA, 19 nt, Artificial Sequence
  Description of Artificial Sequence: Synthetic oligonucleotide
gccaucguaguuauugugg

SEQ ID NO: 695395 - RNA, 19 nt, Artificial Sequence
  Description of Artificial Sequence: Synthetic oligonucleotide
auucggauacgcugguagu

SEQ ID NO: 695396 - RNA, 19 nt, Artificial Sequence
  Description of Artificial Sequence: Synthetic oligonucleotide
gaaaugcgcacaugaaugu

SEQ ID NO: 695397 - RNA, 19 nt, Artificial Sequence
  Description of Artificial Sequence: Synthetic oligonucleotide
agugaacgcaacuccucca

SEQ ID NO: 695398 - RNA, 19 nt, Artificial Sequence
  Description of Artificial Sequence: Synthetic oligonucleotide
aaggugcaugcgugcgugg

SEQ ID NO: 695399 - RNA, 19 nt, Artificial Sequence
  Description of Artificial Sequence: Synthetic oligonucleotide
augcugugagacccacggc

SEQ ID NO: 695400 - RNA, 19 nt, Artificial Sequence
  Description of Artificial Sequence: Synthetic oligonucleotide
agggguuccacgccguaug

SEQ ID NO: 695401 - RNA, 19 nt, Artificial Sequence
  Description of Artificial Sequence: Synthetic oligonucleotide
ggguacaguggcuagcacc

SEQ ID NO: 695402 - RNA, 19 nt, Artificial Sequence
  Description of Artificial Sequence: Synthetic oligonucleotide
aagcgggaaaugaugggcu

SEQ ID NO: 695403 - RNA, 19 nt, Artificial Sequence
  Description of Artificial Sequence: Synthetic oligonucleotide
ugcagcuagucaccacgcc

SEQ ID NO: 695404 - RNA, 19 nt, Artificial Sequence
  Description of Artificial Sequence: Synthetic oligonucleotide
cagaacugcuguaggauca

SEQ ID NO: 695405 - RNA, 19 nt, Artificial Sequence
  Description of Artificial Sequence: Synthetic oligonucleotide
uguacauccuagccacuuu

SEQ ID NO: 695406 - RNA, 19 nt, Artificial Sequence
  Description of Artificial Sequence: Synthetic oligonucleotide
uugcguugauaugucaccu

SEQ ID NO: 695407 - RNA, 19 nt, Artificial Sequence
  Description of Artificial Sequence: Synthetic oligonucleotide
aauguggcgcacugugaua

SEQ ID NO: 695408 - RNA, 19 nt, Artificial Sequence
  Description of Artificial Sequence: Synthetic oligonucleotide
cuacgcaugacacugaauu

SEQ ID NO: 695409 - RNA, 19 nt, Artificial Sequence
  Description of Artificial Sequence: Synthetic oligonucleotide
ucaaagggcccaguugacu

SEQ ID NO: 695410 - RNA, 19 nt, Artificial Sequence
  Description of Artificial Sequence: Synthetic oligonucleotide
accgacggccacuuuguug

SEQ ID NO: 695411 - RNA, 19 nt, Artificial Sequence
  Description of Artificial Sequence: Synthetic oligonucleotide
ggaaaugaugggcucugug

SEQ ID NO: 695412 - RNA, 19 nt, Artificial Sequence
  Description of Artificial Sequence: Synthetic oligonucleotide
cauuaaugucaccccgaac

SEQ ID NO: 695413 - RNA, 19 nt, Artificial Sequence
  Description of Artificial Sequence: Synthetic oligonucleotide
cugaacauaugcugugaga

SEQ ID NO: 695414 - RNA, 19 nt, Artificial Sequence
  Description of Artificial Sequence: Synthetic oligonucleotide
ugcuacgcaugacacugaa

SEQ ID NO: 695415 - RNA, 19 nt, Artificial Sequence
  Description of Artificial Sequence: Synthetic oligonucleotide
cacauuaaugucaccccga

SEQ ID NO: 695416 - RNA, 19 nt, Artificial Sequence
  Description of Artificial Sequence: Synthetic oligonucleotide
aagcgguugcguugauaug

SEQ ID NO: 695417 - RNA, 19 nt, Artificial Sequence
  Description of Artificial Sequence: Synthetic oligonucleotide
gucagugaagggucauagc

SEQ ID NO: 695418 - RNA, 19 nt, Artificial Sequence
  Description of Artificial Sequence: Synthetic oligonucleotide
gguuagcucaccgacggcc

SEQ ID NO: 695419 - RNA, 19 nt, Artificial Sequence
  Description of Artificial Sequence: Synthetic oligonucleotide
uccaccagaucagcaagga

SEQ ID NO: 695420 - RNA, 19 nt, Artificial Sequence
  Description of Artificial Sequence: Synthetic oligonucleotide
gauacgcugguaguucuga

SEQ ID NO: 695421 - RNA, 19 nt, Artificial Sequence
  Description of Artificial Sequence: Synthetic oligonucleotide
uccuggauucggauacgcu

SEQ ID NO: 695422 - RNA, 19 nt, Artificial Sequence
  Description of Artificial Sequence: Synthetic oligonucleotide
caggauaucaaagcgggaa

SEQ ID NO: 695423 - RNA, 19 nt, Artificial Sequence
  Description of Artificial Sequence: Synthetic oligonucleotide
uacgcugguaguucugaua

SEQ ID NO: 695424 - RNA, 19 nt, Artificial Sequence
  Description of Artificial Sequence: Synthetic oligonucleotide
cacggcuagacacuuucuc

SEQ ID NO: 695425 - RNA, 19 nt, Artificial Sequence
  Description of Artificial Sequence: Synthetic oligonucleotide
uguggcgcacugugauagg

SEQ ID NO: 695426 - RNA, 19 nt, Artificial Sequence
  Description of Artificial Sequence: Synthetic oligonucleotide
aggcagggguuccacgccg

SEQ ID NO: 695427 - RNA, 19 nt, Artificial Sequence
  Description of Artificial Sequence: Synthetic oligonucleotide
cagaucagcaaggagaaua

SEQ ID NO: 695428 - RNA, 19 nt, Artificial Sequence
  Description of Artificial Sequence: Synthetic oligonucleotide
gaguucgcugucguagaag

SEQ ID NO: 695429 - RNA, 19 nt, Artificial Sequence
  Description of Artificial Sequence: Synthetic oligonucleotide
uaccgggcaaaagucuugc

SEQ ID NO: 695430 - RNA, 19 nt, Artificial Sequence
  Description of Artificial Sequence: Synthetic oligonucleotide
cuuggaaaggcuggugauc

SEQ ID NO: 695431 - RNA, 19 nt, Artificial Sequence
  Description of Artificial Sequence: Synthetic oligonucleotide
caugguuggccaagaugac

SEQ ID NO: 695432 - RNA, 19 nt, Artificial Sequence
  Description of Artificial Sequence: Synthetic oligonucleotide
ucguaguuauugugguaaa

SEQ ID NO: 695433 - RNA, 19 nt, Artificial Sequence
  Description of Artificial Sequence: Synthetic oligonucleotide
gcguagaugauauacuucu

SEQ ID NO: 695434 - RNA, 19 nt, Artificial Sequence
  Description of Artificial Sequence: Synthetic oligonucleotide
agacacuuucucaauguau

SEQ ID NO: 695435 - RNA, 19 nt, Artificial Sequence
  Description of Artificial Sequence: Synthetic oligonucleotide
aaacgggccagcaucucau

SEQ ID NO: 695436 - RNA, 19 nt, Artificial Sequence
  Description of Artificial Sequence: Synthetic oligonucleotide
ggagauggaaaugcuuugc

SEQ ID NO: 695437 - RNA, 19 nt, Artificial Sequence
  Description of Artificial Sequence: Synthetic oligonucleotide
uggauucggauacgcuggu

SEQ ID NO: 695438 - RNA, 19 nt, Artificial Sequence
  Description of Artificial Sequence: Synthetic oligonucleotide
cuaugggguuggcagcagc

SEQ ID NO: 695439 - RNA, 19 nt, Artificial Sequence
  Description of Artificial Sequence: Synthetic oligonucleotide
acggccacuuuguuguccu

SEQ ID NO: 695440 - RNA, 19 nt, Artificial Sequence
  Description of Artificial Sequence: Synthetic oligonucleotide
cuugcagugagguaacgau

SEQ ID NO: 695441 - RNA, 19 nt, Artificial Sequence
  Description of Artificial Sequence: Synthetic oligonucleotide
cauccuuggagcggggcag

SEQ ID NO: 695442 - RNA, 19 nt, Artificial Sequence
  Description of Artificial Sequence: Synthetic oligonucleotide
cuugcgcaugcuacgcaug

SEQ ID NO: 695443 - RNA, 19 nt, Artificial Sequence
  Description of Artificial Sequence: Synthetic oligonucleotide
ucggauacgcugguaguuc

SEQ ID NO: 695444 - RNA, 19 nt, Artificial Sequence
  Description of Artificial Sequence: Synthetic oligonucleotide
aaacccauuggcaguguua

SEQ ID NO: 695445 - RNA, 19 nt, Artificial Sequence
  Description of Artificial Sequence: Synthetic oligonucleotide
ugauuugccuggccuuguc

SEQ ID NO: 695446 - RNA, 19 nt, Artificial Sequence
  Description of Artificial Sequence: Synthetic oligonucleotide
ucucgccggaaggagaggu

SEQ ID NO: 695447 - RNA, 19 nt, Artificial Sequence
  Description of Artificial Sequence: Synthetic oligonucleotide
cucaaagggcccaguugac

SEQ ID NO: 695448 - RNA, 19 nt, Artificial Sequence
  Description of Artificial Sequence: Synthetic oligonucleotide
gauacugcccguugccaua

SEQ ID NO: 695449 - RNA, 19 nt, Artificial Sequence
  Description of Artificial Sequence: Synthetic oligonucleotide
acgccguauguguugggca

SEQ ID NO: 695450 - RNA, 19 nt, Artificial Sequence
  Description of Artificial Sequence: Synthetic oligonucleotide
gucgacagugucccucacc

SEQ ID NO: 695451 - RNA, 19 nt, Artificial Sequence
  Description of Artificial Sequence: Synthetic oligonucleotide
acaguggcuagcaccaccu

SEQ ID NO: 695452 - RNA, 19 nt, Artificial Sequence
  Description of Artificial Sequence: Synthetic oligonucleotide
gagggcgcaaugcuggcaa

SEQ ID NO: 695453 - RNA, 19 nt, Artificial Sequence
  Description of Artificial Sequence: Synthetic oligonucleotide
auacugcccguugccauag

SEQ ID NO: 695454 - RNA, 19 nt, Artificial Sequence
  Description of Artificial Sequence: Synthetic oligonucleotide
uucggauacgcugguaguu

SEQ ID NO: 695455 - RNA, 19 nt, Artificial Sequence
  Description of Artificial Sequence: Synthetic oligonucleotide
cagcgaugacagugcagcg

SEQ ID NO: 695456 - RNA, 19 nt, Artificial Sequence
  Description of Artificial Sequence: Synthetic oligonucleotide
aucucgucuccuggcuugc

SEQ ID NO: 695457 - RNA, 19 nt, Artificial Sequence
  Description of Artificial Sequence: Synthetic oligonucleotide
ugucaccccgaaccuugug

SEQ ID NO: 695458 - RNA, 19 nt, Artificial Sequence
  Description of Artificial Sequence: Synthetic oligonucleotide
gagguaacgaugccagccu

SEQ ID NO: 695459 - RNA, 19 nt, Artificial Sequence
  Description of Artificial Sequence: Synthetic oligonucleotide
uccaucacguagucccgaa

SEQ ID NO: 695460 - RNA, 19 nt, Artificial Sequence
  Description of Artificial Sequence: Synthetic oligonucleotide
augcggucguaguuggggu

SEQ ID NO: 695461 - RNA, 19 nt, Artificial Sequence
  Description of Artificial Sequence: Synthetic oligonucleotide
uaacgaugccagccuugga

SEQ ID NO: 695462 - RNA, 19 nt, Artificial Sequence
  Description of Artificial Sequence: Synthetic oligonucleotide
ugcgcacaugaauguggug

SEQ ID NO: 695463 - RNA, 19 nt, Artificial Sequence
  Description of Artificial Sequence: Synthetic oligonucleotide
cacgccguauguguugggc

SEQ ID NO: 695464 - RNA, 19 nt, Artificial Sequence
  Description of Artificial Sequence: Synthetic oligonucleotide
gccucuaagguccacucuc

SEQ ID NO: 695465 - RNA, 19 nt, Artificial Sequence
  Description of Artificial Sequence: Synthetic oligonucleotide
agaguucgcugucguagaa

SEQ ID NO: 695466 - RNA, 19 nt, Artificial Sequence
  Description of Artificial Sequence: Synthetic oligonucleotide
gacuccagugcagcuaguc

SEQ ID NO: 695467 - RNA, 19 nt, Artificial Sequence
  Description of Artificial Sequence: Synthetic oligonucleotide
accuccugauuuugagacu

SEQ ID NO: 695468 - RNA, 19 nt, Artificial Sequence
  Description of Artificial Sequence: Synthetic oligonucleotide
gugagguaacgaugccagc

SEQ ID NO: 695469 - RNA, 19 nt, Artificial Sequence
  Description of Artificial Sequence: Synthetic oligonucleotide
caccuugccgggacucucc

SEQ ID NO: 695470 - RNA, 19 nt, Artificial Sequence
  Description of Artificial Sequence: Synthetic oligonucleotide
gguacggaucagcugguuc

SEQ ID NO: 695471 - RNA, 19 nt, Artificial Sequence
  Description of Artificial Sequence: Synthetic oligonucleotide
cacggcugaugcacccugg

SEQ ID NO: 695472 - RNA, 19 nt, Artificial Sequence
  Description of Artificial Sequence: Synthetic oligonucleotide
gauuugccuggccuugucu

SEQ ID NO: 695473 - RNA, 19 nt, Artificial Sequence
  Description of Artificial Sequence: Synthetic oligonucleotide
cuuguuacugggguggugu

SEQ ID NO: 695474 - RNA, 19 nt, Artificial Sequence
  Description of Artificial Sequence: Synthetic oligonucleotide
gacggccacuuuguugucc

SEQ ID NO: 695475 - RNA, 19 nt, Artificial Sequence
  Description of Artificial Sequence: Synthetic oligonucleotide
cuccuggauucggauacgc

SEQ ID NO: 695476 - RNA, 19 nt, Artificial Sequence
  Description of Artificial Sequence: Synthetic oligonucleotide
ggcacggcuagacacuuuc

SEQ ID NO: 695477 - RNA, 19 nt, Artificial Sequence
  Description of Artificial Sequence: Synthetic oligonucleotide
uugauuugccuggccuugu

SEQ ID NO: 695478 - RNA, 19 nt, Artificial Sequence
  Description of Artificial Sequence: Synthetic oligonucleotide
ugggucgacagugucccuc

SEQ ID NO: 695479 - RNA, 19 nt, Artificial Sequence
  Description of Artificial Sequence: Synthetic oligonucleotide
uccuagccacuuugucuug

SEQ ID NO: 695480 - RNA, 19 nt, Artificial Sequence
  Description of Artificial Sequence: Synthetic oligonucleotide
aggugggaaaugcgcacau

SEQ ID NO: 695481 - RNA, 19 nt, Artificial Sequence
  Description of Artificial Sequence: Synthetic oligonucleotide
uggagggcgcaaugcuggc

SEQ ID NO: 695482 - RNA, 19 nt, Artificial Sequence
  Description of Artificial Sequence: Synthetic oligonucleotide
acccauuggcaguguuaag

SEQ ID NO: 695483 - RNA, 19 nt, Artificial Sequence
  Description of Artificial Sequence: Synthetic oligonucleotide
gaugacagugcagcgggcu

SEQ ID NO: 695484 - RNA, 19 nt, Artificial Sequence
  Description of Artificial Sequence: Synthetic oligonucleotide
ggcaacaugguuggccaag

SEQ ID NO: 695485 - RNA, 19 nt, Artificial Sequence
  Description of Artificial Sequence: Synthetic oligonucleotide
auacgcugguaguucugau

SEQ ID NO: 695486 - RNA, 19 nt, Artificial Sequence
  Description of Artificial Sequence: Synthetic oligonucleotide
ggcaguguuaagugagcca

SEQ ID NO: 695487 - RNA, 19 nt, Artificial Sequence
  Description of Artificial Sequence: Synthetic oligonucleotide
guuagcucaccgacggcca

SEQ ID NO: 695488 - RNA, 19 nt, Artificial Sequence
  Description of Artificial Sequence: Synthetic oligonucleotide
augacagugcagcgggcuu

SEQ ID NO: 695489 - RNA, 19 nt, Artificial Sequence
  Description of Artificial Sequence: Synthetic oligonucleotide
caccacgccgcugguacgg

SEQ ID NO: 695490 - RNA, 19 nt, Artificial Sequence
  Description of Artificial Sequence: Synthetic oligonucleotide
guaccgggcaaaagucuug

SEQ ID NO: 695491 - RNA, 19 nt, Artificial Sequence
  Description of Artificial Sequence: Synthetic oligonucleotide
gcggaucauggacucaaug

SEQ ID NO: 695492 - RNA, 19 nt, Artificial Sequence
  Description of Artificial Sequence: Synthetic oligonucleotide
agcuagucaccacgccgcu

SEQ ID NO: 695493 - RNA, 19 nt, Artificial Sequence
  Description of Artificial Sequence: Synthetic oligonucleotide
ugacgucaucuuccaucac

SEQ ID NO: 695494 - RNA, 19 nt, Artificial Sequence
  Description of Artificial Sequence: Synthetic oligonucleotide
agguaccgggcaaaagucu

SEQ ID NO: 695495 - RNA, 19 nt, Artificial Sequence
  Description of Artificial Sequence: Synthetic oligonucleotide
cacgccgcugguacggauc

SEQ ID NO: 695496 - RNA, 19 nt, Artificial Sequence
  Description of Artificial Sequence: Synthetic oligonucleotide
agguaacgaugccagccuu

SEQ ID NO: 695497 - RNA, 19 nt, Artificial Sequence
  Description of Artificial Sequence: Synthetic oligonucleotide
gagccaucguaguuauugu

SEQ ID NO: 695498 - RNA, 19 nt, Artificial Sequence
  Description of Artificial Sequence: Synthetic oligonucleotide
gugcagcuagucaccacgc

SEQ ID NO: 695499 - RNA, 19 nt, Artificial Sequence
  Description of Artificial Sequence: Synthetic oligonucleotide
cagccggccagcugccacc

SEQ ID NO: 695500 - RNA, 19 nt, Artificial Sequence
  Description of Artificial Sequence: Synthetic oligonucleotide
gauggcacggcuagacacu

SEQ ID NO: 695501 - RNA, 19 nt, Artificial Sequence
  Description of Artificial Sequence: Synthetic oligonucleotide
uaggaucaucuugcguuuc

SEQ ID NO: 695502 - RNA, 19 nt, Artificial Sequence
  Description of Artificial Sequence: Synthetic oligonucleotide
gacacacuccccggucggc

SEQ ID NO: 695503 - RNA, 19 nt, Artificial Sequence
  Description of Artificial Sequence: Synthetic oligonucleotide
caauguggcgcacugugau

SEQ ID NO: 695504 - RNA, 19 nt, Artificial Sequence
  Description of Artificial Sequence: Synthetic oligonucleotide
gggaaaugcgcacaugaau

SEQ ID NO: 695505 - RNA, 19 nt, Artificial Sequence
  Description of Artificial Sequence: Synthetic oligonucleotide
ggcguagaugauauacuuc

SEQ ID NO: 695506 - RNA, 19 nt, Artificial Sequence
  Description of Artificial Sequence: Synthetic oligonucleotide
acucaauguggcgcacugu

SEQ ID NO: 695507 - RNA, 19 nt, Artificial Sequence
  Description of Artificial Sequence: Synthetic oligonucleotide
ggcugagccguguccagac

SEQ ID NO: 695508 - RNA, 19 nt, Artificial Sequence
  Description of Artificial Sequence: Synthetic oligonucleotide
ugcgugggccucugccaug

SEQ ID NO: 695509 - RNA, 19 nt, Artificial Sequence
  Description of Artificial Sequence: Synthetic oligonucleotide
cagugcagcuagucaccac

SEQ ID NO: 695510 - RNA, 19 nt, Artificial Sequence
  Description of Artificial Sequence: Synthetic oligonucleotide
ugcaugcgugcgugggccu

SEQ ID NO: 695511 - RNA, 19 nt, Artificial Sequence
  Description of Artificial Sequence: Synthetic oligonucleotide
ugcgcaugcuacgcaugac

SEQ ID NO: 695512 - RNA, 19 nt, Artificial Sequence
  Description of Artificial Sequence: Synthetic oligonucleotide
uggcaacaugguuggccaa

SEQ ID NO: 695513 - RNA, 19 nt, Artificial Sequence
  Description of Artificial Sequence: Synthetic oligonucleotide
guaggaucaucuugcguuu

SEQ ID NO: 695514 - RNA, 19 nt, Artificial Sequence
  Description of Artificial Sequence: Synthetic oligonucleotide
ugacagggugccgcugaac

SEQ ID NO: 695515 - RNA, 19 nt, Artificial Sequence
  Description of Artificial Sequence: Synthetic oligonucleotide
gacucuccuggauucggau

SEQ ID NO: 695516 - RNA, 19 nt, Artificial Sequence
  Description of Artificial Sequence: Synthetic oligonucleotide
uagcucaccgacggccacu

SEQ ID NO: 695517 - RNA, 19 nt, Artificial Sequence
  Description of Artificial Sequence: Synthetic oligonucleotide
cggcugaacuuguugauuc

SEQ ID NO: 695518 - RNA, 19 nt, Artificial Sequence
  Description of Artificial Sequence: Synthetic oligonucleotide
aucucgccggaaggagagg

SEQ ID NO: 695519 - RNA, 19 nt, Artificial Sequence
  Description of Artificial Sequence: Synthetic oligonucleotide
aggagagguaccgggcaaa

SEQ ID NO: 695520 - RNA, 19 nt, Artificial Sequence
  Description of Artificial Sequence: Synthetic oligonucleotide
gcaguguuaagugagccau

SEQ ID NO: 695521 - RNA, 19 nt, Artificial Sequence
  Description of Artificial Sequence: Synthetic oligonucleotide
guuaagcuuuggguggacu

SEQ ID NO: 695522 - RNA, 19 nt, Artificial Sequence
  Description of Artificial Sequence: Synthetic oligonucleotide
cccgaaggugcaugcgugc

SEQ ID NO: 695523 - RNA, 19 nt, Artificial Sequence
  Description of Artificial Sequence: Synthetic oligonucleotide
cagcgggcuugcagugagg

SEQ ID NO: 695524 - RNA, 19 nt, Artificial Sequence
  Description of Artificial Sequence: Synthetic oligonucleotide
ccgaaggugcaugcgugcg

SEQ ID NO: 695525 - RNA, 19 nt, Artificial Sequence
  Description of Artificial Sequence: Synthetic oligonucleotide
uacugcccguugccauaga

SEQ ID NO: 695526 - RNA, 19 nt, Artificial Sequence
  Description of Artificial Sequence: Synthetic oligonucleotide
cauuguuaucucgccggaa

SEQ ID NO: 695527 - RNA, 19 nt, Artificial Sequence
  Description of Artificial Sequence: Synthetic oligonucleotide
gggucgacagugucccuca

SEQ ID NO: 695528 - RNA, 19 nt, Artificial Sequence
  Description of Artificial Sequence: Synthetic oligonucleotide
cacacuccccggucggcca

SEQ ID NO: 695529 - RNA, 19 nt, Artificial Sequence
  Description of Artificial Sequence: Synthetic oligonucleotide
ccaucacguagucccgaag

SEQ ID NO: 695530 - RNA, 19 nt, Artificial Sequence
  Description of Artificial Sequence: Synthetic oligonucleotide
agggugccgcugaacauau

SEQ ID NO: 695531 - RNA, 19 nt, Artificial Sequence
  Description of Artificial Sequence: Synthetic oligonucleotide
ccgggacucuccuggauuc

SEQ ID NO: 695532 - RNA, 19 nt, Artificial Sequence
  Description of Artificial Sequence: Synthetic oligonucleotide
gggcgcaaugcuggcaaag

SEQ ID NO: 695533 - RNA, 19 nt, Artificial Sequence
  Description of Artificial Sequence: Synthetic oligonucleotide
cauccugaacugggucgac

SEQ ID NO: 695534 - RNA, 19 nt, Artificial Sequence
  Description of Artificial Sequence: Synthetic oligonucleotide
guacaaaguugcacuugcu

SEQ ID NO: 695535 - RNA, 19 nt, Artificial Sequence
  Description of Artificial Sequence: Synthetic oligonucleotide
guguuaagugagccaucgu

SEQ ID NO: 695536 - RNA, 19 nt, Artificial Sequence
  Description of Artificial Sequence: Synthetic oligonucleotide
gcccaguugacuggcacuc

SEQ ID NO: 695537 - RNA, 19 nt, Artificial Sequence
  Description of Artificial Sequence: Synthetic oligonucleotide
gcugccucagugaacgcaa

SEQ ID NO: 695538 - RNA, 19 nt, Artificial Sequence
  Description of Artificial Sequence: Synthetic oligonucleotide
ggcuugcagugagguaacg

SEQ ID NO: 695539 - RNA, 19 nt, Artificial Sequence
  Description of Artificial Sequence: Synthetic oligonucleotide
agggcgcaaugcuggcaaa

SEQ ID NO: 695540 - RNA, 19 nt, Artificial Sequence
  Description of Artificial Sequence: Synthetic oligonucleotide
augcuacgcaugacacuga

SEQ ID NO: 695541 - RNA, 19 nt, Artificial Sequence
  Description of Artificial Sequence: Synthetic oligonucleotide
ccggucggccagaaccagg

SEQ ID NO: 695542 - RNA, 19 nt, Artificial Sequence
  Description of Artificial Sequence: Synthetic oligonucleotide
ggauacugcccguugccau

SEQ ID NO: 695543 - RNA, 19 nt, Artificial Sequence
  Description of Artificial Sequence: Synthetic oligonucleotide
cauagauggagggcgcaau

SEQ ID NO: 695544 - RNA, 19 nt, Artificial Sequence
  Description of Artificial Sequence: Synthetic oligonucleotide
caugcggaucauggacuca

SEQ ID NO: 695545 - RNA, 19 nt, Artificial Sequence
  Description of Artificial Sequence: Synthetic oligonucleotide
ugguacggaucagcugguu

SEQ ID NO: 695546 - RNA, 19 nt, Artificial Sequence
  Description of Artificial Sequence: Synthetic oligonucleotide
cacggcugaacuuguugau

SEQ ID NO: 695547 - RNA, 19 nt, Artificial Sequence
  Description of Artificial Sequence: Synthetic oligonucleotide
gagugguggcugagccgug

SEQ ID NO: 695548 - RNA, 19 nt, Artificial Sequence
  Description of Artificial Sequence: Synthetic oligonucleotide
ggcggagagguuguggaua

SEQ ID NO: 695549 - RNA, 19 nt, Artificial Sequence
  Description of Artificial Sequence: Synthetic oligonucleotide
gucguaguugggguacagu

SEQ ID NO: 695550 - RNA, 19 nt, Artificial Sequence
  Description of Artificial Sequence: Synthetic oligonucleotide
gccgcugaacauaugcugu

SEQ ID NO: 695551 - RNA, 19 nt, Artificial Sequence
  Description of Artificial Sequence: Synthetic oligonucleotide
caaagcgguugcguugaua

SEQ ID NO: 695552 - RNA, 19 nt, Artificial Sequence
  Description of Artificial Sequence: Synthetic oligonucleotide
gcaugcuacgcaugacacu

SEQ ID NO: 695553 - RNA, 19 nt, Artificial Sequence
  Description of Artificial Sequence: Synthetic oligonucleotide
cuaucucgucuccuggcuu

SEQ ID NO: 695554 - RNA, 19 nt, Artificial Sequence
  Description of Artificial Sequence: Synthetic oligonucleotide
gcuagucaccacgccgcug

SEQ ID NO: 695555 - RNA, 19 nt, Artificial Sequence
  Description of Artificial Sequence: Synthetic oligonucleotide
cucgccggaaggagaggua

SEQ ID NO: 695556 - RNA, 19 nt, Artificial Sequence
  Description of Artificial Sequence: Synthetic oligonucleotide
cgggcuugcagugagguaa

SEQ ID NO: 695557 - RNA, 19 nt, Artificial Sequence
  Description of Artificial Sequence: Synthetic oligonucleotide
ggcuagacacuuucucaau

SEQ ID NO: 695558 - RNA, 19 nt, Artificial Sequence
  Description of Artificial Sequence: Synthetic oligonucleotide
cccaaagcgguugcguuga

SEQ ID NO: 695559 - RNA, 19 nt, Artificial Sequence
  Description of Artificial Sequence: Synthetic oligonucleotide
cugguacggaucagcuggu

SEQ ID NO: 695560 - RNA, 19 nt, Artificial Sequence
  Description of Artificial Sequence: Synthetic oligonucleotide
gggcuugcagugagguaac

SEQ ID NO: 695561 - RNA, 19 nt, Artificial Sequence
  Description of Artificial Sequence: Synthetic oligonucleotide
gguaccgggcaaaagucuu

SEQ ID NO: 695562 - RNA, 19 nt, Artificial Sequence
  Description of Artificial Sequence: Synthetic oligonucleotide
gcgguugcguugauauguc

SEQ ID NO: 695563 - RNA, 19 nt, Artificial Sequence
  Description of Artificial Sequence: Synthetic oligonucleotide
caacaugguuggccaagau

SEQ ID NO: 695564 - RNA, 19 nt, Artificial Sequence
  Description of Artificial Sequence: Synthetic oligonucleotide
gcggagagguuguggauau

SEQ ID NO: 695565 - RNA, 19 nt, Artificial Sequence
  Description of Artificial Sequence: Synthetic oligonucleotide
cacccuggccaguggugaa

SEQ ID NO: 695566 - RNA, 19 nt, Artificial Sequence
  Description of Artificial Sequence: Synthetic oligonucleotide
ugguccuguccuggucauu

SEQ ID NO: 695567 - RNA, 19 nt, Artificial Sequence
  Description of Artificial Sequence: Synthetic oligonucleotide
cuccccggucggccagaac

SEQ ID NO: 695568 - RNA, 19 nt, Artificial Sequence
  Description of Artificial Sequence: Synthetic oligonucleotide
ccgaaccuugugcuuucca

SEQ ID NO: 695569 - RNA, 19 nt, Artificial Sequence
  Description of Artificial Sequence: Synthetic oligonucleotide
ccccggucggccagaacca

SEQ ID NO: 695570 - RNA, 19 nt, Artificial Sequence
  Description of Artificial Sequence: Synthetic oligonucleotide
ggacucaauguggcgcacu

SEQ ID NO: 695571 - RNA, 19 nt, Artificial Sequence
  Description of Artificial Sequence: Synthetic oligonucleotide
gccccaguacaaaguugca

SEQ ID NO: 695572 - RNA, 19 nt, Artificial Sequence
  Description of Artificial Sequence: Synthetic oligonucleotide
acuccccggucggccagaa

SEQ ID NO: 695573 - RNA, 19 nt, Artificial Sequence
  Description of Artificial Sequence: Synthetic oligonucleotide
cccauagauggagggcgca

SEQ ID NO: 695574 - RNA, 19 nt, Artificial Sequence
  Description of Artificial Sequence: Synthetic oligonucleotide
cgguuagcucaccgacggc

SEQ ID NO: 695575 - RNA, 19 nt, Artificial Sequence
  Description of Artificial Sequence: Synthetic oligonucleotide
caugcgugcgugggccucu

SEQ ID NO: 695576 - RNA, 19 nt, Artificial Sequence
  Description of Artificial Sequence: Synthetic oligonucleotide
gccgggacucuccuggauu

SEQ ID NO: 695577 - RNA, 19 nt, Artificial Sequence
  Description of Artificial Sequence: Synthetic oligonucleotide
gccccaaagcgguugcguu

SEQ ID NO: 695578 - RNA, 19 nt, Artificial Sequence
  Description of Artificial Sequence: Synthetic oligonucleotide
cccggucggccagaaccag

SEQ ID NO: 695579 - RNA, 19 nt, Artificial Sequence
  Description of Artificial Sequence: Synthetic oligonucleotide
cgguugcguugauauguca

SEQ ID NO: 695580 - RNA, 19 nt, Artificial Sequence
  Description of Artificial Sequence: Synthetic oligonucleotide
ccgcugguacggaucagcu

SEQ ID NO: 695581 - RNA, 19 nt, Artificial Sequence
  Description of Artificial Sequence: Synthetic oligonucleotide
cagggguuccacgccguau

SEQ ID NO: 695582 - RNA, 19 nt, Artificial Sequence
  Description of Artificial Sequence: Synthetic oligonucleotide
gcgggcuugcagugaggua

SEQ ID NO: 695583 - RNA, 19 nt, Artificial Sequence
  Description of Artificial Sequence: Synthetic oligonucleotide
gcuacgcaugacacugaau

SEQ ID NO: 695584 - RNA, 19 nt, Artificial Sequence
  Description of Artificial Sequence: Synthetic oligonucleotide
gggugccgcugaacauaug

SEQ ID NO: 695585 - RNA, 19 nt, Artificial Sequence
  Description of Artificial Sequence: Synthetic oligonucleotide
cacuccccggucggccaga

SEQ ID NO: 695586 - RNA, 19 nt, Artificial Sequence
  Description of Artificial Sequence: Synthetic oligonucleotide
cccaguugacuggcacuca

SEQ ID NO: 695587 - RNA, 19 nt, Artificial Sequence
  Description of Artificial Sequence: Synthetic oligonucleotide
cugggucgacagugucccu

SEQ ID NO: 695588 - RNA, 19 nt, Artificial Sequence
  Description of Artificial Sequence: Synthetic oligonucleotide
cugaugcacccuggccagu

SEQ ID NO: 695589 - RNA, 19 nt, Artificial Sequence
  Description of Artificial Sequence: Synthetic oligonucleotide
caccgacggccacuuuguu

SEQ ID NO: 695590 - RNA, 19 nt, Artificial Sequence
  Description of Artificial Sequence: Synthetic oligonucleotide
gugagccaucguaguuauu

SEQ ID NO: 695591 - RNA, 19 nt, Artificial Sequence
  Description of Artificial Sequence: Synthetic oligonucleotide
ccaaagcgguugcguugau

SEQ ID NO: 695592 - RNA, 19 nt, Artificial Sequence
  Description of Artificial Sequence: Synthetic oligonucleotide
aauugaauuacugacagac

SEQ ID NO: 695593 - RNA, 19 nt, Artificial Sequence
  Description of Artificial Sequence: Synthetic oligonucleotide
uuugcuauuguuuuaaugc

SEQ ID NO: 695594 - RNA, 19 nt, Artificial Sequence
  Description of Artificial Sequence: Synthetic oligonucleotide
aaaacguguacucuucucc

SEQ ID NO: 695595 - RNA, 19 nt, Artificial Sequence
  Description of Artificial Sequence: Synthetic oligonucleotide
acauaauugaauuacugac

SEQ ID NO: 695596 - RNA, 19 nt, Artificial Sequence
  Description of Artificial Sequence: Synthetic oligonucleotide
uguaauauuuaauaaaacu

SEQ ID NO: 695597 - RNA, 19 nt, Artificial Sequence
  Description of Artificial Sequence: Synthetic oligonucleotide
ugaacuauagcucauuuug

SEQ ID NO: 695598 - RNA, 19 nt, Artificial Sequence
  Description of Artificial Sequence: Synthetic oligonucleotide
aauaugaaccuacaaauga

SEQ ID NO: 695599 - RNA, 19 nt, Artificial Sequence
  Description of Artificial Sequence: Synthetic oligonucleotide
auuacugacagacaugaac

SEQ ID NO: 695600 - RNA, 19 nt, Artificial Sequence
  Description of Artificial Sequence: Synthetic oligonucleotide
auucuaauuauaaauacac

SEQ ID NO: 695601 - RNA, 19 nt, Artificial Sequence
  Description of Artificial Sequence: Synthetic oligonucleotide
auaauugaauuacugacag

SEQ ID NO: 695602 - RNA, 19 nt, Artificial Sequence
  Description of Artificial Sequence: Synthetic oligonucleotide
uuaaaagagaguuccagca

SEQ ID NO: 695603 - RNA, 19 nt, Artificial Sequence
  Description of Artificial Sequence: Synthetic oligonucleotide
ucuugguugguuuagaaga

SEQ ID NO: 695604 - RNA, 19 nt, Artificial Sequence
  Description of Artificial Sequence: Synthetic oligonucleotide
uguacaauuaggaggcagg

SEQ ID NO: 695605 - RNA, 19 nt, Artificial Sequence
  Description of Artificial Sequence: Synthetic oligonucleotide
uuugccggccauaaaaugg

SEQ ID NO: 695606 - RNA, 19 nt, Artificial Sequence
  Description of Artificial Sequence: Synthetic oligonucleotide
aaguauauuaaaaugcuca

SEQ ID NO: 695607 - RNA, 19 nt, Artificial Sequence
  Description of Artificial Sequence: Synthetic oligonucleotide
acagacauaauugaauuac

SEQ ID NO: 695608 - RNA, 19 nt, Artificial Sequence
  Description of Artificial Sequence: Synthetic oligonucleotide
uucagauucccucagagaa

SEQ ID NO: 695609 - RNA, 19 nt, Artificial Sequence
  Description of Artificial Sequence: Synthetic oligonucleotide
uuuaaaagagaguuccagc

SEQ ID NO: 695610 - RNA, 19 nt, Artificial Sequence
  Description of Artificial Sequence: Synthetic oligonucleotide
guagcuugcaguaacaagg

SEQ ID NO: 695611 - RNA, 19 nt, Artificial Sequence
  Description of Artificial Sequence: Synthetic oligonucleotide
aguuucucagagcacagcg

SEQ ID NO: 695612 - RNA, 19 nt, Artificial Sequence
  Description of Artificial Sequence: Synthetic oligonucleotide
acuaaggaugcccuucucc

SEQ ID NO: 695613 - RNA, 19 nt, Artificial Sequence
  Description of Artificial Sequence: Synthetic oligonucleotide
uguaccugaaugcaaauuc

SEQ ID NO: 695614 - RNA, 19 nt, Artificial Sequence
  Description of Artificial Sequence: Synthetic oligonucleotide
aaaagagaguuccagcaga

SEQ ID NO: 695615 - RNA, 19 nt, Artificial Sequence
  Description of Artificial Sequence: Synthetic oligonucleotide
uguuuuaaugccuuaguuc

SEQ ID NO: 695616 - RNA, 19 nt, Artificial Sequence
  Description of Artificial Sequence: Synthetic oligonucleotide
uccauaaucgucuggauuc

SEQ ID NO: 695617 - RNA, 19 nt, Artificial Sequence
  Description of Artificial Sequence: Synthetic oligonucleotide
auugacaugccuaagaacu

SEQ ID NO: 695618 - RNA, 19 nt, Artificial Sequence
  Description of Artificial Sequence: Synthetic oligonucleotide
uucaaauggauccugcuuc

SEQ ID NO: 695619 - RNA, 19 nt, Artificial Sequence
  Description of Artificial Sequence: Synthetic oligonucleotide
acuuuaugugcacucaguc

SEQ ID NO: 695620 - RNA, 19 nt, Artificial Sequence
  Description of Artificial Sequence: Synthetic oligonucleotide
augaaaaccauaauuagca

SEQ ID NO: 695621 - RNA, 19 nt, Artificial Sequence
  Description of Artificial Sequence: Synthetic oligonucleotide
cauaauuagcacuauucug

SEQ ID NO: 695622 - RNA, 19 nt, Artificial Sequence
  Description of Artificial Sequence: Synthetic oligonucleotide
auaauuagcacuauucugu

SEQ ID NO: 695623 - RNA, 19 nt, Artificial Sequence
  Description of Artificial Sequence: Synthetic oligonucleotide
agcacuauucuguucauug

SEQ ID NO: 695624 - RNA, 19 nt, Artificial Sequence
  Description of Artificial Sequence: Synthetic oligonucleotide
ugugcuucacuucagcugu

SEQ ID NO: 695625 - RNA, 19 nt, Artificial Sequence
  Description of Artificial Sequence: Synthetic oligonucleotide
uaaaaccauacuuuaugug

SEQ ID NO: 695626 - RNA, 19 nt, Artificial Sequence
  Description of Artificial Sequence: Synthetic oligonucleotide
uacugcaagagacuuaagu

SEQ ID NO: 695627 - RNA, 19 nt, Artificial Sequence
  Description of Artificial Sequence: Synthetic oligonucleotide
uuaguucuugagaaaggcc

SEQ ID NO: 695628 - RNA, 19 nt, Artificial Sequence
  Description of Artificial Sequence: Synthetic oligonucleotide
ucuuaaguguaauauuuaa

SEQ ID NO: 695629 - RNA, 19 nt, Artificial Sequence
  Description of Artificial Sequence: Synthetic oligonucleotide
ucccucuuuaauaaaauau

SEQ ID NO: 695630 - RNA, 19 nt, Artificial Sequence
  Description of Artificial Sequence: Synthetic oligonucleotide
aucucauacugacaugaac

SEQ ID NO: 695631 - RNA, 19 nt, Artificial Sequence
  Description of Artificial Sequence: Synthetic oligonucleotide
agaggagaaccucauuugg

SEQ ID NO: 695632 - RNA, 19 nt, Artificial Sequence
  Description of Artificial Sequence: Synthetic oligonucleotide
uagaagaucagugaauacu

SEQ ID NO: 695633 - RNA, 19 nt, Artificial Sequence
  Description of Artificial Sequence: Synthetic oligonucleotide
uucuaauuauaaauacacu

SEQ ID NO: 695634 - RNA, 19 nt, Artificial Sequence
  Description of Artificial Sequence: Synthetic oligonucleotide
ugugacucggugcaguuug

SEQ ID NO: 695635 - RNA, 19 nt, Artificial Sequence
  Description of Artificial Sequence: Synthetic oligonucleotide
uauuguuuuaaugccuuag

SEQ ID NO: 695636 - RNA, 19 nt, Artificial Sequence
  Description of Artificial Sequence: Synthetic oligonucleotide
ugaugugucaacacugacu

SEQ ID NO: 695637 - RNA, 19 nt, Artificial Sequence
  Description of Artificial Sequence: Synthetic oligonucleotide
aaccauacuuuaugugcac

SEQ ID NO: 695638 - RNA, 19 nt, Artificial Sequence
  Description of Artificial Sequence: Synthetic oligonucleotide
uugugauaaacccagccau

SEQ ID NO: 695639 - RNA, 19 nt, Artificial Sequence
  Description of Artificial Sequence: Synthetic oligonucleotide
cuuagugugaaaagugaug

SEQ ID NO: 695640 - RNA, 19 nt, Artificial Sequence
  Description of Artificial Sequence: Synthetic oligonucleotide
uccaacagacuaaggaugc

SEQ ID NO: 695641 - RNA, 19 nt, Artificial Sequence
  Description of Artificial Sequence: Synthetic oligonucleotide
ucuuagaaagcauguguca

SEQ ID NO: 695642 - RNA, 19 nt, Artificial Sequence
  Description of Artificial Sequence: Synthetic oligonucleotide
uaugaaccuacaaaugaaa

SEQ ID NO: 695643 - RNA, 19 nt, Artificial Sequence
  Description of Artificial Sequence: Synthetic oligonucleotide
aguguaauauuuaauaaaa

SEQ ID NO: 695644 - RNA, 19 nt, Artificial Sequence
  Description of Artificial Sequence: Synthetic oligonucleotide
ugguugguuuagaagauca

SEQ ID NO: 695645 - RNA, 19 nt, Artificial Sequence
  Description of Artificial Sequence: Synthetic oligonucleotide
uuuagaagaucagugaaua

SEQ ID NO: 695646 - RNA, 19 nt, Artificial Sequence
  Description of Artificial Sequence: Synthetic oligonucleotide
ugaaccuacaaaugaaaau

SEQ ID NO: 695647 - RNA, 19 nt, Artificial Sequence
  Description of Artificial Sequence: Synthetic oligonucleotide
aaagcaugugucacucugc

SEQ ID NO: 695648 - RNA, 19 nt, Artificial Sequence
  Description of Artificial Sequence: Synthetic oligonucleotide
uagcuugcaguaacaaggg

SEQ ID NO: 695649 - RNA, 19 nt, Artificial Sequence
  Description of Artificial Sequence: Synthetic oligonucleotide
aaggacuccgucugagagg

SEQ ID NO: 695650 - RNA, 19 nt, Artificial Sequence
  Description of Artificial Sequence: Synthetic oligonucleotide
cauaauugaauuacugaca

SEQ ID NO: 695651 - RNA, 19 nt, Artificial Sequence
  Description of Artificial Sequence: Synthetic oligonucleotide
uccuuuuaacccuucuaag

SEQ ID NO: 695652 - RNA, 19 nt, Artificial Sequence
  Description of Artificial Sequence: Synthetic oligonucleotide
agugcaaggacuccgucug

SEQ ID NO: 695653 - RNA, 19 nt, Artificial Sequence
  Description of Artificial Sequence: Synthetic oligonucleotide
agugugaaaagugaugcug

SEQ ID NO: 695654 - RNA, 19 nt, Artificial Sequence
  Description of Artificial Sequence: Synthetic oligonucleotide
uggugaugugucaacacug

SEQ ID NO: 695655 - RNA, 19 nt, Artificial Sequence
  Description of Artificial Sequence: Synthetic oligonucleotide
aaacuuacucaggauagca

SEQ ID NO: 695656 - RNA, 19 nt, Artificial Sequence
  Description of Artificial Sequence: Synthetic oligonucleotide
ugguuuagaagaucaguga

SEQ ID NO: 695657 - RNA, 19 nt, Artificial Sequence
  Description of Artificial Sequence: Synthetic oligonucleotide
acacaugaacuauagcuca

SEQ ID NO: 695658 - RNA, 19 nt, Artificial Sequence
  Description of Artificial Sequence: Synthetic oligonucleotide
aaccucauuugguccaauc

SEQ ID NO: 695659 - RNA, 19 nt, Artificial Sequence
  Description of Artificial Sequence: Synthetic oligonucleotide
uaauuuacaaugugcugaa

SEQ ID NO: 695660 - RNA, 19 nt, Artificial Sequence
  Description of Artificial Sequence: Synthetic oligonucleotide
uggcugaauccacuuauag

SEQ ID NO: 695661 - RNA, 19 nt, Artificial Sequence
  Description of Artificial Sequence: Synthetic oligonucleotide
accccaauaaaauaccuau

SEQ ID NO: 695662 - RNA, 19 nt, Artificial Sequence
  Description of Artificial Sequence: Synthetic oligonucleotide
ugucucuuaaguguaauau

SEQ ID NO: 695663 - RNA, 19 nt, Artificial Sequence
  Description of Artificial Sequence: Synthetic oligonucleotide
cuuugcacaguugacgccg

SEQ ID NO: 695664 - RNA, 19 nt, Artificial Sequence
  Description of Artificial Sequence: Synthetic oligonucleotide
gaagguagcuugcaguaac

SEQ ID NO: 695665 - RNA, 19 nt, Artificial Sequence
  Description of Artificial Sequence: Synthetic oligonucleotide
ugcuauuguuuuaaugccu

SEQ ID NO: 695666 - RNA, 19 nt, Artificial Sequence
  Description of Artificial Sequence: Synthetic oligonucleotide
uuuacacacgggaucccag

SEQ ID NO: 695667 - RNA, 19 nt, Artificial Sequence
  Description of Artificial Sequence: Synthetic oligonucleotide
uuggugaugugucaacacu

SEQ ID NO: 695668 - RNA, 19 nt, Artificial Sequence
  Description of Artificial Sequence: Synthetic oligonucleotide
augccuaagaacuugcuuu

SEQ ID NO: 695669 - RNA, 19 nt, Artificial Sequence
  Description of Artificial Sequence: Synthetic oligonucleotide
uuguuuuaaugccuuaguu

SEQ ID NO: 695670 - RNA, 19 nt, Artificial Sequence
  Description of Artificial Sequence: Synthetic oligonucleotide
aaagaggccuuggugaugu

SEQ ID NO: 695671 - RNA, 19 nt, Artificial Sequence
  Description of Artificial Sequence: Synthetic oligonucleotide
uuaacccuucuaagaaaag

SEQ ID NO: 695672 - RNA, 19 nt, Artificial Sequence
  Description of Artificial Sequence: Synthetic oligonucleotide
gucacggcaaguuugguca

SEQ ID NO: 695673 - RNA, 19 nt, Artificial Sequence
  Description of Artificial Sequence: Synthetic oligonucleotide
aauccacuuauaggucacc

SEQ ID NO: 695674 - RNA, 19 nt, Artificial Sequence
  Description of Artificial Sequence: Synthetic oligonucleotide
ugcacucagucacagacau

SEQ ID NO: 695675 - RNA, 19 nt, Artificial Sequence
  Description of Artificial Sequence: Synthetic oligonucleotide
guacguuugugcucugugg

SEQ ID NO: 695676 - RNA, 19 nt, Artificial Sequence
  Description of Artificial Sequence: Synthetic oligonucleotide
cuaguuccacccaaggaac

SEQ ID NO: 695677 - RNA, 19 nt, Artificial Sequence
  Description of Artificial Sequence: Synthetic oligonucleotide
acaauucuaauuauaaaua

SEQ ID NO: 695678 - RNA, 19 nt, Artificial Sequence
  Description of Artificial Sequence: Synthetic oligonucleotide
acagugagaauggaucgcg

SEQ ID NO: 695679 - RNA, 19 nt, Artificial Sequence
  Description of Artificial Sequence: Synthetic oligonucleotide
ccaauuuguaccugaaugc

SEQ ID NO: 695680 - RNA, 19 nt, Artificial Sequence
  Description of Artificial Sequence: Synthetic oligonucleotide
uugccggccauaaaauggc

SEQ ID NO: 695681 - RNA, 19 nt, Artificial Sequence
  Description of Artificial Sequence: Synthetic oligonucleotide
acgggauuacuuuccaaag

SEQ ID NO: 695682 - RNA, 19 nt, Artificial Sequence
  Description of Artificial Sequence: Synthetic oligonucleotide
uggcguuccuccaagguac

SEQ ID NO: 695683 - RNA, 19 nt, Artificial Sequence
  Description of Artificial Sequence: Synthetic oligonucleotide
uacuuuaugugcacucagu

SEQ ID NO: 695684 - RNA, 19 nt, Artificial Sequence
  Description of Artificial Sequence: Synthetic oligonucleotide
uugggguacacagaggaga

SEQ ID NO: 695685 - RNA, 19 nt, Artificial Sequence
  Description of Artificial Sequence: Synthetic oligonucleotide
caaggacuccgucugagag

SEQ ID NO: 695686 - RNA, 19 nt, Artificial Sequence
  Description of Artificial Sequence: Synthetic oligonucleotide
acacacgggaucccagacc

SEQ ID NO: 695687 - RNA, 19 nt, Artificial Sequence
  Description of Artificial Sequence: Synthetic oligonucleotide
uuuaguccgaugucuuucu

SEQ ID NO: 695688 - RNA, 19 nt, Artificial Sequence
  Description of Artificial Sequence: Synthetic oligonucleotide
agacauaauugaauuacug

SEQ ID NO: 695689 - RNA, 19 nt, Artificial Sequence
  Description of Artificial Sequence: Synthetic oligonucleotide
aggugcauguugcacgccg

SEQ ID NO: 695690 - RNA, 19 nt, Artificial Sequence
  Description of Artificial Sequence: Synthetic oligonucleotide
uacugaauaugaaccuaca

SEQ ID NO: 695691 - RNA, 19 nt, Artificial Sequence
  Description of Artificial Sequence: Synthetic oligonucleotide
ugugauaaacccagccauc

SEQ ID NO: 695692 - RNA, 19 nt, Artificial Sequence
  Description of Artificial Sequence: Synthetic oligonucleotide
gucacaccuauugacaugc

SEQ ID NO: 695693 - RNA, 19 nt, Artificial Sequence
  Description of Artificial Sequence: Synthetic oligonucleotide
cucuugguugguuuagaag

SEQ ID NO: 695694 - RNA, 19 nt, Artificial Sequence
  Description of Artificial Sequence: Synthetic oligonucleotide
gacucggugcaguuugccg

SEQ ID NO: 695695 - RNA, 19 nt, Artificial Sequence
  Description of Artificial Sequence: Synthetic oligonucleotide
accuucgucucccucuugg

SEQ ID NO: 695696 - RNA, 19 nt, Artificial Sequence
  Description of Artificial Sequence: Synthetic oligonucleotide
uugacgccgacuuugccac

SEQ ID NO: 695697 - RNA, 19 nt, Artificial Sequence
  Description of Artificial Sequence: Synthetic oligonucleotide
uuuuaguccgaugucuuuc

SEQ ID NO: 695698 - RNA, 19 nt, Artificial Sequence
  Description of Artificial Sequence: Synthetic oligonucleotide
uacuucgucuccccguugc

SEQ ID NO: 695699 - RNA, 19 nt, Artificial Sequence
  Description of Artificial Sequence: Synthetic oligonucleotide
auaggucaccuucgucucc

SEQ ID NO: 695700 - RNA, 19 nt, Artificial Sequence
  Description of Artificial Sequence: Synthetic oligonucleotide
gacuuaaguuuucaauaca

SEQ ID NO: 695701 - RNA, 19 nt, Artificial Sequence
  Description of Artificial Sequence: Synthetic oligonucleotide
gacgggauuacuuuccaaa

SEQ ID NO: 695702 - RNA, 19 nt, Artificial Sequence
  Description of Artificial Sequence: Synthetic oligonucleotide
gcugaauccacuuauaggu

SEQ ID NO: 695703 - RNA, 19 nt, Artificial Sequence
  Description of Artificial Sequence: Synthetic oligonucleotide
uggaucgcgcauaugcaca

SEQ ID NO: 695704 - RNA, 19 nt, Artificial Sequence
  Description of Artificial Sequence: Synthetic oligonucleotide
gaaaacguguacucuucuc

SEQ ID NO: 695705 - RNA, 19 nt, Artificial Sequence
  Description of Artificial Sequence: Synthetic oligonucleotide
cuuuaugugcacucaguca

SEQ ID NO: 695706 - RNA, 19 nt, Artificial Sequence
  Description of Artificial Sequence: Synthetic oligonucleotide
uauaggucaccuucgucuc

SEQ ID NO: 695707 - RNA, 19 nt, Artificial Sequence
  Description of Artificial Sequence: Synthetic oligonucleotide
uaauugaauuacugacaga

SEQ ID NO: 695708 - RNA, 19 nt, Artificial Sequence
  Description of Artificial Sequence: Synthetic oligonucleotide
aacagacuaaggaugcccu

SEQ ID NO: 695709 - RNA, 19 nt, Artificial Sequence
  Description of Artificial Sequence: Synthetic oligonucleotide
uguuuuaguccgaugucuu

SEQ ID NO: 695710 - RNA, 19 nt, Artificial Sequence
  Description of Artificial Sequence: Synthetic oligonucleotide
cucaggauagcacauaaua

SEQ ID NO: 695711 - RNA, 19 nt, Artificial Sequence
  Description of Artificial Sequence: Synthetic oligonucleotide
acaguugacgccgacuuug

SEQ ID NO: 695712 - RNA, 19 nt, Artificial Sequence
  Description of Artificial Sequence: Synthetic oligonucleotide
aguugacgccgacuuugcc

SEQ ID NO: 695713 - RNA, 19 nt, Artificial Sequence
  Description of Artificial Sequence: Synthetic oligonucleotide
aaccauaauuagcacuauu

SEQ ID NO: 695714 - RNA, 19 nt, Artificial Sequence
  Description of Artificial Sequence: Synthetic oligonucleotide
ugacaugccuaagaacuug

SEQ ID NO: 695715 - RNA, 19 nt, Artificial Sequence
  Description of Artificial Sequence: Synthetic oligonucleotide
uagaaagcaugugucacuc

SEQ ID NO: 695716 - RNA, 19 nt, Artificial Sequence
  Description of Artificial Sequence: Synthetic oligonucleotide
acuuuugaguaaacagagg

SEQ ID NO: 695717 - RNA, 19 nt, Artificial Sequence
  Description of Artificial Sequence: Synthetic oligonucleotide
gcaaacuuacucaggauag

SEQ ID NO: 695718 - RNA, 19 nt, Artificial Sequence
  Description of Artificial Sequence: Synthetic oligonucleotide
guugacgccgacuuugcca

SEQ ID NO: 695719 - RNA, 19 nt, Artificial Sequence
  Description of Artificial Sequence: Synthetic oligonucleotide
guaccugaaugcaaauucc

SEQ ID NO: 695720 - RNA, 19 nt, Artificial Sequence
  Description of Artificial Sequence: Synthetic oligonucleotide
auaugcacacggcagggaa

SEQ ID NO: 695721 - RNA, 19 nt, Artificial Sequence
  Description of Artificial Sequence: Synthetic oligonucleotide
caugcuccaacagacuaag

SEQ ID NO: 695722 - RNA, 19 nt, Artificial Sequence
  Description of Artificial Sequence: Synthetic oligonucleotide
uuacacacgggaucccaga

SEQ ID NO: 695723 - RNA, 19 nt, Artificial Sequence
  Description of Artificial Sequence: Synthetic oligonucleotide
ucgucucccucuugguugg

SEQ ID NO: 695724 - RNA, 19 nt, Artificial Sequence
  Description of Artificial Sequence: Synthetic oligonucleotide
uccccguugcuguagguga

SEQ ID NO: 695725 - RNA, 19 nt, Artificial Sequence
  Description of Artificial Sequence: Synthetic oligonucleotide
auuuguaccugaaugcaaa

SEQ ID NO: 695726 - RNA, 19 nt, Artificial Sequence
  Description of Artificial Sequence: Synthetic oligonucleotide
guuugccggccauaaaaug

SEQ ID NO: 695727 - RNA, 19 nt, Artificial Sequence
  Description of Artificial Sequence: Synthetic oligonucleotide
auaugaaccuacaaaugaa

SEQ ID NO: 695728 - RNA, 19 nt, Artificial Sequence
  Description of Artificial Sequence: Synthetic oligonucleotide
uugcacgccgacuggaaga

SEQ ID NO: 695729 - RNA, 19 nt, Artificial Sequence
  Description of Artificial Sequence: Synthetic oligonucleotide
ugucacggcaaguuugguc

SEQ ID NO: 695730 - RNA, 19 nt, Artificial Sequence
  Description of Artificial Sequence: Synthetic oligonucleotide
uucgucuccccguugcugu

SEQ ID NO: 695731 - RNA, 19 nt, Artificial Sequence
  Description of Artificial Sequence: Synthetic oligonucleotide
aggguaaggcaccacucug

SEQ ID NO: 695732 - RNA, 19 nt, Artificial Sequence
  Description of Artificial Sequence: Synthetic oligonucleotide
ggguuugugauaaacccag

SEQ ID NO: 695733 - RNA, 19 nt, Artificial Sequence
  Description of Artificial Sequence: Synthetic oligonucleotide
guaacaagggucagcacca

SEQ ID NO: 695734 - RNA, 19 nt, Artificial Sequence
  Description of Artificial Sequence: Synthetic oligonucleotide
agacuaaggaugcccuucu

SEQ ID NO: 695735 - RNA, 19 nt, Artificial Sequence
  Description of Artificial Sequence: Synthetic oligonucleotide
uacacacgggaucccagac

SEQ ID NO: 695736 - RNA, 19 nt, Artificial Sequence
  Description of Artificial Sequence: Synthetic oligonucleotide
ugcaguaacaagggucagc

SEQ ID NO: 695737 - RNA, 19 nt, Artificial Sequence
  Description of Artificial Sequence: Synthetic oligonucleotide
aacguguacucuucuccau

SEQ ID NO: 695738 - RNA, 19 nt, Artificial Sequence
  Description of Artificial Sequence: Synthetic oligonucleotide
uuuguaccugaaugcaaau

SEQ ID NO: 695739 - RNA, 19 nt, Artificial Sequence
  Description of Artificial Sequence: Synthetic oligonucleotide
gacuccgucugagaggggc

SEQ ID NO: 695740 - RNA, 19 nt, Artificial Sequence
  Description of Artificial Sequence: Synthetic oligonucleotide
aaguuuggucagguccacg

SEQ ID NO: 695741 - RNA, 19 nt, Artificial Sequence
  Description of Artificial Sequence: Synthetic oligonucleotide
caaacuuacucaggauagc

SEQ ID NO: 695742 - RNA, 19 nt, Artificial Sequence
  Description of Artificial Sequence: Synthetic oligonucleotide
uugacaugccuaagaacuu

SEQ ID NO: 695743 - RNA, 19 nt, Artificial Sequence
  Description of Artificial Sequence: Synthetic oligonucleotide
ugguuacaauucuaauuau

SEQ ID NO: 695744 - RNA, 19 nt, Artificial Sequence
  Description of Artificial Sequence: Synthetic oligonucleotide
gguccaaucuuagaaagca

SEQ ID NO: 695745 - RNA, 19 nt, Artificial Sequence
  Description of Artificial Sequence: Synthetic oligonucleotide
uuuccauaaucgucuggau

SEQ ID NO: 695746 - RNA, 19 nt, Artificial Sequence
  Description of Artificial Sequence: Synthetic oligonucleotide
ccccguacaaaccaggggc

SEQ ID NO: 695747 - RNA, 19 nt, Artificial Sequence
  Description of Artificial Sequence: Synthetic oligonucleotide
uuaguccacacaugugcau

SEQ ID NO: 695748 - RNA, 19 nt, Artificial Sequence
  Description of Artificial Sequence: Synthetic oligonucleotide
cuuaaguguaauauuuaau

SEQ ID NO: 695749 - RNA, 19 nt, Artificial Sequence
  Description of Artificial Sequence: Synthetic oligonucleotide
guugcacgccgacuggaag

SEQ ID NO: 695750 - RNA, 19 nt, Artificial Sequence
  Description of Artificial Sequence: Synthetic oligonucleotide
caugguuacaauucuaauu

SEQ ID NO: 695751 - RNA, 19 nt, Artificial Sequence
  Description of Artificial Sequence: Synthetic oligonucleotide
ugagaauggaucgcgcaua

SEQ ID NO: 695752 - RNA, 19 nt, Artificial Sequence
  Description of Artificial Sequence: Synthetic oligonucleotide
augaaccuacaaaugaaaa

SEQ ID NO: 695753 - RNA, 19 nt, Artificial Sequence
  Description of Artificial Sequence: Synthetic oligonucleotide
ugccuaagaacuugcuuuu

SEQ ID NO: 695754 - RNA, 19 nt, Artificial Sequence
  Description of Artificial Sequence: Synthetic oligonucleotide
guuucucagagcacagcgc

SEQ ID NO: 695755 - RNA, 19 nt, Artificial Sequence
  Description of Artificial Sequence: Synthetic oligonucleotide
gguacguuugugcucugug

SEQ ID NO: 695756 - RNA, 19 nt, Artificial Sequence
  Description of Artificial Sequence: Synthetic oligonucleotide
caguuugccggccauaaaa

SEQ ID NO: 695757 - RNA, 19 nt, Artificial Sequence
  Description of Artificial Sequence: Synthetic oligonucleotide
uucccaacacaugaacuau

SEQ ID NO: 695758 - RNA, 19 nt, Artificial Sequence
  Description of Artificial Sequence: Synthetic oligonucleotide
cacuucagcugugacucgg

SEQ ID NO: 695759 - RNA, 19 nt, Artificial Sequence
  Description of Artificial Sequence: Synthetic oligonucleotide
aaccccaauaaaauaccua

SEQ ID NO: 695760 - RNA, 19 nt, Artificial Sequence
  Description of Artificial Sequence: Synthetic oligonucleotide
acaccuauugacaugccua

SEQ ID NO: 695761 - RNA, 19 nt, Artificial Sequence
  Description of Artificial Sequence: Synthetic oligonucleotide
cagugagaauggaucgcgc

SEQ ID NO: 695762 - RNA, 19 nt, Artificial Sequence
  Description of Artificial Sequence: Synthetic oligonucleotide
cagugaagguagcuugcag

SEQ ID NO: 695763 - RNA, 19 nt, Artificial Sequence
  Description of Artificial Sequence: Synthetic oligonucleotide
gggugccuguuuuaguccg

SEQ ID NO: 695764 - RNA, 19 nt, Artificial Sequence
  Description of Artificial Sequence: Synthetic oligonucleotide
uccacuuauaggucaccuu

SEQ ID NO: 695765 - RNA, 19 nt, Artificial Sequence
  Description of Artificial Sequence: Synthetic oligonucleotide
ucccaacacaugaacuaua

SEQ ID NO: 695766 - RNA, 19 nt, Artificial Sequence
  Description of Artificial Sequence: Synthetic oligonucleotide
ucacggcaaguuuggucag

SEQ ID NO: 695767 - RNA, 19 nt, Artificial Sequence
  Description of Artificial Sequence: Synthetic oligonucleotide
agaaagcaugugucacucu

SEQ ID NO: 695768 - RNA, 19 nt, Artificial Sequence
  Description of Artificial Sequence: Synthetic oligonucleotide
uggcugaguagccugucuu

SEQ ID NO: 695769 - RNA, 19 nt, Artificial Sequence
  Description of Artificial Sequence: Synthetic oligonucleotide
ucgcgcauaugcacacggc

SEQ ID NO: 695770 - RNA, 19 nt, Artificial Sequence
  Description of Artificial Sequence: Synthetic oligonucleotide
caguugacgccgacuuugc

SEQ ID NO: 695771 - RNA, 19 nt, Artificial Sequence
  Description of Artificial Sequence: Synthetic oligonucleotide
gugacauugugcuucacuu

SEQ ID NO: 695772 - RNA, 19 nt, Artificial Sequence
  Description of Artificial Sequence: Synthetic oligonucleotide
ucacaccuauugacaugcc

SEQ ID NO: 695773 - RNA, 19 nt, Artificial Sequence
  Description of Artificial Sequence: Synthetic oligonucleotide
ggucagauaaagcaaacuu

SEQ ID NO: 695774 - RNA, 19 nt, Artificial Sequence
  Description of Artificial Sequence: Synthetic oligonucleotide
uuguaccugaaugcaaauu

SEQ ID NO: 695775 - RNA, 19 nt, Artificial Sequence
  Description of Artificial Sequence: Synthetic oligonucleotide
aguuugccggccauaaaau

SEQ ID NO: 695776 - RNA, 19 nt, Artificial Sequence
  Description of Artificial Sequence: Synthetic oligonucleotide
cacagcgcagccgacuggc

SEQ ID NO: 695777 - RNA, 19 nt, Artificial Sequence
  Description of Artificial Sequence: Synthetic oligonucleotide
agcuugcaguaacaagggu

SEQ ID NO: 695778 - RNA, 19 nt, Artificial Sequence
  Description of Artificial Sequence: Synthetic oligonucleotide
ccauacuuuaugugcacuc

SEQ ID NO: 695779 - RNA, 19 nt, Artificial Sequence
  Description of Artificial Sequence: Synthetic oligonucleotide
accauacuuuaugugcacu

SEQ ID NO: 695780 - RNA, 19 nt, Artificial Sequence
  Description of Artificial Sequence: Synthetic oligonucleotide
gcagggaaaacguguacuc

SEQ ID NO: 695781 - RNA, 19 nt, Artificial Sequence
  Description of Artificial Sequence: Synthetic oligonucleotide
gaucgcgcauaugcacacg

SEQ ID NO: 695782 - RNA, 19 nt, Artificial Sequence
  Description of Artificial Sequence: Synthetic oligonucleotide
caagagacuuaaguuuuca

SEQ ID NO: 695783 - RNA, 19 nt, Artificial Sequence
  Description of Artificial Sequence: Synthetic oligonucleotide
ggaggaaaagaggccuugg

SEQ ID NO: 695784 - RNA, 19 nt, Artificial Sequence
  Description of Artificial Sequence: Synthetic oligonucleotide
cugguugugacgggauuac

SEQ ID NO: 695785 - RNA, 19 nt, Artificial Sequence
  Description of Artificial Sequence: Synthetic oligonucleotide
uucgguucucuggcguucc

SEQ ID NO: 695786 - RNA, 19 nt, Artificial Sequence
  Description of Artificial Sequence: Synthetic oligonucleotide
uuacucaggauagcacaua

SEQ ID NO: 695787 - RNA, 19 nt, Artificial Sequence
  Description of Artificial Sequence: Synthetic oligonucleotide
ugcacgccgacuggaagac

SEQ ID NO: 695788 - RNA, 19 nt, Artificial Sequence
  Description of Artificial Sequence: Synthetic oligonucleotide
ucuucgguucucuggcguu

SEQ ID NO: 695789 - RNA, 19 nt, Artificial Sequence
  Description of Artificial Sequence: Synthetic oligonucleotide
ugccuguuuuaguccgaug

SEQ ID NO: 695790 - RNA, 19 nt, Artificial Sequence
  Description of Artificial Sequence: Synthetic oligonucleotide
uugcaguaacaagggucag

SEQ ID NO: 695791 - RNA, 19 nt, Artificial Sequence
  Description of Artificial Sequence: Synthetic oligonucleotide
cagacauaauugaauuacu

SEQ ID NO: 695792 - RNA, 19 nt, Artificial Sequence
  Description of Artificial Sequence: Synthetic oligonucleotide
acagacuaaggaugcccuu

SEQ ID NO: 695793 - RNA, 19 nt, Artificial Sequence
  Description of Artificial Sequence: Synthetic oligonucleotide
ucaggcacgauggcugaau

SEQ ID NO: 695794 - RNA, 19 nt, Artificial Sequence
  Description of Artificial Sequence: Synthetic oligonucleotide
ugccggccauaaaauggcu

SEQ ID NO: 695795 - RNA, 19 nt, Artificial Sequence
  Description of Artificial Sequence: Synthetic oligonucleotide
acuggcacggcugcugagu

SEQ ID NO: 695796 - RNA, 19 nt, Artificial Sequence
  Description of Artificial Sequence: Synthetic oligonucleotide
caagguacguuugugcucu

SEQ ID NO: 695797 - RNA, 19 nt, Artificial Sequence
  Description of Artificial Sequence: Synthetic oligonucleotide
cgggauuacuuuccaaagg

SEQ ID NO: 695798 - RNA, 19 nt, Artificial Sequence
  Description of Artificial Sequence: Synthetic oligonucleotide
acaugaacuauagcucauu

SEQ ID NO: 695799 - RNA, 19 nt, Artificial Sequence
  Description of Artificial Sequence: Synthetic oligonucleotide
augcacacggcagggaaaa

SEQ ID NO: 695800 - RNA, 19 nt, Artificial Sequence
  Description of Artificial Sequence: Synthetic oligonucleotide
ugcugguugugacgggauu

SEQ ID NO: 695801 - RNA, 19 nt, Artificial Sequence
  Description of Artificial Sequence: Synthetic oligonucleotide
ggauagcacauaauacuga

SEQ ID NO: 695802 - RNA, 19 nt, Artificial Sequence
  Description of Artificial Sequence: Synthetic oligonucleotide
augaacaaguuuaguuuua

SEQ ID NO: 695803 - RNA, 19 nt, Artificial Sequence
  Description of Artificial Sequence: Synthetic oligonucleotide
acggcaaguuuggucaggu

SEQ ID NO: 695804 - RNA, 19 nt, Artificial Sequence
  Description of Artificial Sequence: Synthetic oligonucleotide
aggccuuggugauguguca

SEQ ID NO: 695805 - RNA, 19 nt, Artificial Sequence
  Description of Artificial Sequence: Synthetic oligonucleotide
gaggagaaccucauuuggu

SEQ ID NO: 695806 - RNA, 19 nt, Artificial Sequence
  Description of Artificial Sequence: Synthetic oligonucleotide
aagguacguuugugcucug

SEQ ID NO: 695807 - RNA, 19 nt, Artificial Sequence
  Description of Artificial Sequence: Synthetic oligonucleotide
cuguuuuaguccgaugucu

SEQ ID NO: 695808 - RNA, 19 nt, Artificial Sequence
  Description of Artificial Sequence: Synthetic oligonucleotide
cacacggcagggaaaacgu

SEQ ID NO: 695809 - RNA, 19 nt, Artificial Sequence
  Description of Artificial Sequence: Synthetic oligonucleotide
ggggugccuguuuuagucc

SEQ ID NO: 695810 - RNA, 19 nt, Artificial Sequence
  Description of Artificial Sequence: Synthetic oligonucleotide
ccauaaaauggcuuagugu

SEQ ID NO: 695811 - RNA, 19 nt, Artificial Sequence
  Description of Artificial Sequence: Synthetic oligonucleotide
ggaucgcgcauaugcacac

SEQ ID NO: 695812 - RNA, 19 nt, Artificial Sequence
  Description of Artificial Sequence: Synthetic oligonucleotide
gagaauggaucgcgcauau

SEQ ID NO: 695813 - RNA, 19 nt, Artificial Sequence
  Description of Artificial Sequence: Synthetic oligonucleotide
ggugaugugucaacacuga

SEQ ID NO: 695814 - RNA, 19 nt, Artificial Sequence
  Description of Artificial Sequence: Synthetic oligonucleotide
agguagcuugcaguaacaa

SEQ ID NO: 695815 - RNA, 19 nt, Artificial Sequence
  Description of Artificial Sequence: Synthetic oligonucleotide
gugcauguugcacgccgac

SEQ ID NO: 695816 - RNA, 19 nt, Artificial Sequence
  Description of Artificial Sequence: Synthetic oligonucleotide
acaugccuaagaacuugcu

SEQ ID NO: 695817 - RNA, 19 nt, Artificial Sequence
  Description of Artificial Sequence: Synthetic oligonucleotide
guacaauuaggaggcaggu

SEQ ID NO: 695818 - RNA, 19 nt, Artificial Sequence
  Description of Artificial Sequence: Synthetic oligonucleotide
caggcacgauggcugaauc

SEQ ID NO: 695819 - RNA, 19 nt, Artificial Sequence
  Description of Artificial Sequence: Synthetic oligonucleotide
uaacaagggucagcaccac

SEQ ID NO: 695820 - RNA, 19 nt, Artificial Sequence
  Description of Artificial Sequence: Synthetic oligonucleotide
gcgcauaugcacacggcag

SEQ ID NO: 695821 - RNA, 19 nt, Artificial Sequence
  Description of Artificial Sequence: Synthetic oligonucleotide
ggugacauugugcuucacu

SEQ ID NO: 695822 - RNA, 19 nt, Artificial Sequence
  Description of Artificial Sequence: Synthetic oligonucleotide
cacggcaaguuuggucagg

SEQ ID NO: 695823 - RNA, 19 nt, Artificial Sequence
  Description of Artificial Sequence: Synthetic oligonucleotide
gcuccaacagacuaaggau

SEQ ID NO: 695824 - RNA, 19 nt, Artificial Sequence
  Description of Artificial Sequence: Synthetic oligonucleotide
uugcacaguugacgccgac

SEQ ID NO: 695825 - RNA, 19 nt, Artificial Sequence
  Description of Artificial Sequence: Synthetic oligonucleotide
cagcgcagccgacuggcac

SEQ ID NO: 695826 - RNA, 19 nt, Artificial Sequence
  Description of Artificial Sequence: Synthetic oligonucleotide
auguugcacgccgacugga

SEQ ID NO: 695827 - RNA, 19 nt, Artificial Sequence
  Description of Artificial Sequence: Synthetic oligonucleotide
cuggcguuccuccaaggua

SEQ ID NO: 695828 - RNA, 19 nt, Artificial Sequence
  Description of Artificial Sequence: Synthetic oligonucleotide
gucacucagugcaaggacu

SEQ ID NO: 695829 - RNA, 19 nt, Artificial Sequence
  Description of Artificial Sequence: Synthetic oligonucleotide
ccgacuggaagaccacggg

SEQ ID NO: 695830 - RNA, 19 nt, Artificial Sequence
  Description of Artificial Sequence: Synthetic oligonucleotide
ccaagguacguuugugcuc

SEQ ID NO: 695831 - RNA, 19 nt, Artificial Sequence
  Description of Artificial Sequence: Synthetic oligonucleotide
cuucgguucucuggcguuc

SEQ ID NO: 695832 - RNA, 19 nt, Artificial Sequence
  Description of Artificial Sequence: Synthetic oligonucleotide
uccgucugagaggggcuug

SEQ ID NO: 695833 - RNA, 19 nt, Artificial Sequence
  Description of Artificial Sequence: Synthetic oligonucleotide
guacaaaccaggggcucga

SEQ ID NO: 695834 - RNA, 19 nt, Artificial Sequence
  Description of Artificial Sequence: Synthetic oligonucleotide
caaauggauccugcuucuc

SEQ ID NO: 695835 - RNA, 19 nt, Artificial Sequence
  Description of Artificial Sequence: Synthetic oligonucleotide
guacuucgucuccccguug

SEQ ID NO: 695836 - RNA, 19 nt, Artificial Sequence
  Description of Artificial Sequence: Synthetic oligonucleotide
uggcacggcugcugaguga

SEQ ID NO: 695837 - RNA, 19 nt, Artificial Sequence
  Description of Artificial Sequence: Synthetic oligonucleotide
cuuugccaccuaguuccac

SEQ ID NO: 695838 - RNA, 19 nt, Artificial Sequence
  Description of Artificial Sequence: Synthetic oligonucleotide
ucgguucucuggcguuccu

SEQ ID NO: 695839 - RNA, 19 nt, Artificial Sequence
  Description of Artificial Sequence: Synthetic oligonucleotide
guuuuaguccgaugucuuu

SEQ ID NO: 695840 - RNA, 19 nt, Artificial Sequence
  Description of Artificial Sequence: Synthetic oligonucleotide
uugucacggcaaguuuggu

SEQ ID NO: 695841 - RNA, 19 nt, Artificial Sequence
  Description of Artificial Sequence: Synthetic oligonucleotide
uagcacuauucuguucauu

SEQ ID NO: 695842 - RNA, 19 nt, Artificial Sequence
  Description of Artificial Sequence: Synthetic oligonucleotide
cguacaaaccaggggcucg

SEQ ID NO: 695843 - RNA, 19 nt, Artificial Sequence
  Description of Artificial Sequence: Synthetic oligonucleotide
aaccauugucacaccuauu

SEQ ID NO: 695844 - RNA, 19 nt, Artificial Sequence
  Description of Artificial Sequence: Synthetic oligonucleotide
acgggaucccagaccuagg

SEQ ID NO: 695845 - RNA, 19 nt, Artificial Sequence
  Description of Artificial Sequence: Synthetic oligonucleotide
caggguaaggcaccacucu

SEQ ID NO: 695846 - RNA, 19 nt, Artificial Sequence
  Description of Artificial Sequence: Synthetic oligonucleotide
agguacguuugugcucugu

SEQ ID NO: 695847 - RNA, 19 nt, Artificial Sequence
  Description of Artificial Sequence: Synthetic oligonucleotide
cuggauucaaauggauccu

SEQ ID NO: 695848 - RNA, 19 nt, Artificial Sequence
  Description of Artificial Sequence: Synthetic oligonucleotide
acgccgacuggaagaccac

SEQ ID NO: 695849 - RNA, 19 nt, Artificial Sequence
  Description of Artificial Sequence: Synthetic oligonucleotide
acggcagggaaaacgugua

SEQ ID NO: 695850 - RNA, 19 nt, Artificial Sequence
  Description of Artificial Sequence: Synthetic oligonucleotide
aggccgcacucuuuucuuu

SEQ ID NO: 695851 - RNA, 19 nt, Artificial Sequence
  Description of Artificial Sequence: Synthetic oligonucleotide
cccuucuaagaaaagaguu

SEQ ID NO: 695852 - RNA, 19 nt, Artificial Sequence
  Description of Artificial Sequence: Synthetic oligonucleotide
gcugagugacaggugcaug

SEQ ID NO: 695853 - RNA, 19 nt, Artificial Sequence
  Description of Artificial Sequence: Synthetic oligonucleotide
ggcagggaaaacguguacu

SEQ ID NO: 695854 - RNA, 19 nt, Artificial Sequence
  Description of Artificial Sequence: Synthetic oligonucleotide
ccggccauaaaauggcuua

SEQ ID NO: 695855 - RNA, 19 nt, Artificial Sequence
  Description of Artificial Sequence: Synthetic oligonucleotide
ucgucuccccguugcugua

SEQ ID NO: 695856 - RNA, 19 nt, Artificial Sequence
  Description of Artificial Sequence: Synthetic oligonucleotide
cucccucuugguugguuua

SEQ ID NO: 695857 - RNA, 19 nt, Artificial Sequence
  Description of Artificial Sequence: Synthetic oligonucleotide
ccugcacaccacaguguug

SEQ ID NO: 695858 - RNA, 19 nt, Artificial Sequence
  Description of Artificial Sequence: Synthetic oligonucleotide
gcgggugcucaggaaauac

SEQ ID NO: 695859 - RNA, 19 nt, Artificial Sequence
  Description of Artificial Sequence: Synthetic oligonucleotide
gcugguugugacgggauua

SEQ ID NO: 695860 - RNA, 19 nt, Artificial Sequence
  Description of Artificial Sequence: Synthetic oligonucleotide
gguugugacgggauuacuu

SEQ ID NO: 695861 - RNA, 19 nt, Artificial Sequence
  Description of Artificial Sequence: Synthetic oligonucleotide
aucccagaccuaggcgaga

SEQ ID NO: 695862 - RNA, 19 nt, Artificial Sequence
  Description of Artificial Sequence: Synthetic oligonucleotide
ggugcauguugcacgccga

SEQ ID NO: 695863 - RNA, 19 nt, Artificial Sequence
  Description of Artificial Sequence: Synthetic oligonucleotide
ccagcgggugcucaggaaa

SEQ ID NO: 695864 - RNA, 19 nt, Artificial Sequence
  Description of Artificial Sequence: Synthetic oligonucleotide
ccucuugguugguuuagaa

SEQ ID NO: 695865 - RNA, 19 nt, Artificial Sequence
  Description of Artificial Sequence: Synthetic oligonucleotide
cuucgucucccucuugguu

SEQ ID NO: 695866 - RNA, 19 nt, Artificial Sequence
  Description of Artificial Sequence: Synthetic oligonucleotide
cgcgcauaugcacacggca

SEQ ID NO: 695867 - RNA, 19 nt, Artificial Sequence
  Description of Artificial Sequence: Synthetic oligonucleotide
ccgucugagaggggcuugg

SEQ ID NO: 695868 - RNA, 19 nt, Artificial Sequence
  Description of Artificial Sequence: Synthetic oligonucleotide
cacgggcaggagcagggua

SEQ ID NO: 695869 - RNA, 19 nt, Artificial Sequence
  Description of Artificial Sequence: Synthetic oligonucleotide
ccgcugucaucuguugccc

SEQ ID NO: 695870 - RNA, 19 nt, Artificial Sequence
  Description of Artificial Sequence: Synthetic oligonucleotide
ggccauaaaauggcuuagu

SEQ ID NO: 695871 - RNA, 19 nt, Artificial Sequence
  Description of Artificial Sequence: Synthetic oligonucleotide
cggccauaaaauggcuuag

SEQ ID NO: 695872 - RNA, 19 nt, Artificial Sequence
  Description of Artificial Sequence: Synthetic oligonucleotide
ccaugguuacaauucuaau

SEQ ID NO: 695873 - RNA, 19 nt, Artificial Sequence
  Description of Artificial Sequence: Synthetic oligonucleotide
ggcugaguagccugucuuu

SEQ ID NO: 695874 - RNA, 19 nt, Artificial Sequence
  Description of Artificial Sequence: Synthetic oligonucleotide
cugcugguugugacgggau

SEQ ID NO: 695875 - RNA, 19 nt, Artificial Sequence
  Description of Artificial Sequence: Synthetic oligonucleotide
acgccgacuuugccaccua

SEQ ID NO: 695876 - RNA, 19 nt, Artificial Sequence
  Description of Artificial Sequence: Synthetic oligonucleotide
gcuguacaauuaggaggca

SEQ ID NO: 695877 - RNA, 19 nt, Artificial Sequence
  Description of Artificial Sequence: Synthetic oligonucleotide
cccguacaaaccaggggcu

SEQ ID NO: 695878 - RNA, 19 nt, Artificial Sequence
  Description of Artificial Sequence: Synthetic oligonucleotide
cggcagggaaaacguguac

SEQ ID NO: 695879 - RNA, 19 nt, Artificial Sequence
  Description of Artificial Sequence: Synthetic oligonucleotide
cgccgacuggaagaccacg

SEQ ID NO: 695880 - RNA, 19 nt, Artificial Sequence
  Description of Artificial Sequence: Synthetic oligonucleotide
ccgacuuugccaccuaguu

SEQ ID NO: 695881 - RNA, 19 nt, Artificial Sequence
  Description of Artificial Sequence: Synthetic oligonucleotide
cgccgacuuugccaccuag

SEQ ID NO: 695882 - RNA, 19 nt, Artificial Sequence
  Description of Artificial Sequence: Synthetic oligonucleotide
ccccaauaaaauaccuauu

SEQ ID NO: 695883 - RNA, 19 nt, Artificial Sequence
  Description of Artificial Sequence: Synthetic oligonucleotide
gccgacuuugccaccuagu

SEQ ID NO: 695884 - RNA, 19 nt, Artificial Sequence
  Description of Artificial Sequence: Synthetic oligonucleotide
gcacgccgacuggaagacc

SEQ ID NO: 695885 - RNA, 19 nt, Artificial Sequence
  Description of Artificial Sequence: Synthetic oligonucleotide
ccgaugucuuucuucgguu

SEQ ID NO: 695886 - RNA, 19 nt, Artificial Sequence
  Description of Artificial Sequence: Synthetic oligonucleotide
cgucuccccguugcuguag

SEQ ID NO: 695887 - RNA, 19 nt, Artificial Sequence
  Description of Artificial Sequence: Synthetic oligonucleotide
cuccgucugagaggggcuu

SEQ ID NO: 695888 - RNA, 19 nt, Artificial Sequence
  Description of Artificial Sequence: Synthetic oligonucleotide
gccggccauaaaauggcuu

SEQ ID NO: 695889 - RNA, 19 nt, Artificial Sequence
  Description of Artificial Sequence: Synthetic oligonucleotide
ccggaggaaaagaggccuu

SEQ ID NO: 695890 - RNA, 19 nt, Artificial Sequence
  Description of Artificial Sequence: Synthetic oligonucleotide
gcacggcugcugagugaca

SEQ ID NO: 695891 - RNA, 19 nt, Artificial Sequence
  Description of Artificial Sequence: Synthetic oligonucleotide
cguuccuccaagguacguu

SEQ ID NO: 695892 - RNA, 19 nt, Artificial Sequence
  Description of Artificial Sequence: Synthetic oligonucleotide
cgcagccgacuggcacggc

SEQ ID NO: 695893 - RNA, 19 nt, Artificial Sequence
  Description of Artificial Sequence: Synthetic oligonucleotide
cuuuagauaaacuucauag

SEQ ID NO: 695894 - RNA, 19 nt, Artificial Sequence
  Description of Artificial Sequence: Synthetic oligonucleotide
guaauuuagaauuuauugg

SEQ ID NO: 695895 - RNA, 19 nt, Artificial Sequence
  Description of Artificial Sequence: Synthetic oligonucleotide
ugugguacggaucugauag

SEQ ID NO: 695896 - RNA, 19 nt, Artificial Sequence
  Description of Artificial Sequence: Synthetic oligonucleotide
uggaguauuacucuugugg

SEQ ID NO: 695897 - RNA, 19 nt, Artificial Sequence
  Description of Artificial Sequence: Synthetic oligonucleotide
aaaauauaucggcagucgc

SEQ ID NO: 695898 - RNA, 19 nt, Artificial Sequence
  Description of Artificial Sequence: Synthetic oligonucleotide
ucuaauacaaaguagcuuc

SEQ ID NO: 695899 - RNA, 19 nt, Artificial Sequence
  Description of Artificial Sequence: Synthetic oligonucleotide
acaaggaacaaucagacca

SEQ ID NO: 695900 - RNA, 19 nt, Artificial Sequence
  Description of Artificial Sequence: Synthetic oligonucleotide
uuuuaugagaauaaagauc

SEQ ID NO: 695901 - RNA, 19 nt, Artificial Sequence
  Description of Artificial Sequence: Synthetic oligonucleotide
aauacugguguacugacca

SEQ ID NO: 695902 - RNA, 19 nt, Artificial Sequence
  Description of Artificial Sequence: Synthetic oligonucleotide
augauuaucaauccucugg

SEQ ID NO: 695903 - RNA, 19 nt, Artificial Sequence
  Description of Artificial Sequence: Synthetic oligonucleotide
ugauuaucaauccucuggg

SEQ ID NO: 695904 - RNA, 19 nt, Artificial Sequence
  Description of Artificial Sequence: Synthetic oligonucleotide
aauaugaguccccugaacu

SEQ ID NO: 695905 - RNA, 19 nt, Artificial Sequence
  Description of Artificial Sequence: Synthetic oligonucleotide
uacauuacaaaauagucuc

SEQ ID NO: 695906 - RNA, 19 nt, Artificial Sequence
  Description of Artificial Sequence: Synthetic oligonucleotide
aaaguagcuucuuugaccu

SEQ ID NO: 695907 - RNA, 19 nt, Artificial Sequence
  Description of Artificial Sequence: Synthetic oligonucleotide
agaauuuauuggcaggcgc

SEQ ID NO: 695908 - RNA, 19 nt, Artificial Sequence
  Description of Artificial Sequence: Synthetic oligonucleotide
gacaauaugaaacauacua

SEQ ID NO: 695909 - RNA, 19 nt, Artificial Sequence
  Description of Artificial Sequence: Synthetic oligonucleotide
uguuaaagcacaagcaaug

SEQ ID NO: 695910 - RNA, 19 nt, Artificial Sequence
  Description of Artificial Sequence: Synthetic oligonucleotide
acuauauaggcacacaaca

SEQ ID NO: 695911 - RNA, 19 nt, Artificial Sequence
  Description of Artificial Sequence: Synthetic oligonucleotide
aaaacucaacauuagaauu

SEQ ID NO: 695912 - RNA, 19 nt, Artificial Sequence
  Description of Artificial Sequence: Synthetic oligonucleotide
uguuacaacucauuuaaca

SEQ ID NO: 695913 - RNA, 19 nt, Artificial Sequence
  Description of Artificial Sequence: Synthetic oligonucleotide
aagaugauuaucaauccuc

SEQ ID NO: 695914 - RNA, 19 nt, Artificial Sequence
  Description of Artificial Sequence: Synthetic oligonucleotide
ucugauaaaaguccaacaa

SEQ ID NO: 695915 - RNA, 19 nt, Artificial Sequence
  Description of Artificial Sequence: Synthetic oligonucleotide
aaauaugaguccccugaac

SEQ ID NO: 695916 - RNA, 19 nt, Artificial Sequence
  Description of Artificial Sequence: Synthetic oligonucleotide
auaaagauucacuauaaaa

SEQ ID NO: 695917 - RNA, 19 nt, Artificial Sequence
  Description of Artificial Sequence: Synthetic oligonucleotide
ucugcauaucuccugaugc

SEQ ID NO: 695918 - RNA, 19 nt, Artificial Sequence
  Description of Artificial Sequence: Synthetic oligonucleotide
auuuagaauuuauuggcag

SEQ ID NO: 695919 - RNA, 19 nt, Artificial Sequence
  Description of Artificial Sequence: Synthetic oligonucleotide
aaucagaccacauaauuua

SEQ ID NO: 695920 - RNA, 19 nt, Artificial Sequence
  Description of Artificial Sequence: Synthetic oligonucleotide
uccuauaaagguaccauug

SEQ ID NO: 695921 - RNA, 19 nt, Artificial Sequence
  Description of Artificial Sequence: Synthetic oligonucleotide
uuaucaauccucugggaag

SEQ ID NO: 695922 - RNA, 19 nt, Artificial Sequence
  Description of Artificial Sequence: Synthetic oligonucleotide
agaaauaugaguccccuga

SEQ ID NO: 695923 - RNA, 19 nt, Artificial Sequence
  Description of Artificial Sequence: Synthetic oligonucleotide
uucgauauggucauuccca

SEQ ID NO: 695924 - RNA, 19 nt, Artificial Sequence
  Description of Artificial Sequence: Synthetic oligonucleotide
uacaacucauuuaacacac

SEQ ID NO: 695925 - RNA, 19 nt, Artificial Sequence
  Description of Artificial Sequence: Synthetic oligonucleotide
ugcgcauacacacacacac

SEQ ID NO: 695926 - RNA, 19 nt, Artificial Sequence
  Description of Artificial Sequence: Synthetic oligonucleotide
aucugagaaauaugagucc

SEQ ID NO: 695927 - RNA, 19 nt, Artificial Sequence
  Description of Artificial Sequence: Synthetic oligonucleotide
uguauaccagauuagaaua

SEQ ID NO: 695928 - RNA, 19 nt, Artificial Sequence
  Description of Artificial Sequence: Synthetic oligonucleotide
uguaagauugggacgccgg

SEQ ID NO: 695929 - RNA, 19 nt, Artificial Sequence
  Description of Artificial Sequence: Synthetic oligonucleotide
uccauaaucagcugcggag

SEQ ID NO: 695930 - RNA, 19 nt, Artificial Sequence
  Description of Artificial Sequence: Synthetic oligonucleotide
aauaaagauccuucagagu

SEQ ID NO: 695931 - RNA, 19 nt, Artificial Sequence
  Description of Artificial Sequence: Synthetic oligonucleotide
uugguaugcaucuucaggu

SEQ ID NO: 695932 - RNA, 19 nt, Artificial Sequence
  Description of Artificial Sequence: Synthetic oligonucleotide
aauguauuaugcuuucuuu

SEQ ID NO: 695933 - RNA, 19 nt, Artificial Sequence
  Description of Artificial Sequence: Synthetic oligonucleotide
caguaacuacuuuagaacc

SEQ ID NO: 695934 - RNA, 19 nt, Artificial Sequence
  Description of Artificial Sequence: Synthetic oligonucleotide
ugcacaaccaccugguugc

SEQ ID NO: 695935 - RNA, 19 nt, Artificial Sequence
  Description of Artificial Sequence: Synthetic oligonucleotide
uacacacacacacacacac

SEQ ID NO: 695936 - RNA, 19 nt, Artificial Sequence
  Description of Artificial Sequence: Synthetic oligonucleotide
agucgcuucuccuauaaag

SEQ ID NO: 695937 - RNA, 19 nt, Artificial Sequence
  Description of Artificial Sequence: Synthetic oligonucleotide
gaauuuauuggcaggcgcg

SEQ ID NO: 695938 - RNA, 19 nt, Artificial Sequence
  Description of Artificial Sequence: Synthetic oligonucleotide
uuuagcaauguauuaugcu

SEQ ID NO: 695939 - RNA, 19 nt, Artificial Sequence
  Description of Artificial Sequence: Synthetic oligonucleotide
ucuauuagaguuuuauuuu

SEQ ID NO: 695940 - RNA, 19 nt, Artificial Sequence
  Description of Artificial Sequence: Synthetic oligonucleotide
cauacacacacacacacac

SEQ ID NO: 695941 - RNA, 19 nt, Artificial Sequence
  Description of Artificial Sequence: Synthetic oligonucleotide
aaguacaauucaaauauca

SEQ ID NO: 695942 - RNA, 19 nt, Artificial Sequence
  Description of Artificial Sequence: Synthetic oligonucleotide
aagcgggguaacgagagcc

SEQ ID NO: 695943 - RNA, 19 nt, Artificial Sequence
  Description of Artificial Sequence: Synthetic oligonucleotide
ugcucuuaacugcauacag

SEQ ID NO: 695944 - RNA, 19 nt, Artificial Sequence
  Description of Artificial Sequence: Synthetic oligonucleotide
gaaccugacaaaccuacag

SEQ ID NO: 695945 - RNA, 19 nt, Artificial Sequence
  Description of Artificial Sequence: Synthetic oligonucleotide
acagcuuuaacuuuagaua

SEQ ID NO: 695946 - RNA, 19 nt, Artificial Sequence
  Description of Artificial Sequence: Synthetic oligonucleotide
aacgagagccaaccguccc

SEQ ID NO: 695947 - RNA, 19 nt, Artificial Sequence
  Description of Artificial Sequence: Synthetic oligonucleotide
auuuaacacaccugacaac

SEQ ID NO: 695948 - RNA, 19 nt, Artificial Sequence
  Description of Artificial Sequence: Synthetic oligonucleotide
cuauauaggcacacaacag

SEQ ID NO: 695949 - RNA, 19 nt, Artificial Sequence
  Description of Artificial Sequence: Synthetic oligonucleotide
uacaguucaaaguguauac

SEQ ID NO: 695950 - RNA, 19 nt, Artificial Sequence
  Description of Artificial Sequence: Synthetic oligonucleotide
auacagauuagaauacugg

SEQ ID NO: 695951 - RNA, 19 nt, Artificial Sequence
  Description of Artificial Sequence: Synthetic oligonucleotide
ucugagaaauaugaguccc

SEQ ID NO: 695952 - RNA, 19 nt, Artificial Sequence
  Description of Artificial Sequence: Synthetic oligonucleotide
cagauuagaauacagauua

SEQ ID NO: 695953 - RNA, 19 nt, Artificial Sequence
  Description of Artificial Sequence: Synthetic oligonucleotide
auagucucaauguaaaauu

SEQ ID NO: 695954 - RNA, 19 nt, Artificial Sequence
  Description of Artificial Sequence: Synthetic oligonucleotide
uagaauuuauaaagauuca

SEQ ID NO: 695955 - RNA, 19 nt, Artificial Sequence
  Description of Artificial Sequence: Synthetic oligonucleotide
auuaucaauccucugggaa

SEQ ID NO: 695956 - RNA, 19 nt, Artificial Sequence
  Description of Artificial Sequence: Synthetic oligonucleotide
caugacaaggaacaaucag

SEQ ID NO: 695957 - RNA, 19 nt, Artificial Sequence
  Description of Artificial Sequence: Synthetic oligonucleotide
uuuauuggcaggcgcgugc

SEQ ID NO: 695958 - RNA, 19 nt, Artificial Sequence
  Description of Artificial Sequence: Synthetic oligonucleotide
cacacacacacacacacgc

SEQ ID NO: 695959 - RNA, 19 nt, Artificial Sequence
  Description of Artificial Sequence: Synthetic oligonucleotide
ucuacgucuccuuuucugc

SEQ ID NO: 695960 - RNA, 19 nt, Artificial Sequence
  Description of Artificial Sequence: Synthetic oligonucleotide
aaauauaucggcagucgcu

SEQ ID NO: 695961 - RNA, 19 nt, Artificial Sequence
  Description of Artificial Sequence: Synthetic oligonucleotide
aacuacuuuagaaccugac

SEQ ID NO: 695962 - RNA, 19 nt, Artificial Sequence
  Description of Artificial Sequence: Synthetic oligonucleotide
acaguucaaaguguauacc

SEQ ID NO: 695963 - RNA, 19 nt, Artificial Sequence
  Description of Artificial Sequence: Synthetic oligonucleotide
uguugucugagauguaaga

SEQ ID NO: 695964 - RNA, 19 nt, Artificial Sequence
  Description of Artificial Sequence: Synthetic oligonucleotide
guuggaacagacauagaag

SEQ ID NO: 695965 - RNA, 19 nt, Artificial Sequence
  Description of Artificial Sequence: Synthetic oligonucleotide
aguacaauucaaauaucag

SEQ ID NO: 695966 - RNA, 19 nt, Artificial Sequence
  Description of Artificial Sequence: Synthetic oligonucleotide
ugaugcagucugcacaacc

SEQ ID NO: 695967 - RNA, 19 nt, Artificial Sequence
  Description of Artificial Sequence: Synthetic oligonucleotide
cuacuuuagaaccugacaa

SEQ ID NO: 695968 - RNA, 19 nt, Artificial Sequence
  Description of Artificial Sequence: Synthetic oligonucleotide
auaaagguaccauuggcua

SEQ ID NO: 695969 - RNA, 19 nt, Artificial Sequence
  Description of Artificial Sequence: Synthetic oligonucleotide
ugugaggagccuaugcugu

SEQ ID NO: 695970 - RNA, 19 nt, Artificial Sequence
  Description of Artificial Sequence: Synthetic oligonucleotide
uccugaugcagucugcaca

SEQ ID NO: 695971 - RNA, 19 nt, Artificial Sequence
  Description of Artificial Sequence: Synthetic oligonucleotide
auacuauauaggcacacaa

SEQ ID NO: 695972 - RNA, 19 nt, Artificial Sequence
  Description of Artificial Sequence: Synthetic oligonucleotide
cacacacacacacacacac

SEQ ID NO: 695973 - RNA, 19 nt, Artificial Sequence
  Description of Artificial Sequence: Synthetic oligonucleotide
uuuacauauuuagcaaugu

SEQ ID NO: 695974 - RNA, 19 nt, Artificial Sequence
  Description of Artificial Sequence: Synthetic oligonucleotide
aaagguaccauuggcuaca

SEQ ID NO: 695975 - RNA, 19 nt, Artificial Sequence
  Description of Artificial Sequence: Synthetic oligonucleotide
acaaucagaccacauaauu

SEQ ID NO: 695976 - RNA, 19 nt, Artificial Sequence
  Description of Artificial Sequence: Synthetic oligonucleotide
agagaagcgggguaacgag

SEQ ID NO: 695977 - RNA, 19 nt, Artificial Sequence
  Description of Artificial Sequence: Synthetic oligonucleotide
acaauucaaauaucagcca

SEQ ID NO: 695978 - RNA, 19 nt, Artificial Sequence
  Description of Artificial Sequence: Synthetic oligonucleotide
gaugauuaucaauccucug

SEQ ID NO: 695979 - RNA, 19 nt, Artificial Sequence
  Description of Artificial Sequence: Synthetic oligonucleotide
gauuagaauacugguguac

SEQ ID NO: 695980 - RNA, 19 nt, Artificial Sequence
  Description of Artificial Sequence: Synthetic oligonucleotide
aaacucaacauuagaauuu

SEQ ID NO: 695981 - RNA, 19 nt, Artificial Sequence
  Description of Artificial Sequence: Synthetic oligonucleotide
aauauaucggcagucgcuu

SEQ ID NO: 695982 - RNA, 19 nt, Artificial Sequence
  Description of Artificial Sequence: Synthetic oligonucleotide
uucuacgucuccuuuucug

SEQ ID NO: 695983 - RNA, 19 nt, Artificial Sequence
  Description of Artificial Sequence: Synthetic oligonucleotide
acauacuauauaggcacac

SEQ ID NO: 695984 - RNA, 19 nt, Artificial Sequence
  Description of Artificial Sequence: Synthetic oligonucleotide
auuagaauacugguguacu

SEQ ID NO: 695985 - RNA, 19 nt, Artificial Sequence
  Description of Artificial Sequence: Synthetic oligonucleotide
ugucucaguaacuacuuua

SEQ ID NO: 695986 - RNA, 19 nt, Artificial Sequence
  Description of Artificial Sequence: Synthetic oligonucleotide
uauaucggcagucgcuucu

SEQ ID NO: 695987 - RNA, 19 nt, Artificial Sequence
  Description of Artificial Sequence: Synthetic oligonucleotide
uaucaauccucugggaagc

SEQ ID NO: 695988 - RNA, 19 nt, Artificial Sequence
  Description of Artificial Sequence: Synthetic oligonucleotide
uaaagguaccauuggcuac

SEQ ID NO: 695989 - RNA, 19 nt, Artificial Sequence
  Description of Artificial Sequence: Synthetic oligonucleotide
uuuuccagaacggccacgc

SEQ ID NO: 695990 - RNA, 19 nt, Artificial Sequence
  Description of Artificial Sequence: Synthetic oligonucleotide
caaauaucagccaauugaa

SEQ ID NO: 695991 - RNA, 19 nt, Artificial Sequence
  Description of Artificial Sequence: Synthetic oligonucleotide
ucuuaagggcuucuguaaa

SEQ ID NO: 695992 - RNA, 19 nt, Artificial Sequence
  Description of Artificial Sequence: Synthetic oligonucleotide
agccuaugcugucagauga

SEQ ID NO: 695993 - RNA, 19 nt, Artificial Sequence
  Description of Artificial Sequence: Synthetic oligonucleotide
guaagauugggacgccggg

SEQ ID NO: 695994 - RNA, 19 nt, Artificial Sequence
  Description of Artificial Sequence: Synthetic oligonucleotide
acagauuagaauacuggug

SEQ ID NO: 695995 - RNA, 19 nt, Artificial Sequence
  Description of Artificial Sequence: Synthetic oligonucleotide
aauuuauuggcaggcgcgu

SEQ ID NO: 695996 - RNA, 19 nt, Artificial Sequence
  Description of Artificial Sequence: Synthetic oligonucleotide
cuucgauauggucauuccc

SEQ ID NO: 695997 - RNA, 19 nt, Artificial Sequence
  Description of Artificial Sequence: Synthetic oligonucleotide
uacuuuagaaccugacaaa

SEQ ID NO: 695998 - RNA, 19 nt, Artificial Sequence
  Description of Artificial Sequence: Synthetic oligonucleotide
ugauaguuugagauacaaa

SEQ ID NO: 695999 - RNA, 19 nt, Artificial Sequence
  Description of Artificial Sequence: Synthetic oligonucleotide
auugccugaauuugucaug

SEQ ID NO: 696000 - RNA, 19 nt, Artificial Sequence
  Description of Artificial Sequence: Synthetic oligonucleotide
agugacagcagaaaugcca

SEQ ID NO: 696001 - RNA, 19 nt, Artificial Sequence
  Description of Artificial Sequence: Synthetic oligonucleotide
aaccaacuguuacaacuca

SEQ ID NO: 696002 - RNA, 19 nt, Artificial Sequence
  Description of Artificial Sequence: Synthetic oligonucleotide
ugaacuguugagccaggcu

SEQ ID NO: 696003 - RNA, 19 nt, Artificial Sequence
  Description of Artificial Sequence: Synthetic oligonucleotide
cacacacacacacacgcgc

SEQ ID NO: 696004 - RNA, 19 nt, Artificial Sequence
  Description of Artificial Sequence: Synthetic oligonucleotide
auguaaaauugucucagua

SEQ ID NO: 696005 - RNA, 19 nt, Artificial Sequence
  Description of Artificial Sequence: Synthetic oligonucleotide
uuucacguacucuuucuuc

SEQ ID NO: 696006 - RNA, 19 nt, Artificial Sequence
  Description of Artificial Sequence: Synthetic oligonucleotide
ugagaaauaugaguccccu

SEQ ID NO: 696007 - RNA, 19 nt, Artificial Sequence
  Description of Artificial Sequence: Synthetic oligonucleotide
uuccauaaucagcugcgga

SEQ ID NO: 696008 - RNA, 19 nt, Artificial Sequence
  Description of Artificial Sequence: Synthetic oligonucleotide
gguaccauuggcuacauua

SEQ ID NO: 696009 - RNA, 19 nt, Artificial Sequence
  Description of Artificial Sequence: Synthetic oligonucleotide
aguauuacucuugugggaa

SEQ ID NO: 696010 - RNA, 19 nt, Artificial Sequence
  Description of Artificial Sequence: Synthetic oligonucleotide
acaauaugaaacauacuau

SEQ ID NO: 696011 - RNA, 19 nt, Artificial Sequence
  Description of Artificial Sequence: Synthetic oligonucleotide
gauuguacccuguugggua

SEQ ID NO: 696012 - RNA, 19 nt, Artificial Sequence
  Description of Artificial Sequence: Synthetic oligonucleotide
guaacuacuuuagaaccug

SEQ ID NO: 696013 - RNA, 19 nt, Artificial Sequence
  Description of Artificial Sequence: Synthetic oligonucleotide
cuaucugagaaauaugagu

SEQ ID NO: 696014 - RNA, 19 nt, Artificial Sequence
  Description of Artificial Sequence: Synthetic oligonucleotide
uccagaacggccacgcggu

SEQ ID NO: 696015 - RNA, 19 nt, Artificial Sequence
  Description of Artificial Sequence: Synthetic oligonucleotide
auaggcacacaacaguuuu

SEQ ID NO: 696016 - RNA, 19 nt, Artificial Sequence
  Description of Artificial Sequence: Synthetic oligonucleotide
uuauuggcaggcgcgugcg

SEQ ID NO: 696017 - RNA, 19 nt, Artificial Sequence
  Description of Artificial Sequence: Synthetic oligonucleotide
acuguaaggcuccguuggg

SEQ ID NO: 696018 - RNA, 19 nt, Artificial Sequence
  Description of Artificial Sequence: Synthetic oligonucleotide
gacgaggauuugcuguccg

SEQ ID NO: 696019 - RNA, 19 nt, Artificial Sequence
  Description of Artificial Sequence: Synthetic oligonucleotide
cagauuagaauacuggugu

SEQ ID NO: 696020 - RNA, 19 nt, Artificial Sequence
  Description of Artificial Sequence: Synthetic oligonucleotide
acgucuccuuuucugcccc

SEQ ID NO: 696021 - RNA, 19 nt, Artificial Sequence
  Description of Artificial Sequence: Synthetic oligonucleotide
ucuuaacugcauacagggu

SEQ ID NO: 696022 - RNA, 19 nt, Artificial Sequence
  Description of Artificial Sequence: Synthetic oligonucleotide
uaaagauccuucagaguuu

SEQ ID NO: 696023 - RNA, 19 nt, Artificial Sequence
  Description of Artificial Sequence: Synthetic oligonucleotide
agcuucgauauggucauuc

SEQ ID NO: 696024 - RNA, 19 nt, Artificial Sequence
  Description of Artificial Sequence: Synthetic oligonucleotide
ucgcuucuccuauaaaggu

SEQ ID NO: 696025 - RNA, 19 nt, Artificial Sequence
  Description of Artificial Sequence: Synthetic oligonucleotide
gagaaauaugaguccccug

SEQ ID NO: 696026 - RNA, 19 nt, Artificial Sequence
  Description of Artificial Sequence: Synthetic oligonucleotide
uaacgagagccaaccgucc

SEQ ID NO: 696027 - RNA, 19 nt, Artificial Sequence
  Description of Artificial Sequence: Synthetic oligonucleotide
uuagaaccugacaaaccua

SEQ ID NO: 696028 - RNA, 19 nt, Artificial Sequence
  Description of Artificial Sequence: Synthetic oligonucleotide
ucgauauggucauucccac

SEQ ID NO: 696029 - RNA, 19 nt, Artificial Sequence
  Description of Artificial Sequence: Synthetic oligonucleotide
caccugaugagcuaucuga

SEQ ID NO: 696030 - RNA, 19 nt, Artificial Sequence
  Description of Artificial Sequence: Synthetic oligonucleotide
aggauuugcuguccgucag

SEQ ID NO: 696031 - RNA, 19 nt, Artificial Sequence
  Description of Artificial Sequence: Synthetic oligonucleotide
agccaauugaaaacuuuuc

SEQ ID NO: 696032 - RNA, 19 nt, Artificial Sequence
  Description of Artificial Sequence: Synthetic oligonucleotide
uaacuacuuuagaaccuga

SEQ ID NO: 696033 - RNA, 19 nt, Artificial Sequence
  Description of Artificial Sequence: Synthetic oligonucleotide
agaugauuaucaauccucu

SEQ ID NO: 696034 - RNA, 19 nt, Artificial Sequence
  Description of Artificial Sequence: Synthetic oligonucleotide
aguaacuacuuuagaaccu

SEQ ID NO: 696035 - RNA, 19 nt, Artificial Sequence
  Description of Artificial Sequence: Synthetic oligonucleotide
auacugguguacugaccac

SEQ ID NO: 696036 - RNA, 19 nt, Artificial Sequence
  Description of Artificial Sequence: Synthetic oligonucleotide
ccuauaaagguaccauugg

SEQ ID NO: 696037 - RNA, 19 nt, Artificial Sequence
  Description of Artificial Sequence: Synthetic oligonucleotide
auauaucggcagucgcuuc

SEQ ID NO: 696038 - RNA, 19 nt, Artificial Sequence
  Description of Artificial Sequence: Synthetic oligonucleotide
gauauggucauucccacuu

SEQ ID NO: 696039 - RNA, 19 nt, Artificial Sequence
  Description of Artificial Sequence: Synthetic oligonucleotide
auaccagauuagaauacag

SEQ ID NO: 696040 - RNA, 19 nt, Artificial Sequence
  Description of Artificial Sequence: Synthetic oligonucleotide
cugucaaaucuucaggaca

SEQ ID NO: 696041 - RNA, 19 nt, Artificial Sequence
  Description of Artificial Sequence: Synthetic oligonucleotide
uaagauugggacgccgggc

SEQ ID NO: 696042 - RNA, 19 nt, Artificial Sequence
  Description of Artificial Sequence: Synthetic oligonucleotide
uauaggcacacaacaguuu

SEQ ID NO: 696043 - RNA, 19 nt, Artificial Sequence
  Description of Artificial Sequence: Synthetic oligonucleotide
ucuuugaccuuugaauuua

SEQ ID NO: 696044 - RNA, 19 nt, Artificial Sequence
  Description of Artificial Sequence: Synthetic oligonucleotide
cuaugcugucagaugaguc

SEQ ID NO: 696045 - RNA, 19 nt, Artificial Sequence
  Description of Artificial Sequence: Synthetic oligonucleotide
aguugcgucagcagcuucg

SEQ ID NO: 696046 - RNA, 19 nt, Artificial Sequence
  Description of Artificial Sequence: Synthetic oligonucleotide
uaggcacacaacaguuuug

SEQ ID NO: 696047 - RNA, 19 nt, Artificial Sequence
  Description of Artificial Sequence: Synthetic oligonucleotide
agaacggccacgcgguucu

SEQ ID NO: 696048 - RNA, 19 nt, Artificial Sequence
  Description of Artificial Sequence: Synthetic oligonucleotide
uguacugaccacagcuuua

SEQ ID NO: 696049 - RNA, 19 nt, Artificial Sequence
  Description of Artificial Sequence: Synthetic oligonucleotide
cugcacaaccaccugguug

SEQ ID NO: 696050 - RNA, 19 nt, Artificial Sequence
  Description of Artificial Sequence: Synthetic oligonucleotide
guaacgagagccaaccguc

SEQ ID NO: 696051 - RNA, 19 nt, Artificial Sequence
  Description of Artificial Sequence: Synthetic oligonucleotide
guauaccagauuagaauac

SEQ ID NO: 696052 - RNA, 19 nt, Artificial Sequence
  Description of Artificial Sequence: Synthetic oligonucleotide
guguauaccagauuagaau

SEQ ID NO: 696053 - RNA, 19 nt, Artificial Sequence
  Description of Artificial Sequence: Synthetic oligonucleotide
agucucaauguaaaauugu

SEQ ID NO: 696054 - RNA, 19 nt, Artificial Sequence
  Description of Artificial Sequence: Synthetic oligonucleotide
guacggaucugauaggucu

SEQ ID NO: 696055 - RNA, 19 nt, Artificial Sequence
  Description of Artificial Sequence: Synthetic oligonucleotide
augauaguuugagauacaa

SEQ ID NO: 696056 - RNA, 19 nt, Artificial Sequence
  Description of Artificial Sequence: Synthetic oligonucleotide
ggaacagacauagaaguga

SEQ ID NO: 696057 - RNA, 19 nt, Artificial Sequence
  Description of Artificial Sequence: Synthetic oligonucleotide
gcacuuuuccccuucggag

SEQ ID NO: 696058 - RNA, 19 nt, Artificial Sequence
  Description of Artificial Sequence: Synthetic oligonucleotide
aacauacuauauaggcaca

SEQ ID NO: 696059 - RNA, 19 nt, Artificial Sequence
  Description of Artificial Sequence: Synthetic oligonucleotide
gaggauuugcuguccguca

SEQ ID NO: 696060 - RNA, 19 nt, Artificial Sequence
  Description of Artificial Sequence: Synthetic oligonucleotide
aucuaauacaaaguagcuu

SEQ ID NO: 696061 - RNA, 19 nt, Artificial Sequence
  Description of Artificial Sequence: Synthetic oligonucleotide
agacuccucacuuucugau

SEQ ID NO: 696062 - RNA, 19 nt, Artificial Sequence
  Description of Artificial Sequence: Synthetic oligonucleotide
gaucccgugagcuuucugu

SEQ ID NO: 696063 - RNA, 19 nt, Artificial Sequence
  Description of Artificial Sequence: Synthetic oligonucleotide
ucauucuguuaaagcacaa

SEQ ID NO: 696064 - RNA, 19 nt, Artificial Sequence
  Description of Artificial Sequence: Synthetic oligonucleotide
cuuaacugcauacaggguu

SEQ ID NO: 696065 - RNA, 19 nt, Artificial Sequence
  Description of Artificial Sequence: Synthetic oligonucleotide
acggaucugauaggucugc

SEQ ID NO: 696066 - RNA, 19 nt, Artificial Sequence
  Description of Artificial Sequence: Synthetic oligonucleotide
uacugguguacugaccaca

SEQ ID NO: 696067 - RNA, 19 nt, Artificial Sequence
  Description of Artificial Sequence: Synthetic oligonucleotide
gagccuaugcugucagaug

SEQ ID NO: 696068 - RNA, 19 nt, Artificial Sequence
  Description of Artificial Sequence: Synthetic oligonucleotide
ccguauaucuucagaagag

SEQ ID NO: 696069 - RNA, 19 nt, Artificial Sequence
  Description of Artificial Sequence: Synthetic oligonucleotide
gucgcagccgcagacggcg

SEQ ID NO: 696070 - RNA, 19 nt, Artificial Sequence
  Description of Artificial Sequence: Synthetic oligonucleotide
auauaggcacacaacaguu

SEQ ID NO: 696071 - RNA, 19 nt, Artificial Sequence
  Description of Artificial Sequence: Synthetic oligonucleotide
uuugaccuuugaauuuaua

SEQ ID NO: 696072 - RNA, 19 nt, Artificial Sequence
  Description of Artificial Sequence: Synthetic oligonucleotide
gccgacuucgcucuucgcg

SEQ ID NO: 696073 - RNA, 19 nt, Artificial Sequence
  Description of Artificial Sequence: Synthetic oligonucleotide
gacuucgcucuucgcgucg

SEQ ID NO: 696074 - RNA, 19 nt, Artificial Sequence
  Description of Artificial Sequence: Synthetic oligonucleotide
agauuagaauacagauuag

SEQ ID NO: 696075 - RNA, 19 nt, Artificial Sequence
  Description of Artificial Sequence: Synthetic oligonucleotide
auuacucuugugggaaucu

SEQ ID NO: 696076 - RNA, 19 nt, Artificial Sequence
  Description of Artificial Sequence: Synthetic oligonucleotide
agauuagaauacuggugua

SEQ ID NO: 696077 - RNA, 19 nt, Artificial Sequence
  Description of Artificial Sequence: Synthetic oligonucleotide
acacacacacacacgcgcg

SEQ ID NO: 696078 - RNA, 19 nt, Artificial Sequence
  Description of Artificial Sequence: Synthetic oligonucleotide
gagagaagcgggguaacga

SEQ ID NO: 696079 - RNA, 19 nt, Artificial Sequence
  Description of Artificial Sequence: Synthetic oligonucleotide
auuguacccuguuggguau

SEQ ID NO: 696080 - RNA, 19 nt, Artificial Sequence
  Description of Artificial Sequence: Synthetic oligonucleotide
acaccugaugagcuaucug

SEQ ID NO: 696081 - RNA, 19 nt, Artificial Sequence
  Description of Artificial Sequence: Synthetic oligonucleotide
ugguugcucgggacgagga

SEQ ID NO: 696082 - RNA, 19 nt, Artificial Sequence
  Description of Artificial Sequence: Synthetic oligonucleotide
aacuuuagauaaacuucau

SEQ ID NO: 696083 - RNA, 19 nt, Artificial Sequence
  Description of Artificial Sequence: Synthetic oligonucleotide
cuguaaggcuccguugggg

SEQ ID NO: 696084 - RNA, 19 nt, Artificial Sequence
  Description of Artificial Sequence: Synthetic oligonucleotide
cuccaggcauuucacguac

SEQ ID NO: 696085 - RNA, 19 nt, Artificial Sequence
  Description of Artificial Sequence: Synthetic oligonucleotide
gcuucuccuauaaagguac

SEQ ID NO: 696086 - RNA, 19 nt, Artificial Sequence
  Description of Artificial Sequence: Synthetic oligonucleotide
gcuaucugagaaauaugag

SEQ ID NO: 696087 - RNA, 19 nt, Artificial Sequence
  Description of Artificial Sequence: Synthetic oligonucleotide
ugugggaaucuuccauaau

SEQ ID NO: 696088 - RNA, 19 nt, Artificial Sequence
  Description of Artificial Sequence: Synthetic oligonucleotide
acacacgcgcgcuuccuug

SEQ ID NO: 696089 - RNA, 19 nt, Artificial Sequence
  Description of Artificial Sequence: Synthetic oligonucleotide
cacacacacacacgcgcgc

SEQ ID NO: 696090 - RNA, 19 nt, Artificial Sequence
  Description of Artificial Sequence: Synthetic oligonucleotide
agagccaaccgucccgggu

SEQ ID NO: 696091 - RNA, 19 nt, Artificial Sequence
  Description of Artificial Sequence: Synthetic oligonucleotide
augccaggauuuucuacgu

SEQ ID NO: 696092 - RNA, 19 nt, Artificial Sequence
  Description of Artificial Sequence: Synthetic oligonucleotide
acacuuuuaugagaauaaa

SEQ ID NO: 696093 - RNA, 19 nt, Artificial Sequence
  Description of Artificial Sequence: Synthetic oligonucleotide
acacacacacacacacacg

SEQ ID NO: 696094 - RNA, 19 nt, Artificial Sequence
  Description of Artificial Sequence: Synthetic oligonucleotide
ugguaugcaucuucagguu

SEQ ID NO: 696095 - RNA, 19 nt, Artificial Sequence
  Description of Artificial Sequence: Synthetic oligonucleotide
acuucgcucuucgcgucgc

SEQ ID NO: 696096 - RNA, 19 nt, Artificial Sequence
  Description of Artificial Sequence: Synthetic oligonucleotide
uaucggcagucgcuucucc

SEQ ID NO: 696097 - RNA, 19 nt, Artificial Sequence
  Description of Artificial Sequence: Synthetic oligonucleotide
auuuauuggcaggcgcgug

SEQ ID NO: 696098 - RNA, 19 nt, Artificial Sequence
  Description of Artificial Sequence: Synthetic oligonucleotide
guggcagacggugugguac

SEQ ID NO: 696099 - RNA, 19 nt, Artificial Sequence
  Description of Artificial Sequence: Synthetic oligonucleotide
acacacacacacacacgcg

SEQ ID NO: 696100 - RNA, 19 nt, Artificial Sequence
  Description of Artificial Sequence: Synthetic oligonucleotide
ucagccguauuucccuuuu

SEQ ID NO: 696101 - RNA, 19 nt, Artificial Sequence
  Description of Artificial Sequence: Synthetic oligonucleotide
gcaauguacuguccgcugc

SEQ ID NO: 696102 - RNA, 19 nt, Artificial Sequence
  Description of Artificial Sequence: Synthetic oligonucleotide
acgcgcgcuuccuugagca

SEQ ID NO: 696103 - RNA, 19 nt, Artificial Sequence
  Description of Artificial Sequence: Synthetic oligonucleotide
gauugggacgccgggccag

SEQ ID NO: 696104 - RNA, 19 nt, Artificial Sequence
  Description of Artificial Sequence: Synthetic oligonucleotide
cugcauaucuccugaugca

SEQ ID NO: 696105 - RNA, 19 nt, Artificial Sequence
  Description of Artificial Sequence: Synthetic oligonucleotide
auugucucaguaacuacuu

SEQ ID NO: 696106 - RNA, 19 nt, Artificial Sequence
  Description of Artificial Sequence: Synthetic oligonucleotide
ugcggagccgccuggccgc

SEQ ID NO: 696107 - RNA, 19 nt, Artificial Sequence
  Description of Artificial Sequence: Synthetic oligonucleotide
cauacuauauaggcacaca

SEQ ID NO: 696108 - RNA, 19 nt, Artificial Sequence
  Description of Artificial Sequence: Synthetic oligonucleotide
gaagcgggguaacgagagc

SEQ ID NO: 696109 - RNA, 19 nt, Artificial Sequence
  Description of Artificial Sequence: Synthetic oligonucleotide
uuaccguuucccggccgcg

SEQ ID NO: 696110 - RNA, 19 nt, Artificial Sequence
  Description of Artificial Sequence: Synthetic oligonucleotide
gcuucgauauggucauucc

SEQ ID NO: 696111 - RNA, 19 nt, Artificial Sequence
  Description of Artificial Sequence: Synthetic oligonucleotide
uguuggguauugccugaau

SEQ ID NO: 696112 - RNA, 19 nt, Artificial Sequence
  Description of Artificial Sequence: Synthetic oligonucleotide
cacguacucuuucuucuuc

SEQ ID NO: 696113 - RNA, 19 nt, Artificial Sequence
  Description of Artificial Sequence: Synthetic oligonucleotide
aucugugccuggacuggcc

SEQ ID NO: 696114 - RNA, 19 nt, Artificial Sequence
  Description of Artificial Sequence: Synthetic oligonucleotide
ggaagcuuugguaugcauc

SEQ ID NO: 696115 - RNA, 19 nt, Artificial Sequence
  Description of Artificial Sequence: Synthetic oligonucleotide
guccccugaacuguugagc

SEQ ID NO: 696116 - RNA, 19 nt, Artificial Sequence
  Description of Artificial Sequence: Synthetic oligonucleotide
ucgggacgaggauuugcug

SEQ ID NO: 696117 - RNA, 19 nt, Artificial Sequence
  Description of Artificial Sequence: Synthetic oligonucleotide
cugcggagccgccuggccg

SEQ ID NO: 696118 - RNA, 19 nt, Artificial Sequence
  Description of Artificial Sequence: Synthetic oligonucleotide
ucccggguuaccguuuccc

SEQ ID NO: 696119 - RNA, 19 nt, Artificial Sequence
  Description of Artificial Sequence: Synthetic oligonucleotide
caaccgucccggguuaccg

SEQ ID NO: 696120 - RNA, 19 nt, Artificial Sequence
  Description of Artificial Sequence: Synthetic oligonucleotide
augacaccugaugagcuau

SEQ ID NO: 696121 - RNA, 19 nt, Artificial Sequence
  Description of Artificial Sequence: Synthetic oligonucleotide
agacaauaugaaacauacu

SEQ ID NO: 696122 - RNA, 19 nt, Artificial Sequence
  Description of Artificial Sequence: Synthetic oligonucleotide
aaccgucccggguuaccgu

SEQ ID NO: 696123 - RNA, 19 nt, Artificial Sequence
  Description of Artificial Sequence: Synthetic oligonucleotide
uauuggcaggcgcgugcgc

SEQ ID NO: 696124 - RNA, 19 nt, Artificial Sequence
  Description of Artificial Sequence: Synthetic oligonucleotide
acgccaucugugccuggac

SEQ ID NO: 696125 - RNA, 19 nt, Artificial Sequence
  Description of Artificial Sequence: Synthetic oligonucleotide
gguaacgagagccaaccgu

SEQ ID NO: 696126 - RNA, 19 nt, Artificial Sequence
  Description of Artificial Sequence: Synthetic oligonucleotide
caguuuguggcagugaagu

SEQ ID NO: 696127 - RNA, 19 nt, Artificial Sequence
  Description of Artificial Sequence: Synthetic oligonucleotide
ggcaauguacuguccgcug

SEQ ID NO: 696128 - RNA, 19 nt, Artificial Sequence
  Description of Artificial Sequence: Synthetic oligonucleotide
acaacaugacaaggaacaa

SEQ ID NO: 696129 - RNA, 19 nt, Artificial Sequence
  Description of Artificial Sequence: Synthetic oligonucleotide
cuuuucugccccguauauc

SEQ ID NO: 696130 - RNA, 19 nt, Artificial Sequence
  Description of Artificial Sequence: Synthetic oligonucleotide
cccacuuacccucugucac

SEQ ID NO: 696131 - RNA, 19 nt, Artificial Sequence
  Description of Artificial Sequence: Synthetic oligonucleotide
acgaggauuugcuguccgu

SEQ ID NO: 696132 - RNA, 19 nt, Artificial Sequence
  Description of Artificial Sequence: Synthetic oligonucleotide
ugcuguccgucagaagucu

SEQ ID NO: 696133 - RNA, 19 nt, Artificial Sequence
  Description of Artificial Sequence: Synthetic oligonucleotide
cgcauacacacacacacac

SEQ ID NO: 696134 - RNA, 19 nt, Artificial Sequence
  Description of Artificial Sequence: Synthetic oligonucleotide
ggcgggaacuuccacuccc

SEQ ID NO: 696135 - RNA, 19 nt, Artificial Sequence
  Description of Artificial Sequence: Synthetic oligonucleotide
uucgcgucgcagccgcaga

SEQ ID NO: 696136 - RNA, 19 nt, Artificial Sequence
  Description of Artificial Sequence: Synthetic oligonucleotide
gagaagcgggguaacgaga

SEQ ID NO: 696137 - RNA, 19 nt, Artificial Sequence
  Description of Artificial Sequence: Synthetic oligonucleotide
auacacacacacacacaca

SEQ ID NO: 696138 - RNA, 19 nt, Artificial Sequence
  Description of Artificial Sequence: Synthetic oligonucleotide
agauugggacgccgggcca

SEQ ID NO: 696139 - RNA, 19 nt, Artificial Sequence
  Description of Artificial Sequence: Synthetic oligonucleotide
ugcauacuggaggauugua

SEQ ID NO: 696140 - RNA, 19 nt, Artificial Sequence
  Description of Artificial Sequence: Synthetic oligonucleotide
uccaggcauuucacguacu

SEQ ID NO: 696141 - RNA, 19 nt, Artificial Sequence
  Description of Artificial Sequence: Synthetic oligonucleotide
ccugagacuccucacuuuc

SEQ ID NO: 696142 - RNA, 19 nt, Artificial Sequence
  Description of Artificial Sequence: Synthetic oligonucleotide
uggacgccaucugugccug

SEQ ID NO: 696143 - RNA, 19 nt, Artificial Sequence
  Description of Artificial Sequence: Synthetic oligonucleotide
agcuuuaacuuuagauaaa

SEQ ID NO: 696144 - RNA, 19 nt, Artificial Sequence
  Description of Artificial Sequence: Synthetic oligonucleotide
cccguauaucuucagaaga

SEQ ID NO: 696145 - RNA, 19 nt, Artificial Sequence
  Description of Artificial Sequence: Synthetic oligonucleotide
ccccguauaucuucagaag

SEQ ID NO: 696146 - RNA, 19 nt, Artificial Sequence
  Description of Artificial Sequence: Synthetic oligonucleotide
cugauaggucugcauaucu

SEQ ID NO: 696147 - RNA, 19 nt, Artificial Sequence
  Description of Artificial Sequence: Synthetic oligonucleotide
ggguaacgagagccaaccg

SEQ ID NO: 696148 - RNA, 19 nt, Artificial Sequence
  Description of Artificial Sequence: Synthetic oligonucleotide
ugggaagcuuugguaugca

SEQ ID NO: 696149 - RNA, 19 nt, Artificial Sequence
  Description of Artificial Sequence: Synthetic oligonucleotide
ucgcgucgcagccgcagac

SEQ ID NO: 696150 - RNA, 19 nt, Artificial Sequence
  Description of Artificial Sequence: Synthetic oligonucleotide
gggacgaggauuugcuguc

SEQ ID NO: 696151 - RNA, 19 nt, Artificial Sequence
  Description of Artificial Sequence: Synthetic oligonucleotide
acggccacgcgguucucca

SEQ ID NO: 696152 - RNA, 19 nt, Artificial Sequence
  Description of Artificial Sequence: Synthetic oligonucleotide
gguaugcaucuucagguua

SEQ ID NO: 696153 - RNA, 19 nt, Artificial Sequence
  Description of Artificial Sequence: Synthetic oligonucleotide
acacgcgcgcuuccuugag

SEQ ID NO: 696154 - RNA, 19 nt, Artificial Sequence
  Description of Artificial Sequence: Synthetic oligonucleotide
ccggguuaccguuucccgg

SEQ ID NO: 696155 - RNA, 19 nt, Artificial Sequence
  Description of Artificial Sequence: Synthetic oligonucleotide
gguuaccguuucccggccg

SEQ ID NO: 696156 - RNA, 19 nt, Artificial Sequence
  Description of Artificial Sequence: Synthetic oligonucleotide
acacacacacacgcgcgcu

SEQ ID NO: 696157 - RNA, 19 nt, Artificial Sequence
  Description of Artificial Sequence: Synthetic oligonucleotide
uuccccuucggagcuucca

SEQ ID NO: 696158 - RNA, 19 nt, Artificial Sequence
  Description of Artificial Sequence: Synthetic oligonucleotide
acacacacacacacacaca

SEQ ID NO: 696159 - RNA, 19 nt, Artificial Sequence
  Description of Artificial Sequence: Synthetic oligonucleotide
ggcagugaaguggcagacg

SEQ ID NO: 696160 - RNA, 19 nt, Artificial Sequence
  Description of Artificial Sequence: Synthetic oligonucleotide
ucgcagccgcagacggcgg

SEQ ID NO: 696161 - RNA, 19 nt, Artificial Sequence
  Description of Artificial Sequence: Synthetic oligonucleotide
acccucugucaccuuugca

SEQ ID NO: 696162 - RNA, 19 nt, Artificial Sequence
  Description of Artificial Sequence: Synthetic oligonucleotide
gacgccaucugugccugga

SEQ ID NO: 696163 - RNA, 19 nt, Artificial Sequence
  Description of Artificial Sequence: Synthetic oligonucleotide
gcacaagcaaugcucuuaa

SEQ ID NO: 696164 - RNA, 19 nt, Artificial Sequence
  Description of Artificial Sequence: Synthetic oligonucleotide
cucgggacgaggauuugcu

SEQ ID NO: 696165 - RNA, 19 nt, Artificial Sequence
  Description of Artificial Sequence: Synthetic oligonucleotide
cacgcgcgcuuccuugagc

SEQ ID NO: 696166 - RNA, 19 nt, Artificial Sequence
  Description of Artificial Sequence: Synthetic oligonucleotide
gacaccugaugagcuaucu

SEQ ID NO: 696167 - RNA, 19 nt, Artificial Sequence
  Description of Artificial Sequence: Synthetic oligonucleotide
cccggguuaccguuucccg

SEQ ID NO: 696168 - RNA, 19 nt, Artificial Sequence
  Description of Artificial Sequence: Synthetic oligonucleotide
cggguuaccguuucccggc

SEQ ID NO: 696169 - RNA, 19 nt, Artificial Sequence
  Description of Artificial Sequence: Synthetic oligonucleotide
uaccguuucccggccgcga

SEQ ID NO: 696170 - RNA, 19 nt, Artificial Sequence
  Description of Artificial Sequence: Synthetic oligonucleotide
cugccccguauaucuucag

SEQ ID NO: 696171 - RNA, 19 nt, Artificial Sequence
  Description of Artificial Sequence: Synthetic oligonucleotide
ccaggcauuucacguacuc

SEQ ID NO: 696172 - RNA, 19 nt, Artificial Sequence
  Description of Artificial Sequence: Synthetic oligonucleotide
guuucccggccgcgagggg

SEQ ID NO: 696173 - RNA, 19 nt, Artificial Sequence
  Description of Artificial Sequence: Synthetic oligonucleotide
agcgggguaacgagagcca

SEQ ID NO: 696174 - RNA, 19 nt, Artificial Sequence
  Description of Artificial Sequence: Synthetic oligonucleotide
caggaucccgugagcuuuc

SEQ ID NO: 696175 - RNA, 19 nt, Artificial Sequence
  Description of Artificial Sequence: Synthetic oligonucleotide
cagaacggccacgcgguuc

SEQ ID NO: 696176 - RNA, 19 nt, Artificial Sequence
  Description of Artificial Sequence: Synthetic oligonucleotide
ccuggacgccaucugugcc

SEQ ID NO: 696177 - RNA, 19 nt, Artificial Sequence
  Description of Artificial Sequence: Synthetic oligonucleotide
gugugguacggaucugaua

SEQ ID NO: 696178 - RNA, 19 nt, Artificial Sequence
  Description of Artificial Sequence: Synthetic oligonucleotide
cuguccgucagaagucugu

SEQ ID NO: 696179 - RNA, 19 nt, Artificial Sequence
  Description of Artificial Sequence: Synthetic oligonucleotide
gcgccgacuucgcucuucg

SEQ ID NO: 696180 - RNA, 19 nt, Artificial Sequence
  Description of Artificial Sequence: Synthetic oligonucleotide
gguacggaucugauagguc

SEQ ID NO: 696181 - RNA, 19 nt, Artificial Sequence
  Description of Artificial Sequence: Synthetic oligonucleotide
cacacgcgcgcuuccuuga

SEQ ID NO: 696182 - RNA, 19 nt, Artificial Sequence
  Description of Artificial Sequence: Synthetic oligonucleotide
gcagucgcuucuccuauaa

SEQ ID NO: 696183 - RNA, 19 nt, Artificial Sequence
  Description of Artificial Sequence: Synthetic oligonucleotide
caguugcgucagcagcuuc

SEQ ID NO: 696184 - RNA, 19 nt, Artificial Sequence
  Description of Artificial Sequence: Synthetic oligonucleotide
gccuaugcugucagaugag

SEQ ID NO: 696185 - RNA, 19 nt, Artificial Sequence
  Description of Artificial Sequence: Synthetic oligonucleotide
gcauacacacacacacaca

SEQ ID NO: 696186 - RNA, 19 nt, Artificial Sequence
  Description of Artificial Sequence: Synthetic oligonucleotide
ccuucggagcuuccaguug

SEQ ID NO: 696187 - RNA, 19 nt, Artificial Sequence
  Description of Artificial Sequence: Synthetic oligonucleotide
gaggggcgucucuggcggc

SEQ ID NO: 696188 - RNA, 19 nt, Artificial Sequence
  Description of Artificial Sequence: Synthetic oligonucleotide
agcuuucugugaggagccu

SEQ ID NO: 696189 - RNA, 19 nt, Artificial Sequence
  Description of Artificial Sequence: Synthetic oligonucleotide
ggguuaccguuucccggcc

SEQ ID NO: 696190 - RNA, 19 nt, Artificial Sequence
  Description of Artificial Sequence: Synthetic oligonucleotide
ccagauuagaauacagauu

SEQ ID NO: 696191 - RNA, 19 nt, Artificial Sequence
  Description of Artificial Sequence: Synthetic oligonucleotide
ggacgaggauuugcugucc

SEQ ID NO: 696192 - RNA, 19 nt, Artificial Sequence
  Description of Artificial Sequence: Synthetic oligonucleotide
ggcggggcggagagaagcg

SEQ ID NO: 696193 - RNA, 19 nt, Artificial Sequence
  Description of Artificial Sequence: Synthetic oligonucleotide
cagacggugugguacggau

SEQ ID NO: 696194 - RNA, 19 nt, Artificial Sequence
  Description of Artificial Sequence: Synthetic oligonucleotide
ccguauuucccuuuucagu

SEQ ID NO: 696195 - RNA, 19 nt, Artificial Sequence
  Description of Artificial Sequence: Synthetic oligonucleotide
augagcuaucugagaaaua

SEQ ID NO: 696196 - RNA, 19 nt, Artificial Sequence
  Description of Artificial Sequence: Synthetic oligonucleotide
gucccggguuaccguuucc

SEQ ID NO: 696197 - RNA, 19 nt, Artificial Sequence
  Description of Artificial Sequence: Synthetic oligonucleotide
ggcgggcuggcgcuucucc

SEQ ID NO: 696198 - RNA, 19 nt, Artificial Sequence
  Description of Artificial Sequence: Synthetic oligonucleotide
gcagacggcggcgggcugg

SEQ ID NO: 696199 - RNA, 19 nt, Artificial Sequence
  Description of Artificial Sequence: Synthetic oligonucleotide
agccaaccgucccggguua

SEQ ID NO: 696200 - RNA, 19 nt, Artificial Sequence
  Description of Artificial Sequence: Synthetic oligonucleotide
guugcucgggacgaggauu

SEQ ID NO: 696201 - RNA, 19 nt, Artificial Sequence
  Description of Artificial Sequence: Synthetic oligonucleotide
ggaucccgugagcuuucug

SEQ ID NO: 696202 - RNA, 19 nt, Artificial Sequence
  Description of Artificial Sequence: Synthetic oligonucleotide
ggcagacggugugguacgg

SEQ ID NO: 696203 - RNA, 19 nt, Artificial Sequence
  Description of Artificial Sequence: Synthetic oligonucleotide
acgccgggccaggaucccg

SEQ ID NO: 696204 - RNA, 19 nt, Artificial Sequence
  Description of Artificial Sequence: Synthetic oligonucleotide
cacgcgguucuccaggcau

SEQ ID NO: 696205 - RNA, 19 nt, Artificial Sequence
  Description of Artificial Sequence: Synthetic oligonucleotide
cggagcuuccaguugcguc

SEQ ID NO: 696206 - RNA, 19 nt, Artificial Sequence
  Description of Artificial Sequence: Synthetic oligonucleotide
gccugaauuugucaugguu

SEQ ID NO: 696207 - RNA, 19 nt, Artificial Sequence
  Description of Artificial Sequence: Synthetic oligonucleotide
cgaggauuugcuguccguc

SEQ ID NO: 696208 - RNA, 19 nt, Artificial Sequence
  Description of Artificial Sequence: Synthetic oligonucleotide
cgagagccaaccgucccgg

SEQ ID NO: 696209 - RNA, 19 nt, Artificial Sequence
  Description of Artificial Sequence: Synthetic oligonucleotide
cguuucccggccgcgaggg

SEQ ID NO: 696210 - RNA, 19 nt, Artificial Sequence
  Description of Artificial Sequence: Synthetic oligonucleotide
cagacggcggcgggcuggc

SEQ ID NO: 696211 - RNA, 19 nt, Artificial Sequence
  Description of Artificial Sequence: Synthetic oligonucleotide
gcgggaacuuccacucccc

SEQ ID NO: 696212 - RNA, 19 nt, Artificial Sequence
  Description of Artificial Sequence: Synthetic oligonucleotide
cagucgcuucuccuauaaa

SEQ ID NO: 696213 - RNA, 19 nt, Artificial Sequence
  Description of Artificial Sequence: Synthetic oligonucleotide
cagugaaguggcagacggu

SEQ ID NO: 696214 - RNA, 19 nt, Artificial Sequence
  Description of Artificial Sequence: Synthetic oligonucleotide
gcuguccgucagaagucug

SEQ ID NO: 696215 - RNA, 19 nt, Artificial Sequence
  Description of Artificial Sequence: Synthetic oligonucleotide
cuucgcucuucgcgucgca

SEQ ID NO: 696216 - RNA, 19 nt, Artificial Sequence
  Description of Artificial Sequence: Synthetic oligonucleotide
gcgcauacacacacacaca

SEQ ID NO: 696217 - RNA, 19 nt, Artificial Sequence
  Description of Artificial Sequence: Synthetic oligonucleotide
ccguuucccggccgcgagg

SEQ ID NO: 696218 - RNA, 19 nt, Artificial Sequence
  Description of Artificial Sequence: Synthetic oligonucleotide
ccgacuucgcucuucgcgu

SEQ ID NO: 696219 - RNA, 19 nt, Artificial Sequence
  Description of Artificial Sequence: Synthetic oligonucleotide
gcuuucugugaggagccua

SEQ ID NO: 696220 - RNA, 19 nt, Artificial Sequence
  Description of Artificial Sequence: Synthetic oligonucleotide
ccaaccgucccggguuacc

SEQ ID NO: 696221 - RNA, 19 nt, Artificial Sequence
  Description of Artificial Sequence: Synthetic oligonucleotide
ggacgccaucugugccugg

SEQ ID NO: 696222 - RNA, 19 nt, Artificial Sequence
  Description of Artificial Sequence: Synthetic oligonucleotide
aggcggcgccgacuucgcu

SEQ ID NO: 696223 - RNA, 19 nt, Artificial Sequence
  Description of Artificial Sequence: Synthetic oligonucleotide
ugcccggggcgggaacuuc

SEQ ID NO: 696224 - RNA, 19 nt, Artificial Sequence
  Description of Artificial Sequence: Synthetic oligonucleotide
cgcuucuccuauaaaggua

SEQ ID NO: 696225 - RNA, 19 nt, Artificial Sequence
  Description of Artificial Sequence: Synthetic oligonucleotide
uggcaggcgcgugcgcaua

SEQ ID NO: 696226 - RNA, 19 nt, Artificial Sequence
  Description of Artificial Sequence: Synthetic oligonucleotide
caucagccguauuucccuu

SEQ ID NO: 696227 - RNA, 19 nt, Artificial Sequence
  Description of Artificial Sequence: Synthetic oligonucleotide
cgggacgaggauuugcugu

SEQ ID NO: 696228 - RNA, 19 nt, Artificial Sequence
  Description of Artificial Sequence: Synthetic oligonucleotide
gguugcucgggacgaggau

SEQ ID NO: 696229 - RNA, 19 nt, Artificial Sequence
  Description of Artificial Sequence: Synthetic oligonucleotide
ggcauuucacguacucuuu

SEQ ID NO: 696230 - RNA, 19 nt, Artificial Sequence
  Description of Artificial Sequence: Synthetic oligonucleotide
gcagacggugugguacgga

SEQ ID NO: 696231 - RNA, 19 nt, Artificial Sequence
  Description of Artificial Sequence: Synthetic oligonucleotide
gcccggggcgggaacuucc

SEQ ID NO: 696232 - RNA, 19 nt, Artificial Sequence
  Description of Artificial Sequence: Synthetic oligonucleotide
ggcagucgcuucuccuaua

SEQ ID NO: 696233 - RNA, 19 nt, Artificial Sequence
  Description of Artificial Sequence: Synthetic oligonucleotide
ccuaugcugucagaugagu

SEQ ID NO: 696234 - RNA, 19 nt, Artificial Sequence
  Description of Artificial Sequence: Synthetic oligonucleotide
gcgggguaacgagagccaa

SEQ ID NO: 696235 - RNA, 19 nt, Artificial Sequence
  Description of Artificial Sequence: Synthetic oligonucleotide
gaacggccacgcgguucuc

SEQ ID NO: 696236 - RNA, 19 nt, Artificial Sequence
  Description of Artificial Sequence: Synthetic oligonucleotide
ggcgccgacuucgcucuuc

SEQ ID NO: 696237 - RNA, 19 nt, Artificial Sequence
  Description of Artificial Sequence: Synthetic oligonucleotide
gcgcgcuuccuugagcacu

SEQ ID NO: 696238 - RNA, 19 nt, Artificial Sequence
  Description of Artificial Sequence: Synthetic oligonucleotide
cgucccggguuaccguuuc

SEQ ID NO: 696239 - RNA, 19 nt, Artificial Sequence
  Description of Artificial Sequence: Synthetic oligonucleotide
cgauauggucauucccacu

SEQ ID NO: 696240 - RNA, 19 nt, Artificial Sequence
  Description of Artificial Sequence: Synthetic oligonucleotide
ccggggcgggaacuuccac

SEQ ID NO: 696241 - RNA, 19 nt, Artificial Sequence
  Description of Artificial Sequence: Synthetic oligonucleotide
ucccggccgcgaggggcgu

SEQ ID NO: 696242 - RNA, 19 nt, Artificial Sequence
  Description of Artificial Sequence: Synthetic oligonucleotide
gccaaccgucccggguuac

SEQ ID NO: 696243 - RNA, 19 nt, Artificial Sequence
  Description of Artificial Sequence: Synthetic oligonucleotide
gccaacuguaaggcuccgu

SEQ ID NO: 696244 - RNA, 19 nt, Artificial Sequence
  Description of Artificial Sequence: Synthetic oligonucleotide
cgcgcgcuuccuugagcac

SEQ ID NO: 696245 - RNA, 19 nt, Artificial Sequence
  Description of Artificial Sequence: Synthetic oligonucleotide
cccggggcgggaacuucca

SEQ ID NO: 696246 - RNA, 19 nt, Artificial Sequence
  Description of Artificial Sequence: Synthetic oligonucleotide
cgccgacuucgcucuucgc

SEQ ID NO: 696247 - RNA, 19 nt, Artificial Sequence
  Description of Artificial Sequence: Synthetic oligonucleotide
ccaguugcgucagcagcuu

SEQ ID NO: 696248 - RNA, 19 nt, Artificial Sequence
  Description of Artificial Sequence: Synthetic oligonucleotide
cggcagucgcuucuccuau

SEQ ID NO: 696249 - RNA, 19 nt, Artificial Sequence
  Description of Artificial Sequence: Synthetic oligonucleotide
gcgucucuggcggcaugau

SEQ ID NO: 696250 - RNA, 19 nt, Artificial Sequence
  Description of Artificial Sequence: Synthetic oligonucleotide
ccgcagacggcggcgggcu

SEQ ID NO: 696251 - RNA, 19 nt, Artificial Sequence
  Description of Artificial Sequence: Synthetic oligonucleotide
cugcccggggcgggaacuu

SEQ ID NO: 696252 - RNA, 19 nt, Artificial Sequence
  Description of Artificial Sequence: Synthetic oligonucleotide
ccgucccggguuaccguuu

SEQ ID NO: 696253 - RNA, 19 nt, Artificial Sequence
  Description of Artificial Sequence: Synthetic oligonucleotide
ccagaacggccacgcgguu

SEQ ID NO: 696254 - RNA, 19 nt, Artificial Sequence
  Description of Artificial Sequence: Synthetic oligonucleotide
cgcgguucuccaggcauuu

SEQ ID NO: 696255 - RNA, 19 nt, Artificial Sequence
  Description of Artificial Sequence: Synthetic oligonucleotide
cggcgggcuggcgcuucuc

SEQ ID NO: 696256 - RNA, 19 nt, Artificial Sequence
  Description of Artificial Sequence: Synthetic oligonucleotide
auaauaauaauacacacac

SEQ ID NO: 696257 - RNA, 19 nt, Artificial Sequence
  Description of Artificial Sequence: Synthetic oligonucleotide
aaagucucuacacaaagac

SEQ ID NO: 696258 - RNA, 19 nt, Artificial Sequence
  Description of Artificial Sequence: Synthetic oligonucleotide
ucugaaauuacauagaaaa

SEQ ID NO: 696259 - RNA, 19 nt, Artificial Sequence
  Description of Artificial Sequence: Synthetic oligonucleotide
acaauuaggcaccagaggc

SEQ ID NO: 696260 - RNA, 19 nt, Artificial Sequence
  Description of Artificial Sequence: Synthetic oligonucleotide
aaacaauucacagacaagg

SEQ ID NO: 696261 - RNA, 19 nt, Artificial Sequence
  Description of Artificial Sequence: Synthetic oligonucleotide
aaacaguuuaaauacuagg

SEQ ID NO: 696262 - RNA, 19 nt, Artificial Sequence
  Description of Artificial Sequence: Synthetic oligonucleotide
uaauaauacacacacacac

SEQ ID NO: 696263 - RNA, 19 nt, Artificial Sequence
  Description of Artificial Sequence: Synthetic oligonucleotide
ugacaaagcaucuuaaggg

SEQ ID NO: 696264 - RNA, 19 nt, Artificial Sequence
  Description of Artificial Sequence: Synthetic oligonucleotide
auaauacacacacacacac

SEQ ID NO: 696265 - RNA, 19 nt, Artificial Sequence
  Description of Artificial Sequence: Synthetic oligonucleotide
acuauugccauccaaagag

SEQ ID NO: 696266 - RNA, 19 nt, Artificial Sequence
  Description of Artificial Sequence: Synthetic oligonucleotide
agugaauuaaccuagaauu

SEQ ID NO: 696267 - RNA, 19 nt, Artificial Sequence
  Description of Artificial Sequence: Synthetic oligonucleotide
ggagauauaaauuuauucg

SEQ ID NO: 696268 - RNA, 19 nt, Artificial Sequence
  Description of Artificial Sequence: Synthetic oligonucleotide
aauaccuuauuuuacacaa

SEQ ID NO: 696269 - RNA, 19 nt, Artificial Sequence
  Description of Artificial Sequence: Synthetic oligonucleotide
uacugaguaauccagacgc

SEQ ID NO: 696270 - RNA, 19 nt, Artificial Sequence
  Description of Artificial Sequence: Synthetic oligonucleotide
uauagcaaacauaaaacug

SEQ ID NO: 696271 - RNA, 19 nt, Artificial Sequence
  Description of Artificial Sequence: Synthetic oligonucleotide
aacaaguucacaauguggg

SEQ ID NO: 696272 - RNA, 19 nt, Artificial Sequence
  Description of Artificial Sequence: Synthetic oligonucleotide
aauacuaggacugccaaag

SEQ ID NO: 696273 - RNA, 19 nt, Artificial Sequence
  Description of Artificial Sequence: Synthetic oligonucleotide
uacgaaacacaaaaggagg

SEQ ID NO: 696274 - RNA, 19 nt, Artificial Sequence
  Description of Artificial Sequence: Synthetic oligonucleotide
aguucuacauagcaagugc

SEQ ID NO: 696275 - RNA, 19 nt, Artificial Sequence
  Description of Artificial Sequence: Synthetic oligonucleotide
gauauagacacaauccugg

SEQ ID NO: 696276 - RNA, 19 nt, Artificial Sequence
  Description of Artificial Sequence: Synthetic oligonucleotide
aguauagcaaacauaaaac

SEQ ID NO: 696277 - RNA, 19 nt, Artificial Sequence
  Description of Artificial Sequence: Synthetic oligonucleotide
aauacacacacacacacaa

SEQ ID NO: 696278 - RNA, 19 nt, Artificial Sequence
  Description of Artificial Sequence: Synthetic oligonucleotide
aauugugugcucaaaaguc

SEQ ID NO: 696279 - RNA, 19 nt, Artificial Sequence
  Description of Artificial Sequence: Synthetic oligonucleotide
ucacaauuuauuuuguccc

SEQ ID NO: 696280 - RNA, 19 nt, Artificial Sequence
  Description of Artificial Sequence: Synthetic oligonucleotide
auaagcuuacuuuugcaac

SEQ ID NO: 696281 - RNA, 19 nt, Artificial Sequence
  Description of Artificial Sequence: Synthetic oligonucleotide
auauacaggagauacuuag

SEQ ID NO: 696282 - RNA, 19 nt, Artificial Sequence
  Description of Artificial Sequence: Synthetic oligonucleotide
uuuggaagaauuauuuaca

SEQ ID NO: 696283 - RNA, 19 nt, Artificial Sequence
  Description of Artificial Sequence: Synthetic oligonucleotide
aacuuauucacaauuccac

SEQ ID NO: 696284 - RNA, 19 nt, Artificial Sequence
  Description of Artificial Sequence: Synthetic oligonucleotide
ugaaacaauucacagacaa

SEQ ID NO: 696285 - RNA, 19 nt, Artificial Sequence
  Description of Artificial Sequence: Synthetic oligonucleotide
ugcaucucaacuuugggag

SEQ ID NO: 696286 - RNA, 19 nt, Artificial Sequence
  Description of Artificial Sequence: Synthetic oligonucleotide
uuaauaagcuuacuuuugc

SEQ ID NO: 696287 - RNA, 19 nt, Artificial Sequence
  Description of Artificial Sequence: Synthetic oligonucleotide
uaacaaguucacaaugugg

SEQ ID NO: 696288 - RNA, 19 nt, Artificial Sequence
  Description of Artificial Sequence: Synthetic oligonucleotide
gaauuuauguccauggcag

SEQ ID NO: 696289 - RNA, 19 nt, Artificial Sequence
  Description of Artificial Sequence: Synthetic oligonucleotide
aagauaauaccuuauuuua

SEQ ID NO: 696290 - RNA, 19 nt, Artificial Sequence
  Description of Artificial Sequence: Synthetic oligonucleotide
aaauacaaccauccaaugu

SEQ ID NO: 696291 - RNA, 19 nt, Artificial Sequence
  Description of Artificial Sequence: Synthetic oligonucleotide
aauuuauucggcaguauag

SEQ ID NO: 696292 - RNA, 19 nt, Artificial Sequence
  Description of Artificial Sequence: Synthetic oligonucleotide
aaagagugaauuaaccuag

SEQ ID NO: 696293 - RNA, 19 nt, Artificial Sequence
  Description of Artificial Sequence: Synthetic oligonucleotide
auaauaccuuauuuuacac

SEQ ID NO: 696294 - RNA, 19 nt, Artificial Sequence
  Description of Artificial Sequence: Synthetic oligonucleotide
aauaagcuuacuuuugcaa

SEQ ID NO: 696295 - RNA, 19 nt, Artificial Sequence
  Description of Artificial Sequence: Synthetic oligonucleotide
gauaauaccuuauuuuaca

SEQ ID NO: 696296 - RNA, 19 nt, Artificial Sequence
  Description of Artificial Sequence: Synthetic oligonucleotide
guugcaagggcugagaccg

SEQ ID NO: 696297 - RNA, 19 nt, Artificial Sequence
  Description of Artificial Sequence: Synthetic oligonucleotide
uuaucuaauucauugaguu

SEQ ID NO: 696298 - RNA, 19 nt, Artificial Sequence
  Description of Artificial Sequence: Synthetic oligonucleotide
acaaguugcaagauaauac

SEQ ID NO: 696299 - RNA, 19 nt, Artificial Sequence
  Description of Artificial Sequence: Synthetic oligonucleotide
aacaguuuaaauacuagga

SEQ ID NO: 696300 - RNA, 19 nt, Artificial Sequence
  Description of Artificial Sequence: Synthetic oligonucleotide
caaguugcaagauaauacc

SEQ ID NO: 696301 - RNA, 19 nt, Artificial Sequence
  Description of Artificial Sequence: Synthetic oligonucleotide
ugaaaacuuauucacaauu

SEQ ID NO: 696302 - RNA, 19 nt, Artificial Sequence
  Description of Artificial Sequence: Synthetic oligonucleotide
aucaccugcacucuacagc

SEQ ID NO: 696303 - RNA, 19 nt, Artificial Sequence
  Description of Artificial Sequence: Synthetic oligonucleotide
auuuauucggcaguauagc

SEQ ID NO: 696304 - RNA, 19 nt, Artificial Sequence
  Description of Artificial Sequence: Synthetic oligonucleotide
uccaaagagugaauuaacc

SEQ ID NO: 696305 - RNA, 19 nt, Artificial Sequence
  Description of Artificial Sequence: Synthetic oligonucleotide
aauaacaaguucacaaugu

SEQ ID NO: 696306 - RNA, 19 nt, Artificial Sequence
  Description of Artificial Sequence: Synthetic oligonucleotide
uguugcaucucaacuuugg

SEQ ID NO: 696307 - RNA, 19 nt, Artificial Sequence
  Description of Artificial Sequence: Synthetic oligonucleotide
cuuauucacaauuccacug

SEQ ID NO: 696308 - RNA, 19 nt, Artificial Sequence
  Description of Artificial Sequence: Synthetic oligonucleotide
uuugccaucaacccacuac

SEQ ID NO: 696309 - RNA, 19 nt, Artificial Sequence
  Description of Artificial Sequence: Synthetic oligonucleotide
caacccacuacuuccaucg

SEQ ID NO: 696310 - RNA, 19 nt, Artificial Sequence
  Description of Artificial Sequence: Synthetic oligonucleotide
uacauaguggcuuuacgug

SEQ ID NO: 696311 - RNA, 19 nt, Artificial Sequence
  Description of Artificial Sequence: Synthetic oligonucleotide
ugauuguugcaucucaacu

SEQ ID NO: 696312 - RNA, 19 nt, Artificial Sequence
  Description of Artificial Sequence: Synthetic oligonucleotide
auauuugcauaauugugug

SEQ ID NO: 696313 - RNA, 19 nt, Artificial Sequence
  Description of Artificial Sequence: Synthetic oligonucleotide
uuaaccuagaauuuucuuu

SEQ ID NO: 696314 - RNA, 19 nt, Artificial Sequence
  Description of Artificial Sequence: Synthetic oligonucleotide
ucauugaguugcaagcucc

SEQ ID NO: 696315 - RNA, 19 nt, Artificial Sequence
  Description of Artificial Sequence: Synthetic oligonucleotide
aaacaaccccuuuuaaugu

SEQ ID NO: 696316 - RNA, 19 nt, Artificial Sequence
  Description of Artificial Sequence: Synthetic oligonucleotide
uaagguaguccacugaaaa

SEQ ID NO: 696317 - RNA, 19 nt, Artificial Sequence
  Description of Artificial Sequence: Synthetic oligonucleotide
agauguuugacuggcgugc

SEQ ID NO: 696318 - RNA, 19 nt, Artificial Sequence
  Description of Artificial Sequence: Synthetic oligonucleotide
ucugugguuguauuucagg

SEQ ID NO: 696319 - RNA, 19 nt, Artificial Sequence
  Description of Artificial Sequence: Synthetic oligonucleotide
uuuaaaccugggcacacug

SEQ ID NO: 696320 - RNA, 19 nt, Artificial Sequence
  Description of Artificial Sequence: Synthetic oligonucleotide
gaggcuucaaaacaacccc

SEQ ID NO: 696321 - RNA, 19 nt, Artificial Sequence
  Description of Artificial Sequence: Synthetic oligonucleotide
uacacacacacacacaaaa

SEQ ID NO: 696322 - RNA, 19 nt, Artificial Sequence
  Description of Artificial Sequence: Synthetic oligonucleotide
gcauacgaaacacaaaagg

SEQ ID NO: 696323 - RNA, 19 nt, Artificial Sequence
  Description of Artificial Sequence: Synthetic oligonucleotide
uuguauuucaggguuuggg

SEQ ID NO: 696324 - RNA, 19 nt, Artificial Sequence
  Description of Artificial Sequence: Synthetic oligonucleotide
auaacaaguucacaaugug

SEQ ID NO: 696325 - RNA, 19 nt, Artificial Sequence
  Description of Artificial Sequence: Synthetic oligonucleotide
uacagcauacgaaacacaa

SEQ ID NO: 696326 - RNA, 19 nt, Artificial Sequence
  Description of Artificial Sequence: Synthetic oligonucleotide
aauguacaaacaugaauuu

SEQ ID NO: 696327 - RNA, 19 nt, Artificial Sequence
  Description of Artificial Sequence: Synthetic oligonucleotide
caguuuucagucaacuacg

SEQ ID NO: 696328 - RNA, 19 nt, Artificial Sequence
  Description of Artificial Sequence: Synthetic oligonucleotide
auacgaaacacaaaaggag

SEQ ID NO: 696329 - RNA, 19 nt, Artificial Sequence
  Description of Artificial Sequence: Synthetic oligonucleotide
auacauaguggcuuuacgu

SEQ ID NO: 696330 - RNA, 19 nt, Artificial Sequence
  Description of Artificial Sequence: Synthetic oligonucleotide
uuuugucccauuuacacuu

SEQ ID NO: 696331 - RNA, 19 nt, Artificial Sequence
  Description of Artificial Sequence: Synthetic oligonucleotide
ugugacaaagcaucuuaag

SEQ ID NO: 696332 - RNA, 19 nt, Artificial Sequence
  Description of Artificial Sequence: Synthetic oligonucleotide
uuuauucggcaguauagca

SEQ ID NO: 696333 - RNA, 19 nt, Artificial Sequence
  Description of Artificial Sequence: Synthetic oligonucleotide
auuugcauaauugugugcu

SEQ ID NO: 696334 - RNA, 19 nt, Artificial Sequence
  Description of Artificial Sequence: Synthetic oligonucleotide
cauacgaaacacaaaagga

SEQ ID NO: 696335 - RNA, 19 nt, Artificial Sequence
  Description of Artificial Sequence: Synthetic oligonucleotide
auauuaucuaauucauuga

SEQ ID NO: 696336 - RNA, 19 nt, Artificial Sequence
  Description of Artificial Sequence: Synthetic oligonucleotide
uaggggaugaauucgggug

SEQ ID NO: 696337 - RNA, 19 nt, Artificial Sequence
  Description of Artificial Sequence: Synthetic oligonucleotide
  modified_base (6)..(6): a, c, u, g, unknown or other
gggganacgaugaagaggg

SEQ ID NO: 696338 - RNA, 19 nt, Artificial Sequence
  Description of Artificial Sequence: Synthetic oligonucleotide
acuuccaucgcuuggccuc

SEQ ID NO: 696339 - RNA, 19 nt, Artificial Sequence
  Description of Artificial Sequence: Synthetic oligonucleotide
uucaguaaugcucugccau

SEQ ID NO: 696340 - RNA, 19 nt, Artificial Sequence
  Description of Artificial Sequence: Synthetic oligonucleotide
uauacaggagauacuuagc

SEQ ID NO: 696341 - RNA, 19 nt, Artificial Sequence
  Description of Artificial Sequence: Synthetic oligonucleotide
aggggaugaauucgggugc

SEQ ID NO: 696342 - RNA, 19 nt, Artificial Sequence
  Description of Artificial Sequence: Synthetic oligonucleotide
agauaauaccuuauuuuac

SEQ ID NO: 696343 - RNA, 19 nt, Artificial Sequence
  Description of Artificial Sequence: Synthetic oligonucleotide
ucugccauccaucacgggu

SEQ ID NO: 696344 - RNA, 19 nt, Artificial Sequence
  Description of Artificial Sequence: Synthetic oligonucleotide
uauugccauccaaagagug

SEQ ID NO: 696345 - RNA, 19 nt, Artificial Sequence
  Description of Artificial Sequence: Synthetic oligonucleotide
aauuccacuguaaacauua

SEQ ID NO: 696346 - RNA, 19 nt, Artificial Sequence
  Description of Artificial Sequence: Synthetic oligonucleotide
auggaagaaauacugaaua

SEQ ID NO: 696347 - RNA, 19 nt, Artificial Sequence
  Description of Artificial Sequence: Synthetic oligonucleotide
aauaauacacacacacaca

SEQ ID NO: 696348 - RNA, 19 nt, Artificial Sequence
  Description of Artificial Sequence: Synthetic oligonucleotide
acuuauuacaacugcaguu

SEQ ID NO: 696349 - RNA, 19 nt, Artificial Sequence
  Description of Artificial Sequence: Synthetic oligonucleotide
ucaacuacgcuuccuuuca

SEQ ID NO: 696350 - RNA, 19 nt, Artificial Sequence
  Description of Artificial Sequence: Synthetic oligonucleotide
aacuauugccauccaaaga

SEQ ID NO: 696351 - RNA, 19 nt, Artificial Sequence
  Description of Artificial Sequence: Synthetic oligonucleotide
uccaaugucugaauaaaua

SEQ ID NO: 696352 - RNA, 19 nt, Artificial Sequence
  Description of Artificial Sequence: Synthetic oligonucleotide
uuucagucaacuacgcuuc

SEQ ID NO: 696353 - RNA, 19 nt, Artificial Sequence
  Description of Artificial Sequence: Synthetic oligonucleotide
aaacuuauucacaauucca

SEQ ID NO: 696354 - RNA, 19 nt, Artificial Sequence
  Description of Artificial Sequence: Synthetic oligonucleotide
uccacuuauauguccuagg

SEQ ID NO: 696355 - RNA, 19 nt, Artificial Sequence
  Description of Artificial Sequence: Synthetic oligonucleotide
auacugaguaauccagacg

SEQ ID NO: 696356 - RNA, 19 nt, Artificial Sequence
  Description of Artificial Sequence: Synthetic oligonucleotide
aaaacguucaucaccugca

SEQ ID NO: 696357 - RNA, 19 nt, Artificial Sequence
  Description of Artificial Sequence: Synthetic oligonucleotide
gacauauaguauuuucuga

SEQ ID NO: 696358 - RNA, 19 nt, Artificial Sequence
  Description of Artificial Sequence: Synthetic oligonucleotide
uuauucggcaguauagcaa

SEQ ID NO: 696359 - RNA, 19 nt, Artificial Sequence
  Description of Artificial Sequence: Synthetic oligonucleotide
acgaaacacaaaaggaggc

SEQ ID NO: 696360 - RNA, 19 nt, Artificial Sequence
  Description of Artificial Sequence: Synthetic oligonucleotide
auacugaauaacaaguuca

SEQ ID NO: 696361 - RNA, 19 nt, Artificial Sequence
  Description of Artificial Sequence: Synthetic oligonucleotide
uauucggcaguauagcaaa

SEQ ID NO: 696362 - RNA, 19 nt, Artificial Sequence
  Description of Artificial Sequence: Synthetic oligonucleotide
uuacacuuuuaaaccuggg

SEQ ID NO: 696363 - RNA, 19 nt, Artificial Sequence
  Description of Artificial Sequence: Synthetic oligonucleotide
uugacuggcgugcauuugc

SEQ ID NO: 696364 - RNA, 19 nt, Artificial Sequence
  Description of Artificial Sequence: Synthetic oligonucleotide
gauaagguaguccacugaa

SEQ ID NO: 696365 - RNA, 19 nt, Artificial Sequence
  Description of Artificial Sequence: Synthetic oligonucleotide
aucacggguguguugugcc

SEQ ID NO: 696366 - RNA, 19 nt, Artificial Sequence
  Description of Artificial Sequence: Synthetic oligonucleotide
uauggcaggucaccuaacc

SEQ ID NO: 696367 - RNA, 19 nt, Artificial Sequence
  Description of Artificial Sequence: Synthetic oligonucleotide
ucaaugguugcaacuucag

SEQ ID NO: 696368 - RNA, 19 nt, Artificial Sequence
  Description of Artificial Sequence: Synthetic oligonucleotide
ugauuuuggaagaauuauu

SEQ ID NO: 696369 - RNA, 19 nt, Artificial Sequence
  Description of Artificial Sequence: Synthetic oligonucleotide
cuuuggcaguucuacauag

SEQ ID NO: 696370 - RNA, 19 nt, Artificial Sequence
  Description of Artificial Sequence: Synthetic oligonucleotide
cauacauaguggcuuuacg

SEQ ID NO: 696371 - RNA, 19 nt, Artificial Sequence
  Description of Artificial Sequence: Synthetic oligonucleotide
ucaccuaaccuucaauuau

SEQ ID NO: 696372 - RNA, 19 nt, Artificial Sequence
  Description of Artificial Sequence: Synthetic oligonucleotide
aauuaaccuagaauuuucu

SEQ ID NO: 696373 - RNA, 19 nt, Artificial Sequence
  Description of Artificial Sequence: Synthetic oligonucleotide
gagauacuuagccagcuga

SEQ ID NO: 696374 - RNA, 19 nt, Artificial Sequence
  Description of Artificial Sequence: Synthetic oligonucleotide
ugaguaauccagacgccca

SEQ ID NO: 696375 - RNA, 19 nt, Artificial Sequence
  Description of Artificial Sequence: Synthetic oligonucleotide
caguauagcaaacauaaaa

SEQ ID NO: 696376 - RNA, 19 nt, Artificial Sequence
  Description of Artificial Sequence: Synthetic oligonucleotide
aaguucacaaugugggaaa

SEQ ID NO: 696377 - RNA, 19 nt, Artificial Sequence
  Description of Artificial Sequence: Synthetic oligonucleotide
aucacguuacagcauacga

SEQ ID NO: 696378 - RNA, 19 nt, Artificial Sequence
  Description of Artificial Sequence: Synthetic oligonucleotide
agacauacugaguaaucca

SEQ ID NO: 696379 - RNA, 19 nt, Artificial Sequence
  Description of Artificial Sequence: Synthetic oligonucleotide
uugaguugcaagcuccacu

SEQ ID NO: 696380 - RNA, 19 nt, Artificial Sequence
  Description of Artificial Sequence: Synthetic oligonucleotide
uaauacacacacacacaca

SEQ ID NO: 696381 - RNA, 19 nt, Artificial Sequence
  Description of Artificial Sequence: Synthetic oligonucleotide
aguggagaaacaaugauuu

SEQ ID NO: 696382 - RNA, 19 nt, Artificial Sequence
  Description of Artificial Sequence: Synthetic oligonucleotide
ucacguuacagcauacgaa

SEQ ID NO: 696383 - RNA, 19 nt, Artificial Sequence
  Description of Artificial Sequence: Synthetic oligonucleotide
aagacuuauuacaacugca

SEQ ID NO: 696384 - RNA, 19 nt, Artificial Sequence
  Description of Artificial Sequence: Synthetic oligonucleotide
ugacauagacgcuccugcg

SEQ ID NO: 696385 - RNA, 19 nt, Artificial Sequence
  Description of Artificial Sequence: Synthetic oligonucleotide
uacuuagccagcugagugc

SEQ ID NO: 696386 - RNA, 19 nt, Artificial Sequence
  Description of Artificial Sequence: Synthetic oligonucleotide
ugcucaaaaguccuauaaa

SEQ ID NO: 696387 - RNA, 19 nt, Artificial Sequence
  Description of Artificial Sequence: Synthetic oligonucleotide
cagcaaguacauuuugggg

SEQ ID NO: 696388 - RNA, 19 nt, Artificial Sequence
  Description of Artificial Sequence: Synthetic oligonucleotide
uugcuugaacuguccaugg

SEQ ID NO: 696389 - RNA, 19 nt, Artificial Sequence
  Description of Artificial Sequence: Synthetic oligonucleotide
  modified_base (2)..(2): a, c, u, g, unknown or other
anacgaugaagaggggcuc

SEQ ID NO: 696390 - RNA, 19 nt, Artificial Sequence
  Description of Artificial Sequence: Synthetic oligonucleotide
augauuucaguaaugcucu

SEQ ID NO: 696391 - RNA, 19 nt, Artificial Sequence
  Description of Artificial Sequence: Synthetic oligonucleotide
acauagacgcuccugcgug

SEQ ID NO: 696392 - RNA, 19 nt, Artificial Sequence
  Description of Artificial Sequence: Synthetic oligonucleotide
uguaucagccugugaaaca

SEQ ID NO: 696393 - RNA, 19 nt, Artificial Sequence
  Description of Artificial Sequence: Synthetic oligonucleotide
aaauacuaggacugccaaa

SEQ ID NO: 696394 - RNA, 19 nt, Artificial Sequence
  Description of Artificial Sequence: Synthetic oligonucleotide
caaagagugaauuaaccua

SEQ ID NO: 696395 - RNA, 19 nt, Artificial Sequence
  Description of Artificial Sequence: Synthetic oligonucleotide
uccugcgugagacacuucu

SEQ ID NO: 696396 - RNA, 19 nt, Artificial Sequence
  Description of Artificial Sequence: Synthetic oligonucleotide
uuuacgugauuguugcauc

SEQ ID NO: 696397 - RNA, 19 nt, Artificial Sequence
  Description of Artificial Sequence: Synthetic oligonucleotide
uucauugaguugcaagcuc

SEQ ID NO: 696398 - RNA, 19 nt, Artificial Sequence
  Description of Artificial Sequence: Synthetic oligonucleotide
uaucacguuacagcauacg

SEQ ID NO: 696399 - RNA, 19 nt, Artificial Sequence
  Description of Artificial Sequence: Synthetic oligonucleotide
uguugcaagggcugagacc

SEQ ID NO: 696400 - RNA, 19 nt, Artificial Sequence
  Description of Artificial Sequence: Synthetic oligonucleotide
ucugcucucucucucuugu

SEQ ID NO: 696401 - RNA, 19 nt, Artificial Sequence
  Description of Artificial Sequence: Synthetic oligonucleotide
aguuuucagucaacuacgc

SEQ ID NO: 696402 - RNA, 19 nt, Artificial Sequence
  Description of Artificial Sequence: Synthetic oligonucleotide
aacuacgcuuccuuucaca

SEQ ID NO: 696403 - RNA, 19 nt, Artificial Sequence
  Description of Artificial Sequence: Synthetic oligonucleotide
guauagcaaacauaaaacu

SEQ ID NO: 696404 - RNA, 19 nt, Artificial Sequence
  Description of Artificial Sequence: Synthetic oligonucleotide
aaguugcaagauaauaccu

SEQ ID NO: 696405 - RNA, 19 nt, Artificial Sequence
  Description of Artificial Sequence: Synthetic oligonucleotide
uuauauguccuaggggaug

SEQ ID NO: 696406 - RNA, 19 nt, Artificial Sequence
  Description of Artificial Sequence: Synthetic oligonucleotide
ucuacauagcaagugcuuc

SEQ ID NO: 696407 - RNA, 19 nt, Artificial Sequence
  Description of Artificial Sequence: Synthetic oligonucleotide
uguccuaggggaugaauuc

SEQ ID NO: 696408 - RNA, 19 nt, Artificial Sequence
  Description of Artificial Sequence: Synthetic oligonucleotide
uuuggcaguucuacauagc

SEQ ID NO: 696409 - RNA, 19 nt, Artificial Sequence
  Description of Artificial Sequence: Synthetic oligonucleotide
aacccacuacuuccaucgc

SEQ ID NO: 696410 - RNA, 19 nt, Artificial Sequence
  Description of Artificial Sequence: Synthetic oligonucleotide
augauuuuggaagaauuau

SEQ ID NO: 696411 - RNA, 19 nt, Artificial Sequence
  Description of Artificial Sequence: Synthetic oligonucleotide
cuaaccuucaauuauuaau

SEQ ID NO: 696412 - RNA, 19 nt, Artificial Sequence
  Description of Artificial Sequence: Synthetic oligonucleotide
ugcuguucuguugcaaggg

SEQ ID NO: 696413 - RNA, 19 nt, Artificial Sequence
  Description of Artificial Sequence: Synthetic oligonucleotide
ugucaagggauaagguagu

SEQ ID NO: 696414 - RNA, 19 nt, Artificial Sequence
  Description of Artificial Sequence: Synthetic oligonucleotide
acaaccauccaaugucuga

SEQ ID NO: 696415 - RNA, 19 nt, Artificial Sequence
  Description of Artificial Sequence: Synthetic oligonucleotide
agaccgacucccuucagca

SEQ ID NO: 696416 - RNA, 19 nt, Artificial Sequence
  Description of Artificial Sequence: Synthetic oligonucleotide
ugcacucuacagcaaguac

SEQ ID NO: 696417 - RNA, 19 nt, Artificial Sequence
  Description of Artificial Sequence: Synthetic oligonucleotide
ggaggauauagacacaauc

SEQ ID NO: 696418 - RNA, 19 nt, Artificial Sequence
  Description of Artificial Sequence: Synthetic oligonucleotide
ugcucucucucucuuguac

SEQ ID NO: 696419 - RNA, 19 nt, Artificial Sequence
  Description of Artificial Sequence: Synthetic oligonucleotide
cuucaauuauuaauaagcu

SEQ ID NO: 696420 - RNA, 19 nt, Artificial Sequence
  Description of Artificial Sequence: Synthetic oligonucleotide
agcaagugcuuccacaaaa

SEQ ID NO: 696421 - RNA, 19 nt, Artificial Sequence
  Description of Artificial Sequence: Synthetic oligonucleotide
acaaagacauacugaguaa

SEQ ID NO: 696422 - RNA, 19 nt, Artificial Sequence
  Description of Artificial Sequence: Synthetic oligonucleotide
ggcuuuacgugauuguugc

SEQ ID NO: 696423 - RNA, 19 nt, Artificial Sequence
  Description of Artificial Sequence: Synthetic oligonucleotide
auggcagggagaucuucac

SEQ ID NO: 696424 - RNA, 19 nt, Artificial Sequence
  Description of Artificial Sequence: Synthetic oligonucleotide
uuacgugauuguugcaucu

SEQ ID NO: 696425 - RNA, 19 nt, Artificial Sequence
  Description of Artificial Sequence: Synthetic oligonucleotide
auccaaagagugaauuaac

SEQ ID NO: 696426 - RNA, 19 nt, Artificial Sequence
  Description of Artificial Sequence: Synthetic oligonucleotide
acaacuauugccauccaaa

SEQ ID NO: 696427 - RNA, 19 nt, Artificial Sequence
  Description of Artificial Sequence: Synthetic oligonucleotide
ucuguacuguucauauuau

SEQ ID NO: 696428 - RNA, 19 nt, Artificial Sequence
  Description of Artificial Sequence: Synthetic oligonucleotide
ucggcaguauagcaaacau

SEQ ID NO: 696429 - RNA, 19 nt, Artificial Sequence
  Description of Artificial Sequence: Synthetic oligonucleotide
ggcaguauagcaaacauaa

SEQ ID NO: 696430 - RNA, 19 nt, Artificial Sequence
  Description of Artificial Sequence: Synthetic oligonucleotide
aguugcaagcuccacuuau

SEQ ID NO: 696431 - RNA, 19 nt, Artificial Sequence
  Description of Artificial Sequence: Synthetic oligonucleotide
caggguuugggaauuuaug

SEQ ID NO: 696432 - RNA, 19 nt, Artificial Sequence
  Description of Artificial Sequence: Synthetic oligonucleotide
cagaugacauagacgcucc

SEQ ID NO: 696433 - RNA, 19 nt, Artificial Sequence
  Description of Artificial Sequence: Synthetic oligonucleotide
aacaaccccuuuuaaugua

SEQ ID NO: 696434 - RNA, 19 nt, Artificial Sequence
  Description of Artificial Sequence: Synthetic oligonucleotide
aagggauaagguaguccac

SEQ ID NO: 696435 - RNA, 19 nt, Artificial Sequence
  Description of Artificial Sequence: Synthetic oligonucleotide
cucuguacuguucauauua

SEQ ID NO: 696436 - RNA, 19 nt, Artificial Sequence
  Description of Artificial Sequence: Synthetic oligonucleotide
uguugugccucugucugcc

SEQ ID NO: 696437 - RNA, 19 nt, Artificial Sequence
  Description of Artificial Sequence: Synthetic oligonucleotide
cauagccugggacacccgg

SEQ ID NO: 696438 - RNA, 19 nt, Artificial Sequence
  Description of Artificial Sequence: Synthetic oligonucleotide
ucaguaaugcucugccauc

SEQ ID NO: 696439 - RNA, 19 nt, Artificial Sequence
  Description of Artificial Sequence: Synthetic oligonucleotide
agacgcuccugcgugagac

SEQ ID NO: 696440 - RNA, 19 nt, Artificial Sequence
  Description of Artificial Sequence: Synthetic oligonucleotide
gcuucugcggcuuggacag

SEQ ID NO: 696441 - RNA, 19 nt, Artificial Sequence
  Description of Artificial Sequence: Synthetic oligonucleotide
uugcaagcuccacuuauau

SEQ ID NO: 696442 - RNA, 19 nt, Artificial Sequence
  Description of Artificial Sequence: Synthetic oligonucleotide
acuacgcuuccuuucacaa

SEQ ID NO: 696443 - RNA, 19 nt, Artificial Sequence
  Description of Artificial Sequence: Synthetic oligonucleotide
uuccacuguaaacauuaau

SEQ ID NO: 696444 - RNA, 19 nt, Artificial Sequence
  Description of Artificial Sequence: Synthetic oligonucleotide
guugcaagauaauaccuua

SEQ ID NO: 696445 - RNA, 19 nt, Artificial Sequence
  Description of Artificial Sequence: Synthetic oligonucleotide
ugcaagcuccacuuauaug

SEQ ID NO: 696446 - RNA, 19 nt, Artificial Sequence
  Description of Artificial Sequence: Synthetic oligonucleotide
ccccuuuuaauguacaaac

SEQ ID NO: 696447 - RNA, 19 nt, Artificial Sequence
  Description of Artificial Sequence: Synthetic oligonucleotide
caagauaauaccuuauuuu

SEQ ID NO: 696448 - RNA, 19 nt, Artificial Sequence
  Description of Artificial Sequence: Synthetic oligonucleotide
  modified_base (3)..(3): a, c, u, g, unknown or other
ganacgaugaagaggggcu

SEQ ID NO: 696449 - RNA, 19 nt, Artificial Sequence
  Description of Artificial Sequence: Synthetic oligonucleotide
agagugaauuaaccuagaa

SEQ ID NO: 696450 - RNA, 19 nt, Artificial Sequence
  Description of Artificial Sequence: Synthetic oligonucleotide
agccugugaaacaauucac

SEQ ID NO: 696451 - RNA, 19 nt, Artificial Sequence
  Description of Artificial Sequence: Synthetic oligonucleotide
aguggcuuuacgugauugu

SEQ ID NO: 696452 - RNA, 19 nt, Artificial Sequence
  Description of Artificial Sequence: Synthetic oligonucleotide
gagugaauuaaccuagaau

SEQ ID NO: 696453 - RNA, 19 nt, Artificial Sequence
  Description of Artificial Sequence: Synthetic oligonucleotide
uugcaagauaauaccuuau

SEQ ID NO: 696454 - RNA, 19 nt, Artificial Sequence
  Description of Artificial Sequence: Synthetic oligonucleotide
caucuuaagggcaaccaaa

SEQ ID NO: 696455 - RNA, 19 nt, Artificial Sequence
  Description of Artificial Sequence: Synthetic oligonucleotide
auugaguugcaagcuccac

SEQ ID NO: 696456 - RNA, 19 nt, Artificial Sequence
  Description of Artificial Sequence: Synthetic oligonucleotide
gugauuguugcaucucaac

SEQ ID NO: 696457 - RNA, 19 nt, Artificial Sequence
  Description of Artificial Sequence: Synthetic oligonucleotide
cauagcaagugcuuccaca

SEQ ID NO: 696458 - RNA, 19 nt, Artificial Sequence
  Description of Artificial Sequence: Synthetic oligonucleotide
uacauagcaagugcuucca

SEQ ID NO: 696459 - RNA, 19 nt, Artificial Sequence
  Description of Artificial Sequence: Synthetic oligonucleotide
aguggaagacuuauuacaa

SEQ ID NO: 696460 - RNA, 19 nt, Artificial Sequence
  Description of Artificial Sequence: Synthetic oligonucleotide
  modified_base (4)..(4): a, c, u, g, unknown or other
gganacgaugaagaggggc

SEQ ID NO: 696461 - RNA, 19 nt, Artificial Sequence
  Description of Artificial Sequence: Synthetic oligonucleotide
accgacucccuucagcaca

SEQ ID NO: 696462 - RNA, 19 nt, Artificial Sequence
  Description of Artificial Sequence: Synthetic oligonucleotide
ccacuuauauguccuaggg

SEQ ID NO: 696463 - RNA, 19 nt, Artificial Sequence
  Description of Artificial Sequence: Synthetic oligonucleotide
gucaacuacgcuuccuuuc

SEQ ID NO: 696464 - RNA, 19 nt, Artificial Sequence
  Description of Artificial Sequence: Synthetic oligonucleotide
agcauacgaaacacaaaag

SEQ ID NO: 696465 - RNA, 19 nt, Artificial Sequence
  Description of Artificial Sequence: Synthetic oligonucleotide
acgugauuguugcaucuca

SEQ ID NO: 696466 - RNA, 19 nt, Artificial Sequence
  Description of Artificial Sequence: Synthetic oligonucleotide
agauacuuagccagcugag

SEQ ID NO: 696467 - RNA, 19 nt, Artificial Sequence
  Description of Artificial Sequence: Synthetic oligonucleotide
gacuuauuacaacugcagu

SEQ ID NO: 696468 - RNA, 19 nt, Artificial Sequence
  Description of Artificial Sequence: Synthetic oligonucleotide
cagccugugaaacaauuca

SEQ ID NO: 696469 - RNA, 19 nt, Artificial Sequence
  Description of Artificial Sequence: Synthetic oligonucleotide
gaaguggagaaacaaugau

SEQ ID NO: 696470 - RNA, 19 nt, Artificial Sequence
  Description of Artificial Sequence: Synthetic oligonucleotide
cauuuacacuuuuaaaccu

SEQ ID NO: 696471 - RNA, 19 nt, Artificial Sequence
  Description of Artificial Sequence: Synthetic oligonucleotide
guugcaacuucagacuuca

SEQ ID NO: 696472 - RNA, 19 nt, Artificial Sequence
  Description of Artificial Sequence: Synthetic oligonucleotide
uucagucaacuacgcuucc

SEQ ID NO: 696473 - RNA, 19 nt, Artificial Sequence
  Description of Artificial Sequence: Synthetic oligonucleotide
ugguugcaacuucagacuu

SEQ ID NO: 696474 - RNA, 19 nt, Artificial Sequence
  Description of Artificial Sequence: Synthetic oligonucleotide
agcaucuuaagggcaacca

SEQ ID NO: 696475 - RNA, 19 nt, Artificial Sequence
  Description of Artificial Sequence: Synthetic oligonucleotide
aaguauggcaggucaccua

SEQ ID NO: 696476 - RNA, 19 nt, Artificial Sequence
  Description of Artificial Sequence: Synthetic oligonucleotide
ucgggugcuuuucucugug

SEQ ID NO: 696477 - RNA, 19 nt, Artificial Sequence
  Description of Artificial Sequence: Synthetic oligonucleotide
guccuaggggaugaauucg

SEQ ID NO: 696478 - RNA, 19 nt, Artificial Sequence
  Description of Artificial Sequence: Synthetic oligonucleotide
cauccaaagagugaauuaa

SEQ ID NO: 696479 - RNA, 19 nt, Artificial Sequence
  Description of Artificial Sequence: Synthetic oligonucleotide
agggauaagguaguccacu

SEQ ID NO: 696480 - RNA, 19 nt, Artificial Sequence
  Description of Artificial Sequence: Synthetic oligonucleotide
caucaccugcacucuacag

SEQ ID NO: 696481 - RNA, 19 nt, Artificial Sequence
  Description of Artificial Sequence: Synthetic oligonucleotide
gucccauuuacacuuuuaa

SEQ ID NO: 696482 - RNA, 19 nt, Artificial Sequence
  Description of Artificial Sequence: Synthetic oligonucleotide
cuguacuguucauauuauc

SEQ ID NO: 696483 - RNA, 19 nt, Artificial Sequence
  Description of Artificial Sequence: Synthetic oligonucleotide
ugucccauuuacacuuuua

SEQ ID NO: 696484 - RNA, 19 nt, Artificial Sequence
  Description of Artificial Sequence: Synthetic oligonucleotide
ggaagacuuauuacaacug

SEQ ID NO: 696485 - RNA, 19 nt, Artificial Sequence
  Description of Artificial Sequence: Synthetic oligonucleotide
ucuguugcaagggcugaga

SEQ ID NO: 696486 - RNA, 19 nt, Artificial Sequence
  Description of Artificial Sequence: Synthetic oligonucleotide
gacaacuauugccauccaa

SEQ ID NO: 696487 - RNA, 19 nt, Artificial Sequence
  Description of Artificial Sequence: Synthetic oligonucleotide
gggaauuuauguccauggc

SEQ ID NO: 696488 - RNA, 19 nt, Artificial Sequence
  Description of Artificial Sequence: Synthetic oligonucleotide
acguuacagcauacgaaac

SEQ ID NO: 696489 - RNA, 19 nt, Artificial Sequence
  Description of Artificial Sequence: Synthetic oligonucleotide
ugacuggcgugcauuugcu

SEQ ID NO: 696490 - RNA, 19 nt, Artificial Sequence
  Description of Artificial Sequence: Synthetic oligonucleotide
aguugcaagauaauaccuu

SEQ ID NO: 696491 - RNA, 19 nt, Artificial Sequence
  Description of Artificial Sequence: Synthetic oligonucleotide
aagagugaauuaaccuaga

SEQ ID NO: 696492 - RNA, 19 nt, Artificial Sequence
  Description of Artificial Sequence: Synthetic oligonucleotide
ucucucugcucucucucuc

SEQ ID NO: 696493 - RNA, 19 nt, Artificial Sequence
  Description of Artificial Sequence: Synthetic oligonucleotide
aguaaugcucugccaucca

SEQ ID NO: 696494 - RNA, 19 nt, Artificial Sequence
  Description of Artificial Sequence: Synthetic oligonucleotide
cucuacagcaaguacauuu

SEQ ID NO: 696495 - RNA, 19 nt, Artificial Sequence
  Description of Artificial Sequence: Synthetic oligonucleotide
cuaucacguuacagcauac

SEQ ID NO: 696496 - RNA, 19 nt, Artificial Sequence
  Description of Artificial Sequence: Synthetic oligonucleotide
uccagacgcccacuucugc

SEQ ID NO: 696497 - RNA, 19 nt, Artificial Sequence
  Description of Artificial Sequence: Synthetic oligonucleotide
ugggguucgucuuuugcuu

SEQ ID NO: 696498 - RNA, 19 nt, Artificial Sequence
  Description of Artificial Sequence: Synthetic oligonucleotide
uucucucugcucucucucu

SEQ ID NO: 696499 - RNA, 19 nt, Artificial Sequence
  Description of Artificial Sequence: Synthetic oligonucleotide
gucaccuaaccuucaauua

SEQ ID NO: 696500 - RNA, 19 nt, Artificial Sequence
  Description of Artificial Sequence: Synthetic oligonucleotide
uguuugacuggcgugcauu

SEQ ID NO: 696501 - RNA, 19 nt, Artificial Sequence
  Description of Artificial Sequence: Synthetic oligonucleotide
cuccacuuauauguccuag

SEQ ID NO: 696502 - RNA, 19 nt, Artificial Sequence
  Description of Artificial Sequence: Synthetic oligonucleotide
cuucucucugcucucucuc

SEQ ID NO: 696503 - RNA, 19 nt, Artificial Sequence
  Description of Artificial Sequence: Synthetic oligonucleotide
cuguugcaagggcugagac

SEQ ID NO: 696504 - RNA, 19 nt, Artificial Sequence
  Description of Artificial Sequence: Synthetic oligonucleotide
ugugugcucaaaaguccua

SEQ ID NO: 696505 - RNA, 19 nt, Artificial Sequence
  Description of Artificial Sequence: Synthetic oligonucleotide
ugugcucaaaaguccuaua

SEQ ID NO: 696506 - RNA, 19 nt, Artificial Sequence
  Description of Artificial Sequence: Synthetic oligonucleotide
uucuguugcaagggcugag

SEQ ID NO: 696507 - RNA, 19 nt, Artificial Sequence
  Description of Artificial Sequence: Synthetic oligonucleotide
acccacuacuuccaucgcu

SEQ ID NO: 696508 - RNA, 19 nt, Artificial Sequence
  Description of Artificial Sequence: Synthetic oligonucleotide
cacaaaaggaggcuucaaa

SEQ ID NO: 696509 - RNA, 19 nt, Artificial Sequence
  Description of Artificial Sequence: Synthetic oligonucleotide
uacuuccaucgcuuggccu

SEQ ID NO: 696510 - RNA, 19 nt, Artificial Sequence
  Description of Artificial Sequence: Synthetic oligonucleotide
auacuaggacugccaaagu

SEQ ID NO: 696511 - RNA, 19 nt, Artificial Sequence
  Description of Artificial Sequence: Synthetic oligonucleotide
uccuccugucaaugguugc

SEQ ID NO: 696512 - RNA, 19 nt, Artificial Sequence
  Description of Artificial Sequence: Synthetic oligonucleotide
ccuccaaacaguuuaaaua

SEQ ID NO: 696513 - RNA, 19 nt, Artificial Sequence
  Description of Artificial Sequence: Synthetic oligonucleotide
cacucguucgcuuuggggu

SEQ ID NO: 696514 - RNA, 19 nt, Artificial Sequence
  Description of Artificial Sequence: Synthetic oligonucleotide
acgcuccugcgugagacac

SEQ ID NO: 696515 - RNA, 19 nt, Artificial Sequence
  Description of Artificial Sequence: Synthetic oligonucleotide
cauuugcuugaacugucca

SEQ ID NO: 696516 - RNA, 19 nt, Artificial Sequence
  Description of Artificial Sequence: Synthetic oligonucleotide
cgggcuaucacguuacagc

SEQ ID NO: 696517 - RNA, 19 nt, Artificial Sequence
  Description of Artificial Sequence: Synthetic oligonucleotide
ucagucaacuacgcuuccu

SEQ ID NO: 696518 - RNA, 19 nt, Artificial Sequence
  Description of Artificial Sequence: Synthetic oligonucleotide
uugucccauucuuuucacu

SEQ ID NO: 696519 - RNA, 19 nt, Artificial Sequence
  Description of Artificial Sequence: Synthetic oligonucleotide
aggagauacuuagccagcu

SEQ ID NO: 696520 - RNA, 19 nt, Artificial Sequence
  Description of Artificial Sequence: Synthetic oligonucleotide
ugugcagccuccugccaaa

SEQ ID NO: 696521 - RNA, 19 nt, Artificial Sequence
  Description of Artificial Sequence: Synthetic oligonucleotide
ugcgugagacacuucucua

SEQ ID NO: 696522 - RNA, 19 nt, Artificial Sequence
  Description of Artificial Sequence: Synthetic oligonucleotide
gggcuaucacguuacagca

SEQ ID NO: 696523 - RNA, 19 nt, Artificial Sequence
  Description of Artificial Sequence: Synthetic oligonucleotide
agucaacuacgcuuccuuu

SEQ ID NO: 696524 - RNA, 19 nt, Artificial Sequence
  Description of Artificial Sequence: Synthetic oligonucleotide
ugacaacuauugccaucca

SEQ ID NO: 696525 - RNA, 19 nt, Artificial Sequence
  Description of Artificial Sequence: Synthetic oligonucleotide
gacauagacgcuccugcgu

SEQ ID NO: 696526 - RNA, 19 nt, Artificial Sequence
  Description of Artificial Sequence: Synthetic oligonucleotide
auagacgcuccugcgugag

SEQ ID NO: 696527 - RNA, 19 nt, Artificial Sequence
  Description of Artificial Sequence: Synthetic oligonucleotide
caaugguugcaacuucaga

SEQ ID NO: 696528 - RNA, 19 nt, Artificial Sequence
  Description of Artificial Sequence: Synthetic oligonucleotide
cauugaguugcaagcucca

SEQ ID NO: 696529 - RNA, 19 nt, Artificial Sequence
  Description of Artificial Sequence: Synthetic oligonucleotide
ugugccucugucugccauc

SEQ ID NO: 696530 - RNA, 19 nt, Artificial Sequence
  Description of Artificial Sequence: Synthetic oligonucleotide
ggacacccgggcuaucacg

SEQ ID NO: 696531 - RNA, 19 nt, Artificial Sequence
  Description of Artificial Sequence: Synthetic oligonucleotide
acugcugaacauauacuuu

SEQ ID NO: 696532 - RNA, 19 nt, Artificial Sequence
  Description of Artificial Sequence: Synthetic oligonucleotide
uacgugauuguugcaucuc

SEQ ID NO: 696533 - RNA, 19 nt, Artificial Sequence
  Description of Artificial Sequence: Synthetic oligonucleotide
caucacggguguguugugc

SEQ ID NO: 696534 - RNA, 19 nt, Artificial Sequence
  Description of Artificial Sequence: Synthetic oligonucleotide
ggagauacuuagccagcug

SEQ ID NO: 696535 - RNA, 19 nt, Artificial Sequence
  Description of Artificial Sequence: Synthetic oligonucleotide
auucggcaguauagcaaac

SEQ ID NO: 696536 - RNA, 19 nt, Artificial Sequence
  Description of Artificial Sequence: Synthetic oligonucleotide
gauguuugacuggcgugca

SEQ ID NO: 696537 - RNA, 19 nt, Artificial Sequence
  Description of Artificial Sequence: Synthetic oligonucleotide
gcuaucacguuacagcaua

SEQ ID NO: 696538 - RNA, 19 nt, Artificial Sequence
  Description of Artificial Sequence: Synthetic oligonucleotide
gcucagauguuugacuggc

SEQ ID NO: 696539 - RNA, 19 nt, Artificial Sequence
  Description of Artificial Sequence: Synthetic oligonucleotide
agaugacauagacgcuccu

SEQ ID NO: 696540 - RNA, 19 nt, Artificial Sequence
  Description of Artificial Sequence: Synthetic oligonucleotide
gaugaauucgggugcuuuu

SEQ ID NO: 696541 - RNA, 19 nt, Artificial Sequence
  Description of Artificial Sequence: Synthetic oligonucleotide
acucguucgcuuugggguu

SEQ ID NO: 696542 - RNA, 19 nt, Artificial Sequence
  Description of Artificial Sequence: Synthetic oligonucleotide
gauacuuagccagcugagu

SEQ ID NO: 696543 - RNA, 19 nt, Artificial Sequence
  Description of Artificial Sequence: Synthetic oligonucleotide
aggucaccuaaccuucaau

SEQ ID NO: 696544 - RNA, 19 nt, Artificial Sequence
  Description of Artificial Sequence: Synthetic oligonucleotide
aggacugccaaagucucua

SEQ ID NO: 696545 - RNA, 19 nt, Artificial Sequence
  Description of Artificial Sequence: Synthetic oligonucleotide
cacugcugaacauauacuu

SEQ ID NO: 696546 - RNA, 19 nt, Artificial Sequence
  Description of Artificial Sequence: Synthetic oligonucleotide
ucacggguguguugugccu

SEQ ID NO: 696547 - RNA, 19 nt, Artificial Sequence
  Description of Artificial Sequence: Synthetic oligonucleotide
cauauacuuuggcaguucu

SEQ ID NO: 696548 - RNA, 19 nt, Artificial Sequence
  Description of Artificial Sequence: Synthetic oligonucleotide
guccauggcagggagaucu

SEQ ID NO: 696549 - RNA, 19 nt, Artificial Sequence
  Description of Artificial Sequence: Synthetic oligonucleotide
ggauaagguaguccacuga

SEQ ID NO: 696550 - RNA, 19 nt, Artificial Sequence
  Description of Artificial Sequence: Synthetic oligonucleotide
cagggagaucuucacuguc

SEQ ID NO: 696551 - RNA, 19 nt, Artificial Sequence
  Description of Artificial Sequence: Synthetic oligonucleotide
auccaucacggguguguug

SEQ ID NO: 696552 - RNA, 19 nt, Artificial Sequence
  Description of Artificial Sequence: Synthetic oligonucleotide
ucucugcucucucucucuu

SEQ ID NO: 696553 - RNA, 19 nt, Artificial Sequence
  Description of Artificial Sequence: Synthetic oligonucleotide
caaccauccaaugucugaa

SEQ ID NO: 696554 - RNA, 19 nt, Artificial Sequence
  Description of Artificial Sequence: Synthetic oligonucleotide
ugcaagggcugagaccgac

SEQ ID NO: 696555 - RNA, 19 nt, Artificial Sequence
  Description of Artificial Sequence: Synthetic oligonucleotide
gguguguugugccucuguc

SEQ ID NO: 696556 - RNA, 19 nt, Artificial Sequence
  Description of Artificial Sequence: Synthetic oligonucleotide
cuuuacgugauuguugcau

SEQ ID NO: 696557 - RNA, 19 nt, Artificial Sequence
  Description of Artificial Sequence: Synthetic oligonucleotide
acccgggcuaucacguuac

SEQ ID NO: 696558 - RNA, 19 nt, Artificial Sequence
  Description of Artificial Sequence: Synthetic oligonucleotide
guucuacauagcaagugcu

SEQ ID NO: 696559 - RNA, 19 nt, Artificial Sequence
  Description of Artificial Sequence: Synthetic oligonucleotide
cuggcgugcauuugcuuga

SEQ ID NO: 696560 - RNA, 19 nt, Artificial Sequence
  Description of Artificial Sequence: Synthetic oligonucleotide
cucucucucucuuguacaa

SEQ ID NO: 696561 - RNA, 19 nt, Artificial Sequence
  Description of Artificial Sequence: Synthetic oligonucleotide
cucugcucucucucucuug

SEQ ID NO: 696562 - RNA, 19 nt, Artificial Sequence
  Description of Artificial Sequence: Synthetic oligonucleotide
aguucacaaugugggaaaa

SEQ ID NO: 696563 - RNA, 19 nt, Artificial Sequence
  Description of Artificial Sequence: Synthetic oligonucleotide
ggagcgagccagcuucugc

SEQ ID NO: 696564 - RNA, 19 nt, Artificial Sequence
  Description of Artificial Sequence: Synthetic oligonucleotide
ugccaucaacccacuacuu

SEQ ID NO: 696565 - RNA, 19 nt, Artificial Sequence
  Description of Artificial Sequence: Synthetic oligonucleotide
cuuauauguccuaggggau

SEQ ID NO: 696566 - RNA, 19 nt, Artificial Sequence
  Description of Artificial Sequence: Synthetic oligonucleotide
gccaucaacccacuacuuc

SEQ ID NO: 696567 - RNA, 19 nt, Artificial Sequence
  Description of Artificial Sequence: Synthetic oligonucleotide
caacuacgcuuccuuucac

SEQ ID NO: 696568 - RNA, 19 nt, Artificial Sequence
  Description of Artificial Sequence: Synthetic oligonucleotide
cugagaccgacucccuuca

SEQ ID NO: 696569 - RNA, 19 nt, Artificial Sequence
  Description of Artificial Sequence: Synthetic oligonucleotide
acggguguguugugccucu

SEQ ID NO: 696570 - RNA, 19 nt, Artificial Sequence
  Description of Artificial Sequence: Synthetic oligonucleotide
uagacgcuccugcgugaga

SEQ ID NO: 696571 - RNA, 19 nt, Artificial Sequence
  Description of Artificial Sequence: Synthetic oligonucleotide
gcugacaacuauugccauc

SEQ ID NO: 696572 - RNA, 19 nt, Artificial Sequence
  Description of Artificial Sequence: Synthetic oligonucleotide
cauagacgcuccugcguga

SEQ ID NO: 696573 - RNA, 19 nt, Artificial Sequence
  Description of Artificial Sequence: Synthetic oligonucleotide
auaccuuauuuuacacaaa

SEQ ID NO: 696574 - RNA, 19 nt, Artificial Sequence
  Description of Artificial Sequence: Synthetic oligonucleotide
gcaucuuaagggcaaccaa

SEQ ID NO: 696575 - RNA, 19 nt, Artificial Sequence
  Description of Artificial Sequence: Synthetic oligonucleotide
agugucugaugaagcagau

SEQ ID NO: 696576 - RNA, 19 nt, Artificial Sequence
  Description of Artificial Sequence: Synthetic oligonucleotide
caaagacauacugaguaau

SEQ ID NO: 696577 - RNA, 19 nt, Artificial Sequence
  Description of Artificial Sequence: Synthetic oligonucleotide
accuaaccuucaauuauua

SEQ ID NO: 696578 - RNA, 19 nt, Artificial Sequence
  Description of Artificial Sequence: Synthetic oligonucleotide
auacacacacacacacaaa

SEQ ID NO: 696579 - RNA, 19 nt, Artificial Sequence
  Description of Artificial Sequence: Synthetic oligonucleotide
auaguggcuuuacgugauu

SEQ ID NO: 696580 - RNA, 19 nt, Artificial Sequence
  Description of Artificial Sequence: Synthetic oligonucleotide
ggucaccuaaccuucaauu

SEQ ID NO: 696581 - RNA, 19 nt, Artificial Sequence
  Description of Artificial Sequence: Synthetic oligonucleotide
cauaguggcuuuacgugau

SEQ ID NO: 696582 - RNA, 19 nt, Artificial Sequence
  Description of Artificial Sequence: Synthetic oligonucleotide
auguuugacuggcgugcau

SEQ ID NO: 696583 - RNA, 19 nt, Artificial Sequence
  Description of Artificial Sequence: Synthetic oligonucleotide
gcucucucucucuuguaca

SEQ ID NO: 696584 - RNA, 19 nt, Artificial Sequence
  Description of Artificial Sequence: Synthetic oligonucleotide
guugcaagcuccacuuaua

SEQ ID NO: 696585 - RNA, 19 nt, Artificial Sequence
  Description of Artificial Sequence: Synthetic oligonucleotide
acgcccacuucugcuguuc

SEQ ID NO: 696586 - RNA, 19 nt, Artificial Sequence
  Description of Artificial Sequence: Synthetic oligonucleotide
guaaugcucugccauccau

SEQ ID NO: 696587 - RNA, 19 nt, Artificial Sequence
  Description of Artificial Sequence: Synthetic oligonucleotide
uugcaagggcugagaccga

SEQ ID NO: 696588 - RNA, 19 nt, Artificial Sequence
  Description of Artificial Sequence: Synthetic oligonucleotide
gacgcuccugcgugagaca

SEQ ID NO: 696589 - RNA, 19 nt, Artificial Sequence
  Description of Artificial Sequence: Synthetic oligonucleotide
auccagacgcccacuucug

SEQ ID NO: 696590 - RNA, 19 nt, Artificial Sequence
  Description of Artificial Sequence: Synthetic oligonucleotide
uugcaacuucagacuucaa

SEQ ID NO: 696591 - RNA, 19 nt, Artificial Sequence
  Description of Artificial Sequence: Synthetic oligonucleotide
cagacaaggcauacauagu

SEQ ID NO: 696592 - RNA, 19 nt, Artificial Sequence
  Description of Artificial Sequence: Synthetic oligonucleotide
cagcuucugcggcuuggac

SEQ ID NO: 696593 - RNA, 19 nt, Artificial Sequence
  Description of Artificial Sequence: Synthetic oligonucleotide
auuccacuguaaacauuaa

SEQ ID NO: 696594 - RNA, 19 nt, Artificial Sequence
  Description of Artificial Sequence: Synthetic oligonucleotide
cacggguguguugugccuc

SEQ ID NO: 696595 - RNA, 19 nt, Artificial Sequence
  Description of Artificial Sequence: Synthetic oligonucleotide
aggaggauauagacacaau

SEQ ID NO: 696596 - RNA, 19 nt, Artificial Sequence
  Description of Artificial Sequence: Synthetic oligonucleotide
gaguugcaagcuccacuua

SEQ ID NO: 696597 - RNA, 19 nt, Artificial Sequence
  Description of Artificial Sequence: Synthetic oligonucleotide
cgugagacacuucucuauc

SEQ ID NO: 696598 - RNA, 19 nt, Artificial Sequence
  Description of Artificial Sequence: Synthetic oligonucleotide
gguugcaacuucagacuuc

SEQ ID NO: 696599 - RNA, 19 nt, Artificial Sequence
  Description of Artificial Sequence: Synthetic oligonucleotide
acgaugaagaggggcucau

SEQ ID NO: 696600 - RNA, 19 nt, Artificial Sequence
  Description of Artificial Sequence: Synthetic oligonucleotide
gggcucauuccagugucug

SEQ ID NO: 696601 - RNA, 19 nt, Artificial Sequence
  Description of Artificial Sequence: Synthetic oligonucleotide
guauggcaggucaccuaac

SEQ ID NO: 696602 - RNA, 19 nt, Artificial Sequence
  Description of Artificial Sequence: Synthetic oligonucleotide
ccauccaaagagugaauua

SEQ ID NO: 696603 - RNA, 19 nt, Artificial Sequence
  Description of Artificial Sequence: Synthetic oligonucleotide
ggacugccaaagucucuac

SEQ ID NO: 696604 - RNA, 19 nt, Artificial Sequence
  Description of Artificial Sequence: Synthetic oligonucleotide
cuuugaccuucucucugcu

SEQ ID NO: 696605 - RNA, 19 nt, Artificial Sequence
  Description of Artificial Sequence: Synthetic oligonucleotide
ccuaaccuucaauuauuaa

SEQ ID NO: 696606 - RNA, 19 nt, Artificial Sequence
  Description of Artificial Sequence: Synthetic oligonucleotide
cucguucgcuuugggguuc

SEQ ID NO: 696607 - RNA, 19 nt, Artificial Sequence
  Description of Artificial Sequence: Synthetic oligonucleotide
cagcuuuagaaaucuuguu

SEQ ID NO: 696608 - RNA, 19 nt, Artificial Sequence
  Description of Artificial Sequence: Synthetic oligonucleotide
gugugcucaaaaguccuau

SEQ ID NO: 696609 - RNA, 19 nt, Artificial Sequence
  Description of Artificial Sequence: Synthetic oligonucleotide
guugugccucugucugcca

SEQ ID NO: 696610 - RNA, 19 nt, Artificial Sequence
  Description of Artificial Sequence: Synthetic oligonucleotide
cagucaacuacgcuuccuu

SEQ ID NO: 696611 - RNA, 19 nt, Artificial Sequence
  Description of Artificial Sequence: Synthetic oligonucleotide
cugcacucuacagcaagua

SEQ ID NO: 696612 - RNA, 19 nt, Artificial Sequence
  Description of Artificial Sequence: Synthetic oligonucleotide
cucucugcucucucucucu

SEQ ID NO: 696613 - RNA, 19 nt, Artificial Sequence
  Description of Artificial Sequence: Synthetic oligonucleotide
auauguccuaggggaugaa

SEQ ID NO: 696614 - RNA, 19 nt, Artificial Sequence
  Description of Artificial Sequence: Synthetic oligonucleotide
guccuguugucccauucuu

SEQ ID NO: 696615 - RNA, 19 nt, Artificial Sequence
  Description of Artificial Sequence: Synthetic oligonucleotide
caaagacauauaguauuuu

SEQ ID NO: 696616 - RNA, 19 nt, Artificial Sequence
  Description of Artificial Sequence: Synthetic oligonucleotide
gcuuuacgugauuguugca

SEQ ID NO: 696617 - RNA, 19 nt, Artificial Sequence
  Description of Artificial Sequence: Synthetic oligonucleotide
ccgacucccuucagcacac

SEQ ID NO: 696618 - RNA, 19 nt, Artificial Sequence
  Description of Artificial Sequence: Synthetic oligonucleotide
acucuacagcaaguacauu

SEQ ID NO: 696619 - RNA, 19 nt, Artificial Sequence
  Description of Artificial Sequence: Synthetic oligonucleotide
cuucugcggcuuggacagg

SEQ ID NO: 696620 - RNA, 19 nt, Artificial Sequence
  Description of Artificial Sequence: Synthetic oligonucleotide
ccgggcuaucacguuacag

SEQ ID NO: 696621 - RNA, 19 nt, Artificial Sequence
  Description of Artificial Sequence: Synthetic oligonucleotide
cacccgggcuaucacguua

SEQ ID NO: 696622 - RNA, 19 nt, Artificial Sequence
  Description of Artificial Sequence: Synthetic oligonucleotide
gcgugagacacuucucuau

SEQ ID NO: 696623 - RNA, 19 nt, Artificial Sequence
  Description of Artificial Sequence: Synthetic oligonucleotide
gcuucaaaacaaccccuuu

SEQ ID NO: 696624 - RNA, 19 nt, Artificial Sequence
  Description of Artificial Sequence: Synthetic oligonucleotide
acgcuuccuuucacaauuu

SEQ ID NO: 696625 - RNA, 19 nt, Artificial Sequence
  Description of Artificial Sequence: Synthetic oligonucleotide
ggaugaauucgggugcuuu

SEQ ID NO: 696626 - RNA, 19 nt, Artificial Sequence
  Description of Artificial Sequence: Synthetic oligonucleotide
gcuccacuuauauguccua

SEQ ID NO: 696627 - RNA, 19 nt, Artificial Sequence
  Description of Artificial Sequence: Synthetic oligonucleotide
cugcucucucucucuugua

SEQ ID NO: 696628 - RNA, 19 nt, Artificial Sequence
  Description of Artificial Sequence: Synthetic oligonucleotide
ccaucacggguguguugug

SEQ ID NO: 696629 - RNA, 19 nt, Artificial Sequence
  Description of Artificial Sequence: Synthetic oligonucleotide
cuuccaucgcuuggccucu

SEQ ID NO: 696630 - RNA, 19 nt, Artificial Sequence
  Description of Artificial Sequence: Synthetic oligonucleotide
ggcuucaaaacaaccccuu

SEQ ID NO: 696631 - RNA, 19 nt, Artificial Sequence
  Description of Artificial Sequence: Synthetic oligonucleotide
cccacuacuuccaucgcuu

SEQ ID NO: 696632 - RNA, 19 nt, Artificial Sequence
  Description of Artificial Sequence: Synthetic oligonucleotide
gcaggucaccuaaccuuca

SEQ ID NO: 696633 - RNA, 19 nt, Artificial Sequence
  Description of Artificial Sequence: Synthetic oligonucleotide
ccagacgcccacuucugcu

SEQ ID NO: 696634 - RNA, 19 nt, Artificial Sequence
  Description of Artificial Sequence: Synthetic oligonucleotide
ccugcacucuacagcaagu

SEQ ID NO: 696635 - RNA, 19 nt, Artificial Sequence
  Description of Artificial Sequence: Synthetic oligonucleotide
ggguguguugugccucugu

SEQ ID NO: 696636 - RNA, 19 nt, Artificial Sequence
  Description of Artificial Sequence: Synthetic oligonucleotide
gggagcgagccagcuucug

SEQ ID NO: 696637 - RNA, 19 nt, Artificial Sequence
  Description of Artificial Sequence: Synthetic oligonucleotide
ggcauacauaguggcuuua

SEQ ID NO: 696638 - RNA, 19 nt, Artificial Sequence
  Description of Artificial Sequence: Synthetic oligonucleotide
cggcaguauagcaaacaua

SEQ ID NO: 696639 - RNA, 19 nt, Artificial Sequence
  Description of Artificial Sequence: Synthetic oligonucleotide
cauccaucacggguguguu

SEQ ID NO: 696640 - RNA, 19 nt, Artificial Sequence
  Description of Artificial Sequence: Synthetic oligonucleotide
gggguucgucuuuugcuuu

SEQ ID NO: 696641 - RNA, 19 nt, Artificial Sequence
  Description of Artificial Sequence: Synthetic oligonucleotide
ggggaugaauucgggugcu

SEQ ID NO: 696642 - RNA, 19 nt, Artificial Sequence
  Description of Artificial Sequence: Synthetic oligonucleotide
ggguucgucuuuugcuuuu

SEQ ID NO: 696643 - RNA, 19 nt, Artificial Sequence
  Description of Artificial Sequence: Synthetic oligonucleotide
gacgcccacuucugcuguu

SEQ ID NO: 696644 - RNA, 19 nt, Artificial Sequence
  Description of Artificial Sequence: Synthetic oligonucleotide
uuccaucgcuuggccucuu

SEQ ID NO: 696645 - RNA, 19 nt, Artificial Sequence
  Description of Artificial Sequence: Synthetic oligonucleotide
ggcuaucacguuacagcau

SEQ ID NO: 696646 - RNA, 19 nt, Artificial Sequence
  Description of Artificial Sequence: Synthetic oligonucleotide
ggcugagaccgacucccuu

SEQ ID NO: 696647 - RNA, 19 nt, Artificial Sequence
  Description of Artificial Sequence: Synthetic oligonucleotide
gcaagggcugagaccgacu

SEQ ID NO: 696648 - RNA, 19 nt, Artificial Sequence
  Description of Artificial Sequence: Synthetic oligonucleotide
gcacacugcugaacauaua

SEQ ID NO: 696649 - RNA, 19 nt, Artificial Sequence
  Description of Artificial Sequence: Synthetic oligonucleotide
cccgggcuaucacguuaca

SEQ ID NO: 696650 - RNA, 19 nt, Artificial Sequence
  Description of Artificial Sequence: Synthetic oligonucleotide
gggaugaauucgggugcuu

SEQ ID NO: 696651 - RNA, 19 nt, Artificial Sequence
  Description of Artificial Sequence: Synthetic oligonucleotide
cggguguguugugccucug

SEQ ID NO: 696652 - RNA, 19 nt, Artificial Sequence
  Description of Artificial Sequence: Synthetic oligonucleotide
auuaauaacuuagaauucc

SEQ ID NO: 696653 - RNA, 19 nt, Artificial Sequence
  Description of Artificial Sequence: Synthetic oligonucleotide
aauuuugacaacaaggcga

SEQ ID NO: 696654 - RNA, 19 nt, Artificial Sequence
  Description of Artificial Sequence: Synthetic oligonucleotide
agugccauacagcaguugc

SEQ ID NO: 696655 - RNA, 19 nt, Artificial Sequence
  Description of Artificial Sequence: Synthetic oligonucleotide
aaacccgauacguacaaug

SEQ ID NO: 696656 - RNA, 19 nt, Artificial Sequence
  Description of Artificial Sequence: Synthetic oligonucleotide
uucacguuaauaccgaggu

SEQ ID NO: 696657 - RNA, 19 nt, Artificial Sequence
  Description of Artificial Sequence: Synthetic oligonucleotide
aaaggauucgccaucuccg

SEQ ID NO: 696658 - RNA, 19 nt, Artificial Sequence
  Description of Artificial Sequence: Synthetic oligonucleotide
uuucacguuaauaccgagg

SEQ ID NO: 696659 - RNA, 19 nt, Artificial Sequence
  Description of Artificial Sequence: Synthetic oligonucleotide
ucuauaaaacccgauacgu

SEQ ID NO: 696660 - RNA, 19 nt, Artificial Sequence
  Description of Artificial Sequence: Synthetic oligonucleotide
ugcccauugaccaugggcc

SEQ ID NO: 696661 - RNA, 19 nt, Artificial Sequence
  Description of Artificial Sequence: Synthetic oligonucleotide
cucuauucgugcuucagcg

SEQ ID NO: 696662 - RNA, 19 nt, Artificial Sequence
  Description of Artificial Sequence: Synthetic oligonucleotide
gucuauaaaacccgauacg

SEQ ID NO: 696663 - RNA, 19 nt, Artificial Sequence
  Description of Artificial Sequence: Synthetic oligonucleotide
uuugacaacaaggcgagca

SEQ ID NO: 696664 - RNA, 19 nt, Artificial Sequence
  Description of Artificial Sequence: Synthetic oligonucleotide
uacaaugcgcgaauagucc

SEQ ID NO: 696665 - RNA, 19 nt, Artificial Sequence
  Description of Artificial Sequence: Synthetic oligonucleotide
uguauagauuauauauaga

SEQ ID NO: 696666 - RNA, 19 nt, Artificial Sequence
  Description of Artificial Sequence: Synthetic oligonucleotide
uugggaaacagaucaaacu

SEQ ID NO: 696667 - RNA, 19 nt, Artificial Sequence
  Description of Artificial Sequence: Synthetic oligonucleotide
uggcguucggcgaugagcg

SEQ ID NO: 696668 - RNA, 19 nt, Artificial Sequence
  Description of Artificial Sequence: Synthetic oligonucleotide
cagauuacaauuaauaacu

SEQ ID NO: 696669 - RNA, 19 nt, Artificial Sequence
  Description of Artificial Sequence: Synthetic oligonucleotide
aacccgauacguacaaugc

SEQ ID NO: 696670 - RNA, 19 nt, Artificial Sequence
  Description of Artificial Sequence: Synthetic oligonucleotide
cuauucgugcuucagcgcg

SEQ ID NO: 696671 - RNA, 19 nt, Artificial Sequence
  Description of Artificial Sequence: Synthetic oligonucleotide
ucgggauucuuagagaucc

SEQ ID NO: 696672 - RNA, 19 nt, Artificial Sequence
  Description of Artificial Sequence: Synthetic oligonucleotide
uucuagcucauaccuaugc

SEQ ID NO: 696673 - RNA, 19 nt, Artificial Sequence
  Description of Artificial Sequence: Synthetic oligonucleotide
accgaggucaccuacagau

SEQ ID NO: 696674 - RNA, 19 nt, Artificial Sequence
  Description of Artificial Sequence: Synthetic oligonucleotide
uauacacuggcuuguauau

SEQ ID NO: 696675 - RNA, 19 nt, Artificial Sequence
  Description of Artificial Sequence: Synthetic oligonucleotide
cuaaaggcguaguccaugg

SEQ ID NO: 696676 - RNA, 19 nt, Artificial Sequence
  Description of Artificial Sequence: Synthetic oligonucleotide
agaucaaacuucugcaacu

SEQ ID NO: 696677 - RNA, 19 nt, Artificial Sequence
  Description of Artificial Sequence: Synthetic oligonucleotide
uuauacacuggcuuguaua

SEQ ID NO: 696678 - RNA, 19 nt, Artificial Sequence
  Description of Artificial Sequence: Synthetic oligonucleotide
ucacccgaugcucuauucg

SEQ ID NO: 696679 - RNA, 19 nt, Artificial Sequence
  Description of Artificial Sequence: Synthetic oligonucleotide
accugugccgccaugacgc

SEQ ID NO: 696680 - RNA, 19 nt, Artificial Sequence
  Description of Artificial Sequence: Synthetic oligonucleotide
gaauaguccgauuuuccca

SEQ ID NO: 696681 - RNA, 19 nt, Artificial Sequence
  Description of Artificial Sequence: Synthetic oligonucleotide
agcugagaugcucccaccc

SEQ ID NO: 696682 - RNA, 19 nt, Artificial Sequence
  Description of Artificial Sequence: Synthetic oligonucleotide
uccgauuuucccauuuugu

SEQ ID NO: 696683 - RNA, 19 nt, Artificial Sequence
  Description of Artificial Sequence: Synthetic oligonucleotide
auuuugacaacaaggcgag

SEQ ID NO: 696684 - RNA, 19 nt, Artificial Sequence
  Description of Artificial Sequence: Synthetic oligonucleotide
caaagugagcaguucuccg

SEQ ID NO: 696685 - RNA, 19 nt, Artificial Sequence
  Description of Artificial Sequence: Synthetic oligonucleotide
auaccuaugcaaaggaaag

SEQ ID NO: 696686 - RNA, 19 nt, Artificial Sequence
  Description of Artificial Sequence: Synthetic oligonucleotide
cauggcuagaccugccucg

SEQ ID NO: 696687 - RNA, 19 nt, Artificial Sequence
  Description of Artificial Sequence: Synthetic oligonucleotide
ucgucuauaaaacccgaua

SEQ ID NO: 696688 - RNA, 19 nt, Artificial Sequence
  Description of Artificial Sequence: Synthetic oligonucleotide
ucgcuaaaggcguagucca

SEQ ID NO: 696689 - RNA, 19 nt, Artificial Sequence
  Description of Artificial Sequence: Synthetic oligonucleotide
cggaauuuugacaacaagg

SEQ ID NO: 696690 - RNA, 19 nt, Artificial Sequence
  Description of Artificial Sequence: Synthetic oligonucleotide
uuuucacguuaauaccgag

SEQ ID NO: 696691 - RNA, 19 nt, Artificial Sequence
  Description of Artificial Sequence: Synthetic oligonucleotide
uggcuuguauauauauaug

SEQ ID NO: 696692 - RNA, 19 nt, Artificial Sequence
  Description of Artificial Sequence: Synthetic oligonucleotide
uaaaacccgauacguacaa

SEQ ID NO: 696693 - RNA, 19 nt, Artificial Sequence
  Description of Artificial Sequence: Synthetic oligonucleotide
acccgauacguacaaugcg

SEQ ID NO: 696694 - RNA, 19 nt, Artificial Sequence
  Description of Artificial Sequence: Synthetic oligonucleotide
ugcgcgaauaguccgauuu

SEQ ID NO: 696695 - RNA, 19 nt, Artificial Sequence
  Description of Artificial Sequence: Synthetic oligonucleotide
cacguuaauaccgagguca

SEQ ID NO: 696696 - RNA, 19 nt, Artificial Sequence
  Description of Artificial Sequence: Synthetic oligonucleotide
agauccccggaauuuugac

SEQ ID NO: 696697 - RNA, 19 nt, Artificial Sequence
  Description of Artificial Sequence: Synthetic oligonucleotide
cuguuagcugagaugcucc

SEQ ID NO: 696698 - RNA, 19 nt, Artificial Sequence
  Description of Artificial Sequence: Synthetic oligonucleotide
cagaucaaacuucugcaac

SEQ ID NO: 696699 - RNA, 19 nt, Artificial Sequence
  Description of Artificial Sequence: Synthetic oligonucleotide
agcucauaccuaugcaaag

SEQ ID NO: 696700 - RNA, 19 nt, Artificial Sequence
  Description of Artificial Sequence: Synthetic oligonucleotide
accuaugcaaaggaaagca

SEQ ID NO: 696701 - RNA, 19 nt, Artificial Sequence
  Description of Artificial Sequence: Synthetic oligonucleotide
auccccggaauuuugacaa

SEQ ID NO: 696702 - RNA, 19 nt, Artificial Sequence
  Description of Artificial Sequence: Synthetic oligonucleotide
uaaaggcguaguccauggg

SEQ ID NO: 696703 - RNA, 19 nt, Artificial Sequence
  Description of Artificial Sequence: Synthetic oligonucleotide
ucuauucgugcuucagcgc

SEQ ID NO: 696704 - RNA, 19 nt, Artificial Sequence
  Description of Artificial Sequence: Synthetic oligonucleotide
uaauaccgaggucaccuac

SEQ ID NO: 696705 - RNA, 19 nt, Artificial Sequence
  Description of Artificial Sequence: Synthetic oligonucleotide
acccuucaaaacaaauccc

SEQ ID NO: 696706 - RNA, 19 nt, Artificial Sequence
  Description of Artificial Sequence: Synthetic oligonucleotide
uucuuagagauccccggaa

SEQ ID NO: 696707 - RNA, 19 nt, Artificial Sequence
  Description of Artificial Sequence: Synthetic oligonucleotide
ucauaccuaugcaaaggaa

SEQ ID NO: 696708 - RNA, 19 nt, Artificial Sequence
  Description of Artificial Sequence: Synthetic oligonucleotide
aaggauucgccaucuccgu

SEQ ID NO: 696709 - RNA, 19 nt, Artificial Sequence
  Description of Artificial Sequence: Synthetic oligonucleotide
agaggcgaccccgaaaagg

SEQ ID NO: 696710 - RNA, 19 nt, Artificial Sequence
  Description of Artificial Sequence: Synthetic oligonucleotide
auaacauuauacacuggcu

SEQ ID NO: 696711 - RNA, 19 nt, Artificial Sequence
  Description of Artificial Sequence: Synthetic oligonucleotide
ucuuagagauccccggaau

SEQ ID NO: 696712 - RNA, 19 nt, Artificial Sequence
  Description of Artificial Sequence: Synthetic oligonucleotide
ugcgcaaagccaccugugc

SEQ ID NO: 696713 - RNA, 19 nt, Artificial Sequence
  Description of Artificial Sequence: Synthetic oligonucleotide
ugcgcuguuagcugagaug

SEQ ID NO: 696714 - RNA, 19 nt, Artificial Sequence
  Description of Artificial Sequence: Synthetic oligonucleotide
acguacaaugcgcgaauag

SEQ ID NO: 696715 - RNA, 19 nt, Artificial Sequence
  Description of Artificial Sequence: Synthetic oligonucleotide
uagcgcuugacaccacucc

SEQ ID NO: 696716 - RNA, 19 nt, Artificial Sequence
  Description of Artificial Sequence: Synthetic oligonucleotide
gucgcuaaaggcguagucc

SEQ ID NO: 696717 - RNA, 19 nt, Artificial Sequence
  Description of Artificial Sequence: Synthetic oligonucleotide
auaccgaggucaccuacag

SEQ ID NO: 696718 - RNA, 19 nt, Artificial Sequence
  Description of Artificial Sequence: Synthetic oligonucleotide
ucucgucuauaaaacccga

SEQ ID NO: 696719 - RNA, 19 nt, Artificial Sequence
  Description of Artificial Sequence: Synthetic oligonucleotide
auacagcaguugcaacucg

SEQ ID NO: 696720 - RNA, 19 nt, Artificial Sequence
  Description of Artificial Sequence: Synthetic oligonucleotide
guuaauaccgaggucaccu

SEQ ID NO: 696721 - RNA, 19 nt, Artificial Sequence
  Description of Artificial Sequence: Synthetic oligonucleotide
aauaccgaggucaccuaca

SEQ ID NO: 696722 - RNA, 19 nt, Artificial Sequence
  Description of Artificial Sequence: Synthetic oligonucleotide
ucggcgaugagcgugcacu

SEQ ID NO: 696723 - RNA, 19 nt, Artificial Sequence
  Description of Artificial Sequence: Synthetic oligonucleotide
ugcacuuggcacacaggca

SEQ ID NO: 696724 - RNA, 19 nt, Artificial Sequence
  Description of Artificial Sequence: Synthetic oligonucleotide
uuucuagcucauaccuaug

SEQ ID NO: 696725 - RNA, 19 nt, Artificial Sequence
  Description of Artificial Sequence: Synthetic oligonucleotide
gauacguacaaugcgcgaa

SEQ ID NO: 696726 - RNA, 19 nt, Artificial Sequence
  Description of Artificial Sequence: Synthetic oligonucleotide
ucuccguucuccgagccug

SEQ ID NO: 696727 - RNA, 19 nt, Artificial Sequence
  Description of Artificial Sequence: Synthetic oligonucleotide
gacgccacugaugccacgg

SEQ ID NO: 696728 - RNA, 19 nt, Artificial Sequence
  Description of Artificial Sequence: Synthetic oligonucleotide
uccuuaggaggcccgggcc

SEQ ID NO: 696729 - RNA, 19 nt, Artificial Sequence
  Description of Artificial Sequence: Synthetic oligonucleotide
ugugccgccaugacgcgcu

SEQ ID NO: 696730 - RNA, 19 nt, Artificial Sequence
  Description of Artificial Sequence: Synthetic oligonucleotide
guacaaugcgcgaauaguc

SEQ ID NO: 696731 - RNA, 19 nt, Artificial Sequence
  Description of Artificial Sequence: Synthetic oligonucleotide
gcgacaauggcuucccagg

SEQ ID NO: 696732 - RNA, 19 nt, Artificial Sequence
  Description of Artificial Sequence: Synthetic oligonucleotide
aguagaucucgucuauaaa

SEQ ID NO: 696733 - RNA, 19 nt, Artificial Sequence
  Description of Artificial Sequence: Synthetic oligonucleotide
gaguccgcgccaucgggcg

SEQ ID NO: 696734 - RNA, 19 nt, Artificial Sequence
  Description of Artificial Sequence: Synthetic oligonucleotide
cuagcucauaccuaugcaa

SEQ ID NO: 696735 - RNA, 19 nt, Artificial Sequence
  Description of Artificial Sequence: Synthetic oligonucleotide
guaacgaugcugcggcagc

SEQ ID NO: 696736 - RNA, 19 nt, Artificial Sequence
  Description of Artificial Sequence: Synthetic oligonucleotide
accccgaaaaggauucgcc

SEQ ID NO: 696737 - RNA, 19 nt, Artificial Sequence
  Description of Artificial Sequence: Synthetic oligonucleotide
aggaaagcacaaagugagc

SEQ ID NO: 696738 - RNA, 19 nt, Artificial Sequence
  Description of Artificial Sequence: Synthetic oligonucleotide
gauccccggaauuuugaca

SEQ ID NO: 696739 - RNA, 19 nt, Artificial Sequence
  Description of Artificial Sequence: Synthetic oligonucleotide
agacuucauaggcgggccg

SEQ ID NO: 696740 - RNA, 19 nt, Artificial Sequence
  Description of Artificial Sequence: Synthetic oligonucleotide
ggauucuuagagauccccg

SEQ ID NO: 696741 - RNA, 19 nt, Artificial Sequence
  Description of Artificial Sequence: Synthetic oligonucleotide
auaaaacccgauacguaca

SEQ ID NO: 696742 - RNA, 19 nt, Artificial Sequence
  Description of Artificial Sequence: Synthetic oligonucleotide
aguagcgcuugacaccacu

SEQ ID NO: 696743 - RNA, 19 nt, Artificial Sequence
  Description of Artificial Sequence: Synthetic oligonucleotide
auacguacaaugcgcgaau

SEQ ID NO: 696744 - RNA, 19 nt, Artificial Sequence
  Description of Artificial Sequence: Synthetic oligonucleotide
cccgauacguacaaugcgc

SEQ ID NO: 696745 - RNA, 19 nt, Artificial Sequence
  Description of Artificial Sequence: Synthetic oligonucleotide
acguuaauaccgaggucac

SEQ ID NO: 696746 - RNA, 19 nt, Artificial Sequence
  Description of Artificial Sequence: Synthetic oligonucleotide
guacaggccgcucccguag

SEQ ID NO: 696747 - RNA, 19 nt, Artificial Sequence
  Description of Artificial Sequence: Synthetic oligonucleotide
ucauaggcgggccgcggug

SEQ ID NO: 696748 - RNA, 19 nt, Artificial Sequence
  Description of Artificial Sequence: Synthetic oligonucleotide
cuggcguucggcgaugagc

SEQ ID NO: 696749 - RNA, 19 nt, Artificial Sequence
  Description of Artificial Sequence: Synthetic oligonucleotide
gacuucauaggcgggccgc

SEQ ID NO: 696750 - RNA, 19 nt, Artificial Sequence
  Description of Artificial Sequence: Synthetic oligonucleotide
cgucuauaaaacccgauac

SEQ ID NO: 696751 - RNA, 19 nt, Artificial Sequence
  Description of Artificial Sequence: Synthetic oligonucleotide
uuaauaccgaggucaccua

SEQ ID NO: 696752 - RNA, 19 nt, Artificial Sequence
  Description of Artificial Sequence: Synthetic oligonucleotide
guagccgggcuccuugugc

SEQ ID NO: 696753 - RNA, 19 nt, Artificial Sequence
  Description of Artificial Sequence: Synthetic oligonucleotide
uucauaggcgggccgcggu

SEQ ID NO: 696754 - RNA, 19 nt, Artificial Sequence
  Description of Artificial Sequence: Synthetic oligonucleotide
ucacguuaauaccgagguc

SEQ ID NO: 696755 - RNA, 19 nt, Artificial Sequence
  Description of Artificial Sequence: Synthetic oligonucleotide
gcgcuguuagcugagaugc

SEQ ID NO: 696756 - RNA, 19 nt, Artificial Sequence
  Description of Artificial Sequence: Synthetic oligonucleotide
cuuccagcggcaguagcgc

SEQ ID NO: 696757 - RNA, 19 nt, Artificial Sequence
  Description of Artificial Sequence: Synthetic oligonucleotide
cuggggacgaggucccggg

SEQ ID NO: 696758 - RNA, 19 nt, Artificial Sequence
  Description of Artificial Sequence: Synthetic oligonucleotide
augaggucgcuaaaggcgu

SEQ ID NO: 696759 - RNA, 19 nt, Artificial Sequence
  Description of Artificial Sequence: Synthetic oligonucleotide
guacaguagaucucgucua

SEQ ID NO: 696760 - RNA, 19 nt, Artificial Sequence
  Description of Artificial Sequence: Synthetic oligonucleotide
cguucuccgagccugagcc

SEQ ID NO: 696761 - RNA, 19 nt, Artificial Sequence
  Description of Artificial Sequence: Synthetic oligonucleotide
ggcgacaauggcuucccag

SEQ ID NO: 696762 - RNA, 19 nt, Artificial Sequence
  Description of Artificial Sequence: Synthetic oligonucleotide
cuccuuaggaggcccgggc

SEQ ID NO: 696763 - RNA, 19 nt, Artificial Sequence
  Description of Artificial Sequence: Synthetic oligonucleotide
aaugcgcgaauaguccgau

SEQ ID NO: 696764 - RNA, 19 nt, Artificial Sequence
  Description of Artificial Sequence: Synthetic oligonucleotide
ccgauacguacaaugcgcg

SEQ ID NO: 696765 - RNA, 19 nt, Artificial Sequence
  Description of Artificial Sequence: Synthetic oligonucleotide
uccgcggguacuucuccgc

SEQ ID NO: 696766 - RNA, 19 nt, Artificial Sequence
  Description of Artificial Sequence: Synthetic oligonucleotide
ucggcgccgaaguggcugg

SEQ ID NO: 696767 - RNA, 19 nt, Artificial Sequence
  Description of Artificial Sequence: Synthetic oligonucleotide
gaccccgaaaaggauucgc

SEQ ID NO: 696768 - RNA, 19 nt, Artificial Sequence
  Description of Artificial Sequence: Synthetic oligonucleotide
uaacgaugcugcggcagcc

SEQ ID NO: 696769 - RNA, 19 nt, Artificial Sequence
  Description of Artificial Sequence: Synthetic oligonucleotide
caacuuggccucugcgccc

SEQ ID NO: 696770 - RNA, 19 nt, Artificial Sequence
  Description of Artificial Sequence: Synthetic oligonucleotide
uccuuccagcggcaguagc

SEQ ID NO: 696771 - RNA, 19 nt, Artificial Sequence
  Description of Artificial Sequence: Synthetic oligonucleotide
ggauucgccaucuccguuc

SEQ ID NO: 696772 - RNA, 19 nt, Artificial Sequence
  Description of Artificial Sequence: Synthetic oligonucleotide
gguaacgaugcugcggcag

SEQ ID NO: 696773 - RNA, 19 nt, Artificial Sequence
  Description of Artificial Sequence: Synthetic oligonucleotide
aguugcaacucgcgcgccu

SEQ ID NO: 696774 - RNA, 19 nt, Artificial Sequence
  Description of Artificial Sequence: Synthetic oligonucleotide
caucuccguucuccgagcc

SEQ ID NO: 696775 - RNA, 19 nt, Artificial Sequence
  Description of Artificial Sequence: Synthetic oligonucleotide
gugguugcggcagcgcgcg

SEQ ID NO: 696776 - RNA, 19 nt, Artificial Sequence
  Description of Artificial Sequence: Synthetic oligonucleotide
gaggucgcuaaaggcguag

SEQ ID NO: 696777 - RNA, 19 nt, Artificial Sequence
  Description of Artificial Sequence: Synthetic oligonucleotide
gucaccuacagauuacaau

SEQ ID NO: 696778 - RNA, 19 nt, Artificial Sequence
  Description of Artificial Sequence: Synthetic oligonucleotide
ccuaugcaaaggaaagcac

SEQ ID NO: 696779 - RNA, 19 nt, Artificial Sequence
  Description of Artificial Sequence: Synthetic oligonucleotide
guucuccgagccugagccg

SEQ ID NO: 696780 - RNA, 19 nt, Artificial Sequence
  Description of Artificial Sequence: Synthetic oligonucleotide
caagaggcugauuuguccu

SEQ ID NO: 696781 - RNA, 19 nt, Artificial Sequence
  Description of Artificial Sequence: Synthetic oligonucleotide
aaaacccgauacguacaau

SEQ ID NO: 696782 - RNA, 19 nt, Artificial Sequence
  Description of Artificial Sequence: Synthetic oligonucleotide
uggcuagaccugccucggg

SEQ ID NO: 696783 - RNA, 19 nt, Artificial Sequence
  Description of Artificial Sequence: Synthetic oligonucleotide
gggauucuuagagaucccc

SEQ ID NO: 696784 - RNA, 19 nt, Artificial Sequence
  Description of Artificial Sequence: Synthetic oligonucleotide
aggccgcucccguagccgg

SEQ ID NO: 696785 - RNA, 19 nt, Artificial Sequence
  Description of Artificial Sequence: Synthetic oligonucleotide
agagauccccggaauuuug

SEQ ID NO: 696786 - RNA, 19 nt, Artificial Sequence
  Description of Artificial Sequence: Synthetic oligonucleotide
gaggucaccuacagauuac

SEQ ID NO: 696787 - RNA, 19 nt, Artificial Sequence
  Description of Artificial Sequence: Synthetic oligonucleotide
ggcuagaccugccucgggc

SEQ ID NO: 696788 - RNA, 19 nt, Artificial Sequence
  Description of Artificial Sequence: Synthetic oligonucleotide
ccggcgguggaguagggcg

SEQ ID NO: 696789 - RNA, 19 nt, Artificial Sequence
  Description of Artificial Sequence: Synthetic oligonucleotide
caugacgcgcuggcguucg

SEQ ID NO: 696790 - RNA, 19 nt, Artificial Sequence
  Description of Artificial Sequence: Synthetic oligonucleotide
uacaggccgcucccguagc

SEQ ID NO: 696791 - RNA, 19 nt, Artificial Sequence
  Description of Artificial Sequence: Synthetic oligonucleotide
aagcacaaagugagcaguu

SEQ ID NO: 696792 - RNA, 19 nt, Artificial Sequence
  Description of Artificial Sequence: Synthetic oligonucleotide
cuggacgagcacccagacc

SEQ ID NO: 696793 - RNA, 19 nt, Artificial Sequence
  Description of Artificial Sequence: Synthetic oligonucleotide
uagagauccccggaauuuu

SEQ ID NO: 696794 - RNA, 19 nt, Artificial Sequence
  Description of Artificial Sequence: Synthetic oligonucleotide
uaccgaggucaccuacaga

SEQ ID NO: 696795 - RNA, 19 nt, Artificial Sequence
  Description of Artificial Sequence: Synthetic oligonucleotide
ucgggcgacaauggcuucc

SEQ ID NO: 696796 - RNA, 19 nt, Artificial Sequence
  Description of Artificial Sequence: Synthetic oligonucleotide
guccgcggguacuucuccg

SEQ ID NO: 696797 - RNA, 19 nt, Artificial Sequence
  Description of Artificial Sequence: Synthetic oligonucleotide
cauaggcgggccgcggugg

SEQ ID NO: 696798 - RNA, 19 nt, Artificial Sequence
  Description of Artificial Sequence: Synthetic oligonucleotide
agaugcucccacccacccu

SEQ ID NO: 696799 - RNA, 19 nt, Artificial Sequence
  Description of Artificial Sequence: Synthetic oligonucleotide
uccccagcguacaguagau

SEQ ID NO: 696800 - RNA, 19 nt, Artificial Sequence
  Description of Artificial Sequence: Synthetic oligonucleotide
aggucaccuacagauuaca

SEQ ID NO: 696801 - RNA, 19 nt, Artificial Sequence
  Description of Artificial Sequence: Synthetic oligonucleotide
cugcggacgugucggggcg

SEQ ID NO: 696802 - RNA, 19 nt, Artificial Sequence
  Description of Artificial Sequence: Synthetic oligonucleotide
ugucacccgaugcucuauu

SEQ ID NO: 696803 - RNA, 19 nt, Artificial Sequence
  Description of Artificial Sequence: Synthetic oligonucleotide
cuucauaggcgggccgcgg

SEQ ID NO: 696804 - RNA, 19 nt, Artificial Sequence
  Description of Artificial Sequence: Synthetic oligonucleotide
guaguccaugggcgggcgg

SEQ ID NO: 696805 - RNA, 19 nt, Artificial Sequence
  Description of Artificial Sequence: Synthetic oligonucleotide
gcgaauaguccgauuuucc

SEQ ID NO: 696806 - RNA, 19 nt, Artificial Sequence
  Description of Artificial Sequence: Synthetic oligonucleotide
ccggaauuuugacaacaag

SEQ ID NO: 696807 - RNA, 19 nt, Artificial Sequence
  Description of Artificial Sequence: Synthetic oligonucleotide
cuagaccugccucgggcuc

SEQ ID NO: 696808 - RNA, 19 nt, Artificial Sequence
  Description of Artificial Sequence: Synthetic oligonucleotide
gccacgcucacugguaacg

SEQ ID NO: 696809 - RNA, 19 nt, Artificial Sequence
  Description of Artificial Sequence: Synthetic oligonucleotide
caguucuccgcagcgucgc

SEQ ID NO: 696810 - RNA, 19 nt, Artificial Sequence
  Description of Artificial Sequence: Synthetic oligonucleotide
gcgcaaagccaccugugcc

SEQ ID NO: 696811 - RNA, 19 nt, Artificial Sequence
  Description of Artificial Sequence: Synthetic oligonucleotide
caccacuccgugguugcgg

SEQ ID NO: 696812 - RNA, 19 nt, Artificial Sequence
  Description of Artificial Sequence: Synthetic oligonucleotide
gcagcgcgcgcauuugggg

SEQ ID NO: 696813 - RNA, 19 nt, Artificial Sequence
  Description of Artificial Sequence: Synthetic oligonucleotide
ggcgccaugaaggccaggc

SEQ ID NO: 696814 - RNA, 19 nt, Artificial Sequence
  Description of Artificial Sequence: Synthetic oligonucleotide
aucuccguucuccgagccu

SEQ ID NO: 696815 - RNA, 19 nt, Artificial Sequence
  Description of Artificial Sequence: Synthetic oligonucleotide
gucacccgaugcucuauuc

SEQ ID NO: 696816 - RNA, 19 nt, Artificial Sequence
  Description of Artificial Sequence: Synthetic oligonucleotide
agcgucgcucgcuggcgag

SEQ ID NO: 696817 - RNA, 19 nt, Artificial Sequence
  Description of Artificial Sequence: Synthetic oligonucleotide
uacguacaaugcgcgaaua

SEQ ID NO: 696818 - RNA, 19 nt, Artificial Sequence
  Description of Artificial Sequence: Synthetic oligonucleotide
gauucgccaucuccguucu

SEQ ID NO: 696819 - RNA, 19 nt, Artificial Sequence
  Description of Artificial Sequence: Synthetic oligonucleotide
ugaggucgcuaaaggcgua

SEQ ID NO: 696820 - RNA, 19 nt, Artificial Sequence
  Description of Artificial Sequence: Synthetic oligonucleotide
gggguaggcgcccgcgucg

SEQ ID NO: 696821 - RNA, 19 nt, Artificial Sequence
  Description of Artificial Sequence: Synthetic oligonucleotide
uucggcgaugagcgugcac

SEQ ID NO: 696822 - RNA, 19 nt, Artificial Sequence
  Description of Artificial Sequence: Synthetic oligonucleotide
gcggguacuucuccgcugc

SEQ ID NO: 696823 - RNA, 19 nt, Artificial Sequence
  Description of Artificial Sequence: Synthetic oligonucleotide
gggacgaggucccgggacc

SEQ ID NO: 696824 - RNA, 19 nt, Artificial Sequence
  Description of Artificial Sequence: Synthetic oligonucleotide
guagcgcuugacaccacuc

SEQ ID NO: 696825 - RNA, 19 nt, Artificial Sequence
  Description of Artificial Sequence: Synthetic oligonucleotide
ggucgcaccucuggggacg

SEQ ID NO: 696826 - RNA, 19 nt, Artificial Sequence
  Description of Artificial Sequence: Synthetic oligonucleotide
caugggcgggcggaagccg

SEQ ID NO: 696827 - RNA, 19 nt, Artificial Sequence
  Description of Artificial Sequence: Synthetic oligonucleotide
acaaggcgagcaggcuugg

SEQ ID NO: 696828 - RNA, 19 nt, Artificial Sequence
  Description of Artificial Sequence: Synthetic oligonucleotide
ugacgcgcuggcguucggc

SEQ ID NO: 696829 - RNA, 19 nt, Artificial Sequence
  Description of Artificial Sequence: Synthetic oligonucleotide
gcugcggacgugucggggc

SEQ ID NO: 696830 - RNA, 19 nt, Artificial Sequence
  Description of Artificial Sequence: Synthetic oligonucleotide
uggcgagucccggagcuuc

SEQ ID NO: 696831 - RNA, 19 nt, Artificial Sequence
  Description of Artificial Sequence: Synthetic oligonucleotide
ccgucgguggcgcacacag

SEQ ID NO: 696832 - RNA, 19 nt, Artificial Sequence
  Description of Artificial Sequence: Synthetic oligonucleotide
aggauucgccaucuccguu

SEQ ID NO: 696833 - RNA, 19 nt, Artificial Sequence
  Description of Artificial Sequence: Synthetic oligonucleotide
ggucccgggacccgagucc

SEQ ID NO: 696834 - RNA, 19 nt, Artificial Sequence
  Description of Artificial Sequence: Synthetic oligonucleotide
uccccggaauuuugacaac

SEQ ID NO: 696835 - RNA, 19 nt, Artificial Sequence
  Description of Artificial Sequence: Synthetic oligonucleotide
guugcaacucgcgcgccuc

SEQ ID NO: 696836 - RNA, 19 nt, Artificial Sequence
  Description of Artificial Sequence: Synthetic oligonucleotide
ggucgcuaaaggcguaguc

SEQ ID NO: 696837 - RNA, 19 nt, Artificial Sequence
  Description of Artificial Sequence: Synthetic oligonucleotide
gccacgggaggucccgucg

SEQ ID NO: 696838 - RNA, 19 nt, Artificial Sequence
  Description of Artificial Sequence: Synthetic oligonucleotide
ccgaaaaggauucgccauc

SEQ ID NO: 696839 - RNA, 19 nt, Artificial Sequence
  Description of Artificial Sequence: Synthetic oligonucleotide
cuucuccgcugccucaaca

SEQ ID NO: 696840 - RNA, 19 nt, Artificial Sequence
  Description of Artificial Sequence: Synthetic oligonucleotide
gucccgucgcugucgcugc

SEQ ID NO: 696841 - RNA, 19 nt, Artificial Sequence
  Description of Artificial Sequence: Synthetic oligonucleotide
auucgccaucuccguucuc

SEQ ID NO: 696842 - RNA, 19 nt, Artificial Sequence
  Description of Artificial Sequence: Synthetic oligonucleotide
caggccgcucccguagccg

SEQ ID NO: 696843 - RNA, 19 nt, Artificial Sequence
  Description of Artificial Sequence: Synthetic oligonucleotide
cuuagagauccccggaauu

SEQ ID NO: 696844 - RNA, 19 nt, Artificial Sequence
  Description of Artificial Sequence: Synthetic oligonucleotide
cagaggcgaccccgaaaag

SEQ ID NO: 696845 - RNA, 19 nt, Artificial Sequence
  Description of Artificial Sequence: Synthetic oligonucleotide
ggcguaguccaugggcggg

SEQ ID NO: 696846 - RNA, 19 nt, Artificial Sequence
  Description of Artificial Sequence: Synthetic oligonucleotide
ggaggucccgucgcugucg

SEQ ID NO: 696847 - RNA, 19 nt, Artificial Sequence
  Description of Artificial Sequence: Synthetic oligonucleotide
uccgugguugcggcagcgc

SEQ ID NO: 696848 - RNA, 19 nt, Artificial Sequence
  Description of Artificial Sequence: Synthetic oligonucleotide
cacccgaugcucuauucgu

SEQ ID NO: 696849 - RNA, 19 nt, Artificial Sequence
  Description of Artificial Sequence: Synthetic oligonucleotide
gcaguucuccgcagcgucg

SEQ ID NO: 696850 - RNA, 19 nt, Artificial Sequence
  Description of Artificial Sequence: Synthetic oligonucleotide
caucgggcgacaauggcuu

SEQ ID NO: 696851 - RNA, 19 nt, Artificial Sequence
  Description of Artificial Sequence: Synthetic oligonucleotide
gccauacagcaguugcaac

SEQ ID NO: 696852 - RNA, 19 nt, Artificial Sequence
  Description of Artificial Sequence: Synthetic oligonucleotide
ugcggacgugucggggcgg

SEQ ID NO: 696853 - RNA, 19 nt, Artificial Sequence
  Description of Artificial Sequence: Synthetic oligonucleotide
gcucaggccgagcggugcg

SEQ ID NO: 696854 - RNA, 19 nt, Artificial Sequence
  Description of Artificial Sequence: Synthetic oligonucleotide
ccgagccugagccgggucg

SEQ ID NO: 696855 - RNA, 19 nt, Artificial Sequence
  Description of Artificial Sequence: Synthetic oligonucleotide
ggcccguacaggccgcucc

SEQ ID NO: 696856 - RNA, 19 nt, Artificial Sequence
  Description of Artificial Sequence: Synthetic oligonucleotide
gcgcuaccaggacagcugc

SEQ ID NO: 696857 - RNA, 19 nt, Artificial Sequence
  Description of Artificial Sequence: Synthetic oligonucleotide
ccagaggcgaccccgaaaa

SEQ ID NO: 696858 - RNA, 19 nt, Artificial Sequence
  Description of Artificial Sequence: Synthetic oligonucleotide
gccgccaugacgcgcuggc

SEQ ID NO: 696859 - RNA, 19 nt, Artificial Sequence
  Description of Artificial Sequence: Synthetic oligonucleotide
ccgugguugcggcagcgcg

SEQ ID NO: 696860 - RNA, 19 nt, Artificial Sequence
  Description of Artificial Sequence: Synthetic oligonucleotide
cgagcggucccgcaugagg

SEQ ID NO: 696861 - RNA, 19 nt, Artificial Sequence
  Description of Artificial Sequence: Synthetic oligonucleotide
gcgccaucgggcgacaaug

SEQ ID NO: 696862 - RNA, 19 nt, Artificial Sequence
  Description of Artificial Sequence: Synthetic oligonucleotide
gccgggucgcaccucuggg

SEQ ID NO: 696863 - RNA, 19 nt, Artificial Sequence
  Description of Artificial Sequence: Synthetic oligonucleotide
gcguacaguagaucucguc

SEQ ID NO: 696864 - RNA, 19 nt, Artificial Sequence
  Description of Artificial Sequence: Synthetic oligonucleotide
cccagcguacaguagaucu

SEQ ID NO: 696865 - RNA, 19 nt, Artificial Sequence
  Description of Artificial Sequence: Synthetic oligonucleotide
gcuccauggcuagaccugc

SEQ ID NO: 696866 - RNA, 19 nt, Artificial Sequence
  Description of Artificial Sequence: Synthetic oligonucleotide
cguacaguagaucucgucu

SEQ ID NO: 696867 - RNA, 19 nt, Artificial Sequence
  Description of Artificial Sequence: Synthetic oligonucleotide
gguccgcggguacuucucc

SEQ ID NO: 696868 - RNA, 19 nt, Artificial Sequence
  Description of Artificial Sequence: Synthetic oligonucleotide
augacgcgcuggcguucgg

SEQ ID NO: 696869 - RNA, 19 nt, Artificial Sequence
  Description of Artificial Sequence: Synthetic oligonucleotide
gcacgcaccgcccagcucu

SEQ ID NO: 696870 - RNA, 19 nt, Artificial Sequence
  Description of Artificial Sequence: Synthetic oligonucleotide
cuccgcgggcgcugcacgc

SEQ ID NO: 696871 - RNA, 19 nt, Artificial Sequence
  Description of Artificial Sequence: Synthetic oligonucleotide
aggucgcuaaaggcguagu

SEQ ID NO: 696872 - RNA, 19 nt, Artificial Sequence
  Description of Artificial Sequence: Synthetic oligonucleotide
uccugccguccaccugagc

SEQ ID NO: 696873 - RNA, 19 nt, Artificial Sequence
  Description of Artificial Sequence: Synthetic oligonucleotide
cgccgaguaggccaggcgc

SEQ ID NO: 696874 - RNA, 19 nt, Artificial Sequence
  Description of Artificial Sequence: Synthetic oligonucleotide
cguucggcgaugagcgugc

SEQ ID NO: 696875 - RNA, 19 nt, Artificial Sequence
  Description of Artificial Sequence: Synthetic oligonucleotide
acgcgcuggcguucggcga

SEQ ID NO: 696876 - RNA, 19 nt, Artificial Sequence
  Description of Artificial Sequence: Synthetic oligonucleotide
cucaggccgagcggugcgc

SEQ ID NO: 696877 - RNA, 19 nt, Artificial Sequence
  Description of Artificial Sequence: Synthetic oligonucleotide
ggcgcccgcagcaagcccc

SEQ ID NO: 696878 - RNA, 19 nt, Artificial Sequence
  Description of Artificial Sequence: Synthetic oligonucleotide
guucuccgcagcgucgcuc

SEQ ID NO: 696879 - RNA, 19 nt, Artificial Sequence
  Description of Artificial Sequence: Synthetic oligonucleotide
cugugccgccaugacgcgc

SEQ ID NO: 696880 - RNA, 19 nt, Artificial Sequence
  Description of Artificial Sequence: Synthetic oligonucleotide
cucgcuggcgagucccgga

SEQ ID NO: 696881 - RNA, 19 nt, Artificial Sequence
  Description of Artificial Sequence: Synthetic oligonucleotide
cucgucuauaaaacccgau

SEQ ID NO: 696882 - RNA, 19 nt, Artificial Sequence
  Description of Artificial Sequence: Synthetic oligonucleotide
gcguucggcgaugagcgug

SEQ ID NO: 696883 - RNA, 19 nt, Artificial Sequence
  Description of Artificial Sequence: Synthetic oligonucleotide
ccauggcuagaccugccuc

SEQ ID NO: 696884 - RNA, 19 nt, Artificial Sequence
  Description of Artificial Sequence: Synthetic oligonucleotide
gccgaaguggcuggcguug

SEQ ID NO: 696885 - RNA, 19 nt, Artificial Sequence
  Description of Artificial Sequence: Synthetic oligonucleotide
caggccgagcggugcgccc

SEQ ID NO: 696886 - RNA, 19 nt, Artificial Sequence
  Description of Artificial Sequence: Synthetic oligonucleotide
ccccgaaaaggauucgcca

SEQ ID NO: 696887 - RNA, 19 nt, Artificial Sequence
  Description of Artificial Sequence: Synthetic oligonucleotide
uccgcgggcgcugcacgca

SEQ ID NO: 696888 - RNA, 19 nt, Artificial Sequence
  Description of Artificial Sequence: Synthetic oligonucleotide
gcgaccccgaaaaggauuc

SEQ ID NO: 696889 - RNA, 19 nt, Artificial Sequence
  Description of Artificial Sequence: Synthetic oligonucleotide
gcgggcgcugcacgcaccg

SEQ ID NO: 696890 - RNA, 19 nt, Artificial Sequence
  Description of Artificial Sequence: Synthetic oligonucleotide
caguugcaacucgcgcgcc

SEQ ID NO: 696891 - RNA, 19 nt, Artificial Sequence
  Description of Artificial Sequence: Synthetic oligonucleotide
cguguccuacugcuucucg

SEQ ID NO: 696892 - RNA, 19 nt, Artificial Sequence
  Description of Artificial Sequence: Synthetic oligonucleotide
cgcgcuaccaggacagcug

SEQ ID NO: 696893 - RNA, 19 nt, Artificial Sequence
  Description of Artificial Sequence: Synthetic oligonucleotide
agcguacaguagaucucgu

SEQ ID NO: 696894 - RNA, 19 nt, Artificial Sequence
  Description of Artificial Sequence: Synthetic oligonucleotide
acgggaggucccgucgcug

SEQ ID NO: 696895 - RNA, 19 nt, Artificial Sequence
  Description of Artificial Sequence: Synthetic oligonucleotide
ccgaguccgcgccaucggg

SEQ ID NO: 696896 - RNA, 19 nt, Artificial Sequence
  Description of Artificial Sequence: Synthetic oligonucleotide
cgugguugcggcagcgcgc

SEQ ID NO: 696897 - RNA, 19 nt, Artificial Sequence
  Description of Artificial Sequence: Synthetic oligonucleotide
ucagcgcggccuggacugc

SEQ ID NO: 696898 - RNA, 19 nt, Artificial Sequence
  Description of Artificial Sequence: Synthetic oligonucleotide
ccccguguccuacugcuuc

SEQ ID NO: 696899 - RNA, 19 nt, Artificial Sequence
  Description of Artificial Sequence: Synthetic oligonucleotide
gccaccgacgccacugaug

SEQ ID NO: 696900 - RNA, 19 nt, Artificial Sequence
  Description of Artificial Sequence: Synthetic oligonucleotide
gcgcacacagagccaaaga

SEQ ID NO: 696901 - RNA, 19 nt, Artificial Sequence
  Description of Artificial Sequence: Synthetic oligonucleotide
ccgcaugaggucgcuaaag

SEQ ID NO: 696902 - RNA, 19 nt, Artificial Sequence
  Description of Artificial Sequence: Synthetic oligonucleotide
cacgcaccgcccagcucug

SEQ ID NO: 696903 - RNA, 19 nt, Artificial Sequence
  Description of Artificial Sequence: Synthetic oligonucleotide
cuucagcgcggccuggacu

SEQ ID NO: 696904 - RNA, 19 nt, Artificial Sequence
  Description of Artificial Sequence: Synthetic oligonucleotide
gcgccaugaaggccaggcc

SEQ ID NO: 696905 - RNA, 19 nt, Artificial Sequence
  Description of Artificial Sequence: Synthetic oligonucleotide
ggcgaugagcgugcacuug

SEQ ID NO: 696906 - RNA, 19 nt, Artificial Sequence
  Description of Artificial Sequence: Synthetic oligonucleotide
gcgggcucaggccgagcgg

SEQ ID NO: 696907 - RNA, 19 nt, Artificial Sequence
  Description of Artificial Sequence: Synthetic oligonucleotide
ggcugcggacgugucgggg

SEQ ID NO: 696908 - RNA, 19 nt, Artificial Sequence
  Description of Artificial Sequence: Synthetic oligonucleotide
ggucaccuacagauuacaa

SEQ ID NO: 696909 - RNA, 19 nt, Artificial Sequence
  Description of Artificial Sequence: Synthetic oligonucleotide
cgaugagcgugcacuuggc

SEQ ID NO: 696910 - RNA, 19 nt, Artificial Sequence
  Description of Artificial Sequence: Synthetic oligonucleotide
ggacgaggucccgggaccc

SEQ ID NO: 696911 - RNA, 19 nt, Artificial Sequence
  Description of Artificial Sequence: Synthetic oligonucleotide
cgaguccgcgccaucgggc

SEQ ID NO: 696912 - RNA, 19 nt, Artificial Sequence
  Description of Artificial Sequence: Synthetic oligonucleotide
augcgcgaauaguccgauu

SEQ ID NO: 696913 - RNA, 19 nt, Artificial Sequence
  Description of Artificial Sequence: Synthetic oligonucleotide
gcuagaccugccucgggcu

SEQ ID NO: 696914 - RNA, 19 nt, Artificial Sequence
  Description of Artificial Sequence: Synthetic oligonucleotide
caguagcgcuugacaccac

SEQ ID NO: 696915 - RNA, 19 nt, Artificial Sequence
  Description of Artificial Sequence: Synthetic oligonucleotide
ggguaggcgcccgcgucgg

SEQ ID NO: 696916 - RNA, 19 nt, Artificial Sequence
  Description of Artificial Sequence: Synthetic oligonucleotide
cgcgaauaguccgauuuuc

SEQ ID NO: 696917 - RNA, 19 nt, Artificial Sequence
  Description of Artificial Sequence: Synthetic oligonucleotide
ugguugcggcagcgcgcgc

SEQ ID NO: 696918 - RNA, 19 nt, Artificial Sequence
  Description of Artificial Sequence: Synthetic oligonucleotide
ucccgucgcugucgcugcu

SEQ ID NO: 696919 - RNA, 19 nt, Artificial Sequence
  Description of Artificial Sequence: Synthetic oligonucleotide
guccgcgccaucgggcgac

SEQ ID NO: 696920 - RNA, 19 nt, Artificial Sequence
  Description of Artificial Sequence: Synthetic oligonucleotide
cgaggucaccuacagauua

SEQ ID NO: 696921 - RNA, 19 nt, Artificial Sequence
  Description of Artificial Sequence: Synthetic oligonucleotide
cgcuugacaccacuccgug

SEQ ID NO: 696922 - RNA, 19 nt, Artificial Sequence
  Description of Artificial Sequence: Synthetic oligonucleotide
gcuucagcgcggccuggac

SEQ ID NO: 696923 - RNA, 19 nt, Artificial Sequence
  Description of Artificial Sequence: Synthetic oligonucleotide
gguugcggcagcgcgcgca

SEQ ID NO: 696924 - RNA, 19 nt, Artificial Sequence
  Description of Artificial Sequence: Synthetic oligonucleotide
ccacgggaggucccgucgc

SEQ ID NO: 696925 - RNA, 19 nt, Artificial Sequence
  Description of Artificial Sequence: Synthetic oligonucleotide
cuccguucuccgagccuga

SEQ ID NO: 696926 - RNA, 19 nt, Artificial Sequence
  Description of Artificial Sequence: Synthetic oligonucleotide
cccggaauuuugacaacaa

SEQ ID NO: 696927 - RNA, 19 nt, Artificial Sequence
  Description of Artificial Sequence: Synthetic oligonucleotide
ggcgguggaguagggcgcc

SEQ ID NO: 696928 - RNA, 19 nt, Artificial Sequence
  Description of Artificial Sequence: Synthetic oligonucleotide
cgccaucgggcgacaaugg

SEQ ID NO: 696929 - RNA, 19 nt, Artificial Sequence
  Description of Artificial Sequence: Synthetic oligonucleotide
ccaucgggcgacaauggcu

SEQ ID NO: 696930 - RNA, 19 nt, Artificial Sequence
  Description of Artificial Sequence: Synthetic oligonucleotide
gcguaguccaugggcgggc

SEQ ID NO: 696931 - RNA, 19 nt, Artificial Sequence
  Description of Artificial Sequence: Synthetic oligonucleotide
ggccacgcucacugguaac

SEQ ID NO: 696932 - RNA, 19 nt, Artificial Sequence
  Description of Artificial Sequence: Synthetic oligonucleotide
gcuggcguucggcgaugag

SEQ ID NO: 696933 - RNA, 19 nt, Artificial Sequence
  Description of Artificial Sequence: Synthetic oligonucleotide
gcccucggcagugccauac

SEQ ID NO: 696934 - RNA, 19 nt, Artificial Sequence
  Description of Artificial Sequence: Synthetic oligonucleotide
ccuccgcgggcgcugcacg

SEQ ID NO: 696935 - RNA, 19 nt, Artificial Sequence
  Description of Artificial Sequence: Synthetic oligonucleotide
ccgaaguggcuggcguugg

SEQ ID NO: 696936 - RNA, 19 nt, Artificial Sequence
  Description of Artificial Sequence: Synthetic oligonucleotide
cccgaaaaggauucgccau

SEQ ID NO: 696937 - RNA, 19 nt, Artificial Sequence
  Description of Artificial Sequence: Synthetic oligonucleotide
gccgaguaggccaggcgca

SEQ ID NO: 696938 - RNA, 19 nt, Artificial Sequence
  Description of Artificial Sequence: Synthetic oligonucleotide
ccccggaauuuugacaaca

SEQ ID NO: 696939 - RNA, 19 nt, Artificial Sequence
  Description of Artificial Sequence: Synthetic oligonucleotide
ccaccugugccgccaugac

SEQ ID NO: 696940 - RNA, 19 nt, Artificial Sequence
  Description of Artificial Sequence: Synthetic oligonucleotide
cguacaaugcgcgaauagu

SEQ ID NO: 696941 - RNA, 19 nt, Artificial Sequence
  Description of Artificial Sequence: Synthetic oligonucleotide
ggcccgcgcuaccaggaca

SEQ ID NO: 696942 - RNA, 19 nt, Artificial Sequence
  Description of Artificial Sequence: Synthetic oligonucleotide
cgauacguacaaugcgcga

SEQ ID NO: 696943 - RNA, 19 nt, Artificial Sequence
  Description of Artificial Sequence: Synthetic oligonucleotide
ccgacgccacugaugccac

SEQ ID NO: 696944 - RNA, 19 nt, Artificial Sequence
  Description of Artificial Sequence: Synthetic oligonucleotide
gccagaggcgaccccgaaa

SEQ ID NO: 696945 - RNA, 19 nt, Artificial Sequence
  Description of Artificial Sequence: Synthetic oligonucleotide
cugcgcuguuagcugagau

SEQ ID NO: 696946 - RNA, 19 nt, Artificial Sequence
  Description of Artificial Sequence: Synthetic oligonucleotide
gguggcgcacacagagcca

SEQ ID NO: 696947 - RNA, 19 nt, Artificial Sequence
  Description of Artificial Sequence: Synthetic oligonucleotide
gcguugggcugcagcggcg

SEQ ID NO: 696948 - RNA, 19 nt, Artificial Sequence
  Description of Artificial Sequence: Synthetic oligonucleotide
gcgccgggcacgcuuggca

SEQ ID NO: 696949 - RNA, 19 nt, Artificial Sequence
  Description of Artificial Sequence: Synthetic oligonucleotide
cggcgguggaguagggcgc

SEQ ID NO: 696950 - RNA, 19 nt, Artificial Sequence
  Description of Artificial Sequence: Synthetic oligonucleotide
ucucgccccugcgccccug

SEQ ID NO: 696951 - RNA, 19 nt, Artificial Sequence
  Description of Artificial Sequence: Synthetic oligonucleotide
ccugcgcaaagccaccugu

SEQ ID NO: 696952 - RNA, 19 nt, Artificial Sequence
  Description of Artificial Sequence: Synthetic oligonucleotide
gcgcggccuggacugcucc

SEQ ID NO: 696953 - RNA, 19 nt, Artificial Sequence
  Description of Artificial Sequence: Synthetic oligonucleotide
gucgcaccucuggggacga

SEQ ID NO: 696954 - RNA, 19 nt, Artificial Sequence
  Description of Artificial Sequence: Synthetic oligonucleotide
cacuccccgcgggcgcucc

SEQ ID NO: 696955 - RNA, 19 nt, Artificial Sequence
  Description of Artificial Sequence: Synthetic oligonucleotide
ccggcacuccccgcgggcg

SEQ ID NO: 696956 - RNA, 19 nt, Artificial Sequence
  Description of Artificial Sequence: Synthetic oligonucleotide
gugccgccaugacgcgcug

SEQ ID NO: 696957 - RNA, 19 nt, Artificial Sequence
  Description of Artificial Sequence: Synthetic oligonucleotide
gguaggcgcccgcgucggc

SEQ ID NO: 696958 - RNA, 19 nt, Artificial Sequence
  Description of Artificial Sequence: Synthetic oligonucleotide
cgggacccgaguccgcgcc

SEQ ID NO: 696959 - RNA, 19 nt, Artificial Sequence
  Description of Artificial Sequence: Synthetic oligonucleotide
ggggcgggcacggccgcag

SEQ ID NO: 696960 - RNA, 19 nt, Artificial Sequence
  Description of Artificial Sequence: Synthetic oligonucleotide
cgcggguacuucuccgcug

SEQ ID NO: 696961 - RNA, 19 nt, Artificial Sequence
  Description of Artificial Sequence: Synthetic oligonucleotide
cugagccgggucgcaccuc

SEQ ID NO: 696962 - RNA, 19 nt, Artificial Sequence
  Description of Artificial Sequence: Synthetic oligonucleotide
ugcgccccucucgccccug

SEQ ID NO: 696963 - RNA, 19 nt, Artificial Sequence
  Description of Artificial Sequence: Synthetic oligonucleotide
cgggcgacaauggcuuccc

SEQ ID NO: 696964 - RNA, 19 nt, Artificial Sequence
  Description of Artificial Sequence: Synthetic oligonucleotide
cccggcacuccccgcgggc

SEQ ID NO: 696965 - RNA, 19 nt, Artificial Sequence
  Description of Artificial Sequence: Synthetic oligonucleotide
cccguacaggccgcucccg

SEQ ID NO: 696966 - RNA, 19 nt, Artificial Sequence
  Description of Artificial Sequence: Synthetic oligonucleotide
guucggcgaugagcgugca

SEQ ID NO: 696967 - RNA, 19 nt, Artificial Sequence
  Description of Artificial Sequence: Synthetic oligonucleotide
ggguccgcggguacuucuc

SEQ ID NO: 696968 - RNA, 19 nt, Artificial Sequence
  Description of Artificial Sequence: Synthetic oligonucleotide
gcggcggcggcggcggccg

SEQ ID NO: 696969 - RNA, 19 nt, Artificial Sequence
  Description of Artificial Sequence: Synthetic oligonucleotide
ccgggacccgaguccgcgc

SEQ ID NO: 696970 - RNA, 19 nt, Artificial Sequence
  Description of Artificial Sequence: Synthetic oligonucleotide
ggcaguccuuccagcggca

SEQ ID NO: 696971 - RNA, 19 nt, Artificial Sequence
  Description of Artificial Sequence: Synthetic oligonucleotide
gggacccgaguccgcgcca

SEQ ID NO: 696972 - RNA, 19 nt, Artificial Sequence
  Description of Artificial Sequence: Synthetic oligonucleotide
gggcccgcgcuaccaggac

SEQ ID NO: 696973 - RNA, 19 nt, Artificial Sequence
  Description of Artificial Sequence: Synthetic oligonucleotide
cggcagcgcgcgcauuugg

SEQ ID NO: 696974 - RNA, 19 nt, Artificial Sequence
  Description of Artificial Sequence: Synthetic oligonucleotide
ggcgaccccgaaaaggauu

SEQ ID NO: 696975 - RNA, 19 nt, Artificial Sequence
  Description of Artificial Sequence: Synthetic oligonucleotide
gcggacgugucggggcggc

SEQ ID NO: 696976 - RNA, 19 nt, Artificial Sequence
  Description of Artificial Sequence: Synthetic oligonucleotide
cacgggaggucccgucgcu

SEQ ID NO: 696977 - RNA, 19 nt, Artificial Sequence
  Description of Artificial Sequence: Synthetic oligonucleotide
ccacgcucacugguaacga

SEQ ID NO: 696978 - RNA, 19 nt, Artificial Sequence
  Description of Artificial Sequence: Synthetic oligonucleotide
ccgaugcucuauucgugcu

SEQ ID NO: 696979 - RNA, 19 nt, Artificial Sequence
  Description of Artificial Sequence: Synthetic oligonucleotide
cgaccccgaaaaggauucg

SEQ ID NO: 696980 - RNA, 19 nt, Artificial Sequence
  Description of Artificial Sequence: Synthetic oligonucleotide
gcgcgaauaguccgauuuu

SEQ ID NO: 696981 - RNA, 19 nt, Artificial Sequence
  Description of Artificial Sequence: Synthetic oligonucleotide
ccgcagcgucgcucgcugg

SEQ ID NO: 696982 - RNA, 19 nt, Artificial Sequence
  Description of Artificial Sequence: Synthetic oligonucleotide
gcccgcgucggcgccgaag

SEQ ID NO: 696983 - RNA, 19 nt, Artificial Sequence
  Description of Artificial Sequence: Synthetic oligonucleotide
gggcgacaauggcuuccca

SEQ ID NO: 696984 - RNA, 19 nt, Artificial Sequence
  Description of Artificial Sequence: Synthetic oligonucleotide
cgcucgcuggcgagucccg

SEQ ID NO: 696985 - RNA, 19 nt, Artificial Sequence
  Description of Artificial Sequence: Synthetic oligonucleotide
gcgccgaaguggcuggcgu

SEQ ID NO: 696986 - RNA, 19 nt, Artificial Sequence
  Description of Artificial Sequence: Synthetic oligonucleotide
gccaugacgcgcuggcguu

SEQ ID NO: 696987 - RNA, 19 nt, Artificial Sequence
  Description of Artificial Sequence: Synthetic oligonucleotide
ccaugacgcgcuggcguuc

SEQ ID NO: 696988 - RNA, 19 nt, Artificial Sequence
  Description of Artificial Sequence: Synthetic oligonucleotide
cgcuggcgagucccggagc

SEQ ID NO: 696989 - RNA, 19 nt, Artificial Sequence
  Description of Artificial Sequence: Synthetic oligonucleotide
ccccagcguacaguagauc

SEQ ID NO: 696990 - RNA, 19 nt, Artificial Sequence
  Description of Artificial Sequence: Synthetic oligonucleotide
ccccggcacuccccgcggg

SEQ ID NO: 696991 - RNA, 19 nt, Artificial Sequence
  Description of Artificial Sequence: Synthetic oligonucleotide
cccgcaugaggucgcuaaa

SEQ ID NO: 696992 - RNA, 19 nt, Artificial Sequence
  Description of Artificial Sequence: Synthetic oligonucleotide
cuccgcagcgucgcucgcu

SEQ ID NO: 696993 - RNA, 19 nt, Artificial Sequence
  Description of Artificial Sequence: Synthetic oligonucleotide
ccgcgggcgcugcacgcac

SEQ ID NO: 696994 - RNA, 19 nt, Artificial Sequence
  Description of Artificial Sequence: Synthetic oligonucleotide
cauugaccaugggcccgua

SEQ ID NO: 696995 - RNA, 19 nt, Artificial Sequence
  Description of Artificial Sequence: Synthetic oligonucleotide
cggcgagacgccgccgccg

SEQ ID NO: 696996 - RNA, 19 nt, Artificial Sequence
  Description of Artificial Sequence: Synthetic oligonucleotide
cccgcgucggcgccgaagu

SEQ ID NO: 696997 - RNA, 19 nt, Artificial Sequence
  Description of Artificial Sequence: Synthetic oligonucleotide
ggcggccgagcggucccgc

SEQ ID NO: 696998 - RNA, 19 nt, Artificial Sequence
  Description of Artificial Sequence: Synthetic oligonucleotide
gggcgccaugaaggccagg

SEQ ID NO: 696999 - RNA, 19 nt, Artificial Sequence
  Description of Artificial Sequence: Synthetic oligonucleotide
ccugagccgggucgcaccu

SEQ ID NO: 697000 - RNA, 19 nt, Artificial Sequence
  Description of Artificial Sequence: Synthetic oligonucleotide
gcggccgagcggucccgca

SEQ ID NO: 697001 - RNA, 19 nt, Artificial Sequence
  Description of Artificial Sequence: Synthetic oligonucleotide
ccgagcggucccgcaugag

SEQ ID NO: 697002 - RNA, 19 nt, Artificial Sequence
  Description of Artificial Sequence: Synthetic oligonucleotide
ggcguucggcgaugagcgu

SEQ ID NO: 697003 - RNA, 19 nt, Artificial Sequence
  Description of Artificial Sequence: Synthetic oligonucleotide
ccugcgcuguuagcugaga

SEQ ID NO: 697004 - RNA, 19 nt, Artificial Sequence
  Description of Artificial Sequence: Synthetic oligonucleotide
gccgcccucgggauucuua

SEQ ID NO: 697005 - RNA, 19 nt, Artificial Sequence
  Description of Artificial Sequence: Synthetic oligonucleotide
cccgcgcuaccaggacagc

SEQ ID NO: 697006 - RNA, 19 nt, Artificial Sequence
  Description of Artificial Sequence: Synthetic oligonucleotide
ccgaggucaccuacagauu

SEQ ID NO: 697007 - RNA, 19 nt, Artificial Sequence
  Description of Artificial Sequence: Synthetic oligonucleotide
gccgucgguggcgcacaca

SEQ ID NO: 697008 - RNA, 19 nt, Artificial Sequence
  Description of Artificial Sequence: Synthetic oligonucleotide
gggcccguacaggccgcuc

SEQ ID NO: 697009 - RNA, 19 nt, Artificial Sequence
  Description of Artificial Sequence: Synthetic oligonucleotide
ccguacaggccgcucccgu

SEQ ID NO: 697010 - RNA, 19 nt, Artificial Sequence
  Description of Artificial Sequence: Synthetic oligonucleotide
cgcccucgggauucuuaga

SEQ ID NO: 697011 - RNA, 19 nt, Artificial Sequence
  Description of Artificial Sequence: Synthetic oligonucleotide
cggccacgcucacugguaa

SEQ ID NO: 697012 - RNA, 19 nt, Artificial Sequence
  Description of Artificial Sequence: Synthetic oligonucleotide
ggacccgaguccgcgccau

SEQ ID NO: 697013 - RNA, 19 nt, Artificial Sequence
  Description of Artificial Sequence: Synthetic oligonucleotide
ucgccgcgccgggcacgcu

SEQ ID NO: 697014 - RNA, 19 nt, Artificial Sequence
  Description of Artificial Sequence: Synthetic oligonucleotide
ccgcggguacuucuccgcu

SEQ ID NO: 697015 - RNA, 19 nt, Artificial Sequence
  Description of Artificial Sequence: Synthetic oligonucleotide
gcgguggaguagggcgcca

SEQ ID NO: 697016 - RNA, 19 nt, Artificial Sequence
  Description of Artificial Sequence: Synthetic oligonucleotide
ccgcgcuaccaggacagcu

SEQ ID NO: 697017 - RNA, 19 nt, Artificial Sequence
  Description of Artificial Sequence: Synthetic oligonucleotide
cuggcgagucccggagcuu

SEQ ID NO: 697018 - RNA, 19 nt, Artificial Sequence
  Description of Artificial Sequence: Synthetic oligonucleotide
ccgggcacgcuuggcagcu

SEQ ID NO: 697019 - RNA, 19 nt, Artificial Sequence
  Description of Artificial Sequence: Synthetic oligonucleotide
gcgucgcucgcuggcgagu

SEQ ID NO: 697020 - RNA, 19 nt, Artificial Sequence
  Description of Artificial Sequence: Synthetic oligonucleotide
cgcaccgcccagcucugcu

SEQ ID NO: 697021 - RNA, 19 nt, Artificial Sequence
  Description of Artificial Sequence: Synthetic oligonucleotide
ccgccgucgguggcgcaca

SEQ ID NO: 697022 - RNA, 19 nt, Artificial Sequence
  Description of Artificial Sequence: Synthetic oligonucleotide
cgcggcggcggcggcggcc

SEQ ID NO: 697023 - RNA, 19 nt, Artificial Sequence
  Description of Artificial Sequence: Synthetic oligonucleotide
cgccgucgguggcgcacac

SEQ ID NO: 697024 - RNA, 19 nt, Artificial Sequence
  Description of Artificial Sequence: Synthetic oligonucleotide
cgcgccaucgggcgacaau

SEQ ID NO: 697025 - RNA, 19 nt, Artificial Sequence
  Description of Artificial Sequence: Synthetic oligonucleotide
cggcgaugagcgugcacuu

SEQ ID NO: 697026 - RNA, 19 nt, Artificial Sequence
  Description of Artificial Sequence: Synthetic oligonucleotide
cgcuggcguucggcgauga

SEQ ID NO: 697027 - RNA, 19 nt, Artificial Sequence
  Description of Artificial Sequence: Synthetic oligonucleotide
cgccgaaguggcuggcguu

SEQ ID NO: 697028 - RNA, 19 nt, Artificial Sequence
  Description of Artificial Sequence: Synthetic oligonucleotide
cagccgcccucgggauucu

SEQ ID NO: 697029 - RNA, 19 nt, Artificial Sequence
  Description of Artificial Sequence: Synthetic oligonucleotide
gccccguguccuacugcuu

SEQ ID NO: 697030 - RNA, 19 nt, Artificial Sequence
  Description of Artificial Sequence: Synthetic oligonucleotide
ccgcggcggcggcggcggc

SEQ ID NO: 697031 - RNA, 19 nt, Artificial Sequence
  Description of Artificial Sequence: Synthetic oligonucleotide
ccgcucccguagccgggcu

SEQ ID NO: 697032 - RNA, 19 nt, Artificial Sequence
  Description of Artificial Sequence: Synthetic oligonucleotide
cgcccgcgucggcgccgaa

SEQ ID NO: 697033 - RNA, 19 nt, Artificial Sequence
  Description of Artificial Sequence: Synthetic oligonucleotide
aaauauucuagccaauaac

SEQ ID NO: 697034 - RNA, 19 nt, Artificial Sequence
  Description of Artificial Sequence: Synthetic oligonucleotide
uacauuuggacucauauag

SEQ ID NO: 697035 - RNA, 19 nt, Artificial Sequence
  Description of Artificial Sequence: Synthetic oligonucleotide
aauagucuaauaaauauuc

SEQ ID NO: 697036 - RNA, 19 nt, Artificial Sequence
  Description of Artificial Sequence: Synthetic oligonucleotide
acaacaaccacauuuauug

SEQ ID NO: 697037 - RNA, 19 nt, Artificial Sequence
  Description of Artificial Sequence: Synthetic oligonucleotide
aaauaguccaacaauaguc

SEQ ID NO: 697038 - RNA, 19 nt, Artificial Sequence
  Description of Artificial Sequence: Synthetic oligonucleotide
aaaucgaucauucagggaa

SEQ ID NO: 697039 - RNA, 19 nt, Artificial Sequence
  Description of Artificial Sequence: Synthetic oligonucleotide
aacuauauuucuuugaaau

SEQ ID NO: 697040 - RNA, 19 nt, Artificial Sequence
  Description of Artificial Sequence: Synthetic oligonucleotide
gauggagcgaguuagcugg

SEQ ID NO: 697041 - RNA, 19 nt, Artificial Sequence
  Description of Artificial Sequence: Synthetic oligonucleotide
acugucaaugaauauauuc

SEQ ID NO: 697042 - RNA, 19 nt, Artificial Sequence
  Description of Artificial Sequence: Synthetic oligonucleotide
ucuggaacccaucauaucc

SEQ ID NO: 697043 - RNA, 19 nt, Artificial Sequence
  Description of Artificial Sequence: Synthetic oligonucleotide
aauauucuagccaauaaca

SEQ ID NO: 697044 - RNA, 19 nt, Artificial Sequence
  Description of Artificial Sequence: Synthetic oligonucleotide
guuguuaugucucaccacg

SEQ ID NO: 697045 - RNA, 19 nt, Artificial Sequence
  Description of Artificial Sequence: Synthetic oligonucleotide
ugaaauuaugcuaccagug

SEQ ID NO: 697046 - RNA, 19 nt, Artificial Sequence
  Description of Artificial Sequence: Synthetic oligonucleotide
aguuagaucgaguaaagca

SEQ ID NO: 697047 - RNA, 19 nt, Artificial Sequence
  Description of Artificial Sequence: Synthetic oligonucleotide
gaguaaagcaacaacaacc

SEQ ID NO: 697048 - RNA, 19 nt, Artificial Sequence
  Description of Artificial Sequence: Synthetic oligonucleotide
uacucuuacaaguagcaag

SEQ ID NO: 697049 - RNA, 19 nt, Artificial Sequence
  Description of Artificial Sequence: Synthetic oligonucleotide
ugagcuagaaagcauauau

SEQ ID NO: 697050 - RNA, 19 nt, Artificial Sequence
  Description of Artificial Sequence: Synthetic oligonucleotide
aagaagggauuucagcaac

SEQ ID NO: 697051 - RNA, 19 nt, Artificial Sequence
  Description of Artificial Sequence: Synthetic oligonucleotide
uucuuacugaucaaguaag

SEQ ID NO: 697052 - RNA, 19 nt, Artificial Sequence
  Description of Artificial Sequence: Synthetic oligonucleotide
agggauuuguuccagauug

SEQ ID NO: 697053 - RNA, 19 nt, Artificial Sequence
  Description of Artificial Sequence: Synthetic oligonucleotide
aauaguuagaucgaguaaa

SEQ ID NO: 697054 - RNA, 19 nt, Artificial Sequence
  Description of Artificial Sequence: Synthetic oligonucleotide
ucaaaucgaucauucaggg

SEQ ID NO: 697055 - RNA, 19 nt, Artificial Sequence
  Description of Artificial Sequence: Synthetic oligonucleotide
ugaaugaauaauguaaaca

SEQ ID NO: 697056 - RNA, 19 nt, Artificial Sequence
  Description of Artificial Sequence: Synthetic oligonucleotide
cucaaaucgaucauucagg

SEQ ID NO: 697057 - RNA, 19 nt, Artificial Sequence
  Description of Artificial Sequence: Synthetic oligonucleotide
aaaguccuuaaguuuacug

SEQ ID NO: 697058 - RNA, 19 nt, Artificial Sequence
  Description of Artificial Sequence: Synthetic oligonucleotide
uuuagcguaagucuaguaa

SEQ ID NO: 697059 - RNA, 19 nt, Artificial Sequence
  Description of Artificial Sequence: Synthetic oligonucleotide
ugauuuuguugcaauauga

SEQ ID NO: 697060 - RNA, 19 nt, Artificial Sequence
  Description of Artificial Sequence: Synthetic oligonucleotide
ucaaguaaggcgaauucug

SEQ ID NO: 697061 - RNA, 19 nt, Artificial Sequence
  Description of Artificial Sequence: Synthetic oligonucleotide
acaagaaugaguauugauc

SEQ ID NO: 697062 - RNA, 19 nt, Artificial Sequence
  Description of Artificial Sequence: Synthetic oligonucleotide
uuuaguuucucaaaucgau

SEQ ID NO: 697063 - RNA, 19 nt, Artificial Sequence
  Description of Artificial Sequence: Synthetic oligonucleotide
uuaugucucaccacgaagu

SEQ ID NO: 697064 - RNA, 19 nt, Artificial Sequence
  Description of Artificial Sequence: Synthetic oligonucleotide
uuucguauucucaaaacaa

SEQ ID NO: 697065 - RNA, 19 nt, Artificial Sequence
  Description of Artificial Sequence: Synthetic oligonucleotide
uucguauucucaaaacaag

SEQ ID NO: 697066 - RNA, 19 nt, Artificial Sequence
  Description of Artificial Sequence: Synthetic oligonucleotide
aguaaggcgaauucugagg

SEQ ID NO: 697067 - RNA, 19 nt, Artificial Sequence
  Description of Artificial Sequence: Synthetic oligonucleotide
uguuggacaaacuggaaga

SEQ ID NO: 697068 - RNA, 19 nt, Artificial Sequence
  Description of Artificial Sequence: Synthetic oligonucleotide
auaauugugggagugguuc

SEQ ID NO: 697069 - RNA, 19 nt, Artificial Sequence
  Description of Artificial Sequence: Synthetic oligonucleotide
uggaauuggcuuaaggagc

SEQ ID NO: 697070 - RNA, 19 nt, Artificial Sequence
  Description of Artificial Sequence: Synthetic oligonucleotide
aagcaaauaucuggaaccc

SEQ ID NO: 697071 - RNA, 19 nt, Artificial Sequence
  Description of Artificial Sequence: Synthetic oligonucleotide
guuuugccuaaccugaugg

SEQ ID NO: 697072 - RNA, 19 nt, Artificial Sequence
  Description of Artificial Sequence: Synthetic oligonucleotide
guauugauccuauugauga

SEQ ID NO: 697073 - RNA, 19 nt, Artificial Sequence
  Description of Artificial Sequence: Synthetic oligonucleotide
ugcaguuacucuuacaagu

SEQ ID NO: 697074 - RNA, 19 nt, Artificial Sequence
  Description of Artificial Sequence: Synthetic oligonucleotide
ucauaauccaagaggacac

SEQ ID NO: 697075 - RNA, 19 nt, Artificial Sequence
  Description of Artificial Sequence: Synthetic oligonucleotide
uaugcuaccagugaauuac

SEQ ID NO: 697076 - RNA, 19 nt, Artificial Sequence
  Description of Artificial Sequence: Synthetic oligonucleotide
agucuaauaaauauucuag

SEQ ID NO: 697077 - RNA, 19 nt, Artificial Sequence
  Description of Artificial Sequence: Synthetic oligonucleotide
ugaauaguuagaucgagua

SEQ ID NO: 697078 - RNA, 19 nt, Artificial Sequence
  Description of Artificial Sequence: Synthetic oligonucleotide
aguggaaacaagcauaaau

SEQ ID NO: 697079 - RNA, 19 nt, Artificial Sequence
  Description of Artificial Sequence: Synthetic oligonucleotide
ugucucaccacgaaguuac

SEQ ID NO: 697080 - RNA, 19 nt, Artificial Sequence
  Description of Artificial Sequence: Synthetic oligonucleotide
agcuacaaauaauuguggg

SEQ ID NO: 697081 - RNA, 19 nt, Artificial Sequence
  Description of Artificial Sequence: Synthetic oligonucleotide
uccucuauuaaauaauauc

SEQ ID NO: 697082 - RNA, 19 nt, Artificial Sequence
  Description of Artificial Sequence: Synthetic oligonucleotide
ucguauucucaaaacaagc

SEQ ID NO: 697083 - RNA, 19 nt, Artificial Sequence
  Description of Artificial Sequence: Synthetic oligonucleotide
acucauauaguuguugaac

SEQ ID NO: 697084 - RNA, 19 nt, Artificial Sequence
  Description of Artificial Sequence: Synthetic oligonucleotide
uccuuaaguuuacugaagc

SEQ ID NO: 697085 - RNA, 19 nt, Artificial Sequence
  Description of Artificial Sequence: Synthetic oligonucleotide
aaccugauggcaauaaauc

SEQ ID NO: 697086 - RNA, 19 nt, Artificial Sequence
  Description of Artificial Sequence: Synthetic oligonucleotide
aguagcaagaacaucaaug

SEQ ID NO: 697087 - RNA, 19 nt, Artificial Sequence
  Description of Artificial Sequence: Synthetic oligonucleotide
agaacccaugacuaccucc

SEQ ID NO: 697088 - RNA, 19 nt, Artificial Sequence
  Description of Artificial Sequence: Synthetic oligonucleotide
aaguaaggcgaauucugag

SEQ ID NO: 697089 - RNA, 19 nt, Artificial Sequence
  Description of Artificial Sequence: Synthetic oligonucleotide
ucuuacugaucaaguaagg

SEQ ID NO: 697090 - RNA, 19 nt, Artificial Sequence
  Description of Artificial Sequence: Synthetic oligonucleotide
gaugcaguuacucuuacaa

SEQ ID NO: 697091 - RNA, 19 nt, Artificial Sequence
  Description of Artificial Sequence: Synthetic oligonucleotide
uucuuauugggaugugugg

SEQ ID NO: 697092 - RNA, 19 nt, Artificial Sequence
  Description of Artificial Sequence: Synthetic oligonucleotide
aaucacacaagaaugagua

SEQ ID NO: 697093 - RNA, 19 nt, Artificial Sequence
  Description of Artificial Sequence: Synthetic oligonucleotide
uuaugaaaguccuuaaguu

SEQ ID NO: 697094 - RNA, 19 nt, Artificial Sequence
  Description of Artificial Sequence: Synthetic oligonucleotide
uguugucauaauccaagag

SEQ ID NO: 697095 - RNA, 19 nt, Artificial Sequence
  Description of Artificial Sequence: Synthetic oligonucleotide
uuggaaagcauuuugucau

SEQ ID NO: 697096 - RNA, 19 nt, Artificial Sequence
  Description of Artificial Sequence: Synthetic oligonucleotide
uauguauuugagaguaaca

SEQ ID NO: 697097 - RNA, 19 nt, Artificial Sequence
  Description of Artificial Sequence: Synthetic oligonucleotide
ugcaacuggcuuuagcuag

SEQ ID NO: 697098 - RNA, 19 nt, Artificial Sequence
  Description of Artificial Sequence: Synthetic oligonucleotide
ucucuuguccauuaauggc

SEQ ID NO: 697099 - RNA, 19 nt, Artificial Sequence
  Description of Artificial Sequence: Synthetic oligonucleotide
aacaaccacauuuauugaa

SEQ ID NO: 697100 - RNA, 19 nt, Artificial Sequence
  Description of Artificial Sequence: Synthetic oligonucleotide
aacuauguauuugagagua

SEQ ID NO: 697101 - RNA, 19 nt, Artificial Sequence
  Description of Artificial Sequence: Synthetic oligonucleotide
cauaaaaggcaguuuugcc

SEQ ID NO: 697102 - RNA, 19 nt, Artificial Sequence
  Description of Artificial Sequence: Synthetic oligonucleotide
ugccaguauuuuaugaaag

SEQ ID NO: 697103 - RNA, 19 nt, Artificial Sequence
  Description of Artificial Sequence: Synthetic oligonucleotide
aaagaagggauuucagcaa

SEQ ID NO: 697104 - RNA, 19 nt, Artificial Sequence
  Description of Artificial Sequence: Synthetic oligonucleotide
augacuaccucccaguagu

SEQ ID NO: 697105 - RNA, 19 nt, Artificial Sequence
  Description of Artificial Sequence: Synthetic oligonucleotide
uuagaucgaguaaagcaac

SEQ ID NO: 697106 - RNA, 19 nt, Artificial Sequence
  Description of Artificial Sequence: Synthetic oligonucleotide
ugaaccuguaacacuauuc

SEQ ID NO: 697107 - RNA, 19 nt, Artificial Sequence
  Description of Artificial Sequence: Synthetic oligonucleotide
auucuuacugaucaaguaa

SEQ ID NO: 697108 - RNA, 19 nt, Artificial Sequence
  Description of Artificial Sequence: Synthetic oligonucleotide
aguucugaauaguuagauc

SEQ ID NO: 697109 - RNA, 19 nt, Artificial Sequence
  Description of Artificial Sequence: Synthetic oligonucleotide
uugaaagaagggauuucag

SEQ ID NO: 697110 - RNA, 19 nt, Artificial Sequence
  Description of Artificial Sequence: Synthetic oligonucleotide
uagucuaauaaauauucua

SEQ ID NO: 697111 - RNA, 19 nt, Artificial Sequence
  Description of Artificial Sequence: Synthetic oligonucleotide
uaugaaaguccuuaaguuu

SEQ ID NO: 697112 - RNA, 19 nt, Artificial Sequence
  Description of Artificial Sequence: Synthetic oligonucleotide
uuguaggcgauaccaauug

SEQ ID NO: 697113 - RNA, 19 nt, Artificial Sequence
  Description of Artificial Sequence: Synthetic oligonucleotide
ucuuauugggauguguggc

SEQ ID NO: 697114 - RNA, 19 nt, Artificial Sequence
  Description of Artificial Sequence: Synthetic oligonucleotide
aacugguuccaccaggcga

SEQ ID NO: 697115 - RNA, 19 nt, Artificial Sequence
  Description of Artificial Sequence: Synthetic oligonucleotide
ucgaguaaagcaacaacaa

SEQ ID NO: 697116 - RNA, 19 nt, Artificial Sequence
  Description of Artificial Sequence: Synthetic oligonucleotide
aagguuucuuauugggaug

SEQ ID NO: 697117 - RNA, 19 nt, Artificial Sequence
  Description of Artificial Sequence: Synthetic oligonucleotide
cuuguuguuaugucucacc

SEQ ID NO: 697118 - RNA, 19 nt, Artificial Sequence
  Description of Artificial Sequence: Synthetic oligonucleotide
ucuuuaggccugcaguugc

SEQ ID NO: 697119 - RNA, 19 nt, Artificial Sequence
  Description of Artificial Sequence: Synthetic oligonucleotide
ugaagaacccaugacuacc

SEQ ID NO: 697120 - RNA, 19 nt, Artificial Sequence
  Description of Artificial Sequence: Synthetic oligonucleotide
aaguuacuguugcaucggg

SEQ ID NO: 697121 - RNA, 19 nt, Artificial Sequence
  Description of Artificial Sequence: Synthetic oligonucleotide
cuuauugggauguguggcc

SEQ ID NO: 697122 - RNA, 19 nt, Artificial Sequence
  Description of Artificial Sequence: Synthetic oligonucleotide
agauguguaucugaaacug

SEQ ID NO: 697123 - RNA, 19 nt, Artificial Sequence
  Description of Artificial Sequence: Synthetic oligonucleotide
uggagauggagcgaguuag

SEQ ID NO: 697124 - RNA, 19 nt, Artificial Sequence
  Description of Artificial Sequence: Synthetic oligonucleotide
uuaaggagcuacaaauaau

SEQ ID NO: 697125 - RNA, 19 nt, Artificial Sequence
  Description of Artificial Sequence: Synthetic oligonucleotide
uccuauugaugaaaacagc

SEQ ID NO: 697126 - RNA, 19 nt, Artificial Sequence
  Description of Artificial Sequence: Synthetic oligonucleotide
ugccccauaacacccagug

SEQ ID NO: 697127 - RNA, 19 nt, Artificial Sequence
  Description of Artificial Sequence: Synthetic oligonucleotide
ucaaugaaauuaugcuacc

SEQ ID NO: 697128 - RNA, 19 nt, Artificial Sequence
  Description of Artificial Sequence: Synthetic oligonucleotide
ucugaauaguuagaucgag

SEQ ID NO: 697129 - RNA, 19 nt, Artificial Sequence
  Description of Artificial Sequence: Synthetic oligonucleotide
uaagugaaugaauaaugua

SEQ ID NO: 697130 - RNA, 19 nt, Artificial Sequence
  Description of Artificial Sequence: Synthetic oligonucleotide
gaucgaguaaagcaacaac

SEQ ID NO: 697131 - RNA, 19 nt, Artificial Sequence
  Description of Artificial Sequence: Synthetic oligonucleotide
aagaaugaguauugauccu

SEQ ID NO: 697132 - RNA, 19 nt, Artificial Sequence
  Description of Artificial Sequence: Synthetic oligonucleotide
cuuacugaucaaguaaggc

SEQ ID NO: 697133 - RNA, 19 nt, Artificial Sequence
  Description of Artificial Sequence: Synthetic oligonucleotide
uuaguuucucaaaucgauc

SEQ ID NO: 697134 - RNA, 19 nt, Artificial Sequence
  Description of Artificial Sequence: Synthetic oligonucleotide
acgaaguuacuguugcauc

SEQ ID NO: 697135 - RNA, 19 nt, Artificial Sequence
  Description of Artificial Sequence: Synthetic oligonucleotide
guuaugucucaccacgaag

SEQ ID NO: 697136 - RNA, 19 nt, Artificial Sequence
  Description of Artificial Sequence: Synthetic oligonucleotide
auugccaguauuuuaugaa

SEQ ID NO: 697137 - RNA, 19 nt, Artificial Sequence
  Description of Artificial Sequence: Synthetic oligonucleotide
ugaauauauuccugcugcc

SEQ ID NO: 697138 - RNA, 19 nt, Artificial Sequence
  Description of Artificial Sequence: Synthetic oligonucleotide
uuacaaguagcaagaacau

SEQ ID NO: 697139 - RNA, 19 nt, Artificial Sequence
  Description of Artificial Sequence: Synthetic oligonucleotide
ggcauuaaauuuucuuucg

SEQ ID NO: 697140 - RNA, 19 nt, Artificial Sequence
  Description of Artificial Sequence: Synthetic oligonucleotide
acaaauaauugugggagug

SEQ ID NO: 697141 - RNA, 19 nt, Artificial Sequence
  Description of Artificial Sequence: Synthetic oligonucleotide
ucagcaacugagcuuauuu

SEQ ID NO: 697142 - RNA, 19 nt, Artificial Sequence
  Description of Artificial Sequence: Synthetic oligonucleotide
aucgaguaaagcaacaaca

SEQ ID NO: 697143 - RNA, 19 nt, Artificial Sequence
  Description of Artificial Sequence: Synthetic oligonucleotide
uauucuuacugaucaagua

SEQ ID NO: 697144 - RNA, 19 nt, Artificial Sequence
  Description of Artificial Sequence: Synthetic oligonucleotide
aaauugauccauccaggua

SEQ ID NO: 697145 - RNA, 19 nt, Artificial Sequence
  Description of Artificial Sequence: Synthetic oligonucleotide
cuagaaugcuuugagcuag

SEQ ID NO: 697146 - RNA, 19 nt, Artificial Sequence
  Description of Artificial Sequence: Synthetic oligonucleotide
gaucaaguaaggcgaauuc

SEQ ID NO: 697147 - RNA, 19 nt, Artificial Sequence
  Description of Artificial Sequence: Synthetic oligonucleotide
aauugcauaccauguugaa

SEQ ID NO: 697148 - RNA, 19 nt, Artificial Sequence
  Description of Artificial Sequence: Synthetic oligonucleotide
caggguaaucaauaaaauc

SEQ ID NO: 697149 - RNA, 19 nt, Artificial Sequence
  Description of Artificial Sequence: Synthetic oligonucleotide
ucccaguacaaacaagccu

SEQ ID NO: 697150 - RNA, 19 nt, Artificial Sequence
  Description of Artificial Sequence: Synthetic oligonucleotide
gacaccuagacgcuucagc

SEQ ID NO: 697151 - RNA, 19 nt, Artificial Sequence
  Description of Artificial Sequence: Synthetic oligonucleotide
uugcaucgggagaagaccc

SEQ ID NO: 697152 - RNA, 19 nt, Artificial Sequence
  Description of Artificial Sequence: Synthetic oligonucleotide
uguuguuccuuggaaagca

SEQ ID NO: 697153 - RNA, 19 nt, Artificial Sequence
  Description of Artificial Sequence: Synthetic oligonucleotide
auguauuugagaguaacaa

SEQ ID NO: 697154 - RNA, 19 nt, Artificial Sequence
  Description of Artificial Sequence: Synthetic oligonucleotide
aacaagccugggguaaagc

SEQ ID NO: 697155 - RNA, 19 nt, Artificial Sequence
  Description of Artificial Sequence: Synthetic oligonucleotide
uguugcaucgggagaagac

SEQ ID NO: 697156 - RNA, 19 nt, Artificial Sequence
  Description of Artificial Sequence: Synthetic oligonucleotide
ucgaagauguguaucugaa

SEQ ID NO: 697157 - RNA, 19 nt, Artificial Sequence
  Description of Artificial Sequence: Synthetic oligonucleotide
cuauguauuugagaguaac

SEQ ID NO: 697158 - RNA, 19 nt, Artificial Sequence
  Description of Artificial Sequence: Synthetic oligonucleotide
ucgagaaugugccuuuagu

SEQ ID NO: 697159 - RNA, 19 nt, Artificial Sequence
  Description of Artificial Sequence: Synthetic oligonucleotide
uaacaauaacacagcauau

SEQ ID NO: 697160 - RNA, 19 nt, Artificial Sequence
  Description of Artificial Sequence: Synthetic oligonucleotide
ucggugacgacccaccagu

SEQ ID NO: 697161 - RNA, 19 nt, Artificial Sequence
  Description of Artificial Sequence: Synthetic oligonucleotide
agugccacuaaaucucucu

SEQ ID NO: 697162 - RNA, 19 nt, Artificial Sequence
  Description of Artificial Sequence: Synthetic oligonucleotide
ggcgauaccaauugcauac

SEQ ID NO: 697163 - RNA, 19 nt, Artificial Sequence
  Description of Artificial Sequence: Synthetic oligonucleotide
aguuagcugggucauagaa

SEQ ID NO: 697164 - RNA, 19 nt, Artificial Sequence
  Description of Artificial Sequence: Synthetic oligonucleotide
uugauccuauugaugaaaa

SEQ ID NO: 697165 - RNA, 19 nt, Artificial Sequence
  Description of Artificial Sequence: Synthetic oligonucleotide
caaauaauugugggagugg

SEQ ID NO: 697166 - RNA, 19 nt, Artificial Sequence
  Description of Artificial Sequence: Synthetic oligonucleotide
uuagcuagugguagccucu

SEQ ID NO: 697167 - RNA, 19 nt, Artificial Sequence
  Description of Artificial Sequence: Synthetic oligonucleotide
uuuguaggcgauaccaauu

SEQ ID NO: 697168 - RNA, 19 nt, Artificial Sequence
  Description of Artificial Sequence: Synthetic oligonucleotide
uccauuaugcaacucuauu

SEQ ID NO: 697169 - RNA, 19 nt, Artificial Sequence
  Description of Artificial Sequence: Synthetic oligonucleotide
uuuugccuaaccugauggc

SEQ ID NO: 697170 - RNA, 19 nt, Artificial Sequence
  Description of Artificial Sequence: Synthetic oligonucleotide
cuuucguauucucaaaaca

SEQ ID NO: 697171 - RNA, 19 nt, Artificial Sequence
  Description of Artificial Sequence: Synthetic oligonucleotide
gaacccaugacuaccuccc

SEQ ID NO: 697172 - RNA, 19 nt, Artificial Sequence
  Description of Artificial Sequence: Synthetic oligonucleotide
uaguccaacaauagucuaa

SEQ ID NO: 697173 - RNA, 19 nt, Artificial Sequence
  Description of Artificial Sequence: Synthetic oligonucleotide
uacaaauaauugugggagu

SEQ ID NO: 697174 - RNA, 19 nt, Artificial Sequence
  Description of Artificial Sequence: Synthetic oligonucleotide
auuuguaggcgauaccaau

SEQ ID NO: 697175 - RNA, 19 nt, Artificial Sequence
  Description of Artificial Sequence: Synthetic oligonucleotide
caucccagacacauagggg

SEQ ID NO: 697176 - RNA, 19 nt, Artificial Sequence
  Description of Artificial Sequence: Synthetic oligonucleotide
auucuagccaauaacaaua

SEQ ID NO: 697177 - RNA, 19 nt, Artificial Sequence
  Description of Artificial Sequence: Synthetic oligonucleotide
guuagaucgaguaaagcaa

SEQ ID NO: 697178 - RNA, 19 nt, Artificial Sequence
  Description of Artificial Sequence: Synthetic oligonucleotide
uaacuauguauuugagagu

SEQ ID NO: 697179 - RNA, 19 nt, Artificial Sequence
  Description of Artificial Sequence: Synthetic oligonucleotide
aguauugauccuauugaug

SEQ ID NO: 697180 - RNA, 19 nt, Artificial Sequence
  Description of Artificial Sequence: Synthetic oligonucleotide
uucuagccaauaacaauaa

SEQ ID NO: 697181 - RNA, 19 nt, Artificial Sequence
  Description of Artificial Sequence: Synthetic oligonucleotide
ugagaguaacaaaacuaua

SEQ ID NO: 697182 - RNA, 19 nt, Artificial Sequence
  Description of Artificial Sequence: Synthetic oligonucleotide
ugggguaaagcauuugaua

SEQ ID NO: 697183 - RNA, 19 nt, Artificial Sequence
  Description of Artificial Sequence: Synthetic oligonucleotide
uguuaugucucaccacgaa

SEQ ID NO: 697184 - RNA, 19 nt, Artificial Sequence
  Description of Artificial Sequence: Synthetic oligonucleotide
acaagccugggguaaagca

SEQ ID NO: 697185 - RNA, 19 nt, Artificial Sequence
  Description of Artificial Sequence: Synthetic oligonucleotide
uagcguaagucuaguaacu

SEQ ID NO: 697186 - RNA, 19 nt, Artificial Sequence
  Description of Artificial Sequence: Synthetic oligonucleotide
augcuuugagcuagaaagc

SEQ ID NO: 697187 - RNA, 19 nt, Artificial Sequence
  Description of Artificial Sequence: Synthetic oligonucleotide
uguaggcgauaccaauugc

SEQ ID NO: 697188 - RNA, 19 nt, Artificial Sequence
  Description of Artificial Sequence: Synthetic oligonucleotide
uucgagaaugugccuuuag

SEQ ID NO: 697189 - RNA, 19 nt, Artificial Sequence
  Description of Artificial Sequence: Synthetic oligonucleotide
accuagacgcuucagcugu

SEQ ID NO: 697190 - RNA, 19 nt, Artificial Sequence
  Description of Artificial Sequence: Synthetic oligonucleotide
uugccaguauuuuaugaaa

SEQ ID NO: 697191 - RNA, 19 nt, Artificial Sequence
  Description of Artificial Sequence: Synthetic oligonucleotide
aauaugaacuucacugcau

SEQ ID NO: 697192 - RNA, 19 nt, Artificial Sequence
  Description of Artificial Sequence: Synthetic oligonucleotide
augucuaccugccucacau

SEQ ID NO: 697193 - RNA, 19 nt, Artificial Sequence
  Description of Artificial Sequence: Synthetic oligonucleotide
cuggaacccaucauauccc

SEQ ID NO: 697194 - RNA, 19 nt, Artificial Sequence
  Description of Artificial Sequence: Synthetic oligonucleotide
uagaucgaguaaagcaaca

SEQ ID NO: 697195 - RNA, 19 nt, Artificial Sequence
  Description of Artificial Sequence: Synthetic oligonucleotide
uuauugaaucacauuucuu

SEQ ID NO: 697196 - RNA, 19 nt, Artificial Sequence
  Description of Artificial Sequence: Synthetic oligonucleotide
uuacuguugcaucgggaga

SEQ ID NO: 697197 - RNA, 19 nt, Artificial Sequence
  Description of Artificial Sequence: Synthetic oligonucleotide
augcaguuacucuuacaag

SEQ ID NO: 697198 - RNA, 19 nt, Artificial Sequence
  Description of Artificial Sequence: Synthetic oligonucleotide
uguuguuaugucucaccac

SEQ ID NO: 697199 - RNA, 19 nt, Artificial Sequence
  Description of Artificial Sequence: Synthetic oligonucleotide
aaucgaucauucagggaag

SEQ ID NO: 697200 - RNA, 19 nt, Artificial Sequence
  Description of Artificial Sequence: Synthetic oligonucleotide
uugaagaacccaugacuac

SEQ ID NO: 697201 - RNA, 19 nt, Artificial Sequence
  Description of Artificial Sequence: Synthetic oligonucleotide
auuaguccagagcucccag

SEQ ID NO: 697202 - RNA, 19 nt, Artificial Sequence
  Description of Artificial Sequence: Synthetic oligonucleotide
ugugaauguuggacaaacu

SEQ ID NO: 697203 - RNA, 19 nt, Artificial Sequence
  Description of Artificial Sequence: Synthetic oligonucleotide
agauggagcgaguuagcug

SEQ ID NO: 697204 - RNA, 19 nt, Artificial Sequence
  Description of Artificial Sequence: Synthetic oligonucleotide
uguaaugcgcagccaaaua

SEQ ID NO: 697205 - RNA, 19 nt, Artificial Sequence
  Description of Artificial Sequence: Synthetic oligonucleotide
gccacuaaaucucucuggg

SEQ ID NO: 697206 - RNA, 19 nt, Artificial Sequence
  Description of Artificial Sequence: Synthetic oligonucleotide
auaguuagaucgaguaaag

SEQ ID NO: 697207 - RNA, 19 nt, Artificial Sequence
  Description of Artificial Sequence: Synthetic oligonucleotide
uaggcgauaccaauugcau

SEQ ID NO: 697208 - RNA, 19 nt, Artificial Sequence
  Description of Artificial Sequence: Synthetic oligonucleotide
uaauugugggagugguuca

SEQ ID NO: 697209 - RNA, 19 nt, Artificial Sequence
  Description of Artificial Sequence: Synthetic oligonucleotide
ggucacaucaaaagugugg

SEQ ID NO: 697210 - RNA, 19 nt, Artificial Sequence
  Description of Artificial Sequence: Synthetic oligonucleotide
guugcaucgggagaagacc

SEQ ID NO: 697211 - RNA, 19 nt, Artificial Sequence
  Description of Artificial Sequence: Synthetic oligonucleotide
uuguuaugucucaccacga

SEQ ID NO: 697212 - RNA, 19 nt, Artificial Sequence
  Description of Artificial Sequence: Synthetic oligonucleotide
uaagucuaguaacuaugua

SEQ ID NO: 697213 - RNA, 19 nt, Artificial Sequence
  Description of Artificial Sequence: Synthetic oligonucleotide
uugccuaaccugauggcaa

SEQ ID NO: 697214 - RNA, 19 nt, Artificial Sequence
  Description of Artificial Sequence: Synthetic oligonucleotide
aagcuuagcuuuauuuugu

SEQ ID NO: 697215 - RNA, 19 nt, Artificial Sequence
  Description of Artificial Sequence: Synthetic oligonucleotide
cuaagugaaugaauaaugu

SEQ ID NO: 697216 - RNA, 19 nt, Artificial Sequence
  Description of Artificial Sequence: Synthetic oligonucleotide
aucaaguaaggcgaauucu

SEQ ID NO: 697217 - RNA, 19 nt, Artificial Sequence
  Description of Artificial Sequence: Synthetic oligonucleotide
uucaccuagaaugcuuuga

SEQ ID NO: 697218 - RNA, 19 nt, Artificial Sequence
  Description of Artificial Sequence: Synthetic oligonucleotide
aaaggcaguuuugccuaac

SEQ ID NO: 697219 - RNA, 19 nt, Artificial Sequence
  Description of Artificial Sequence: Synthetic oligonucleotide
ccccauaacacccagugcc

SEQ ID NO: 697220 - RNA, 19 nt, Artificial Sequence
  Description of Artificial Sequence: Synthetic oligonucleotide
aucauaucccucugaguga

SEQ ID NO: 697221 - RNA, 19 nt, Artificial Sequence
  Description of Artificial Sequence: Synthetic oligonucleotide
ugauccuauugaugaaaac

SEQ ID NO: 697222 - RNA, 19 nt, Artificial Sequence
  Description of Artificial Sequence: Synthetic oligonucleotide
ucgaucauucagggaagcg

SEQ ID NO: 697223 - RNA, 19 nt, Artificial Sequence
  Description of Artificial Sequence: Synthetic oligonucleotide
uggacucauauaguuguug

SEQ ID NO: 697224 - RNA, 19 nt, Artificial Sequence
  Description of Artificial Sequence: Synthetic oligonucleotide
agucuaguaacuauguauu

SEQ ID NO: 697225 - RNA, 19 nt, Artificial Sequence
  Description of Artificial Sequence: Synthetic oligonucleotide
aauucaccuagaaugcuuu

SEQ ID NO: 697226 - RNA, 19 nt, Artificial Sequence
  Description of Artificial Sequence: Synthetic oligonucleotide
uauugauccuauugaugaa

SEQ ID NO: 697227 - RNA, 19 nt, Artificial Sequence
  Description of Artificial Sequence: Synthetic oligonucleotide
ccugauggcaauaaaucug

SEQ ID NO: 697228 - RNA, 19 nt, Artificial Sequence
  Description of Artificial Sequence: Synthetic oligonucleotide
aucgaucauucagggaagc

SEQ ID NO: 697229 - RNA, 19 nt, Artificial Sequence
  Description of Artificial Sequence: Synthetic oligonucleotide
uaaucccucgaagaugugu

SEQ ID NO: 697230 - RNA, 19 nt, Artificial Sequence
  Description of Artificial Sequence: Synthetic oligonucleotide
ggaaccuccauuaugcaac

SEQ ID NO: 697231 - RNA, 19 nt, Artificial Sequence
  Description of Artificial Sequence: Synthetic oligonucleotide
uacuguugcaucgggagaa

SEQ ID NO: 697232 - RNA, 19 nt, Artificial Sequence
  Description of Artificial Sequence: Synthetic oligonucleotide
uaauccaagaggacaccua

SEQ ID NO: 697233 - RNA, 19 nt, Artificial Sequence
  Description of Artificial Sequence: Synthetic oligonucleotide
auugauccuauugaugaaa

SEQ ID NO: 697234 - RNA, 19 nt, Artificial Sequence
  Description of Artificial Sequence: Synthetic oligonucleotide
cuagugguagccucugguc

SEQ ID NO: 697235 - RNA, 19 nt, Artificial Sequence
  Description of Artificial Sequence: Synthetic oligonucleotide
aaugaguauugauccuauu

SEQ ID NO: 697236 - RNA, 19 nt, Artificial Sequence
  Description of Artificial Sequence: Synthetic oligonucleotide
agcuuagcuuuauuuugug

SEQ ID NO: 697237 - RNA, 19 nt, Artificial Sequence
  Description of Artificial Sequence: Synthetic oligonucleotide
gaacccaucauaucccucu

SEQ ID NO: 697238 - RNA, 19 nt, Artificial Sequence
  Description of Artificial Sequence: Synthetic oligonucleotide
ucugggguauggcuuuucu

SEQ ID NO: 697239 - RNA, 19 nt, Artificial Sequence
  Description of Artificial Sequence: Synthetic oligonucleotide
aguuucucaaaucgaucau

SEQ ID NO: 697240 - RNA, 19 nt, Artificial Sequence
  Description of Artificial Sequence: Synthetic oligonucleotide
cuugaugaugguaaaugua

SEQ ID NO: 697241 - RNA, 19 nt, Artificial Sequence
  Description of Artificial Sequence: Synthetic oligonucleotide
ugaucaaguaaggcgaauu

SEQ ID NO: 697242 - RNA, 19 nt, Artificial Sequence
  Description of Artificial Sequence: Synthetic oligonucleotide
caaauaucuggaacccauc

SEQ ID NO: 697243 - RNA, 19 nt, Artificial Sequence
  Description of Artificial Sequence: Synthetic oligonucleotide
uugugggagugguucaugu

SEQ ID NO: 697244 - RNA, 19 nt, Artificial Sequence
  Description of Artificial Sequence: Synthetic oligonucleotide
uaugucucaccacgaaguu

SEQ ID NO: 697245 - RNA, 19 nt, Artificial Sequence
  Description of Artificial Sequence: Synthetic oligonucleotide
agaaugaguauugauccua

SEQ ID NO: 697246 - RNA, 19 nt, Artificial Sequence
  Description of Artificial Sequence: Synthetic oligonucleotide
ucuggccaacuuguaaugc

SEQ ID NO: 697247 - RNA, 19 nt, Artificial Sequence
  Description of Artificial Sequence: Synthetic oligonucleotide
agugaauuacaugcucucu

SEQ ID NO: 697248 - RNA, 19 nt, Artificial Sequence
  Description of Artificial Sequence: Synthetic oligonucleotide
aaucccucgaagaugugua

SEQ ID NO: 697249 - RNA, 19 nt, Artificial Sequence
  Description of Artificial Sequence: Synthetic oligonucleotide
uuaugcuaccagugaauua

SEQ ID NO: 697250 - RNA, 19 nt, Artificial Sequence
  Description of Artificial Sequence: Synthetic oligonucleotide
accuguaacacuauucuua

SEQ ID NO: 697251 - RNA, 19 nt, Artificial Sequence
  Description of Artificial Sequence: Synthetic oligonucleotide
caaguaaggcgaauucuga

SEQ ID NO: 697252 - RNA, 19 nt, Artificial Sequence
  Description of Artificial Sequence: Synthetic oligonucleotide
aaugugccuuuaguuucuc

SEQ ID NO: 697253 - RNA, 19 nt, Artificial Sequence
  Description of Artificial Sequence: Synthetic oligonucleotide
cauugccaguauuuuauga

SEQ ID NO: 697254 - RNA, 19 nt, Artificial Sequence
  Description of Artificial Sequence: Synthetic oligonucleotide
uauaguuguugaaccugua

SEQ ID NO: 697255 - RNA, 19 nt, Artificial Sequence
  Description of Artificial Sequence: Synthetic oligonucleotide
uuuuagcguaagucuagua

SEQ ID NO: 697256 - RNA, 19 nt, Artificial Sequence
  Description of Artificial Sequence: Synthetic oligonucleotide
gagcgaguuagcuggguca

SEQ ID NO: 697257 - RNA, 19 nt, Artificial Sequence
  Description of Artificial Sequence: Synthetic oligonucleotide
ccaauugcauaccauguug

SEQ ID NO: 697258 - RNA, 19 nt, Artificial Sequence
  Description of Artificial Sequence: Synthetic oligonucleotide
auucaccuagaaugcuuug

SEQ ID NO: 697259 - RNA, 19 nt, Artificial Sequence
  Description of Artificial Sequence: Synthetic oligonucleotide
agugauuugccaccauguu

SEQ ID NO: 697260 - RNA, 19 nt, Artificial Sequence
  Description of Artificial Sequence: Synthetic oligonucleotide
aggaaccuccauuaugcaa

SEQ ID NO: 697261 - RNA, 19 nt, Artificial Sequence
  Description of Artificial Sequence: Synthetic oligonucleotide
gaagcgaccugauggucuc

SEQ ID NO: 697262 - RNA, 19 nt, Artificial Sequence
  Description of Artificial Sequence: Synthetic oligonucleotide
gcucccaguacaaacaagc

SEQ ID NO: 697263 - RNA, 19 nt, Artificial Sequence
  Description of Artificial Sequence: Synthetic oligonucleotide
accaauugcauaccauguu

SEQ ID NO: 697264 - RNA, 19 nt, Artificial Sequence
  Description of Artificial Sequence: Synthetic oligonucleotide
uacaaguagcaagaacauc

SEQ ID NO: 697265 - RNA, 19 nt, Artificial Sequence
  Description of Artificial Sequence: Synthetic oligonucleotide
gcuaccagugaauuacaug

SEQ ID NO: 697266 - RNA, 19 nt, Artificial Sequence
  Description of Artificial Sequence: Synthetic oligonucleotide
acccaugacuaccucccag

SEQ ID NO: 697267 - RNA, 19 nt, Artificial Sequence
  Description of Artificial Sequence: Synthetic oligonucleotide
gcauaaauugcagacagaa

SEQ ID NO: 697268 - RNA, 19 nt, Artificial Sequence
  Description of Artificial Sequence: Synthetic oligonucleotide
guaggcgauaccaauugca

SEQ ID NO: 697269 - RNA, 19 nt, Artificial Sequence
  Description of Artificial Sequence: Synthetic oligonucleotide
auaguccaacaauagucua

SEQ ID NO: 697270 - RNA, 19 nt, Artificial Sequence
  Description of Artificial Sequence: Synthetic oligonucleotide
acaaguacauuuggacuca

SEQ ID NO: 697271 - RNA, 19 nt, Artificial Sequence
  Description of Artificial Sequence: Synthetic oligonucleotide
guggcauuaaauuuucuuu

SEQ ID NO: 697272 - RNA, 19 nt, Artificial Sequence
  Description of Artificial Sequence: Synthetic oligonucleotide
gugccacuaaaucucucug

SEQ ID NO: 697273 - RNA, 19 nt, Artificial Sequence
  Description of Artificial Sequence: Synthetic oligonucleotide
cucgaagauguguaucuga

SEQ ID NO: 697274 - RNA, 19 nt, Artificial Sequence
  Description of Artificial Sequence: Synthetic oligonucleotide
cuauucuuacugaucaagu

SEQ ID NO: 697275 - RNA, 19 nt, Artificial Sequence
  Description of Artificial Sequence: Synthetic oligonucleotide
gaguauugauccuauugau

SEQ ID NO: 697276 - RNA, 19 nt, Artificial Sequence
  Description of Artificial Sequence: Synthetic oligonucleotide
acagaucaauuggucauca

SEQ ID NO: 697277 - RNA, 19 nt, Artificial Sequence
  Description of Artificial Sequence: Synthetic oligonucleotide
aauaauugugggagugguu

SEQ ID NO: 697278 - RNA, 19 nt, Artificial Sequence
  Description of Artificial Sequence: Synthetic oligonucleotide
ugcauaccauguugaagaa

SEQ ID NO: 697279 - RNA, 19 nt, Artificial Sequence
  Description of Artificial Sequence: Synthetic oligonucleotide
uaucccucugagugauuug

SEQ ID NO: 697280 - RNA, 19 nt, Artificial Sequence
  Description of Artificial Sequence: Synthetic oligonucleotide
uuguaaugcgcagccaaau

SEQ ID NO: 697281 - RNA, 19 nt, Artificial Sequence
  Description of Artificial Sequence: Synthetic oligonucleotide
ugcuaccagugaauuacau

SEQ ID NO: 697282 - RNA, 19 nt, Artificial Sequence
  Description of Artificial Sequence: Synthetic oligonucleotide
acaauucaccuagaaugcu

SEQ ID NO: 697283 - RNA, 19 nt, Artificial Sequence
  Description of Artificial Sequence: Synthetic oligonucleotide
caagcauaaauugcagaca

SEQ ID NO: 697284 - RNA, 19 nt, Artificial Sequence
  Description of Artificial Sequence: Synthetic oligonucleotide
ugacuaccucccaguagug

SEQ ID NO: 697285 - RNA, 19 nt, Artificial Sequence
  Description of Artificial Sequence: Synthetic oligonucleotide
agaugcaguuacucuuaca

SEQ ID NO: 697286 - RNA, 19 nt, Artificial Sequence
  Description of Artificial Sequence: Synthetic oligonucleotide
agacaugaucaugagggau

SEQ ID NO: 697287 - RNA, 19 nt, Artificial Sequence
  Description of Artificial Sequence: Synthetic oligonucleotide
agaucgaguaaagcaacaa

SEQ ID NO: 697288 - RNA, 19 nt, Artificial Sequence
  Description of Artificial Sequence: Synthetic oligonucleotide
ggauucuuuaggccugcag

SEQ ID NO: 697289 - RNA, 19 nt, Artificial Sequence
  Description of Artificial Sequence: Synthetic oligonucleotide
aggccugcaguugcauucc

SEQ ID NO: 697290 - RNA, 19 nt, Artificial Sequence
  Description of Artificial Sequence: Synthetic oligonucleotide
gauuuguaggcgauaccaa

SEQ ID NO: 697291 - RNA, 19 nt, Artificial Sequence
  Description of Artificial Sequence: Synthetic oligonucleotide
aagaggacaccuagacgcu

SEQ ID NO: 697292 - RNA, 19 nt, Artificial Sequence
  Description of Artificial Sequence: Synthetic oligonucleotide
ccaaugacucucaggcugg

SEQ ID NO: 697293 - RNA, 19 nt, Artificial Sequence
  Description of Artificial Sequence: Synthetic oligonucleotide
cucaccacgaaguuacugu

SEQ ID NO: 697294 - RNA, 19 nt, Artificial Sequence
  Description of Artificial Sequence: Synthetic oligonucleotide
augcgcagccaaauacagc

SEQ ID NO: 697295 - RNA, 19 nt, Artificial Sequence
  Description of Artificial Sequence: Synthetic oligonucleotide
aacccaugacuaccuccca

SEQ ID NO: 697296 - RNA, 19 nt, Artificial Sequence
  Description of Artificial Sequence: Synthetic oligonucleotide
ucucggugacgacccacca

SEQ ID NO: 697297 - RNA, 19 nt, Artificial Sequence
  Description of Artificial Sequence: Synthetic oligonucleotide
caccuagacgcuucagcug

SEQ ID NO: 697298 - RNA, 19 nt, Artificial Sequence
  Description of Artificial Sequence: Synthetic oligonucleotide
caauagucuaauaaauauu

SEQ ID NO: 697299 - RNA, 19 nt, Artificial Sequence
  Description of Artificial Sequence: Synthetic oligonucleotide
uggaagaaugaaggucaca

SEQ ID NO: 697300 - RNA, 19 nt, Artificial Sequence
  Description of Artificial Sequence: Synthetic oligonucleotide
cuagacgcuucagcugugg

SEQ ID NO: 697301 - RNA, 19 nt, Artificial Sequence
  Description of Artificial Sequence: Synthetic oligonucleotide
caaaucgaucauucaggga

SEQ ID NO: 697302 - RNA, 19 nt, Artificial Sequence
  Description of Artificial Sequence: Synthetic oligonucleotide
uccuucgagaaugugccuu

SEQ ID NO: 697303 - RNA, 19 nt, Artificial Sequence
  Description of Artificial Sequence: Synthetic oligonucleotide
gagugauuugccaccaugu

SEQ ID NO: 697304 - RNA, 19 nt, Artificial Sequence
  Description of Artificial Sequence: Synthetic oligonucleotide
caacaaccacauuuauuga

SEQ ID NO: 697305 - RNA, 19 nt, Artificial Sequence
  Description of Artificial Sequence: Synthetic oligonucleotide
caguacaaacaagccuggg

SEQ ID NO: 697306 - RNA, 19 nt, Artificial Sequence
  Description of Artificial Sequence: Synthetic oligonucleotide
cucggugacgacccaccag

SEQ ID NO: 697307 - RNA, 19 nt, Artificial Sequence
  Description of Artificial Sequence: Synthetic oligonucleotide
aguuacuguugcaucggga

SEQ ID NO: 697308 - RNA, 19 nt, Artificial Sequence
  Description of Artificial Sequence: Synthetic oligonucleotide
agcgaccugauggucucgg

SEQ ID NO: 697309 - RNA, 19 nt, Artificial Sequence
  Description of Artificial Sequence: Synthetic oligonucleotide
uugagcuagaaagcauaua

SEQ ID NO: 697310 - RNA, 19 nt, Artificial Sequence
  Description of Artificial Sequence: Synthetic oligonucleotide
auugugggagugguucaug

SEQ ID NO: 697311 - RNA, 19 nt, Artificial Sequence
  Description of Artificial Sequence: Synthetic oligonucleotide
gaagaacccaugacuaccu

SEQ ID NO: 697312 - RNA, 19 nt, Artificial Sequence
  Description of Artificial Sequence: Synthetic oligonucleotide
ggggaugcuaagugaauga

SEQ ID NO: 697313 - RNA, 19 nt, Artificial Sequence
  Description of Artificial Sequence: Synthetic oligonucleotide
gguaaucccucgaagaugu

SEQ ID NO: 697314 - RNA, 19 nt, Artificial Sequence
  Description of Artificial Sequence: Synthetic oligonucleotide
aggcgauaccaauugcaua

SEQ ID NO: 697315 - RNA, 19 nt, Artificial Sequence
  Description of Artificial Sequence: Synthetic oligonucleotide
uuaggccugcaguugcauu

SEQ ID NO: 697316 - RNA, 19 nt, Artificial Sequence
  Description of Artificial Sequence: Synthetic oligonucleotide
cugaauaguuagaucgagu

SEQ ID NO: 697317 - RNA, 19 nt, Artificial Sequence
  Description of Artificial Sequence: Synthetic oligonucleotide
uuuaggccugcaguugcau

SEQ ID NO: 697318 - RNA, 19 nt, Artificial Sequence
  Description of Artificial Sequence: Synthetic oligonucleotide
gagcuagaaagcauauaua

SEQ ID NO: 697319 - RNA, 19 nt, Artificial Sequence
  Description of Artificial Sequence: Synthetic oligonucleotide
aggacaccuagacgcuuca

SEQ ID NO: 697320 - RNA, 19 nt, Artificial Sequence
  Description of Artificial Sequence: Synthetic oligonucleotide
acuguugcaucgggagaag

SEQ ID NO: 697321 - RNA, 19 nt, Artificial Sequence
  Description of Artificial Sequence: Synthetic oligonucleotide
aggcagguaaucccucgaa

SEQ ID NO: 697322 - RNA, 19 nt, Artificial Sequence
  Description of Artificial Sequence: Synthetic oligonucleotide
ucccucgaagauguguauc

SEQ ID NO: 697323 - RNA, 19 nt, Artificial Sequence
  Description of Artificial Sequence: Synthetic oligonucleotide
gaggacaccuagacgcuuc

SEQ ID NO: 697324 - RNA, 19 nt, Artificial Sequence
  Description of Artificial Sequence: Synthetic oligonucleotide
cacaagaaugaguauugau

SEQ ID NO: 697325 - RNA, 19 nt, Artificial Sequence
  Description of Artificial Sequence: Synthetic oligonucleotide
uuugugcaacuggcuuuag

SEQ ID NO: 697326 - RNA, 19 nt, Artificial Sequence
  Description of Artificial Sequence: Synthetic oligonucleotide
ccuuaaguuuacugaagca

SEQ ID NO: 697327 - RNA, 19 nt, Artificial Sequence
  Description of Artificial Sequence: Synthetic oligonucleotide
agcguaagucuaguaacua

SEQ ID NO: 697328 - RNA, 19 nt, Artificial Sequence
  Description of Artificial Sequence: Synthetic oligonucleotide
aagcgaccugauggucucg

SEQ ID NO: 697329 - RNA, 19 nt, Artificial Sequence
  Description of Artificial Sequence: Synthetic oligonucleotide
gucucggugacgacccacc

SEQ ID NO: 697330 - RNA, 19 nt, Artificial Sequence
  Description of Artificial Sequence: Synthetic oligonucleotide
agcauaaauugcagacaga

SEQ ID NO: 697331 - RNA, 19 nt, Artificial Sequence
  Description of Artificial Sequence: Synthetic oligonucleotide
cuuuaggccugcaguugca

SEQ ID NO: 697332 - RNA, 19 nt, Artificial Sequence
  Description of Artificial Sequence: Synthetic oligonucleotide
gacccaggaagaggcauuc

SEQ ID NO: 697333 - RNA, 19 nt, Artificial Sequence
  Description of Artificial Sequence: Synthetic oligonucleotide
cacaauggaauuacauaau

SEQ ID NO: 697334 - RNA, 19 nt, Artificial Sequence
  Description of Artificial Sequence: Synthetic oligonucleotide
gaaugaguauugauccuau

SEQ ID NO: 697335 - RNA, 19 nt, Artificial Sequence
  Description of Artificial Sequence: Synthetic oligonucleotide
uggcuggugaaagguuucu

SEQ ID NO: 697336 - RNA, 19 nt, Artificial Sequence
  Description of Artificial Sequence: Synthetic oligonucleotide
aucccucgaagauguguau

SEQ ID NO: 697337 - RNA, 19 nt, Artificial Sequence
  Description of Artificial Sequence: Synthetic oligonucleotide
ggaaagcauuuugucauga

SEQ ID NO: 697338 - RNA, 19 nt, Artificial Sequence
  Description of Artificial Sequence: Synthetic oligonucleotide
gugcaacuggcuuuagcua

SEQ ID NO: 697339 - RNA, 19 nt, Artificial Sequence
  Description of Artificial Sequence: Synthetic oligonucleotide
caguacauguucacuuucu

SEQ ID NO: 697340 - RNA, 19 nt, Artificial Sequence
  Description of Artificial Sequence: Synthetic oligonucleotide
agcgaguuagcugggucau

SEQ ID NO: 697341 - RNA, 19 nt, Artificial Sequence
  Description of Artificial Sequence: Synthetic oligonucleotide
ccaggcagguaaucccucg

SEQ ID NO: 697342 - RNA, 19 nt, Artificial Sequence
  Description of Artificial Sequence: Synthetic oligonucleotide
cauccauaaauugauccau

SEQ ID NO: 697343 - RNA, 19 nt, Artificial Sequence
  Description of Artificial Sequence: Synthetic oligonucleotide
ggagcgaguuagcuggguc

SEQ ID NO: 697344 - RNA, 19 nt, Artificial Sequence
  Description of Artificial Sequence: Synthetic oligonucleotide
augucucaccacgaaguua

SEQ ID NO: 697345 - RNA, 19 nt, Artificial Sequence
  Description of Artificial Sequence: Synthetic oligonucleotide
cgaguuagcugggucauag

SEQ ID NO: 697346 - RNA, 19 nt, Artificial Sequence
  Description of Artificial Sequence: Synthetic oligonucleotide
gucuaguaacuauguauuu

SEQ ID NO: 697347 - RNA, 19 nt, Artificial Sequence
  Description of Artificial Sequence: Synthetic oligonucleotide
gcaacugagcuuauuuaaa

SEQ ID NO: 697348 - RNA, 19 nt, Artificial Sequence
  Description of Artificial Sequence: Synthetic oligonucleotide
cagugccacuaaaucucuc

SEQ ID NO: 697349 - RNA, 19 nt, Artificial Sequence
  Description of Artificial Sequence: Synthetic oligonucleotide
gcaguuacucuuacaagua

SEQ ID NO: 697350 - RNA, 19 nt, Artificial Sequence
  Description of Artificial Sequence: Synthetic oligonucleotide
gcauaccauguugaagaac

SEQ ID NO: 697351 - RNA, 19 nt, Artificial Sequence
  Description of Artificial Sequence: Synthetic oligonucleotide
ccauuaugcaacucuauuu

SEQ ID NO: 697352 - RNA, 19 nt, Artificial Sequence
  Description of Artificial Sequence: Synthetic oligonucleotide
uggucucggugacgaccca

SEQ ID NO: 697353 - RNA, 19 nt, Artificial Sequence
  Description of Artificial Sequence: Synthetic oligonucleotide
gccccauaacacccagugc

SEQ ID NO: 697354 - RNA, 19 nt, Artificial Sequence
  Description of Artificial Sequence: Synthetic oligonucleotide
agaggacaccuagacgcuu

SEQ ID NO: 697355 - RNA, 19 nt, Artificial Sequence
  Description of Artificial Sequence: Synthetic oligonucleotide
gcgauaccaauugcauacc

SEQ ID NO: 697356 - RNA, 19 nt, Artificial Sequence
  Description of Artificial Sequence: Synthetic oligonucleotide
gggaugcuaagugaaugaa

SEQ ID NO: 697357 - RNA, 19 nt, Artificial Sequence
  Description of Artificial Sequence: Synthetic oligonucleotide
gccagaugcaguuacucuu

SEQ ID NO: 697358 - RNA, 19 nt, Artificial Sequence
  Description of Artificial Sequence: Synthetic oligonucleotide
cccauaacacccagugcca

SEQ ID NO: 697359 - RNA, 19 nt, Artificial Sequence
  Description of Artificial Sequence: Synthetic oligonucleotide
ccagauugugaauguugga

SEQ ID NO: 697360 - RNA, 19 nt, Artificial Sequence
  Description of Artificial Sequence: Synthetic oligonucleotide
cuguugcaucgggagaaga

SEQ ID NO: 697361 - RNA, 19 nt, Artificial Sequence
  Description of Artificial Sequence: Synthetic oligonucleotide
ggaagcgaccugauggucu

SEQ ID NO: 697362 - RNA, 19 nt, Artificial Sequence
  Description of Artificial Sequence: Synthetic oligonucleotide
gcguaagucuaguaacuau

SEQ ID NO: 697363 - RNA, 19 nt, Artificial Sequence
  Description of Artificial Sequence: Synthetic oligonucleotide
cgacccaccaguuugcaua

SEQ ID NO: 697364 - RNA, 19 nt, Artificial Sequence
  Description of Artificial Sequence: Synthetic oligonucleotide
gcaauaaaucuggccaacu

SEQ ID NO: 697365 - RNA, 19 nt, Artificial Sequence
  Description of Artificial Sequence: Synthetic oligonucleotide
ccucgaagauguguaucug

SEQ ID NO: 697366 - RNA, 19 nt, Artificial Sequence
  Description of Artificial Sequence: Synthetic oligonucleotide
ggacaccuagacgcuucag

SEQ ID NO: 697367 - RNA, 19 nt, Artificial Sequence
  Description of Artificial Sequence: Synthetic oligonucleotide
cccucgaagauguguaucu

SEQ ID NO: 697368 - RNA, 19 nt, Artificial Sequence
  Description of Artificial Sequence: Synthetic oligonucleotide
ccuaaccugauggcaauaa

SEQ ID NO: 697369 - RNA, 19 nt, Artificial Sequence
  Description of Artificial Sequence: Synthetic oligonucleotide
ucccugccauugccaguau

SEQ ID NO: 697370 - RNA, 19 nt, Artificial Sequence
  Description of Artificial Sequence: Synthetic oligonucleotide
caugguccaggcagguaau

SEQ ID NO: 697371 - RNA, 19 nt, Artificial Sequence
  Description of Artificial Sequence: Synthetic oligonucleotide
ccugccauugccaguauuu

SEQ ID NO: 697372 - RNA, 19 nt, Artificial Sequence
  Description of Artificial Sequence: Synthetic oligonucleotide
cgauaccaauugcauacca

SEQ ID NO: 697373 - RNA, 19 nt, Artificial Sequence
  Description of Artificial Sequence: Synthetic oligonucleotide
ccuagacgcuucagcugug

SEQ ID NO: 697374 - RNA, 19 nt, Artificial Sequence
  Description of Artificial Sequence: Synthetic oligonucleotide
cgagaaugugccuuuaguu

SEQ ID NO: 697375 - RNA, 19 nt, Artificial Sequence
  Description of Artificial Sequence: Synthetic oligonucleotide
gcgauggcuggugaaaggu

SEQ ID NO: 697376 - RNA, 19 nt, Artificial Sequence
  Description of Artificial Sequence: Synthetic oligonucleotide
gggaagcgaccugaugguc

SEQ ID NO: 697377 - RNA, 19 nt, Artificial Sequence
  Description of Artificial Sequence: Synthetic oligonucleotide
cacugucaaugaauauauu

SEQ ID NO: 697378 - RNA, 19 nt, Artificial Sequence
  Description of Artificial Sequence: Synthetic oligonucleotide
cugaucaaguaaggcgaau

SEQ ID NO: 697379 - RNA, 19 nt, Artificial Sequence
  Description of Artificial Sequence: Synthetic oligonucleotide
ggugacgacccaccaguuu

SEQ ID NO: 697380 - RNA, 19 nt, Artificial Sequence
  Description of Artificial Sequence: Synthetic oligonucleotide
caggcaagccagacaugau

SEQ ID NO: 697381 - RNA, 19 nt, Artificial Sequence
  Description of Artificial Sequence: Synthetic oligonucleotide
cugccauugccaguauuuu

SEQ ID NO: 697382 - RNA, 19 nt, Artificial Sequence
  Description of Artificial Sequence: Synthetic oligonucleotide
cugagugauuugccaccau

SEQ ID NO: 697383 - RNA, 19 nt, Artificial Sequence
  Description of Artificial Sequence: Synthetic oligonucleotide
gggauucuuuaggccugca

SEQ ID NO: 697384 - RNA, 19 nt, Artificial Sequence
  Description of Artificial Sequence: Synthetic oligonucleotide
cugccccauaacacccagu

SEQ ID NO: 697385 - RNA, 19 nt, Artificial Sequence
  Description of Artificial Sequence: Synthetic oligonucleotide
ccuucgagaaugugccuuu

SEQ ID NO: 697386 - RNA, 19 nt, Artificial Sequence
  Description of Artificial Sequence: Synthetic oligonucleotide
gcgaccugauggucucggu

SEQ ID NO: 697387 - RNA, 19 nt, Artificial Sequence
  Description of Artificial Sequence: Synthetic oligonucleotide
gcgaguuagcugggucaua

SEQ ID NO: 697388 - RNA, 19 nt, Artificial Sequence
  Description of Artificial Sequence: Synthetic oligonucleotide
cccugccauugccaguauu

SEQ ID NO: 697389 - RNA, 19 nt, Artificial Sequence
  Description of Artificial Sequence: Synthetic oligonucleotide
cggugacgacccaccaguu

SEQ ID NO: 697390 - RNA, 19 nt, Artificial Sequence
  Description of Artificial Sequence: Synthetic oligonucleotide
ucaauuguaagcaagacag

SEQ ID NO: 697391 - RNA, 19 nt, Artificial Sequence
  Description of Artificial Sequence: Synthetic oligonucleotide
uucacuaugaaccaguaac

SEQ ID NO: 697392 - RNA, 19 nt, Artificial Sequence
  Description of Artificial Sequence: Synthetic oligonucleotide
uauuuguccacauaggccu

SEQ ID NO: 697393 - RNA, 19 nt, Artificial Sequence
  Description of Artificial Sequence: Synthetic oligonucleotide
uuguaagcaagacaggugc

SEQ ID NO: 697394 - RNA, 19 nt, Artificial Sequence
  Description of Artificial Sequence: Synthetic oligonucleotide
ugagauaucuucacuauga

SEQ ID NO: 697395 - RNA, 19 nt, Artificial Sequence
  Description of Artificial Sequence: Synthetic oligonucleotide
aaagacguggccugccucc

SEQ ID NO: 697396 - RNA, 19 nt, Artificial Sequence
  Description of Artificial Sequence: Synthetic oligonucleotide
ugcugaacuccuaugaggg

SEQ ID NO: 697397 - RNA, 19 nt, Artificial Sequence
  Description of Artificial Sequence: Synthetic oligonucleotide
acuaugaaccaguaacgcc

SEQ ID NO: 697398 - RNA, 19 nt, Artificial Sequence
  Description of Artificial Sequence: Synthetic oligonucleotide
ucacuaugaaccaguaacg

SEQ ID NO: 697399 - RNA, 19 nt, Artificial Sequence
  Description of Artificial Sequence: Synthetic oligonucleotide
uuagccuuggcucugugcc

SEQ ID NO: 697400 - RNA, 19 nt, Artificial Sequence
  Description of Artificial Sequence: Synthetic oligonucleotide
ucucucuuuugguagaagg

SEQ ID NO: 697401 - RNA, 19 nt, Artificial Sequence
  Description of Artificial Sequence: Synthetic oligonucleotide
ucgucuccuacucucaugg

SEQ ID NO: 697402 - RNA, 19 nt, Artificial Sequence
  Description of Artificial Sequence: Synthetic oligonucleotide
aaugucgccucuuucgucu

SEQ ID NO: 697403 - RNA, 19 nt, Artificial Sequence
  Description of Artificial Sequence: Synthetic oligonucleotide
aagaccuccggcucuuagc

SEQ ID NO: 697404 - RNA, 19 nt, Artificial Sequence
  Description of Artificial Sequence: Synthetic oligonucleotide
aagcaagacaggugcagac

SEQ ID NO: 697405 - RNA, 19 nt, Artificial Sequence
  Description of Artificial Sequence: Synthetic oligonucleotide
ucaucgagcugaaugaaga

SEQ ID NO: 697406 - RNA, 19 nt, Artificial Sequence
  Description of Artificial Sequence: Synthetic oligonucleotide
ugaccuaugcuccaagcug

SEQ ID NO: 697407 - RNA, 19 nt, Artificial Sequence
  Description of Artificial Sequence: Synthetic oligonucleotide
agucccaacagcuggcagc

SEQ ID NO: 697408 - RNA, 19 nt, Artificial Sequence
  Description of Artificial Sequence: Synthetic oligonucleotide
agaaucaccauagucuagg

SEQ ID NO: 697409 - RNA, 19 nt, Artificial Sequence
  Description of Artificial Sequence: Synthetic oligonucleotide
agaccuccggcucuuagcc

SEQ ID NO: 697410 - RNA, 19 nt, Artificial Sequence
  Description of Artificial Sequence: Synthetic oligonucleotide
aauggggccgcuucucacg

SEQ ID NO: 697411 - RNA, 19 nt, Artificial Sequence
  Description of Artificial Sequence: Synthetic oligonucleotide
aaaguaccaguuuucaauu

SEQ ID NO: 697412 - RNA, 19 nt, Artificial Sequence
  Description of Artificial Sequence: Synthetic oligonucleotide
aacgccucccucuggauag

SEQ ID NO: 697413 - RNA, 19 nt, Artificial Sequence
  Description of Artificial Sequence: Synthetic oligonucleotide
aguagguagaguagugucc

SEQ ID NO: 697414 - RNA, 19 nt, Artificial Sequence
  Description of Artificial Sequence: Synthetic oligonucleotide
uggugguaggaauagcuag

SEQ ID NO: 697415 - RNA, 19 nt, Artificial Sequence
  Description of Artificial Sequence: Synthetic oligonucleotide
aaaccucccucacagccuc

SEQ ID NO: 697416 - RNA, 19 nt, Artificial Sequence
  Description of Artificial Sequence: Synthetic oligonucleotide
agcugggugaccgagaccg

SEQ ID NO: 697417 - RNA, 19 nt, Artificial Sequence
  Description of Artificial Sequence: Synthetic oligonucleotide
uuuguggccucugaagugg

SEQ ID NO: 697418 - RNA, 19 nt, Artificial Sequence
  Description of Artificial Sequence: Synthetic oligonucleotide
auagcuagcucugagguug

SEQ ID NO: 697419 - RNA, 19 nt, Artificial Sequence
  Description of Artificial Sequence: Synthetic oligonucleotide
acaauggaaacaguguauc

SEQ ID NO: 697420 - RNA, 19 nt, Artificial Sequence
  Description of Artificial Sequence: Synthetic oligonucleotide
gcauauuagacacuggggc

SEQ ID NO: 697421 - RNA, 19 nt, Artificial Sequence
  Description of Artificial Sequence: Synthetic oligonucleotide
uuugugccugcgcauaugc

SEQ ID NO: 697422 - RNA, 19 nt, Artificial Sequence
  Description of Artificial Sequence: Synthetic oligonucleotide
aauggaaacaguguaucua

SEQ ID NO: 697423 - RNA, 19 nt, Artificial Sequence
  Description of Artificial Sequence: Synthetic oligonucleotide
aguaccaguuuucaauugu

SEQ ID NO: 697424 - RNA, 19 nt, Artificial Sequence
  Description of Artificial Sequence: Synthetic oligonucleotide
uaagcaggcacugaucuga

SEQ ID NO: 697425 - RNA, 19 nt, Artificial Sequence
  Description of Artificial Sequence: Synthetic oligonucleotide
cauaugccgguauuugucc

SEQ ID NO: 697426 - RNA, 19 nt, Artificial Sequence
  Description of Artificial Sequence: Synthetic oligonucleotide
guccuuggaacucugucgg

SEQ ID NO: 697427 - RNA, 19 nt, Artificial Sequence
  Description of Artificial Sequence: Synthetic oligonucleotide
uacagugucuugccuaagc

SEQ ID NO: 697428 - RNA, 19 nt, Artificial Sequence
  Description of Artificial Sequence: Synthetic oligonucleotide
auuugaugggaagucucgc

SEQ ID NO: 697429 - RNA, 19 nt, Artificial Sequence
  Description of Artificial Sequence: Synthetic oligonucleotide
aagaacugccaggacuccc

SEQ ID NO: 697430 - RNA, 19 nt, Artificial Sequence
  Description of Artificial Sequence: Synthetic oligonucleotide
augucaucgagcugaauga

SEQ ID NO: 697431 - RNA, 19 nt, Artificial Sequence
  Description of Artificial Sequence: Synthetic oligonucleotide
uguggcuggcauauuagac

SEQ ID NO: 697432 - RNA, 19 nt, Artificial Sequence
  Description of Artificial Sequence: Synthetic oligonucleotide
aaguaccaguuuucaauug

SEQ ID NO: 697433 - RNA, 19 nt, Artificial Sequence
  Description of Artificial Sequence: Synthetic oligonucleotide
agccccauuucuuuccuac

SEQ ID NO: 697434 - RNA, 19 nt, Artificial Sequence
  Description of Artificial Sequence: Synthetic oligonucleotide
aagcucagaggcacgagcg

SEQ ID NO: 697435 - RNA, 19 nt, Artificial Sequence
  Description of Artificial Sequence: Synthetic oligonucleotide
agguaacccagucuccugg

SEQ ID NO: 697436 - RNA, 19 nt, Artificial Sequence
  Description of Artificial Sequence: Synthetic oligonucleotide
uuugaugggaagucucgcu

SEQ ID NO: 697437 - RNA, 19 nt, Artificial Sequence
  Description of Artificial Sequence: Synthetic oligonucleotide
ugagcucaugucaucgagc

SEQ ID NO: 697438 - RNA, 19 nt, Artificial Sequence
  Description of Artificial Sequence: Synthetic oligonucleotide
aggaauagcuagcucugag

SEQ ID NO: 697439 - RNA, 19 nt, Artificial Sequence
  Description of Artificial Sequence: Synthetic oligonucleotide
uuugcucuguccuggcugc

SEQ ID NO: 697440 - RNA, 19 nt, Artificial Sequence
  Description of Artificial Sequence: Synthetic oligonucleotide
ugaacuccuaugagggccc

SEQ ID NO: 697441 - RNA, 19 nt, Artificial Sequence
  Description of Artificial Sequence: Synthetic oligonucleotide
uggagcacguggaugggag

SEQ ID NO: 697442 - RNA, 19 nt, Artificial Sequence
  Description of Artificial Sequence: Synthetic oligonucleotide
agccacaaccaccucuggc

SEQ ID NO: 697443 - RNA, 19 nt, Artificial Sequence
  Description of Artificial Sequence: Synthetic oligonucleotide
ucuggaccguagcaguggg

SEQ ID NO: 697444 - RNA, 19 nt, Artificial Sequence
  Description of Artificial Sequence: Synthetic oligonucleotide
ggaauagcuagcucugagg

SEQ ID NO: 697445 - RNA, 19 nt, Artificial Sequence
  Description of Artificial Sequence: Synthetic oligonucleotide
gauaguagguagaguagug

SEQ ID NO: 697446 - RNA, 19 nt, Artificial Sequence
  Description of Artificial Sequence: Synthetic oligonucleotide
gacuguuucacauccucuc

SEQ ID NO: 697447 - RNA, 19 nt, Artificial Sequence
  Description of Artificial Sequence: Synthetic oligonucleotide
ucugaacgggucaaugccu

SEQ ID NO: 697448 - RNA, 19 nt, Artificial Sequence
  Description of Artificial Sequence: Synthetic oligonucleotide
gaauagcuagcucugaggu

SEQ ID NO: 697449 - RNA, 19 nt, Artificial Sequence
  Description of Artificial Sequence: Synthetic oligonucleotide
guagaguaguguccugugg

SEQ ID NO: 697450 - RNA, 19 nt, Artificial Sequence
  Description of Artificial Sequence: Synthetic oligonucleotide
cugaacuccuaugagggcc

SEQ ID NO: 697451 - RNA, 19 nt, Artificial Sequence
  Description of Artificial Sequence: Synthetic oligonucleotide
uggcuggcauauuagacac

SEQ ID NO: 697452 - RNA, 19 nt, Artificial Sequence
  Description of Artificial Sequence: Synthetic oligonucleotide
cuggauaguagguagagua

SEQ ID NO: 697453 - RNA, 19 nt, Artificial Sequence
  Description of Artificial Sequence: Synthetic oligonucleotide
ucuuguccauccucucucg

SEQ ID NO: 697454 - RNA, 19 nt, Artificial Sequence
  Description of Artificial Sequence: Synthetic oligonucleotide
aaccaguaacgccucccuc

SEQ ID NO: 697455 - RNA, 19 nt, Artificial Sequence
  Description of Artificial Sequence: Synthetic oligonucleotide
cauuucuuuccuacuggag

SEQ ID NO: 697456 - RNA, 19 nt, Artificial Sequence
  Description of Artificial Sequence: Synthetic oligonucleotide
uccuaugagggcccugucc

SEQ ID NO: 697457 - RNA, 19 nt, Artificial Sequence
  Description of Artificial Sequence: Synthetic oligonucleotide
uguaagcaagacaggugca

SEQ ID NO: 697458 - RNA, 19 nt, Artificial Sequence
  Description of Artificial Sequence: Synthetic oligonucleotide
ugccucgagaccuggaccc

SEQ ID NO: 697459 - RNA, 19 nt, Artificial Sequence
  Description of Artificial Sequence: Synthetic oligonucleotide
cuaugaaccaguaacgccu

SEQ ID NO: 697460 - RNA, 19 nt, Artificial Sequence
  Description of Artificial Sequence: Synthetic oligonucleotide
uggugagcucaugucaucg

SEQ ID NO: 697461 - RNA, 19 nt, Artificial Sequence
  Description of Artificial Sequence: Synthetic oligonucleotide
ucuaaagauaagccauuuu

SEQ ID NO: 697462 - RNA, 19 nt, Artificial Sequence
  Description of Artificial Sequence: Synthetic oligonucleotide
aguguaucuauaauauaca

SEQ ID NO: 697463 - RNA, 19 nt, Artificial Sequence
  Description of Artificial Sequence: Synthetic oligonucleotide
ggaaaccucccucacagcc

SEQ ID NO: 697464 - RNA, 19 nt, Artificial Sequence
  Description of Artificial Sequence: Synthetic oligonucleotide
ugaugggaagucucgcuca

SEQ ID NO: 697465 - RNA, 19 nt, Artificial Sequence
  Description of Artificial Sequence: Synthetic oligonucleotide
acacuuacuuccuccuguc

SEQ ID NO: 697466 - RNA, 19 nt, Artificial Sequence
  Description of Artificial Sequence: Synthetic oligonucleotide
uggucuucucagcagcuga

SEQ ID NO: 697467 - RNA, 19 nt, Artificial Sequence
  Description of Artificial Sequence: Synthetic oligonucleotide
cauagucuagguccucagg

SEQ ID NO: 697468 - RNA, 19 nt, Artificial Sequence
  Description of Artificial Sequence: Synthetic oligonucleotide
gauguuugugucuccgguc

SEQ ID NO: 697469 - RNA, 19 nt, Artificial Sequence
  Description of Artificial Sequence: Synthetic oligonucleotide
cuucucacgggaacguggc

SEQ ID NO: 697470 - RNA, 19 nt, Artificial Sequence
  Description of Artificial Sequence: Synthetic oligonucleotide
auuguaagcaagacaggug

SEQ ID NO: 697471 - RNA, 19 nt, Artificial Sequence
  Description of Artificial Sequence: Synthetic oligonucleotide
cacuaugaaccaguaacgc

SEQ ID NO: 697472 - RNA, 19 nt, Artificial Sequence
  Description of Artificial Sequence: Synthetic oligonucleotide
uggaccguagcaguggggc

SEQ ID NO: 697473 - RNA, 19 nt, Artificial Sequence
  Description of Artificial Sequence: Synthetic oligonucleotide
ucacuggaagaccuccggc

SEQ ID NO: 697474 - RNA, 19 nt, Artificial Sequence
  Description of Artificial Sequence: Synthetic oligonucleotide
agcucagaggcacgagcgc

SEQ ID NO: 697475 - RNA, 19 nt, Artificial Sequence
  Description of Artificial Sequence: Synthetic oligonucleotide
aguaacgccucccucugga

SEQ ID NO: 697476 - RNA, 19 nt, Artificial Sequence
  Description of Artificial Sequence: Synthetic oligonucleotide
aacguggccuccgugaccu

SEQ ID NO: 697477 - RNA, 19 nt, Artificial Sequence
  Description of Artificial Sequence: Synthetic oligonucleotide
ucccauggggaccacacuc

SEQ ID NO: 697478 - RNA, 19 nt, Artificial Sequence
  Description of Artificial Sequence: Synthetic oligonucleotide
accuucacgggguugauuu

SEQ ID NO: 697479 - RNA, 19 nt, Artificial Sequence
  Description of Artificial Sequence: Synthetic oligonucleotide
gaugggaagucucgcucag

SEQ ID NO: 697480 - RNA, 19 nt, Artificial Sequence
  Description of Artificial Sequence: Synthetic oligonucleotide
ucgggaccgagucauacuc

SEQ ID NO: 697481 - RNA, 19 nt, Artificial Sequence
  Description of Artificial Sequence: Synthetic oligonucleotide
uguaaaccugggcaagaau

SEQ ID NO: 697482 - RNA, 19 nt, Artificial Sequence
  Description of Artificial Sequence: Synthetic oligonucleotide
cuaagaguugcagcagcgg

SEQ ID NO: 697483 - RNA, 19 nt, Artificial Sequence
  Description of Artificial Sequence: Synthetic oligonucleotide
uucuggaccguagcagugg

SEQ ID NO: 697484 - RNA, 19 nt, Artificial Sequence
  Description of Artificial Sequence: Synthetic oligonucleotide
agcagcggucucuacagug

SEQ ID NO: 697485 - RNA, 19 nt, Artificial Sequence
  Description of Artificial Sequence: Synthetic oligonucleotide
gacaggugcagacaggugu

SEQ ID NO: 697486 - RNA, 19 nt, Artificial Sequence
  Description of Artificial Sequence: Synthetic oligonucleotide
agaauggugccugcugaac

SEQ ID NO: 697487 - RNA, 19 nt, Artificial Sequence
  Description of Artificial Sequence: Synthetic oligonucleotide
ucucucucgggaccgaguc

SEQ ID NO: 697488 - RNA, 19 nt, Artificial Sequence
  Description of Artificial Sequence: Synthetic oligonucleotide
cuuagccuuggcucugugc

SEQ ID NO: 697489 - RNA, 19 nt, Artificial Sequence
  Description of Artificial Sequence: Synthetic oligonucleotide
auaguagguagaguagugu

SEQ ID NO: 697490 - RNA, 19 nt, Artificial Sequence
  Description of Artificial Sequence: Synthetic oligonucleotide
ugcaucagguaacccaguc

SEQ ID NO: 697491 - RNA, 19 nt, Artificial Sequence
  Description of Artificial Sequence: Synthetic oligonucleotide
guggcuggcauauuagaca

SEQ ID NO: 697492 - RNA, 19 nt, Artificial Sequence
  Description of Artificial Sequence: Synthetic oligonucleotide
ucaaagacguggccugccu

SEQ ID NO: 697493 - RNA, 19 nt, Artificial Sequence
  Description of Artificial Sequence: Synthetic oligonucleotide
ugggguguuguccucugcu

SEQ ID NO: 697494 - RNA, 19 nt, Artificial Sequence
  Description of Artificial Sequence: Synthetic oligonucleotide
guaggaauagcuagcucug

SEQ ID NO: 697495 - RNA, 19 nt, Artificial Sequence
  Description of Artificial Sequence: Synthetic oligonucleotide
uuagacacuggggccaggc

SEQ ID NO: 697496 - RNA, 19 nt, Artificial Sequence
  Description of Artificial Sequence: Synthetic oligonucleotide
ugaacgggucaaugccugg

SEQ ID NO: 697497 - RNA, 19 nt, Artificial Sequence
  Description of Artificial Sequence: Synthetic oligonucleotide
augaaccaguaacgccucc

SEQ ID NO: 697498 - RNA, 19 nt, Artificial Sequence
  Description of Artificial Sequence: Synthetic oligonucleotide
uguacucucaggggaaggu

SEQ ID NO: 697499 - RNA, 19 nt, Artificial Sequence
  Description of Artificial Sequence: Synthetic oligonucleotide
ggcauauuagacacugggg

SEQ ID NO: 697500 - RNA, 19 nt, Artificial Sequence
  Description of Artificial Sequence: Synthetic oligonucleotide
gaacgggucaaugccuggg

SEQ ID NO: 697501 - RNA, 19 nt, Artificial Sequence
  Description of Artificial Sequence: Synthetic oligonucleotide
guaaaccugggcaagaaua

SEQ ID NO: 697502 - RNA, 19 nt, Artificial Sequence
  Description of Artificial Sequence: Synthetic oligonucleotide
aucgagcugaaugaagaug

SEQ ID NO: 697503 - RNA, 19 nt, Artificial Sequence
  Description of Artificial Sequence: Synthetic oligonucleotide
acacucggggugcuaagag

SEQ ID NO: 697504 - RNA, 19 nt, Artificial Sequence
  Description of Artificial Sequence: Synthetic oligonucleotide
guuggccaccuucacgggg

SEQ ID NO: 697505 - RNA, 19 nt, Artificial Sequence
  Description of Artificial Sequence: Synthetic oligonucleotide
gcaagacaggugcagacag

SEQ ID NO: 697506 - RNA, 19 nt, Artificial Sequence
  Description of Artificial Sequence: Synthetic oligonucleotide
uguuugugucuccgguccc

SEQ ID NO: 697507 - RNA, 19 nt, Artificial Sequence
  Description of Artificial Sequence: Synthetic oligonucleotide
caagacaggugcagacagg

SEQ ID NO: 697508 - RNA, 19 nt, Artificial Sequence
  Description of Artificial Sequence: Synthetic oligonucleotide
gaagaccuccggcucuuag

SEQ ID NO: 697509 - RNA, 19 nt, Artificial Sequence
  Description of Artificial Sequence: Synthetic oligonucleotide
ugccaugaccccaggggcc

SEQ ID NO: 697510 - RNA, 19 nt, Artificial Sequence
  Description of Artificial Sequence: Synthetic oligonucleotide
cugaacgggucaaugccug

SEQ ID NO: 697511 - RNA, 19 nt, Artificial Sequence
  Description of Artificial Sequence: Synthetic oligonucleotide
cugccaugaccccaggggc

SEQ ID NO: 697512 - RNA, 19 nt, Artificial Sequence
  Description of Artificial Sequence: Synthetic oligonucleotide
cucuggauaguagguagag

SEQ ID NO: 697513 - RNA, 19 nt, Artificial Sequence
  Description of Artificial Sequence: Synthetic oligonucleotide
ucucuacagugucuugccu

SEQ ID NO: 697514 - RNA, 19 nt, Artificial Sequence
  Description of Artificial Sequence: Synthetic oligonucleotide
agaguaguguccuguggaa

SEQ ID NO: 697515 - RNA, 19 nt, Artificial Sequence
  Description of Artificial Sequence: Synthetic oligonucleotide
uucgucuccuacucucaug

SEQ ID NO: 697516 - RNA, 19 nt, Artificial Sequence
  Description of Artificial Sequence: Synthetic oligonucleotide
uuuccuacuggagccacuc

SEQ ID NO: 697517 - RNA, 19 nt, Artificial Sequence
  Description of Artificial Sequence: Synthetic oligonucleotide
auaugccgguauuugucca

SEQ ID NO: 697518 - RNA, 19 nt, Artificial Sequence
  Description of Artificial Sequence: Synthetic oligonucleotide
uccuuggaacucugucggg

SEQ ID NO: 697519 - RNA, 19 nt, Artificial Sequence
  Description of Artificial Sequence: Synthetic oligonucleotide
uucuaaagauaagccauuu

SEQ ID NO: 697520 - RNA, 19 nt, Artificial Sequence
  Description of Artificial Sequence: Synthetic oligonucleotide
gagcucaugucaucgagcu

SEQ ID NO: 697521 - RNA, 19 nt, Artificial Sequence
  Description of Artificial Sequence: Synthetic oligonucleotide
cacgggguugauuucacca

SEQ ID NO: 697522 - RNA, 19 nt, Artificial Sequence
  Description of Artificial Sequence: Synthetic oligonucleotide
auggggccgcuucucacgg

SEQ ID NO: 697523 - RNA, 19 nt, Artificial Sequence
  Description of Artificial Sequence: Synthetic oligonucleotide
cagaaucaccauagucuag

SEQ ID NO: 697524 - RNA, 19 nt, Artificial Sequence
  Description of Artificial Sequence: Synthetic oligonucleotide
ucucccgauguuugugucu

SEQ ID NO: 697525 - RNA, 19 nt, Artificial Sequence
  Description of Artificial Sequence: Synthetic oligonucleotide
acaggugcagacagguguc

SEQ ID NO: 697526 - RNA, 19 nt, Artificial Sequence
  Description of Artificial Sequence: Synthetic oligonucleotide
gguagccccauuucuuucc

SEQ ID NO: 697527 - RNA, 19 nt, Artificial Sequence
  Description of Artificial Sequence: Synthetic oligonucleotide
uucacgggguugauuucac

SEQ ID NO: 697528 - RNA, 19 nt, Artificial Sequence
  Description of Artificial Sequence: Synthetic oligonucleotide
ugagugggugguuccuccc

SEQ ID NO: 697529 - RNA, 19 nt, Artificial Sequence
  Description of Artificial Sequence: Synthetic oligonucleotide
cauggggaccacacucggg

SEQ ID NO: 697530 - RNA, 19 nt, Artificial Sequence
  Description of Artificial Sequence: Synthetic oligonucleotide
aggguucuggaccguagca

SEQ ID NO: 697531 - RNA, 19 nt, Artificial Sequence
  Description of Artificial Sequence: Synthetic oligonucleotide
gcucaugucaucgagcuga

SEQ ID NO: 697532 - RNA, 19 nt, Artificial Sequence
  Description of Artificial Sequence: Synthetic oligonucleotide
uuucgucuccuacucucau

SEQ ID NO: 697533 - RNA, 19 nt, Artificial Sequence
  Description of Artificial Sequence: Synthetic oligonucleotide
uggaaacaguguaucuaua

SEQ ID NO: 697534 - RNA, 19 nt, Artificial Sequence
  Description of Artificial Sequence: Synthetic oligonucleotide
gguagaguaguguccugug

SEQ ID NO: 697535 - RNA, 19 nt, Artificial Sequence
  Description of Artificial Sequence: Synthetic oligonucleotide
gaaugucgccucuuucguc

SEQ ID NO: 697536 - RNA, 19 nt, Artificial Sequence
  Description of Artificial Sequence: Synthetic oligonucleotide
gaauggggccgcuucucac

SEQ ID NO: 697537 - RNA, 19 nt, Artificial Sequence
  Description of Artificial Sequence: Synthetic oligonucleotide
gagugggugguuccucccc

SEQ ID NO: 697538 - RNA, 19 nt, Artificial Sequence
  Description of Artificial Sequence: Synthetic oligonucleotide
gacucuuuucaccaggguu

SEQ ID NO: 697539 - RNA, 19 nt, Artificial Sequence
  Description of Artificial Sequence: Synthetic oligonucleotide
ucucucgggaccgagucau

SEQ ID NO: 697540 - RNA, 19 nt, Artificial Sequence
  Description of Artificial Sequence: Synthetic oligonucleotide
ugggugaccgagaccgcca

SEQ ID NO: 697541 - RNA, 19 nt, Artificial Sequence
  Description of Artificial Sequence: Synthetic oligonucleotide
cucacaggaagaacugcca

SEQ ID NO: 697542 - RNA, 19 nt, Artificial Sequence
  Description of Artificial Sequence: Synthetic oligonucleotide
ucggggugcuaagaguugc

SEQ ID NO: 697543 - RNA, 19 nt, Artificial Sequence
  Description of Artificial Sequence: Synthetic oligonucleotide
ggaagaacugccaggacuc

SEQ ID NO: 697544 - RNA, 19 nt, Artificial Sequence
  Description of Artificial Sequence: Synthetic oligonucleotide
aagucucgcucaggggagg

SEQ ID NO: 697545 - RNA, 19 nt, Artificial Sequence
  Description of Artificial Sequence: Synthetic oligonucleotide
agguagaguaguguccugu

SEQ ID NO: 697546 - RNA, 19 nt, Artificial Sequence
  Description of Artificial Sequence: Synthetic oligonucleotide
uaacgccucccucuggaua

SEQ ID NO: 697547 - RNA, 19 nt, Artificial Sequence
  Description of Artificial Sequence: Synthetic oligonucleotide
ugggaguagcaguucuuuc

SEQ ID NO: 697548 - RNA, 19 nt, Artificial Sequence
  Description of Artificial Sequence: Synthetic oligonucleotide
ugguaggaauagcuagcuc

SEQ ID NO: 697549 - RNA, 19 nt, Artificial Sequence
  Description of Artificial Sequence: Synthetic oligonucleotide
uuccuacuggagccacucc

SEQ ID NO: 697550 - RNA, 19 nt, Artificial Sequence
  Description of Artificial Sequence: Synthetic oligonucleotide
gugccugcgcauaugccgg

SEQ ID NO: 697551 - RNA, 19 nt, Artificial Sequence
  Description of Artificial Sequence: Synthetic oligonucleotide
gucuugccuaagcaggcac

SEQ ID NO: 697552 - RNA, 19 nt, Artificial Sequence
  Description of Artificial Sequence: Synthetic oligonucleotide
ggucucuacagugucuugc

SEQ ID NO: 697553 - RNA, 19 nt, Artificial Sequence
  Description of Artificial Sequence: Synthetic oligonucleotide
ugucaucgagcugaaugaa

SEQ ID NO: 697554 - RNA, 19 nt, Artificial Sequence
  Description of Artificial Sequence: Synthetic oligonucleotide
caggucggagaauggugcc

SEQ ID NO: 697555 - RNA, 19 nt, Artificial Sequence
  Description of Artificial Sequence: Synthetic oligonucleotide
uucucacgggaacguggcc

SEQ ID NO: 697556 - RNA, 19 nt, Artificial Sequence
  Description of Artificial Sequence: Synthetic oligonucleotide
uguccuguggaaggcuggc

SEQ ID NO: 697557 - RNA, 19 nt, Artificial Sequence
  Description of Artificial Sequence: Synthetic oligonucleotide
agcaagacaggugcagaca

SEQ ID NO: 697558 - RNA, 19 nt, Artificial Sequence
  Description of Artificial Sequence: Synthetic oligonucleotide
gaagaacugccaggacucc

SEQ ID NO: 697559 - RNA, 19 nt, Artificial Sequence
  Description of Artificial Sequence: Synthetic oligonucleotide
ucucgggaccgagucauac

SEQ ID NO: 697560 - RNA, 19 nt, Artificial Sequence
  Description of Artificial Sequence: Synthetic oligonucleotide
agaacugccaggacucccu

SEQ ID NO: 697561 - RNA, 19 nt, Artificial Sequence
  Description of Artificial Sequence: Synthetic oligonucleotide
gaacguggccuccgugacc

SEQ ID NO: 697562 - RNA, 19 nt, Artificial Sequence
  Description of Artificial Sequence: Synthetic oligonucleotide
uaggaauagcuagcucuga

SEQ ID NO: 697563 - RNA, 19 nt, Artificial Sequence
  Description of Artificial Sequence: Synthetic oligonucleotide
cacucaacugguucugcca

SEQ ID NO: 697564 - RNA, 19 nt, Artificial Sequence
  Description of Artificial Sequence: Synthetic oligonucleotide
caccacagccugcuagggg

SEQ ID NO: 697565 - RNA, 19 nt, Artificial Sequence
  Description of Artificial Sequence: Synthetic oligonucleotide
agcgcugguagccccauuu

SEQ ID NO: 697566 - RNA, 19 nt, Artificial Sequence
  Description of Artificial Sequence: Synthetic oligonucleotide
gaccgagucauacucuccu

SEQ ID NO: 697567 - RNA, 19 nt, Artificial Sequence
  Description of Artificial Sequence: Synthetic oligonucleotide
uagguagaguaguguccug

SEQ ID NO: 697568 - RNA, 19 nt, Artificial Sequence
  Description of Artificial Sequence: Synthetic oligonucleotide
gagaauggugccugcugaa

SEQ ID NO: 697569 - RNA, 19 nt, Artificial Sequence
  Description of Artificial Sequence: Synthetic oligonucleotide
gggugcuaagaguugcagc

SEQ ID NO: 697570 - RNA, 19 nt, Artificial Sequence
  Description of Artificial Sequence: Synthetic oligonucleotide
gccuccgugaccuaugcuc

SEQ ID NO: 697571 - RNA, 19 nt, Artificial Sequence
  Description of Artificial Sequence: Synthetic oligonucleotide
uggccuccgugaccuaugc

SEQ ID NO: 697572 - RNA, 19 nt, Artificial Sequence
  Description of Artificial Sequence: Synthetic oligonucleotide
ugcugaguguagaguccca

SEQ ID NO: 697573 - RNA, 19 nt, Artificial Sequence
  Description of Artificial Sequence: Synthetic oligonucleotide
caaagacguggccugccuc

SEQ ID NO: 697574 - RNA, 19 nt, Artificial Sequence
  Description of Artificial Sequence: Synthetic oligonucleotide
cucacgggaacguggccuc

SEQ ID NO: 697575 - RNA, 19 nt, Artificial Sequence
  Description of Artificial Sequence: Synthetic oligonucleotide
augucgccucuuucgucuc

SEQ ID NO: 697576 - RNA, 19 nt, Artificial Sequence
  Description of Artificial Sequence: Synthetic oligonucleotide
gaccgagaccgccaccuuc

SEQ ID NO: 697577 - RNA, 19 nt, Artificial Sequence
  Description of Artificial Sequence: Synthetic oligonucleotide
gaaccaguaacgccucccu

SEQ ID NO: 697578 - RNA, 19 nt, Artificial Sequence
  Description of Artificial Sequence: Synthetic oligonucleotide
cacacacucaacugguucu

SEQ ID NO: 697579 - RNA, 19 nt, Artificial Sequence
  Description of Artificial Sequence: Synthetic oligonucleotide
ccuccgugaccuaugcucc

SEQ ID NO: 697580 - RNA, 19 nt, Artificial Sequence
  Description of Artificial Sequence: Synthetic oligonucleotide
gugaccuaugcuccaagcu

SEQ ID NO: 697581 - RNA, 19 nt, Artificial Sequence
  Description of Artificial Sequence: Synthetic oligonucleotide
cuggaccguagcagugggg

SEQ ID NO: 697582 - RNA, 19 nt, Artificial Sequence
  Description of Artificial Sequence: Synthetic oligonucleotide
cucccgauguuugugucuc

SEQ ID NO: 697583 - RNA, 19 nt, Artificial Sequence
  Description of Artificial Sequence: Synthetic oligonucleotide
gugcuaagaguugcagcag

SEQ ID NO: 697584 - RNA, 19 nt, Artificial Sequence
  Description of Artificial Sequence: Synthetic oligonucleotide
cacagcuuugcgcaggaua

SEQ ID NO: 697585 - RNA, 19 nt, Artificial Sequence
  Description of Artificial Sequence: Synthetic oligonucleotide
ggauuugaugggaagucuc

SEQ ID NO: 697586 - RNA, 19 nt, Artificial Sequence
  Description of Artificial Sequence: Synthetic oligonucleotide
gaaucaccauagucuaggu

SEQ ID NO: 697587 - RNA, 19 nt, Artificial Sequence
  Description of Artificial Sequence: Synthetic oligonucleotide
cauggcgcucacaggaaga

SEQ ID NO: 697588 - RNA, 19 nt, Artificial Sequence
  Description of Artificial Sequence: Synthetic oligonucleotide
acucggggugcuaagaguu

SEQ ID NO: 697589 - RNA, 19 nt, Artificial Sequence
  Description of Artificial Sequence: Synthetic oligonucleotide
cugggugaccgagaccgcc

SEQ ID NO: 697590 - RNA, 19 nt, Artificial Sequence
  Description of Artificial Sequence: Synthetic oligonucleotide
ccuuggaacucugucgggg

SEQ ID NO: 697591 - RNA, 19 nt, Artificial Sequence
  Description of Artificial Sequence: Synthetic oligonucleotide
cucgcucaggggaggaguc

SEQ ID NO: 697592 - RNA, 19 nt, Artificial Sequence
  Description of Artificial Sequence: Synthetic oligonucleotide
cccauggggaccacacucg

SEQ ID NO: 697593 - RNA, 19 nt, Artificial Sequence
  Description of Artificial Sequence: Synthetic oligonucleotide
aagacguggccugccucca

SEQ ID NO: 697594 - RNA, 19 nt, Artificial Sequence
  Description of Artificial Sequence: Synthetic oligonucleotide
gcacacacucaacugguuc

SEQ ID NO: 697595 - RNA, 19 nt, Artificial Sequence
  Description of Artificial Sequence: Synthetic oligonucleotide
gacguggccugccuccaca

SEQ ID NO: 697596 - RNA, 19 nt, Artificial Sequence
  Description of Artificial Sequence: Synthetic oligonucleotide
gagggaucugcaucaggua

SEQ ID NO: 697597 - RNA, 19 nt, Artificial Sequence
  Description of Artificial Sequence: Synthetic oligonucleotide
cucucccgauguuuguguc

SEQ ID NO: 697598 - RNA, 19 nt, Artificial Sequence
  Description of Artificial Sequence: Synthetic oligonucleotide
cuucacuaugaaccaguaa

SEQ ID NO: 697599 - RNA, 19 nt, Artificial Sequence
  Description of Artificial Sequence: Synthetic oligonucleotide
uagcuagcucugagguugu

SEQ ID NO: 697600 - RNA, 19 nt, Artificial Sequence
  Description of Artificial Sequence: Synthetic oligonucleotide
ggguucuggaccguagcag

SEQ ID NO: 697601 - RNA, 19 nt, Artificial Sequence
  Description of Artificial Sequence: Synthetic oligonucleotide
uggugccugcugaacuccu

SEQ ID NO: 697602 - RNA, 19 nt, Artificial Sequence
  Description of Artificial Sequence: Synthetic oligonucleotide
ggaggguucaggucagcca

SEQ ID NO: 697603 - RNA, 19 nt, Artificial Sequence
  Description of Artificial Sequence: Synthetic oligonucleotide
gggaacguggccuccguga

SEQ ID NO: 697604 - RNA, 19 nt, Artificial Sequence
  Description of Artificial Sequence: Synthetic oligonucleotide
gcauaugccgguauuuguc

SEQ ID NO: 697605 - RNA, 19 nt, Artificial Sequence
  Description of Artificial Sequence: Synthetic oligonucleotide
cuaugagggcccuguccuc

SEQ ID NO: 697606 - RNA, 19 nt, Artificial Sequence
  Description of Artificial Sequence: Synthetic oligonucleotide
ucggagaauggugccugcu

SEQ ID NO: 697607 - RNA, 19 nt, Artificial Sequence
  Description of Artificial Sequence: Synthetic oligonucleotide
cgguauuuguccacauagg

SEQ ID NO: 697608 - RNA, 19 nt, Artificial Sequence
  Description of Artificial Sequence: Synthetic oligonucleotide
caguaacgccucccucugg

SEQ ID NO: 697609 - RNA, 19 nt, Artificial Sequence
  Description of Artificial Sequence: Synthetic oligonucleotide
ggacacuuacuuccuccug

SEQ ID NO: 697610 - RNA, 19 nt, Artificial Sequence
  Description of Artificial Sequence: Synthetic oligonucleotide
ggcacgagcgcugguagcc

SEQ ID NO: 697611 - RNA, 19 nt, Artificial Sequence
  Description of Artificial Sequence: Synthetic oligonucleotide
ugcgcaggauauccuugua

SEQ ID NO: 697612 - RNA, 19 nt, Artificial Sequence
  Description of Artificial Sequence: Synthetic oligonucleotide
ucccucuggauaguaggua

SEQ ID NO: 697613 - RNA, 19 nt, Artificial Sequence
  Description of Artificial Sequence: Synthetic oligonucleotide
gucggagaauggugccugc

SEQ ID NO: 697614 - RNA, 19 nt, Artificial Sequence
  Description of Artificial Sequence: Synthetic oligonucleotide
gaaaccucccucacagccu

SEQ ID NO: 697615 - RNA, 19 nt, Artificial Sequence
  Description of Artificial Sequence: Synthetic oligonucleotide
ggcauguuggggcuguaaa

SEQ ID NO: 697616 - RNA, 19 nt, Artificial Sequence
  Description of Artificial Sequence: Synthetic oligonucleotide
ucccugagcgggaccugga

SEQ ID NO: 697617 - RNA, 19 nt, Artificial Sequence
  Description of Artificial Sequence: Synthetic oligonucleotide
ucccgauguuugugucucc

SEQ ID NO: 697618 - RNA, 19 nt, Artificial Sequence
  Description of Artificial Sequence: Synthetic oligonucleotide
ccauagucuagguccucag

SEQ ID NO: 697619 - RNA, 19 nt, Artificial Sequence
  Description of Artificial Sequence: Synthetic oligonucleotide
ggucggagaauggugccug

SEQ ID NO: 697620 - RNA, 19 nt, Artificial Sequence
  Description of Artificial Sequence: Synthetic oligonucleotide
gcugccucgagaccuggac

SEQ ID NO: 697621 - RNA, 19 nt, Artificial Sequence
  Description of Artificial Sequence: Synthetic oligonucleotide
gcgcaggauauccuuguac

SEQ ID NO: 697622 - RNA, 19 nt, Artificial Sequence
  Description of Artificial Sequence: Synthetic oligonucleotide
gaccuggacccugaauguc

SEQ ID NO: 697623 - RNA, 19 nt, Artificial Sequence
  Description of Artificial Sequence: Synthetic oligonucleotide
gggaucugcaucagguaac

SEQ ID NO: 697624 - RNA, 19 nt, Artificial Sequence
  Description of Artificial Sequence: Synthetic oligonucleotide
agaggcacgagcgcuggua

SEQ ID NO: 697625 - RNA, 19 nt, Artificial Sequence
  Description of Artificial Sequence: Synthetic oligonucleotide
aggucggagaauggugccu

SEQ ID NO: 697626 - RNA, 19 nt, Artificial Sequence
  Description of Artificial Sequence: Synthetic oligonucleotide
ccgauguuugugucuccgg

SEQ ID NO: 697627 - RNA, 19 nt, Artificial Sequence
  Description of Artificial Sequence: Synthetic oligonucleotide
ggauaguagguagaguagu

SEQ ID NO: 697628 - RNA, 19 nt, Artificial Sequence
  Description of Artificial Sequence: Synthetic oligonucleotide
accacacucggggugcuaa

SEQ ID NO: 697629 - RNA, 19 nt, Artificial Sequence
  Description of Artificial Sequence: Synthetic oligonucleotide
gugggauuugaugggaagu

SEQ ID NO: 697630 - RNA, 19 nt, Artificial Sequence
  Description of Artificial Sequence: Synthetic oligonucleotide
uggggccgcuucucacggg

SEQ ID NO: 697631 - RNA, 19 nt, Artificial Sequence
  Description of Artificial Sequence: Synthetic oligonucleotide
ggugagcucaugucaucga

SEQ ID NO: 697632 - RNA, 19 nt, Artificial Sequence
  Description of Artificial Sequence: Synthetic oligonucleotide
cacgggaacguggccuccg

SEQ ID NO: 697633 - RNA, 19 nt, Artificial Sequence
  Description of Artificial Sequence: Synthetic oligonucleotide
ccaggacucccugagcggg

SEQ ID NO: 697634 - RNA, 19 nt, Artificial Sequence
  Description of Artificial Sequence: Synthetic oligonucleotide
uccgugaccuaugcuccaa

SEQ ID NO: 697635 - RNA, 19 nt, Artificial Sequence
  Description of Artificial Sequence: Synthetic oligonucleotide
gagcgggaccuggacuucc

SEQ ID NO: 697636 - RNA, 19 nt, Artificial Sequence
  Description of Artificial Sequence: Synthetic oligonucleotide
ccuaagcaggcacugaucu

SEQ ID NO: 697637 - RNA, 19 nt, Artificial Sequence
  Description of Artificial Sequence: Synthetic oligonucleotide
ccauggggaccacacucgg

SEQ ID NO: 697638 - RNA, 19 nt, Artificial Sequence
  Description of Artificial Sequence: Synthetic oligonucleotide
ggaccguagcaguggggcc

SEQ ID NO: 697639 - RNA, 19 nt, Artificial Sequence
  Description of Artificial Sequence: Synthetic oligonucleotide
agacaggugcagacaggug

SEQ ID NO: 697640 - RNA, 19 nt, Artificial Sequence
  Description of Artificial Sequence: Synthetic oligonucleotide
ggaauggggccgcuucuca

SEQ ID NO: 697641 - RNA, 19 nt, Artificial Sequence
  Description of Artificial Sequence: Synthetic oligonucleotide
uccugucgagcaggggcug

SEQ ID NO: 697642 - RNA, 19 nt, Artificial Sequence
  Description of Artificial Sequence: Synthetic oligonucleotide
cgugaccuaugcuccaagc

SEQ ID NO: 697643 - RNA, 19 nt, Artificial Sequence
  Description of Artificial Sequence: Synthetic oligonucleotide
cccgauguuugugucuccg

SEQ ID NO: 697644 - RNA, 19 nt, Artificial Sequence
  Description of Artificial Sequence: Synthetic oligonucleotide
guggugguaggaauagcua

SEQ ID NO: 697645 - RNA, 19 nt, Artificial Sequence
  Description of Artificial Sequence: Synthetic oligonucleotide
ccgagucauacucuccuuc

SEQ ID NO: 697646 - RNA, 19 nt, Artificial Sequence
  Description of Artificial Sequence: Synthetic oligonucleotide
ggacccugaaugucgccuc

SEQ ID NO: 697647 - RNA, 19 nt, Artificial Sequence
  Description of Artificial Sequence: Synthetic oligonucleotide
gaccguagcaguggggccu

SEQ ID NO: 697648 - RNA, 19 nt, Artificial Sequence
  Description of Artificial Sequence: Synthetic oligonucleotide
cuguaaaccugggcaagaa

SEQ ID NO: 697649 - RNA, 19 nt, Artificial Sequence
  Description of Artificial Sequence: Synthetic oligonucleotide
gugaccgagaccgccaccu

SEQ ID NO: 697650 - RNA, 19 nt, Artificial Sequence
  Description of Artificial Sequence: Synthetic oligonucleotide
gggcuguaaaccugggcaa

SEQ ID NO: 697651 - RNA, 19 nt, Artificial Sequence
  Description of Artificial Sequence: Synthetic oligonucleotide
ggaagcucagaggcacgag

SEQ ID NO: 697652 - RNA, 19 nt, Artificial Sequence
  Description of Artificial Sequence: Synthetic oligonucleotide
gcgcauaugccgguauuug

SEQ ID NO: 697653 - RNA, 19 nt, Artificial Sequence
  Description of Artificial Sequence: Synthetic oligonucleotide
acgggaacguggccuccgu

SEQ ID NO: 697654 - RNA, 19 nt, Artificial Sequence
  Description of Artificial Sequence: Synthetic oligonucleotide
gggaaaccucccucacagc

SEQ ID NO: 697655 - RNA, 19 nt, Artificial Sequence
  Description of Artificial Sequence: Synthetic oligonucleotide
cugagcgggaccuggacuu

SEQ ID NO: 697656 - RNA, 19 nt, Artificial Sequence
  Description of Artificial Sequence: Synthetic oligonucleotide
gcaggaucaacuggacuga

SEQ ID NO: 697657 - RNA, 19 nt, Artificial Sequence
  Description of Artificial Sequence: Synthetic oligonucleotide
ugccugcgcauaugccggu

SEQ ID NO: 697658 - RNA, 19 nt, Artificial Sequence
  Description of Artificial Sequence: Synthetic oligonucleotide
ggguugcaggcuuugagau

SEQ ID NO: 697659 - RNA, 19 nt, Artificial Sequence
  Description of Artificial Sequence: Synthetic oligonucleotide
uugcaggcuuugagauauc

SEQ ID NO: 697660 - RNA, 19 nt, Artificial Sequence
  Description of Artificial Sequence: Synthetic oligonucleotide
ugaccgagaccgccaccuu

SEQ ID NO: 697661 - RNA, 19 nt, Artificial Sequence
  Description of Artificial Sequence: Synthetic oligonucleotide
guagccccauuucuuuccu

SEQ ID NO: 697662 - RNA, 19 nt, Artificial Sequence
  Description of Artificial Sequence: Synthetic oligonucleotide
caucgagcugaaugaagau

SEQ ID NO: 697663 - RNA, 19 nt, Artificial Sequence
  Description of Artificial Sequence: Synthetic oligonucleotide
gcacugaucugaacggguc

SEQ ID NO: 697664 - RNA, 19 nt, Artificial Sequence
  Description of Artificial Sequence: Synthetic oligonucleotide
cuccuaugagggcccuguc

SEQ ID NO: 697665 - RNA, 19 nt, Artificial Sequence
  Description of Artificial Sequence: Synthetic oligonucleotide
cgggucaaugccuggguug

SEQ ID NO: 697666 - RNA, 19 nt, Artificial Sequence
  Description of Artificial Sequence: Synthetic oligonucleotide
uccuacucucauggcgcuc

SEQ ID NO: 697667 - RNA, 19 nt, Artificial Sequence
  Description of Artificial Sequence: Synthetic oligonucleotide
gucucgcucaggggaggag

SEQ ID NO: 697668 - RNA, 19 nt, Artificial Sequence
  Description of Artificial Sequence: Synthetic oligonucleotide
cucucucgggaccgaguca

SEQ ID NO: 697669 - RNA, 19 nt, Artificial Sequence
  Description of Artificial Sequence: Synthetic oligonucleotide
cacacucggggugcuaaga

SEQ ID NO: 697670 - RNA, 19 nt, Artificial Sequence
  Description of Artificial Sequence: Synthetic oligonucleotide
gggguugauuucaccacuc

SEQ ID NO: 697671 - RNA, 19 nt, Artificial Sequence
  Description of Artificial Sequence: Synthetic oligonucleotide
gcagcugacuugggaguag

SEQ ID NO: 697672 - RNA, 19 nt, Artificial Sequence
  Description of Artificial Sequence: Synthetic oligonucleotide
caccacucuugcuguggca

SEQ ID NO: 697673 - RNA, 19 nt, Artificial Sequence
  Description of Artificial Sequence: Synthetic oligonucleotide
caacagcuggcagcccuuc

SEQ ID NO: 697674 - RNA, 19 nt, Artificial Sequence
  Description of Artificial Sequence: Synthetic oligonucleotide
ccucucccacuuagcaaag

SEQ ID NO: 697675 - RNA, 19 nt, Artificial Sequence
  Description of Artificial Sequence: Synthetic oligonucleotide
cucugagguuguggcuggc

SEQ ID NO: 697676 - RNA, 19 nt, Artificial Sequence
  Description of Artificial Sequence: Synthetic oligonucleotide
ccuacucucauggcgcuca

SEQ ID NO: 697677 - RNA, 19 nt, Artificial Sequence
  Description of Artificial Sequence: Synthetic oligonucleotide
cagcuuugcgcaggauauc

SEQ ID NO: 697678 - RNA, 19 nt, Artificial Sequence
  Description of Artificial Sequence: Synthetic oligonucleotide
gcaggacacuuacuuccuc

SEQ ID NO: 697679 - RNA, 19 nt, Artificial Sequence
  Description of Artificial Sequence: Synthetic oligonucleotide
cuugggaguagcaguucuu

SEQ ID NO: 697680 - RNA, 19 nt, Artificial Sequence
  Description of Artificial Sequence: Synthetic oligonucleotide
gggugaccgagaccgccac

SEQ ID NO: 697681 - RNA, 19 nt, Artificial Sequence
  Description of Artificial Sequence: Synthetic oligonucleotide
gggauuugaugggaagucu

SEQ ID NO: 697682 - RNA, 19 nt, Artificial Sequence
  Description of Artificial Sequence: Synthetic oligonucleotide
cucgggaccgagucauacu

SEQ ID NO: 697683 - RNA, 19 nt, Artificial Sequence
  Description of Artificial Sequence: Synthetic oligonucleotide
agcuagcucugagguugug

SEQ ID NO: 697684 - RNA, 19 nt, Artificial Sequence
  Description of Artificial Sequence: Synthetic oligonucleotide
caccugccaugaccccagg

SEQ ID NO: 697685 - RNA, 19 nt, Artificial Sequence
  Description of Artificial Sequence: Synthetic oligonucleotide
ggguugauuucaccacucu

SEQ ID NO: 697686 - RNA, 19 nt, Artificial Sequence
  Description of Artificial Sequence: Synthetic oligonucleotide
ggaagguggugagcucaug

SEQ ID NO: 697687 - RNA, 19 nt, Artificial Sequence
  Description of Artificial Sequence: Synthetic oligonucleotide
gcugaguguagagucccaa

SEQ ID NO: 697688 - RNA, 19 nt, Artificial Sequence
  Description of Artificial Sequence: Synthetic oligonucleotide
accaggguucuggaccgua

SEQ ID NO: 697689 - RNA, 19 nt, Artificial Sequence
  Description of Artificial Sequence: Synthetic oligonucleotide
ccacacucggggugcuaag

SEQ ID NO: 697690 - RNA, 19 nt, Artificial Sequence
  Description of Artificial Sequence: Synthetic oligonucleotide
gccucuugguguguucuuc

SEQ ID NO: 697691 - RNA, 19 nt, Artificial Sequence
  Description of Artificial Sequence: Synthetic oligonucleotide
agcgggaccuggacuuccu

SEQ ID NO: 697692 - RNA, 19 nt, Artificial Sequence
  Description of Artificial Sequence: Synthetic oligonucleotide
guaacgccucccucuggau

SEQ ID NO: 697693 - RNA, 19 nt, Artificial Sequence
  Description of Artificial Sequence: Synthetic oligonucleotide
ccgugaccuaugcuccaag

SEQ ID NO: 697694 - RNA, 19 nt, Artificial Sequence
  Description of Artificial Sequence: Synthetic oligonucleotide
acgagcgcugguagcccca

SEQ ID NO: 697695 - RNA, 19 nt, Artificial Sequence
  Description of Artificial Sequence: Synthetic oligonucleotide
ggcacugaucugaacgggu

SEQ ID NO: 697696 - RNA, 19 nt, Artificial Sequence
  Description of Artificial Sequence: Synthetic oligonucleotide
cgcucacaggaagaacugc

SEQ ID NO: 697697 - RNA, 19 nt, Artificial Sequence
  Description of Artificial Sequence: Synthetic oligonucleotide
ccaagcugggugaccgaga

SEQ ID NO: 697698 - RNA, 19 nt, Artificial Sequence
  Description of Artificial Sequence: Synthetic oligonucleotide
gcacgagcgcugguagccc

SEQ ID NO: 697699 - RNA, 19 nt, Artificial Sequence
  Description of Artificial Sequence: Synthetic oligonucleotide
cccugagcgggaccuggac

SEQ ID NO: 697700 - RNA, 19 nt, Artificial Sequence
  Description of Artificial Sequence: Synthetic oligonucleotide
gcagcggucucuacagugu

SEQ ID NO: 697701 - RNA, 19 nt, Artificial Sequence
  Description of Artificial Sequence: Synthetic oligonucleotide
ggcugagagggaucugcau

SEQ ID NO: 697702 - RNA, 19 nt, Artificial Sequence
  Description of Artificial Sequence: Synthetic oligonucleotide
acgccucccucuggauagu

SEQ ID NO: 697703 - RNA, 19 nt, Artificial Sequence
  Description of Artificial Sequence: Synthetic oligonucleotide
ccucucccgauguuugugu

SEQ ID NO: 697704 - RNA, 19 nt, Artificial Sequence
  Description of Artificial Sequence: Synthetic oligonucleotide
cugaucugaacgggucaau

SEQ ID NO: 697705 - RNA, 19 nt, Artificial Sequence
  Description of Artificial Sequence: Synthetic oligonucleotide
gcugggugaccgagaccgc

SEQ ID NO: 697706 - RNA, 19 nt, Artificial Sequence
  Description of Artificial Sequence: Synthetic oligonucleotide
cgcauaugccgguauuugu

SEQ ID NO: 697707 - RNA, 19 nt, Artificial Sequence
  Description of Artificial Sequence: Synthetic oligonucleotide
ccugagcgggaccuggacu

SEQ ID NO: 697708 - RNA, 19 nt, Artificial Sequence
  Description of Artificial Sequence: Synthetic oligonucleotide
cucucgggaccgagucaua

SEQ ID NO: 697709 - RNA, 19 nt, Artificial Sequence
  Description of Artificial Sequence: Synthetic oligonucleotide
gcuuugcgcaggauauccu

SEQ ID NO: 697710 - RNA, 19 nt, Artificial Sequence
  Description of Artificial Sequence: Synthetic oligonucleotide
ccgccuccgcucccugucc

SEQ ID NO: 697711 - RNA, 19 nt, Artificial Sequence
  Description of Artificial Sequence: Synthetic oligonucleotide
gaccacacucggggugcua

SEQ ID NO: 697712 - RNA, 19 nt, Artificial Sequence
  Description of Artificial Sequence: Synthetic oligonucleotide
cggggugcuaagaguugca

SEQ ID NO: 697713 - RNA, 19 nt, Artificial Sequence
  Description of Artificial Sequence: Synthetic oligonucleotide
caccucuggcaggacacuu

SEQ ID NO: 697714 - RNA, 19 nt, Artificial Sequence
  Description of Artificial Sequence: Synthetic oligonucleotide
acguggccuccgugaccua

SEQ ID NO: 697715 - RNA, 19 nt, Artificial Sequence
  Description of Artificial Sequence: Synthetic oligonucleotide
ggccuccgugaccuaugcu

SEQ ID NO: 697716 - RNA, 19 nt, Artificial Sequence
  Description of Artificial Sequence: Synthetic oligonucleotide
cagaggcacgagcgcuggu

SEQ ID NO: 697717 - RNA, 19 nt, Artificial Sequence
  Description of Artificial Sequence: Synthetic oligonucleotide
guggcauguuggggcugua

SEQ ID NO: 697718 - RNA, 19 nt, Artificial Sequence
  Description of Artificial Sequence: Synthetic oligonucleotide
ggcuggcugaccagugcau

SEQ ID NO: 697719 - RNA, 19 nt, Artificial Sequence
  Description of Artificial Sequence: Synthetic oligonucleotide
ggcacacacucaacugguu

SEQ ID NO: 697720 - RNA, 19 nt, Artificial Sequence
  Description of Artificial Sequence: Synthetic oligonucleotide
ccugcgcauaugccgguau

SEQ ID NO: 697721 - RNA, 19 nt, Artificial Sequence
  Description of Artificial Sequence: Synthetic oligonucleotide
gagcgcugguagccccauu

SEQ ID NO: 697722 - RNA, 19 nt, Artificial Sequence
  Description of Artificial Sequence: Synthetic oligonucleotide
gggccgcuucucacgggaa

SEQ ID NO: 697723 - RNA, 19 nt, Artificial Sequence
  Description of Artificial Sequence: Synthetic oligonucleotide
cgggaccgagucauacucu

SEQ ID NO: 697724 - RNA, 19 nt, Artificial Sequence
  Description of Artificial Sequence: Synthetic oligonucleotide
gccugcgcauaugccggua

SEQ ID NO: 697725 - RNA, 19 nt, Artificial Sequence
  Description of Artificial Sequence: Synthetic oligonucleotide
gccucgagaccuggacccu

SEQ ID NO: 697726 - RNA, 19 nt, Artificial Sequence
  Description of Artificial Sequence: Synthetic oligonucleotide
ccgcuucucacgggaacgu

SEQ ID NO: 697727 - RNA, 19 nt, Artificial Sequence
  Description of Artificial Sequence: Synthetic oligonucleotide
caccaggguucuggaccgu

SEQ ID NO: 697728 - RNA, 19 nt, Artificial Sequence
  Description of Artificial Sequence: Synthetic oligonucleotide
cccugagugggugguuccu

SEQ ID NO: 697729 - RNA, 19 nt, Artificial Sequence
  Description of Artificial Sequence: Synthetic oligonucleotide
ccgagaccgccaccuucuu

SEQ ID NO: 697730 - RNA, 19 nt, Artificial Sequence
  Description of Artificial Sequence: Synthetic oligonucleotide
cgagcgcugguagccccau

SEQ ID NO: 697731 - RNA, 19 nt, Artificial Sequence
  Description of Artificial Sequence: Synthetic oligonucleotide
uguucauagagccagaacc

SEQ ID NO: 697732 - RNA, 19 nt, Artificial Sequence
  Description of Artificial Sequence: Synthetic oligonucleotide
uguaauccaggauacaugg

SEQ ID NO: 697733 - RNA, 19 nt, Artificial Sequence
  Description of Artificial Sequence: Synthetic oligonucleotide
aacacgauaagcagcaugc

SEQ ID NO: 697734 - RNA, 19 nt, Artificial Sequence
  Description of Artificial Sequence: Synthetic oligonucleotide
uacauagguuccuauaggg

SEQ ID NO: 697735 - RNA, 19 nt, Artificial Sequence
  Description of Artificial Sequence: Synthetic oligonucleotide
agcacuucaggguauacac

SEQ ID NO: 697736 - RNA, 19 nt, Artificial Sequence
  Description of Artificial Sequence: Synthetic oligonucleotide
gaauauguacgagagagcc

SEQ ID NO: 697737 - RNA, 19 nt, Artificial Sequence
  Description of Artificial Sequence: Synthetic oligonucleotide
ugaguagggguauugagcc

SEQ ID NO: 697738 - RNA, 19 nt, Artificial Sequence
  Description of Artificial Sequence: Synthetic oligonucleotide
agugaugcaaccucagggg

SEQ ID NO: 697739 - RNA, 19 nt, Artificial Sequence
  Description of Artificial Sequence: Synthetic oligonucleotide
uuuucauugcaccaaggcu

SEQ ID NO: 697740 - RNA, 19 nt, Artificial Sequence
  Description of Artificial Sequence: Synthetic oligonucleotide
cauagguuccuauaggggc

SEQ ID NO: 697741 - RNA, 19 nt, Artificial Sequence
  Description of Artificial Sequence: Synthetic oligonucleotide
ugcucuaucagccagugau

SEQ ID NO: 697742 - RNA, 19 nt, Artificial Sequence
  Description of Artificial Sequence: Synthetic oligonucleotide
cacuguaacagguucagcc

SEQ ID NO: 697743 - RNA, 19 nt, Artificial Sequence
  Description of Artificial Sequence: Synthetic oligonucleotide
aauugaguggggaugaucu

SEQ ID NO: 697744 - RNA, 19 nt, Artificial Sequence
  Description of Artificial Sequence: Synthetic oligonucleotide
acaaagucgucguagucgg

SEQ ID NO: 697745 - RNA, 19 nt, Artificial Sequence
  Description of Artificial Sequence: Synthetic oligonucleotide
aacuggugcacguaguuca

SEQ ID NO: 697746 - RNA, 19 nt, Artificial Sequence
  Description of Artificial Sequence: Synthetic oligonucleotide
uccuauaggggccagacuc

SEQ ID NO: 697747 - RNA, 19 nt, Artificial Sequence
  Description of Artificial Sequence: Synthetic oligonucleotide
auauguacgagagagccag

SEQ ID NO: 697748 - RNA, 19 nt, Artificial Sequence
  Description of Artificial Sequence: Synthetic oligonucleotide
ugaugagcaaccucaaaca

SEQ ID NO: 697749 - RNA, 19 nt, Artificial Sequence
  Description of Artificial Sequence: Synthetic oligonucleotide
uucauugcaccaaggcucg

SEQ ID NO: 697750 - RNA, 19 nt, Artificial Sequence
  Description of Artificial Sequence: Synthetic oligonucleotide
ugugugaaaauggaagugc

SEQ ID NO: 697751 - RNA, 19 nt, Artificial Sequence
  Description of Artificial Sequence: Synthetic oligonucleotide
aaucucaaaggcgcaaagg

SEQ ID NO: 697752 - RNA, 19 nt, Artificial Sequence
  Description of Artificial Sequence: Synthetic oligonucleotide
aaugcccucucccagacaa

SEQ ID NO: 697753 - RNA, 19 nt, Artificial Sequence
  Description of Artificial Sequence: Synthetic oligonucleotide
uccaccaguauagucaggg

SEQ ID NO: 697754 - RNA, 19 nt, Artificial Sequence
  Description of Artificial Sequence: Synthetic oligonucleotide
cacuucaggguauacaccc

SEQ ID NO: 697755 - RNA, 19 nt, Artificial Sequence
  Description of Artificial Sequence: Synthetic oligonucleotide
aguagggguauugagcccc

SEQ ID NO: 697756 - RNA, 19 nt, Artificial Sequence
  Description of Artificial Sequence: Synthetic oligonucleotide
cugaugagcaaccucaaac

SEQ ID NO: 697757 - RNA, 19 nt, Artificial Sequence
  Description of Artificial Sequence: Synthetic oligonucleotide
guggauuaagcggugaugg

SEQ ID NO: 697758 - RNA, 19 nt, Artificial Sequence
  Description of Artificial Sequence: Synthetic oligonucleotide
aaugggguucagccgcugc

SEQ ID NO: 697759 - RNA, 19 nt, Artificial Sequence
  Description of Artificial Sequence: Synthetic oligonucleotide
cauaugaggcauagggugg

SEQ ID NO: 697760 - RNA, 19 nt, Artificial Sequence
  Description of Artificial Sequence: Synthetic oligonucleotide
uggauugacuggcugacug

SEQ ID NO: 697761 - RNA, 19 nt, Artificial Sequence
  Description of Artificial Sequence: Synthetic oligonucleotide
guacgagagagccaguuag

SEQ ID NO: 697762 - RNA, 19 nt, Artificial Sequence
  Description of Artificial Sequence: Synthetic oligonucleotide
agucucgugcccgugaugc

SEQ ID NO: 697763 - RNA, 19 nt, Artificial Sequence
  Description of Artificial Sequence: Synthetic oligonucleotide
agggugaucguugugugcc

SEQ ID NO: 697764 - RNA, 19 nt, Artificial Sequence
  Description of Artificial Sequence: Synthetic oligonucleotide
cugaguagggguauugagc

SEQ ID NO: 697765 - RNA, 19 nt, Artificial Sequence
  Description of Artificial Sequence: Synthetic oligonucleotide
acgauaagcagcaugcagg

SEQ ID NO: 697766 - RNA, 19 nt, Artificial Sequence
  Description of Artificial Sequence: Synthetic oligonucleotide
aaaggcgcaaaggugcagg

SEQ ID NO: 697767 - RNA, 19 nt, Artificial Sequence
  Description of Artificial Sequence: Synthetic oligonucleotide
cauuccaccaguauaguca

SEQ ID NO: 697768 - RNA, 19 nt, Artificial Sequence
  Description of Artificial Sequence: Synthetic oligonucleotide
gagucauucccucugugug

SEQ ID NO: 697769 - RNA, 19 nt, Artificial Sequence
  Description of Artificial Sequence: Synthetic oligonucleotide
ggcucguugaauuucauug

SEQ ID NO: 697770 - RNA, 19 nt, Artificial Sequence
  Description of Artificial Sequence: Synthetic oligonucleotide
cacaaagucgucguagucg

SEQ ID NO: 697771 - RNA, 19 nt, Artificial Sequence
  Description of Artificial Sequence: Synthetic oligonucleotide
aauggcuggaaaugugggu

SEQ ID NO: 697772 - RNA, 19 nt, Artificial Sequence
  Description of Artificial Sequence: Synthetic oligonucleotide
gauacaugggaagaauaug

SEQ ID NO: 697773 - RNA, 19 nt, Artificial Sequence
  Description of Artificial Sequence: Synthetic oligonucleotide
caugaaugggguucagccg

SEQ ID NO: 697774 - RNA, 19 nt, Artificial Sequence
  Description of Artificial Sequence: Synthetic oligonucleotide
cuacauagguuccuauagg

SEQ ID NO: 697775 - RNA, 19 nt, Artificial Sequence
  Description of Artificial Sequence: Synthetic oligonucleotide
auagguuccuauaggggcc

SEQ ID NO: 697776 - RNA, 19 nt, Artificial Sequence
  Description of Artificial Sequence: Synthetic oligonucleotide
ucugagacaucuuggcccc

SEQ ID NO: 697777 - RNA, 19 nt, Artificial Sequence
  Description of Artificial Sequence: Synthetic oligonucleotide
agcacaaacgggcucagca

SEQ ID NO: 697778 - RNA, 19 nt, Artificial Sequence
  Description of Artificial Sequence: Synthetic oligonucleotide
auuccaccaguauagucag

SEQ ID NO: 697779 - RNA, 19 nt, Artificial Sequence
  Description of Artificial Sequence: Synthetic oligonucleotide
gauuaagcggugauggaug

SEQ ID NO: 697780 - RNA, 19 nt, Artificial Sequence
  Description of Artificial Sequence: Synthetic oligonucleotide
ugugucccuacauagguuc

SEQ ID NO: 697781 - RNA, 19 nt, Artificial Sequence
  Description of Artificial Sequence: Synthetic oligonucleotide
ggaagaauauguacgagag

SEQ ID NO: 697782 - RNA, 19 nt, Artificial Sequence
  Description of Artificial Sequence: Synthetic oligonucleotide
accuccgcuuaccagaggg

SEQ ID NO: 697783 - RNA, 19 nt, Artificial Sequence
  Description of Artificial Sequence: Synthetic oligonucleotide
cauguaugccugcugacag

SEQ ID NO: 697784 - RNA, 19 nt, Artificial Sequence
  Description of Artificial Sequence: Synthetic oligonucleotide
uuaucucuagagagacccg

SEQ ID NO: 697785 - RNA, 19 nt, Artificial Sequence
  Description of Artificial Sequence: Synthetic oligonucleotide
gaaaaccuccgcuuaccag

SEQ ID NO: 697786 - RNA, 19 nt, Artificial Sequence
  Description of Artificial Sequence: Synthetic oligonucleotide
agaauauguacgagagagc

SEQ ID NO: 697787 - RNA, 19 nt, Artificial Sequence
  Description of Artificial Sequence: Synthetic oligonucleotide
cauguuggagucucgugcc

SEQ ID NO: 697788 - RNA, 19 nt, Artificial Sequence
  Description of Artificial Sequence: Synthetic oligonucleotide
uguuugcugcgcuugaggu

SEQ ID NO: 697789 - RNA, 19 nt, Artificial Sequence
  Description of Artificial Sequence: Synthetic oligonucleotide
uacgagagagccaguuagg

SEQ ID NO: 697790 - RNA, 19 nt, Artificial Sequence
  Description of Artificial Sequence: Synthetic oligonucleotide
aguauagucagggcugcac

SEQ ID NO: 697791 - RNA, 19 nt, Artificial Sequence
  Description of Artificial Sequence: Synthetic oligonucleotide
uaccagggaauugaguggg

SEQ ID NO: 697792 - RNA, 19 nt, Artificial Sequence
  Description of Artificial Sequence: Synthetic oligonucleotide
agggcauaaagcccaaucu

SEQ ID NO: 697793 - RNA, 19 nt, Artificial Sequence
  Description of Artificial Sequence: Synthetic oligonucleotide
gcauaugaggcauagggug

SEQ ID NO: 697794 - RNA, 19 nt, Artificial Sequence
  Description of Artificial Sequence: Synthetic oligonucleotide
cuaccagggaauugagugg

SEQ ID NO: 697795 - RNA, 19 nt, Artificial Sequence
  Description of Artificial Sequence: Synthetic oligonucleotide
aucccaacacgauaagcag

SEQ ID NO: 697796 - RNA, 19 nt, Artificial Sequence
  Description of Artificial Sequence: Synthetic oligonucleotide
agcagcaugcagguggugc

SEQ ID NO: 697797 - RNA, 19 nt, Artificial Sequence
  Description of Artificial Sequence: Synthetic oligonucleotide
auauaaacuggaucccacu

SEQ ID NO: 697798 - RNA, 19 nt, Artificial Sequence
  Description of Artificial Sequence: Synthetic oligonucleotide
caucccaacacgauaagca

SEQ ID NO: 697799 - RNA, 19 nt, Artificial Sequence
  Description of Artificial Sequence: Synthetic oligonucleotide
auguacugcauguaugccu

SEQ ID NO: 697800 - RNA, 19 nt, Artificial Sequence
  Description of Artificial Sequence: Synthetic oligonucleotide
gaauggcuggaaauguggg

SEQ ID NO: 697801 - RNA, 19 nt, Artificial Sequence
  Description of Artificial Sequence: Synthetic oligonucleotide
gaucccacugagaugacug

SEQ ID NO: 697802 - RNA, 19 nt, Artificial Sequence
  Description of Artificial Sequence: Synthetic oligonucleotide
uaagcggugauggauguac

SEQ ID NO: 697803 - RNA, 19 nt, Artificial Sequence
  Description of Artificial Sequence: Synthetic oligonucleotide
uguguggauugacuggcug

SEQ ID NO: 697804 - RNA, 19 nt, Artificial Sequence
  Description of Artificial Sequence: Synthetic oligonucleotide
auguaugccugcugacagc

SEQ ID NO: 697805 - RNA, 19 nt, Artificial Sequence
  Description of Artificial Sequence: Synthetic oligonucleotide
gcugguagccccuucacgg

SEQ ID NO: 697806 - RNA, 19 nt, Artificial Sequence
  Description of Artificial Sequence: Synthetic oligonucleotide
uucacaaagucgucguagu

SEQ ID NO: 697807 - RNA, 19 nt, Artificial Sequence
  Description of Artificial Sequence: Synthetic oligonucleotide
ugcacugccaauuuccauu

SEQ ID NO: 697808 - RNA, 19 nt, Artificial Sequence
  Description of Artificial Sequence: Synthetic oligonucleotide
uaucucuagagagacccgc

SEQ ID NO: 697809 - RNA, 19 nt, Artificial Sequence
  Description of Artificial Sequence: Synthetic oligonucleotide
guuguuagggugaucguug

SEQ ID NO: 697810 - RNA, 19 nt, Artificial Sequence
  Description of Artificial Sequence: Synthetic oligonucleotide
gagcgggagaaguuguuag

SEQ ID NO: 697811 - RNA, 19 nt, Artificial Sequence
  Description of Artificial Sequence: Synthetic oligonucleotide
auugcaccaaggcucguug

SEQ ID NO: 697812 - RNA, 19 nt, Artificial Sequence
  Description of Artificial Sequence: Synthetic oligonucleotide
cuguaacagguucagcccc

SEQ ID NO: 697813 - RNA, 19 nt, Artificial Sequence
  Description of Artificial Sequence: Synthetic oligonucleotide
accauuugacaucaucagu

SEQ ID NO: 697814 - RNA, 19 nt, Artificial Sequence
  Description of Artificial Sequence: Synthetic oligonucleotide
agagucauucccucugugu

SEQ ID NO: 697815 - RNA, 19 nt, Artificial Sequence
  Description of Artificial Sequence: Synthetic oligonucleotide
acauagguuccuauagggg

SEQ ID NO: 697816 - RNA, 19 nt, Artificial Sequence
  Description of Artificial Sequence: Synthetic oligonucleotide
gauggacacugcucaaggc

SEQ ID NO: 697817 - RNA, 19 nt, Artificial Sequence
  Description of Artificial Sequence: Synthetic oligonucleotide
cauucccucugugugaggg

SEQ ID NO: 697818 - RNA, 19 nt, Artificial Sequence
  Description of Artificial Sequence: Synthetic oligonucleotide
gaccgagcaucucaagugc

SEQ ID NO: 697819 - RNA, 19 nt, Artificial Sequence
  Description of Artificial Sequence: Synthetic oligonucleotide
guagggauggacugugaug

SEQ ID NO: 697820 - RNA, 19 nt, Artificial Sequence
  Description of Artificial Sequence: Synthetic oligonucleotide
augaccgugccccaguccu

SEQ ID NO: 697821 - RNA, 19 nt, Artificial Sequence
  Description of Artificial Sequence: Synthetic oligonucleotide
auuaagcggugauggaugu

SEQ ID NO: 697822 - RNA, 19 nt, Artificial Sequence
  Description of Artificial Sequence: Synthetic oligonucleotide
uacaugggaagaauaugua

SEQ ID NO: 697823 - RNA, 19 nt, Artificial Sequence
  Description of Artificial Sequence: Synthetic oligonucleotide
auccaggauacaugggaag

SEQ ID NO: 697824 - RNA, 19 nt, Artificial Sequence
  Description of Artificial Sequence: Synthetic oligonucleotide
aauauguacgagagagcca

SEQ ID NO: 697825 - RNA, 19 nt, Artificial Sequence
  Description of Artificial Sequence: Synthetic oligonucleotide
cucuaucagccagugaugc

SEQ ID NO: 697826 - RNA, 19 nt, Artificial Sequence
  Description of Artificial Sequence: Synthetic oligonucleotide
gauugacuggcugacugug

SEQ ID NO: 697827 - RNA, 19 nt, Artificial Sequence
  Description of Artificial Sequence: Synthetic oligonucleotide
ccuacauagguuccuauag

SEQ ID NO: 697828 - RNA, 19 nt, Artificial Sequence
  Description of Artificial Sequence: Synthetic oligonucleotide
agaaggugguuaucucuag

SEQ ID NO: 697829 - RNA, 19 nt, Artificial Sequence
  Description of Artificial Sequence: Synthetic oligonucleotide
uccaggauacaugggaaga

SEQ ID NO: 697830 - RNA, 19 nt, Artificial Sequence
  Description of Artificial Sequence: Synthetic oligonucleotide
caacacgauaagcagcaug

SEQ ID NO: 697831 - RNA, 19 nt, Artificial Sequence
  Description of Artificial Sequence: Synthetic oligonucleotide
guggcagcgagugagggag

SEQ ID NO: 697832 - RNA, 19 nt, Artificial Sequence
  Description of Artificial Sequence: Synthetic oligonucleotide
aagcuacagcccaagagca

SEQ ID NO: 697833 - RNA, 19 nt, Artificial Sequence
  Description of Artificial Sequence: Synthetic oligonucleotide
ugccacuacagcugguagc

SEQ ID NO: 697834 - RNA, 19 nt, Artificial Sequence
  Description of Artificial Sequence: Synthetic oligonucleotide
augugugaaaauggaagug

SEQ ID NO: 697835 - RNA, 19 nt, Artificial Sequence
  Description of Artificial Sequence: Synthetic oligonucleotide
agcccuaggcuucuaaggu

SEQ ID NO: 697836 - RNA, 19 nt, Artificial Sequence
  Description of Artificial Sequence: Synthetic oligonucleotide
gauguacugcauguaugcc

SEQ ID NO: 697837 - RNA, 19 nt, Artificial Sequence
  Description of Artificial Sequence: Synthetic oligonucleotide
agccaagagucauucccuc

SEQ ID NO: 697838 - RNA, 19 nt, Artificial Sequence
  Description of Artificial Sequence: Synthetic oligonucleotide
aaguuguuagggugaucgu

SEQ ID NO: 697839 - RNA, 19 nt, Artificial Sequence
  Description of Artificial Sequence: Synthetic oligonucleotide
caggccggggcauaugagg

SEQ ID NO: 697840 - RNA, 19 nt, Artificial Sequence
  Description of Artificial Sequence: Synthetic oligonucleotide
uaaauaccagaggccaccc

SEQ ID NO: 697841 - RNA, 19 nt, Artificial Sequence
  Description of Artificial Sequence: Synthetic oligonucleotide
cagguugcggugaggaccc

SEQ ID NO: 697842 - RNA, 19 nt, Artificial Sequence
  Description of Artificial Sequence: Synthetic oligonucleotide
agucauucccucuguguga

SEQ ID NO: 697843 - RNA, 19 nt, Artificial Sequence
  Description of Artificial Sequence: Synthetic oligonucleotide
uguacgagagagccaguua

SEQ ID NO: 697844 - RNA, 19 nt, Artificial Sequence
  Description of Artificial Sequence: Synthetic oligonucleotide
uagagagacccgcugccac

SEQ ID NO: 697845 - RNA, 19 nt, Artificial Sequence
  Description of Artificial Sequence: Synthetic oligonucleotide
aauccaggauacaugggaa

SEQ ID NO: 697846 - RNA, 19 nt, Artificial Sequence
  Description of Artificial Sequence: Synthetic oligonucleotide
aucccacugagaugacugg

SEQ ID NO: 697847 - RNA, 19 nt, Artificial Sequence
  Description of Artificial Sequence: Synthetic oligonucleotide
uggaaaaccuccgcuuacc

SEQ ID NO: 697848 - RNA, 19 nt, Artificial Sequence
  Description of Artificial Sequence: Synthetic oligonucleotide
ggcgcaaaggugcagguug

SEQ ID NO: 697849 - RNA, 19 nt, Artificial Sequence
  Description of Artificial Sequence: Synthetic oligonucleotide
uucauagagccagaaccac

SEQ ID NO: 697850 - RNA, 19 nt, Artificial Sequence
  Description of Artificial Sequence: Synthetic oligonucleotide
gaugcucuaucagccagug

SEQ ID NO: 697851 - RNA, 19 nt, Artificial Sequence
  Description of Artificial Sequence: Synthetic oligonucleotide
gggaagaauauguacgaga

SEQ ID NO: 697852 - RNA, 19 nt, Artificial Sequence
  Description of Artificial Sequence: Synthetic oligonucleotide
ccagccaagagucauuccc

SEQ ID NO: 697853 - RNA, 19 nt, Artificial Sequence
  Description of Artificial Sequence: Synthetic oligonucleotide
uguuagggugaucguugug

SEQ ID NO: 697854 - RNA, 19 nt, Artificial Sequence
  Description of Artificial Sequence: Synthetic oligonucleotide
ccaacaucagguuauccug

SEQ ID NO: 697855 - RNA, 19 nt, Artificial Sequence
  Description of Artificial Sequence: Synthetic oligonucleotide
uggauggacacugcucaag

SEQ ID NO: 697856 - RNA, 19 nt, Artificial Sequence
  Description of Artificial Sequence: Synthetic oligonucleotide
aaaccuccgcuuaccagag

SEQ ID NO: 697857 - RNA, 19 nt, Artificial Sequence
  Description of Artificial Sequence: Synthetic oligonucleotide
ucaggcauuccccgcccag

SEQ ID NO: 697858 - RNA, 19 nt, Artificial Sequence
  Description of Artificial Sequence: Synthetic oligonucleotide
gccagaaccacugaugagc

SEQ ID NO: 697859 - RNA, 19 nt, Artificial Sequence
  Description of Artificial Sequence: Synthetic oligonucleotide
ugcaccaaggcucguugaa

SEQ ID NO: 697860 - RNA, 19 nt, Artificial Sequence
  Description of Artificial Sequence: Synthetic oligonucleotide
uaguucacucccagcuuug

SEQ ID NO: 697861 - RNA, 19 nt, Artificial Sequence
  Description of Artificial Sequence: Synthetic oligonucleotide
aaggcgcaaaggugcaggu

SEQ ID NO: 697862 - RNA, 19 nt, Artificial Sequence
  Description of Artificial Sequence: Synthetic oligonucleotide
caggaugcacacccugugg

SEQ ID NO: 697863 - RNA, 19 nt, Artificial Sequence
  Description of Artificial Sequence: Synthetic oligonucleotide
uuguuagggugaucguugu

SEQ ID NO: 697864 - RNA, 19 nt, Artificial Sequence
  Description of Artificial Sequence: Synthetic oligonucleotide
gcugcccucaccauguugg

SEQ ID NO: 697865 - RNA, 19 nt, Artificial Sequence
  Description of Artificial Sequence: Synthetic oligonucleotide
guaauccaggauacauggg

SEQ ID NO: 697866 - RNA, 19 nt, Artificial Sequence
  Description of Artificial Sequence: Synthetic oligonucleotide
ugcggugaggacccuggug

SEQ ID NO: 697867 - RNA, 19 nt, Artificial Sequence
  Description of Artificial Sequence: Synthetic oligonucleotide
guugcggugaggacccugg

SEQ ID NO: 697868 - RNA, 19 nt, Artificial Sequence
  Description of Artificial Sequence: Synthetic oligonucleotide
ugggcaugaggcaggcagc

SEQ ID NO: 697869 - RNA, 19 nt, Artificial Sequence
  Description of Artificial Sequence: Synthetic oligonucleotide
ugcacguaguucacuccca

SEQ ID NO: 697870 - RNA, 19 nt, Artificial Sequence
  Description of Artificial Sequence: Synthetic oligonucleotide
aucguugugugcccggcga

SEQ ID NO: 697871 - RNA, 19 nt, Artificial Sequence
  Description of Artificial Sequence: Synthetic oligonucleotide
uccgcuuaccagagggcug

SEQ ID NO: 697872 - RNA, 19 nt, Artificial Sequence
  Description of Artificial Sequence: Synthetic oligonucleotide
uuggcagugggagcccugg

SEQ ID NO: 697873 - RNA, 19 nt, Artificial Sequence
  Description of Artificial Sequence: Synthetic oligonucleotide
aggccggggcauaugaggc

SEQ ID NO: 697874 - RNA, 19 nt, Artificial Sequence
  Description of Artificial Sequence: Synthetic oligonucleotide
agcgucuccaugacgaucu

SEQ ID NO: 697875 - RNA, 19 nt, Artificial Sequence
  Description of Artificial Sequence: Synthetic oligonucleotide
cugguagccccuucacggg

SEQ ID NO: 697876 - RNA, 19 nt, Artificial Sequence
  Description of Artificial Sequence: Synthetic oligonucleotide
ugguagccccuucacgggc

SEQ ID NO: 697877 - RNA, 19 nt, Artificial Sequence
  Description of Artificial Sequence: Synthetic oligonucleotide
gaagggacaggaaaagaua

SEQ ID NO: 697878 - RNA, 19 nt, Artificial Sequence
  Description of Artificial Sequence: Synthetic oligonucleotide
guuccuauaggggccagac

SEQ ID NO: 697879 - RNA, 19 nt, Artificial Sequence
  Description of Artificial Sequence: Synthetic oligonucleotide
uucccucugugugaggggc

SEQ ID NO: 697880 - RNA, 19 nt, Artificial Sequence
  Description of Artificial Sequence: Synthetic oligonucleotide
ccaagcuacagcccaagag

SEQ ID NO: 697881 - RNA, 19 nt, Artificial Sequence
  Description of Artificial Sequence: Synthetic oligonucleotide
uguggcagcgagugaggga

SEQ ID NO: 697882 - RNA, 19 nt, Artificial Sequence
  Description of Artificial Sequence: Synthetic oligonucleotide
guugugugcccggcgaccg

SEQ ID NO: 697883 - RNA, 19 nt, Artificial Sequence
  Description of Artificial Sequence: Synthetic oligonucleotide
ugugguagggauggacugu

SEQ ID NO: 697884 - RNA, 19 nt, Artificial Sequence
  Description of Artificial Sequence: Synthetic oligonucleotide
accgagcaucucaagugcc

SEQ ID NO: 697885 - RNA, 19 nt, Artificial Sequence
  Description of Artificial Sequence: Synthetic oligonucleotide
agucgucguagucggcggg

SEQ ID NO: 697886 - RNA, 19 nt, Artificial Sequence
  Description of Artificial Sequence: Synthetic oligonucleotide
gaauugaguggggaugauc

SEQ ID NO: 697887 - RNA, 19 nt, Artificial Sequence
  Description of Artificial Sequence: Synthetic oligonucleotide
aguuguuagggugaucguu

SEQ ID NO: 697888 - RNA, 19 nt, Artificial Sequence
  Description of Artificial Sequence: Synthetic oligonucleotide
acccaaugcccucucccag

SEQ ID NO: 697889 - RNA, 19 nt, Artificial Sequence
  Description of Artificial Sequence: Synthetic oligonucleotide
guuagggugaucguugugu

SEQ ID NO: 697890 - RNA, 19 nt, Artificial Sequence
  Description of Artificial Sequence: Synthetic oligonucleotide
uggagucucgugcccguga

SEQ ID NO: 697891 - RNA, 19 nt, Artificial Sequence
  Description of Artificial Sequence: Synthetic oligonucleotide
uuccuauaggggccagacu

SEQ ID NO: 697892 - RNA, 19 nt, Artificial Sequence
  Description of Artificial Sequence: Synthetic oligonucleotide
guguggauugacuggcuga

SEQ ID NO: 697893 - RNA, 19 nt, Artificial Sequence
  Description of Artificial Sequence: Synthetic oligonucleotide
ggcauaaagcccaaucuca

SEQ ID NO: 697894 - RNA, 19 nt, Artificial Sequence
  Description of Artificial Sequence: Synthetic oligonucleotide
gcgcuugagguucuguagg

SEQ ID NO: 697895 - RNA, 19 nt, Artificial Sequence
  Description of Artificial Sequence: Synthetic oligonucleotide
uccggugguggaaaaccuc

SEQ ID NO: 697896 - RNA, 19 nt, Artificial Sequence
  Description of Artificial Sequence: Synthetic oligonucleotide
caaggcucguugaauuuca

SEQ ID NO: 697897 - RNA, 19 nt, Artificial Sequence
  Description of Artificial Sequence: Synthetic oligonucleotide
cauugccuguccuguaauc

SEQ ID NO: 697898 - RNA, 19 nt, Artificial Sequence
  Description of Artificial Sequence: Synthetic oligonucleotide
gggcauaaagcccaaucuc

SEQ ID NO: 697899 - RNA, 19 nt, Artificial Sequence
  Description of Artificial Sequence: Synthetic oligonucleotide
acgagagagccaguuagga

SEQ ID NO: 697900 - RNA, 19 nt, Artificial Sequence
  Description of Artificial Sequence: Synthetic oligonucleotide
acugaugagcaaccucaaa

SEQ ID NO: 697901 - RNA, 19 nt, Artificial Sequence
  Description of Artificial Sequence: Synthetic oligonucleotide
aggaguuuauauauuuaua

SEQ ID NO: 697902 - RNA, 19 nt, Artificial Sequence
  Description of Artificial Sequence: Synthetic oligonucleotide
ccgugaugcucuaucagcc

SEQ ID NO: 697903 - RNA, 19 nt, Artificial Sequence
  Description of Artificial Sequence: Synthetic oligonucleotide
gaccuggauauaaacugga

SEQ ID NO: 697904 - RNA, 19 nt, Artificial Sequence
  Description of Artificial Sequence: Synthetic oligonucleotide
aaccuccgcuuaccagagg

SEQ ID NO: 697905 - RNA, 19 nt, Artificial Sequence
  Description of Artificial Sequence: Synthetic oligonucleotide
gugggcaugaaugggguuc

SEQ ID NO: 697906 - RNA, 19 nt, Artificial Sequence
  Description of Artificial Sequence: Synthetic oligonucleotide
cagcaucccaacacgauaa

SEQ ID NO: 697907 - RNA, 19 nt, Artificial Sequence
  Description of Artificial Sequence: Synthetic oligonucleotide
gaaggccggggcucgaaga

SEQ ID NO: 697908 - RNA, 19 nt, Artificial Sequence
  Description of Artificial Sequence: Synthetic oligonucleotide
ugugugcccggcgaccgag

SEQ ID NO: 697909 - RNA, 19 nt, Artificial Sequence
  Description of Artificial Sequence: Synthetic oligonucleotide
agguggauuaagcggugau

SEQ ID NO: 697910 - RNA, 19 nt, Artificial Sequence
  Description of Artificial Sequence: Synthetic oligonucleotide
gcagguugcggugaggacc

SEQ ID NO: 697911 - RNA, 19 nt, Artificial Sequence
  Description of Artificial Sequence: Synthetic oligonucleotide
cccgugaugcucuaucagc

SEQ ID NO: 697912 - RNA, 19 nt, Artificial Sequence
  Description of Artificial Sequence: Synthetic oligonucleotide
gccacuacagcugguagcc

SEQ ID NO: 697913 - RNA, 19 nt, Artificial Sequence
  Description of Artificial Sequence: Synthetic oligonucleotide
uccagccaagagucauucc

SEQ ID NO: 697914 - RNA, 19 nt, Artificial Sequence
  Description of Artificial Sequence: Synthetic oligonucleotide
gaccgugccccaguccugg

SEQ ID NO: 697915 - RNA, 19 nt, Artificial Sequence
  Description of Artificial Sequence: Synthetic oligonucleotide
uugcaccaaggcucguuga

SEQ ID NO: 697916 - RNA, 19 nt, Artificial Sequence
  Description of Artificial Sequence: Synthetic oligonucleotide
cuuaccagagggcugggcu

SEQ ID NO: 697917 - RNA, 19 nt, Artificial Sequence
  Description of Artificial Sequence: Synthetic oligonucleotide
ucccacugagaugacugga

SEQ ID NO: 697918 - RNA, 19 nt, Artificial Sequence
  Description of Artificial Sequence: Synthetic oligonucleotide
gaaugaccgugccccaguc

SEQ ID NO: 697919 - RNA, 19 nt, Artificial Sequence
  Description of Artificial Sequence: Synthetic oligonucleotide
ucauucccucugugugagg

SEQ ID NO: 697920 - RNA, 19 nt, Artificial Sequence
  Description of Artificial Sequence: Synthetic oligonucleotide
acuggugcacguaguucac

SEQ ID NO: 697921 - RNA, 19 nt, Artificial Sequence
  Description of Artificial Sequence: Synthetic oligonucleotide
uauguacgagagagccagu

SEQ ID NO: 697922 - RNA, 19 nt, Artificial Sequence
  Description of Artificial Sequence: Synthetic oligonucleotide
ggcugcacugccaauuucc

SEQ ID NO: 697923 - RNA, 19 nt, Artificial Sequence
  Description of Artificial Sequence: Synthetic oligonucleotide
ugucccuacauagguuccu

SEQ ID NO: 697924 - RNA, 19 nt, Artificial Sequence
  Description of Artificial Sequence: Synthetic oligonucleotide
gguggauuaagcggugaug

SEQ ID NO: 697925 - RNA, 19 nt, Artificial Sequence
  Description of Artificial Sequence: Synthetic oligonucleotide
ccagcaaccauuugacauc

SEQ ID NO: 697926 - RNA, 19 nt, Artificial Sequence
  Description of Artificial Sequence: Synthetic oligonucleotide
caaaggugcagguugcggu

SEQ ID NO: 697927 - RNA, 19 nt, Artificial Sequence
  Description of Artificial Sequence: Synthetic oligonucleotide
gucgaggugcccaucccag

SEQ ID NO: 697928 - RNA, 19 nt, Artificial Sequence
  Description of Artificial Sequence: Synthetic oligonucleotide
cacgggccguggaugagcc

SEQ ID NO: 697929 - RNA, 19 nt, Artificial Sequence
  Description of Artificial Sequence: Synthetic oligonucleotide
ucgaggugcccaucccagc

SEQ ID NO: 697930 - RNA, 19 nt, Artificial Sequence
  Description of Artificial Sequence: Synthetic oligonucleotide
ggauauaaacuggauccca

SEQ ID NO: 697931 - RNA, 19 nt, Artificial Sequence
  Description of Artificial Sequence: Synthetic oligonucleotide
ccggugguggaaaaccucc

SEQ ID NO: 697932 - RNA, 19 nt, Artificial Sequence
  Description of Artificial Sequence: Synthetic oligonucleotide
cuuggucuguuugcugcgc

SEQ ID NO: 697933 - RNA, 19 nt, Artificial Sequence
  Description of Artificial Sequence: Synthetic oligonucleotide
guaggggugcaggccaggg

SEQ ID NO: 697934 - RNA, 19 nt, Artificial Sequence
  Description of Artificial Sequence: Synthetic oligonucleotide
ucguugugugcccggcgac

SEQ ID NO: 697935 - RNA, 19 nt, Artificial Sequence
  Description of Artificial Sequence: Synthetic oligonucleotide
uaugaggcauagggugggc

SEQ ID NO: 697936 - RNA, 19 nt, Artificial Sequence
  Description of Artificial Sequence: Synthetic oligonucleotide
ugagccgccugcugucugu

SEQ ID NO: 697937 - RNA, 19 nt, Artificial Sequence
  Description of Artificial Sequence: Synthetic oligonucleotide
accaaggcucguugaauuu

SEQ ID NO: 697938 - RNA, 19 nt, Artificial Sequence
  Description of Artificial Sequence: Synthetic oligonucleotide
cugugugguagggauggac

SEQ ID NO: 697939 - RNA, 19 nt, Artificial Sequence
  Description of Artificial Sequence: Synthetic oligonucleotide
ucucgugcccgugaugcuc

SEQ ID NO: 697940 - RNA, 19 nt, Artificial Sequence
  Description of Artificial Sequence: Synthetic oligonucleotide
ucccucugugugaggggcc

SEQ ID NO: 697941 - RNA, 19 nt, Artificial Sequence
  Description of Artificial Sequence: Synthetic oligonucleotide
aggauacaugggaagaaua

SEQ ID NO: 697942 - RNA, 19 nt, Artificial Sequence
  Description of Artificial Sequence: Synthetic oligonucleotide
caaagucgucguagucggc

SEQ ID NO: 697943 - RNA, 19 nt, Artificial Sequence
  Description of Artificial Sequence: Synthetic oligonucleotide
ugguagggauggacuguga

SEQ ID NO: 697944 - RNA, 19 nt, Artificial Sequence
  Description of Artificial Sequence: Synthetic oligonucleotide
ggagucacugaguaggggu

SEQ ID NO: 697945 - RNA, 19 nt, Artificial Sequence
  Description of Artificial Sequence: Synthetic oligonucleotide
ggaaaaccuccgcuuacca

SEQ ID NO: 697946 - RNA, 19 nt, Artificial Sequence
  Description of Artificial Sequence: Synthetic oligonucleotide
uccuguaauccaggauaca

SEQ ID NO: 697947 - RNA, 19 nt, Artificial Sequence
  Description of Artificial Sequence: Synthetic oligonucleotide
gucgucguagucggcgggg

SEQ ID NO: 697948 - RNA, 19 nt, Artificial Sequence
  Description of Artificial Sequence: Synthetic oligonucleotide
ugaccgugccccaguccug

SEQ ID NO: 697949 - RNA, 19 nt, Artificial Sequence
  Description of Artificial Sequence: Synthetic oligonucleotide
ugcccggcgaccgagcauc

SEQ ID NO: 697950 - RNA, 19 nt, Artificial Sequence
  Description of Artificial Sequence: Synthetic oligonucleotide
agagacccgcugccacaac

SEQ ID NO: 697951 - RNA, 19 nt, Artificial Sequence
  Description of Artificial Sequence: Synthetic oligonucleotide
aacagcacuucaggguaua

SEQ ID NO: 697952 - RNA, 19 nt, Artificial Sequence
  Description of Artificial Sequence: Synthetic oligonucleotide
cuucacgggccguggauga

SEQ ID NO: 697953 - RNA, 19 nt, Artificial Sequence
  Description of Artificial Sequence: Synthetic oligonucleotide
ucccuacauagguuccuau

SEQ ID NO: 697954 - RNA, 19 nt, Artificial Sequence
  Description of Artificial Sequence: Synthetic oligonucleotide
guaacagguucagccccag

SEQ ID NO: 697955 - RNA, 19 nt, Artificial Sequence
  Description of Artificial Sequence: Synthetic oligonucleotide
agguucuguaggaugucgu

SEQ ID NO: 697956 - RNA, 19 nt, Artificial Sequence
  Description of Artificial Sequence: Synthetic oligonucleotide
cucaagugccagcauccca

SEQ ID NO: 697957 - RNA, 19 nt, Artificial Sequence
  Description of Artificial Sequence: Synthetic oligonucleotide
cugagaugacuggaaccac

SEQ ID NO: 697958 - RNA, 19 nt, Artificial Sequence
  Description of Artificial Sequence: Synthetic oligonucleotide
ggugaucguugugugcccg

SEQ ID NO: 697959 - RNA, 19 nt, Artificial Sequence
  Description of Artificial Sequence: Synthetic oligonucleotide
gcggugauggauguacugc

SEQ ID NO: 697960 - RNA, 19 nt, Artificial Sequence
  Description of Artificial Sequence: Synthetic oligonucleotide
auguacgagagagccaguu

SEQ ID NO: 697961 - RNA, 19 nt, Artificial Sequence
  Description of Artificial Sequence: Synthetic oligonucleotide
cuguggguaugcagagcug

SEQ ID NO: 697962 - RNA, 19 nt, Artificial Sequence
  Description of Artificial Sequence: Synthetic oligonucleotide
aggcucguugaauuucauu

SEQ ID NO: 697963 - RNA, 19 nt, Artificial Sequence
  Description of Artificial Sequence: Synthetic oligonucleotide
gugguggaaaaccuccgcu

SEQ ID NO: 697964 - RNA, 19 nt, Artificial Sequence
  Description of Artificial Sequence: Synthetic oligonucleotide
gcacguaguucacucccag

SEQ ID NO: 697965 - RNA, 19 nt, Artificial Sequence
  Description of Artificial Sequence: Synthetic oligonucleotide
gagucucgugcccgugaug

SEQ ID NO: 697966 - RNA, 19 nt, Artificial Sequence
  Description of Artificial Sequence: Synthetic oligonucleotide
guacugcauguaugccugc

SEQ ID NO: 697967 - RNA, 19 nt, Artificial Sequence
  Description of Artificial Sequence: Synthetic oligonucleotide
gugcccgugaugcucuauc

SEQ ID NO: 697968 - RNA, 19 nt, Artificial Sequence
  Description of Artificial Sequence: Synthetic oligonucleotide
caguccuggaccuggauau

SEQ ID NO: 697969 - RNA, 19 nt, Artificial Sequence
  Description of Artificial Sequence: Synthetic oligonucleotide
agcauuccaccaguauagu

SEQ ID NO: 697970 - RNA, 19 nt, Artificial Sequence
  Description of Artificial Sequence: Synthetic oligonucleotide
aggcauagggugggcgagg

SEQ ID NO: 697971 - RNA, 19 nt, Artificial Sequence
  Description of Artificial Sequence: Synthetic oligonucleotide
guagagcaguguaggggug

SEQ ID NO: 697972 - RNA, 19 nt, Artificial Sequence
  Description of Artificial Sequence: Synthetic oligonucleotide
cgaccgagcaucucaagug

SEQ ID NO: 697973 - RNA, 19 nt, Artificial Sequence
  Description of Artificial Sequence: Synthetic oligonucleotide
caaggccacacugguuggc

SEQ ID NO: 697974 - RNA, 19 nt, Artificial Sequence
  Description of Artificial Sequence: Synthetic oligonucleotide
gggaauugaguggggauga

SEQ ID NO: 697975 - RNA, 19 nt, Artificial Sequence
  Description of Artificial Sequence: Synthetic oligonucleotide
ugugggcaugaaugggguu

SEQ ID NO: 697976 - RNA, 19 nt, Artificial Sequence
  Description of Artificial Sequence: Synthetic oligonucleotide
gugucccuacauagguucc

SEQ ID NO: 697977 - RNA, 19 nt, Artificial Sequence
  Description of Artificial Sequence: Synthetic oligonucleotide
caucaugcccauggguguc

SEQ ID NO: 697978 - RNA, 19 nt, Artificial Sequence
  Description of Artificial Sequence: Synthetic oligonucleotide
ccuccggugguggaaaacc

SEQ ID NO: 697979 - RNA, 19 nt, Artificial Sequence
  Description of Artificial Sequence: Synthetic oligonucleotide
gcaucccaacacgauaagc

SEQ ID NO: 697980 - RNA, 19 nt, Artificial Sequence
  Description of Artificial Sequence: Synthetic oligonucleotide
uugugugcccggcgaccga

SEQ ID NO: 697981 - RNA, 19 nt, Artificial Sequence
  Description of Artificial Sequence: Synthetic oligonucleotide
cugcguggucagagcaggc

SEQ ID NO: 697982 - RNA, 19 nt, Artificial Sequence
  Description of Artificial Sequence: Synthetic oligonucleotide
uuaagcggugauggaugua

SEQ ID NO: 697983 - RNA, 19 nt, Artificial Sequence
  Description of Artificial Sequence: Synthetic oligonucleotide
uggggcuguagagcagugu

SEQ ID NO: 697984 - RNA, 19 nt, Artificial Sequence
  Description of Artificial Sequence: Synthetic oligonucleotide
gagguggauuaagcgguga

SEQ ID NO: 697985 - RNA, 19 nt, Artificial Sequence
  Description of Artificial Sequence: Synthetic oligonucleotide
uuggagucucgugcccgug

SEQ ID NO: 697986 - RNA, 19 nt, Artificial Sequence
  Description of Artificial Sequence: Synthetic oligonucleotide
gcccucaucccacugccac

SEQ ID NO: 697987 - RNA, 19 nt, Artificial Sequence
  Description of Artificial Sequence: Synthetic oligonucleotide
guucagccgcugcagcguc

SEQ ID NO: 697988 - RNA, 19 nt, Artificial Sequence
  Description of Artificial Sequence: Synthetic oligonucleotide
cagaaggcgcugcgggcac

SEQ ID NO: 697989 - RNA, 19 nt, Artificial Sequence
  Description of Artificial Sequence: Synthetic oligonucleotide
ugacagcgcugcaccaguu

SEQ ID NO: 697990 - RNA, 19 nt, Artificial Sequence
  Description of Artificial Sequence: Synthetic oligonucleotide
cagcacuucaggguauaca

SEQ ID NO: 697991 - RNA, 19 nt, Artificial Sequence
  Description of Artificial Sequence: Synthetic oligonucleotide
auaccagaggccacccaau

SEQ ID NO: 697992 - RNA, 19 nt, Artificial Sequence
  Description of Artificial Sequence: Synthetic oligonucleotide
gcauguaugccugcugaca

SEQ ID NO: 697993 - RNA, 19 nt, Artificial Sequence
  Description of Artificial Sequence: Synthetic oligonucleotide
gagagacccgcugccacaa

SEQ ID NO: 697994 - RNA, 19 nt, Artificial Sequence
  Description of Artificial Sequence: Synthetic oligonucleotide
cagccaagagucauucccu

SEQ ID NO: 697995 - RNA, 19 nt, Artificial Sequence
  Description of Artificial Sequence: Synthetic oligonucleotide
cacugaugagcaaccucaa

SEQ ID NO: 697996 - RNA, 19 nt, Artificial Sequence
  Description of Artificial Sequence: Synthetic oligonucleotide
ccgcuuaccagagggcugg

SEQ ID NO: 697997 - RNA, 19 nt, Artificial Sequence
  Description of Artificial Sequence: Synthetic oligonucleotide
gcacuucaggguauacacc

SEQ ID NO: 697998 - RNA, 19 nt, Artificial Sequence
  Description of Artificial Sequence: Synthetic oligonucleotide
cugcgcuugagguucugua

SEQ ID NO: 697999 - RNA, 19 nt, Artificial Sequence
  Description of Artificial Sequence: Synthetic oligonucleotide
ccguggaugagccgccugc

SEQ ID NO: 698000 - RNA, 19 nt, Artificial Sequence
  Description of Artificial Sequence: Synthetic oligonucleotide
ggucgaggugcccauccca

SEQ ID NO: 698001 - RNA, 19 nt, Artificial Sequence
  Description of Artificial Sequence: Synthetic oligonucleotide
ggauuaagcggugauggau

SEQ ID NO: 698002 - RNA, 19 nt, Artificial Sequence
  Description of Artificial Sequence: Synthetic oligonucleotide
cuaggcuucuaaggucuga

SEQ ID NO: 698003 - RNA, 19 nt, Artificial Sequence
  Description of Artificial Sequence: Synthetic oligonucleotide
gcugccacaacuccuuggu

SEQ ID NO: 698004 - RNA, 19 nt, Artificial Sequence
  Description of Artificial Sequence: Synthetic oligonucleotide
gggugaucguugugugccc

SEQ ID NO: 698005 - RNA, 19 nt, Artificial Sequence
  Description of Artificial Sequence: Synthetic oligonucleotide
gguagccccuucacgggcc

SEQ ID NO: 698006 - RNA, 19 nt, Artificial Sequence
  Description of Artificial Sequence: Synthetic oligonucleotide
ccuauaggggccagacuca

SEQ ID NO: 698007 - RNA, 19 nt, Artificial Sequence
  Description of Artificial Sequence: Synthetic oligonucleotide
acgggccguggaugagccg

SEQ ID NO: 698008 - RNA, 19 nt, Artificial Sequence
  Description of Artificial Sequence: Synthetic oligonucleotide
ggcucugugugguagggau

SEQ ID NO: 698009 - RNA, 19 nt, Artificial Sequence
  Description of Artificial Sequence: Synthetic oligonucleotide
ccaaggcucguugaauuuc

SEQ ID NO: 698010 - RNA, 19 nt, Artificial Sequence
  Description of Artificial Sequence: Synthetic oligonucleotide
gcccuaggcuucuaagguc

SEQ ID NO: 698011 - RNA, 19 nt, Artificial Sequence
  Description of Artificial Sequence: Synthetic oligonucleotide
gugggcgaggggugagcug

SEQ ID NO: 698012 - RNA, 19 nt, Artificial Sequence
  Description of Artificial Sequence: Synthetic oligonucleotide
gggauggacugugauggga

SEQ ID NO: 698013 - RNA, 19 nt, Artificial Sequence
  Description of Artificial Sequence: Synthetic oligonucleotide
ccuguggguaugcagagcu

SEQ ID NO: 698014 - RNA, 19 nt, Artificial Sequence
  Description of Artificial Sequence: Synthetic oligonucleotide
guuugcugcgcuugagguu

SEQ ID NO: 698015 - RNA, 19 nt, Artificial Sequence
  Description of Artificial Sequence: Synthetic oligonucleotide
ggcauaugaggcauagggu

SEQ ID NO: 698016 - RNA, 19 nt, Artificial Sequence
  Description of Artificial Sequence: Synthetic oligonucleotide
ccuccgcuuaccagagggc

SEQ ID NO: 698017 - RNA, 19 nt, Artificial Sequence
  Description of Artificial Sequence: Synthetic oligonucleotide
agccccuucacgggccgug

SEQ ID NO: 698018 - RNA, 19 nt, Artificial Sequence
  Description of Artificial Sequence: Synthetic oligonucleotide
gccgccugcugucuguuca

SEQ ID NO: 698019 - RNA, 19 nt, Artificial Sequence
  Description of Artificial Sequence: Synthetic oligonucleotide
caccaaggcucguugaauu

SEQ ID NO: 698020 - RNA, 19 nt, Artificial Sequence
  Description of Artificial Sequence: Synthetic oligonucleotide
cagaacuggugcacguagu

SEQ ID NO: 698021 - RNA, 19 nt, Artificial Sequence
  Description of Artificial Sequence: Synthetic oligonucleotide
ggcgaccgagcaucucaag

SEQ ID NO: 698022 - RNA, 19 nt, Artificial Sequence
  Description of Artificial Sequence: Synthetic oligonucleotide
ggaaaugugggugcuggau

SEQ ID NO: 698023 - RNA, 19 nt, Artificial Sequence
  Description of Artificial Sequence: Synthetic oligonucleotide
ucauugcaccaaggcucgu

SEQ ID NO: 698024 - RNA, 19 nt, Artificial Sequence
  Description of Artificial Sequence: Synthetic oligonucleotide
ggaaugaccgugccccagu

SEQ ID NO: 698025 - RNA, 19 nt, Artificial Sequence
  Description of Artificial Sequence: Synthetic oligonucleotide
cugacagcgcugcaccagu

SEQ ID NO: 698026 - RNA, 19 nt, Artificial Sequence
  Description of Artificial Sequence: Synthetic oligonucleotide
agguuccuauaggggccag

SEQ ID NO: 698027 - RNA, 19 nt, Artificial Sequence
  Description of Artificial Sequence: Synthetic oligonucleotide
cuccggugguggaaaaccu

SEQ ID NO: 698028 - RNA, 19 nt, Artificial Sequence
  Description of Artificial Sequence: Synthetic oligonucleotide
cuccgcuuaccagagggcu

SEQ ID NO: 698029 - RNA, 19 nt, Artificial Sequence
  Description of Artificial Sequence: Synthetic oligonucleotide
gcgaccgagcaucucaagu

SEQ ID NO: 698030 - RNA, 19 nt, Artificial Sequence
  Description of Artificial Sequence: Synthetic oligonucleotide
gagggaggagucacugagu

SEQ ID NO: 698031 - RNA, 19 nt, Artificial Sequence
  Description of Artificial Sequence: Synthetic oligonucleotide
cucgugcccgugaugcucu

SEQ ID NO: 698032 - RNA, 19 nt, Artificial Sequence
  Description of Artificial Sequence: Synthetic oligonucleotide
gguucuguaggaugucguu

SEQ ID NO: 698033 - RNA, 19 nt, Artificial Sequence
  Description of Artificial Sequence: Synthetic oligonucleotide
cugcccucaccauguugga

SEQ ID NO: 698034 - RNA, 19 nt, Artificial Sequence
  Description of Artificial Sequence: Synthetic oligonucleotide
ccgagcaucucaagugcca

SEQ ID NO: 698035 - RNA, 19 nt, Artificial Sequence
  Description of Artificial Sequence: Synthetic oligonucleotide
gguugcggugaggacccug

SEQ ID NO: 698036 - RNA, 19 nt, Artificial Sequence
  Description of Artificial Sequence: Synthetic oligonucleotide
ccagcaucccaacacgaua

SEQ ID NO: 698037 - RNA, 19 nt, Artificial Sequence
  Description of Artificial Sequence: Synthetic oligonucleotide
cggugauggauguacugca

SEQ ID NO: 698038 - RNA, 19 nt, Artificial Sequence
  Description of Artificial Sequence: Synthetic oligonucleotide
cucaggcauuccccgccca

SEQ ID NO: 698039 - RNA, 19 nt, Artificial Sequence
  Description of Artificial Sequence: Synthetic oligonucleotide
cccuacauagguuccuaua

SEQ ID NO: 698040 - RNA, 19 nt, Artificial Sequence
  Description of Artificial Sequence: Synthetic oligonucleotide
gcuuaccagagggcugggc

SEQ ID NO: 698041 - RNA, 19 nt, Artificial Sequence
  Description of Artificial Sequence: Synthetic oligonucleotide
cgggccguggaugagccgc

SEQ ID NO: 698042 - RNA, 19 nt, Artificial Sequence
  Description of Artificial Sequence: Synthetic oligonucleotide
ccggcgaccgagcaucuca

SEQ ID NO: 698043 - RNA, 19 nt, Artificial Sequence
  Description of Artificial Sequence: Synthetic oligonucleotide
aggcgcaaaggugcagguu

SEQ ID NO: 698044 - RNA, 19 nt, Artificial Sequence
  Description of Artificial Sequence: Synthetic oligonucleotide
caguauagucagggcugca

SEQ ID NO: 698045 - RNA, 19 nt, Artificial Sequence
  Description of Artificial Sequence: Synthetic oligonucleotide
cgauaagcagcaugcaggu

SEQ ID NO: 698046 - RNA, 19 nt, Artificial Sequence
  Description of Artificial Sequence: Synthetic oligonucleotide
ggcagcgagugagggagga

SEQ ID NO: 698047 - RNA, 19 nt, Artificial Sequence
  Description of Artificial Sequence: Synthetic oligonucleotide
ccaggauacaugggaagaa

SEQ ID NO: 698048 - RNA, 19 nt, Artificial Sequence
  Description of Artificial Sequence: Synthetic oligonucleotide
cgugaugcucuaucagcca

SEQ ID NO: 698049 - RNA, 19 nt, Artificial Sequence
  Description of Artificial Sequence: Synthetic oligonucleotide
gguuccuauaggggccaga

SEQ ID NO: 698050 - RNA, 19 nt, Artificial Sequence
  Description of Artificial Sequence: Synthetic oligonucleotide
ggggaaugaccgugcccca

SEQ ID NO: 698051 - RNA, 19 nt, Artificial Sequence
  Description of Artificial Sequence: Synthetic oligonucleotide
gugccccaguccuggaccu

SEQ ID NO: 698052 - RNA, 19 nt, Artificial Sequence
  Description of Artificial Sequence: Synthetic oligonucleotide
ggggcucgaagaugguugu

SEQ ID NO: 698053 - RNA, 19 nt, Artificial Sequence
  Description of Artificial Sequence: Synthetic oligonucleotide
gccguggaugagccgccug

SEQ ID NO: 698054 - RNA, 19 nt, Artificial Sequence
  Description of Artificial Sequence: Synthetic oligonucleotide
cguugugugcccggcgacc

SEQ ID NO: 698055 - RNA, 19 nt, Artificial Sequence
  Description of Artificial Sequence: Synthetic oligonucleotide
gugugcccggcgaccgagc

SEQ ID NO: 698056 - RNA, 19 nt, Artificial Sequence
  Description of Artificial Sequence: Synthetic oligonucleotide
gguucagccgcugcagcgu

SEQ ID NO: 698057 - RNA, 19 nt, Artificial Sequence
  Description of Artificial Sequence: Synthetic oligonucleotide
cauugcaccaaggcucguu

SEQ ID NO: 698058 - RNA, 19 nt, Artificial Sequence
  Description of Artificial Sequence: Synthetic oligonucleotide
ggagucucgugcccgugau

SEQ ID NO: 698059 - RNA, 19 nt, Artificial Sequence
  Description of Artificial Sequence: Synthetic oligonucleotide
acggcaggccggggcauau

SEQ ID NO: 698060 - RNA, 19 nt, Artificial Sequence
  Description of Artificial Sequence: Synthetic oligonucleotide
agacggcaggccggggcau

SEQ ID NO: 698061 - RNA, 19 nt, Artificial Sequence
  Description of Artificial Sequence: Synthetic oligonucleotide
gccccuucacgggccgugg

SEQ ID NO: 698062 - RNA, 19 nt, Artificial Sequence
  Description of Artificial Sequence: Synthetic oligonucleotide
gggcaccccugcccucagg

SEQ ID NO: 698063 - RNA, 19 nt, Artificial Sequence
  Description of Artificial Sequence: Synthetic oligonucleotide
cuccuccggugguggaaaa

SEQ ID NO: 698064 - RNA, 19 nt, Artificial Sequence
  Description of Artificial Sequence: Synthetic oligonucleotide
gggcaugaaugggguucag

SEQ ID NO: 698065 - RNA, 19 nt, Artificial Sequence
  Description of Artificial Sequence: Synthetic oligonucleotide
cccaagcuacagcccaaga

SEQ ID NO: 698066 - RNA, 19 nt, Artificial Sequence
  Description of Artificial Sequence: Synthetic oligonucleotide
cuggugcacguaguucacu

SEQ ID NO: 698067 - RNA, 19 nt, Artificial Sequence
  Description of Artificial Sequence: Synthetic oligonucleotide
gggcaugaggcaggcagcu

SEQ ID NO: 698068 - RNA, 19 nt, Artificial Sequence
  Description of Artificial Sequence: Synthetic oligonucleotide
ggccacccaaugcccucuc

SEQ ID NO: 698069 - RNA, 19 nt, Artificial Sequence
  Description of Artificial Sequence: Synthetic oligonucleotide
ggcauuccccgcccagccu

SEQ ID NO: 698070 - RNA, 19 nt, Artificial Sequence
  Description of Artificial Sequence: Synthetic oligonucleotide
ggaauugaguggggaugau

SEQ ID NO: 698071 - RNA, 19 nt, Artificial Sequence
  Description of Artificial Sequence: Synthetic oligonucleotide
agguugcggugaggacccu

SEQ ID NO: 698072 - RNA, 19 nt, Artificial Sequence
  Description of Artificial Sequence: Synthetic oligonucleotide
caagggcauaaagcccaau

SEQ ID NO: 698073 - RNA, 19 nt, Artificial Sequence
  Description of Artificial Sequence: Synthetic oligonucleotide
ccauugccuguccuguaau

SEQ ID NO: 698074 - RNA, 19 nt, Artificial Sequence
  Description of Artificial Sequence: Synthetic oligonucleotide
gcugcgcuugagguucugu

SEQ ID NO: 698075 - RNA, 19 nt, Artificial Sequence
  Description of Artificial Sequence: Synthetic oligonucleotide
gugcccggcgaccgagcau

SEQ ID NO: 698076 - RNA, 19 nt, Artificial Sequence
  Description of Artificial Sequence: Synthetic oligonucleotide
ccuccuccggugguggaaa

SEQ ID NO: 698077 - RNA, 19 nt, Artificial Sequence
  Description of Artificial Sequence: Synthetic oligonucleotide
ccuccugaggaggauggau

SEQ ID NO: 698078 - RNA, 19 nt, Artificial Sequence
  Description of Artificial Sequence: Synthetic oligonucleotide
cuacagcugguagccccuu

SEQ ID NO: 698079 - RNA, 19 nt, Artificial Sequence
  Description of Artificial Sequence: Synthetic oligonucleotide
ccccuucacgggccgugga

SEQ ID NO: 698080 - RNA, 19 nt, Artificial Sequence
  Description of Artificial Sequence: Synthetic oligonucleotide
cggcgaccgagcaucucaa

SEQ ID NO: 698081 - RNA, 19 nt, Artificial Sequence
  Description of Artificial Sequence: Synthetic oligonucleotide
ccccugcccucaggcauuc

SEQ ID NO: 698082 - RNA, 19 nt, Artificial Sequence
  Description of Artificial Sequence: Synthetic oligonucleotide
ccggggcauaugaggcaua

SEQ ID NO: 698083 - RNA, 19 nt, Artificial Sequence
  Description of Artificial Sequence: Synthetic oligonucleotide
gcccuggcucuguguggua

SEQ ID NO: 698084 - RNA, 19 nt, Artificial Sequence
  Description of Artificial Sequence: Synthetic oligonucleotide
cccggcgaccgagcaucuc

SEQ ID NO: 698085 - RNA, 19 nt, Artificial Sequence
  Description of Artificial Sequence: Synthetic oligonucleotide
ccacaacuccuuggucugu

SEQ ID NO: 698086 - RNA, 19 nt, Artificial Sequence
  Description of Artificial Sequence: Synthetic oligonucleotide
ggccguggaugagccgccu

SEQ ID NO: 698087 - RNA, 19 nt, Artificial Sequence
  Description of Artificial Sequence: Synthetic oligonucleotide
ccucaccauguuggagucu

SEQ ID NO: 698088 - RNA, 19 nt, Artificial Sequence
  Description of Artificial Sequence: Synthetic oligonucleotide
ccggggcucgaagaugguu

SEQ ID NO: 698089 - RNA, 19 nt, Artificial Sequence
  Description of Artificial Sequence: Synthetic oligonucleotide
cgugcccgugaugcucuau

SEQ ID NO: 698090 - RNA, 19 nt, Artificial Sequence
  Description of Artificial Sequence: Synthetic oligonucleotide
ccgcugcccucaccauguu

SEQ ID NO: 698091 - RNA, 19 nt, Artificial Sequence
  Description of Artificial Sequence: Synthetic oligonucleotide
aaauucuaagaacugaguc

SEQ ID NO: 698092 - RNA, 19 nt, Artificial Sequence
  Description of Artificial Sequence: Synthetic oligonucleotide
cuugaguugaucuuggugg

SEQ ID NO: 698093 - RNA, 19 nt, Artificial Sequence
  Description of Artificial Sequence: Synthetic oligonucleotide
uuuagguacagccagcucc

SEQ ID NO: 698094 - RNA, 19 nt, Artificial Sequence
  Description of Artificial Sequence: Synthetic oligonucleotide
aauucuaagaacugaguca

SEQ ID NO: 698095 - RNA, 19 nt, Artificial Sequence
  Description of Artificial Sequence: Synthetic oligonucleotide
uguaugauccuuuagguac

SEQ ID NO: 698096 - RNA, 19 nt, Artificial Sequence
  Description of Artificial Sequence: Synthetic oligonucleotide
accaucauaaaaucgcagc

SEQ ID NO: 698097 - RNA, 19 nt, Artificial Sequence
  Description of Artificial Sequence: Synthetic oligonucleotide
uucacgacuaauuaugugc

SEQ ID NO: 698098 - RNA, 19 nt, Artificial Sequence
  Description of Artificial Sequence: Synthetic oligonucleotide
gugaguuguagcuugaugg

SEQ ID NO: 698099 - RNA, 19 nt, Artificial Sequence
  Description of Artificial Sequence: Synthetic oligonucleotide
gauaccaucauaaaaucgc

SEQ ID NO: 698100 - RNA, 19 nt, Artificial Sequence
  Description of Artificial Sequence: Synthetic oligonucleotide
aaaaucgcagcagaugggc

SEQ ID NO: 698101 - RNA, 19 nt, Artificial Sequence
  Description of Artificial Sequence: Synthetic oligonucleotide
aaagugcggaaaucuaccc

SEQ ID NO: 698102 - RNA, 19 nt, Artificial Sequence
  Description of Artificial Sequence: Synthetic oligonucleotide
aaaagugcggaaaucuacc

SEQ ID NO: 698103 - RNA, 19 nt, Artificial Sequence
  Description of Artificial Sequence: Synthetic oligonucleotide
agcauugacuguuuggccc

SEQ ID NO: 698104 - RNA, 19 nt, Artificial Sequence
  Description of Artificial Sequence: Synthetic oligonucleotide
acuaauuaugugcaccuuc

SEQ ID NO: 698105 - RNA, 19 nt, Artificial Sequence
  Description of Artificial Sequence: Synthetic oligonucleotide
aagugcggaaaucuacccc

SEQ ID NO: 698106 - RNA, 19 nt, Artificial Sequence
  Description of Artificial Sequence: Synthetic oligonucleotide
gaauuggggaacuagggug

SEQ ID NO: 698107 - RNA, 19 nt, Artificial Sequence
  Description of Artificial Sequence: Synthetic oligonucleotide
gaaaucuaccccuagggac

SEQ ID NO: 698108 - RNA, 19 nt, Artificial Sequence
  Description of Artificial Sequence: Synthetic oligonucleotide
aaggaaagaaaguguguag

SEQ ID NO: 698109 - RNA, 19 nt, Artificial Sequence
  Description of Artificial Sequence: Synthetic oligonucleotide
ugcuucacgacuaauuaug

SEQ ID NO: 698110 - RNA, 19 nt, Artificial Sequence
  Description of Artificial Sequence: Synthetic oligonucleotide
ugaaaccuaaauucuaaga

SEQ ID NO: 698111 - RNA, 19 nt, Artificial Sequence
  Description of Artificial Sequence: Synthetic oligonucleotide
aaugggaccuacaaugagg

SEQ ID NO: 698112 - RNA, 19 nt, Artificial Sequence
  Description of Artificial Sequence: Synthetic oligonucleotide
ugauaguaggucuuggcug

SEQ ID NO: 698113 - RNA, 19 nt, Artificial Sequence
  Description of Artificial Sequence: Synthetic oligonucleotide
ugugauagagcgugagugg

SEQ ID NO: 698114 - RNA, 19 nt, Artificial Sequence
  Description of Artificial Sequence: Synthetic oligonucleotide
ggagaugaaaccuaaauuc

SEQ ID NO: 698115 - RNA, 19 nt, Artificial Sequence
  Description of Artificial Sequence: Synthetic oligonucleotide
cacaacgcauguaugaucc

SEQ ID NO: 698116 - RNA, 19 nt, Artificial Sequence
  Description of Artificial Sequence: Synthetic oligonucleotide
uugaauaacaguggcagug

SEQ ID NO: 698117 - RNA, 19 nt, Artificial Sequence
  Description of Artificial Sequence: Synthetic oligonucleotide
caauauggaaguucuuugg

SEQ ID NO: 698118 - RNA, 19 nt, Artificial Sequence
  Description of Artificial Sequence: Synthetic oligonucleotide
aauggaagguugauggcac

SEQ ID NO: 698119 - RNA, 19 nt, Artificial Sequence
  Description of Artificial Sequence: Synthetic oligonucleotide
agcgaagauuuccaaauuc

SEQ ID NO: 698120 - RNA, 19 nt, Artificial Sequence
  Description of Artificial Sequence: Synthetic oligonucleotide
aauaacaguggcagugucg

SEQ ID NO: 698121 - RNA, 19 nt, Artificial Sequence
  Description of Artificial Sequence: Synthetic oligonucleotide
agaguugaagcuucguguc

SEQ ID NO: 698122 - RNA, 19 nt, Artificial Sequence
  Description of Artificial Sequence: Synthetic oligonucleotide
uguaguacugguguggggc

SEQ ID NO: 698123 - RNA, 19 nt, Artificial Sequence
  Description of Artificial Sequence: Synthetic oligonucleotide
uauggaaguucuuuggggu

SEQ ID NO: 698124 - RNA, 19 nt, Artificial Sequence
  Description of Artificial Sequence: Synthetic oligonucleotide
uugugauagagcgugagug

SEQ ID NO: 698125 - RNA, 19 nt, Artificial Sequence
  Description of Artificial Sequence: Synthetic oligonucleotide
cuugcgaucacaacgcaug

SEQ ID NO: 698126 - RNA, 19 nt, Artificial Sequence
  Description of Artificial Sequence: Synthetic oligonucleotide
uuaugugcaccuucugccg

SEQ ID NO: 698127 - RNA, 19 nt, Artificial Sequence
  Description of Artificial Sequence: Synthetic oligonucleotide
acgacuaauuaugugcacc

SEQ ID NO: 698128 - RNA, 19 nt, Artificial Sequence
  Description of Artificial Sequence: Synthetic oligonucleotide
uccuacucuguucaggggc

SEQ ID NO: 698129 - RNA, 19 nt, Artificial Sequence
  Description of Artificial Sequence: Synthetic oligonucleotide
aacgccaccuccaucuugc

SEQ ID NO: 698130 - RNA, 19 nt, Artificial Sequence
  Description of Artificial Sequence: Synthetic oligonucleotide
guaguuguagucuugaaua

SEQ ID NO: 698131 - RNA, 19 nt, Artificial Sequence
  Description of Artificial Sequence: Synthetic oligonucleotide
uuuagugccugugaugaag

SEQ ID NO: 698132 - RNA, 19 nt, Artificial Sequence
  Description of Artificial Sequence: Synthetic oligonucleotide
ucacgacuaauuaugugca

SEQ ID NO: 698133 - RNA, 19 nt, Artificial Sequence
  Description of Artificial Sequence: Synthetic oligonucleotide
ugaguuguagcuugauggc

SEQ ID NO: 698134 - RNA, 19 nt, Artificial Sequence
  Description of Artificial Sequence: Synthetic oligonucleotide
caaggaaucagugugaaga

SEQ ID NO: 698135 - RNA, 19 nt, Artificial Sequence
  Description of Artificial Sequence: Synthetic oligonucleotide
cuagggugaagccugcugg

SEQ ID NO: 698136 - RNA, 19 nt, Artificial Sequence
  Description of Artificial Sequence: Synthetic oligonucleotide
uauucacagacaagaguug

SEQ ID NO: 698137 - RNA, 19 nt, Artificial Sequence
  Description of Artificial Sequence: Synthetic oligonucleotide
gaucacaacgcauguauga

SEQ ID NO: 698138 - RNA, 19 nt, Artificial Sequence
  Description of Artificial Sequence: Synthetic oligonucleotide
cauauuuccucccgggacc

SEQ ID NO: 698139 - RNA, 19 nt, Artificial Sequence
  Description of Artificial Sequence: Synthetic oligonucleotide
acuugaguugaucuuggug

SEQ ID NO: 698140 - RNA, 19 nt, Artificial Sequence
  Description of Artificial Sequence: Synthetic oligonucleotide
agugcggaaaucuaccccu

SEQ ID NO: 698141 - RNA, 19 nt, Artificial Sequence
  Description of Artificial Sequence: Synthetic oligonucleotide
aaaucuaccccuagggacu

SEQ ID NO: 698142 - RNA, 19 nt, Artificial Sequence
  Description of Artificial Sequence: Synthetic oligonucleotide
uaccccuagggacugaaug

SEQ ID NO: 698143 - RNA, 19 nt, Artificial Sequence
  Description of Artificial Sequence: Synthetic oligonucleotide
guauggguagaugugcucg

SEQ ID NO: 698144 - RNA, 19 nt, Artificial Sequence
  Description of Artificial Sequence: Synthetic oligonucleotide
uaccaucauaaaaucgcag

SEQ ID NO: 698145 - RNA, 19 nt, Artificial Sequence
  Description of Artificial Sequence: Synthetic oligonucleotide
aauccccaaccguucagag

SEQ ID NO: 698146 - RNA, 19 nt, Artificial Sequence
  Description of Artificial Sequence: Synthetic oligonucleotide
cauaaaaucgcagcagaug

SEQ ID NO: 698147 - RNA, 19 nt, Artificial Sequence
  Description of Artificial Sequence: Synthetic oligonucleotide
cacauuacgguugcgacag

SEQ ID NO: 698148 - RNA, 19 nt, Artificial Sequence
  Description of Artificial Sequence: Synthetic oligonucleotide
agauaccaucauaaaaucg

SEQ ID NO: 698149 - RNA, 19 nt, Artificial Sequence
  Description of Artificial Sequence: Synthetic oligonucleotide
cuggaugugggcacggucc

SEQ ID NO: 698150 - RNA, 19 nt, Artificial Sequence
  Description of Artificial Sequence: Synthetic oligonucleotide
ugcgcagugaguuguagcu

SEQ ID NO: 698151 - RNA, 19 nt, Artificial Sequence
  Description of Artificial Sequence: Synthetic oligonucleotide
aguuguagucuugaauaac

SEQ ID NO: 698152 - RNA, 19 nt, Artificial Sequence
  Description of Artificial Sequence: Synthetic oligonucleotide
uucccuagugccauggggu

SEQ ID NO: 698153 - RNA, 19 nt, Artificial Sequence
  Description of Artificial Sequence: Synthetic oligonucleotide
accagcauugacuguuugg

SEQ ID NO: 698154 - RNA, 19 nt, Artificial Sequence
  Description of Artificial Sequence: Synthetic oligonucleotide
gaaugggaccuacaaugag

SEQ ID NO: 698155 - RNA, 19 nt, Artificial Sequence
  Description of Artificial Sequence: Synthetic oligonucleotide
cuugcgacugcgcagugag

SEQ ID NO: 698156 - RNA, 19 nt, Artificial Sequence
  Description of Artificial Sequence: Synthetic oligonucleotide
agugaguuguagcuugaug

SEQ ID NO: 698157 - RNA, 19 nt, Artificial Sequence
  Description of Artificial Sequence: Synthetic oligonucleotide
aaucgcagcagaugggcaa

SEQ ID NO: 698158 - RNA, 19 nt, Artificial Sequence
  Description of Artificial Sequence: Synthetic oligonucleotide
aaugagguuccaauuggcu

SEQ ID NO: 698159 - RNA, 19 nt, Artificial Sequence
  Description of Artificial Sequence: Synthetic oligonucleotide
gaagaucaauggaagguug

SEQ ID NO: 698160 - RNA, 19 nt, Artificial Sequence
  Description of Artificial Sequence: Synthetic oligonucleotide
agccuaaaggagcuaacug

SEQ ID NO: 698161 - RNA, 19 nt, Artificial Sequence
  Description of Artificial Sequence: Synthetic oligonucleotide
aauuggggaacuaggguga

SEQ ID NO: 698162 - RNA, 19 nt, Artificial Sequence
  Description of Artificial Sequence: Synthetic oligonucleotide
ucaauggaagguugauggc

SEQ ID NO: 698163 - RNA, 19 nt, Artificial Sequence
  Description of Artificial Sequence: Synthetic oligonucleotide
uuacgguugcgacaguggu

SEQ ID NO: 698164 - RNA, 19 nt, Artificial Sequence
  Description of Artificial Sequence: Synthetic oligonucleotide
cucgccugcuucuagcagg

SEQ ID NO: 698165 - RNA, 19 nt, Artificial Sequence
  Description of Artificial Sequence: Synthetic oligonucleotide
uuuggacucccgucgagga

SEQ ID NO: 698166 - RNA, 19 nt, Artificial Sequence
  Description of Artificial Sequence: Synthetic oligonucleotide
uugacuguuuggcccugcg

SEQ ID NO: 698167 - RNA, 19 nt, Artificial Sequence
  Description of Artificial Sequence: Synthetic oligonucleotide
gaagcgaagauuuccaaau

SEQ ID NO: 698168 - RNA, 19 nt, Artificial Sequence
  Description of Artificial Sequence: Synthetic oligonucleotide
gguccuacucuguucaggg

SEQ ID NO: 698169 - RNA, 19 nt, Artificial Sequence
  Description of Artificial Sequence: Synthetic oligonucleotide
gaucaauggaagguugaug

SEQ ID NO: 698170 - RNA, 19 nt, Artificial Sequence
  Description of Artificial Sequence: Synthetic oligonucleotide
uaguaccugggacaauccc

SEQ ID NO: 698171 - RNA, 19 nt, Artificial Sequence
  Description of Artificial Sequence: Synthetic oligonucleotide
gugauagagcgugaguggg

SEQ ID NO: 698172 - RNA, 19 nt, Artificial Sequence
  Description of Artificial Sequence: Synthetic oligonucleotide
gcaauauggaaguucuuug

SEQ ID NO: 698173 - RNA, 19 nt, Artificial Sequence
  Description of Artificial Sequence: Synthetic oligonucleotide
acuggaugugggcacgguc

SEQ ID NO: 698174 - RNA, 19 nt, Artificial Sequence
  Description of Artificial Sequence: Synthetic oligonucleotide
uccgccaaguucccuagug

SEQ ID NO: 698175 - RNA, 19 nt, Artificial Sequence
  Description of Artificial Sequence: Synthetic oligonucleotide
acaccacccaagcaugauc

SEQ ID NO: 698176 - RNA, 19 nt, Artificial Sequence
  Description of Artificial Sequence: Synthetic oligonucleotide
ucagggaauccccaaccgu

SEQ ID NO: 698177 - RNA, 19 nt, Artificial Sequence
  Description of Artificial Sequence: Synthetic oligonucleotide
aucccugguguuuuccggg

SEQ ID NO: 698178 - RNA, 19 nt, Artificial Sequence
  Description of Artificial Sequence: Synthetic oligonucleotide
agacuggcccuccccaccc

SEQ ID NO: 698179 - RNA, 19 nt, Artificial Sequence
  Description of Artificial Sequence: Synthetic oligonucleotide
auuacgguugcgacagugg

SEQ ID NO: 698180 - RNA, 19 nt, Artificial Sequence
  Description of Artificial Sequence: Synthetic oligonucleotide
uguguagucgcugggugug

SEQ ID NO: 698181 - RNA, 19 nt, Artificial Sequence
  Description of Artificial Sequence: Synthetic oligonucleotide
gucagggaauccccaaccg

SEQ ID NO: 698182 - RNA, 19 nt, Artificial Sequence
  Description of Artificial Sequence: Synthetic oligonucleotide
gaguugaagcuucgugucc

SEQ ID NO: 698183 - RNA, 19 nt, Artificial Sequence
  Description of Artificial Sequence: Synthetic oligonucleotide
agugccaugggguaccuuu

SEQ ID NO: 698184 - RNA, 19 nt, Artificial Sequence
  Description of Artificial Sequence: Synthetic oligonucleotide
ggaaucagugugaagauca

SEQ ID NO: 698185 - RNA, 19 nt, Artificial Sequence
  Description of Artificial Sequence: Synthetic oligonucleotide
cuucacgacuaauuaugug

SEQ ID NO: 698186 - RNA, 19 nt, Artificial Sequence
  Description of Artificial Sequence: Synthetic oligonucleotide
ugccgcuuaaggaaagaaa

SEQ ID NO: 698187 - RNA, 19 nt, Artificial Sequence
  Description of Artificial Sequence: Synthetic oligonucleotide
acucaaaagugcggaaauc

SEQ ID NO: 698188 - RNA, 19 nt, Artificial Sequence
  Description of Artificial Sequence: Synthetic oligonucleotide
aggagcuaacugaagguuc

SEQ ID NO: 698189 - RNA, 19 nt, Artificial Sequence
  Description of Artificial Sequence: Synthetic oligonucleotide
accccgugcauauuuccuc

SEQ ID NO: 698190 - RNA, 19 nt, Artificial Sequence
  Description of Artificial Sequence: Synthetic oligonucleotide
gaauaacaguggcaguguc

SEQ ID NO: 698191 - RNA, 19 nt, Artificial Sequence
  Description of Artificial Sequence: Synthetic oligonucleotide
ugcggaaaucuaccccuag

SEQ ID NO: 698192 - RNA, 19 nt, Artificial Sequence
  Description of Artificial Sequence: Synthetic oligonucleotide
ugauagagcgugagugggu

SEQ ID NO: 698193 - RNA, 19 nt, Artificial Sequence
  Description of Artificial Sequence: Synthetic oligonucleotide
cugacccugcauuuugccc

SEQ ID NO: 698194 - RNA, 19 nt, Artificial Sequence
  Description of Artificial Sequence: Synthetic oligonucleotide
ucacaacgcauguaugauc

SEQ ID NO: 698195 - RNA, 19 nt, Artificial Sequence
  Description of Artificial Sequence: Synthetic oligonucleotide
agcgugagugggucuggcc

SEQ ID NO: 698196 - RNA, 19 nt, Artificial Sequence
  Description of Artificial Sequence: Synthetic oligonucleotide
auccccaaccguucagagg

SEQ ID NO: 698197 - RNA, 19 nt, Artificial Sequence
  Description of Artificial Sequence: Synthetic oligonucleotide
auuugcagauaccaucaua

SEQ ID NO: 698198 - RNA, 19 nt, Artificial Sequence
  Description of Artificial Sequence: Synthetic oligonucleotide
ggaacuagggugaagccug

SEQ ID NO: 698199 - RNA, 19 nt, Artificial Sequence
  Description of Artificial Sequence: Synthetic oligonucleotide
aaggagcuaacugaagguu

SEQ ID NO: 698200 - RNA, 19 nt, Artificial Sequence
  Description of Artificial Sequence: Synthetic oligonucleotide
gauccgccaaguucccuag

SEQ ID NO: 698201 - RNA, 19 nt, Artificial Sequence
  Description of Artificial Sequence: Synthetic oligonucleotide
cucgacgccggccuucucg

SEQ ID NO: 698202 - RNA, 19 nt, Artificial Sequence
  Description of Artificial Sequence: Synthetic oligonucleotide
gauagagcgugaguggguc

SEQ ID NO: 698203 - RNA, 19 nt, Artificial Sequence
  Description of Artificial Sequence: Synthetic oligonucleotide
uauggguagaugugcucgu

SEQ ID NO: 698204 - RNA, 19 nt, Artificial Sequence
  Description of Artificial Sequence: Synthetic oligonucleotide
cauguaugauccuuuaggu

SEQ ID NO: 698205 - RNA, 19 nt, Artificial Sequence
  Description of Artificial Sequence: Synthetic oligonucleotide
aagcgaagauuuccaaauu

SEQ ID NO: 698206 - RNA, 19 nt, Artificial Sequence
  Description of Artificial Sequence: Synthetic oligonucleotide
uguauggguagaugugcuc

SEQ ID NO: 698207 - RNA, 19 nt, Artificial Sequence
  Description of Artificial Sequence: Synthetic oligonucleotide
cagauuggggaugacauca

SEQ ID NO: 698208 - RNA, 19 nt, Artificial Sequence
  Description of Artificial Sequence: Synthetic oligonucleotide
ucuugcgaucacaacgcau

SEQ ID NO: 698209 - RNA, 19 nt, Artificial Sequence
  Description of Artificial Sequence: Synthetic oligonucleotide
aguugaagcuucguguccu

SEQ ID NO: 698210 - RNA, 19 nt, Artificial Sequence
  Description of Artificial Sequence: Synthetic oligonucleotide
agcagauuggggaugacau

SEQ ID NO: 698211 - RNA, 19 nt, Artificial Sequence
  Description of Artificial Sequence: Synthetic oligonucleotide
guuuggacucccgucgagg

SEQ ID NO: 698212 - RNA, 19 nt, Artificial Sequence
  Description of Artificial Sequence: Synthetic oligonucleotide
aggaaucagugugaagauc

SEQ ID NO: 698213 - RNA, 19 nt, Artificial Sequence
  Description of Artificial Sequence: Synthetic oligonucleotide
ucgacgccggccuucucgg

SEQ ID NO: 698214 - RNA, 19 nt, Artificial Sequence
  Description of Artificial Sequence: Synthetic oligonucleotide
aguaccugggacaaucccu

SEQ ID NO: 698215 - RNA, 19 nt, Artificial Sequence
  Description of Artificial Sequence: Synthetic oligonucleotide
cagcauugacuguuuggcc

SEQ ID NO: 698216 - RNA, 19 nt, Artificial Sequence
  Description of Artificial Sequence: Synthetic oligonucleotide
gaugugggcacgguccuug

SEQ ID NO: 698217 - RNA, 19 nt, Artificial Sequence
  Description of Artificial Sequence: Synthetic oligonucleotide
ucugcacuugcgacugcgc

SEQ ID NO: 698218 - RNA, 19 nt, Artificial Sequence
  Description of Artificial Sequence: Synthetic oligonucleotide
auaccaucauaaaaucgca

SEQ ID NO: 698219 - RNA, 19 nt, Artificial Sequence
  Description of Artificial Sequence: Synthetic oligonucleotide
cagccuacauguaguacug

SEQ ID NO: 698220 - RNA, 19 nt, Artificial Sequence
  Description of Artificial Sequence: Synthetic oligonucleotide
uugcgaucacaacgcaugu

SEQ ID NO: 698221 - RNA, 19 nt, Artificial Sequence
  Description of Artificial Sequence: Synthetic oligonucleotide
augggaccuacaaugaggu

SEQ ID NO: 698222 - RNA, 19 nt, Artificial Sequence
  Description of Artificial Sequence: Synthetic oligonucleotide
gcuccguucagccacacca

SEQ ID NO: 698223 - RNA, 19 nt, Artificial Sequence
  Description of Artificial Sequence: Synthetic oligonucleotide
acucccgucgaggaccucg

SEQ ID NO: 698224 - RNA, 19 nt, Artificial Sequence
  Description of Artificial Sequence: Synthetic oligonucleotide
aaucuaccccuagggacug

SEQ ID NO: 698225 - RNA, 19 nt, Artificial Sequence
  Description of Artificial Sequence: Synthetic oligonucleotide
caauggaagguugauggca

SEQ ID NO: 698226 - RNA, 19 nt, Artificial Sequence
  Description of Artificial Sequence: Synthetic oligonucleotide
uagagcgugagugggucug

SEQ ID NO: 698227 - RNA, 19 nt, Artificial Sequence
  Description of Artificial Sequence: Synthetic oligonucleotide
gggaccuacaaugagguuc

SEQ ID NO: 698228 - RNA, 19 nt, Artificial Sequence
  Description of Artificial Sequence: Synthetic oligonucleotide
cauuacgguugcgacagug

SEQ ID NO: 698229 - RNA, 19 nt, Artificial Sequence
  Description of Artificial Sequence: Synthetic oligonucleotide
ucgccugcuucuagcaggc

SEQ ID NO: 698230 - RNA, 19 nt, Artificial Sequence
  Description of Artificial Sequence: Synthetic oligonucleotide
aggaccucgacgccggccu

SEQ ID NO: 698231 - RNA, 19 nt, Artificial Sequence
  Description of Artificial Sequence: Synthetic oligonucleotide
cuggacucugggguuaggg

SEQ ID NO: 698232 - RNA, 19 nt, Artificial Sequence
  Description of Artificial Sequence: Synthetic oligonucleotide
gacuguuuggcccugcgau

SEQ ID NO: 698233 - RNA, 19 nt, Artificial Sequence
  Description of Artificial Sequence: Synthetic oligonucleotide
aaaucgcagcagaugggca

SEQ ID NO: 698234 - RNA, 19 nt, Artificial Sequence
  Description of Artificial Sequence: Synthetic oligonucleotide
caauucccuugugauagag

SEQ ID NO: 698235 - RNA, 19 nt, Artificial Sequence
  Description of Artificial Sequence: Synthetic oligonucleotide
uggaagguugauggcacac

SEQ ID NO: 698236 - RNA, 19 nt, Artificial Sequence
  Description of Artificial Sequence: Synthetic oligonucleotide
ucggguuuggacucccguc

SEQ ID NO: 698237 - RNA, 19 nt, Artificial Sequence
  Description of Artificial Sequence: Synthetic oligonucleotide
cagguacauguauggguag

SEQ ID NO: 698238 - RNA, 19 nt, Artificial Sequence
  Description of Artificial Sequence: Synthetic oligonucleotide
cacggguaguaccugggac

SEQ ID NO: 698239 - RNA, 19 nt, Artificial Sequence
  Description of Artificial Sequence: Synthetic oligonucleotide
acagccuaaaggagcuaac

SEQ ID NO: 698240 - RNA, 19 nt, Artificial Sequence
  Description of Artificial Sequence: Synthetic oligonucleotide
aucacaacgcauguaugau

SEQ ID NO: 698241 - RNA, 19 nt, Artificial Sequence
  Description of Artificial Sequence: Synthetic oligonucleotide
ggaaaucuaccccuaggga

SEQ ID NO: 698242 - RNA, 19 nt, Artificial Sequence
  Description of Artificial Sequence: Synthetic oligonucleotide
agauccgccaaguucccua

SEQ ID NO: 698243 - RNA, 19 nt, Artificial Sequence
  Description of Artificial Sequence: Synthetic oligonucleotide
gguaguaccugggacaauc

SEQ ID NO: 698244 - RNA, 19 nt, Artificial Sequence
  Description of Artificial Sequence: Synthetic oligonucleotide
cuagggacugcacaaggaa

SEQ ID NO: 698245 - RNA, 19 nt, Artificial Sequence
  Description of Artificial Sequence: Synthetic oligonucleotide
ugcgacugcgcagugaguu

SEQ ID NO: 698246 - RNA, 19 nt, Artificial Sequence
  Description of Artificial Sequence: Synthetic oligonucleotide
aacgcauguaugauccuuu

SEQ ID NO: 698247 - RNA, 19 nt, Artificial Sequence
  Description of Artificial Sequence: Synthetic oligonucleotide
gguuagggaggcgaggaag

SEQ ID NO: 698248 - RNA, 19 nt, Artificial Sequence
  Description of Artificial Sequence: Synthetic oligonucleotide
agcuccguucagccacacc

SEQ ID NO: 698249 - RNA, 19 nt, Artificial Sequence
  Description of Artificial Sequence: Synthetic oligonucleotide
ccgucgaggaccucgacgc

SEQ ID NO: 698250 - RNA, 19 nt, Artificial Sequence
  Description of Artificial Sequence: Synthetic oligonucleotide
ucgcgcacauuacgguugc

SEQ ID NO: 698251 - RNA, 19 nt, Artificial Sequence
  Description of Artificial Sequence: Synthetic oligonucleotide
uugcgacagugguagccag

SEQ ID NO: 698252 - RNA, 19 nt, Artificial Sequence
  Description of Artificial Sequence: Synthetic oligonucleotide
auggaaguucuuuggggua

SEQ ID NO: 698253 - RNA, 19 nt, Artificial Sequence
  Description of Artificial Sequence: Synthetic oligonucleotide
auucaggcagcaauaugga

SEQ ID NO: 698254 - RNA, 19 nt, Artificial Sequence
  Description of Artificial Sequence: Synthetic oligonucleotide
cacccaagcaugauccuca

SEQ ID NO: 698255 - RNA, 19 nt, Artificial Sequence
  Description of Artificial Sequence: Synthetic oligonucleotide
cacgacuaauuaugugcac

SEQ ID NO: 698256 - RNA, 19 nt, Artificial Sequence
  Description of Artificial Sequence: Synthetic oligonucleotide
gcggaaaucuaccccuagg

SEQ ID NO: 698257 - RNA, 19 nt, Artificial Sequence
  Description of Artificial Sequence: Synthetic oligonucleotide
caagcaugauccucagaca

SEQ ID NO: 698258 - RNA, 19 nt, Artificial Sequence
  Description of Artificial Sequence: Synthetic oligonucleotide
accugucccucgaagcggc

SEQ ID NO: 698259 - RNA, 19 nt, Artificial Sequence
  Description of Artificial Sequence: Synthetic oligonucleotide
agccagguacauguauggg

SEQ ID NO: 698260 - RNA, 19 nt, Artificial Sequence
  Description of Artificial Sequence: Synthetic oligonucleotide
ggcuggaacucaaaagugc

SEQ ID NO: 698261 - RNA, 19 nt, Artificial Sequence
  Description of Artificial Sequence: Synthetic oligonucleotide
cugguguuuuccggggugg

SEQ ID NO: 698262 - RNA, 19 nt, Artificial Sequence
  Description of Artificial Sequence: Synthetic oligonucleotide
cugauaguaggucuuggcu

SEQ ID NO: 698263 - RNA, 19 nt, Artificial Sequence
  Description of Artificial Sequence: Synthetic oligonucleotide
uagucgcuggguguggaca

SEQ ID NO: 698264 - RNA, 19 nt, Artificial Sequence
  Description of Artificial Sequence: Synthetic oligonucleotide
uacgguugcgacaguggua

SEQ ID NO: 698265 - RNA, 19 nt, Artificial Sequence
  Description of Artificial Sequence: Synthetic oligonucleotide
ggccagauggacaucucgg

SEQ ID NO: 698266 - RNA, 19 nt, Artificial Sequence
  Description of Artificial Sequence: Synthetic oligonucleotide
uugccaugccaggugaccu

SEQ ID NO: 698267 - RNA, 19 nt, Artificial Sequence
  Description of Artificial Sequence: Synthetic oligonucleotide
ugguuccucggguuuggac

SEQ ID NO: 698268 - RNA, 19 nt, Artificial Sequence
  Description of Artificial Sequence: Synthetic oligonucleotide
ugugcucguccugauagua

SEQ ID NO: 698269 - RNA, 19 nt, Artificial Sequence
  Description of Artificial Sequence: Synthetic oligonucleotide
cuuuagguacagccagcuc

SEQ ID NO: 698270 - RNA, 19 nt, Artificial Sequence
  Description of Artificial Sequence: Synthetic oligonucleotide
gaauccccaaccguucaga

SEQ ID NO: 698271 - RNA, 19 nt, Artificial Sequence
  Description of Artificial Sequence: Synthetic oligonucleotide
guaugauccuuuagguaca

SEQ ID NO: 698272 - RNA, 19 nt, Artificial Sequence
  Description of Artificial Sequence: Synthetic oligonucleotide
ccaucauaaaaucgcagca

SEQ ID NO: 698273 - RNA, 19 nt, Artificial Sequence
  Description of Artificial Sequence: Synthetic oligonucleotide
auagagcgugagugggucu

SEQ ID NO: 698274 - RNA, 19 nt, Artificial Sequence
  Description of Artificial Sequence: Synthetic oligonucleotide
ccuacucuguucaggggcc

SEQ ID NO: 698275 - RNA, 19 nt, Artificial Sequence
  Description of Artificial Sequence: Synthetic oligonucleotide
ggcuucgcgcacauuacgg

SEQ ID NO: 698276 - RNA, 19 nt, Artificial Sequence
  Description of Artificial Sequence: Synthetic oligonucleotide
ccuagggacugaaugggac

SEQ ID NO: 698277 - RNA, 19 nt, Artificial Sequence
  Description of Artificial Sequence: Synthetic oligonucleotide
auauuuccucccgggaccu

SEQ ID NO: 698278 - RNA, 19 nt, Artificial Sequence
  Description of Artificial Sequence: Synthetic oligonucleotide
guucagaggcccuugcgcu

SEQ ID NO: 698279 - RNA, 19 nt, Artificial Sequence
  Description of Artificial Sequence: Synthetic oligonucleotide
guugcgacagugguagcca

SEQ ID NO: 698280 - RNA, 19 nt, Artificial Sequence
  Description of Artificial Sequence: Synthetic oligonucleotide
aucuugcgaucacaacgca

SEQ ID NO: 698281 - RNA, 19 nt, Artificial Sequence
  Description of Artificial Sequence: Synthetic oligonucleotide
auggaagguugauggcaca

SEQ ID NO: 698282 - RNA, 19 nt, Artificial Sequence
  Description of Artificial Sequence: Synthetic oligonucleotide
auggguagaugugcucguc

SEQ ID NO: 698283 - RNA, 19 nt, Artificial Sequence
  Description of Artificial Sequence: Synthetic oligonucleotide
gguugcgacagugguagcc

SEQ ID NO: 698284 - RNA, 19 nt, Artificial Sequence
  Description of Artificial Sequence: Synthetic oligonucleotide
ggaagcgaagauuuccaaa

SEQ ID NO: 698285 - RNA, 19 nt, Artificial Sequence
  Description of Artificial Sequence: Synthetic oligonucleotide
gccuagggacugcacaagg

SEQ ID NO: 698286 - RNA, 19 nt, Artificial Sequence
  Description of Artificial Sequence: Synthetic oligonucleotide
agcuaacugaagguuccca

SEQ ID NO: 698287 - RNA, 19 nt, Artificial Sequence
  Description of Artificial Sequence: Synthetic oligonucleotide
acaacgcauguaugauccu

SEQ ID NO: 698288 - RNA, 19 nt, Artificial Sequence
  Description of Artificial Sequence: Synthetic oligonucleotide
agugucggcccaggccugc

SEQ ID NO: 698289 - RNA, 19 nt, Artificial Sequence
  Description of Artificial Sequence: Synthetic oligonucleotide
gguuccucggguuuggacu

SEQ ID NO: 698290 - RNA, 19 nt, Artificial Sequence
  Description of Artificial Sequence: Synthetic oligonucleotide
ucuaccccuagggacugaa

SEQ ID NO: 698291 - RNA, 19 nt, Artificial Sequence
  Description of Artificial Sequence: Synthetic oligonucleotide
gagcuaacugaagguuccc

SEQ ID NO: 698292 - RNA, 19 nt, Artificial Sequence
  Description of Artificial Sequence: Synthetic oligonucleotide
ggaauccccaaccguucag

SEQ ID NO: 698293 - RNA, 19 nt, Artificial Sequence
  Description of Artificial Sequence: Synthetic oligonucleotide
caccugucccucgaagcgg

SEQ ID NO: 698294 - RNA, 19 nt, Artificial Sequence
  Description of Artificial Sequence: Synthetic oligonucleotide
ucccuagugccauggggua

SEQ ID NO: 698295 - RNA, 19 nt, Artificial Sequence
  Description of Artificial Sequence: Synthetic oligonucleotide
cucguccugauaguagguc

SEQ ID NO: 698296 - RNA, 19 nt, Artificial Sequence
  Description of Artificial Sequence: Synthetic oligonucleotide
augugcucguccugauagu

SEQ ID NO: 698297 - RNA, 19 nt, Artificial Sequence
  Description of Artificial Sequence: Synthetic oligonucleotide
gucuggccgaccaggagug

SEQ ID NO: 698298 - RNA, 19 nt, Artificial Sequence
  Description of Artificial Sequence: Synthetic oligonucleotide
gugcucguccugauaguag

SEQ ID NO: 698299 - RNA, 19 nt, Artificial Sequence
  Description of Artificial Sequence: Synthetic oligonucleotide
cacaccaugaacgccaccu

SEQ ID NO: 698300 - RNA, 19 nt, Artificial Sequence
  Description of Artificial Sequence: Synthetic oligonucleotide
ggggaacuagggugaagcc

SEQ ID NO: 698301 - RNA, 19 nt, Artificial Sequence
  Description of Artificial Sequence: Synthetic oligonucleotide
cguucagaggcccuugcgc

SEQ ID NO: 698302 - RNA, 19 nt, Artificial Sequence
  Description of Artificial Sequence: Synthetic oligonucleotide
acgcauguaugauccuuua

SEQ ID NO: 698303 - RNA, 19 nt, Artificial Sequence
  Description of Artificial Sequence: Synthetic oligonucleotide
gggagaugaaaccuaaauu

SEQ ID NO: 698304 - RNA, 19 nt, Artificial Sequence
  Description of Artificial Sequence: Synthetic oligonucleotide
gguuuggacucccgucgag

SEQ ID NO: 698305 - RNA, 19 nt, Artificial Sequence
  Description of Artificial Sequence: Synthetic oligonucleotide
gcugacuucugggccacgg

SEQ ID NO: 698306 - RNA, 19 nt, Artificial Sequence
  Description of Artificial Sequence: Synthetic oligonucleotide
guagucgcuggguguggac

SEQ ID NO: 698307 - RNA, 19 nt, Artificial Sequence
  Description of Artificial Sequence: Synthetic oligonucleotide
gcacauuacgguugcgaca

SEQ ID NO: 698308 - RNA, 19 nt, Artificial Sequence
  Description of Artificial Sequence: Synthetic oligonucleotide
gcccuuguccaaugcaggc

SEQ ID NO: 698309 - RNA, 19 nt, Artificial Sequence
  Description of Artificial Sequence: Synthetic oligonucleotide
ccugacccugcauuuugcc

SEQ ID NO: 698310 - RNA, 19 nt, Artificial Sequence
  Description of Artificial Sequence: Synthetic oligonucleotide
cgaggaagcgaagauuucc

SEQ ID NO: 698311 - RNA, 19 nt, Artificial Sequence
  Description of Artificial Sequence: Synthetic oligonucleotide
cggguuuggacucccgucg

SEQ ID NO: 698312 - RNA, 19 nt, Artificial Sequence
  Description of Artificial Sequence: Synthetic oligonucleotide
cuugugauagagcgugagu

SEQ ID NO: 698313 - RNA, 19 nt, Artificial Sequence
  Description of Artificial Sequence: Synthetic oligonucleotide
ugcgaaggccacgccugag

SEQ ID NO: 698314 - RNA, 19 nt, Artificial Sequence
  Description of Artificial Sequence: Synthetic oligonucleotide
gauggacaucucggagacc

SEQ ID NO: 698315 - RNA, 19 nt, Artificial Sequence
  Description of Artificial Sequence: Synthetic oligonucleotide
ggcccuuguccaaugcagg

SEQ ID NO: 698316 - RNA, 19 nt, Artificial Sequence
  Description of Artificial Sequence: Synthetic oligonucleotide
cgugcauauuuccucccgg

SEQ ID NO: 698317 - RNA, 19 nt, Artificial Sequence
  Description of Artificial Sequence: Synthetic oligonucleotide
gggccuagguccuggucag

SEQ ID NO: 698318 - RNA, 19 nt, Artificial Sequence
  Description of Artificial Sequence: Synthetic oligonucleotide
guuguagcuugauggcacu

SEQ ID NO: 698319 - RNA, 19 nt, Artificial Sequence
  Description of Artificial Sequence: Synthetic oligonucleotide
ucuggccgaccaggagugg

SEQ ID NO: 698320 - RNA, 19 nt, Artificial Sequence
  Description of Artificial Sequence: Synthetic oligonucleotide
cccgucgaggaccucgacg

SEQ ID NO: 698321 - RNA, 19 nt, Artificial Sequence
  Description of Artificial Sequence: Synthetic oligonucleotide
gaggcgaggaagcgaagau

SEQ ID NO: 698322 - RNA, 19 nt, Artificial Sequence
  Description of Artificial Sequence: Synthetic oligonucleotide
cgcacauuacgguugcgac

SEQ ID NO: 698323 - RNA, 19 nt, Artificial Sequence
  Description of Artificial Sequence: Synthetic oligonucleotide
accuacaaugagguuccaa

SEQ ID NO: 698324 - RNA, 19 nt, Artificial Sequence
  Description of Artificial Sequence: Synthetic oligonucleotide
ugguguuuuccgggguggu

SEQ ID NO: 698325 - RNA, 19 nt, Artificial Sequence
  Description of Artificial Sequence: Synthetic oligonucleotide
gccagguacauguaugggu

SEQ ID NO: 698326 - RNA, 19 nt, Artificial Sequence
  Description of Artificial Sequence: Synthetic oligonucleotide
ccgugcauauuuccucccg

SEQ ID NO: 698327 - RNA, 19 nt, Artificial Sequence
  Description of Artificial Sequence: Synthetic oligonucleotide
gcagugucggcccaggccu

SEQ ID NO: 698328 - RNA, 19 nt, Artificial Sequence
  Description of Artificial Sequence: Synthetic oligonucleotide
acgccggccuucucgggcu

SEQ ID NO: 698329 - RNA, 19 nt, Artificial Sequence
  Description of Artificial Sequence: Synthetic oligonucleotide
uugcgacugcgcagugagu

SEQ ID NO: 698330 - RNA, 19 nt, Artificial Sequence
  Description of Artificial Sequence: Synthetic oligonucleotide
ccccuagggacugaauggg

SEQ ID NO: 698331 - RNA, 19 nt, Artificial Sequence
  Description of Artificial Sequence: Synthetic oligonucleotide
ccagccuacauguaguacu

SEQ ID NO: 698332 - RNA, 19 nt, Artificial Sequence
  Description of Artificial Sequence: Synthetic oligonucleotide
acuugcgacugcgcaguga

SEQ ID NO: 698333 - RNA, 19 nt, Artificial Sequence
  Description of Artificial Sequence: Synthetic oligonucleotide
aucgcagcagaugggcaaa

SEQ ID NO: 698334 - RNA, 19 nt, Artificial Sequence
  Description of Artificial Sequence: Synthetic oligonucleotide
uuguagcuugauggcacuu

SEQ ID NO: 698335 - RNA, 19 nt, Artificial Sequence
  Description of Artificial Sequence: Synthetic oligonucleotide
cagggaauccccaaccguu

SEQ ID NO: 698336 - RNA, 19 nt, Artificial Sequence
  Description of Artificial Sequence: Synthetic oligonucleotide
ggaagguugauggcacaca

SEQ ID NO: 698337 - RNA, 19 nt, Artificial Sequence
  Description of Artificial Sequence: Synthetic oligonucleotide
acgcuccucgccugcuucu

SEQ ID NO: 698338 - RNA, 19 nt, Artificial Sequence
  Description of Artificial Sequence: Synthetic oligonucleotide
agauuggggaugacaucau

SEQ ID NO: 698339 - RNA, 19 nt, Artificial Sequence
  Description of Artificial Sequence: Synthetic oligonucleotide
cuggucagggaauccccaa

SEQ ID NO: 698340 - RNA, 19 nt, Artificial Sequence
  Description of Artificial Sequence: Synthetic oligonucleotide
ccgccaaguucccuagugc

SEQ ID NO: 698341 - RNA, 19 nt, Artificial Sequence
  Description of Artificial Sequence: Synthetic oligonucleotide
cgcaccugucccucgaagc

SEQ ID NO: 698342 - RNA, 19 nt, Artificial Sequence
  Description of Artificial Sequence: Synthetic oligonucleotide
ugggaccuacaaugagguu

SEQ ID NO: 698343 - RNA, 19 nt, Artificial Sequence
  Description of Artificial Sequence: Synthetic oligonucleotide
ccaccccgugcauauuucc

SEQ ID NO: 698344 - RNA, 19 nt, Artificial Sequence
  Description of Artificial Sequence: Synthetic oligonucleotide
acgccugagcuguccaguu

SEQ ID NO: 698345 - RNA, 19 nt, Artificial Sequence
  Description of Artificial Sequence: Synthetic oligonucleotide
ucagcagauuggggaugac

SEQ ID NO: 698346 - RNA, 19 nt, Artificial Sequence
  Description of Artificial Sequence: Synthetic oligonucleotide
ggaggcgaggaagcgaaga

SEQ ID NO: 698347 - RNA, 19 nt, Artificial Sequence
  Description of Artificial Sequence: Synthetic oligonucleotide
acauuacgguugcgacagu

SEQ ID NO: 698348 - RNA, 19 nt, Artificial Sequence
  Description of Artificial Sequence: Synthetic oligonucleotide
ccguucagaggcccuugcg

SEQ ID NO: 698349 - RNA, 19 nt, Artificial Sequence
  Description of Artificial Sequence: Synthetic oligonucleotide
gccacggguaguaccuggg

SEQ ID NO: 698350 - RNA, 19 nt, Artificial Sequence
  Description of Artificial Sequence: Synthetic oligonucleotide
cgaucacaacgcauguaug

SEQ ID NO: 698351 - RNA, 19 nt, Artificial Sequence
  Description of Artificial Sequence: Synthetic oligonucleotide
cgcauguaugauccuuuag

SEQ ID NO: 698352 - RNA, 19 nt, Artificial Sequence
  Description of Artificial Sequence: Synthetic oligonucleotide
gcgacugcgcagugaguug

SEQ ID NO: 698353 - RNA, 19 nt, Artificial Sequence
  Description of Artificial Sequence: Synthetic oligonucleotide
gcauugacuguuuggcccu

SEQ ID NO: 698354 - RNA, 19 nt, Artificial Sequence
  Description of Artificial Sequence: Synthetic oligonucleotide
auccgccaaguucccuagu

SEQ ID NO: 698355 - RNA, 19 nt, Artificial Sequence
  Description of Artificial Sequence: Synthetic oligonucleotide
ccccauuugggcccaaaca

SEQ ID NO: 698356 - RNA, 19 nt, Artificial Sequence
  Description of Artificial Sequence: Synthetic oligonucleotide
cugcugacuucugggccac

SEQ ID NO: 698357 - RNA, 19 nt, Artificial Sequence
  Description of Artificial Sequence: Synthetic oligonucleotide
ucccgucgaggaccucgac

SEQ ID NO: 698358 - RNA, 19 nt, Artificial Sequence
  Description of Artificial Sequence: Synthetic oligonucleotide
gggaacuagggugaagccu

SEQ ID NO: 698359 - RNA, 19 nt, Artificial Sequence
  Description of Artificial Sequence: Synthetic oligonucleotide
cagccuaaaggagcuaacu

SEQ ID NO: 698360 - RNA, 19 nt, Artificial Sequence
  Description of Artificial Sequence: Synthetic oligonucleotide
cuucgcgcacauuacgguu

SEQ ID NO: 698361 - RNA, 19 nt, Artificial Sequence
  Description of Artificial Sequence: Synthetic oligonucleotide
gugccaugggguaccuuuc

SEQ ID NO: 698362 - RNA, 19 nt, Artificial Sequence
  Description of Artificial Sequence: Synthetic oligonucleotide
ggcgaggaagcgaagauuu

SEQ ID NO: 698363 - RNA, 19 nt, Artificial Sequence
  Description of Artificial Sequence: Synthetic oligonucleotide
gacuaauuaugugcaccuu

SEQ ID NO: 698364 - RNA, 19 nt, Artificial Sequence
  Description of Artificial Sequence: Synthetic oligonucleotide
cucccgucgaggaccucga

SEQ ID NO: 698365 - RNA, 19 nt, Artificial Sequence
  Description of Artificial Sequence: Synthetic oligonucleotide
gucccucgaagcggccuag

SEQ ID NO: 698366 - RNA, 19 nt, Artificial Sequence
  Description of Artificial Sequence: Synthetic oligonucleotide
gcgcacauuacgguugcga

SEQ ID NO: 698367 - RNA, 19 nt, Artificial Sequence
  Description of Artificial Sequence: Synthetic oligonucleotide
guacugguguggggcugcc

SEQ ID NO: 698368 - RNA, 19 nt, Artificial Sequence
  Description of Artificial Sequence: Synthetic oligonucleotide
caccccgugcauauuuccu

SEQ ID NO: 698369 - RNA, 19 nt, Artificial Sequence
  Description of Artificial Sequence: Synthetic oligonucleotide
cacuugcgacugcgcagug

SEQ ID NO: 698370 - RNA, 19 nt, Artificial Sequence
  Description of Artificial Sequence: Synthetic oligonucleotide
gcaauucccuugugauaga

SEQ ID NO: 698371 - RNA, 19 nt, Artificial Sequence
  Description of Artificial Sequence: Synthetic oligonucleotide
cucggguuuggacucccgu

SEQ ID NO: 698372 - RNA, 19 nt, Artificial Sequence
  Description of Artificial Sequence: Synthetic oligonucleotide
cuacucuguucaggggcca

SEQ ID NO: 698373 - RNA, 19 nt, Artificial Sequence
  Description of Artificial Sequence: Synthetic oligonucleotide
gcuucgcgcacauuacggu

SEQ ID NO: 698374 - RNA, 19 nt, Artificial Sequence
  Description of Artificial Sequence: Synthetic oligonucleotide
cgacuaauuaugugcaccu

SEQ ID NO: 698375 - RNA, 19 nt, Artificial Sequence
  Description of Artificial Sequence: Synthetic oligonucleotide
gcuucacgacuaauuaugu

SEQ ID NO: 698376 - RNA, 19 nt, Artificial Sequence
  Description of Artificial Sequence: Synthetic oligonucleotide
cccaaccguucagaggccc

SEQ ID NO: 698377 - RNA, 19 nt, Artificial Sequence
  Description of Artificial Sequence: Synthetic oligonucleotide
caacgcauguaugauccuu

SEQ ID NO: 698378 - RNA, 19 nt, Artificial Sequence
  Description of Artificial Sequence: Synthetic oligonucleotide
caccuccaucuugcgauca

SEQ ID NO: 698379 - RNA, 19 nt, Artificial Sequence
  Description of Artificial Sequence: Synthetic oligonucleotide
cccagccuacauguaguac

SEQ ID NO: 698380 - RNA, 19 nt, Artificial Sequence
  Description of Artificial Sequence: Synthetic oligonucleotide
ccgcuuaaggaaagaaagu

SEQ ID NO: 698381 - RNA, 19 nt, Artificial Sequence
  Description of Artificial Sequence: Synthetic oligonucleotide
ccucggguuuggacucccg

SEQ ID NO: 698382 - RNA, 19 nt, Artificial Sequence
  Description of Artificial Sequence: Synthetic oligonucleotide
cccaccccgugcauauuuc

SEQ ID NO: 698383 - RNA, 19 nt, Artificial Sequence
  Description of Artificial Sequence: Synthetic oligonucleotide
gcagugaguuguagcuuga

SEQ ID NO: 698384 - RNA, 19 nt, Artificial Sequence
  Description of Artificial Sequence: Synthetic oligonucleotide
ggggugguccugacccugc

SEQ ID NO: 698385 - RNA, 19 nt, Artificial Sequence
  Description of Artificial Sequence: Synthetic oligonucleotide
ccgcaccugucccucgaag

SEQ ID NO: 698386 - RNA, 19 nt, Artificial Sequence
  Description of Artificial Sequence: Synthetic oligonucleotide
cccuagggacugaauggga

SEQ ID NO: 698387 - RNA, 19 nt, Artificial Sequence
  Description of Artificial Sequence: Synthetic oligonucleotide
gacugcgcagugaguugua

SEQ ID NO: 698388 - RNA, 19 nt, Artificial Sequence
  Description of Artificial Sequence: Synthetic oligonucleotide
aucuaccccuagggacuga

SEQ ID NO: 698389 - RNA, 19 nt, Artificial Sequence
  Description of Artificial Sequence: Synthetic oligonucleotide
gcacuugcgacugcgcagu

SEQ ID NO: 698390 - RNA, 19 nt, Artificial Sequence
  Description of Artificial Sequence: Synthetic oligonucleotide
ccaccuccaucuugcgauc

SEQ ID NO: 698391 - RNA, 19 nt, Artificial Sequence
  Description of Artificial Sequence: Synthetic oligonucleotide
cccuagugccaugggguac

SEQ ID NO: 698392 - RNA, 19 nt, Artificial Sequence
  Description of Artificial Sequence: Synthetic oligonucleotide
gugcggaaaucuaccccua

SEQ ID NO: 698393 - RNA, 19 nt, Artificial Sequence
  Description of Artificial Sequence: Synthetic oligonucleotide
cacgccugagcuguccagu

SEQ ID NO: 698394 - RNA, 19 nt, Artificial Sequence
  Description of Artificial Sequence: Synthetic oligonucleotide
cgugagugggucuggccga

SEQ ID NO: 698395 - RNA, 19 nt, Artificial Sequence
  Description of Artificial Sequence: Synthetic oligonucleotide
ccccuaggacugugggcag

SEQ ID NO: 698396 - RNA, 19 nt, Artificial Sequence
  Description of Artificial Sequence: Synthetic oligonucleotide
gcccugcgaucuucauugc

SEQ ID NO: 698397 - RNA, 19 nt, Artificial Sequence
  Description of Artificial Sequence: Synthetic oligonucleotide
gugguuccucggguuugga

SEQ ID NO: 698398 - RNA, 19 nt, Artificial Sequence
  Description of Artificial Sequence: Synthetic oligonucleotide
uagugccaugggguaccuu

SEQ ID NO: 698399 - RNA, 19 nt, Artificial Sequence
  Description of Artificial Sequence: Synthetic oligonucleotide
ccacggguaguaccuggga

SEQ ID NO: 698400 - RNA, 19 nt, Artificial Sequence
  Description of Artificial Sequence: Synthetic oligonucleotide
ggcccagccuacauguagu

SEQ ID NO: 698401 - RNA, 19 nt, Artificial Sequence
  Description of Artificial Sequence: Synthetic oligonucleotide
ccgggcccuuguccaaugc

SEQ ID NO: 698402 - RNA, 19 nt, Artificial Sequence
  Description of Artificial Sequence: Synthetic oligonucleotide
ccggcaguaguuguagucu

SEQ ID NO: 698403 - RNA, 19 nt, Artificial Sequence
  Description of Artificial Sequence: Synthetic oligonucleotide
cuaccccuagggacugaau

SEQ ID NO: 698404 - RNA, 19 nt, Artificial Sequence
  Description of Artificial Sequence: Synthetic oligonucleotide
gggcuugaauuggggaacu

SEQ ID NO: 698405 - RNA, 19 nt, Artificial Sequence
  Description of Artificial Sequence: Synthetic oligonucleotide
cagugaguuguagcuugau

SEQ ID NO: 698406 - RNA, 19 nt, Artificial Sequence
  Description of Artificial Sequence: Synthetic oligonucleotide
aggccacgccugagcuguc

SEQ ID NO: 698407 - RNA, 19 nt, Artificial Sequence
  Description of Artificial Sequence: Synthetic oligonucleotide
ccgggacgcuccucgccug

SEQ ID NO: 698408 - RNA, 19 nt, Artificial Sequence
  Description of Artificial Sequence: Synthetic oligonucleotide
caaccguucagaggcccuu

SEQ ID NO: 698409 - RNA, 19 nt, Artificial Sequence
  Description of Artificial Sequence: Synthetic oligonucleotide
ccaaccguucagaggcccu

SEQ ID NO: 698410 - RNA, 19 nt, Artificial Sequence
  Description of Artificial Sequence: Synthetic oligonucleotide
gcgcugccgcuuaaggaaa

SEQ ID NO: 698411 - RNA, 19 nt, Artificial Sequence
  Description of Artificial Sequence: Synthetic oligonucleotide
cggguaguaccugggacaa

SEQ ID NO: 698412 - RNA, 19 nt, Artificial Sequence
  Description of Artificial Sequence: Synthetic oligonucleotide
ccagaugucccaggucaua

SEQ ID NO: 698413 - RNA, 19 nt, Artificial Sequence
  Description of Artificial Sequence: Synthetic oligonucleotide
cgggacgcuccucgccugc

SEQ ID NO: 698414 - RNA, 19 nt, Artificial Sequence
  Description of Artificial Sequence: Synthetic oligonucleotide
cgggcccuuguccaaugca

SEQ ID NO: 698415 - RNA, 19 nt, Artificial Sequence
  Description of Artificial Sequence: Synthetic oligonucleotide
gguccugacccugcauuuu

SEQ ID NO: 698416 - RNA, 19 nt, Artificial Sequence
  Description of Artificial Sequence: Synthetic oligonucleotide
gacucccgucgaggaccuc

SEQ ID NO: 698417 - RNA, 19 nt, Artificial Sequence
  Description of Artificial Sequence: Synthetic oligonucleotide
ccaugaacgccaccuccau

SEQ ID NO: 698418 - RNA, 19 nt, Artificial Sequence
  Description of Artificial Sequence: Synthetic oligonucleotide
cggggugguccugacccug

SEQ ID NO: 698419 - RNA, 19 nt, Artificial Sequence
  Description of Artificial Sequence: Synthetic oligonucleotide
cccuuucaucuucucacuu

SEQ ID NO: 698420 - RNA, 19 nt, Artificial Sequence
  Description of Artificial Sequence: Synthetic oligonucleotide
cgguugcgacagugguagc

SEQ ID NO: 698421 - RNA, 19 nt, Artificial Sequence
  Description of Artificial Sequence: Synthetic oligonucleotide
cccuaggacugugggcaga

SEQ ID NO: 698422 - RNA, 19 nt, Artificial Sequence
  Description of Artificial Sequence: Synthetic oligonucleotide
cgcgcacauuacgguugcg

SEQ ID NO: 698423 - RNA, 19 nt, Artificial Sequence
  Description of Artificial Sequence: Synthetic oligonucleotide
cccgggaccucagggaggu

SEQ ID NO: 698424 - RNA, 19 nt, Artificial Sequence
  Description of Artificial Sequence: Synthetic oligonucleotide
cgacugcgcagugaguugu

SEQ ID NO: 698425 - RNA, 19 nt, Artificial Sequence
  Description of Artificial Sequence: Synthetic oligonucleotide
gcgcagugaguuguagcuu

SEQ ID NO: 698426 - RNA, 19 nt, Artificial Sequence
  Description of Artificial Sequence: Synthetic oligonucleotide
cggcaguaguuguagucuu

SEQ ID NO: 698427 - RNA, 19 nt, Artificial Sequence
  Description of Artificial Sequence: Synthetic oligonucleotide
ggguaguaccugggacaau

SEQ ID NO: 698428 - RNA, 19 nt, Artificial Sequence
  Description of Artificial Sequence: Synthetic oligonucleotide
ccucugcuucacgacuaau

SEQ ID NO: 698429 - RNA, 19 nt, Artificial Sequence
  Description of Artificial Sequence: Synthetic oligonucleotide
gcccgggcccuuguccaau

SEQ ID NO: 698430 - RNA, 19 nt, Artificial Sequence
  Description of Artificial Sequence: Synthetic oligonucleotide
ccgggaccucagggagguu

SEQ ID NO: 698431 - RNA, 19 nt, Artificial Sequence
  Description of Artificial Sequence: Synthetic oligonucleotide
uaaauagauauuuaaauga

SEQ ID NO: 698432 - RNA, 19 nt, Artificial Sequence
  Description of Artificial Sequence: Synthetic oligonucleotide
aaguagauaacccauuucu

SEQ ID NO: 698433 - RNA, 19 nt, Artificial Sequence
  Description of Artificial Sequence: Synthetic oligonucleotide
aaauagauauuuaaaugac

SEQ ID NO: 698434 - RNA, 19 nt, Artificial Sequence
  Description of Artificial Sequence: Synthetic oligonucleotide
aagauuacggacccgguag

SEQ ID NO: 698435 - RNA, 19 nt, Artificial Sequence
  Description of Artificial Sequence: Synthetic oligonucleotide
uaauugagaguuuaagcag

SEQ ID NO: 698436 - RNA, 19 nt, Artificial Sequence
  Description of Artificial Sequence: Synthetic oligonucleotide
cacuuaggcaaauugaggg

SEQ ID NO: 698437 - RNA, 19 nt, Artificial Sequence
  Description of Artificial Sequence: Synthetic oligonucleotide
acacguauuuucaagaccc

SEQ ID NO: 698438 - RNA, 19 nt, Artificial Sequence
  Description of Artificial Sequence: Synthetic oligonucleotide
ucuagaucugccuagcuug

SEQ ID NO: 698439 - RNA, 19 nt, Artificial Sequence
  Description of Artificial Sequence: Synthetic oligonucleotide
uuaagcaggaucauccagc

SEQ ID NO: 698440 - RNA, 19 nt, Artificial Sequence
  Description of Artificial Sequence: Synthetic oligonucleotide
aauugagaguuuaagcagg

SEQ ID NO: 698441 - RNA, 19 nt, Artificial Sequence
  Description of Artificial Sequence: Synthetic oligonucleotide
ugaaagauuacggacccgg

SEQ ID NO: 698442 - RNA, 19 nt, Artificial Sequence
  Description of Artificial Sequence: Synthetic oligonucleotide
acccuggacaaucaaaggc

SEQ ID NO: 698443 - RNA, 19 nt, Artificial Sequence
  Description of Artificial Sequence: Synthetic oligonucleotide
agcauaaagagaccaagag

SEQ ID NO: 698444 - RNA, 19 nt, Artificial Sequence
  Description of Artificial Sequence: Synthetic oligonucleotide
gauggguuagaguauagac

SEQ ID NO: 698445 - RNA, 19 nt, Artificial Sequence
  Description of Artificial Sequence: Synthetic oligonucleotide
gaaggaggcugacugaugg

SEQ ID NO: 698446 - RNA, 19 nt, Artificial Sequence
  Description of Artificial Sequence: Synthetic oligonucleotide
ugggagaacaguucggacg

SEQ ID NO: 698447 - RNA, 19 nt, Artificial Sequence
  Description of Artificial Sequence: Synthetic oligonucleotide
guagauaacccauuucucc

SEQ ID NO: 698448 - RNA, 19 nt, Artificial Sequence
  Description of Artificial Sequence: Synthetic oligonucleotide
ucugaaagauuacggaccc

SEQ ID NO: 698449 - RNA, 19 nt, Artificial Sequence
  Description of Artificial Sequence: Synthetic oligonucleotide
ugccuuuaugccuuuacgg

SEQ ID NO: 698450 - RNA, 19 nt, Artificial Sequence
  Description of Artificial Sequence: Synthetic oligonucleotide
gaacaguucggacggaugg

SEQ ID NO: 698451 - RNA, 19 nt, Artificial Sequence
  Description of Artificial Sequence: Synthetic oligonucleotide
uuaagcugucaacacaagc

SEQ ID NO: 698452 - RNA, 19 nt, Artificial Sequence
  Description of Artificial Sequence: Synthetic oligonucleotide
uuuaagcaggaucauccag

SEQ ID NO: 698453 - RNA, 19 nt, Artificial Sequence
  Description of Artificial Sequence: Synthetic oligonucleotide
uuuacgggaaaucgggcag

SEQ ID NO: 698454 - RNA, 19 nt, Artificial Sequence
  Description of Artificial Sequence: Synthetic oligonucleotide
uuagaguauagacaucaac

SEQ ID NO: 698455 - RNA, 19 nt, Artificial Sequence
  Description of Artificial Sequence: Synthetic oligonucleotide
acaguguuccgacaccucc

SEQ ID NO: 698456 - RNA, 19 nt, Artificial Sequence
  Description of Artificial Sequence: Synthetic oligonucleotide
ugagaguuuaagcaggauc

SEQ ID NO: 698457 - RNA, 19 nt, Artificial Sequence
  Description of Artificial Sequence: Synthetic oligonucleotide
uggguuagaguauagacau

SEQ ID NO: 698458 - RNA, 19 nt, Artificial Sequence
  Description of Artificial Sequence: Synthetic oligonucleotide
aauaagugacagugugggg

SEQ ID NO: 698459 - RNA, 19 nt, Artificial Sequence
  Description of Artificial Sequence: Synthetic oligonucleotide
auaacccauuucuccaucc

SEQ ID NO: 698460 - RNA, 19 nt, Artificial Sequence
  Description of Artificial Sequence: Synthetic oligonucleotide
gacacuuaggcaaauugag

SEQ ID NO: 698461 - RNA, 19 nt, Artificial Sequence
  Description of Artificial Sequence: Synthetic oligonucleotide
ggcaaaagaacucuggcag

SEQ ID NO: 698462 - RNA, 19 nt, Artificial Sequence
  Description of Artificial Sequence: Synthetic oligonucleotide
ucucaguuaauugagaguu

SEQ ID NO: 698463 - RNA, 19 nt, Artificial Sequence
  Description of Artificial Sequence: Synthetic oligonucleotide
uguuugccgcucuaguucg

SEQ ID NO: 698464 - RNA, 19 nt, Artificial Sequence
  Description of Artificial Sequence: Synthetic oligonucleotide
uccuauggggccuacagac

SEQ ID NO: 698465 - RNA, 19 nt, Artificial Sequence
  Description of Artificial Sequence: Synthetic oligonucleotide
aaaucgggcagaugcuguc

SEQ ID NO: 698466 - RNA, 19 nt, Artificial Sequence
  Description of Artificial Sequence: Synthetic oligonucleotide
uaauucacuuccaaguaua

SEQ ID NO: 698467 - RNA, 19 nt, Artificial Sequence
  Description of Artificial Sequence: Synthetic oligonucleotide
gcauaaagagaccaagagg

SEQ ID NO: 698468 - RNA, 19 nt, Artificial Sequence
  Description of Artificial Sequence: Synthetic oligonucleotide
caaccuuaaggguacacac

SEQ ID NO: 698469 - RNA, 19 nt, Artificial Sequence
  Description of Artificial Sequence: Synthetic oligonucleotide
agcccugucaccugugccc

SEQ ID NO: 698470 - RNA, 19 nt, Artificial Sequence
  Description of Artificial Sequence: Synthetic oligonucleotide
cauauggcuacaguguucc

SEQ ID NO: 698471 - RNA, 19 nt, Artificial Sequence
  Description of Artificial Sequence: Synthetic oligonucleotide
acuugucugaaagauuacg

SEQ ID NO: 698472 - RNA, 19 nt, Artificial Sequence
  Description of Artificial Sequence: Synthetic oligonucleotide
uccauuugacugucgauca

SEQ ID NO: 698473 - RNA, 19 nt, Artificial Sequence
  Description of Artificial Sequence: Synthetic oligonucleotide
ugccuuuacgggaaaucgg

SEQ ID NO: 698474 - RNA, 19 nt, Artificial Sequence
  Description of Artificial Sequence: Synthetic oligonucleotide
accuuaaggguacacacgu

SEQ ID NO: 698475 - RNA, 19 nt, Artificial Sequence
  Description of Artificial Sequence: Synthetic oligonucleotide
ugguuggagagcuugcacc

SEQ ID NO: 698476 - RNA, 19 nt, Artificial Sequence
  Description of Artificial Sequence: Synthetic oligonucleotide
agauuacggacccgguagc

SEQ ID NO: 698477 - RNA, 19 nt, Artificial Sequence
  Description of Artificial Sequence: Synthetic oligonucleotide
aguucggacggauggucgc

SEQ ID NO: 698478 - RNA, 19 nt, Artificial Sequence
  Description of Artificial Sequence: Synthetic oligonucleotide
gacggauggucgcucaugg

SEQ ID NO: 698479 - RNA, 19 nt, Artificial Sequence
  Description of Artificial Sequence: Synthetic oligonucleotide
ugagcuagcucgcuggccu

SEQ ID NO: 698480 - RNA, 19 nt, Artificial Sequence
  Description of Artificial Sequence: Synthetic oligonucleotide
uguagaccccuuuaagcug

SEQ ID NO: 698481 - RNA, 19 nt, Artificial Sequence
  Description of Artificial Sequence: Synthetic oligonucleotide
auaauucacuuccaaguau

SEQ ID NO: 698482 - RNA, 19 nt, Artificial Sequence
  Description of Artificial Sequence: Synthetic oligonucleotide
uccaggcuuucucagagga

SEQ ID NO: 698483 - RNA, 19 nt, Artificial Sequence
  Description of Artificial Sequence: Synthetic oligonucleotide
aaagauuacggacccggua

SEQ ID NO: 698484 - RNA, 19 nt, Artificial Sequence
  Description of Artificial Sequence: Synthetic oligonucleotide
aaucgggcagaugcugucc

SEQ ID NO: 698485 - RNA, 19 nt, Artificial Sequence
  Description of Artificial Sequence: Synthetic oligonucleotide
uccugagcuagcucgcugg

SEQ ID NO: 698486 - RNA, 19 nt, Artificial Sequence
  Description of Artificial Sequence: Synthetic oligonucleotide
guacacacguauuuucaag

SEQ ID NO: 698487 - RNA, 19 nt, Artificial Sequence
  Description of Artificial Sequence: Synthetic oligonucleotide
aaccuuaaggguacacacg

SEQ ID NO: 698488 - RNA, 19 nt, Artificial Sequence
  Description of Artificial Sequence: Synthetic oligonucleotide
uaaggguacacacguauuu

SEQ ID NO: 698489 - RNA, 19 nt, Artificial Sequence
  Description of Artificial Sequence: Synthetic oligonucleotide
aucgcugcugguuggagag

SEQ ID NO: 698490 - RNA, 19 nt, Artificial Sequence
  Description of Artificial Sequence: Synthetic oligonucleotide
guuccuauggggccuacag

SEQ ID NO: 698491 - RNA, 19 nt, Artificial Sequence
  Description of Artificial Sequence: Synthetic oligonucleotide
cuuuaagcugucaacacaa

SEQ ID NO: 698492 - RNA, 19 nt, Artificial Sequence
  Description of Artificial Sequence: Synthetic oligonucleotide
aguagauaacccauuucuc

SEQ ID NO: 698493 - RNA, 19 nt, Artificial Sequence
  Description of Artificial Sequence: Synthetic oligonucleotide
accccuuuaagcugucaac

SEQ ID NO: 698494 - RNA, 19 nt, Artificial Sequence
  Description of Artificial Sequence: Synthetic oligonucleotide
gaggagacgaggcuagagc

SEQ ID NO: 698495 - RNA, 19 nt, Artificial Sequence
  Description of Artificial Sequence: Synthetic oligonucleotide
gguguagaccccuuuaagc

SEQ ID NO: 698496 - RNA, 19 nt, Artificial Sequence
  Description of Artificial Sequence: Synthetic oligonucleotide
ugugagucaauguucccuc

SEQ ID NO: 698497 - RNA, 19 nt, Artificial Sequence
  Description of Artificial Sequence: Synthetic oligonucleotide
uuccauuugacugucgauc

SEQ ID NO: 698498 - RNA, 19 nt, Artificial Sequence
  Description of Artificial Sequence: Synthetic oligonucleotide
ucagucgacagaugaggcc

SEQ ID NO: 698499 - RNA, 19 nt, Artificial Sequence
  Description of Artificial Sequence: Synthetic oligonucleotide
ucaaccuuaaggguacaca

SEQ ID NO: 698500 - RNA, 19 nt, Artificial Sequence
  Description of Artificial Sequence: Synthetic oligonucleotide
ucuacccuggacaaucaaa

SEQ ID NO: 698501 - RNA, 19 nt, Artificial Sequence
  Description of Artificial Sequence: Synthetic oligonucleotide
gggagaacaguucggacgg

SEQ ID NO: 698502 - RNA, 19 nt, Artificial Sequence
  Description of Artificial Sequence: Synthetic oligonucleotide
gaugaggccagcucaguuc

SEQ ID NO: 698503 - RNA, 19 nt, Artificial Sequence
  Description of Artificial Sequence: Synthetic oligonucleotide
aggagacgaggcuagagcu

SEQ ID NO: 698504 - RNA, 19 nt, Artificial Sequence
  Description of Artificial Sequence: Synthetic oligonucleotide
uuacggacccgguagccag

SEQ ID NO: 698505 - RNA, 19 nt, Artificial Sequence
  Description of Artificial Sequence: Synthetic oligonucleotide
uuaggcaaauugagggugu

SEQ ID NO: 698506 - RNA, 19 nt, Artificial Sequence
  Description of Artificial Sequence: Synthetic oligonucleotide
acaguuugugagucaaugu

SEQ ID NO: 698507 - RNA, 19 nt, Artificial Sequence
  Description of Artificial Sequence: Synthetic oligonucleotide
uaugagaggaggguacagc

SEQ ID NO: 698508 - RNA, 19 nt, Artificial Sequence
  Description of Artificial Sequence: Synthetic oligonucleotide
agaccaagaggcaagugag

SEQ ID NO: 698509 - RNA, 19 nt, Artificial Sequence
  Description of Artificial Sequence: Synthetic oligonucleotide
aucgggcagaugcuguccc

SEQ ID NO: 698510 - RNA, 19 nt, Artificial Sequence
  Description of Artificial Sequence: Synthetic oligonucleotide
ucaguuaauugagaguuua

SEQ ID NO: 698511 - RNA, 19 nt, Artificial Sequence
  Description of Artificial Sequence: Synthetic oligonucleotide
gugccuuuaugccuuuacg

SEQ ID NO: 698512 - RNA, 19 nt, Artificial Sequence
  Description of Artificial Sequence: Synthetic oligonucleotide
agcucuacccuggacaauc

SEQ ID NO: 698513 - RNA, 19 nt, Artificial Sequence
  Description of Artificial Sequence: Synthetic oligonucleotide
gaaggucggggcuuaggag

SEQ ID NO: 698514 - RNA, 19 nt, Artificial Sequence
  Description of Artificial Sequence: Synthetic oligonucleotide
ugccgcucuaguucgcucg

SEQ ID NO: 698515 - RNA, 19 nt, Artificial Sequence
  Description of Artificial Sequence: Synthetic oligonucleotide
ucuccaucccuucucuaga

SEQ ID NO: 698516 - RNA, 19 nt, Artificial Sequence
  Description of Artificial Sequence: Synthetic oligonucleotide
accgaggcaaacuuucacu

SEQ ID NO: 698517 - RNA, 19 nt, Artificial Sequence
  Description of Artificial Sequence: Synthetic oligonucleotide
agagcccugucaccugugc

SEQ ID NO: 698518 - RNA, 19 nt, Artificial Sequence
  Description of Artificial Sequence: Synthetic oligonucleotide
gguuagaguauagacauca

SEQ ID NO: 698519 - RNA, 19 nt, Artificial Sequence
  Description of Artificial Sequence: Synthetic oligonucleotide
cuuuacgggaaaucgggca

SEQ ID NO: 698520 - RNA, 19 nt, Artificial Sequence
  Description of Artificial Sequence: Synthetic oligonucleotide
auggguuagaguauagaca

SEQ ID NO: 698521 - RNA, 19 nt, Artificial Sequence
  Description of Artificial Sequence: Synthetic oligonucleotide
uucuaucccucucucaguu

SEQ ID NO: 698522 - RNA, 19 nt, Artificial Sequence
  Description of Artificial Sequence: Synthetic oligonucleotide
uguuggguuccuuggcacc

SEQ ID NO: 698523 - RNA, 19 nt, Artificial Sequence
  Description of Artificial Sequence: Synthetic oligonucleotide
ucauauggcuacaguguuc

SEQ ID NO: 698524 - RNA, 19 nt, Artificial Sequence
  Description of Artificial Sequence: Synthetic oligonucleotide
uuaaggguacacacguauu

SEQ ID NO: 698525 - RNA, 19 nt, Artificial Sequence
  Description of Artificial Sequence: Synthetic oligonucleotide
agcugucaacacaagcagc

SEQ ID NO: 698526 - RNA, 19 nt, Artificial Sequence
  Description of Artificial Sequence: Synthetic oligonucleotide
agcaccgaggcaaacuuuc

SEQ ID NO: 698527 - RNA, 19 nt, Artificial Sequence
  Description of Artificial Sequence: Synthetic oligonucleotide
gagacgaggcuagagcuug

SEQ ID NO: 698528 - RNA, 19 nt, Artificial Sequence
  Description of Artificial Sequence: Synthetic oligonucleotide
aaaugaccuuauauaaaau

SEQ ID NO: 698529 - RNA, 19 nt, Artificial Sequence
  Description of Artificial Sequence: Synthetic oligonucleotide
guguuugccgcucuaguuc

SEQ ID NO: 698530 - RNA, 19 nt, Artificial Sequence
  Description of Artificial Sequence: Synthetic oligonucleotide
ugauggguuagaguauaga

SEQ ID NO: 698531 - RNA, 19 nt, Artificial Sequence
  Description of Artificial Sequence: Synthetic oligonucleotide
ccuuccacuagucaccucc

SEQ ID NO: 698532 - RNA, 19 nt, Artificial Sequence
  Description of Artificial Sequence: Synthetic oligonucleotide
aggagcucgugacagggca

SEQ ID NO: 698533 - RNA, 19 nt, Artificial Sequence
  Description of Artificial Sequence: Synthetic oligonucleotide
ugcaccccgaccgagggcc

SEQ ID NO: 698534 - RNA, 19 nt, Artificial Sequence
  Description of Artificial Sequence: Synthetic oligonucleotide
auacaggcagguagguccc

SEQ ID NO: 698535 - RNA, 19 nt, Artificial Sequence
  Description of Artificial Sequence: Synthetic oligonucleotide
ugacugucgaucagcugcu

SEQ ID NO: 698536 - RNA, 19 nt, Artificial Sequence
  Description of Artificial Sequence: Synthetic oligonucleotide
uuccuauggggccuacaga

SEQ ID NO: 698537 - RNA, 19 nt, Artificial Sequence
  Description of Artificial Sequence: Synthetic oligonucleotide
uccacuagucaccucccuc

SEQ ID NO: 698538 - RNA, 19 nt, Artificial Sequence
  Description of Artificial Sequence: Synthetic oligonucleotide
guuuaagcaggaucaucca

SEQ ID NO: 698539 - RNA, 19 nt, Artificial Sequence
  Description of Artificial Sequence: Synthetic oligonucleotide
acaguucggacggaugguc

SEQ ID NO: 698540 - RNA, 19 nt, Artificial Sequence
  Description of Artificial Sequence: Synthetic oligonucleotide
caguucggacggauggucg

SEQ ID NO: 698541 - RNA, 19 nt, Artificial Sequence
  Description of Artificial Sequence: Synthetic oligonucleotide
cacagcucuacccuggaca

SEQ ID NO: 698542 - RNA, 19 nt, Artificial Sequence
  Description of Artificial Sequence: Synthetic oligonucleotide
guguagaccccuuuaagcu

SEQ ID NO: 698543 - RNA, 19 nt, Artificial Sequence
  Description of Artificial Sequence: Synthetic oligonucleotide
cuauggggccuacagacca

SEQ ID NO: 698544 - RNA, 19 nt, Artificial Sequence
  Description of Artificial Sequence: Synthetic oligonucleotide
ucucuagaucugccuagcu

SEQ ID NO: 698545 - RNA, 19 nt, Artificial Sequence
  Description of Artificial Sequence: Synthetic oligonucleotide
ugcugggcaaaagaacucu

SEQ ID NO: 698546 - RNA, 19 nt, Artificial Sequence
  Description of Artificial Sequence: Synthetic oligonucleotide
gacaucaacuucaaccuua

SEQ ID NO: 698547 - RNA, 19 nt, Artificial Sequence
  Description of Artificial Sequence: Synthetic oligonucleotide
gauuacggacccgguagcc

SEQ ID NO: 698548 - RNA, 19 nt, Artificial Sequence
  Description of Artificial Sequence: Synthetic oligonucleotide
gauggucgcucauggggug

SEQ ID NO: 698549 - RNA, 19 nt, Artificial Sequence
  Description of Artificial Sequence: Synthetic oligonucleotide
gagguuuccauuugacugu

SEQ ID NO: 698550 - RNA, 19 nt, Artificial Sequence
  Description of Artificial Sequence: Synthetic oligonucleotide
ucauacgggcagcuggguc

SEQ ID NO: 698551 - RNA, 19 nt, Artificial Sequence
  Description of Artificial Sequence: Synthetic oligonucleotide
auuugacugucgaucagcu

SEQ ID NO: 698552 - RNA, 19 nt, Artificial Sequence
  Description of Artificial Sequence: Synthetic oligonucleotide
cuaccugggucagauguag

SEQ ID NO: 698553 - RNA, 19 nt, Artificial Sequence
  Description of Artificial Sequence: Synthetic oligonucleotide
aacaguucggacggauggu

SEQ ID NO: 698554 - RNA, 19 nt, Artificial Sequence
  Description of Artificial Sequence: Synthetic oligonucleotide
aaggguacacacguauuuu

SEQ ID NO: 698555 - RNA, 19 nt, Artificial Sequence
  Description of Artificial Sequence: Synthetic oligonucleotide
gccuuuacgggaaaucggg

SEQ ID NO: 698556 - RNA, 19 nt, Artificial Sequence
  Description of Artificial Sequence: Synthetic oligonucleotide
cuugagugcagggagccuc

SEQ ID NO: 698557 - RNA, 19 nt, Artificial Sequence
  Description of Artificial Sequence: Synthetic oligonucleotide
uaguucgcucgcucccucg

SEQ ID NO: 698558 - RNA, 19 nt, Artificial Sequence
  Description of Artificial Sequence: Synthetic oligonucleotide
uuuaugccuuuacgggaaa

SEQ ID NO: 698559 - RNA, 19 nt, Artificial Sequence
  Description of Artificial Sequence: Synthetic oligonucleotide
ucgugacagggcaaccugu

SEQ ID NO: 698560 - RNA, 19 nt, Artificial Sequence
  Description of Artificial Sequence: Synthetic oligonucleotide
cagugcaauggcuuccuuc

SEQ ID NO: 698561 - RNA, 19 nt, Artificial Sequence
  Description of Artificial Sequence: Synthetic oligonucleotide
gacccgguagccagggagg

SEQ ID NO: 698562 - RNA, 19 nt, Artificial Sequence
  Description of Artificial Sequence: Synthetic oligonucleotide
aagcaggaucauccagcug

SEQ ID NO: 698563 - RNA, 19 nt, Artificial Sequence
  Description of Artificial Sequence: Synthetic oligonucleotide
gcccacaauaaauaaguga

SEQ ID NO: 698564 - RNA, 19 nt, Artificial Sequence
  Description of Artificial Sequence: Synthetic oligonucleotide
cucgugacagggcaaccug

SEQ ID NO: 698565 - RNA, 19 nt, Artificial Sequence
  Description of Artificial Sequence: Synthetic oligonucleotide
cuuaaggguacacacguau

SEQ ID NO: 698566 - RNA, 19 nt, Artificial Sequence
  Description of Artificial Sequence: Synthetic oligonucleotide
cucgaucgcugcugguugg

SEQ ID NO: 698567 - RNA, 19 nt, Artificial Sequence
  Description of Artificial Sequence: Synthetic oligonucleotide
ccacuagucaccucccucc

SEQ ID NO: 698568 - RNA, 19 nt, Artificial Sequence
  Description of Artificial Sequence: Synthetic oligonucleotide
gaccccuuuaagcugucaa

SEQ ID NO: 698569 - RNA, 19 nt, Artificial Sequence
  Description of Artificial Sequence: Synthetic oligonucleotide
cuaucccucucucaguuaa

SEQ ID NO: 698570 - RNA, 19 nt, Artificial Sequence
  Description of Artificial Sequence: Synthetic oligonucleotide
cuaugagaggaggguacag

SEQ ID NO: 698571 - RNA, 19 nt, Artificial Sequence
  Description of Artificial Sequence: Synthetic oligonucleotide
cugguuggagagcuugcac

SEQ ID NO: 698572 - RNA, 19 nt, Artificial Sequence
  Description of Artificial Sequence: Synthetic oligonucleotide
caacacggagagcaccgag

SEQ ID NO: 698573 - RNA, 19 nt, Artificial Sequence
  Description of Artificial Sequence: Synthetic oligonucleotide
ucgggcagaugcugucccg

SEQ ID NO: 698574 - RNA, 19 nt, Artificial Sequence
  Description of Artificial Sequence: Synthetic oligonucleotide
cccauuuucacugagagcu

SEQ ID NO: 698575 - RNA, 19 nt, Artificial Sequence
  Description of Artificial Sequence: Synthetic oligonucleotide
acggauggucgcucauggg

SEQ ID NO: 698576 - RNA, 19 nt, Artificial Sequence
  Description of Artificial Sequence: Synthetic oligonucleotide
ucuaguucgcucgcucccu

SEQ ID NO: 698577 - RNA, 19 nt, Artificial Sequence
  Description of Artificial Sequence: Synthetic oligonucleotide
uuacgggaaaucgggcaga

SEQ ID NO: 698578 - RNA, 19 nt, Artificial Sequence
  Description of Artificial Sequence: Synthetic oligonucleotide
gagcccugucaccugugcc

SEQ ID NO: 698579 - RNA, 19 nt, Artificial Sequence
  Description of Artificial Sequence: Synthetic oligonucleotide
cacuugucugaaagauuac

SEQ ID NO: 698580 - RNA, 19 nt, Artificial Sequence
  Description of Artificial Sequence: Synthetic oligonucleotide
ggcuacaguguuccgacac

SEQ ID NO: 698581 - RNA, 19 nt, Artificial Sequence
  Description of Artificial Sequence: Synthetic oligonucleotide
uacaguguuccgacaccuc

SEQ ID NO: 698582 - RNA, 19 nt, Artificial Sequence
  Description of Artificial Sequence: Synthetic oligonucleotide
ggcaaauugaggguguaga

SEQ ID NO: 698583 - RNA, 19 nt, Artificial Sequence
  Description of Artificial Sequence: Synthetic oligonucleotide
acuagucaccucccuccug

SEQ ID NO: 698584 - RNA, 19 nt, Artificial Sequence
  Description of Artificial Sequence: Synthetic oligonucleotide
auuacggacccgguagcca

SEQ ID NO: 698585 - RNA, 19 nt, Artificial Sequence
  Description of Artificial Sequence: Synthetic oligonucleotide
ccgggaugcagaaagccgc

SEQ ID NO: 698586 - RNA, 19 nt, Artificial Sequence
  Description of Artificial Sequence: Synthetic oligonucleotide
auucacuuccaaguauaaa

SEQ ID NO: 698587 - RNA, 19 nt, Artificial Sequence
  Description of Artificial Sequence: Synthetic oligonucleotide
aacucuggcaggggcgugu

SEQ ID NO: 698588 - RNA, 19 nt, Artificial Sequence
  Description of Artificial Sequence: Synthetic oligonucleotide
ggucauacgggcagcuggg

SEQ ID NO: 698589 - RNA, 19 nt, Artificial Sequence
  Description of Artificial Sequence: Synthetic oligonucleotide
cugcugggcaaaagaacuc

SEQ ID NO: 698590 - RNA, 19 nt, Artificial Sequence
  Description of Artificial Sequence: Synthetic oligonucleotide
ggaaggucggggcuuagga

SEQ ID NO: 698591 - RNA, 19 nt, Artificial Sequence
  Description of Artificial Sequence: Synthetic oligonucleotide
guagcccaagcaguucucc

SEQ ID NO: 698592 - RNA, 19 nt, Artificial Sequence
  Description of Artificial Sequence: Synthetic oligonucleotide
gugggagaacaguucggac

SEQ ID NO: 698593 - RNA, 19 nt, Artificial Sequence
  Description of Artificial Sequence: Synthetic oligonucleotide
gggguggauggaaagacug

SEQ ID NO: 698594 - RNA, 19 nt, Artificial Sequence
  Description of Artificial Sequence: Synthetic oligonucleotide
aggcaaauugaggguguag

SEQ ID NO: 698595 - RNA, 19 nt, Artificial Sequence
  Description of Artificial Sequence: Synthetic oligonucleotide
ggacacuuaggcaaauuga

SEQ ID NO: 698596 - RNA, 19 nt, Artificial Sequence
  Description of Artificial Sequence: Synthetic oligonucleotide
aguucgcucgcucccucga

SEQ ID NO: 698597 - RNA, 19 nt, Artificial Sequence
  Description of Artificial Sequence: Synthetic oligonucleotide
ggaaaucgggcagaugcug

SEQ ID NO: 698598 - RNA, 19 nt, Artificial Sequence
  Description of Artificial Sequence: Synthetic oligonucleotide
ccuagcuuggcuagagaug

SEQ ID NO: 698599 - RNA, 19 nt, Artificial Sequence
  Description of Artificial Sequence: Synthetic oligonucleotide
aguguuccgacaccuccuu

SEQ ID NO: 698600 - RNA, 19 nt, Artificial Sequence
  Description of Artificial Sequence: Synthetic oligonucleotide
cggauggucgcucaugggg

SEQ ID NO: 698601 - RNA, 19 nt, Artificial Sequence
  Description of Artificial Sequence: Synthetic oligonucleotide
acguauuuucaagacccau

SEQ ID NO: 698602 - RNA, 19 nt, Artificial Sequence
  Description of Artificial Sequence: Synthetic oligonucleotide
gcuacaguguuccgacacc

SEQ ID NO: 698603 - RNA, 19 nt, Artificial Sequence
  Description of Artificial Sequence: Synthetic oligonucleotide
agcucgugacagggcaacc

SEQ ID NO: 698604 - RNA, 19 nt, Artificial Sequence
  Description of Artificial Sequence: Synthetic oligonucleotide
ggccauacaggcagguagg

SEQ ID NO: 698605 - RNA, 19 nt, Artificial Sequence
  Description of Artificial Sequence: Synthetic oligonucleotide
ucccgcccuguaaaucuca

SEQ ID NO: 698606 - RNA, 19 nt, Artificial Sequence
  Description of Artificial Sequence: Synthetic oligonucleotide
ugaggccagcucaguucag

SEQ ID NO: 698607 - RNA, 19 nt, Artificial Sequence
  Description of Artificial Sequence: Synthetic oligonucleotide
cucccucgaucgcugcugg

SEQ ID NO: 698608 - RNA, 19 nt, Artificial Sequence
  Description of Artificial Sequence: Synthetic oligonucleotide
guggauggaaagacuguuc

SEQ ID NO: 698609 - RNA, 19 nt, Artificial Sequence
  Description of Artificial Sequence: Synthetic oligonucleotide
cccgggaugcagaaagccg

SEQ ID NO: 698610 - RNA, 19 nt, Artificial Sequence
  Description of Artificial Sequence: Synthetic oligonucleotide
cagggcuagucuccccucc

SEQ ID NO: 698611 - RNA, 19 nt, Artificial Sequence
  Description of Artificial Sequence: Synthetic oligonucleotide
cucucaguuaauugagagu

SEQ ID NO: 698612 - RNA, 19 nt, Artificial Sequence
  Description of Artificial Sequence: Synthetic oligonucleotide
caguuaauugagaguuuaa

SEQ ID NO: 698613 - RNA, 19 nt, Artificial Sequence
  Description of Artificial Sequence: Synthetic oligonucleotide
ucccgguccggcguguuug

SEQ ID NO: 698614 - RNA, 19 nt, Artificial Sequence
  Description of Artificial Sequence: Synthetic oligonucleotide
ccuuuacgggaaaucgggc

SEQ ID NO: 698615 - RNA, 19 nt, Artificial Sequence
  Description of Artificial Sequence: Synthetic oligonucleotide
ccagcucaguucaggaagc

SEQ ID NO: 698616 - RNA, 19 nt, Artificial Sequence
  Description of Artificial Sequence: Synthetic oligonucleotide
cucgcuggccuuccuugag

SEQ ID NO: 698617 - RNA, 19 nt, Artificial Sequence
  Description of Artificial Sequence: Synthetic oligonucleotide
uaucccucucucaguuaau

SEQ ID NO: 698618 - RNA, 19 nt, Artificial Sequence
  Description of Artificial Sequence: Synthetic oligonucleotide
uggcuaugagaggagggua

SEQ ID NO: 698619 - RNA, 19 nt, Artificial Sequence
  Description of Artificial Sequence: Synthetic oligonucleotide
ucggacggauggucgcuca

SEQ ID NO: 698620 - RNA, 19 nt, Artificial Sequence
  Description of Artificial Sequence: Synthetic oligonucleotide
gguccggcguguuugccgc

SEQ ID NO: 698621 - RNA, 19 nt, Artificial Sequence
  Description of Artificial Sequence: Synthetic oligonucleotide
caggagcucgugacagggc

SEQ ID NO: 698622 - RNA, 19 nt, Artificial Sequence
  Description of Artificial Sequence: Synthetic oligonucleotide
gagcucgugacagggcaac

SEQ ID NO: 698623 - RNA, 19 nt, Artificial Sequence
  Description of Artificial Sequence: Synthetic oligonucleotide
cacguauuuucaagaccca

SEQ ID NO: 698624 - RNA, 19 nt, Artificial Sequence
  Description of Artificial Sequence: Synthetic oligonucleotide
gaaaucgggcagaugcugu

SEQ ID NO: 698625 - RNA, 19 nt, Artificial Sequence
  Description of Artificial Sequence: Synthetic oligonucleotide
gcagguaggucccuugcca

SEQ ID NO: 698626 - RNA, 19 nt, Artificial Sequence
  Description of Artificial Sequence: Synthetic oligonucleotide
caaacuccaucuggcauga

SEQ ID NO: 698627 - RNA, 19 nt, Artificial Sequence
  Description of Artificial Sequence: Synthetic oligonucleotide
cucccacagcucuacccug

SEQ ID NO: 698628 - RNA, 19 nt, Artificial Sequence
  Description of Artificial Sequence: Synthetic oligonucleotide
agggcuagucuccccuccu

SEQ ID NO: 698629 - RNA, 19 nt, Artificial Sequence
  Description of Artificial Sequence: Synthetic oligonucleotide
cugagcuagcucgcuggcc

SEQ ID NO: 698630 - RNA, 19 nt, Artificial Sequence
  Description of Artificial Sequence: Synthetic oligonucleotide
ggcuaugagaggaggguac

SEQ ID NO: 698631 - RNA, 19 nt, Artificial Sequence
  Description of Artificial Sequence: Synthetic oligonucleotide
ggaggagacgaggcuagag

SEQ ID NO: 698632 - RNA, 19 nt, Artificial Sequence
  Description of Artificial Sequence: Synthetic oligonucleotide
guuagaguauagacaucaa

SEQ ID NO: 698633 - RNA, 19 nt, Artificial Sequence
  Description of Artificial Sequence: Synthetic oligonucleotide
gggccuacagaccacccuc

SEQ ID NO: 698634 - RNA, 19 nt, Artificial Sequence
  Description of Artificial Sequence: Synthetic oligonucleotide
ccuagagaccagcucuggc

SEQ ID NO: 698635 - RNA, 19 nt, Artificial Sequence
  Description of Artificial Sequence: Synthetic oligonucleotide
aggcaagugagagcccugu

SEQ ID NO: 698636 - RNA, 19 nt, Artificial Sequence
  Description of Artificial Sequence: Synthetic oligonucleotide
cuagagcuugguccuccuc

SEQ ID NO: 698637 - RNA, 19 nt, Artificial Sequence
  Description of Artificial Sequence: Synthetic oligonucleotide
uccugaggcagggcuaguc

SEQ ID NO: 698638 - RNA, 19 nt, Artificial Sequence
  Description of Artificial Sequence: Synthetic oligonucleotide
uggcuacaguguuccgaca

SEQ ID NO: 698639 - RNA, 19 nt, Artificial Sequence
  Description of Artificial Sequence: Synthetic oligonucleotide
cagggcccacaauaaauaa

SEQ ID NO: 698640 - RNA, 19 nt, Artificial Sequence
  Description of Artificial Sequence: Synthetic oligonucleotide
ggcuuaggagcucccucag

SEQ ID NO: 698641 - RNA, 19 nt, Artificial Sequence
  Description of Artificial Sequence: Synthetic oligonucleotide
caagacccauuuucacuga

SEQ ID NO: 698642 - RNA, 19 nt, Artificial Sequence
  Description of Artificial Sequence: Synthetic oligonucleotide
acagaccacccuccuccca

SEQ ID NO: 698643 - RNA, 19 nt, Artificial Sequence
  Description of Artificial Sequence: Synthetic oligonucleotide
cuaguucgcucgcucccuc

SEQ ID NO: 698644 - RNA, 19 nt, Artificial Sequence
  Description of Artificial Sequence: Synthetic oligonucleotide
gggcuuaggagcucccuca

SEQ ID NO: 698645 - RNA, 19 nt, Artificial Sequence
  Description of Artificial Sequence: Synthetic oligonucleotide
ccaucuggcaugagguuuc

SEQ ID NO: 698646 - RNA, 19 nt, Artificial Sequence
  Description of Artificial Sequence: Synthetic oligonucleotide
gaaagauuacggacccggu

SEQ ID NO: 698647 - RNA, 19 nt, Artificial Sequence
  Description of Artificial Sequence: Synthetic oligonucleotide
guagaccccuuuaagcugu

SEQ ID NO: 698648 - RNA, 19 nt, Artificial Sequence
  Description of Artificial Sequence: Synthetic oligonucleotide
uaggcaaauugagggugua

SEQ ID NO: 698649 - RNA, 19 nt, Artificial Sequence
  Description of Artificial Sequence: Synthetic oligonucleotide
uacgggaaaucgggcagau

SEQ ID NO: 698650 - RNA, 19 nt, Artificial Sequence
  Description of Artificial Sequence: Synthetic oligonucleotide
ugggucccgguccggcgug

SEQ ID NO: 698651 - RNA, 19 nt, Artificial Sequence
  Description of Artificial Sequence: Synthetic oligonucleotide
ucgaucgcugcugguugga

SEQ ID NO: 698652 - RNA, 19 nt, Artificial Sequence
  Description of Artificial Sequence: Synthetic oligonucleotide
guguuccgacaccuccuug

SEQ ID NO: 698653 - RNA, 19 nt, Artificial Sequence
  Description of Artificial Sequence: Synthetic oligonucleotide
gcaaugcuccugcucacca

SEQ ID NO: 698654 - RNA, 19 nt, Artificial Sequence
  Description of Artificial Sequence: Synthetic oligonucleotide
cccuggucucccaugggcc

SEQ ID NO: 698655 - RNA, 19 nt, Artificial Sequence
  Description of Artificial Sequence: Synthetic oligonucleotide
ccgucuuuugggcugugug

SEQ ID NO: 698656 - RNA, 19 nt, Artificial Sequence
  Description of Artificial Sequence: Synthetic oligonucleotide
gccuaccugggucagaugu

SEQ ID NO: 698657 - RNA, 19 nt, Artificial Sequence
  Description of Artificial Sequence: Synthetic oligonucleotide
agcuugcaccccgaccgag

SEQ ID NO: 698658 - RNA, 19 nt, Artificial Sequence
  Description of Artificial Sequence: Synthetic oligonucleotide
ccuggacaaucaaaggcca

SEQ ID NO: 698659 - RNA, 19 nt, Artificial Sequence
  Description of Artificial Sequence: Synthetic oligonucleotide
caucuggcaugagguuucc

SEQ ID NO: 698660 - RNA, 19 nt, Artificial Sequence
  Description of Artificial Sequence: Synthetic oligonucleotide
cccucagucgacagaugag

SEQ ID NO: 698661 - RNA, 19 nt, Artificial Sequence
  Description of Artificial Sequence: Synthetic oligonucleotide
ccauuugacugucgaucag

SEQ ID NO: 698662 - RNA, 19 nt, Artificial Sequence
  Description of Artificial Sequence: Synthetic oligonucleotide
agacgaggcuagagcuugg

SEQ ID NO: 698663 - RNA, 19 nt, Artificial Sequence
  Description of Artificial Sequence: Synthetic oligonucleotide
uucggacggauggucgcuc

SEQ ID NO: 698664 - RNA, 19 nt, Artificial Sequence
  Description of Artificial Sequence: Synthetic oligonucleotide
ugccuaccugggucagaug

SEQ ID NO: 698665 - RNA, 19 nt, Artificial Sequence
  Description of Artificial Sequence: Synthetic oligonucleotide
ccucgaucgcugcugguug

SEQ ID NO: 698666 - RNA, 19 nt, Artificial Sequence
  Description of Artificial Sequence: Synthetic oligonucleotide
gagcuugcaccccgaccga

SEQ ID NO: 698667 - RNA, 19 nt, Artificial Sequence
  Description of Artificial Sequence: Synthetic oligonucleotide
cuacaguguuccgacaccu

SEQ ID NO: 698668 - RNA, 19 nt, Artificial Sequence
  Description of Artificial Sequence: Synthetic oligonucleotide
gcuugcaccccgaccgagg

SEQ ID NO: 698669 - RNA, 19 nt, Artificial Sequence
  Description of Artificial Sequence: Synthetic oligonucleotide
gccccgcgcggucauacgg

SEQ ID NO: 698670 - RNA, 19 nt, Artificial Sequence
  Description of Artificial Sequence: Synthetic oligonucleotide
gcugggucccgguccggcg

SEQ ID NO: 698671 - RNA, 19 nt, Artificial Sequence
  Description of Artificial Sequence: Synthetic oligonucleotide
ggcuagagcuugguccucc

SEQ ID NO: 698672 - RNA, 19 nt, Artificial Sequence
  Description of Artificial Sequence: Synthetic oligonucleotide
augggccauacaggcaggu

SEQ ID NO: 698673 - RNA, 19 nt, Artificial Sequence
  Description of Artificial Sequence: Synthetic oligonucleotide
gacugucgaucagcugcug

SEQ ID NO: 698674 - RNA, 19 nt, Artificial Sequence
  Description of Artificial Sequence: Synthetic oligonucleotide
cccaaucauauggcuacag

SEQ ID NO: 698675 - RNA, 19 nt, Artificial Sequence
  Description of Artificial Sequence: Synthetic oligonucleotide
uuggcaccaguuggguuuu

SEQ ID NO: 698676 - RNA, 19 nt, Artificial Sequence
  Description of Artificial Sequence: Synthetic oligonucleotide
gcuaugagaggaggguaca

SEQ ID NO: 698677 - RNA, 19 nt, Artificial Sequence
  Description of Artificial Sequence: Synthetic oligonucleotide
aggcuagagcuugguccuc

SEQ ID NO: 698678 - RNA, 19 nt, Artificial Sequence
  Description of Artificial Sequence: Synthetic oligonucleotide
ugggccauacaggcaggua

SEQ ID NO: 698679 - RNA, 19 nt, Artificial Sequence
  Description of Artificial Sequence: Synthetic oligonucleotide
ccugagcuagcucgcuggc

SEQ ID NO: 698680 - RNA, 19 nt, Artificial Sequence
  Description of Artificial Sequence: Synthetic oligonucleotide
ggacggauggucgcucaug

SEQ ID NO: 698681 - RNA, 19 nt, Artificial Sequence
  Description of Artificial Sequence: Synthetic oligonucleotide
ccgcccuguaaaucucagg

SEQ ID NO: 698682 - RNA, 19 nt, Artificial Sequence
  Description of Artificial Sequence: Synthetic oligonucleotide
agaugcugucccgcccugu

SEQ ID NO: 698683 - RNA, 19 nt, Artificial Sequence
  Description of Artificial Sequence: Synthetic oligonucleotide
acgggaaaucgggcagaug

SEQ ID NO: 698684 - RNA, 19 nt, Artificial Sequence
  Description of Artificial Sequence: Synthetic oligonucleotide
ucccucgaucgcugcuggu

SEQ ID NO: 698685 - RNA, 19 nt, Artificial Sequence
  Description of Artificial Sequence: Synthetic oligonucleotide
ggccuacagaccacccucc

SEQ ID NO: 698686 - RNA, 19 nt, Artificial Sequence
  Description of Artificial Sequence: Synthetic oligonucleotide
cucaguuaauugagaguuu

SEQ ID NO: 698687 - RNA, 19 nt, Artificial Sequence
  Description of Artificial Sequence: Synthetic oligonucleotide
gcugguuggagagcuugca

SEQ ID NO: 698688 - RNA, 19 nt, Artificial Sequence
  Description of Artificial Sequence: Synthetic oligonucleotide
gccgcucuaguucgcucgc

SEQ ID NO: 698689 - RNA, 19 nt, Artificial Sequence
  Description of Artificial Sequence: Synthetic oligonucleotide
ccccgcgcggucauacggg

SEQ ID NO: 698690 - RNA, 19 nt, Artificial Sequence
  Description of Artificial Sequence: Synthetic oligonucleotide
ggauggucgcucauggggu

SEQ ID NO: 698691 - RNA, 19 nt, Artificial Sequence
  Description of Artificial Sequence: Synthetic oligonucleotide
ggagcucccucagucgaca

SEQ ID NO: 698692 - RNA, 19 nt, Artificial Sequence
  Description of Artificial Sequence: Synthetic oligonucleotide
cccgcccuguaaaucucag

SEQ ID NO: 698693 - RNA, 19 nt, Artificial Sequence
  Description of Artificial Sequence: Synthetic oligonucleotide
gacgaggcuagagcuuggu

SEQ ID NO: 698694 - RNA, 19 nt, Artificial Sequence
  Description of Artificial Sequence: Synthetic oligonucleotide
cgguccggcguguuugccg

SEQ ID NO: 698695 - RNA, 19 nt, Artificial Sequence
  Description of Artificial Sequence: Synthetic oligonucleotide
cuucaaccuuaaggguaca

SEQ ID NO: 698696 - RNA, 19 nt, Artificial Sequence
  Description of Artificial Sequence: Synthetic oligonucleotide
gcuagcucgcuggccuucc

SEQ ID NO: 698697 - RNA, 19 nt, Artificial Sequence
  Description of Artificial Sequence: Synthetic oligonucleotide
gguaggucccuugccaggu

SEQ ID NO: 698698 - RNA, 19 nt, Artificial Sequence
  Description of Artificial Sequence: Synthetic oligonucleotide
ggguuagaguauagacauc

SEQ ID NO: 698699 - RNA, 19 nt, Artificial Sequence
  Description of Artificial Sequence: Synthetic oligonucleotide
cacuagucaccucccuccu

SEQ ID NO: 698700 - RNA, 19 nt, Artificial Sequence
  Description of Artificial Sequence: Synthetic oligonucleotide
gggcccagccaugucgaug

SEQ ID NO: 698701 - RNA, 19 nt, Artificial Sequence
  Description of Artificial Sequence: Synthetic oligonucleotide
cccgcgcggucauacgggc

SEQ ID NO: 698702 - RNA, 19 nt, Artificial Sequence
  Description of Artificial Sequence: Synthetic oligonucleotide
uggucucccaugggccaua

SEQ ID NO: 698703 - RNA, 19 nt, Artificial Sequence
  Description of Artificial Sequence: Synthetic oligonucleotide
guucggacggauggucgcu

SEQ ID NO: 698704 - RNA, 19 nt, Artificial Sequence
  Description of Artificial Sequence: Synthetic oligonucleotide
cugccuaccugggucagau

SEQ ID NO: 698705 - RNA, 19 nt, Artificial Sequence
  Description of Artificial Sequence: Synthetic oligonucleotide
gucucccaugggccauaca

SEQ ID NO: 698706 - RNA, 19 nt, Artificial Sequence
  Description of Artificial Sequence: Synthetic oligonucleotide
ggggccuacagaccacccu

SEQ ID NO: 698707 - RNA, 19 nt, Artificial Sequence
  Description of Artificial Sequence: Synthetic oligonucleotide
gguuccuauggggccuaca

SEQ ID NO: 698708 - RNA, 19 nt, Artificial Sequence
  Description of Artificial Sequence: Synthetic oligonucleotide
ccuuaaggguacacacgua

SEQ ID NO: 698709 - RNA, 19 nt, Artificial Sequence
  Description of Artificial Sequence: Synthetic oligonucleotide
ccuaccugggucagaugua

SEQ ID NO: 698710 - RNA, 19 nt, Artificial Sequence
  Description of Artificial Sequence: Synthetic oligonucleotide
cccgguccggcguguuugc

SEQ ID NO: 698711 - RNA, 19 nt, Artificial Sequence
  Description of Artificial Sequence: Synthetic oligonucleotide
gcaacacggagagcaccga

SEQ ID NO: 698712 - RNA, 19 nt, Artificial Sequence
  Description of Artificial Sequence: Synthetic oligonucleotide
gccacgccgcugucccggg

SEQ ID NO: 698713 - RNA, 19 nt, Artificial Sequence
  Description of Artificial Sequence: Synthetic oligonucleotide
gucauacgggcagcugggu

SEQ ID NO: 698714 - RNA, 19 nt, Artificial Sequence
  Description of Artificial Sequence: Synthetic oligonucleotide
gcggucauacgggcagcug

SEQ ID NO: 698715 - RNA, 19 nt, Artificial Sequence
  Description of Artificial Sequence: Synthetic oligonucleotide
gcgugugggcaggaggaga

SEQ ID NO: 698716 - RNA, 19 nt, Artificial Sequence
  Description of Artificial Sequence: Synthetic oligonucleotide
guucgcucgcucccucgau

SEQ ID NO: 698717 - RNA, 19 nt, Artificial Sequence
  Description of Artificial Sequence: Synthetic oligonucleotide
ggcaaccuguucagcucca

SEQ ID NO: 698718 - RNA, 19 nt, Artificial Sequence
  Description of Artificial Sequence: Synthetic oligonucleotide
gcucgugacagggcaaccu

SEQ ID NO: 698719 - RNA, 19 nt, Artificial Sequence
  Description of Artificial Sequence: Synthetic oligonucleotide
ggagcucgugacagggcaa

SEQ ID NO: 698720 - RNA, 19 nt, Artificial Sequence
  Description of Artificial Sequence: Synthetic oligonucleotide
cgggcagaugcugucccgc

SEQ ID NO: 698721 - RNA, 19 nt, Artificial Sequence
  Description of Artificial Sequence: Synthetic oligonucleotide
ggucucccaugggccauac

SEQ ID NO: 698722 - RNA, 19 nt, Artificial Sequence
  Description of Artificial Sequence: Synthetic oligonucleotide
gccuacagaccacccuccu

SEQ ID NO: 698723 - RNA, 19 nt, Artificial Sequence
  Description of Artificial Sequence: Synthetic oligonucleotide
gucccugccuguccauguu

SEQ ID NO: 698724 - RNA, 19 nt, Artificial Sequence
  Description of Artificial Sequence: Synthetic oligonucleotide
uggcaccaguuggguuuuc

SEQ ID NO: 698725 - RNA, 19 nt, Artificial Sequence
  Description of Artificial Sequence: Synthetic oligonucleotide
ggagacgaggcuagagcuu

SEQ ID NO: 698726 - RNA, 19 nt, Artificial Sequence
  Description of Artificial Sequence: Synthetic oligonucleotide
cuagcucgcuggccuuccu

SEQ ID NO: 698727 - RNA, 19 nt, Artificial Sequence
  Description of Artificial Sequence: Synthetic oligonucleotide
ggggaaggucggggcuuag

SEQ ID NO: 698728 - RNA, 19 nt, Artificial Sequence
  Description of Artificial Sequence: Synthetic oligonucleotide
cgaucgcugcugguuggag

SEQ ID NO: 698729 - RNA, 19 nt, Artificial Sequence
  Description of Artificial Sequence: Synthetic oligonucleotide
gguccugagcuagcucgcu

SEQ ID NO: 698730 - RNA, 19 nt, Artificial Sequence
  Description of Artificial Sequence: Synthetic oligonucleotide
gcgccccgcgcggucauac

SEQ ID NO: 698731 - RNA, 19 nt, Artificial Sequence
  Description of Artificial Sequence: Synthetic oligonucleotide
ccgguccggcguguuugcc

SEQ ID NO: 698732 - RNA, 19 nt, Artificial Sequence
  Description of Artificial Sequence: Synthetic oligonucleotide
guccggcguguuugccgcu

SEQ ID NO: 698733 - RNA, 19 nt, Artificial Sequence
  Description of Artificial Sequence: Synthetic oligonucleotide
cgccccgcgcggucauacg

SEQ ID NO: 698734 - RNA, 19 nt, Artificial Sequence
  Description of Artificial Sequence: Synthetic oligonucleotide
gucccgguccggcguguuu

SEQ ID NO: 698735 - RNA, 19 nt, Artificial Sequence
  Description of Artificial Sequence: Synthetic oligonucleotide
gggguuccuauggggccua

SEQ ID NO: 698736 - RNA, 19 nt, Artificial Sequence
  Description of Artificial Sequence: Synthetic oligonucleotide
ccgcgcggucauacgggca

SEQ ID NO: 698737 - RNA, 19 nt, Artificial Sequence
  Description of Artificial Sequence: Synthetic oligonucleotide
gcagcgccccgcggcgccc

SEQ ID NO: 698738 - RNA, 19 nt, Artificial Sequence
  Description of Artificial Sequence: Synthetic oligonucleotide
cagcucuacccuggacaau

SEQ ID NO: 698739 - RNA, 19 nt, Artificial Sequence
  Description of Artificial Sequence: Synthetic oligonucleotide
cccucgaucgcugcugguu

SEQ ID NO: 698740 - RNA, 19 nt, Artificial Sequence
  Description of Artificial Sequence: Synthetic oligonucleotide
ccuugagugcagggagccu

SEQ ID NO: 698741 - RNA, 19 nt, Artificial Sequence
  Description of Artificial Sequence: Synthetic oligonucleotide
cgcucaugggguggaugga

SEQ ID NO: 698742 - RNA, 19 nt, Artificial Sequence
  Description of Artificial Sequence: Synthetic oligonucleotide
ccgacaccuccuuggcaau

SEQ ID NO: 698743 - RNA, 19 nt, Artificial Sequence
  Description of Artificial Sequence: Synthetic oligonucleotide
gcaccccgaccgagggcca

SEQ ID NO: 698744 - RNA, 19 nt, Artificial Sequence
  Description of Artificial Sequence: Synthetic oligonucleotide
ccacgccgcugucccggga

SEQ ID NO: 698745 - RNA, 19 nt, Artificial Sequence
  Description of Artificial Sequence: Synthetic oligonucleotide
gggucccgguccggcgugu

SEQ ID NO: 698746 - RNA, 19 nt, Artificial Sequence
  Description of Artificial Sequence: Synthetic oligonucleotide
ccgcucuaguucgcucgcu

SEQ ID NO: 698747 - RNA, 19 nt, Artificial Sequence
  Description of Artificial Sequence: Synthetic oligonucleotide
cggacggauggucgcucau

SEQ ID NO: 698748 - RNA, 19 nt, Artificial Sequence
  Description of Artificial Sequence: Synthetic oligonucleotide
ggucccgguccggcguguu

SEQ ID NO: 698749 - RNA, 19 nt, Artificial Sequence
  Description of Artificial Sequence: Synthetic oligonucleotide
ggcgccccgcgcggucaua

SEQ ID NO: 698750 - RNA, 19 nt, Artificial Sequence
  Description of Artificial Sequence: Synthetic oligonucleotide
aaugcggugauauagucac

SEQ ID NO: 698751 - RNA, 19 nt, Artificial Sequence
  Description of Artificial Sequence: Synthetic oligonucleotide
aaaccuucaauauuaacug

SEQ ID NO: 698752 - RNA, 19 nt, Artificial Sequence
  Description of Artificial Sequence: Synthetic oligonucleotide
uuuggauaugcauagaggc

SEQ ID NO: 698753 - RNA, 19 nt, Artificial Sequence
  Description of Artificial Sequence: Synthetic oligonucleotide
aauauuaacugcagggugc

SEQ ID NO: 698754 - RNA, 19 nt, Artificial Sequence
  Description of Artificial Sequence: Synthetic oligonucleotide
agagcaauguccuugugcc

SEQ ID NO: 698755 - RNA, 19 nt, Artificial Sequence
  Description of Artificial Sequence: Synthetic oligonucleotide
uagaagaagagcaaugucc

SEQ ID NO: 698756 - RNA, 19 nt, Artificial Sequence
  Description of Artificial Sequence: Synthetic oligonucleotide
auauaauacauccaccuag

SEQ ID NO: 698757 - RNA, 19 nt, Artificial Sequence
  Description of Artificial Sequence: Synthetic oligonucleotide
ucuucuauuuucaagccag

SEQ ID NO: 698758 - RNA, 19 nt, Artificial Sequence
  Description of Artificial Sequence: Synthetic oligonucleotide
uauggcaagagucuaaggc

SEQ ID NO: 698759 - RNA, 19 nt, Artificial Sequence
  Description of Artificial Sequence: Synthetic oligonucleotide
aaugguuccacuuuaguaa

SEQ ID NO: 698760 - RNA, 19 nt, Artificial Sequence
  Description of Artificial Sequence: Synthetic oligonucleotide
uuaacaguccuucggaccg

SEQ ID NO: 698761 - RNA, 19 nt, Artificial Sequence
  Description of Artificial Sequence: Synthetic oligonucleotide
gaugaucaaagucaucucg

SEQ ID NO: 698762 - RNA, 19 nt, Artificial Sequence
  Description of Artificial Sequence: Synthetic oligonucleotide
aaugugacgugauagaaau

SEQ ID NO: 698763 - RNA, 19 nt, Artificial Sequence
  Description of Artificial Sequence: Synthetic oligonucleotide
guuauuuggauaugcauag

SEQ ID NO: 698764 - RNA, 19 nt, Artificial Sequence
  Description of Artificial Sequence: Synthetic oligonucleotide
gugauagaaauacacagag

SEQ ID NO: 698765 - RNA, 19 nt, Artificial Sequence
  Description of Artificial Sequence: Synthetic oligonucleotide
ucuucuacaaccugcaugu

SEQ ID NO: 698766 - RNA, 19 nt, Artificial Sequence
  Description of Artificial Sequence: Synthetic oligonucleotide
aaagacuucccaaugguuc

SEQ ID NO: 698767 - RNA, 19 nt, Artificial Sequence
  Description of Artificial Sequence: Synthetic oligonucleotide
aauaauuagcagcuucaug

SEQ ID NO: 698768 - RNA, 19 nt, Artificial Sequence
  Description of Artificial Sequence: Synthetic oligonucleotide
uaugcauagaggccggugg

SEQ ID NO: 698769 - RNA, 19 nt, Artificial Sequence
  Description of Artificial Sequence: Synthetic oligonucleotide
acgugauagaaauacacag

SEQ ID NO: 698770 - RNA, 19 nt, Artificial Sequence
  Description of Artificial Sequence: Synthetic oligonucleotide
aacuugacaaucucuacgu

SEQ ID NO: 698771 - RNA, 19 nt, Artificial Sequence
  Description of Artificial Sequence: Synthetic oligonucleotide
uuuacauagucagucaaag

SEQ ID NO: 698772 - RNA, 19 nt, Artificial Sequence
  Description of Artificial Sequence: Synthetic oligonucleotide
ugaucuacguuacacacgu

SEQ ID NO: 698773 - RNA, 19 nt, Artificial Sequence
  Description of Artificial Sequence: Synthetic oligonucleotide
agucuaaggcacuucaaac

SEQ ID NO: 698774 - RNA, 19 nt, Artificial Sequence
  Description of Artificial Sequence: Synthetic oligonucleotide
uggauaugcauagaggccg

SEQ ID NO: 698775 - RNA, 19 nt, Artificial Sequence
  Description of Artificial Sequence: Synthetic oligonucleotide
aaguuagagugagacacgc

SEQ ID NO: 698776 - RNA, 19 nt, Artificial Sequence
  Description of Artificial Sequence: Synthetic oligonucleotide
accguuugagucuuuauuc

SEQ ID NO: 698777 - RNA, 19 nt, Artificial Sequence
  Description of Artificial Sequence: Synthetic oligonucleotide
uguaacauuaaacguuucu

SEQ ID NO: 698778 - RNA, 19 nt, Artificial Sequence
  Description of Artificial Sequence: Synthetic oligonucleotide
accuagauaaaccagcuga

SEQ ID NO: 698779 - RNA, 19 nt, Artificial Sequence
  Description of Artificial Sequence: Synthetic oligonucleotide
uauaauacauccaccuaga

SEQ ID NO: 698780 - RNA, 19 nt, Artificial Sequence
  Description of Artificial Sequence: Synthetic oligonucleotide
ugugacgugauagaaauac

SEQ ID NO: 698781 - RNA, 19 nt, Artificial Sequence
  Description of Artificial Sequence: Synthetic oligonucleotide
uuugaaaauauggcaagag

SEQ ID NO: 698782 - RNA, 19 nt, Artificial Sequence
  Description of Artificial Sequence: Synthetic oligonucleotide
uucaccaugucuauucgcc

SEQ ID NO: 698783 - RNA, 19 nt, Artificial Sequence
  Description of Artificial Sequence: Synthetic oligonucleotide
uggaaagacuucccaaugg

SEQ ID NO: 698784 - RNA, 19 nt, Artificial Sequence
  Description of Artificial Sequence: Synthetic oligonucleotide
cuagaggcaaauuuggaac

SEQ ID NO: 698785 - RNA, 19 nt, Artificial Sequence
  Description of Artificial Sequence: Synthetic oligonucleotide
accuaauucagccuuuauc

SEQ ID NO: 698786 - RNA, 19 nt, Artificial Sequence
  Description of Artificial Sequence: Synthetic oligonucleotide
ugacgugauagaaauacac

SEQ ID NO: 698787 - RNA, 19 nt, Artificial Sequence
  Description of Artificial Sequence: Synthetic oligonucleotide
ugucuauucgcccauggcu

SEQ ID NO: 698788 - RNA, 19 nt, Artificial Sequence
  Description of Artificial Sequence: Synthetic oligonucleotide
aauauggcaagagucuaag

SEQ ID NO: 698789 - RNA, 19 nt, Artificial Sequence
  Description of Artificial Sequence: Synthetic oligonucleotide
uccaccuagauaaaccagc

SEQ ID NO: 698790 - RNA, 19 nt, Artificial Sequence
  Description of Artificial Sequence: Synthetic oligonucleotide
ucuguuagguucacugggg

SEQ ID NO: 698791 - RNA, 19 nt, Artificial Sequence
  Description of Artificial Sequence: Synthetic oligonucleotide
cagaguauuucccugagug

SEQ ID NO: 698792 - RNA, 19 nt, Artificial Sequence
  Description of Artificial Sequence: Synthetic oligonucleotide
uggaauauaaaaguugaaa

SEQ ID NO: 698793 - RNA, 19 nt, Artificial Sequence
  Description of Artificial Sequence: Synthetic oligonucleotide
acauucaguaucugucgcc

SEQ ID NO: 698794 - RNA, 19 nt, Artificial Sequence
  Description of Artificial Sequence: Synthetic oligonucleotide
agugaaugugacgugauag

SEQ ID NO: 698795 - RNA, 19 nt, Artificial Sequence
  Description of Artificial Sequence: Synthetic oligonucleotide
aagagucuaaggcacuuca

SEQ ID NO: 698796 - RNA, 19 nt, Artificial Sequence
  Description of Artificial Sequence: Synthetic oligonucleotide
accaaagugaaugugacgu

SEQ ID NO: 698797 - RNA, 19 nt, Artificial Sequence
  Description of Artificial Sequence: Synthetic oligonucleotide
uuggauaugcauagaggcc

SEQ ID NO: 698798 - RNA, 19 nt, Artificial Sequence
  Description of Artificial Sequence: Synthetic oligonucleotide
uccacuuuaguaaguggcc

SEQ ID NO: 698799 - RNA, 19 nt, Artificial Sequence
  Description of Artificial Sequence: Synthetic oligonucleotide
auuaaacguuucuuuauga

SEQ ID NO: 698800 - RNA, 19 nt, Artificial Sequence
  Description of Artificial Sequence: Synthetic oligonucleotide
auacauuccaagugauuuc

SEQ ID NO: 698801 - RNA, 19 nt, Artificial Sequence
  Description of Artificial Sequence: Synthetic oligonucleotide
ucaauauuaacugcagggu

SEQ ID NO: 698802 - RNA, 19 nt, Artificial Sequence
  Description of Artificial Sequence: Synthetic oligonucleotide
aucuacguuacacacgucu

SEQ ID NO: 698803 - RNA, 19 nt, Artificial Sequence
  Description of Artificial Sequence: Synthetic oligonucleotide
ugauguaacggagccacgg

SEQ ID NO: 698804 - RNA, 19 nt, Artificial Sequence
  Description of Artificial Sequence: Synthetic oligonucleotide
uaauacauccaccuagaua

SEQ ID NO: 698805 - RNA, 19 nt, Artificial Sequence
  Description of Artificial Sequence: Synthetic oligonucleotide
cuucaauauuaacugcagg

SEQ ID NO: 698806 - RNA, 19 nt, Artificial Sequence
  Description of Artificial Sequence: Synthetic oligonucleotide
ucuacguuacacacgucug

SEQ ID NO: 698807 - RNA, 19 nt, Artificial Sequence
  Description of Artificial Sequence: Synthetic oligonucleotide
aauguaacauuaaacguuu

SEQ ID NO: 698808 - RNA, 19 nt, Artificial Sequence
  Description of Artificial Sequence: Synthetic oligonucleotide
caauauuaacugcagggug

SEQ ID NO: 698809 - RNA, 19 nt, Artificial Sequence
  Description of Artificial Sequence: Synthetic oligonucleotide
uguuuacauagucagucaa

SEQ ID NO: 698810 - RNA, 19 nt, Artificial Sequence
  Description of Artificial Sequence: Synthetic oligonucleotide
ucggccauguugaugaugu

SEQ ID NO: 698811 - RNA, 19 nt, Artificial Sequence
  Description of Artificial Sequence: Synthetic oligonucleotide
ucaaugguaucacacucgu

SEQ ID NO: 698812 - RNA, 19 nt, Artificial Sequence
  Description of Artificial Sequence: Synthetic oligonucleotide
aaacguuucuuuaugacua

SEQ ID NO: 698813 - RNA, 19 nt, Artificial Sequence
  Description of Artificial Sequence: Synthetic oligonucleotide
ggaaguuagagugagacac

SEQ ID NO: 698814 - RNA, 19 nt, Artificial Sequence
  Description of Artificial Sequence: Synthetic oligonucleotide
augauaggcguguaccccg

SEQ ID NO: 698815 - RNA, 19 nt, Artificial Sequence
  Description of Artificial Sequence: Synthetic oligonucleotide
uucguuauuuggauaugca

SEQ ID NO: 698816 - RNA, 19 nt, Artificial Sequence
  Description of Artificial Sequence: Synthetic oligonucleotide
auagucagucaaaggaacc

SEQ ID NO: 698817 - RNA, 19 nt, Artificial Sequence
  Description of Artificial Sequence: Synthetic oligonucleotide
cuuguucuggugaucuacg

SEQ ID NO: 698818 - RNA, 19 nt, Artificial Sequence
  Description of Artificial Sequence: Synthetic oligonucleotide
uuucguuauuuggauaugc

SEQ ID NO: 698819 - RNA, 19 nt, Artificial Sequence
  Description of Artificial Sequence: Synthetic oligonucleotide
auagucacccaccauggcu

SEQ ID NO: 698820 - RNA, 19 nt, Artificial Sequence
  Description of Artificial Sequence: Synthetic oligonucleotide
ucauaccucucucugauuu

SEQ ID NO: 698821 - RNA, 19 nt, Artificial Sequence
  Description of Artificial Sequence: Synthetic oligonucleotide
acacucgucaucugacucg

SEQ ID NO: 698822 - RNA, 19 nt, Artificial Sequence
  Description of Artificial Sequence: Synthetic oligonucleotide
ucguccuggauauugacau

SEQ ID NO: 698823 - RNA, 19 nt, Artificial Sequence
  Description of Artificial Sequence: Synthetic oligonucleotide
cuggaaguuagagugagac

SEQ ID NO: 698824 - RNA, 19 nt, Artificial Sequence
  Description of Artificial Sequence: Synthetic oligonucleotide
cacuauguuucccuagagg

SEQ ID NO: 698825 - RNA, 19 nt, Artificial Sequence
  Description of Artificial Sequence: Synthetic oligonucleotide
cucgaaugcggugauauag

SEQ ID NO: 698826 - RNA, 19 nt, Artificial Sequence
  Description of Artificial Sequence: Synthetic oligonucleotide
gacgugggcguauagaaga

SEQ ID NO: 698827 - RNA, 19 nt, Artificial Sequence
  Description of Artificial Sequence: Synthetic oligonucleotide
guggcacacacauggaggg

SEQ ID NO: 698828 - RNA, 19 nt, Artificial Sequence
  Description of Artificial Sequence: Synthetic oligonucleotide
uugacgugggcguauagaa

SEQ ID NO: 698829 - RNA, 19 nt, Artificial Sequence
  Description of Artificial Sequence: Synthetic oligonucleotide
uacucaaugguaucacacu

SEQ ID NO: 698830 - RNA, 19 nt, Artificial Sequence
  Description of Artificial Sequence: Synthetic oligonucleotide
ugggcguauagaagaagag

SEQ ID NO: 698831 - RNA, 19 nt, Artificial Sequence
  Description of Artificial Sequence: Synthetic oligonucleotide
augccacuuaauucauacc

SEQ ID NO: 698832 - RNA, 19 nt, Artificial Sequence
  Description of Artificial Sequence: Synthetic oligonucleotide
ccuaauucagccuuuauca

SEQ ID NO: 698833 - RNA, 19 nt, Artificial Sequence
  Description of Artificial Sequence: Synthetic oligonucleotide
auucauaccucucucugau

SEQ ID NO: 698834 - RNA, 19 nt, Artificial Sequence
  Description of Artificial Sequence: Synthetic oligonucleotide
cuaauucagccuuuaucac

SEQ ID NO: 698835 - RNA, 19 nt, Artificial Sequence
  Description of Artificial Sequence: Synthetic oligonucleotide
aaaauauggcaagagucua

SEQ ID NO: 698836 - RNA, 19 nt, Artificial Sequence
  Description of Artificial Sequence: Synthetic oligonucleotide
aguugaaaaugcuguguca

SEQ ID NO: 698837 - RNA, 19 nt, Artificial Sequence
  Description of Artificial Sequence: Synthetic oligonucleotide
ucgggaggauacucaaugg

SEQ ID NO: 698838 - RNA, 19 nt, Artificial Sequence
  Description of Artificial Sequence: Synthetic oligonucleotide
gaaguuagagugagacacg

SEQ ID NO: 698839 - RNA, 19 nt, Artificial Sequence
  Description of Artificial Sequence: Synthetic oligonucleotide
guauagaagaagagcaaug

SEQ ID NO: 698840 - RNA, 19 nt, Artificial Sequence
  Description of Artificial Sequence: Synthetic oligonucleotide
ucguuauuuggauaugcau

SEQ ID NO: 698841 - RNA, 19 nt, Artificial Sequence
  Description of Artificial Sequence: Synthetic oligonucleotide
acuggaaagacuucccaau

SEQ ID NO: 698842 - RNA, 19 nt, Artificial Sequence
  Description of Artificial Sequence: Synthetic oligonucleotide
ucgucaucugacucggaag

SEQ ID NO: 698843 - RNA, 19 nt, Artificial Sequence
  Description of Artificial Sequence: Synthetic oligonucleotide
uucccuuccgccauuccug

SEQ ID NO: 698844 - RNA, 19 nt, Artificial Sequence
  Description of Artificial Sequence: Synthetic oligonucleotide
gucuaaggcacuucaaaca

SEQ ID NO: 698845 - RNA, 19 nt, Artificial Sequence
  Description of Artificial Sequence: Synthetic oligonucleotide
auauggcaagagucuaagg

SEQ ID NO: 698846 - RNA, 19 nt, Artificial Sequence
  Description of Artificial Sequence: Synthetic oligonucleotide
cucgggaggauacucaaug

SEQ ID NO: 698847 - RNA, 19 nt, Artificial Sequence
  Description of Artificial Sequence: Synthetic oligonucleotide
cauucaguaucugucgccc

SEQ ID NO: 698848 - RNA, 19 nt, Artificial Sequence
  Description of Artificial Sequence: Synthetic oligonucleotide
uuuaguaaguggccauguc

SEQ ID NO: 698849 - RNA, 19 nt, Artificial Sequence
  Description of Artificial Sequence: Synthetic oligonucleotide
ggaauggaauacuggaaag

SEQ ID NO: 698850 - RNA, 19 nt, Artificial Sequence
  Description of Artificial Sequence: Synthetic oligonucleotide
gacagaguauuucccugag

SEQ ID NO: 698851 - RNA, 19 nt, Artificial Sequence
  Description of Artificial Sequence: Synthetic oligonucleotide
cuacguuacacacgucugc

SEQ ID NO: 698852 - RNA, 19 nt, Artificial Sequence
  Description of Artificial Sequence: Synthetic oligonucleotide
gagacagccucgaaugcgg

SEQ ID NO: 698853 - RNA, 19 nt, Artificial Sequence
  Description of Artificial Sequence: Synthetic oligonucleotide
ucgaaugcggugauauagu

SEQ ID NO: 698854 - RNA, 19 nt, Artificial Sequence
  Description of Artificial Sequence: Synthetic oligonucleotide
gacaagucgcugaugauca

SEQ ID NO: 698855 - RNA, 19 nt, Artificial Sequence
  Description of Artificial Sequence: Synthetic oligonucleotide
ggugaucuacguuacacac

SEQ ID NO: 698856 - RNA, 19 nt, Artificial Sequence
  Description of Artificial Sequence: Synthetic oligonucleotide
agcuacacuauguuucccu

SEQ ID NO: 698857 - RNA, 19 nt, Artificial Sequence
  Description of Artificial Sequence: Synthetic oligonucleotide
caugucuauucgcccaugg

SEQ ID NO: 698858 - RNA, 19 nt, Artificial Sequence
  Description of Artificial Sequence: Synthetic oligonucleotide
cucggaauggaauacugga

SEQ ID NO: 698859 - RNA, 19 nt, Artificial Sequence
  Description of Artificial Sequence: Synthetic oligonucleotide
uacgugcccauguucacug

SEQ ID NO: 698860 - RNA, 19 nt, Artificial Sequence
  Description of Artificial Sequence: Synthetic oligonucleotide
ucggaauggaauacuggaa

SEQ ID NO: 698861 - RNA, 19 nt, Artificial Sequence
  Description of Artificial Sequence: Synthetic oligonucleotide
gucagucaaaggaaccucg

SEQ ID NO: 698862 - RNA, 19 nt, Artificial Sequence
  Description of Artificial Sequence: Synthetic oligonucleotide
aacggagccacgguccggg

SEQ ID NO: 698863 - RNA, 19 nt, Artificial Sequence
  Description of Artificial Sequence: Synthetic oligonucleotide
ugacgugggcguauagaag

SEQ ID NO: 698864 - RNA, 19 nt, Artificial Sequence
  Description of Artificial Sequence: Synthetic oligonucleotide
ugaaaaugcugugucaauu

SEQ ID NO: 698865 - RNA, 19 nt, Artificial Sequence
  Description of Artificial Sequence: Synthetic oligonucleotide
uucucagguucacauucug

SEQ ID NO: 698866 - RNA, 19 nt, Artificial Sequence
  Description of Artificial Sequence: Synthetic oligonucleotide
uuagguucacuggggacag

SEQ ID NO: 698867 - RNA, 19 nt, Artificial Sequence
  Description of Artificial Sequence: Synthetic oligonucleotide
uguuagguucacuggggac

SEQ ID NO: 698868 - RNA, 19 nt, Artificial Sequence
  Description of Artificial Sequence: Synthetic oligonucleotide
uggaaguuagagugagaca

SEQ ID NO: 698869 - RNA, 19 nt, Artificial Sequence
  Description of Artificial Sequence: Synthetic oligonucleotide
guucuggugaucuacguua

SEQ ID NO: 698870 - RNA, 19 nt, Artificial Sequence
  Description of Artificial Sequence: Synthetic oligonucleotide
gagagcuagcuacacuaug

SEQ ID NO: 698871 - RNA, 19 nt, Artificial Sequence
  Description of Artificial Sequence: Synthetic oligonucleotide
uucaguaucugucgcccaa

SEQ ID NO: 698872 - RNA, 19 nt, Artificial Sequence
  Description of Artificial Sequence: Synthetic oligonucleotide
aaugaacugaagguucuuu

SEQ ID NO: 698873 - RNA, 19 nt, Artificial Sequence
  Description of Artificial Sequence: Synthetic oligonucleotide
uggcuaucuggucauucug

SEQ ID NO: 698874 - RNA, 19 nt, Artificial Sequence
  Description of Artificial Sequence: Synthetic oligonucleotide
auuucccugaguggggaac

SEQ ID NO: 698875 - RNA, 19 nt, Artificial Sequence
  Description of Artificial Sequence: Synthetic oligonucleotide
gacgugauagaaauacaca

SEQ ID NO: 698876 - RNA, 19 nt, Artificial Sequence
  Description of Artificial Sequence: Synthetic oligonucleotide
aggaaccucggugaguagg

SEQ ID NO: 698877 - RNA, 19 nt, Artificial Sequence
  Description of Artificial Sequence: Synthetic oligonucleotide
caugauaggcguguacccc

SEQ ID NO: 698878 - RNA, 19 nt, Artificial Sequence
  Description of Artificial Sequence: Synthetic oligonucleotide
acuggggacagaguauuuc

SEQ ID NO: 698879 - RNA, 19 nt, Artificial Sequence
  Description of Artificial Sequence: Synthetic oligonucleotide
cuucaccaugucuauucgc

SEQ ID NO: 698880 - RNA, 19 nt, Artificial Sequence
  Description of Artificial Sequence: Synthetic oligonucleotide
guuagguucacuggggaca

SEQ ID NO: 698881 - RNA, 19 nt, Artificial Sequence
  Description of Artificial Sequence: Synthetic oligonucleotide
aacguuucuuuaugacuau

SEQ ID NO: 698882 - RNA, 19 nt, Artificial Sequence
  Description of Artificial Sequence: Synthetic oligonucleotide
cuggugaucuacguuacac

SEQ ID NO: 698883 - RNA, 19 nt, Artificial Sequence
  Description of Artificial Sequence: Synthetic oligonucleotide
uggagggcuauguuuacau

SEQ ID NO: 698884 - RNA, 19 nt, Artificial Sequence
  Description of Artificial Sequence: Synthetic oligonucleotide
uacguuacacacgucugca

SEQ ID NO: 698885 - RNA, 19 nt, Artificial Sequence
  Description of Artificial Sequence: Synthetic oligonucleotide
gucuauucgcccauggcug

SEQ ID NO: 698886 - RNA, 19 nt, Artificial Sequence
  Description of Artificial Sequence: Synthetic oligonucleotide
cuggucacggccucugacc

SEQ ID NO: 698887 - RNA, 19 nt, Artificial Sequence
  Description of Artificial Sequence: Synthetic oligonucleotide
cuggaaagacuucccaaug

SEQ ID NO: 698888 - RNA, 19 nt, Artificial Sequence
  Description of Artificial Sequence: Synthetic oligonucleotide
gugacuuuacccagccugg

SEQ ID NO: 698889 - RNA, 19 nt, Artificial Sequence
  Description of Artificial Sequence: Synthetic oligonucleotide
guaacggagccacgguccg

SEQ ID NO: 698890 - RNA, 19 nt, Artificial Sequence
  Description of Artificial Sequence: Synthetic oligonucleotide
uggucacggccucugacca

SEQ ID NO: 698891 - RNA, 19 nt, Artificial Sequence
  Description of Artificial Sequence: Synthetic oligonucleotide
cauccaccuagauaaacca

SEQ ID NO: 698892 - RNA, 19 nt, Artificial Sequence
  Description of Artificial Sequence: Synthetic oligonucleotide
cacgcggaaccacucaugc

SEQ ID NO: 698893 - RNA, 19 nt, Artificial Sequence
  Description of Artificial Sequence: Synthetic oligonucleotide
uucuggugaucuacguuac

SEQ ID NO: 698894 - RNA, 19 nt, Artificial Sequence
  Description of Artificial Sequence: Synthetic oligonucleotide
ucuauucgcccauggcuga

SEQ ID NO: 698895 - RNA, 19 nt, Artificial Sequence
  Description of Artificial Sequence: Synthetic oligonucleotide
ggcguauagaagaagagca

SEQ ID NO: 698896 - RNA, 19 nt, Artificial Sequence
  Description of Artificial Sequence: Synthetic oligonucleotide
gugaucuacguuacacacg

SEQ ID NO: 698897 - RNA, 19 nt, Artificial Sequence
  Description of Artificial Sequence: Synthetic oligonucleotide
agcaauguccuugugccca

SEQ ID NO: 698898 - RNA, 19 nt, Artificial Sequence
  Description of Artificial Sequence: Synthetic oligonucleotide
uguucuggugaucuacguu

SEQ ID NO: 698899 - RNA, 19 nt, Artificial Sequence
  Description of Artificial Sequence: Synthetic oligonucleotide
uggcugacggccagcauga

SEQ ID NO: 698900 - RNA, 19 nt, Artificial Sequence
  Description of Artificial Sequence: Synthetic oligonucleotide
uugaaaaugcugugucaau

SEQ ID NO: 698901 - RNA, 19 nt, Artificial Sequence
  Description of Artificial Sequence: Synthetic oligonucleotide
uaugguuugagagcccauc

SEQ ID NO: 698902 - RNA, 19 nt, Artificial Sequence
  Description of Artificial Sequence: Synthetic oligonucleotide
auucgcccauggcugacgg

SEQ ID NO: 698903 - RNA, 19 nt, Artificial Sequence
  Description of Artificial Sequence: Synthetic oligonucleotide
aggauacucaaugguauca

SEQ ID NO: 698904 - RNA, 19 nt, Artificial Sequence
  Description of Artificial Sequence: Synthetic oligonucleotide
acagcggacuucugacugg

SEQ ID NO: 698905 - RNA, 19 nt, Artificial Sequence
  Description of Artificial Sequence: Synthetic oligonucleotide
agggcuauggagagagcgc

SEQ ID NO: 698906 - RNA, 19 nt, Artificial Sequence
  Description of Artificial Sequence: Synthetic oligonucleotide
gaggauacucaaugguauc

SEQ ID NO: 698907 - RNA, 19 nt, Artificial Sequence
  Description of Artificial Sequence: Synthetic oligonucleotide
uuuucguuauuuggauaug

SEQ ID NO: 698908 - RNA, 19 nt, Artificial Sequence
  Description of Artificial Sequence: Synthetic oligonucleotide
ggugaguaggaccaggaga

SEQ ID NO: 698909 - RNA, 19 nt, Artificial Sequence
  Description of Artificial Sequence: Synthetic oligonucleotide
uccguguuugcagacuuca

SEQ ID NO: 698910 - RNA, 19 nt, Artificial Sequence
  Description of Artificial Sequence: Synthetic oligonucleotide
uuaugacuauuguggaaua

SEQ ID NO: 698911 - RNA, 19 nt, Artificial Sequence
  Description of Artificial Sequence: Synthetic oligonucleotide
ugacaaucucuacgugccc

SEQ ID NO: 698912 - RNA, 19 nt, Artificial Sequence
  Description of Artificial Sequence: Synthetic oligonucleotide
cacagcggacuucugacug

SEQ ID NO: 698913 - RNA, 19 nt, Artificial Sequence
  Description of Artificial Sequence: Synthetic oligonucleotide
cuauguuucccuagaggca

SEQ ID NO: 698914 - RNA, 19 nt, Artificial Sequence
  Description of Artificial Sequence: Synthetic oligonucleotide
aagugaaugugacgugaua

SEQ ID NO: 698915 - RNA, 19 nt, Artificial Sequence
  Description of Artificial Sequence: Synthetic oligonucleotide
auaauacauccaccuagau

SEQ ID NO: 698916 - RNA, 19 nt, Artificial Sequence
  Description of Artificial Sequence: Synthetic oligonucleotide
gcuagcuacacuauguuuc

SEQ ID NO: 698917 - RNA, 19 nt, Artificial Sequence
  Description of Artificial Sequence: Synthetic oligonucleotide
caaugguuccacuuuagua

SEQ ID NO: 698918 - RNA, 19 nt, Artificial Sequence
  Description of Artificial Sequence: Synthetic oligonucleotide
ugauaggcguguaccccgc

SEQ ID NO: 698919 - RNA, 19 nt, Artificial Sequence
  Description of Artificial Sequence: Synthetic oligonucleotide
aagccauauaauacaucca

SEQ ID NO: 698920 - RNA, 19 nt, Artificial Sequence
  Description of Artificial Sequence: Synthetic oligonucleotide
aaagugaaugugacgugau

SEQ ID NO: 698921 - RNA, 19 nt, Artificial Sequence
  Description of Artificial Sequence: Synthetic oligonucleotide
auacccgccauugaugcca

SEQ ID NO: 698922 - RNA, 19 nt, Artificial Sequence
  Description of Artificial Sequence: Synthetic oligonucleotide
uacauccaccuagauaaac

SEQ ID NO: 698923 - RNA, 19 nt, Artificial Sequence
  Description of Artificial Sequence: Synthetic oligonucleotide
ucucuacgugcccauguuc

SEQ ID NO: 698924 - RNA, 19 nt, Artificial Sequence
  Description of Artificial Sequence: Synthetic oligonucleotide
acgcggaaccacucaugcc

SEQ ID NO: 698925 - RNA, 19 nt, Artificial Sequence
  Description of Artificial Sequence: Synthetic oligonucleotide
ucuggaaguuagagugaga

SEQ ID NO: 698926 - RNA, 19 nt, Artificial Sequence
  Description of Artificial Sequence: Synthetic oligonucleotide
ucuaccuaauucagccuuu

SEQ ID NO: 698927 - RNA, 19 nt, Artificial Sequence
  Description of Artificial Sequence: Synthetic oligonucleotide
ggaauaauuagcagcuuca

SEQ ID NO: 698928 - RNA, 19 nt, Artificial Sequence
  Description of Artificial Sequence: Synthetic oligonucleotide
ccuucaauauuaacugcag

SEQ ID NO: 698929 - RNA, 19 nt, Artificial Sequence
  Description of Artificial Sequence: Synthetic oligonucleotide
uuauuuggauaugcauaga

SEQ ID NO: 698930 - RNA, 19 nt, Artificial Sequence
  Description of Artificial Sequence: Synthetic oligonucleotide
gaaugcggugauauaguca

SEQ ID NO: 698931 - RNA, 19 nt, Artificial Sequence
  Description of Artificial Sequence: Synthetic oligonucleotide
uauucgcccauggcugacg

SEQ ID NO: 698932 - RNA, 19 nt, Artificial Sequence
  Description of Artificial Sequence: Synthetic oligonucleotide
gacuucugacuggacacgc

SEQ ID NO: 698933 - RNA, 19 nt, Artificial Sequence
  Description of Artificial Sequence: Synthetic oligonucleotide
ucacacucgucaucugacu

SEQ ID NO: 698934 - RNA, 19 nt, Artificial Sequence
  Description of Artificial Sequence: Synthetic oligonucleotide
gacaucagccccacaggcc

SEQ ID NO: 698935 - RNA, 19 nt, Artificial Sequence
  Description of Artificial Sequence: Synthetic oligonucleotide
ucuggugaucuacguuaca

SEQ ID NO: 698936 - RNA, 19 nt, Artificial Sequence
  Description of Artificial Sequence: Synthetic oligonucleotide
agugauuuccugugacuuu

SEQ ID NO: 698937 - RNA, 19 nt, Artificial Sequence
  Description of Artificial Sequence: Synthetic oligonucleotide
ugaugauguaacggagcca

SEQ ID NO: 698938 - RNA, 19 nt, Artificial Sequence
  Description of Artificial Sequence: Synthetic oligonucleotide
aguugggcagcuguuaaaa

SEQ ID NO: 698939 - RNA, 19 nt, Artificial Sequence
  Description of Artificial Sequence: Synthetic oligonucleotide
augacuauuguggaauaua

SEQ ID NO: 698940 - RNA, 19 nt, Artificial Sequence
  Description of Artificial Sequence: Synthetic oligonucleotide
ugguaucacacucgucauc

SEQ ID NO: 698941 - RNA, 19 nt, Artificial Sequence
  Description of Artificial Sequence: Synthetic oligonucleotide
uacacacgucugcauccag

SEQ ID NO: 698942 - RNA, 19 nt, Artificial Sequence
  Description of Artificial Sequence: Synthetic oligonucleotide
cauauaauacauccaccua

SEQ ID NO: 698943 - RNA, 19 nt, Artificial Sequence
  Description of Artificial Sequence: Synthetic oligonucleotide
uguucggcucagcaugguc

SEQ ID NO: 698944 - RNA, 19 nt, Artificial Sequence
  Description of Artificial Sequence: Synthetic oligonucleotide
agagcuuaaugaaauuuua

SEQ ID NO: 698945 - RNA, 19 nt, Artificial Sequence
  Description of Artificial Sequence: Synthetic oligonucleotide
aaaguugacgugggcguau

SEQ ID NO: 698946 - RNA, 19 nt, Artificial Sequence
  Description of Artificial Sequence: Synthetic oligonucleotide
cacacucgucaucugacuc

SEQ ID NO: 698947 - RNA, 19 nt, Artificial Sequence
  Description of Artificial Sequence: Synthetic oligonucleotide
auaugcauagaggccggug

SEQ ID NO: 698948 - RNA, 19 nt, Artificial Sequence
  Description of Artificial Sequence: Synthetic oligonucleotide
gucaucucggaauggaaua

SEQ ID NO: 698949 - RNA, 19 nt, Artificial Sequence
  Description of Artificial Sequence: Synthetic oligonucleotide
cucgucguccuggauauug

SEQ ID NO: 698950 - RNA, 19 nt, Artificial Sequence
  Description of Artificial Sequence: Synthetic oligonucleotide
cauaccucucucugauuuc

SEQ ID NO: 698951 - RNA, 19 nt, Artificial Sequence
  Description of Artificial Sequence: Synthetic oligonucleotide
cacucgucaucugacucgg

SEQ ID NO: 698952 - RNA, 19 nt, Artificial Sequence
  Description of Artificial Sequence: Synthetic oligonucleotide
aaggaaccucggugaguag

SEQ ID NO: 698953 - RNA, 19 nt, Artificial Sequence
  Description of Artificial Sequence: Synthetic oligonucleotide
guaaguuuguaugguuuga

SEQ ID NO: 698954 - RNA, 19 nt, Artificial Sequence
  Description of Artificial Sequence: Synthetic oligonucleotide
ucugucgcccaaacaggaa

SEQ ID NO: 698955 - RNA, 19 nt, Artificial Sequence
  Description of Artificial Sequence: Synthetic oligonucleotide
gguuccacuuuaguaagug

SEQ ID NO: 698956 - RNA, 19 nt, Artificial Sequence
  Description of Artificial Sequence: Synthetic oligonucleotide
ccguuugagucuuuauucc

SEQ ID NO: 698957 - RNA, 19 nt, Artificial Sequence
  Description of Artificial Sequence: Synthetic oligonucleotide
auucaguaucugucgccca

SEQ ID NO: 698958 - RNA, 19 nt, Artificial Sequence
  Description of Artificial Sequence: Synthetic oligonucleotide
gaagagcaauguccuugug

SEQ ID NO: 698959 - RNA, 19 nt, Artificial Sequence
  Description of Artificial Sequence: Synthetic oligonucleotide
guaacauuaaacguuucuu

SEQ ID NO: 698960 - RNA, 19 nt, Artificial Sequence
  Description of Artificial Sequence: Synthetic oligonucleotide
auaggcguguaccccgccu

SEQ ID NO: 698961 - RNA, 19 nt, Artificial Sequence
  Description of Artificial Sequence: Synthetic oligonucleotide
acgguccggggagacagcc

SEQ ID NO: 698962 - RNA, 19 nt, Artificial Sequence
  Description of Artificial Sequence: Synthetic oligonucleotide
guuuacauagucagucaaa

SEQ ID NO: 698963 - RNA, 19 nt, Artificial Sequence
  Description of Artificial Sequence: Synthetic oligonucleotide
auucccugagugucgucgu

SEQ ID NO: 698964 - RNA, 19 nt, Artificial Sequence
  Description of Artificial Sequence: Synthetic oligonucleotide
cguuucuuuaugacuauug

SEQ ID NO: 698965 - RNA, 19 nt, Artificial Sequence
  Description of Artificial Sequence: Synthetic oligonucleotide
auccaccuagauaaaccag

SEQ ID NO: 698966 - RNA, 19 nt, Artificial Sequence
  Description of Artificial Sequence: Synthetic oligonucleotide
gggcguauagaagaagagc

SEQ ID NO: 698967 - RNA, 19 nt, Artificial Sequence
  Description of Artificial Sequence: Synthetic oligonucleotide
uguaccccgccuuguucug

SEQ ID NO: 698968 - RNA, 19 nt, Artificial Sequence
  Description of Artificial Sequence: Synthetic oligonucleotide
caguaggcccuucaccaug

SEQ ID NO: 698969 - RNA, 19 nt, Artificial Sequence
  Description of Artificial Sequence: Synthetic oligonucleotide
ugagugucgucguccuccu

SEQ ID NO: 698970 - RNA, 19 nt, Artificial Sequence
  Description of Artificial Sequence: Synthetic oligonucleotide
auguaacauuaaacguuuc

SEQ ID NO: 698971 - RNA, 19 nt, Artificial Sequence
  Description of Artificial Sequence: Synthetic oligonucleotide
ucacuggggacagaguauu

SEQ ID NO: 698972 - RNA, 19 nt, Artificial Sequence
  Description of Artificial Sequence: Synthetic oligonucleotide
cauacccgccauugaugcc

SEQ ID NO: 698973 - RNA, 19 nt, Artificial Sequence
  Description of Artificial Sequence: Synthetic oligonucleotide
caccuagauaaaccagcug

SEQ ID NO: 698974 - RNA, 19 nt, Artificial Sequence
  Description of Artificial Sequence: Synthetic oligonucleotide
guucccguugccgucggcc

SEQ ID NO: 698975 - RNA, 19 nt, Artificial Sequence
  Description of Artificial Sequence: Synthetic oligonucleotide
agggcuauguuuacauagu

SEQ ID NO: 698976 - RNA, 19 nt, Artificial Sequence
  Description of Artificial Sequence: Synthetic oligonucleotide
auagaggccgguggcuauc

SEQ ID NO: 698977 - RNA, 19 nt, Artificial Sequence
  Description of Artificial Sequence: Synthetic oligonucleotide
guugacgugggcguauaga

SEQ ID NO: 698978 - RNA, 19 nt, Artificial Sequence
  Description of Artificial Sequence: Synthetic oligonucleotide
caccaugucuauucgccca

SEQ ID NO: 698979 - RNA, 19 nt, Artificial Sequence
  Description of Artificial Sequence: Synthetic oligonucleotide
aacuggucacggccucuga

SEQ ID NO: 698980 - RNA, 19 nt, Artificial Sequence
  Description of Artificial Sequence: Synthetic oligonucleotide
uauuucccugaguggggaa

SEQ ID NO: 698981 - RNA, 19 nt, Artificial Sequence
  Description of Artificial Sequence: Synthetic oligonucleotide
ggcguucacgucuccacag

SEQ ID NO: 698982 - RNA, 19 nt, Artificial Sequence
  Description of Artificial Sequence: Synthetic oligonucleotide
gauaggcguguaccccgcc

SEQ ID NO: 698983 - RNA, 19 nt, Artificial Sequence
  Description of Artificial Sequence: Synthetic oligonucleotide
caguaucugucgcccaaac

SEQ ID NO: 698984 - RNA, 19 nt, Artificial Sequence
  Description of Artificial Sequence: Synthetic oligonucleotide
cucggugaguaggaccagg

SEQ ID NO: 698985 - RNA, 19 nt, Artificial Sequence
  Description of Artificial Sequence: Synthetic oligonucleotide
ggacaagucgcugaugauc

SEQ ID NO: 698986 - RNA, 19 nt, Artificial Sequence
  Description of Artificial Sequence: Synthetic oligonucleotide
accaugucuauucgcccau

SEQ ID NO: 698987 - RNA, 19 nt, Artificial Sequence
  Description of Artificial Sequence: Synthetic oligonucleotide
agcuggcuauugcagccug

SEQ ID NO: 698988 - RNA, 19 nt, Artificial Sequence
  Description of Artificial Sequence: Synthetic oligonucleotide
gaacuggucacggccucug

SEQ ID NO: 698989 - RNA, 19 nt, Artificial Sequence
  Description of Artificial Sequence: Synthetic oligonucleotide
uauugcagccuggcugggc

SEQ ID NO: 698990 - RNA, 19 nt, Artificial Sequence
  Description of Artificial Sequence: Synthetic oligonucleotide
auucagccuuuaucaccag

SEQ ID NO: 698991 - RNA, 19 nt, Artificial Sequence
  Description of Artificial Sequence: Synthetic oligonucleotide
ggauaugcauagaggccgg

SEQ ID NO: 698992 - RNA, 19 nt, Artificial Sequence
  Description of Artificial Sequence: Synthetic oligonucleotide
cuagauaaaccagcugaaa

SEQ ID NO: 698993 - RNA, 19 nt, Artificial Sequence
  Description of Artificial Sequence: Synthetic oligonucleotide
gaauaauuagcagcuucau

SEQ ID NO: 698994 - RNA, 19 nt, Artificial Sequence
  Description of Artificial Sequence: Synthetic oligonucleotide
cuguuagguucacugggga

SEQ ID NO: 698995 - RNA, 19 nt, Artificial Sequence
  Description of Artificial Sequence: Synthetic oligonucleotide
ggcuauguuuacauaguca

SEQ ID NO: 698996 - RNA, 19 nt, Artificial Sequence
  Description of Artificial Sequence: Synthetic oligonucleotide
ggauacucaaugguaucac

SEQ ID NO: 698997 - RNA, 19 nt, Artificial Sequence
  Description of Artificial Sequence: Synthetic oligonucleotide
ugacuuuacccagccuggu

SEQ ID NO: 698998 - RNA, 19 nt, Artificial Sequence
  Description of Artificial Sequence: Synthetic oligonucleotide
gcuauggagagagcgcugc

SEQ ID NO: 698999 - RNA, 19 nt, Artificial Sequence
  Description of Artificial Sequence: Synthetic oligonucleotide
uagcuacacuauguuuccc

SEQ ID NO: 699000 - RNA, 19 nt, Artificial Sequence
  Description of Artificial Sequence: Synthetic oligonucleotide
uuccguguuugcagacuuc

SEQ ID NO: 699001 - RNA, 19 nt, Artificial Sequence
  Description of Artificial Sequence: Synthetic oligonucleotide
cacagagagcuagcuacac

SEQ ID NO: 699002 - RNA, 19 nt, Artificial Sequence
  Description of Artificial Sequence: Synthetic oligonucleotide
gccaaugaacugaagguuc

SEQ ID NO: 699003 - RNA, 19 nt, Artificial Sequence
  Description of Artificial Sequence: Synthetic oligonucleotide
ugacucggaagaagagcuu

SEQ ID NO: 699004 - RNA, 19 nt, Artificial Sequence
  Description of Artificial Sequence: Synthetic oligonucleotide
ccuucaccaugucuauucg

SEQ ID NO: 699005 - RNA, 19 nt, Artificial Sequence
  Description of Artificial Sequence: Synthetic oligonucleotide
guauuucccugagugggga

SEQ ID NO: 699006 - RNA, 19 nt, Artificial Sequence
  Description of Artificial Sequence: Synthetic oligonucleotide
cuucggaccgaaggccucc

SEQ ID NO: 699007 - RNA, 19 nt, Artificial Sequence
  Description of Artificial Sequence: Synthetic oligonucleotide
cagcuuauuccuuuacacu

SEQ ID NO: 699008 - RNA, 19 nt, Artificial Sequence
  Description of Artificial Sequence: Synthetic oligonucleotide
aagccuaggggugcccgga

SEQ ID NO: 699009 - RNA, 19 nt, Artificial Sequence
  Description of Artificial Sequence: Synthetic oligonucleotide
uaacggagccacgguccgg

SEQ ID NO: 699010 - RNA, 19 nt, Artificial Sequence
  Description of Artificial Sequence: Synthetic oligonucleotide
augauguaacggagccacg

SEQ ID NO: 699011 - RNA, 19 nt, Artificial Sequence
  Description of Artificial Sequence: Synthetic oligonucleotide
cuguaaguuuguaugguuu

SEQ ID NO: 699012 - RNA, 19 nt, Artificial Sequence
  Description of Artificial Sequence: Synthetic oligonucleotide
caagagucuaaggcacuuc

SEQ ID NO: 699013 - RNA, 19 nt, Artificial Sequence
  Description of Artificial Sequence: Synthetic oligonucleotide
uugucucauacccgccauu

SEQ ID NO: 699014 - RNA, 19 nt, Artificial Sequence
  Description of Artificial Sequence: Synthetic oligonucleotide
aguuagagugagacacgcu

SEQ ID NO: 699015 - RNA, 19 nt, Artificial Sequence
  Description of Artificial Sequence: Synthetic oligonucleotide
aguaggcccuucaccaugu

SEQ ID NO: 699016 - RNA, 19 nt, Artificial Sequence
  Description of Artificial Sequence: Synthetic oligonucleotide
agagagcgcugcugccauc

SEQ ID NO: 699017 - RNA, 19 nt, Artificial Sequence
  Description of Artificial Sequence: Synthetic oligonucleotide
gcaaaguugacgugggcgu

SEQ ID NO: 699018 - RNA, 19 nt, Artificial Sequence
  Description of Artificial Sequence: Synthetic oligonucleotide
gggcuauguuuacauaguc

SEQ ID NO: 699019 - RNA, 19 nt, Artificial Sequence
  Description of Artificial Sequence: Synthetic oligonucleotide
uguuucccuagaggcaaau

SEQ ID NO: 699020 - RNA, 19 nt, Artificial Sequence
  Description of Artificial Sequence: Synthetic oligonucleotide
uucauaccucucucugauu

SEQ ID NO: 699021 - RNA, 19 nt, Artificial Sequence
  Description of Artificial Sequence: Synthetic oligonucleotide
cgugauagaaauacacaga

SEQ ID NO: 699022 - RNA, 19 nt, Artificial Sequence
  Description of Artificial Sequence: Synthetic oligonucleotide
gugacgugauagaaauaca

SEQ ID NO: 699023 - RNA, 19 nt, Artificial Sequence
  Description of Artificial Sequence: Synthetic oligonucleotide
uucccugagugucgucguc

SEQ ID NO: 699024 - RNA, 19 nt, Artificial Sequence
  Description of Artificial Sequence: Synthetic oligonucleotide
acacacgucugcauccaga

SEQ ID NO: 699025 - RNA, 19 nt, Artificial Sequence
  Description of Artificial Sequence: Synthetic oligonucleotide
aacaguccuucggaccgaa

SEQ ID NO: 699026 - RNA, 19 nt, Artificial Sequence
  Description of Artificial Sequence: Synthetic oligonucleotide
aggcguguaccccgccuug

SEQ ID NO: 699027 - RNA, 19 nt, Artificial Sequence
  Description of Artificial Sequence: Synthetic oligonucleotide
guggcuaucuggucauucu

SEQ ID NO: 699028 - RNA, 19 nt, Artificial Sequence
  Description of Artificial Sequence: Synthetic oligonucleotide
guguaccccgccuuguucu

SEQ ID NO: 699029 - RNA, 19 nt, Artificial Sequence
  Description of Artificial Sequence: Synthetic oligonucleotide
uuuacccagccugguuuuc

SEQ ID NO: 699030 - RNA, 19 nt, Artificial Sequence
  Description of Artificial Sequence: Synthetic oligonucleotide
uaacaguccuucggaccga

SEQ ID NO: 699031 - RNA, 19 nt, Artificial Sequence
  Description of Artificial Sequence: Synthetic oligonucleotide
agagagcuagcuacacuau

SEQ ID NO: 699032 - RNA, 19 nt, Artificial Sequence
  Description of Artificial Sequence: Synthetic oligonucleotide
gaccaggagaugucuuucu

SEQ ID NO: 699033 - RNA, 19 nt, Artificial Sequence
  Description of Artificial Sequence: Synthetic oligonucleotide
gguccggggagacagccuc

SEQ ID NO: 699034 - RNA, 19 nt, Artificial Sequence
  Description of Artificial Sequence: Synthetic oligonucleotide
agagcccaucuucuauuuu

SEQ ID NO: 699035 - RNA, 19 nt, Artificial Sequence
  Description of Artificial Sequence: Synthetic oligonucleotide
agagucuaaggcacuucaa

SEQ ID NO: 699036 - RNA, 19 nt, Artificial Sequence
  Description of Artificial Sequence: Synthetic oligonucleotide
ccuagauaaaccagcugaa

SEQ ID NO: 699037 - RNA, 19 nt, Artificial Sequence
  Description of Artificial Sequence: Synthetic oligonucleotide
cuuuaguaaguggccaugu

SEQ ID NO: 699038 - RNA, 19 nt, Artificial Sequence
  Description of Artificial Sequence: Synthetic oligonucleotide
cucuaccuaauucagccuu

SEQ ID NO: 699039 - RNA, 19 nt, Artificial Sequence
  Description of Artificial Sequence: Synthetic oligonucleotide
cccaaugguuccacuuuag

SEQ ID NO: 699040 - RNA, 19 nt, Artificial Sequence
  Description of Artificial Sequence: Synthetic oligonucleotide
ugacuggccuuggcguuca

SEQ ID NO: 699041 - RNA, 19 nt, Artificial Sequence
  Description of Artificial Sequence: Synthetic oligonucleotide
gcuguucggcucagcaugg

SEQ ID NO: 699042 - RNA, 19 nt, Artificial Sequence
  Description of Artificial Sequence: Synthetic oligonucleotide
aaguugacgugggcguaua

SEQ ID NO: 699043 - RNA, 19 nt, Artificial Sequence
  Description of Artificial Sequence: Synthetic oligonucleotide
gacacgcggaaccacucau

SEQ ID NO: 699044 - RNA, 19 nt, Artificial Sequence
  Description of Artificial Sequence: Synthetic oligonucleotide
cuauucgcccauggcugac

SEQ ID NO: 699045 - RNA, 19 nt, Artificial Sequence
  Description of Artificial Sequence: Synthetic oligonucleotide
gcccaaacaggaauaauua

SEQ ID NO: 699046 - RNA, 19 nt, Artificial Sequence
  Description of Artificial Sequence: Synthetic oligonucleotide
gggaggauacucaauggua

SEQ ID NO: 699047 - RNA, 19 nt, Artificial Sequence
  Description of Artificial Sequence: Synthetic oligonucleotide
cgcggaaccacucaugcca

SEQ ID NO: 699048 - RNA, 19 nt, Artificial Sequence
  Description of Artificial Sequence: Synthetic oligonucleotide
cuucucagguucacauucu

SEQ ID NO: 699049 - RNA, 19 nt, Artificial Sequence
  Description of Artificial Sequence: Synthetic oligonucleotide
ggaggauacucaaugguau

SEQ ID NO: 699050 - RNA, 19 nt, Artificial Sequence
  Description of Artificial Sequence: Synthetic oligonucleotide
ucgcccaaacaggaauaau

SEQ ID NO: 699051 - RNA, 19 nt, Artificial Sequence
  Description of Artificial Sequence: Synthetic oligonucleotide
gcuacacuauguuucccua

SEQ ID NO: 699052 - RNA, 19 nt, Artificial Sequence
  Description of Artificial Sequence: Synthetic oligonucleotide
cacuuuaguaaguggccau

SEQ ID NO: 699053 - RNA, 19 nt, Artificial Sequence
  Description of Artificial Sequence: Synthetic oligonucleotide
ucacggccucugaccagcu

SEQ ID NO: 699054 - RNA, 19 nt, Artificial Sequence
  Description of Artificial Sequence: Synthetic oligonucleotide
cgaaugcggugauauaguc

SEQ ID NO: 699055 - RNA, 19 nt, Artificial Sequence
  Description of Artificial Sequence: Synthetic oligonucleotide
gagagcccaucuucuauuu

SEQ ID NO: 699056 - RNA, 19 nt, Artificial Sequence
  Description of Artificial Sequence: Synthetic oligonucleotide
acguuucuuuaugacuauu

SEQ ID NO: 699057 - RNA, 19 nt, Artificial Sequence
  Description of Artificial Sequence: Synthetic oligonucleotide
gguggcuaucuggucauuc

SEQ ID NO: 699058 - RNA, 19 nt, Artificial Sequence
  Description of Artificial Sequence: Synthetic oligonucleotide
uucggaccgaaggccucca

SEQ ID NO: 699059 - RNA, 19 nt, Artificial Sequence
  Description of Artificial Sequence: Synthetic oligonucleotide
gcguucacgucuccacagc

SEQ ID NO: 699060 - RNA, 19 nt, Artificial Sequence
  Description of Artificial Sequence: Synthetic oligonucleotide
gagagagcgcugcugccau

SEQ ID NO: 699061 - RNA, 19 nt, Artificial Sequence
  Description of Artificial Sequence: Synthetic oligonucleotide
caccguuugagucuuuauu

SEQ ID NO: 699062 - RNA, 19 nt, Artificial Sequence
  Description of Artificial Sequence: Synthetic oligonucleotide
agcggacuucugacuggac

SEQ ID NO: 699063 - RNA, 19 nt, Artificial Sequence
  Description of Artificial Sequence: Synthetic oligonucleotide
cugucgcccaaacaggaau

SEQ ID NO: 699064 - RNA, 19 nt, Artificial Sequence
  Description of Artificial Sequence: Synthetic oligonucleotide
guccggggagacagccucg

SEQ ID NO: 699065 - RNA, 19 nt, Artificial Sequence
  Description of Artificial Sequence: Synthetic oligonucleotide
gucgcccaaacaggaauaa

SEQ ID NO: 699066 - RNA, 19 nt, Artificial Sequence
  Description of Artificial Sequence: Synthetic oligonucleotide
cagccuuuaucaccagaua

SEQ ID NO: 699067 - RNA, 19 nt, Artificial Sequence
  Description of Artificial Sequence: Synthetic oligonucleotide
gaucuacguuacacacguc

SEQ ID NO: 699068 - RNA, 19 nt, Artificial Sequence
  Description of Artificial Sequence: Synthetic oligonucleotide
auacauccaccuagauaaa

SEQ ID NO: 699069 - RNA, 19 nt, Artificial Sequence
  Description of Artificial Sequence: Synthetic oligonucleotide
gcuggcuauugcagccugg

SEQ ID NO: 699070 - RNA, 19 nt, Artificial Sequence
  Description of Artificial Sequence: Synthetic oligonucleotide
cccgccauugaugccaaug

SEQ ID NO: 699071 - RNA, 19 nt, Artificial Sequence
  Description of Artificial Sequence: Synthetic oligonucleotide
cuccacggcugcaagugcu

SEQ ID NO: 699072 - RNA, 19 nt, Artificial Sequence
  Description of Artificial Sequence: Synthetic oligonucleotide
cuaccuaauucagccuuua

SEQ ID NO: 699073 - RNA, 19 nt, Artificial Sequence
  Description of Artificial Sequence: Synthetic oligonucleotide
ccaagccuaggggugcccg

SEQ ID NO: 699074 - RNA, 19 nt, Artificial Sequence
  Description of Artificial Sequence: Synthetic oligonucleotide
ggacacgcggaaccacuca

SEQ ID NO: 699075 - RNA, 19 nt, Artificial Sequence
  Description of Artificial Sequence: Synthetic oligonucleotide
ccgccauugaugccaauga

SEQ ID NO: 699076 - RNA, 19 nt, Artificial Sequence
  Description of Artificial Sequence: Synthetic oligonucleotide
gcguauagaagaagagcaa

SEQ ID NO: 699077 - RNA, 19 nt, Artificial Sequence
  Description of Artificial Sequence: Synthetic oligonucleotide
ccacuuuaguaaguggcca

SEQ ID NO: 699078 - RNA, 19 nt, Artificial Sequence
  Description of Artificial Sequence: Synthetic oligonucleotide
accacucaugccacuuaau

SEQ ID NO: 699079 - RNA, 19 nt, Artificial Sequence
  Description of Artificial Sequence: Synthetic oligonucleotide
cuuuacccagccugguuuu

SEQ ID NO: 699080 - RNA, 19 nt, Artificial Sequence
  Description of Artificial Sequence: Synthetic oligonucleotide
gcuguaaguuuguaugguu

SEQ ID NO: 699081 - RNA, 19 nt, Artificial Sequence
  Description of Artificial Sequence: Synthetic oligonucleotide
caaaguugacgugggcgua

SEQ ID NO: 699082 - RNA, 19 nt, Artificial Sequence
  Description of Artificial Sequence: Synthetic oligonucleotide
ggaacccauuccucuaccu

SEQ ID NO: 699083 - RNA, 19 nt, Artificial Sequence
  Description of Artificial Sequence: Synthetic oligonucleotide
cgugcccauguucacuggc

SEQ ID NO: 699084 - RNA, 19 nt, Artificial Sequence
  Description of Artificial Sequence: Synthetic oligonucleotide
gcggugauauagucaccca

SEQ ID NO: 699085 - RNA, 19 nt, Artificial Sequence
  Description of Artificial Sequence: Synthetic oligonucleotide
acgugggcguauagaagaa

SEQ ID NO: 699086 - RNA, 19 nt, Artificial Sequence
  Description of Artificial Sequence: Synthetic oligonucleotide
ggugcccggagacugggcu

SEQ ID NO: 699087 - RNA, 19 nt, Artificial Sequence
  Description of Artificial Sequence: Synthetic oligonucleotide
ggugcccuuccgccauucc

SEQ ID NO: 699088 - RNA, 19 nt, Artificial Sequence
  Description of Artificial Sequence: Synthetic oligonucleotide
ggagggcuauguuuacaua

SEQ ID NO: 699089 - RNA, 19 nt, Artificial Sequence
  Description of Artificial Sequence: Synthetic oligonucleotide
cagcggacuucugacugga

SEQ ID NO: 699090 - RNA, 19 nt, Artificial Sequence
  Description of Artificial Sequence: Synthetic oligonucleotide
ggggugcccggagacuggg

SEQ ID NO: 699091 - RNA, 19 nt, Artificial Sequence
  Description of Artificial Sequence: Synthetic oligonucleotide
augugacgugauagaaaua

SEQ ID NO: 699092 - RNA, 19 nt, Artificial Sequence
  Description of Artificial Sequence: Synthetic oligonucleotide
caaaggaaccucggugagu

SEQ ID NO: 699093 - RNA, 19 nt, Artificial Sequence
  Description of Artificial Sequence: Synthetic oligonucleotide
cuauggagagagcgcugcu

SEQ ID NO: 699094 - RNA, 19 nt, Artificial Sequence
  Description of Artificial Sequence: Synthetic oligonucleotide
ccaccuagauaaaccagcu

SEQ ID NO: 699095 - RNA, 19 nt, Artificial Sequence
  Description of Artificial Sequence: Synthetic oligonucleotide
gcccucgucguccuggaua

SEQ ID NO: 699096 - RNA, 19 nt, Artificial Sequence
  Description of Artificial Sequence: Synthetic oligonucleotide
cuacgugcccauguucacu

SEQ ID NO: 699097 - RNA, 19 nt, Artificial Sequence
  Description of Artificial Sequence: Synthetic oligonucleotide
caccagauacagacacagu

SEQ ID NO: 699098 - RNA, 19 nt, Artificial Sequence
  Description of Artificial Sequence: Synthetic oligonucleotide
gcggaaccacucaugccac

SEQ ID NO: 699099 - RNA, 19 nt, Artificial Sequence
  Description of Artificial Sequence: Synthetic oligonucleotide
ccuucggaccgaaggccuc

SEQ ID NO: 699100 - RNA, 19 nt, Artificial Sequence
  Description of Artificial Sequence: Synthetic oligonucleotide
cguguaccccgccuuguuc

SEQ ID NO: 699101 - RNA, 19 nt, Artificial Sequence
  Description of Artificial Sequence: Synthetic oligonucleotide
cuguagugaagggccgugu

SEQ ID NO: 699102 - RNA, 19 nt, Artificial Sequence
  Description of Artificial Sequence: Synthetic oligonucleotide
cguauagaagaagagcaau

SEQ ID NO: 699103 - RNA, 19 nt, Artificial Sequence
  Description of Artificial Sequence: Synthetic oligonucleotide
cgcccaaacaggaauaauu

SEQ ID NO: 699104 - RNA, 19 nt, Artificial Sequence
  Description of Artificial Sequence: Synthetic oligonucleotide
guaugguuugagagcccau

SEQ ID NO: 699105 - RNA, 19 nt, Artificial Sequence
  Description of Artificial Sequence: Synthetic oligonucleotide
ggaaccacucaugccacuu

SEQ ID NO: 699106 - RNA, 19 nt, Artificial Sequence
  Description of Artificial Sequence: Synthetic oligonucleotide
acucgucaucugacucgga

SEQ ID NO: 699107 - RNA, 19 nt, Artificial Sequence
  Description of Artificial Sequence: Synthetic oligonucleotide
gccuaggggugcccggaga

SEQ ID NO: 699108 - RNA, 19 nt, Artificial Sequence
  Description of Artificial Sequence: Synthetic oligonucleotide
ccaugucuauucgcccaug

SEQ ID NO: 699109 - RNA, 19 nt, Artificial Sequence
  Description of Artificial Sequence: Synthetic oligonucleotide
gggacaagucgcugaugau

SEQ ID NO: 699110 - RNA, 19 nt, Artificial Sequence
  Description of Artificial Sequence: Synthetic oligonucleotide
agggugcccuuccgccauu

SEQ ID NO: 699111 - RNA, 19 nt, Artificial Sequence
  Description of Artificial Sequence: Synthetic oligonucleotide
ccucuaccuaauucagccu

SEQ ID NO: 699112 - RNA, 19 nt, Artificial Sequence
  Description of Artificial Sequence: Synthetic oligonucleotide
gcaagagucuaaggcacuu

SEQ ID NO: 699113 - RNA, 19 nt, Artificial Sequence
  Description of Artificial Sequence: Synthetic oligonucleotide
ccuuggcguucacgucucc

SEQ ID NO: 699114 - RNA, 19 nt, Artificial Sequence
  Description of Artificial Sequence: Synthetic oligonucleotide
gccuuggcguucacgucuc

SEQ ID NO: 699115 - RNA, 19 nt, Artificial Sequence
  Description of Artificial Sequence: Synthetic oligonucleotide
cuacaaccugcauguccuu

SEQ ID NO: 699116 - RNA, 19 nt, Artificial Sequence
  Description of Artificial Sequence: Synthetic oligonucleotide
gcaccguuugagucuuuau

SEQ ID NO: 699117 - RNA, 19 nt, Artificial Sequence
  Description of Artificial Sequence: Synthetic oligonucleotide
ccccgccuuguucugguga

SEQ ID NO: 699118 - RNA, 19 nt, Artificial Sequence
  Description of Artificial Sequence: Synthetic oligonucleotide
cgggaggauacucaauggu

SEQ ID NO: 699119 - RNA, 19 nt, Artificial Sequence
  Description of Artificial Sequence: Synthetic oligonucleotide
uggcaccguuugagucuuu

SEQ ID NO: 699120 - RNA, 19 nt, Artificial Sequence
  Description of Artificial Sequence: Synthetic oligonucleotide
cacuggggacagaguauuu

SEQ ID NO: 699121 - RNA, 19 nt, Artificial Sequence
  Description of Artificial Sequence: Synthetic oligonucleotide
ccucggugaguaggaccag

SEQ ID NO: 699122 - RNA, 19 nt, Artificial Sequence
  Description of Artificial Sequence: Synthetic oligonucleotide
acccgccauugaugccaau

SEQ ID NO: 699123 - RNA, 19 nt, Artificial Sequence
  Description of Artificial Sequence: Synthetic oligonucleotide
gggugcccggagacugggc

SEQ ID NO: 699124 - RNA, 19 nt, Artificial Sequence
  Description of Artificial Sequence: Synthetic oligonucleotide
ggcuggcacagcggacuuc

SEQ ID NO: 699125 - RNA, 19 nt, Artificial Sequence
  Description of Artificial Sequence: Synthetic oligonucleotide
gggugcccuuccgccauuc

SEQ ID NO: 699126 - RNA, 19 nt, Artificial Sequence
  Description of Artificial Sequence: Synthetic oligonucleotide
cuguucggcucagcauggu

SEQ ID NO: 699127 - RNA, 19 nt, Artificial Sequence
  Description of Artificial Sequence: Synthetic oligonucleotide
ggcguguaccccgccuugu

SEQ ID NO: 699128 - RNA, 19 nt, Artificial Sequence
  Description of Artificial Sequence: Synthetic oligonucleotide
cccggagacugggcuuuug

SEQ ID NO: 699129 - RNA, 19 nt, Artificial Sequence
  Description of Artificial Sequence: Synthetic oligonucleotide
ccgguggcuaucuggucau

SEQ ID NO: 699130 - RNA, 19 nt, Artificial Sequence
  Description of Artificial Sequence: Synthetic oligonucleotide
ccgccuuguucuggugauc

SEQ ID NO: 699131 - RNA, 19 nt, Artificial Sequence
  Description of Artificial Sequence: Synthetic oligonucleotide
ccagcaugauaggcgugua

SEQ ID NO: 699132 - RNA, 19 nt, Artificial Sequence
  Description of Artificial Sequence: Synthetic oligonucleotide
gcguguaccccgccuuguu

SEQ ID NO: 699133 - RNA, 19 nt, Artificial Sequence
  Description of Artificial Sequence: Synthetic oligonucleotide
ccguguuugcagacuucau

SEQ ID NO: 699134 - RNA, 19 nt, Artificial Sequence
  Description of Artificial Sequence: Synthetic oligonucleotide
ccucgggaggauacucaau

SEQ ID NO: 699135 - RNA, 19 nt, Artificial Sequence
  Description of Artificial Sequence: Synthetic oligonucleotide
cacggccucugaccagcuu

SEQ ID NO: 699136 - RNA, 19 nt, Artificial Sequence
  Description of Artificial Sequence: Synthetic oligonucleotide
ccggggagacagccucgaa

SEQ ID NO: 699137 - RNA, 19 nt, Artificial Sequence
  Description of Artificial Sequence: Synthetic oligonucleotide
cggaaccacucaugccacu

SEQ ID NO: 699138 - RNA, 19 nt, Artificial Sequence
  Description of Artificial Sequence: Synthetic oligonucleotide
gcccggagacugggcuuuu

SEQ ID NO: 699139 - RNA, 19 nt, Artificial Sequence
  Description of Artificial Sequence: Synthetic oligonucleotide
ccucgucguccuggauauu

SEQ ID NO: 699140 - RNA, 19 nt, Artificial Sequence
  Description of Artificial Sequence: Synthetic oligonucleotide
aaagugacagaucacagcc

SEQ ID NO: 699141 - RNA, 19 nt, Artificial Sequence
  Description of Artificial Sequence: Synthetic oligonucleotide
aacauugagacaugaaugc

SEQ ID NO: 699142 - RNA, 19 nt, Artificial Sequence
  Description of Artificial Sequence: Synthetic oligonucleotide
uuuacaaagugacagauca

SEQ ID NO: 699143 - RNA, 19 nt, Artificial Sequence
  Description of Artificial Sequence: Synthetic oligonucleotide
aauggaaagaagcuccugc

SEQ ID NO: 699144 - RNA, 19 nt, Artificial Sequence
  Description of Artificial Sequence: Synthetic oligonucleotide
uguauuuucacacugggca

SEQ ID NO: 699145 - RNA, 19 nt, Artificial Sequence
  Description of Artificial Sequence: Synthetic oligonucleotide
uauuucuacacuaacuuug

SEQ ID NO: 699146 - RNA, 19 nt, Artificial Sequence
  Description of Artificial Sequence: Synthetic oligonucleotide
uuuuaaguggccuaagucu

SEQ ID NO: 699147 - RNA, 19 nt, Artificial Sequence
  Description of Artificial Sequence: Synthetic oligonucleotide
aaacuagcccaaaugaugc

SEQ ID NO: 699148 - RNA, 19 nt, Artificial Sequence
  Description of Artificial Sequence: Synthetic oligonucleotide
aacguugcuggaaauaucc

SEQ ID NO: 699149 - RNA, 19 nt, Artificial Sequence
  Description of Artificial Sequence: Synthetic oligonucleotide
acugucgacuucuuuaucc

SEQ ID NO: 699150 - RNA, 19 nt, Artificial Sequence
  Description of Artificial Sequence: Synthetic oligonucleotide
auauggagagcuuuugccc

SEQ ID NO: 699151 - RNA, 19 nt, Artificial Sequence
  Description of Artificial Sequence: Synthetic oligonucleotide
aguuucauauuauuucuac

SEQ ID NO: 699152 - RNA, 19 nt, Artificial Sequence
  Description of Artificial Sequence: Synthetic oligonucleotide
uguaguuucauauuauuuc

SEQ ID NO: 699153 - RNA, 19 nt, Artificial Sequence
  Description of Artificial Sequence: Synthetic oligonucleotide
aauacauugccgucucugg

SEQ ID NO: 699154 - RNA, 19 nt, Artificial Sequence
  Description of Artificial Sequence: Synthetic oligonucleotide
uuaguuuugcaauaauuug

SEQ ID NO: 699155 - RNA, 19 nt, Artificial Sequence
  Description of Artificial Sequence: Synthetic oligonucleotide
ucacguaacaugcugaaga

SEQ ID NO: 699156 - RNA, 19 nt, Artificial Sequence
  Description of Artificial Sequence: Synthetic oligonucleotide
ucugauuaaugcaagcuga

SEQ ID NO: 699157 - RNA, 19 nt, Artificial Sequence
  Description of Artificial Sequence: Synthetic oligonucleotide
cagaauagaacucaucacc

SEQ ID NO: 699158 - RNA, 19 nt, Artificial Sequence
  Description of Artificial Sequence: Synthetic oligonucleotide
uuuaauguggaauuugaau

SEQ ID NO: 699159 - RNA, 19 nt, Artificial Sequence
  Description of Artificial Sequence: Synthetic oligonucleotide
uguaauucgggaauggaaa

SEQ ID NO: 699160 - RNA, 19 nt, Artificial Sequence
  Description of Artificial Sequence: Synthetic oligonucleotide
guaguauuuacacuuacac

SEQ ID NO: 699161 - RNA, 19 nt, Artificial Sequence
  Description of Artificial Sequence: Synthetic oligonucleotide
uucgggaauggaaagaagc

SEQ ID NO: 699162 - RNA, 19 nt, Artificial Sequence
  Description of Artificial Sequence: Synthetic oligonucleotide
aauaggcccgcccagaagu

SEQ ID NO: 699163 - RNA, 19 nt, Artificial Sequence
  Description of Artificial Sequence: Synthetic oligonucleotide
aguauagugguuugguuag

SEQ ID NO: 699164 - RNA, 19 nt, Artificial Sequence
  Description of Artificial Sequence: Synthetic oligonucleotide
ugauucaacauugagacau

SEQ ID NO: 699165 - RNA, 19 nt, Artificial Sequence
  Description of Artificial Sequence: Synthetic oligonucleotide
agagugacugacuuacggc

SEQ ID NO: 699166 - RNA, 19 nt, Artificial Sequence
  Description of Artificial Sequence: Synthetic oligonucleotide
auaguuacuauaaagugug

SEQ ID NO: 699167 - RNA, 19 nt, Artificial Sequence
  Description of Artificial Sequence: Synthetic oligonucleotide
uuugaaucuaaggagguga

SEQ ID NO: 699168 - RNA, 19 nt, Artificial Sequence
  Description of Artificial Sequence: Synthetic oligonucleotide
aggacugugcccuagagcu

SEQ ID NO: 699169 - RNA, 19 nt, Artificial Sequence
  Description of Artificial Sequence: Synthetic oligonucleotide
aauagaacucaucaccaaa

SEQ ID NO: 699170 - RNA, 19 nt, Artificial Sequence
  Description of Artificial Sequence: Synthetic oligonucleotide
cauuucacaucacaguagg

SEQ ID NO: 699171 - RNA, 19 nt, Artificial Sequence
  Description of Artificial Sequence: Synthetic oligonucleotide
caacauugagacaugaaug

SEQ ID NO: 699172 - RNA, 19 nt, Artificial Sequence
  Description of Artificial Sequence: Synthetic oligonucleotide
uaagucuugcuccaguucu

SEQ ID NO: 699173 - RNA, 19 nt, Artificial Sequence
  Description of Artificial Sequence: Synthetic oligonucleotide
uguucauacaguauauaaa

SEQ ID NO: 699174 - RNA, 19 nt, Artificial Sequence
  Description of Artificial Sequence: Synthetic oligonucleotide
agagcuuuugcccuaagcu

SEQ ID NO: 699175 - RNA, 19 nt, Artificial Sequence
  Description of Artificial Sequence: Synthetic oligonucleotide
aaguauagugguuugguua

SEQ ID NO: 699176 - RNA, 19 nt, Artificial Sequence
  Description of Artificial Sequence: Synthetic oligonucleotide
gaauguuugucuuuuguga

SEQ ID NO: 699177 - RNA, 19 nt, Artificial Sequence
  Description of Artificial Sequence: Synthetic oligonucleotide
ucuacacuaacuuuggcua

SEQ ID NO: 699178 - RNA, 19 nt, Artificial Sequence
  Description of Artificial Sequence: Synthetic oligonucleotide
ugcaauaauuugcuuuuag

SEQ ID NO: 699179 - RNA, 19 nt, Artificial Sequence
  Description of Artificial Sequence: Synthetic oligonucleotide
agucauugaauucugcugu

SEQ ID NO: 699180 - RNA, 19 nt, Artificial Sequence
  Description of Artificial Sequence: Synthetic oligonucleotide
gagagugacugacuuacgg

SEQ ID NO: 699181 - RNA, 19 nt, Artificial Sequence
  Description of Artificial Sequence: Synthetic oligonucleotide
uucuacacuaacuuuggcu

SEQ ID NO: 699182 - RNA, 19 nt, Artificial Sequence
  Description of Artificial Sequence: Synthetic oligonucleotide
uguaguauuuacacuuaca

SEQ ID NO: 699183 - RNA, 19 nt, Artificial Sequence
  Description of Artificial Sequence: Synthetic oligonucleotide
uuagccagaugucauaaaa

SEQ ID NO: 699184 - RNA, 19 nt, Artificial Sequence
  Description of Artificial Sequence: Synthetic oligonucleotide
augaaugcucuguaguuuc

SEQ ID NO: 699185 - RNA, 19 nt, Artificial Sequence
  Description of Artificial Sequence: Synthetic oligonucleotide
aacuagcccaaaugaugcc

SEQ ID NO: 699186 - RNA, 19 nt, Artificial Sequence
  Description of Artificial Sequence: Synthetic oligonucleotide
cacgauauuccuuuauuag

SEQ ID NO: 699187 - RNA, 19 nt, Artificial Sequence
  Description of Artificial Sequence: Synthetic oligonucleotide
uggaagacuccgcagagug

SEQ ID NO: 699188 - RNA, 19 nt, Artificial Sequence
  Description of Artificial Sequence: Synthetic oligonucleotide
gauuaaugcaagcugagcu

SEQ ID NO: 699189 - RNA, 19 nt, Artificial Sequence
  Description of Artificial Sequence: Synthetic oligonucleotide
aaaugaugcccuaagaaau

SEQ ID NO: 699190 - RNA, 19 nt, Artificial Sequence
  Description of Artificial Sequence: Synthetic oligonucleotide
aagucuuagcaguacaaaa

SEQ ID NO: 699191 - RNA, 19 nt, Artificial Sequence
  Description of Artificial Sequence: Synthetic oligonucleotide
agucuuagcaguacaaaac

SEQ ID NO: 699192 - RNA, 19 nt, Artificial Sequence
  Description of Artificial Sequence: Synthetic oligonucleotide
cuguaugcuguuuagauca

SEQ ID NO: 699193 - RNA, 19 nt, Artificial Sequence
  Description of Artificial Sequence: Synthetic oligonucleotide
uguuugacacuuccagggg

SEQ ID NO: 699194 - RNA, 19 nt, Artificial Sequence
  Description of Artificial Sequence: Synthetic oligonucleotide
aaauuaacuucagaguuaa

SEQ ID NO: 699195 - RNA, 19 nt, Artificial Sequence
  Description of Artificial Sequence: Synthetic oligonucleotide
uuggcuauaguucugcaua

SEQ ID NO: 699196 - RNA, 19 nt, Artificial Sequence
  Description of Artificial Sequence: Synthetic oligonucleotide
uucuuuauccagugagggg

SEQ ID NO: 699197 - RNA, 19 nt, Artificial Sequence
  Description of Artificial Sequence: Synthetic oligonucleotide
ucagauuggcuucugggcu

SEQ ID NO: 699198 - RNA, 19 nt, Artificial Sequence
  Description of Artificial Sequence: Synthetic oligonucleotide
aauugggaggaauucuccu

SEQ ID NO: 699199 - RNA, 19 nt, Artificial Sequence
  Description of Artificial Sequence: Synthetic oligonucleotide
aacaaaaggcuccaucuuu

SEQ ID NO: 699200 - RNA, 19 nt, Artificial Sequence
  Description of Artificial Sequence: Synthetic oligonucleotide
acagagguugcacuguauc

SEQ ID NO: 699201 - RNA, 19 nt, Artificial Sequence
  Description of Artificial Sequence: Synthetic oligonucleotide
aaucuaaggaggugagcug

SEQ ID NO: 699202 - RNA, 19 nt, Artificial Sequence
  Description of Artificial Sequence: Synthetic oligonucleotide
ucuaugaauguaacaaaua

SEQ ID NO: 699203 - RNA, 19 nt, Artificial Sequence
  Description of Artificial Sequence: Synthetic oligonucleotide
uuuuguucauacaguauau

SEQ ID NO: 699204 - RNA, 19 nt, Artificial Sequence
  Description of Artificial Sequence: Synthetic oligonucleotide
uugaaucuaaggaggugag

SEQ ID NO: 699205 - RNA, 19 nt, Artificial Sequence
  Description of Artificial Sequence: Synthetic oligonucleotide
uaucucugauuaaugcaag

SEQ ID NO: 699206 - RNA, 19 nt, Artificial Sequence
  Description of Artificial Sequence: Synthetic oligonucleotide
cuuuuaaguggccuaaguc

SEQ ID NO: 699207 - RNA, 19 nt, Artificial Sequence
  Description of Artificial Sequence: Synthetic oligonucleotide
caaagugacagaucacagc

SEQ ID NO: 699208 - RNA, 19 nt, Artificial Sequence
  Description of Artificial Sequence: Synthetic oligonucleotide
guuuagaucagucauggcu

SEQ ID NO: 699209 - RNA, 19 nt, Artificial Sequence
  Description of Artificial Sequence: Synthetic oligonucleotide
acuagcccaaaugaugccc

SEQ ID NO: 699210 - RNA, 19 nt, Artificial Sequence
  Description of Artificial Sequence: Synthetic oligonucleotide
uguccagugacugagccug

SEQ ID NO: 699211 - RNA, 19 nt, Artificial Sequence
  Description of Artificial Sequence: Synthetic oligonucleotide
acgauauuccuuuauuagu

SEQ ID NO: 699212 - RNA, 19 nt, Artificial Sequence
  Description of Artificial Sequence: Synthetic oligonucleotide
cuguuuagaucagucaugg

SEQ ID NO: 699213 - RNA, 19 nt, Artificial Sequence
  Description of Artificial Sequence: Synthetic oligonucleotide
gaaauauccagggaaccug

SEQ ID NO: 699214 - RNA, 19 nt, Artificial Sequence
  Description of Artificial Sequence: Synthetic oligonucleotide
ucuuuuaaguggccuaagu

SEQ ID NO: 699215 - RNA, 19 nt, Artificial Sequence
  Description of Artificial Sequence: Synthetic oligonucleotide
uuugacacuuccaggggca

SEQ ID NO: 699216 - RNA, 19 nt, Artificial Sequence
  Description of Artificial Sequence: Synthetic oligonucleotide
gaaaauguggacugcaacu

SEQ ID NO: 699217 - RNA, 19 nt, Artificial Sequence
  Description of Artificial Sequence: Synthetic oligonucleotide
caaacacuagcucaaaaca

SEQ ID NO: 699218 - RNA, 19 nt, Artificial Sequence
  Description of Artificial Sequence: Synthetic oligonucleotide
ucaucacguaacaugcuga

SEQ ID NO: 699219 - RNA, 19 nt, Artificial Sequence
  Description of Artificial Sequence: Synthetic oligonucleotide
aagacugggcuuucaacgu

SEQ ID NO: 699220 - RNA, 19 nt, Artificial Sequence
  Description of Artificial Sequence: Synthetic oligonucleotide
aagacacuguaauucggga

SEQ ID NO: 699221 - RNA, 19 nt, Artificial Sequence
  Description of Artificial Sequence: Synthetic oligonucleotide
aauugcuccuuggacauca

SEQ ID NO: 699222 - RNA, 19 nt, Artificial Sequence
  Description of Artificial Sequence: Synthetic oligonucleotide
aggggcacuaucuagcucu

SEQ ID NO: 699223 - RNA, 19 nt, Artificial Sequence
  Description of Artificial Sequence: Synthetic oligonucleotide
agguacaaggugcugagcu

SEQ ID NO: 699224 - RNA, 19 nt, Artificial Sequence
  Description of Artificial Sequence: Synthetic oligonucleotide
gagaguaaggguuuccauc

SEQ ID NO: 699225 - RNA, 19 nt, Artificial Sequence
  Description of Artificial Sequence: Synthetic oligonucleotide
uucugcugugcuuucgggg

SEQ ID NO: 699226 - RNA, 19 nt, Artificial Sequence
  Description of Artificial Sequence: Synthetic oligonucleotide
aaauguggacugcaacugu

SEQ ID NO: 699227 - RNA, 19 nt, Artificial Sequence
  Description of Artificial Sequence: Synthetic oligonucleotide
ugaaagcagaauagaacuc

SEQ ID NO: 699228 - RNA, 19 nt, Artificial Sequence
  Description of Artificial Sequence: Synthetic oligonucleotide
uguauccccagaagaaugu

SEQ ID NO: 699229 - RNA, 19 nt, Artificial Sequence
  Description of Artificial Sequence: Synthetic oligonucleotide
aauucgggaauggaaagaa

SEQ ID NO: 699230 - RNA, 19 nt, Artificial Sequence
  Description of Artificial Sequence: Synthetic oligonucleotide
ucgggaauggaaagaagcu

SEQ ID NO: 699231 - RNA, 19 nt, Artificial Sequence
  Description of Artificial Sequence: Synthetic oligonucleotide
uuuugcccuaagcucaucu

SEQ ID NO: 699232 - RNA, 19 nt, Artificial Sequence
  Description of Artificial Sequence: Synthetic oligonucleotide
aguggccuaagucuugcuc

SEQ ID NO: 699233 - RNA, 19 nt, Artificial Sequence
  Description of Artificial Sequence: Synthetic oligonucleotide
ucuguguuuaauguggaau

SEQ ID NO: 699234 - RNA, 19 nt, Artificial Sequence
  Description of Artificial Sequence: Synthetic oligonucleotide
aucuaaggaggugagcugg

SEQ ID NO: 699235 - RNA, 19 nt, Artificial Sequence
  Description of Artificial Sequence: Synthetic oligonucleotide
ucuuagcaguacaaaacaa

SEQ ID NO: 699236 - RNA, 19 nt, Artificial Sequence
  Description of Artificial Sequence: Synthetic oligonucleotide
guaaauggaagacuccgca

SEQ ID NO: 699237 - RNA, 19 nt, Artificial Sequence
  Description of Artificial Sequence: Synthetic oligonucleotide
gaauacauugccgucucug

SEQ ID NO: 699238 - RNA, 19 nt, Artificial Sequence
  Description of Artificial Sequence: Synthetic oligonucleotide
auuaaugcaagcugagcuu

SEQ ID NO: 699239 - RNA, 19 nt, Artificial Sequence
  Description of Artificial Sequence: Synthetic oligonucleotide
auugggaggaauucuccug

SEQ ID NO: 699240 - RNA, 19 nt, Artificial Sequence
  Description of Artificial Sequence: Synthetic oligonucleotide
ucaaccagcggcuuguuuu

SEQ ID NO: 699241 - RNA, 19 nt, Artificial Sequence
  Description of Artificial Sequence: Synthetic oligonucleotide
cuuacggcagcagaggaag

SEQ ID NO: 699242 - RNA, 19 nt, Artificial Sequence
  Description of Artificial Sequence: Synthetic oligonucleotide
cuggaaauauccagggaac

SEQ ID NO: 699243 - RNA, 19 nt, Artificial Sequence
  Description of Artificial Sequence: Synthetic oligonucleotide
gucagauuggcuucugggc

SEQ ID NO: 699244 - RNA, 19 nt, Artificial Sequence
  Description of Artificial Sequence: Synthetic oligonucleotide
uguucagugagaugccaga

SEQ ID NO: 699245 - RNA, 19 nt, Artificial Sequence
  Description of Artificial Sequence: Synthetic oligonucleotide
agagccaaacaauuuaaua

SEQ ID NO: 699246 - RNA, 19 nt, Artificial Sequence
  Description of Artificial Sequence: Synthetic oligonucleotide
cugauuaaugcaagcugag

SEQ ID NO: 699247 - RNA, 19 nt, Artificial Sequence
  Description of Artificial Sequence: Synthetic oligonucleotide
guggccuaagucuugcucc

SEQ ID NO: 699248 - RNA, 19 nt, Artificial Sequence
  Description of Artificial Sequence: Synthetic oligonucleotide
uaaauaaguuuuguaguau

SEQ ID NO: 699249 - RNA, 19 nt, Artificial Sequence
  Description of Artificial Sequence: Synthetic oligonucleotide
aaacacuagcucaaaacaa

SEQ ID NO: 699250 - RNA, 19 nt, Artificial Sequence
  Description of Artificial Sequence: Synthetic oligonucleotide
agaauagaacucaucacca

SEQ ID NO: 699251 - RNA, 19 nt, Artificial Sequence
  Description of Artificial Sequence: Synthetic oligonucleotide
cuugucucuccuuuucaag

SEQ ID NO: 699252 - RNA, 19 nt, Artificial Sequence
  Description of Artificial Sequence: Synthetic oligonucleotide
cacuuacacagaaacuagc

SEQ ID NO: 699253 - RNA, 19 nt, Artificial Sequence
  Description of Artificial Sequence: Synthetic oligonucleotide
ucuggggaugcucggcugg

SEQ ID NO: 699254 - RNA, 19 nt, Artificial Sequence
  Description of Artificial Sequence: Synthetic oligonucleotide
ucucuugugagaugagccu

SEQ ID NO: 699255 - RNA, 19 nt, Artificial Sequence
  Description of Artificial Sequence: Synthetic oligonucleotide
ucacgauauuccuuuauua

SEQ ID NO: 699256 - RNA, 19 nt, Artificial Sequence
  Description of Artificial Sequence: Synthetic oligonucleotide
acuauaaaguguguuucug

SEQ ID NO: 699257 - RNA, 19 nt, Artificial Sequence
  Description of Artificial Sequence: Synthetic oligonucleotide
aguacaaaacaaacacuag

SEQ ID NO: 699258 - RNA, 19 nt, Artificial Sequence
  Description of Artificial Sequence: Synthetic oligonucleotide
agacaugaaugcucuguag

SEQ ID NO: 699259 - RNA, 19 nt, Artificial Sequence
  Description of Artificial Sequence: Synthetic oligonucleotide
cagaaacuagcccaaauga

SEQ ID NO: 699260 - RNA, 19 nt, Artificial Sequence
  Description of Artificial Sequence: Synthetic oligonucleotide
cacaguaggaagucuuagc

SEQ ID NO: 699261 - RNA, 19 nt, Artificial Sequence
  Description of Artificial Sequence: Synthetic oligonucleotide
cuccguaaauggaagacuc

SEQ ID NO: 699262 - RNA, 19 nt, Artificial Sequence
  Description of Artificial Sequence: Synthetic oligonucleotide
gggacuaguguucagugag

SEQ ID NO: 699263 - RNA, 19 nt, Artificial Sequence
  Description of Artificial Sequence: Synthetic oligonucleotide
ugauuaaugcaagcugagc

SEQ ID NO: 699264 - RNA, 19 nt, Artificial Sequence
  Description of Artificial Sequence: Synthetic oligonucleotide
ugauccggacugcugaaga

SEQ ID NO: 699265 - RNA, 19 nt, Artificial Sequence
  Description of Artificial Sequence: Synthetic oligonucleotide
ggaccauucuguuugacac

SEQ ID NO: 699266 - RNA, 19 nt, Artificial Sequence
  Description of Artificial Sequence: Synthetic oligonucleotide
ugacuuacggcagcagagg

SEQ ID NO: 699267 - RNA, 19 nt, Artificial Sequence
  Description of Artificial Sequence: Synthetic oligonucleotide
guuugacacuuccaggggc

SEQ ID NO: 699268 - RNA, 19 nt, Artificial Sequence
  Description of Artificial Sequence: Synthetic oligonucleotide
uuaaugcaagcugagcuuc

SEQ ID NO: 699269 - RNA, 19 nt, Artificial Sequence
  Description of Artificial Sequence: Synthetic oligonucleotide
gaaucuaaggaggugagcu

SEQ ID NO: 699270 - RNA, 19 nt, Artificial Sequence
  Description of Artificial Sequence: Synthetic oligonucleotide
ugugcccuagagcugguga

SEQ ID NO: 699271 - RNA, 19 nt, Artificial Sequence
  Description of Artificial Sequence: Synthetic oligonucleotide
uggcuauaguucugcauag

SEQ ID NO: 699272 - RNA, 19 nt, Artificial Sequence
  Description of Artificial Sequence: Synthetic oligonucleotide
cucaucacguaacaugcug

SEQ ID NO: 699273 - RNA, 19 nt, Artificial Sequence
  Description of Artificial Sequence: Synthetic oligonucleotide
ugugccuuaggaccauucu

SEQ ID NO: 699274 - RNA, 19 nt, Artificial Sequence
  Description of Artificial Sequence: Synthetic oligonucleotide
uggacugcaacugucgacu

SEQ ID NO: 699275 - RNA, 19 nt, Artificial Sequence
  Description of Artificial Sequence: Synthetic oligonucleotide
uccguaaauggaagacucc

SEQ ID NO: 699276 - RNA, 19 nt, Artificial Sequence
  Description of Artificial Sequence: Synthetic oligonucleotide
caagguacaaggugcugag

SEQ ID NO: 699277 - RNA, 19 nt, Artificial Sequence
  Description of Artificial Sequence: Synthetic oligonucleotide
gagcuuuugcccuaagcuc

SEQ ID NO: 699278 - RNA, 19 nt, Artificial Sequence
  Description of Artificial Sequence: Synthetic oligonucleotide
ugcugucaauuucugucag

SEQ ID NO: 699279 - RNA, 19 nt, Artificial Sequence
  Description of Artificial Sequence: Synthetic oligonucleotide
ucaacguugcuggaaauau

SEQ ID NO: 699280 - RNA, 19 nt, Artificial Sequence
  Description of Artificial Sequence: Synthetic oligonucleotide
ucaucuuuuaaguggccua

SEQ ID NO: 699281 - RNA, 19 nt, Artificial Sequence
  Description of Artificial Sequence: Synthetic oligonucleotide
uggaaauauccagggaacc

SEQ ID NO: 699282 - RNA, 19 nt, Artificial Sequence
  Description of Artificial Sequence: Synthetic oligonucleotide
uagugguuugguuaguuuu

SEQ ID NO: 699283 - RNA, 19 nt, Artificial Sequence
  Description of Artificial Sequence: Synthetic oligonucleotide
cuguauccccagaagaaug

SEQ ID NO: 699284 - RNA, 19 nt, Artificial Sequence
  Description of Artificial Sequence: Synthetic oligonucleotide
uccggacugcugaagacug

SEQ ID NO: 699285 - RNA, 19 nt, Artificial Sequence
  Description of Artificial Sequence: Synthetic oligonucleotide
gaugcccuaagaaauuaac

SEQ ID NO: 699286 - RNA, 19 nt, Artificial Sequence
  Description of Artificial Sequence: Synthetic oligonucleotide
uaacaugcugaagacuuca

SEQ ID NO: 699287 - RNA, 19 nt, Artificial Sequence
  Description of Artificial Sequence: Synthetic oligonucleotide
auaucucugauuaaugcaa

SEQ ID NO: 699288 - RNA, 19 nt, Artificial Sequence
  Description of Artificial Sequence: Synthetic oligonucleotide
caguaggaagucuuagcag

SEQ ID NO: 699289 - RNA, 19 nt, Artificial Sequence
  Description of Artificial Sequence: Synthetic oligonucleotide
uuuuagccagaugucauaa

SEQ ID NO: 699290 - RNA, 19 nt, Artificial Sequence
  Description of Artificial Sequence: Synthetic oligonucleotide
uagaacucaucaccaaaau

SEQ ID NO: 699291 - RNA, 19 nt, Artificial Sequence
  Description of Artificial Sequence: Synthetic oligonucleotide
uuacaaagugacagaucac

SEQ ID NO: 699292 - RNA, 19 nt, Artificial Sequence
  Description of Artificial Sequence: Synthetic oligonucleotide
gaauugggaggaauucucc

SEQ ID NO: 699293 - RNA, 19 nt, Artificial Sequence
  Description of Artificial Sequence: Synthetic oligonucleotide
uacucacuaggagaguaag

SEQ ID NO: 699294 - RNA, 19 nt, Artificial Sequence
  Description of Artificial Sequence: Synthetic oligonucleotide
gagguugcacuguaucccc

SEQ ID NO: 699295 - RNA, 19 nt, Artificial Sequence
  Description of Artificial Sequence: Synthetic oligonucleotide
agggaguacucacuaggag

SEQ ID NO: 699296 - RNA, 19 nt, Artificial Sequence
  Description of Artificial Sequence: Synthetic oligonucleotide
agcgacuuuguucuugccu

SEQ ID NO: 699297 - RNA, 19 nt, Artificial Sequence
  Description of Artificial Sequence: Synthetic oligonucleotide
ugucgacuucuuuauccag

SEQ ID NO: 699298 - RNA, 19 nt, Artificial Sequence
  Description of Artificial Sequence: Synthetic oligonucleotide
ucuaaggaggugagcuggc

SEQ ID NO: 699299 - RNA, 19 nt, Artificial Sequence
  Description of Artificial Sequence: Synthetic oligonucleotide
aagcagaauagaacucauc

SEQ ID NO: 699300 - RNA, 19 nt, Artificial Sequence
  Description of Artificial Sequence: Synthetic oligonucleotide
acaugaaugcucuguaguu

SEQ ID NO: 699301 - RNA, 19 nt, Artificial Sequence
  Description of Artificial Sequence: Synthetic oligonucleotide
ugugcuuucggggugcuuc

SEQ ID NO: 699302 - RNA, 19 nt, Artificial Sequence
  Description of Artificial Sequence: Synthetic oligonucleotide
aucuaugaauguaacaaau

SEQ ID NO: 699303 - RNA, 19 nt, Artificial Sequence
  Description of Artificial Sequence: Synthetic oligonucleotide
gggaauggaaagaagcucc

SEQ ID NO: 699304 - RNA, 19 nt, Artificial Sequence
  Description of Artificial Sequence: Synthetic oligonucleotide
agcggcuugaauguuuguc

SEQ ID NO: 699305 - RNA, 19 nt, Artificial Sequence
  Description of Artificial Sequence: Synthetic oligonucleotide
ggaguacucacuaggagag

SEQ ID NO: 699306 - RNA, 19 nt, Artificial Sequence
  Description of Artificial Sequence: Synthetic oligonucleotide
gacaugaaugcucuguagu

SEQ ID NO: 699307 - RNA, 19 nt, Artificial Sequence
  Description of Artificial Sequence: Synthetic oligonucleotide
gcagggaguacucacuagg

SEQ ID NO: 699308 - RNA, 19 nt, Artificial Sequence
  Description of Artificial Sequence: Synthetic oligonucleotide
acacuuacacagaaacuag

SEQ ID NO: 699309 - RNA, 19 nt, Artificial Sequence
  Description of Artificial Sequence: Synthetic oligonucleotide
augguaauugcugucaauu

SEQ ID NO: 699310 - RNA, 19 nt, Artificial Sequence
  Description of Artificial Sequence: Synthetic oligonucleotide
uuugaugaccaggacucac

SEQ ID NO: 699311 - RNA, 19 nt, Artificial Sequence
  Description of Artificial Sequence: Synthetic oligonucleotide
auuugaaucuaaggaggug

SEQ ID NO: 699312 - RNA, 19 nt, Artificial Sequence
  Description of Artificial Sequence: Synthetic oligonucleotide
auacauugccgucucuggu

SEQ ID NO: 699313 - RNA, 19 nt, Artificial Sequence
  Description of Artificial Sequence: Synthetic oligonucleotide
ucuccguaaauggaagacu

SEQ ID NO: 699314 - RNA, 19 nt, Artificial Sequence
  Description of Artificial Sequence: Synthetic oligonucleotide
cugcguauaucucugauua

SEQ ID NO: 699315 - RNA, 19 nt, Artificial Sequence
  Description of Artificial Sequence: Synthetic oligonucleotide
acugaacccaggcgguggg

SEQ ID NO: 699316 - RNA, 19 nt, Artificial Sequence
  Description of Artificial Sequence: Synthetic oligonucleotide
aggaagucuuagcaguaca

SEQ ID NO: 699317 - RNA, 19 nt, Artificial Sequence
  Description of Artificial Sequence: Synthetic oligonucleotide
agacacuguaauucgggaa

SEQ ID NO: 699318 - RNA, 19 nt, Artificial Sequence
  Description of Artificial Sequence: Synthetic oligonucleotide
ggcuccaucuuuccgaacc

SEQ ID NO: 699319 - RNA, 19 nt, Artificial Sequence
  Description of Artificial Sequence: Synthetic oligonucleotide
uguuuagaucagucauggc

SEQ ID NO: 699320 - RNA, 19 nt, Artificial Sequence
  Description of Artificial Sequence: Synthetic oligonucleotide
auagaacucaucaccaaaa

SEQ ID NO: 699321 - RNA, 19 nt, Artificial Sequence
  Description of Artificial Sequence: Synthetic oligonucleotide
uuuauccagugaggggacg

SEQ ID NO: 699322 - RNA, 19 nt, Artificial Sequence
  Description of Artificial Sequence: Synthetic oligonucleotide
acuaguguucagugagaug

SEQ ID NO: 699323 - RNA, 19 nt, Artificial Sequence
  Description of Artificial Sequence: Synthetic oligonucleotide
guguuuaauguggaauuug

SEQ ID NO: 699324 - RNA, 19 nt, Artificial Sequence
  Description of Artificial Sequence: Synthetic oligonucleotide
aaucuguguuuaaugugga

SEQ ID NO: 699325 - RNA, 19 nt, Artificial Sequence
  Description of Artificial Sequence: Synthetic oligonucleotide
aguuacuauaaaguguguu

SEQ ID NO: 699326 - RNA, 19 nt, Artificial Sequence
  Description of Artificial Sequence: Synthetic oligonucleotide
ucaauaggcccgcccagaa

SEQ ID NO: 699327 - RNA, 19 nt, Artificial Sequence
  Description of Artificial Sequence: Synthetic oligonucleotide
ugaugcccuaagaaauuaa

SEQ ID NO: 699328 - RNA, 19 nt, Artificial Sequence
  Description of Artificial Sequence: Synthetic oligonucleotide
gacacuguaauucgggaau

SEQ ID NO: 699329 - RNA, 19 nt, Artificial Sequence
  Description of Artificial Sequence: Synthetic oligonucleotide
acuaucuagcucuuccauu

SEQ ID NO: 699330 - RNA, 19 nt, Artificial Sequence
  Description of Artificial Sequence: Synthetic oligonucleotide
aucuuuccgaaccuaguuu

SEQ ID NO: 699331 - RNA, 19 nt, Artificial Sequence
  Description of Artificial Sequence: Synthetic oligonucleotide
uuugcccuaagcucaucuc

SEQ ID NO: 699332 - RNA, 19 nt, Artificial Sequence
  Description of Artificial Sequence: Synthetic oligonucleotide
cacagccaucaauaggccc

SEQ ID NO: 699333 - RNA, 19 nt, Artificial Sequence
  Description of Artificial Sequence: Synthetic oligonucleotide
aacagggagguuaaugauu

SEQ ID NO: 699334 - RNA, 19 nt, Artificial Sequence
  Description of Artificial Sequence: Synthetic oligonucleotide
ccuccaagcggcuugaaug

SEQ ID NO: 699335 - RNA, 19 nt, Artificial Sequence
  Description of Artificial Sequence: Synthetic oligonucleotide
gccgaaagaaucuucaaaa

SEQ ID NO: 699336 - RNA, 19 nt, Artificial Sequence
  Description of Artificial Sequence: Synthetic oligonucleotide
cuguaauucgggaauggaa

SEQ ID NO: 699337 - RNA, 19 nt, Artificial Sequence
  Description of Artificial Sequence: Synthetic oligonucleotide
cuuuugggaaccaggaaua

SEQ ID NO: 699338 - RNA, 19 nt, Artificial Sequence
  Description of Artificial Sequence: Synthetic oligonucleotide
uacggcagcagaggaagcc

SEQ ID NO: 699339 - RNA, 19 nt, Artificial Sequence
  Description of Artificial Sequence: Synthetic oligonucleotide
gauucaacauugagacaug

SEQ ID NO: 699340 - RNA, 19 nt, Artificial Sequence
  Description of Artificial Sequence: Synthetic oligonucleotide
agaaacuagcccaaaugau

SEQ ID NO: 699341 - RNA, 19 nt, Artificial Sequence
  Description of Artificial Sequence: Synthetic oligonucleotide
uacaaggugcugagcugcc

SEQ ID NO: 699342 - RNA, 19 nt, Artificial Sequence
  Description of Artificial Sequence: Synthetic oligonucleotide
uuucugucguuuucucccu

SEQ ID NO: 699343 - RNA, 19 nt, Artificial Sequence
  Description of Artificial Sequence: Synthetic oligonucleotide
uaguuacuauaaagugugu

SEQ ID NO: 699344 - RNA, 19 nt, Artificial Sequence
  Description of Artificial Sequence: Synthetic oligonucleotide
agaucagucauggcugucu

SEQ ID NO: 699345 - RNA, 19 nt, Artificial Sequence
  Description of Artificial Sequence: Synthetic oligonucleotide
ugcuuuugggaaccaggaa

SEQ ID NO: 699346 - RNA, 19 nt, Artificial Sequence
  Description of Artificial Sequence: Synthetic oligonucleotide
ugggauauggagagcuuuu

SEQ ID NO: 699347 - RNA, 19 nt, Artificial Sequence
  Description of Artificial Sequence: Synthetic oligonucleotide
uuuagccagaugucauaaa

SEQ ID NO: 699348 - RNA, 19 nt, Artificial Sequence
  Description of Artificial Sequence: Synthetic oligonucleotide
acauugagacaugaaugcu

SEQ ID NO: 699349 - RNA, 19 nt, Artificial Sequence
  Description of Artificial Sequence: Synthetic oligonucleotide
gaauggaaagaagcuccug

SEQ ID NO: 699350 - RNA, 19 nt, Artificial Sequence
  Description of Artificial Sequence: Synthetic oligonucleotide
gcagaauagaacucaucac

SEQ ID NO: 699351 - RNA, 19 nt, Artificial Sequence
  Description of Artificial Sequence: Synthetic oligonucleotide
auguggacugcaacugucg

SEQ ID NO: 699352 - RNA, 19 nt, Artificial Sequence
  Description of Artificial Sequence: Synthetic oligonucleotide
ugguuaguuuugcaauaau

SEQ ID NO: 699353 - RNA, 19 nt, Artificial Sequence
  Description of Artificial Sequence: Synthetic oligonucleotide
guucagugagaugccagag

SEQ ID NO: 699354 - RNA, 19 nt, Artificial Sequence
  Description of Artificial Sequence: Synthetic oligonucleotide
ugccacugggcucugcuau

SEQ ID NO: 699355 - RNA, 19 nt, Artificial Sequence
  Description of Artificial Sequence: Synthetic oligonucleotide
ucauagucuuucugucgcu

SEQ ID NO: 699356 - RNA, 19 nt, Artificial Sequence
  Description of Artificial Sequence: Synthetic oligonucleotide
cacuguaauucgggaaugg

SEQ ID NO: 699357 - RNA, 19 nt, Artificial Sequence
  Description of Artificial Sequence: Synthetic oligonucleotide
uuccauccucaucacguaa

SEQ ID NO: 699358 - RNA, 19 nt, Artificial Sequence
  Description of Artificial Sequence: Synthetic oligonucleotide
acuguaauucgggaaugga

SEQ ID NO: 699359 - RNA, 19 nt, Artificial Sequence
  Description of Artificial Sequence: Synthetic oligonucleotide
gaucagucauggcugucuc

SEQ ID NO: 699360 - RNA, 19 nt, Artificial Sequence
  Description of Artificial Sequence: Synthetic oligonucleotide
gguuugguuaguuuugcaa

SEQ ID NO: 699361 - RNA, 19 nt, Artificial Sequence
  Description of Artificial Sequence: Synthetic oligonucleotide
cagauuggcuucugggcug

SEQ ID NO: 699362 - RNA, 19 nt, Artificial Sequence
  Description of Artificial Sequence: Synthetic oligonucleotide
gugacugacuuacggcagc

SEQ ID NO: 699363 - RNA, 19 nt, Artificial Sequence
  Description of Artificial Sequence: Synthetic oligonucleotide
caucaauaggcccgcccag

SEQ ID NO: 699364 - RNA, 19 nt, Artificial Sequence
  Description of Artificial Sequence: Synthetic oligonucleotide
auagugguuugguuaguuu

SEQ ID NO: 699365 - RNA, 19 nt, Artificial Sequence
  Description of Artificial Sequence: Synthetic oligonucleotide
gacuuacggcagcagagga

SEQ ID NO: 699366 - RNA, 19 nt, Artificial Sequence
  Description of Artificial Sequence: Synthetic oligonucleotide
agucacgauauuccuuuau

SEQ ID NO: 699367 - RNA, 19 nt, Artificial Sequence
  Description of Artificial Sequence: Synthetic oligonucleotide
acacuaacuuuggcuauag

SEQ ID NO: 699368 - RNA, 19 nt, Artificial Sequence
  Description of Artificial Sequence: Synthetic oligonucleotide
gucuccguaaauggaagac

SEQ ID NO: 699369 - RNA, 19 nt, Artificial Sequence
  Description of Artificial Sequence: Synthetic oligonucleotide
agugaggggacggaugagu

SEQ ID NO: 699370 - RNA, 19 nt, Artificial Sequence
  Description of Artificial Sequence: Synthetic oligonucleotide
acuguauccccagaagaau

SEQ ID NO: 699371 - RNA, 19 nt, Artificial Sequence
  Description of Artificial Sequence: Synthetic oligonucleotide
uccugcguauaucucugau

SEQ ID NO: 699372 - RNA, 19 nt, Artificial Sequence
  Description of Artificial Sequence: Synthetic oligonucleotide
ggaggaauucuccugucuc

SEQ ID NO: 699373 - RNA, 19 nt, Artificial Sequence
  Description of Artificial Sequence: Synthetic oligonucleotide
gacugggcuuucaacguug

SEQ ID NO: 699374 - RNA, 19 nt, Artificial Sequence
  Description of Artificial Sequence: Synthetic oligonucleotide
ccguaaauggaagacuccg

SEQ ID NO: 699375 - RNA, 19 nt, Artificial Sequence
  Description of Artificial Sequence: Synthetic oligonucleotide
agcucaucucuugugagau

SEQ ID NO: 699376 - RNA, 19 nt, Artificial Sequence
  Description of Artificial Sequence: Synthetic oligonucleotide
ugacagagguugcacugua

SEQ ID NO: 699377 - RNA, 19 nt, Artificial Sequence
  Description of Artificial Sequence: Synthetic oligonucleotide
uuucaacguugcuggaaau

SEQ ID NO: 699378 - RNA, 19 nt, Artificial Sequence
  Description of Artificial Sequence: Synthetic oligonucleotide
ugcccuaagcucaucucuu

SEQ ID NO: 699379 - RNA, 19 nt, Artificial Sequence
  Description of Artificial Sequence: Synthetic oligonucleotide
uuacggcagcagaggaagc

SEQ ID NO: 699380 - RNA, 19 nt, Artificial Sequence
  Description of Artificial Sequence: Synthetic oligonucleotide
uggcagucucaaccagcgg

SEQ ID NO: 699381 - RNA, 19 nt, Artificial Sequence
  Description of Artificial Sequence: Synthetic oligonucleotide
agauuggcuucugggcugg

SEQ ID NO: 699382 - RNA, 19 nt, Artificial Sequence
  Description of Artificial Sequence: Synthetic oligonucleotide
gcgacuuuguucuugccuc

SEQ ID NO: 699383 - RNA, 19 nt, Artificial Sequence
  Description of Artificial Sequence: Synthetic oligonucleotide
ugaggggacggaugaguaa

SEQ ID NO: 699384 - RNA, 19 nt, Artificial Sequence
  Description of Artificial Sequence: Synthetic oligonucleotide
acacuguaauucgggaaug

SEQ ID NO: 699385 - RNA, 19 nt, Artificial Sequence
  Description of Artificial Sequence: Synthetic oligonucleotide
caacguugcuggaaauauc

SEQ ID NO: 699386 - RNA, 19 nt, Artificial Sequence
  Description of Artificial Sequence: Synthetic oligonucleotide
gaauguguuggcugugccu

SEQ ID NO: 699387 - RNA, 19 nt, Artificial Sequence
  Description of Artificial Sequence: Synthetic oligonucleotide
ugcguauaucucugauuaa

SEQ ID NO: 699388 - RNA, 19 nt, Artificial Sequence
  Description of Artificial Sequence: Synthetic oligonucleotide
cuaucuagcucuuccauuu

SEQ ID NO: 699389 - RNA, 19 nt, Artificial Sequence
  Description of Artificial Sequence: Synthetic oligonucleotide
aucuguguuuaauguggaa

SEQ ID NO: 699390 - RNA, 19 nt, Artificial Sequence
  Description of Artificial Sequence: Synthetic oligonucleotide
caguagauggagguuucug

SEQ ID NO: 699391 - RNA, 19 nt, Artificial Sequence
  Description of Artificial Sequence: Synthetic oligonucleotide
accagcggcuuguuuucag

SEQ ID NO: 699392 - RNA, 19 nt, Artificial Sequence
  Description of Artificial Sequence: Synthetic oligonucleotide
gcuaugaaagcagaauaga

SEQ ID NO: 699393 - RNA, 19 nt, Artificial Sequence
  Description of Artificial Sequence: Synthetic oligonucleotide
ugacugacuuacggcagca

SEQ ID NO: 699394 - RNA, 19 nt, Artificial Sequence
  Description of Artificial Sequence: Synthetic oligonucleotide
ccuagagcuggugacagag

SEQ ID NO: 699395 - RNA, 19 nt, Artificial Sequence
  Description of Artificial Sequence: Synthetic oligonucleotide
uggcagauccacuggcauc

SEQ ID NO: 699396 - RNA, 19 nt, Artificial Sequence
  Description of Artificial Sequence: Synthetic oligonucleotide
agcggcuuguuuucaguau

SEQ ID NO: 699397 - RNA, 19 nt, Artificial Sequence
  Description of Artificial Sequence: Synthetic oligonucleotide
caauaggcccgcccagaag

SEQ ID NO: 699398 - RNA, 19 nt, Artificial Sequence
  Description of Artificial Sequence: Synthetic oligonucleotide
cacugaacccaggcggugg

SEQ ID NO: 699399 - RNA, 19 nt, Artificial Sequence
  Description of Artificial Sequence: Synthetic oligonucleotide
cucuucaguagauggaggu

SEQ ID NO: 699400 - RNA, 19 nt, Artificial Sequence
  Description of Artificial Sequence: Synthetic oligonucleotide
caucacguaacaugcugaa

SEQ ID NO: 699401 - RNA, 19 nt, Artificial Sequence
  Description of Artificial Sequence: Synthetic oligonucleotide
cuccgcagagugcucuggg

SEQ ID NO: 699402 - RNA, 19 nt, Artificial Sequence
  Description of Artificial Sequence: Synthetic oligonucleotide
gcuguuuagaucagucaug

SEQ ID NO: 699403 - RNA, 19 nt, Artificial Sequence
  Description of Artificial Sequence: Synthetic oligonucleotide
ucaguagauggagguuucu

SEQ ID NO: 699404 - RNA, 19 nt, Artificial Sequence
  Description of Artificial Sequence: Synthetic oligonucleotide
aagucacgauauuccuuua

SEQ ID NO: 699405 - RNA, 19 nt, Artificial Sequence
  Description of Artificial Sequence: Synthetic oligonucleotide
agagagugacugacuuacg

SEQ ID NO: 699406 - RNA, 19 nt, Artificial Sequence
  Description of Artificial Sequence: Synthetic oligonucleotide
acguaacaugcugaagacu

SEQ ID NO: 699407 - RNA, 19 nt, Artificial Sequence
  Description of Artificial Sequence: Synthetic oligonucleotide
guauccccagaagaaugug

SEQ ID NO: 699408 - RNA, 19 nt, Artificial Sequence
  Description of Artificial Sequence: Synthetic oligonucleotide
guauuuucacacugggcau

SEQ ID NO: 699409 - RNA, 19 nt, Artificial Sequence
  Description of Artificial Sequence: Synthetic oligonucleotide
aaugggauauggagagcuu

SEQ ID NO: 699410 - RNA, 19 nt, Artificial Sequence
  Description of Artificial Sequence: Synthetic oligonucleotide
cguaaauggaagacuccgc

SEQ ID NO: 699411 - RNA, 19 nt, Artificial Sequence
  Description of Artificial Sequence: Synthetic oligonucleotide
gcagcgacuuuguucuugc

SEQ ID NO: 699412 - RNA, 19 nt, Artificial Sequence
  Description of Artificial Sequence: Synthetic oligonucleotide
cugugccuuaggaccauuc

SEQ ID NO: 699413 - RNA, 19 nt, Artificial Sequence
  Description of Artificial Sequence: Synthetic oligonucleotide
aagcggcuugaauguuugu

SEQ ID NO: 699414 - RNA, 19 nt, Artificial Sequence
  Description of Artificial Sequence: Synthetic oligonucleotide
ucuugccucuccugcguau

SEQ ID NO: 699415 - RNA, 19 nt, Artificial Sequence
  Description of Artificial Sequence: Synthetic oligonucleotide
gacugacuuacggcagcag

SEQ ID NO: 699416 - RNA, 19 nt, Artificial Sequence
  Description of Artificial Sequence: Synthetic oligonucleotide
guaacaugcugaagacuuc

SEQ ID NO: 699417 - RNA, 19 nt, Artificial Sequence
  Description of Artificial Sequence: Synthetic oligonucleotide
caucuuuuaaguggccuaa

SEQ ID NO: 699418 - RNA, 19 nt, Artificial Sequence
  Description of Artificial Sequence: Synthetic oligonucleotide
augaugcccuaagaaauua

SEQ ID NO: 699419 - RNA, 19 nt, Artificial Sequence
  Description of Artificial Sequence: Synthetic oligonucleotide
uggagguuucugucguuuu

SEQ ID NO: 699420 - RNA, 19 nt, Artificial Sequence
  Description of Artificial Sequence: Synthetic oligonucleotide
guguuggcugugccuuagg

SEQ ID NO: 699421 - RNA, 19 nt, Artificial Sequence
  Description of Artificial Sequence: Synthetic oligonucleotide
agacugggcuuucaacguu

SEQ ID NO: 699422 - RNA, 19 nt, Artificial Sequence
  Description of Artificial Sequence: Synthetic oligonucleotide
uuucggggugcuucugguu

SEQ ID NO: 699423 - RNA, 19 nt, Artificial Sequence
  Description of Artificial Sequence: Synthetic oligonucleotide
gucacgauauuccuuuauu

SEQ ID NO: 699424 - RNA, 19 nt, Artificial Sequence
  Description of Artificial Sequence: Synthetic oligonucleotide
cugauccggacugcugaag

SEQ ID NO: 699425 - RNA, 19 nt, Artificial Sequence
  Description of Artificial Sequence: Synthetic oligonucleotide
cuagcccaaaugaugcccu

SEQ ID NO: 699426 - RNA, 19 nt, Artificial Sequence
  Description of Artificial Sequence: Synthetic oligonucleotide
cuccaagcggcuugaaugu

SEQ ID NO: 699427 - RNA, 19 nt, Artificial Sequence
  Description of Artificial Sequence: Synthetic oligonucleotide
acuuacggcagcagaggaa

SEQ ID NO: 699428 - RNA, 19 nt, Artificial Sequence
  Description of Artificial Sequence: Synthetic oligonucleotide
gcgucuuccguggagagga

SEQ ID NO: 699429 - RNA, 19 nt, Artificial Sequence
  Description of Artificial Sequence: Synthetic oligonucleotide
aagucuugcuccaguucua

SEQ ID NO: 699430 - RNA, 19 nt, Artificial Sequence
  Description of Artificial Sequence: Synthetic oligonucleotide
ccaggaauacauugccguc

SEQ ID NO: 699431 - RNA, 19 nt, Artificial Sequence
  Description of Artificial Sequence: Synthetic oligonucleotide
gggucuccguaaauggaag

SEQ ID NO: 699432 - RNA, 19 nt, Artificial Sequence
  Description of Artificial Sequence: Synthetic oligonucleotide
cugaauugggaggaauucu

SEQ ID NO: 699433 - RNA, 19 nt, Artificial Sequence
  Description of Artificial Sequence: Synthetic oligonucleotide
ggaagucuuagcaguacaa

SEQ ID NO: 699434 - RNA, 19 nt, Artificial Sequence
  Description of Artificial Sequence: Synthetic oligonucleotide
cccgcccagaaguucagag

SEQ ID NO: 699435 - RNA, 19 nt, Artificial Sequence
  Description of Artificial Sequence: Synthetic oligonucleotide
caacugucgacuucuuuau

SEQ ID NO: 699436 - RNA, 19 nt, Artificial Sequence
  Description of Artificial Sequence: Synthetic oligonucleotide
ccaucaauaggcccgccca

SEQ ID NO: 699437 - RNA, 19 nt, Artificial Sequence
  Description of Artificial Sequence: Synthetic oligonucleotide
cagcgacuuuguucuugcc

SEQ ID NO: 699438 - RNA, 19 nt, Artificial Sequence
  Description of Artificial Sequence: Synthetic oligonucleotide
acguugcuggaaauaucca

SEQ ID NO: 699439 - RNA, 19 nt, Artificial Sequence
  Description of Artificial Sequence: Synthetic oligonucleotide
gcuauaguucugcauaguu

SEQ ID NO: 699440 - RNA, 19 nt, Artificial Sequence
  Description of Artificial Sequence: Synthetic oligonucleotide
uucuugcuuuugggaacca

SEQ ID NO: 699441 - RNA, 19 nt, Artificial Sequence
  Description of Artificial Sequence: Synthetic oligonucleotide
caucuuuccgaaccuaguu

SEQ ID NO: 699442 - RNA, 19 nt, Artificial Sequence
  Description of Artificial Sequence: Synthetic oligonucleotide
guacucacuaggagaguaa

SEQ ID NO: 699443 - RNA, 19 nt, Artificial Sequence
  Description of Artificial Sequence: Synthetic oligonucleotide
gcggcuugaauguuugucu

SEQ ID NO: 699444 - RNA, 19 nt, Artificial Sequence
  Description of Artificial Sequence: Synthetic oligonucleotide
uggagagcuuuugcccuaa

SEQ ID NO: 699445 - RNA, 19 nt, Artificial Sequence
  Description of Artificial Sequence: Synthetic oligonucleotide
gcuggcgucuuccguggag

SEQ ID NO: 699446 - RNA, 19 nt, Artificial Sequence
  Description of Artificial Sequence: Synthetic oligonucleotide
ggaagacuccgcagagugc

SEQ ID NO: 699447 - RNA, 19 nt, Artificial Sequence
  Description of Artificial Sequence: Synthetic oligonucleotide
caacagggagguuaaugau

SEQ ID NO: 699448 - RNA, 19 nt, Artificial Sequence
  Description of Artificial Sequence: Synthetic oligonucleotide
cauugccgucucuggucug

SEQ ID NO: 699449 - RNA, 19 nt, Artificial Sequence
  Description of Artificial Sequence: Synthetic oligonucleotide
uccagugacugagccugau

SEQ ID NO: 699450 - RNA, 19 nt, Artificial Sequence
  Description of Artificial Sequence: Synthetic oligonucleotide
ggaaugggauauggagagc

SEQ ID NO: 699451 - RNA, 19 nt, Artificial Sequence
  Description of Artificial Sequence: Synthetic oligonucleotide
ggggaugcucggcugggac

SEQ ID NO: 699452 - RNA, 19 nt, Artificial Sequence
  Description of Artificial Sequence: Synthetic oligonucleotide
caggggcacuaucuagcuc

SEQ ID NO: 699453 - RNA, 19 nt, Artificial Sequence
  Description of Artificial Sequence: Synthetic oligonucleotide
auguguuggcugugccuua

SEQ ID NO: 699454 - RNA, 19 nt, Artificial Sequence
  Description of Artificial Sequence: Synthetic oligonucleotide
ugccucuccugcguauauc

SEQ ID NO: 699455 - RNA, 19 nt, Artificial Sequence
  Description of Artificial Sequence: Synthetic oligonucleotide
aggcggugggucuccguaa

SEQ ID NO: 699456 - RNA, 19 nt, Artificial Sequence
  Description of Artificial Sequence: Synthetic oligonucleotide
cuggcgucuuccguggaga

SEQ ID NO: 699457 - RNA, 19 nt, Artificial Sequence
  Description of Artificial Sequence: Synthetic oligonucleotide
gcucaucucuugugagaug

SEQ ID NO: 699458 - RNA, 19 nt, Artificial Sequence
  Description of Artificial Sequence: Synthetic oligonucleotide
cugcuguaugcuguuuaga

SEQ ID NO: 699459 - RNA, 19 nt, Artificial Sequence
  Description of Artificial Sequence: Synthetic oligonucleotide
ggcgucuuccguggagagg

SEQ ID NO: 699460 - RNA, 19 nt, Artificial Sequence
  Description of Artificial Sequence: Synthetic oligonucleotide
uccaagcggcuugaauguu

SEQ ID NO: 699461 - RNA, 19 nt, Artificial Sequence
  Description of Artificial Sequence: Synthetic oligonucleotide
cagugaggggacggaugag

SEQ ID NO: 699462 - RNA, 19 nt, Artificial Sequence
  Description of Artificial Sequence: Synthetic oligonucleotide
agccugauccggacugcug

SEQ ID NO: 699463 - RNA, 19 nt, Artificial Sequence
  Description of Artificial Sequence: Synthetic oligonucleotide
gugacagaucacagccauc

SEQ ID NO: 699464 - RNA, 19 nt, Artificial Sequence
  Description of Artificial Sequence: Synthetic oligonucleotide
gccucuccugcguauaucu

SEQ ID NO: 699465 - RNA, 19 nt, Artificial Sequence
  Description of Artificial Sequence: Synthetic oligonucleotide
gcguauaucucugauuaau

SEQ ID NO: 699466 - RNA, 19 nt, Artificial Sequence
  Description of Artificial Sequence: Synthetic oligonucleotide
ggagaguaaggguuuccau

SEQ ID NO: 699467 - RNA, 19 nt, Artificial Sequence
  Description of Artificial Sequence: Synthetic oligonucleotide
gcagagugcucuggggaug

SEQ ID NO: 699468 - RNA, 19 nt, Artificial Sequence
  Description of Artificial Sequence: Synthetic oligonucleotide
cuuuugcccuaagcucauc

SEQ ID NO: 699469 - RNA, 19 nt, Artificial Sequence
  Description of Artificial Sequence: Synthetic oligonucleotide
guaugcuguuuagaucagu

SEQ ID NO: 699470 - RNA, 19 nt, Artificial Sequence
  Description of Artificial Sequence: Synthetic oligonucleotide
ggacuaguguucagugaga

SEQ ID NO: 699471 - RNA, 19 nt, Artificial Sequence
  Description of Artificial Sequence: Synthetic oligonucleotide
augcugccgaaagaaucuu

SEQ ID NO: 699472 - RNA, 19 nt, Artificial Sequence
  Description of Artificial Sequence: Synthetic oligonucleotide
cuccugcguauaucucuga

SEQ ID NO: 699473 - RNA, 19 nt, Artificial Sequence
  Description of Artificial Sequence: Synthetic oligonucleotide
cgggaauggaaagaagcuc

SEQ ID NO: 699474 - RNA, 19 nt, Artificial Sequence
  Description of Artificial Sequence: Synthetic oligonucleotide
ccggacugcugaagacugg

SEQ ID NO: 699475 - RNA, 19 nt, Artificial Sequence
  Description of Artificial Sequence: Synthetic oligonucleotide
ggaauggaaagaagcuccu

SEQ ID NO: 699476 - RNA, 19 nt, Artificial Sequence
  Description of Artificial Sequence: Synthetic oligonucleotide
gugcuuucggggugcuucu

SEQ ID NO: 699477 - RNA, 19 nt, Artificial Sequence
  Description of Artificial Sequence: Synthetic oligonucleotide
gcaucaugugcaggaggac

SEQ ID NO: 699478 - RNA, 19 nt, Artificial Sequence
  Description of Artificial Sequence: Synthetic oligonucleotide
gcuuuuagccagaugucau

SEQ ID NO: 699479 - RNA, 19 nt, Artificial Sequence
  Description of Artificial Sequence: Synthetic oligonucleotide
auaggcccgcccagaaguu

SEQ ID NO: 699480 - RNA, 19 nt, Artificial Sequence
  Description of Artificial Sequence: Synthetic oligonucleotide
augcucggcugggacuagu

SEQ ID NO: 699481 - RNA, 19 nt, Artificial Sequence
  Description of Artificial Sequence: Synthetic oligonucleotide
ggccuaagucuugcuccag

SEQ ID NO: 699482 - RNA, 19 nt, Artificial Sequence
  Description of Artificial Sequence: Synthetic oligonucleotide
gaugagccuccaagcggcu

SEQ ID NO: 699483 - RNA, 19 nt, Artificial Sequence
  Description of Artificial Sequence: Synthetic oligonucleotide
cuccaucuuuccgaaccua

SEQ ID NO: 699484 - RNA, 19 nt, Artificial Sequence
  Description of Artificial Sequence: Synthetic oligonucleotide
ggcggugggucuccguaaa

SEQ ID NO: 699485 - RNA, 19 nt, Artificial Sequence
  Description of Artificial Sequence: Synthetic oligonucleotide
ccaucuuuccgaaccuagu

SEQ ID NO: 699486 - RNA, 19 nt, Artificial Sequence
  Description of Artificial Sequence: Synthetic oligonucleotide
cauccucaucacguaacau

SEQ ID NO: 699487 - RNA, 19 nt, Artificial Sequence
  Description of Artificial Sequence: Synthetic oligonucleotide
gcggcuuguuuucaguauu

SEQ ID NO: 699488 - RNA, 19 nt, Artificial Sequence
  Description of Artificial Sequence: Synthetic oligonucleotide
ccugauccggacugcugaa

SEQ ID NO: 699489 - RNA, 19 nt, Artificial Sequence
  Description of Artificial Sequence: Synthetic oligonucleotide
ccugcguauaucucugauu

SEQ ID NO: 699490 - RNA, 19 nt, Artificial Sequence
  Description of Artificial Sequence: Synthetic oligonucleotide
gccuuaggaccauucuguu

SEQ ID NO: 699491 - RNA, 19 nt, Artificial Sequence
  Description of Artificial Sequence: Synthetic oligonucleotide
ccuuaggaccauucuguuu

SEQ ID NO: 699492 - RNA, 19 nt, Artificial Sequence
  Description of Artificial Sequence: Synthetic oligonucleotide
ccucaucacguaacaugcu

SEQ ID NO: 699493 - RNA, 19 nt, Artificial Sequence
  Description of Artificial Sequence: Synthetic oligonucleotide
ccaagcggcuugaauguuu

SEQ ID NO: 699494 - RNA, 19 nt, Artificial Sequence
  Description of Artificial Sequence: Synthetic oligonucleotide
gccuccaagcggcuugaau

SEQ ID NO: 699495 - RNA, 19 nt, Artificial Sequence
  Description of Artificial Sequence: Synthetic oligonucleotide
cccuagagcuggugacaga

SEQ ID NO: 699496 - RNA, 19 nt, Artificial Sequence
  Description of Artificial Sequence: Synthetic oligonucleotide
ggacugcaacugucgacuu

SEQ ID NO: 699497 - RNA, 19 nt, Artificial Sequence
  Description of Artificial Sequence: Synthetic oligonucleotide
cugcaacugucgacuucuu

SEQ ID NO: 699498 - RNA, 19 nt, Artificial Sequence
  Description of Artificial Sequence: Synthetic oligonucleotide
cagucucaaccagcggcuu

SEQ ID NO: 699499 - RNA, 19 nt, Artificial Sequence
  Description of Artificial Sequence: Synthetic oligonucleotide
gcggugggucuccguaaau

SEQ ID NO: 699500 - RNA, 19 nt, Artificial Sequence
  Description of Artificial Sequence: Synthetic oligonucleotide
ccugccaaacuugcuccau

SEQ ID NO: 699501 - RNA, 19 nt, Artificial Sequence
  Description of Artificial Sequence: Synthetic oligonucleotide
cugugcuuucggggugcuu

SEQ ID NO: 699502 - RNA, 19 nt, Artificial Sequence
  Description of Artificial Sequence: Synthetic oligonucleotide
ccaggcggugggucuccgu

SEQ ID NO: 699503 - RNA, 19 nt, Artificial Sequence
  Description of Artificial Sequence: Synthetic oligonucleotide
cgucuuccguggagaggau

SEQ ID NO: 699504 - RNA, 19 nt, Artificial Sequence
  Description of Artificial Sequence: Synthetic oligonucleotide
aauuaauagcaacaaacgg

SEQ ID NO: 699505 - RNA, 19 nt, Artificial Sequence
  Description of Artificial Sequence: Synthetic oligonucleotide
uaauuaauagcaacaaacg

SEQ ID NO: 699506 - RNA, 19 nt, Artificial Sequence
  Description of Artificial Sequence: Synthetic oligonucleotide
uauucuucgaauuagauau

SEQ ID NO: 699507 - RNA, 19 nt, Artificial Sequence
  Description of Artificial Sequence: Synthetic oligonucleotide
auuaauagcaacaaacggc

SEQ ID NO: 699508 - RNA, 19 nt, Artificial Sequence
  Description of Artificial Sequence: Synthetic oligonucleotide
uuaauagcaacaaacggcc

SEQ ID NO: 699509 - RNA, 19 nt, Artificial Sequence
  Description of Artificial Sequence: Synthetic oligonucleotide
aaugauacacgacaaaggu

SEQ ID NO: 699510 - RNA, 19 nt, Artificial Sequence
  Description of Artificial Sequence: Synthetic oligonucleotide
aaauaagcuggcuucagag

SEQ ID NO: 699511 - RNA, 19 nt, Artificial Sequence
  Description of Artificial Sequence: Synthetic oligonucleotide
auuuucgugaaauacguag

SEQ ID NO: 699512 - RNA, 19 nt, Artificial Sequence
  Description of Artificial Sequence: Synthetic oligonucleotide
  modified_base (14)..(14): a, c, u, g, unknown or other
uauuaauuugugungugug

SEQ ID NO: 699513 - RNA, 19 nt, Artificial Sequence
  Description of Artificial Sequence: Synthetic oligonucleotide
agcauuauaaguguguugg

SEQ ID NO: 699514 - RNA, 19 nt, Artificial Sequence
  Description of Artificial Sequence: Synthetic oligonucleotide
ugaaauacguaguauggag

SEQ ID NO: 699515 - RNA, 19 nt, Artificial Sequence
  Description of Artificial Sequence: Synthetic oligonucleotide
uagucaaggacuuccaugg

SEQ ID NO: 699516 - RNA, 19 nt, Artificial Sequence
  Description of Artificial Sequence: Synthetic oligonucleotide
ucauauguaaacuggguug

SEQ ID NO: 699517 - RNA, 19 nt, Artificial Sequence
  Description of Artificial Sequence: Synthetic oligonucleotide
aauacagccaacaggucgc

SEQ ID NO: 699518 - RNA, 19 nt, Artificial Sequence
  Description of Artificial Sequence: Synthetic oligonucleotide
aaauacguaguauggagga

SEQ ID NO: 699519 - RNA, 19 nt, Artificial Sequence
  Description of Artificial Sequence: Synthetic oligonucleotide
uuuuagacguuucugcugc

SEQ ID NO: 699520 - RNA, 19 nt, Artificial Sequence
  Description of Artificial Sequence: Synthetic oligonucleotide
aaguggacuauugggaucc

SEQ ID NO: 699521 - RNA, 19 nt, Artificial Sequence
  Description of Artificial Sequence: Synthetic oligonucleotide
uguuggagauaucacgucg

SEQ ID NO: 699522 - RNA, 19 nt, Artificial Sequence
  Description of Artificial Sequence: Synthetic oligonucleotide
ugauacacgacaaagguuu

SEQ ID NO: 699523 - RNA, 19 nt, Artificial Sequence
  Description of Artificial Sequence: Synthetic oligonucleotide
aacauaaucuccgacccgg

SEQ ID NO: 699524 - RNA, 19 nt, Artificial Sequence
  Description of Artificial Sequence: Synthetic oligonucleotide
ucggcaagcauuauaagug

SEQ ID NO: 699525 - RNA, 19 nt, Artificial Sequence
  Description of Artificial Sequence: Synthetic oligonucleotide
uuuagcaugcuuaucggca

SEQ ID NO: 699526 - RNA, 19 nt, Artificial Sequence
  Description of Artificial Sequence: Synthetic oligonucleotide
ucaaaguaaacauaaucuc

SEQ ID NO: 699527 - RNA, 19 nt, Artificial Sequence
  Description of Artificial Sequence: Synthetic oligonucleotide
ucuguaaguggacuauugg

SEQ ID NO: 699528 - RNA, 19 nt, Artificial Sequence
  Description of Artificial Sequence: Synthetic oligonucleotide
auaaucuccgacccgguac

SEQ ID NO: 699529 - RNA, 19 nt, Artificial Sequence
  Description of Artificial Sequence: Synthetic oligonucleotide
gauaucacgucgucuauag

SEQ ID NO: 699530 - RNA, 19 nt, Artificial Sequence
  Description of Artificial Sequence: Synthetic oligonucleotide
ucgaauuagauauggguug

SEQ ID NO: 699531 - RNA, 19 nt, Artificial Sequence
  Description of Artificial Sequence: Synthetic oligonucleotide
uuaucggcaagcauuauaa

SEQ ID NO: 699532 - RNA, 19 nt, Artificial Sequence
  Description of Artificial Sequence: Synthetic oligonucleotide
uacccaaugauacacgaca

SEQ ID NO: 699533 - RNA, 19 nt, Artificial Sequence
  Description of Artificial Sequence: Synthetic oligonucleotide
ucaaggacuuccaugggag

SEQ ID NO: 699534 - RNA, 19 nt, Artificial Sequence
  Description of Artificial Sequence: Synthetic oligonucleotide
uucggagcggucaacaucc

SEQ ID NO: 699535 - RNA, 19 nt, Artificial Sequence
  Description of Artificial Sequence: Synthetic oligonucleotide
aauacccaaugauacacga

SEQ ID NO: 699536 - RNA, 19 nt, Artificial Sequence
  Description of Artificial Sequence: Synthetic oligonucleotide
caaugauacacgacaaagg

SEQ ID NO: 699537 - RNA, 19 nt, Artificial Sequence
  Description of Artificial Sequence: Synthetic oligonucleotide
auuauaaguguguuggaga

SEQ ID NO: 699538 - RNA, 19 nt, Artificial Sequence
  Description of Artificial Sequence: Synthetic oligonucleotide
uguguuggagauaucacgu

SEQ ID NO: 699539 - RNA, 19 nt, Artificial Sequence
  Description of Artificial Sequence: Synthetic oligonucleotide
auacuggcgggauagaaag

SEQ ID NO: 699540 - RNA, 19 nt, Artificial Sequence
  Description of Artificial Sequence: Synthetic oligonucleotide
cuguaaguggacuauuggg

SEQ ID NO: 699541 - RNA, 19 nt, Artificial Sequence
  Description of Artificial Sequence: Synthetic oligonucleotide
gaaauacguaguauggagg

SEQ ID NO: 699542 - RNA, 19 nt, Artificial Sequence
  Description of Artificial Sequence: Synthetic oligonucleotide
aaucugucgaucuguaagu

SEQ ID NO: 699543 - RNA, 19 nt, Artificial Sequence
  Description of Artificial Sequence: Synthetic oligonucleotide
uaucacgucgucuauagaa

SEQ ID NO: 699544 - RNA, 19 nt, Artificial Sequence
  Description of Artificial Sequence: Synthetic oligonucleotide
aagcauacgacuuuugcuu

SEQ ID NO: 699545 - RNA, 19 nt, Artificial Sequence
  Description of Artificial Sequence: Synthetic oligonucleotide
ucgugaaauacguaguaug

SEQ ID NO: 699546 - RNA, 19 nt, Artificial Sequence
  Description of Artificial Sequence: Synthetic oligonucleotide
uucgaauuagauauggguu

SEQ ID NO: 699547 - RNA, 19 nt, Artificial Sequence
  Description of Artificial Sequence: Synthetic oligonucleotide
caaucugucgaucuguaag

SEQ ID NO: 699548 - RNA, 19 nt, Artificial Sequence
  Description of Artificial Sequence: Synthetic oligonucleotide
acacuuauggcacugcuca

SEQ ID NO: 699549 - RNA, 19 nt, Artificial Sequence
  Description of Artificial Sequence: Synthetic oligonucleotide
  modified_base (10)..(10): a, c, u, g, unknown or other
aauuugugungugugugug

SEQ ID NO: 699550 - RNA, 19 nt, Artificial Sequence
  Description of Artificial Sequence: Synthetic oligonucleotide
ugacggaugucauugaagu

SEQ ID NO: 699551 - RNA, 19 nt, Artificial Sequence
  Description of Artificial Sequence: Synthetic oligonucleotide
uguaaguugggauguacac

SEQ ID NO: 699552 - RNA, 19 nt, Artificial Sequence
  Description of Artificial Sequence: Synthetic oligonucleotide
ucuucgaauuagauauggg

SEQ ID NO: 699553 - RNA, 19 nt, Artificial Sequence
  Description of Artificial Sequence: Synthetic oligonucleotide
aaacuggguugucucacgg

SEQ ID NO: 699554 - RNA, 19 nt, Artificial Sequence
  Description of Artificial Sequence: Synthetic oligonucleotide
uuuucgugaaauacguagu

SEQ ID NO: 699555 - RNA, 19 nt, Artificial Sequence
  Description of Artificial Sequence: Synthetic oligonucleotide
ugcacucauauguaaacug

SEQ ID NO: 699556 - RNA, 19 nt, Artificial Sequence
  Description of Artificial Sequence: Synthetic oligonucleotide
acuauugggaucccaaacu

SEQ ID NO: 699557 - RNA, 19 nt, Artificial Sequence
  Description of Artificial Sequence: Synthetic oligonucleotide
ugcggcugcacucauaugu

SEQ ID NO: 699558 - RNA, 19 nt, Artificial Sequence
  Description of Artificial Sequence: Synthetic oligonucleotide
aucgaauuacauuagguuu

SEQ ID NO: 699559 - RNA, 19 nt, Artificial Sequence
  Description of Artificial Sequence: Synthetic oligonucleotide
ugguuuguaaguugggaug

SEQ ID NO: 699560 - RNA, 19 nt, Artificial Sequence
  Description of Artificial Sequence: Synthetic oligonucleotide
gauggaucucuaaauaccc

SEQ ID NO: 699561 - RNA, 19 nt, Artificial Sequence
  Description of Artificial Sequence: Synthetic oligonucleotide
gagaucgaauuacauuagg

SEQ ID NO: 699562 - RNA, 19 nt, Artificial Sequence
  Description of Artificial Sequence: Synthetic oligonucleotide
caaacgucccaacagcacg

SEQ ID NO: 699563 - RNA, 19 nt, Artificial Sequence
  Description of Artificial Sequence: Synthetic oligonucleotide
ugacgagcaauuuucguga

SEQ ID NO: 699564 - RNA, 19 nt, Artificial Sequence
  Description of Artificial Sequence: Synthetic oligonucleotide
ucugucgaucuguaagugg

SEQ ID NO: 699565 - RNA, 19 nt, Artificial Sequence
  Description of Artificial Sequence: Synthetic oligonucleotide
uagacguuucugcugcacg

SEQ ID NO: 699566 - RNA, 19 nt, Artificial Sequence
  Description of Artificial Sequence: Synthetic oligonucleotide
aauuagauauggguugcug

SEQ ID NO: 699567 - RNA, 19 nt, Artificial Sequence
  Description of Artificial Sequence: Synthetic oligonucleotide
auagccaugccuguacagc

SEQ ID NO: 699568 - RNA, 19 nt, Artificial Sequence
  Description of Artificial Sequence: Synthetic oligonucleotide
aucggcaagcauuauaagu

SEQ ID NO: 699569 - RNA, 19 nt, Artificial Sequence
  Description of Artificial Sequence: Synthetic oligonucleotide
acaugugcguaccacagug

SEQ ID NO: 699570 - RNA, 19 nt, Artificial Sequence
  Description of Artificial Sequence: Synthetic oligonucleotide
agccucaaccgucaucucc

SEQ ID NO: 699571 - RNA, 19 nt, Artificial Sequence
  Description of Artificial Sequence: Synthetic oligonucleotide
  modified_base (4)..(4): a, c, u, g, unknown or other
ugungugugugugugugug

SEQ ID NO: 699572 - RNA, 19 nt, Artificial Sequence
  Description of Artificial Sequence: Synthetic oligonucleotide
ucuauucuucgaauuagau

SEQ ID NO: 699573 - RNA, 19 nt, Artificial Sequence
  Description of Artificial Sequence: Synthetic oligonucleotide
gacuuuugcuuccacguug

SEQ ID NO: 699574 - RNA, 19 nt, Artificial Sequence
  Description of Artificial Sequence: Synthetic oligonucleotide
acuggguugucucacggag

SEQ ID NO: 699575 - RNA, 19 nt, Artificial Sequence
  Description of Artificial Sequence: Synthetic oligonucleotide
gucaagguaggacagcacc

SEQ ID NO: 699576 - RNA, 19 nt, Artificial Sequence
  Description of Artificial Sequence: Synthetic oligonucleotide
cugacgagcaauuuucgug

SEQ ID NO: 699577 - RNA, 19 nt, Artificial Sequence
  Description of Artificial Sequence: Synthetic oligonucleotide
augcuagucaaggacuucc

SEQ ID NO: 699578 - RNA, 19 nt, Artificial Sequence
  Description of Artificial Sequence: Synthetic oligonucleotide
caggaagggauucauacug

SEQ ID NO: 699579 - RNA, 19 nt, Artificial Sequence
  Description of Artificial Sequence: Synthetic oligonucleotide
augugcguaccacagugcg

SEQ ID NO: 699580 - RNA, 19 nt, Artificial Sequence
  Description of Artificial Sequence: Synthetic oligonucleotide
cuagucaaggacuuccaug

SEQ ID NO: 699581 - RNA, 19 nt, Artificial Sequence
  Description of Artificial Sequence: Synthetic oligonucleotide
agccugauacuuugggccc

SEQ ID NO: 699582 - RNA, 19 nt, Artificial Sequence
  Description of Artificial Sequence: Synthetic oligonucleotide
uucuauucuucgaauuaga

SEQ ID NO: 699583 - RNA, 19 nt, Artificial Sequence
  Description of Artificial Sequence: Synthetic oligonucleotide
auucauacuggcgggauag

SEQ ID NO: 699584 - RNA, 19 nt, Artificial Sequence
  Description of Artificial Sequence: Synthetic oligonucleotide
uagaaagagcucccuaugu

SEQ ID NO: 699585 - RNA, 19 nt, Artificial Sequence
  Description of Artificial Sequence: Synthetic oligonucleotide
uguguguguguguagacau

SEQ ID NO: 699586 - RNA, 19 nt, Artificial Sequence
  Description of Artificial Sequence: Synthetic oligonucleotide
uauagaagcauacgacuuu

SEQ ID NO: 699587 - RNA, 19 nt, Artificial Sequence
  Description of Artificial Sequence: Synthetic oligonucleotide
agcuuucacaggcucgccc

SEQ ID NO: 699588 - RNA, 19 nt, Artificial Sequence
  Description of Artificial Sequence: Synthetic oligonucleotide
uggaggaauucucaaagua

SEQ ID NO: 699589 - RNA, 19 nt, Artificial Sequence
  Description of Artificial Sequence: Synthetic oligonucleotide
agggucauacaccaaugag

SEQ ID NO: 699590 - RNA, 19 nt, Artificial Sequence
  Description of Artificial Sequence: Synthetic oligonucleotide
cuuuagcaugcuuaucggc

SEQ ID NO: 699591 - RNA, 19 nt, Artificial Sequence
  Description of Artificial Sequence: Synthetic oligonucleotide
aagggucauacaccaauga

SEQ ID NO: 699592 - RNA, 19 nt, Artificial Sequence
  Description of Artificial Sequence: Synthetic oligonucleotide
cagcauaauuaauagcaac

SEQ ID NO: 699593 - RNA, 19 nt, Artificial Sequence
  Description of Artificial Sequence: Synthetic oligonucleotide
gacuauugggaucccaaac

SEQ ID NO: 699594 - RNA, 19 nt, Artificial Sequence
  Description of Artificial Sequence: Synthetic oligonucleotide
uugguuuguaaguugggau

SEQ ID NO: 699595 - RNA, 19 nt, Artificial Sequence
  Description of Artificial Sequence: Synthetic oligonucleotide
uggcgggauagaaagagcu

SEQ ID NO: 699596 - RNA, 19 nt, Artificial Sequence
  Description of Artificial Sequence: Synthetic oligonucleotide
auacuuugggcccacucug

SEQ ID NO: 699597 - RNA, 19 nt, Artificial Sequence
  Description of Artificial Sequence: Synthetic oligonucleotide
ucgucuauagaagcauacg

SEQ ID NO: 699598 - RNA, 19 nt, Artificial Sequence
  Description of Artificial Sequence: Synthetic oligonucleotide
uuucgugaaauacguagua

SEQ ID NO: 699599 - RNA, 19 nt, Artificial Sequence
  Description of Artificial Sequence: Synthetic oligonucleotide
  modified_base (6)..(6): a, c, u, g, unknown or other
ugugungugugugugugug

SEQ ID NO: 699600 - RNA, 19 nt, Artificial Sequence
  Description of Artificial Sequence: Synthetic oligonucleotide
uguuggccgccauaguccg

SEQ ID NO: 699601 - RNA, 19 nt, Artificial Sequence
  Description of Artificial Sequence: Synthetic oligonucleotide
agcauacgacuuuugcuuc

SEQ ID NO: 699602 - RNA, 19 nt, Artificial Sequence
  Description of Artificial Sequence: Synthetic oligonucleotide
  modified_base (8)..(8): a, c, u, g, unknown or other
uuugugungugugugugug

SEQ ID NO: 699603 - RNA, 19 nt, Artificial Sequence
  Description of Artificial Sequence: Synthetic oligonucleotide
  modified_base (9)..(9): a, c, u, g, unknown or other
auuugugungugugugugu

SEQ ID NO: 699604 - RNA, 19 nt, Artificial Sequence
  Description of Artificial Sequence: Synthetic oligonucleotide
uucaccaugagggucccag

SEQ ID NO: 699605 - RNA, 19 nt, Artificial Sequence
  Description of Artificial Sequence: Synthetic oligonucleotide
  modified_base (11)..(11): a, c, u, g, unknown or other
uaauuugugungugugugu

SEQ ID NO: 699606 - RNA, 19 nt, Artificial Sequence
  Description of Artificial Sequence: Synthetic oligonucleotide
aaacgucccaacagcacgg

SEQ ID NO: 699607 - RNA, 19 nt, Artificial Sequence
  Description of Artificial Sequence: Synthetic oligonucleotide
acuuuugcuuccacguugc

SEQ ID NO: 699608 - RNA, 19 nt, Artificial Sequence
  Description of Artificial Sequence: Synthetic oligonucleotide
uauguaaacuggguugucu

SEQ ID NO: 699609 - RNA, 19 nt, Artificial Sequence
  Description of Artificial Sequence: Synthetic oligonucleotide
uauuugguugggauuuggu

SEQ ID NO: 699610 - RNA, 19 nt, Artificial Sequence
  Description of Artificial Sequence: Synthetic oligonucleotide
ucuccgacccgguacaugu

SEQ ID NO: 699611 - RNA, 19 nt, Artificial Sequence
  Description of Artificial Sequence: Synthetic oligonucleotide
uacagcguauccauggcau

SEQ ID NO: 699612 - RNA, 19 nt, Artificial Sequence
  Description of Artificial Sequence: Synthetic oligonucleotide
ucacgucgucuauagaagc

SEQ ID NO: 699613 - RNA, 19 nt, Artificial Sequence
  Description of Artificial Sequence: Synthetic oligonucleotide
caaacggccgucucgcugc

SEQ ID NO: 699614 - RNA, 19 nt, Artificial Sequence
  Description of Artificial Sequence: Synthetic oligonucleotide
ucagaggccgaccacuccu

SEQ ID NO: 699615 - RNA, 19 nt, Artificial Sequence
  Description of Artificial Sequence: Synthetic oligonucleotide
auagcaacaaacggccguc

SEQ ID NO: 699616 - RNA, 19 nt, Artificial Sequence
  Description of Artificial Sequence: Synthetic oligonucleotide
acuuauggcacugcucagg

SEQ ID NO: 699617 - RNA, 19 nt, Artificial Sequence
  Description of Artificial Sequence: Synthetic oligonucleotide
gugcguaccacagugcgcg

SEQ ID NO: 699618 - RNA, 19 nt, Artificial Sequence
  Description of Artificial Sequence: Synthetic oligonucleotide
uuugucggcuaauaauguc

SEQ ID NO: 699619 - RNA, 19 nt, Artificial Sequence
  Description of Artificial Sequence: Synthetic oligonucleotide
acauuagguuucuuugcug

SEQ ID NO: 699620 - RNA, 19 nt, Artificial Sequence
  Description of Artificial Sequence: Synthetic oligonucleotide
cauguuggccgccauaguc

SEQ ID NO: 699621 - RNA, 19 nt, Artificial Sequence
  Description of Artificial Sequence: Synthetic oligonucleotide
cacguugccacuugcaguc

SEQ ID NO: 699622 - RNA, 19 nt, Artificial Sequence
  Description of Artificial Sequence: Synthetic oligonucleotide
aggaauucucaaaguaaac

SEQ ID NO: 699623 - RNA, 19 nt, Artificial Sequence
  Description of Artificial Sequence: Synthetic oligonucleotide
uuagcaugcuuaucggcaa

SEQ ID NO: 699624 - RNA, 19 nt, Artificial Sequence
  Description of Artificial Sequence: Synthetic oligonucleotide
uggcaguaccuuuaccugc

SEQ ID NO: 699625 - RNA, 19 nt, Artificial Sequence
  Description of Artificial Sequence: Synthetic oligonucleotide
agaucgaauuacauuaggu

SEQ ID NO: 699626 - RNA, 19 nt, Artificial Sequence
  Description of Artificial Sequence: Synthetic oligonucleotide
acgacaaagguuuccuagu

SEQ ID NO: 699627 - RNA, 19 nt, Artificial Sequence
  Description of Artificial Sequence: Synthetic oligonucleotide
cucuaaauacccaaugaua

SEQ ID NO: 699628 - RNA, 19 nt, Artificial Sequence
  Description of Artificial Sequence: Synthetic oligonucleotide
cuucgaauuagauaugggu

SEQ ID NO: 699629 - RNA, 19 nt, Artificial Sequence
  Description of Artificial Sequence: Synthetic oligonucleotide
aguucggcaugucugucug

SEQ ID NO: 699630 - RNA, 19 nt, Artificial Sequence
  Description of Artificial Sequence: Synthetic oligonucleotide
gauauggguugcuggagga

SEQ ID NO: 699631 - RNA, 19 nt, Artificial Sequence
  Description of Artificial Sequence: Synthetic oligonucleotide
uaucggcaagcauuauaag

SEQ ID NO: 699632 - RNA, 19 nt, Artificial Sequence
  Description of Artificial Sequence: Synthetic oligonucleotide
ugcuuaucggcaagcauua

SEQ ID NO: 699633 - RNA, 19 nt, Artificial Sequence
  Description of Artificial Sequence: Synthetic oligonucleotide
ugauacuuugggcccacuc

SEQ ID NO: 699634 - RNA, 19 nt, Artificial Sequence
  Description of Artificial Sequence: Synthetic oligonucleotide
cgugaaauacguaguaugg

SEQ ID NO: 699635 - RNA, 19 nt, Artificial Sequence
  Description of Artificial Sequence: Synthetic oligonucleotide
auauuugguugggauuugg

SEQ ID NO: 699636 - RNA, 19 nt, Artificial Sequence
  Description of Artificial Sequence: Synthetic oligonucleotide
uggucaaucugucgaucug

SEQ ID NO: 699637 - RNA, 19 nt, Artificial Sequence
  Description of Artificial Sequence: Synthetic oligonucleotide
  modified_base (2)..(2): a, c, u, g, unknown or other
ungugugugugugugugug

SEQ ID NO: 699638 - RNA, 19 nt, Artificial Sequence
  Description of Artificial Sequence: Synthetic oligonucleotide
ugucagccugauacuuugg

SEQ ID NO: 699639 - RNA, 19 nt, Artificial Sequence
  Description of Artificial Sequence: Synthetic oligonucleotide
uaaguggacuauugggauc

SEQ ID NO: 699640 - RNA, 19 nt, Artificial Sequence
  Description of Artificial Sequence: Synthetic oligonucleotide
uggauauuugguugggauu

SEQ ID NO: 699641 - RNA, 19 nt, Artificial Sequence
  Description of Artificial Sequence: Synthetic oligonucleotide
agaaagagcucccuauguu

SEQ ID NO: 699642 - RNA, 19 nt, Artificial Sequence
  Description of Artificial Sequence: Synthetic oligonucleotide
cuauucuucgaauuagaua

SEQ ID NO: 699643 - RNA, 19 nt, Artificial Sequence
  Description of Artificial Sequence: Synthetic oligonucleotide
caauuuucgugaaauacgu

SEQ ID NO: 699644 - RNA, 19 nt, Artificial Sequence
  Description of Artificial Sequence: Synthetic oligonucleotide
uguguguguguguguguag

SEQ ID NO: 699645 - RNA, 19 nt, Artificial Sequence
  Description of Artificial Sequence: Synthetic oligonucleotide
aucguuccggcccauccag

SEQ ID NO: 699646 - RNA, 19 nt, Artificial Sequence
  Description of Artificial Sequence: Synthetic oligonucleotide
ugcccuaauggcagcauaa

SEQ ID NO: 699647 - RNA, 19 nt, Artificial Sequence
  Description of Artificial Sequence: Synthetic oligonucleotide
agcaacaaacggccgucuc

SEQ ID NO: 699648 - RNA, 19 nt, Artificial Sequence
  Description of Artificial Sequence: Synthetic oligonucleotide
ugugcguaccacagugcgc

SEQ ID NO: 699649 - RNA, 19 nt, Artificial Sequence
  Description of Artificial Sequence: Synthetic oligonucleotide
uauugggaucccaaacuuu

SEQ ID NO: 699650 - RNA, 19 nt, Artificial Sequence
  Description of Artificial Sequence: Synthetic oligonucleotide
guggcaguaccuuuaccug

SEQ ID NO: 699651 - RNA, 19 nt, Artificial Sequence
  Description of Artificial Sequence: Synthetic oligonucleotide
ugaugcuagucaaggacuu

SEQ ID NO: 699652 - RNA, 19 nt, Artificial Sequence
  Description of Artificial Sequence: Synthetic oligonucleotide
gaccugacgagcaauuuuc

SEQ ID NO: 699653 - RNA, 19 nt, Artificial Sequence
  Description of Artificial Sequence: Synthetic oligonucleotide
aucacgucgucuauagaag

SEQ ID NO: 699654 - RNA, 19 nt, Artificial Sequence
  Description of Artificial Sequence: Synthetic oligonucleotide
uccgacccgguacauguug

SEQ ID NO: 699655 - RNA, 19 nt, Artificial Sequence
  Description of Artificial Sequence: Synthetic oligonucleotide
aacuggguugucucacgga

SEQ ID NO: 699656 - RNA, 19 nt, Artificial Sequence
  Description of Artificial Sequence: Synthetic oligonucleotide
uuccggaccggcaugcccu

SEQ ID NO: 699657 - RNA, 19 nt, Artificial Sequence
  Description of Artificial Sequence: Synthetic oligonucleotide
ugcuagucaaggacuucca

SEQ ID NO: 699658 - RNA, 19 nt, Artificial Sequence
  Description of Artificial Sequence: Synthetic oligonucleotide
uguguguguguguguagac

SEQ ID NO: 699659 - RNA, 19 nt, Artificial Sequence
  Description of Artificial Sequence: Synthetic oligonucleotide
aaacggccgucucgcugcc

SEQ ID NO: 699660 - RNA, 19 nt, Artificial Sequence
  Description of Artificial Sequence: Synthetic oligonucleotide
ugauuucaccuuugucggc

SEQ ID NO: 699661 - RNA, 19 nt, Artificial Sequence
  Description of Artificial Sequence: Synthetic oligonucleotide
cucccuauguuucaacuga

SEQ ID NO: 699662 - RNA, 19 nt, Artificial Sequence
  Description of Artificial Sequence: Synthetic oligonucleotide
uagcaugcuuaucggcaag

SEQ ID NO: 699663 - RNA, 19 nt, Artificial Sequence
  Description of Artificial Sequence: Synthetic oligonucleotide
gcacucauauguaaacugg

SEQ ID NO: 699664 - RNA, 19 nt, Artificial Sequence
  Description of Artificial Sequence: Synthetic oligonucleotide
ucgaucuguaaguggacua

SEQ ID NO: 699665 - RNA, 19 nt, Artificial Sequence
  Description of Artificial Sequence: Synthetic oligonucleotide
ugcacguaucugucaguag

SEQ ID NO: 699666 - RNA, 19 nt, Artificial Sequence
  Description of Artificial Sequence: Synthetic oligonucleotide
ucgguggagaucgaauuac

SEQ ID NO: 699667 - RNA, 19 nt, Artificial Sequence
  Description of Artificial Sequence: Synthetic oligonucleotide
ccuuucaccaugagggucc

SEQ ID NO: 699668 - RNA, 19 nt, Artificial Sequence
  Description of Artificial Sequence: Synthetic oligonucleotide
  modified_base (7)..(7): a, c, u, g, unknown or other
uugugungugugugugugu

SEQ ID NO: 699669 - RNA, 19 nt, Artificial Sequence
  Description of Artificial Sequence: Synthetic oligonucleotide
uuggagauaucacgucguc

SEQ ID NO: 699670 - RNA, 19 nt, Artificial Sequence
  Description of Artificial Sequence: Synthetic oligonucleotide
ucaccaugagggucccagg

SEQ ID NO: 699671 - RNA, 19 nt, Artificial Sequence
  Description of Artificial Sequence: Synthetic oligonucleotide
guccugacggaugucauug

SEQ ID NO: 699672 - RNA, 19 nt, Artificial Sequence
  Description of Artificial Sequence: Synthetic oligonucleotide
uccgguagcaugucuggaa

SEQ ID NO: 699673 - RNA, 19 nt, Artificial Sequence
  Description of Artificial Sequence: Synthetic oligonucleotide
uucgugaaauacguaguau

SEQ ID NO: 699674 - RNA, 19 nt, Artificial Sequence
  Description of Artificial Sequence: Synthetic oligonucleotide
ggagauaucacgucgucua

SEQ ID NO: 699675 - RNA, 19 nt, Artificial Sequence
  Description of Artificial Sequence: Synthetic oligonucleotide
ugucaagguaggacagcac

SEQ ID NO: 699676 - RNA, 19 nt, Artificial Sequence
  Description of Artificial Sequence: Synthetic oligonucleotide
guaaacuggguugucucac

SEQ ID NO: 699677 - RNA, 19 nt, Artificial Sequence
  Description of Artificial Sequence: Synthetic oligonucleotide
gcaggcucgguggagaucg

SEQ ID NO: 699678 - RNA, 19 nt, Artificial Sequence
  Description of Artificial Sequence: Synthetic oligonucleotide
ugugguucggagcggucaa

SEQ ID NO: 699679 - RNA, 19 nt, Artificial Sequence
  Description of Artificial Sequence: Synthetic oligonucleotide
ucaucuccguuucuuccuc

SEQ ID NO: 699680 - RNA, 19 nt, Artificial Sequence
  Description of Artificial Sequence: Synthetic oligonucleotide
ugguggauauuugguuggg

SEQ ID NO: 699681 - RNA, 19 nt, Artificial Sequence
  Description of Artificial Sequence: Synthetic oligonucleotide
ccuaauggcagcauaauua

SEQ ID NO: 699682 - RNA, 19 nt, Artificial Sequence
  Description of Artificial Sequence: Synthetic oligonucleotide
guuucaacugaugcuucug

SEQ ID NO: 699683 - RNA, 19 nt, Artificial Sequence
  Description of Artificial Sequence: Synthetic oligonucleotide
aacgucccaacagcacggg

SEQ ID NO: 699684 - RNA, 19 nt, Artificial Sequence
  Description of Artificial Sequence: Synthetic oligonucleotide
uggagauaucacgucgucu

SEQ ID NO: 699685 - RNA, 19 nt, Artificial Sequence
  Description of Artificial Sequence: Synthetic oligonucleotide
acuugggacucccaguguu

SEQ ID NO: 699686 - RNA, 19 nt, Artificial Sequence
  Description of Artificial Sequence: Synthetic oligonucleotide
gugaaauacguaguaugga

SEQ ID NO: 699687 - RNA, 19 nt, Artificial Sequence
  Description of Artificial Sequence: Synthetic oligonucleotide
agucgguucuuuccuuuca

SEQ ID NO: 699688 - RNA, 19 nt, Artificial Sequence
  Description of Artificial Sequence: Synthetic oligonucleotide
cuuggcgggucuucacugc

SEQ ID NO: 699689 - RNA, 19 nt, Artificial Sequence
  Description of Artificial Sequence: Synthetic oligonucleotide
agaccugacgagcaauuuu

SEQ ID NO: 699690 - RNA, 19 nt, Artificial Sequence
  Description of Artificial Sequence: Synthetic oligonucleotide
aagguuuccuagugcuuuu

SEQ ID NO: 699691 - RNA, 19 nt, Artificial Sequence
  Description of Artificial Sequence: Synthetic oligonucleotide
accgacuccgucucauuca

SEQ ID NO: 699692 - RNA, 19 nt, Artificial Sequence
  Description of Artificial Sequence: Synthetic oligonucleotide
aguguuccggaccggcaug

SEQ ID NO: 699693 - RNA, 19 nt, Artificial Sequence
  Description of Artificial Sequence: Synthetic oligonucleotide
caaauaagcuggcuucaga

SEQ ID NO: 699694 - RNA, 19 nt, Artificial Sequence
  Description of Artificial Sequence: Synthetic oligonucleotide
acgucccaacagcacgggc

SEQ ID NO: 699695 - RNA, 19 nt, Artificial Sequence
  Description of Artificial Sequence: Synthetic oligonucleotide
cuggguugucucacggagc

SEQ ID NO: 699696 - RNA, 19 nt, Artificial Sequence
  Description of Artificial Sequence: Synthetic oligonucleotide
gcugcacucauauguaaac

SEQ ID NO: 699697 - RNA, 19 nt, Artificial Sequence
  Description of Artificial Sequence: Synthetic oligonucleotide
auagaagcauacgacuuuu

SEQ ID NO: 699698 - RNA, 19 nt, Artificial Sequence
  Description of Artificial Sequence: Synthetic oligonucleotide
uuagacguuucugcugcac

SEQ ID NO: 699699 - RNA, 19 nt, Artificial Sequence
  Description of Artificial Sequence: Synthetic oligonucleotide
uccaugggagaaaguccug

SEQ ID NO: 699700 - RNA, 19 nt, Artificial Sequence
  Description of Artificial Sequence: Synthetic oligonucleotide
ugugugugugugugugugu

SEQ ID NO: 699701 - RNA, 19 nt, Artificial Sequence
  Description of Artificial Sequence: Synthetic oligonucleotide
uaguccgcccgcccgcccg

SEQ ID NO: 699702 - RNA, 19 nt, Artificial Sequence
  Description of Artificial Sequence: Synthetic oligonucleotide
uguugcaggaagggauuca

SEQ ID NO: 699703 - RNA, 19 nt, Artificial Sequence
  Description of Artificial Sequence: Synthetic oligonucleotide
cuggcgggauagaaagagc

SEQ ID NO: 699704 - RNA, 19 nt, Artificial Sequence
  Description of Artificial Sequence: Synthetic oligonucleotide
uggcgggucuucacugcgg

SEQ ID NO: 699705 - RNA, 19 nt, Artificial Sequence
  Description of Artificial Sequence: Synthetic oligonucleotide
cauacuggcgggauagaaa

SEQ ID NO: 699706 - RNA, 19 nt, Artificial Sequence
  Description of Artificial Sequence: Synthetic oligonucleotide
aacaaacggccgucucgcu

SEQ ID NO: 699707 - RNA, 19 nt, Artificial Sequence
  Description of Artificial Sequence: Synthetic oligonucleotide
ugggacucccaguguuccg

SEQ ID NO: 699708 - RNA, 19 nt, Artificial Sequence
  Description of Artificial Sequence: Synthetic oligonucleotide
cuuaucggcaagcauuaua

SEQ ID NO: 699709 - RNA, 19 nt, Artificial Sequence
  Description of Artificial Sequence: Synthetic oligonucleotide
cuugggacucccaguguuc

SEQ ID NO: 699710 - RNA, 19 nt, Artificial Sequence
  Description of Artificial Sequence: Synthetic oligonucleotide
ucccuauguuucaacugau

SEQ ID NO: 699711 - RNA, 19 nt, Artificial Sequence
  Description of Artificial Sequence: Synthetic oligonucleotide
gcgggauagaaagagcucc

SEQ ID NO: 699712 - RNA, 19 nt, Artificial Sequence
  Description of Artificial Sequence: Synthetic oligonucleotide
gugugugugugugugugug

SEQ ID NO: 699713 - RNA, 19 nt, Artificial Sequence
  Description of Artificial Sequence: Synthetic oligonucleotide
ugccuguacagcguaucca

SEQ ID NO: 699714 - RNA, 19 nt, Artificial Sequence
  Description of Artificial Sequence: Synthetic oligonucleotide
acgggcaaacgucccaaca

SEQ ID NO: 699715 - RNA, 19 nt, Artificial Sequence
  Description of Artificial Sequence: Synthetic oligonucleotide
agcuuggcgggucuucacu

SEQ ID NO: 699716 - RNA, 19 nt, Artificial Sequence
  Description of Artificial Sequence: Synthetic oligonucleotide
aucugucgaucuguaagug

SEQ ID NO: 699717 - RNA, 19 nt, Artificial Sequence
  Description of Artificial Sequence: Synthetic oligonucleotide
gaacgugguccccacagcu

SEQ ID NO: 699718 - RNA, 19 nt, Artificial Sequence
  Description of Artificial Sequence: Synthetic oligonucleotide
ggagaucgaauuacauuag

SEQ ID NO: 699719 - RNA, 19 nt, Artificial Sequence
  Description of Artificial Sequence: Synthetic oligonucleotide
uauaaguguguuggagaua

SEQ ID NO: 699720 - RNA, 19 nt, Artificial Sequence
  Description of Artificial Sequence: Synthetic oligonucleotide
aguuugcaggcucggugga

SEQ ID NO: 699721 - RNA, 19 nt, Artificial Sequence
  Description of Artificial Sequence: Synthetic oligonucleotide
cuauagaagcauacgacuu

SEQ ID NO: 699722 - RNA, 19 nt, Artificial Sequence
  Description of Artificial Sequence: Synthetic oligonucleotide
gcauaauuaauagcaacaa

SEQ ID NO: 699723 - RNA, 19 nt, Artificial Sequence
  Description of Artificial Sequence: Synthetic oligonucleotide
auaucacgucgucuauaga

SEQ ID NO: 699724 - RNA, 19 nt, Artificial Sequence
  Description of Artificial Sequence: Synthetic oligonucleotide
uuucaccuuugucggcuaa

SEQ ID NO: 699725 - RNA, 19 nt, Artificial Sequence
  Description of Artificial Sequence: Synthetic oligonucleotide
gggcaaacgucccaacagc

SEQ ID NO: 699726 - RNA, 19 nt, Artificial Sequence
  Description of Artificial Sequence: Synthetic oligonucleotide
accugacgagcaauuuucg

SEQ ID NO: 699727 - RNA, 19 nt, Artificial Sequence
  Description of Artificial Sequence: Synthetic oligonucleotide
ugguucggagcggucaaca

SEQ ID NO: 699728 - RNA, 19 nt, Artificial Sequence
  Description of Artificial Sequence: Synthetic oligonucleotide
ggucaaacucaggucacag

SEQ ID NO: 699729 - RNA, 19 nt, Artificial Sequence
  Description of Artificial Sequence: Synthetic oligonucleotide
cacgucgucuauagaagca

SEQ ID NO: 699730 - RNA, 19 nt, Artificial Sequence
  Description of Artificial Sequence: Synthetic oligonucleotide
ucugcauauucugcccuaa

SEQ ID NO: 699731 - RNA, 19 nt, Artificial Sequence
  Description of Artificial Sequence: Synthetic oligonucleotide
acuuccaauuuugauuguu

SEQ ID NO: 699732 - RNA, 19 nt, Artificial Sequence
  Description of Artificial Sequence: Synthetic oligonucleotide
guguagacaugugcguacc

SEQ ID NO: 699733 - RNA, 19 nt, Artificial Sequence
  Description of Artificial Sequence: Synthetic oligonucleotide
auaguccgcccgcccgccc

SEQ ID NO: 699734 - RNA, 19 nt, Artificial Sequence
  Description of Artificial Sequence: Synthetic oligonucleotide
gauacacgacaaagguuuc

SEQ ID NO: 699735 - RNA, 19 nt, Artificial Sequence
  Description of Artificial Sequence: Synthetic oligonucleotide
cauauguaaacuggguugu

SEQ ID NO: 699736 - RNA, 19 nt, Artificial Sequence
  Description of Artificial Sequence: Synthetic oligonucleotide
augauacacgacaaagguu

SEQ ID NO: 699737 - RNA, 19 nt, Artificial Sequence
  Description of Artificial Sequence: Synthetic oligonucleotide
cucauauguaaacuggguu

SEQ ID NO: 699738 - RNA, 19 nt, Artificial Sequence
  Description of Artificial Sequence: Synthetic oligonucleotide
guccccacagcuccguuca

SEQ ID NO: 699739 - RNA, 19 nt, Artificial Sequence
  Description of Artificial Sequence: Synthetic oligonucleotide
acagugcgcguguggaggu

SEQ ID NO: 699740 - RNA, 19 nt, Artificial Sequence
  Description of Artificial Sequence: Synthetic oligonucleotide
aguggacuauugggauccc

SEQ ID NO: 699741 - RNA, 19 nt, Artificial Sequence
  Description of Artificial Sequence: Synthetic oligonucleotide
acugcggacuugggacucc

SEQ ID NO: 699742 - RNA, 19 nt, Artificial Sequence
  Description of Artificial Sequence: Synthetic oligonucleotide
gaugcuagucaaggacuuc

SEQ ID NO: 699743 - RNA, 19 nt, Artificial Sequence
  Description of Artificial Sequence: Synthetic oligonucleotide
gugugggcauuuugagacc

SEQ ID NO: 699744 - RNA, 19 nt, Artificial Sequence
  Description of Artificial Sequence: Synthetic oligonucleotide
cuuugucggcuaauaaugu

SEQ ID NO: 699745 - RNA, 19 nt, Artificial Sequence
  Description of Artificial Sequence: Synthetic oligonucleotide
guaaguugggauguacacu

SEQ ID NO: 699746 - RNA, 19 nt, Artificial Sequence
  Description of Artificial Sequence: Synthetic oligonucleotide
caugccuguacagcguauc

SEQ ID NO: 699747 - RNA, 19 nt, Artificial Sequence
  Description of Artificial Sequence: Synthetic oligonucleotide
acgucgucuauagaagcau

SEQ ID NO: 699748 - RNA, 19 nt, Artificial Sequence
  Description of Artificial Sequence: Synthetic oligonucleotide
cuuauggcacugcucaggu

SEQ ID NO: 699749 - RNA, 19 nt, Artificial Sequence
  Description of Artificial Sequence: Synthetic oligonucleotide
caccgacuccgucucauuc

SEQ ID NO: 699750 - RNA, 19 nt, Artificial Sequence
  Description of Artificial Sequence: Synthetic oligonucleotide
guggagaucgaauuacauu

SEQ ID NO: 699751 - RNA, 19 nt, Artificial Sequence
  Description of Artificial Sequence: Synthetic oligonucleotide
guguguguguguguguaga

SEQ ID NO: 699752 - RNA, 19 nt, Artificial Sequence
  Description of Artificial Sequence: Synthetic oligonucleotide
gggacucccaguguuccgg

SEQ ID NO: 699753 - RNA, 19 nt, Artificial Sequence
  Description of Artificial Sequence: Synthetic oligonucleotide
acgagcaauuuucgugaaa

SEQ ID NO: 699754 - RNA, 19 nt, Artificial Sequence
  Description of Artificial Sequence: Synthetic oligonucleotide
guguguguguguguagaca

SEQ ID NO: 699755 - RNA, 19 nt, Artificial Sequence
  Description of Artificial Sequence: Synthetic oligonucleotide
agauaucacgucgucuaua

SEQ ID NO: 699756 - RNA, 19 nt, Artificial Sequence
  Description of Artificial Sequence: Synthetic oligonucleotide
caagguaggacagcaccga

SEQ ID NO: 699757 - RNA, 19 nt, Artificial Sequence
  Description of Artificial Sequence: Synthetic oligonucleotide
agcggucaacauccucuug

SEQ ID NO: 699758 - RNA, 19 nt, Artificial Sequence
  Description of Artificial Sequence: Synthetic oligonucleotide
aguccugacggaugucauu

SEQ ID NO: 699759 - RNA, 19 nt, Artificial Sequence
  Description of Artificial Sequence: Synthetic oligonucleotide
ugggcccacucugauuuca

SEQ ID NO: 699760 - RNA, 19 nt, Artificial Sequence
  Description of Artificial Sequence: Synthetic oligonucleotide
aggccgaccacuccuccau

SEQ ID NO: 699761 - RNA, 19 nt, Artificial Sequence
  Description of Artificial Sequence: Synthetic oligonucleotide
uucauacuggcgggauaga

SEQ ID NO: 699762 - RNA, 19 nt, Artificial Sequence
  Description of Artificial Sequence: Synthetic oligonucleotide
gacgagcaauuuucgugaa

SEQ ID NO: 699763 - RNA, 19 nt, Artificial Sequence
  Description of Artificial Sequence: Synthetic oligonucleotide
gcacguaucugucaguagu

SEQ ID NO: 699764 - RNA, 19 nt, Artificial Sequence
  Description of Artificial Sequence: Synthetic oligonucleotide
ggcaagcauuauaagugug

SEQ ID NO: 699765 - RNA, 19 nt, Artificial Sequence
  Description of Artificial Sequence: Synthetic oligonucleotide
cgucuauagaagcauacga

SEQ ID NO: 699766 - RNA, 19 nt, Artificial Sequence
  Description of Artificial Sequence: Synthetic oligonucleotide
cuuucaccaugaggguccc

SEQ ID NO: 699767 - RNA, 19 nt, Artificial Sequence
  Description of Artificial Sequence: Synthetic oligonucleotide
auuucaccuuugucggcua

SEQ ID NO: 699768 - RNA, 19 nt, Artificial Sequence
  Description of Artificial Sequence: Synthetic oligonucleotide
acacgacaaagguuuccua

SEQ ID NO: 699769 - RNA, 19 nt, Artificial Sequence
  Description of Artificial Sequence: Synthetic oligonucleotide
uugucucacggagcugcug

SEQ ID NO: 699770 - RNA, 19 nt, Artificial Sequence
  Description of Artificial Sequence: Synthetic oligonucleotide
cgaauuagauauggguugc

SEQ ID NO: 699771 - RNA, 19 nt, Artificial Sequence
  Description of Artificial Sequence: Synthetic oligonucleotide
agguuuccuagugcuuuug

SEQ ID NO: 699772 - RNA, 19 nt, Artificial Sequence
  Description of Artificial Sequence: Synthetic oligonucleotide
gucggcuaauaaugucuuc

SEQ ID NO: 699773 - RNA, 19 nt, Artificial Sequence
  Description of Artificial Sequence: Synthetic oligonucleotide
uagcaacaaacggccgucu

SEQ ID NO: 699774 - RNA, 19 nt, Artificial Sequence
  Description of Artificial Sequence: Synthetic oligonucleotide
ggaacgugguccccacagc

SEQ ID NO: 699775 - RNA, 19 nt, Artificial Sequence
  Description of Artificial Sequence: Synthetic oligonucleotide
ccaucguuccggcccaucc

SEQ ID NO: 699776 - RNA, 19 nt, Artificial Sequence
  Description of Artificial Sequence: Synthetic oligonucleotide
ggauagaaagagcucccua

SEQ ID NO: 699777 - RNA, 19 nt, Artificial Sequence
  Description of Artificial Sequence: Synthetic oligonucleotide
guguguguguguagacaug

SEQ ID NO: 699778 - RNA, 19 nt, Artificial Sequence
  Description of Artificial Sequence: Synthetic oligonucleotide
caggaugcucagagaggug

SEQ ID NO: 699779 - RNA, 19 nt, Artificial Sequence
  Description of Artificial Sequence: Synthetic oligonucleotide
auauggguugcuggaggaa

SEQ ID NO: 699780 - RNA, 19 nt, Artificial Sequence
  Description of Artificial Sequence: Synthetic oligonucleotide
gggacagguggcuucucac

SEQ ID NO: 699781 - RNA, 19 nt, Artificial Sequence
  Description of Artificial Sequence: Synthetic oligonucleotide
caggucgcacacagucuac

SEQ ID NO: 699782 - RNA, 19 nt, Artificial Sequence
  Description of Artificial Sequence: Synthetic oligonucleotide
cuauugggaucccaaacuu

SEQ ID NO: 699783 - RNA, 19 nt, Artificial Sequence
  Description of Artificial Sequence: Synthetic oligonucleotide
gguuuguaaguugggaugu

SEQ ID NO: 699784 - RNA, 19 nt, Artificial Sequence
  Description of Artificial Sequence: Synthetic oligonucleotide
gugugguucggagcgguca

SEQ ID NO: 699785 - RNA, 19 nt, Artificial Sequence
  Description of Artificial Sequence: Synthetic oligonucleotide
gacaugugcguaccacagu

SEQ ID NO: 699786 - RNA, 19 nt, Artificial Sequence
  Description of Artificial Sequence: Synthetic oligonucleotide
guguuccggaccggcaugc

SEQ ID NO: 699787 - RNA, 19 nt, Artificial Sequence
  Description of Artificial Sequence: Synthetic oligonucleotide
gaauuagauauggguugcu

SEQ ID NO: 699788 - RNA, 19 nt, Artificial Sequence
  Description of Artificial Sequence: Synthetic oligonucleotide
caucguuccggcccaucca

SEQ ID NO: 699789 - RNA, 19 nt, Artificial Sequence
  Description of Artificial Sequence: Synthetic oligonucleotide
gagauaucacgucgucuau

SEQ ID NO: 699790 - RNA, 19 nt, Artificial Sequence
  Description of Artificial Sequence: Synthetic oligonucleotide
cucgguggagaucgaauua

SEQ ID NO: 699791 - RNA, 19 nt, Artificial Sequence
  Description of Artificial Sequence: Synthetic oligonucleotide
guauggaggaagaaagcuu

SEQ ID NO: 699792 - RNA, 19 nt, Artificial Sequence
  Description of Artificial Sequence: Synthetic oligonucleotide
ugcggacuugggacuccca

SEQ ID NO: 699793 - RNA, 19 nt, Artificial Sequence
  Description of Artificial Sequence: Synthetic oligonucleotide
gguagcaugucuggaaugu

SEQ ID NO: 699794 - RNA, 19 nt, Artificial Sequence
  Description of Artificial Sequence: Synthetic oligonucleotide
aggagucgguucuuuccuu

SEQ ID NO: 699795 - RNA, 19 nt, Artificial Sequence
  Description of Artificial Sequence: Synthetic oligonucleotide
agagcucccuauguuucaa

SEQ ID NO: 699796 - RNA, 19 nt, Artificial Sequence
  Description of Artificial Sequence: Synthetic oligonucleotide
guguguagacaugugcgua

SEQ ID NO: 699797 - RNA, 19 nt, Artificial Sequence
  Description of Artificial Sequence: Synthetic oligonucleotide
cauaguccgcccgcccgcc

SEQ ID NO: 699798 - RNA, 19 nt, Artificial Sequence
  Description of Artificial Sequence: Synthetic oligonucleotide
cagaggccgaccacuccuc

SEQ ID NO: 699799 - RNA, 19 nt, Artificial Sequence
  Description of Artificial Sequence: Synthetic oligonucleotide
acauaaucuccgacccggu

SEQ ID NO: 699800 - RNA, 19 nt, Artificial Sequence
  Description of Artificial Sequence: Synthetic oligonucleotide
cgggcaaacgucccaacag

SEQ ID NO: 699801 - RNA, 19 nt, Artificial Sequence
  Description of Artificial Sequence: Synthetic oligonucleotide
aaguggcaccaggacacuu

SEQ ID NO: 699802 - RNA, 19 nt, Artificial Sequence
  Description of Artificial Sequence: Synthetic oligonucleotide
agcacgggcuacaacuaaa

SEQ ID NO: 699803 - RNA, 19 nt, Artificial Sequence
  Description of Artificial Sequence: Synthetic oligonucleotide
caaguucggcaugucuguc

SEQ ID NO: 699804 - RNA, 19 nt, Artificial Sequence
  Description of Artificial Sequence: Synthetic oligonucleotide
uccggaccggcaugcccug

SEQ ID NO: 699805 - RNA, 19 nt, Artificial Sequence
  Description of Artificial Sequence: Synthetic oligonucleotide
cagggcaacgcugcacuuc

SEQ ID NO: 699806 - RNA, 19 nt, Artificial Sequence
  Description of Artificial Sequence: Synthetic oligonucleotide
aucuccgacccgguacaug

SEQ ID NO: 699807 - RNA, 19 nt, Artificial Sequence
  Description of Artificial Sequence: Synthetic oligonucleotide
ccgacccgguacauguugg

SEQ ID NO: 699808 - RNA, 19 nt, Artificial Sequence
  Description of Artificial Sequence: Synthetic oligonucleotide
gugugugugugugugugua

SEQ ID NO: 699809 - RNA, 19 nt, Artificial Sequence
  Description of Artificial Sequence: Synthetic oligonucleotide
acguaguauggaggaagaa

SEQ ID NO: 699810 - RNA, 19 nt, Artificial Sequence
  Description of Artificial Sequence: Synthetic oligonucleotide
gucugcauauucugcccua

SEQ ID NO: 699811 - RNA, 19 nt, Artificial Sequence
  Description of Artificial Sequence: Synthetic oligonucleotide
aaucuccgacccgguacau

SEQ ID NO: 699812 - RNA, 19 nt, Artificial Sequence
  Description of Artificial Sequence: Synthetic oligonucleotide
gcuuccacguugccacuug

SEQ ID NO: 699813 - RNA, 19 nt, Artificial Sequence
  Description of Artificial Sequence: Synthetic oligonucleotide
  modified_base (3)..(3): a, c, u, g, unknown or other
gungugugugugugugugu

SEQ ID NO: 699814 - RNA, 19 nt, Artificial Sequence
  Description of Artificial Sequence: Synthetic oligonucleotide
gucgaucuguaaguggacu

SEQ ID NO: 699815 - RNA, 19 nt, Artificial Sequence
  Description of Artificial Sequence: Synthetic oligonucleotide
agcaccgacuccgucucau

SEQ ID NO: 699816 - RNA, 19 nt, Artificial Sequence
  Description of Artificial Sequence: Synthetic oligonucleotide
ucggcaugucugucugcau

SEQ ID NO: 699817 - RNA, 19 nt, Artificial Sequence
  Description of Artificial Sequence: Synthetic oligonucleotide
ucggagcggucaacauccu

SEQ ID NO: 699818 - RNA, 19 nt, Artificial Sequence
  Description of Artificial Sequence: Synthetic oligonucleotide
gcaaguucggcaugucugu

SEQ ID NO: 699819 - RNA, 19 nt, Artificial Sequence
  Description of Artificial Sequence: Synthetic oligonucleotide
gcuuucacaggcucgcccu

SEQ ID NO: 699820 - RNA, 19 nt, Artificial Sequence
  Description of Artificial Sequence: Synthetic oligonucleotide
cugauauguguugcaggaa

SEQ ID NO: 699821 - RNA, 19 nt, Artificial Sequence
  Description of Artificial Sequence: Synthetic oligonucleotide
ugcguaccacagugcgcgu

SEQ ID NO: 699822 - RNA, 19 nt, Artificial Sequence
  Description of Artificial Sequence: Synthetic oligonucleotide
gccgccauaguccgcccgc

SEQ ID NO: 699823 - RNA, 19 nt, Artificial Sequence
  Description of Artificial Sequence: Synthetic oligonucleotide
ggugagacuguguggcaua

SEQ ID NO: 699824 - RNA, 19 nt, Artificial Sequence
  Description of Artificial Sequence: Synthetic oligonucleotide
caguaccuuuaccugcuua

SEQ ID NO: 699825 - RNA, 19 nt, Artificial Sequence
  Description of Artificial Sequence: Synthetic oligonucleotide
cugcacucauauguaaacu

SEQ ID NO: 699826 - RNA, 19 nt, Artificial Sequence
  Description of Artificial Sequence: Synthetic oligonucleotide
cugcggacuugggacuccc

SEQ ID NO: 699827 - RNA, 19 nt, Artificial Sequence
  Description of Artificial Sequence: Synthetic oligonucleotide
ccauaguccgcccgcccgc

SEQ ID NO: 699828 - RNA, 19 nt, Artificial Sequence
  Description of Artificial Sequence: Synthetic oligonucleotide
gcccacucugauuucaccu

SEQ ID NO: 699829 - RNA, 19 nt, Artificial Sequence
  Description of Artificial Sequence: Synthetic oligonucleotide
cacugcggacuugggacuc

SEQ ID NO: 699830 - RNA, 19 nt, Artificial Sequence
  Description of Artificial Sequence: Synthetic oligonucleotide
cugaagggucauacaccaa

SEQ ID NO: 699831 - RNA, 19 nt, Artificial Sequence
  Description of Artificial Sequence: Synthetic oligonucleotide
  modified_base (5)..(5): a, c, u, g, unknown or other
gugungugugugugugugu

SEQ ID NO: 699832 - RNA, 19 nt, Artificial Sequence
  Description of Artificial Sequence: Synthetic oligonucleotide
ggcgggauagaaagagcuc

SEQ ID NO: 699833 - RNA, 19 nt, Artificial Sequence
  Description of Artificial Sequence: Synthetic oligonucleotide
cugcggcugcacucauaug

SEQ ID NO: 699834 - RNA, 19 nt, Artificial Sequence
  Description of Artificial Sequence: Synthetic oligonucleotide
cagcacgggcuacaacuaa

SEQ ID NO: 699835 - RNA, 19 nt, Artificial Sequence
  Description of Artificial Sequence: Synthetic oligonucleotide
gggauucauacuggcggga

SEQ ID NO: 699836 - RNA, 19 nt, Artificial Sequence
  Description of Artificial Sequence: Synthetic oligonucleotide
ccuagugcuuuugcuuuuc

SEQ ID NO: 699837 - RNA, 19 nt, Artificial Sequence
  Description of Artificial Sequence: Synthetic oligonucleotide
gguggagaucgaauuacau

SEQ ID NO: 699838 - RNA, 19 nt, Artificial Sequence
  Description of Artificial Sequence: Synthetic oligonucleotide
caguguuccggaccggcau

SEQ ID NO: 699839 - RNA, 19 nt, Artificial Sequence
  Description of Artificial Sequence: Synthetic oligonucleotide
acguugccacuugcagucu

SEQ ID NO: 699840 - RNA, 19 nt, Artificial Sequence
  Description of Artificial Sequence: Synthetic oligonucleotide
ucgcccuaggaggguguuc

SEQ ID NO: 699841 - RNA, 19 nt, Artificial Sequence
  Description of Artificial Sequence: Synthetic oligonucleotide
ggaggguguucuggggcug

SEQ ID NO: 699842 - RNA, 19 nt, Artificial Sequence
  Description of Artificial Sequence: Synthetic oligonucleotide
cagccucaaccgucaucuc

SEQ ID NO: 699843 - RNA, 19 nt, Artificial Sequence
  Description of Artificial Sequence: Synthetic oligonucleotide
ggacucccaguguuccgga

SEQ ID NO: 699844 - RNA, 19 nt, Artificial Sequence
  Description of Artificial Sequence: Synthetic oligonucleotide
gcucgguggagaucgaauu

SEQ ID NO: 699845 - RNA, 19 nt, Artificial Sequence
  Description of Artificial Sequence: Synthetic oligonucleotide
guguggcauagcagcuuuc

SEQ ID NO: 699846 - RNA, 19 nt, Artificial Sequence
  Description of Artificial Sequence: Synthetic oligonucleotide
gcacgggcuacaacuaaaa

SEQ ID NO: 699847 - RNA, 19 nt, Artificial Sequence
  Description of Artificial Sequence: Synthetic oligonucleotide
aacggccgucucgcugccu

SEQ ID NO: 699848 - RNA, 19 nt, Artificial Sequence
  Description of Artificial Sequence: Synthetic oligonucleotide
gggauagaaagagcucccu

SEQ ID NO: 699849 - RNA, 19 nt, Artificial Sequence
  Description of Artificial Sequence: Synthetic oligonucleotide
gcguaccacagugcgcgug

SEQ ID NO: 699850 - RNA, 19 nt, Artificial Sequence
  Description of Artificial Sequence: Synthetic oligonucleotide
cgagcaauuuucgugaaau

SEQ ID NO: 699851 - RNA, 19 nt, Artificial Sequence
  Description of Artificial Sequence: Synthetic oligonucleotide
ccugauacuuugggcccac

SEQ ID NO: 699852 - RNA, 19 nt, Artificial Sequence
  Description of Artificial Sequence: Synthetic oligonucleotide
ccugacgagcaauuuucgu

SEQ ID NO: 699853 - RNA, 19 nt, Artificial Sequence
  Description of Artificial Sequence: Synthetic oligonucleotide
ggauucauacuggcgggau

SEQ ID NO: 699854 - RNA, 19 nt, Artificial Sequence
  Description of Artificial Sequence: Synthetic oligonucleotide
gguucggagcggucaacau

SEQ ID NO: 699855 - RNA, 19 nt, Artificial Sequence
  Description of Artificial Sequence: Synthetic oligonucleotide
ccacguugccacuugcagu

SEQ ID NO: 699856 - RNA, 19 nt, Artificial Sequence
  Description of Artificial Sequence: Synthetic oligonucleotide
ggcccuccaaguggcacca

SEQ ID NO: 699857 - RNA, 19 nt, Artificial Sequence
  Description of Artificial Sequence: Synthetic oligonucleotide
cagugcgcguguggagguc

SEQ ID NO: 699858 - RNA, 19 nt, Artificial Sequence
  Description of Artificial Sequence: Synthetic oligonucleotide
cucggcuucugcugcuuuu

SEQ ID NO: 699859 - RNA, 19 nt, Artificial Sequence
  Description of Artificial Sequence: Synthetic oligonucleotide
gggcccacucugauuucac

SEQ ID NO: 699860 - RNA, 19 nt, Artificial Sequence
  Description of Artificial Sequence: Synthetic oligonucleotide
cgguggagaucgaauuaca

SEQ ID NO: 699861 - RNA, 19 nt, Artificial Sequence
  Description of Artificial Sequence: Synthetic oligonucleotide
gcacgggcaaacgucccaa

SEQ ID NO: 699862 - RNA, 19 nt, Artificial Sequence
  Description of Artificial Sequence: Synthetic oligonucleotide
gcggcugcacucauaugua

SEQ ID NO: 699863 - RNA, 19 nt, Artificial Sequence
  Description of Artificial Sequence: Synthetic oligonucleotide
ggccgaccacuccuccauc

SEQ ID NO: 699864 - RNA, 19 nt, Artificial Sequence
  Description of Artificial Sequence: Synthetic oligonucleotide
cggcaagcauuauaagugu

SEQ ID NO: 699865 - RNA, 19 nt, Artificial Sequence
  Description of Artificial Sequence: Synthetic oligonucleotide
cagaccugacgagcaauuu

SEQ ID NO: 699866 - RNA, 19 nt, Artificial Sequence
  Description of Artificial Sequence: Synthetic oligonucleotide
cccuaauggcagcauaauu

SEQ ID NO: 699867 - RNA, 19 nt, Artificial Sequence
  Description of Artificial Sequence: Synthetic oligonucleotide
cgaauuacauuagguuucu

SEQ ID NO: 699868 - RNA, 19 nt, Artificial Sequence
  Description of Artificial Sequence: Synthetic oligonucleotide
ggcucgguggagaucgaau

SEQ ID NO: 699869 - RNA, 19 nt, Artificial Sequence
  Description of Artificial Sequence: Synthetic oligonucleotide
cgccauaguccgcccgccc

SEQ ID NO: 699870 - RNA, 19 nt, Artificial Sequence
  Description of Artificial Sequence: Synthetic oligonucleotide
ccgccauaguccgcccgcc

SEQ ID NO: 699871 - RNA, 19 nt, Artificial Sequence
  Description of Artificial Sequence: Synthetic oligonucleotide
cggcaugucugucugcaua

SEQ ID NO: 699872 - RNA, 19 nt, Artificial Sequence
  Description of Artificial Sequence: Synthetic oligonucleotide
ccgguagcaugucuggaau

SEQ ID NO: 699873 - RNA, 19 nt, Artificial Sequence
  Description of Artificial Sequence: Synthetic oligonucleotide
cagcaccgacuccgucuca

SEQ ID NO: 699874 - RNA, 19 nt, Artificial Sequence
  Description of Artificial Sequence: Synthetic oligonucleotide
gcacuugcaggagucgguu

SEQ ID NO: 699875 - RNA, 19 nt, Artificial Sequence
  Description of Artificial Sequence: Synthetic oligonucleotide
gcccuaauggcagcauaau

SEQ ID NO: 699876 - RNA, 19 nt, Artificial Sequence
  Description of Artificial Sequence: Synthetic oligonucleotide
ccauugcugguggauauuu

SEQ ID NO: 699877 - RNA, 19 nt, Artificial Sequence
  Description of Artificial Sequence: Synthetic oligonucleotide
cugauacuuugggcccacu

SEQ ID NO: 699878 - RNA, 19 nt, Artificial Sequence
  Description of Artificial Sequence: Synthetic oligonucleotide
cgaucuguaaguggacuau

SEQ ID NO: 699879 - RNA, 19 nt, Artificial Sequence
  Description of Artificial Sequence: Synthetic oligonucleotide
gccaucguuccggcccauc

SEQ ID NO: 699880 - RNA, 19 nt, Artificial Sequence
  Description of Artificial Sequence: Synthetic oligonucleotide
cuccgacccgguacauguu

SEQ ID NO: 699881 - RNA, 19 nt, Artificial Sequence
  Description of Artificial Sequence: Synthetic oligonucleotide
cggccgucucgcugccugc

SEQ ID NO: 699882 - RNA, 19 nt, Artificial Sequence
  Description of Artificial Sequence: Synthetic oligonucleotide
ccucaaccgucaucuccgu

SEQ ID NO: 699883 - RNA, 19 nt, Artificial Sequence
  Description of Artificial Sequence: Synthetic oligonucleotide
ccggaccggcaugcccugc

SEQ ID NO: 699884 - RNA, 19 nt, Artificial Sequence
  Description of Artificial Sequence: Synthetic oligonucleotide
gcaccgacuccgucucauu

SEQ ID NO: 699885 - RNA, 19 nt, Artificial Sequence
  Description of Artificial Sequence: Synthetic oligonucleotide
cucgcccuaggaggguguu

SEQ ID NO: 699886 - RNA, 19 nt, Artificial Sequence
  Description of Artificial Sequence: Synthetic oligonucleotide
cgacuuuugcuuccacguu

SEQ ID NO: 699887 - RNA, 19 nt, Artificial Sequence
  Description of Artificial Sequence: Synthetic oligonucleotide
ccgggacagguggcuucuc

SEQ ID NO: 699888 - RNA, 19 nt, Artificial Sequence
  Description of Artificial Sequence: Synthetic oligonucleotide
  modified_base (1)..(1): a, c, u, g, unknown or other
ngugugugugugugugugu

SEQ ID NO: 699889 - RNA, 19 nt, Artificial Sequence
  Description of Artificial Sequence: Synthetic oligonucleotide
aauaaucugucuuaugugc

SEQ ID NO: 699890 - RNA, 19 nt, Artificial Sequence
  Description of Artificial Sequence: Synthetic oligonucleotide
aaugacucaauucccaggg

SEQ ID NO: 699891 - RNA, 19 nt, Artificial Sequence
  Description of Artificial Sequence: Synthetic oligonucleotide
ucaguaaagucuaugagag

SEQ ID NO: 699892 - RNA, 19 nt, Artificial Sequence
  Description of Artificial Sequence: Synthetic oligonucleotide
aacauuuauacaugccacc

SEQ ID NO: 699893 - RNA, 19 nt, Artificial Sequence
  Description of Artificial Sequence: Synthetic oligonucleotide
aaauuaaagaacucuacau

SEQ ID NO: 699894 - RNA, 19 nt, Artificial Sequence
  Description of Artificial Sequence: Synthetic oligonucleotide
cuuaugugcacuuacuagg

SEQ ID NO: 699895 - RNA, 19 nt, Artificial Sequence
  Description of Artificial Sequence: Synthetic oligonucleotide
aaauaaucugucuuaugug

SEQ ID NO: 699896 - RNA, 19 nt, Artificial Sequence
  Description of Artificial Sequence: Synthetic oligonucleotide
aauugacaccaaugcaucc

SEQ ID NO: 699897 - RNA, 19 nt, Artificial Sequence
  Description of Artificial Sequence: Synthetic oligonucleotide
uuacaggaaagccuggagg

SEQ ID NO: 699898 - RNA, 19 nt, Artificial Sequence
  Description of Artificial Sequence: Synthetic oligonucleotide
uucauaucucuuaagacac

SEQ ID NO: 699899 - RNA, 19 nt, Artificial Sequence
  Description of Artificial Sequence: Synthetic oligonucleotide
aagaaaucgauuugguuga

SEQ ID NO: 699900 - RNA, 19 nt, Artificial Sequence
  Description of Artificial Sequence: Synthetic oligonucleotide
gaucgugggaaacacaggg

SEQ ID NO: 699901 - RNA, 19 nt, Artificial Sequence
  Description of Artificial Sequence: Synthetic oligonucleotide
gauaucuaauuuuacagga

SEQ ID NO: 699902 - RNA, 19 nt, Artificial Sequence
  Description of Artificial Sequence: Synthetic oligonucleotide
aaaucgauuugguugauaa

SEQ ID NO: 699903 - RNA, 19 nt, Artificial Sequence
  Description of Artificial Sequence: Synthetic oligonucleotide
ucaguuaaaggucaggaaa

SEQ ID NO: 699904 - RNA, 19 nt, Artificial Sequence
  Description of Artificial Sequence: Synthetic oligonucleotide
uugauucuagaacaagucc

SEQ ID NO: 699905 - RNA, 19 nt, Artificial Sequence
  Description of Artificial Sequence: Synthetic oligonucleotide
ucuuaugugcacuuacuag

SEQ ID NO: 699906 - RNA, 19 nt, Artificial Sequence
  Description of Artificial Sequence: Synthetic oligonucleotide
cuuauuccgaagaaugucc

SEQ ID NO: 699907 - RNA, 19 nt, Artificial Sequence
  Description of Artificial Sequence: Synthetic oligonucleotide
auaggaaggucucaggguc

SEQ ID NO: 699908 - RNA, 19 nt, Artificial Sequence
  Description of Artificial Sequence: Synthetic oligonucleotide
agaaccuuuauacucaagu

SEQ ID NO: 699909 - RNA, 19 nt, Artificial Sequence
  Description of Artificial Sequence: Synthetic oligonucleotide
ucuagaacaaguccauuca

SEQ ID NO: 699910 - RNA, 19 nt, Artificial Sequence
  Description of Artificial Sequence: Synthetic oligonucleotide
ugucuaacacuacaaaaga

SEQ ID NO: 699911 - RNA, 19 nt, Artificial Sequence
  Description of Artificial Sequence: Synthetic oligonucleotide
cauauauauuccaagagga

SEQ ID NO: 699912 - RNA, 19 nt, Artificial Sequence
  Description of Artificial Sequence: Synthetic oligonucleotide
agaacauucaauaaugacu

SEQ ID NO: 699913 - RNA, 19 nt, Artificial Sequence
  Description of Artificial Sequence: Synthetic oligonucleotide
uuauuagagguccauuucu

SEQ ID NO: 699914 - RNA, 19 nt, Artificial Sequence
  Description of Artificial Sequence: Synthetic oligonucleotide
ugaagcuuagauccccucg

SEQ ID NO: 699915 - RNA, 19 nt, Artificial Sequence
  Description of Artificial Sequence: Synthetic oligonucleotide
uuuacguuaaugguccagg

SEQ ID NO: 699916 - RNA, 19 nt, Artificial Sequence
  Description of Artificial Sequence: Synthetic oligonucleotide
uugaaaaucccagugaagu

SEQ ID NO: 699917 - RNA, 19 nt, Artificial Sequence
  Description of Artificial Sequence: Synthetic oligonucleotide
uaucuaauuuuacaggaaa

SEQ ID NO: 699918 - RNA, 19 nt, Artificial Sequence
  Description of Artificial Sequence: Synthetic oligonucleotide
uuauacucaaguuuaggaa

SEQ ID NO: 699919 - RNA, 19 nt, Artificial Sequence
  Description of Artificial Sequence: Synthetic oligonucleotide
aucgauuugguugauaaag

SEQ ID NO: 699920 - RNA, 19 nt, Artificial Sequence
  Description of Artificial Sequence: Synthetic oligonucleotide
augauguauccgcugauac

SEQ ID NO: 699921 - RNA, 19 nt, Artificial Sequence
  Description of Artificial Sequence: Synthetic oligonucleotide
ugucaguaaagucuaugag

SEQ ID NO: 699922 - RNA, 19 nt, Artificial Sequence
  Description of Artificial Sequence: Synthetic oligonucleotide
ugcuuguauauuuuacagg

SEQ ID NO: 699923 - RNA, 19 nt, Artificial Sequence
  Description of Artificial Sequence: Synthetic oligonucleotide
caaacuauuacagacagga

SEQ ID NO: 699924 - RNA, 19 nt, Artificial Sequence
  Description of Artificial Sequence: Synthetic oligonucleotide
gucaaacuauuacagacag

SEQ ID NO: 699925 - RNA, 19 nt, Artificial Sequence
  Description of Artificial Sequence: Synthetic oligonucleotide
caccaaugcauccauaucc

SEQ ID NO: 699926 - RNA, 19 nt, Artificial Sequence
  Description of Artificial Sequence: Synthetic oligonucleotide
uuuuagauauagcuauaga

SEQ ID NO: 699927 - RNA, 19 nt, Artificial Sequence
  Description of Artificial Sequence: Synthetic oligonucleotide
uuaagacacugaauuuacg

SEQ ID NO: 699928 - RNA, 19 nt, Artificial Sequence
  Description of Artificial Sequence: Synthetic oligonucleotide
uauuccaagaggaagugua

SEQ ID NO: 699929 - RNA, 19 nt, Artificial Sequence
  Description of Artificial Sequence: Synthetic oligonucleotide
uuuauuagagguccauuuc

SEQ ID NO: 699930 - RNA, 19 nt, Artificial Sequence
  Description of Artificial Sequence: Synthetic oligonucleotide
cuaucaacagaacaagaac

SEQ ID NO: 699931 - RNA, 19 nt, Artificial Sequence
  Description of Artificial Sequence: Synthetic oligonucleotide
gauguauccgcugauacac

SEQ ID NO: 699932 - RNA, 19 nt, Artificial Sequence
  Description of Artificial Sequence: Synthetic oligonucleotide
uaaugacucaauucccagg

SEQ ID NO: 699933 - RNA, 19 nt, Artificial Sequence
  Description of Artificial Sequence: Synthetic oligonucleotide
gacguuuuauuagaggucc

SEQ ID NO: 699934 - RNA, 19 nt, Artificial Sequence
  Description of Artificial Sequence: Synthetic oligonucleotide
gugucaaacuauuacagac

SEQ ID NO: 699935 - RNA, 19 nt, Artificial Sequence
  Description of Artificial Sequence: Synthetic oligonucleotide
aaagccuggaggaagcuuc

SEQ ID NO: 699936 - RNA, 19 nt, Artificial Sequence
  Description of Artificial Sequence: Synthetic oligonucleotide
ugguugauaaaguugcaga

SEQ ID NO: 699937 - RNA, 19 nt, Artificial Sequence
  Description of Artificial Sequence: Synthetic oligonucleotide
uucucuaagcuuguuaaag

SEQ ID NO: 699938 - RNA, 19 nt, Artificial Sequence
  Description of Artificial Sequence: Synthetic oligonucleotide
gaacucuacauaaugauga

SEQ ID NO: 699939 - RNA, 19 nt, Artificial Sequence
  Description of Artificial Sequence: Synthetic oligonucleotide
gaaauguauucuucccacg

SEQ ID NO: 699940 - RNA, 19 nt, Artificial Sequence
  Description of Artificial Sequence: Synthetic oligonucleotide
aauaaugacucaauuccca

SEQ ID NO: 699941 - RNA, 19 nt, Artificial Sequence
  Description of Artificial Sequence: Synthetic oligonucleotide
uaauaguguucugaggagg

SEQ ID NO: 699942 - RNA, 19 nt, Artificial Sequence
  Description of Artificial Sequence: Synthetic oligonucleotide
uaaauaucacugcucauua

SEQ ID NO: 699943 - RNA, 19 nt, Artificial Sequence
  Description of Artificial Sequence: Synthetic oligonucleotide
acguuaaugguccaggagu

SEQ ID NO: 699944 - RNA, 19 nt, Artificial Sequence
  Description of Artificial Sequence: Synthetic oligonucleotide
auaaugacucaauucccag

SEQ ID NO: 699945 - RNA, 19 nt, Artificial Sequence
  Description of Artificial Sequence: Synthetic oligonucleotide
aacugaugguuaccauugc

SEQ ID NO: 699946 - RNA, 19 nt, Artificial Sequence
  Description of Artificial Sequence: Synthetic oligonucleotide
ucacugcucauuaaaauau

SEQ ID NO: 699947 - RNA, 19 nt, Artificial Sequence
  Description of Artificial Sequence: Synthetic oligonucleotide
caauaaugacucaauuccc

SEQ ID NO: 699948 - RNA, 19 nt, Artificial Sequence
  Description of Artificial Sequence: Synthetic oligonucleotide
uaaaggucaggaaaacgac

SEQ ID NO: 699949 - RNA, 19 nt, Artificial Sequence
  Description of Artificial Sequence: Synthetic oligonucleotide
uucuagaacaaguccauuc

SEQ ID NO: 699950 - RNA, 19 nt, Artificial Sequence
  Description of Artificial Sequence: Synthetic oligonucleotide
ggaaauuccuggcucaugg

SEQ ID NO: 699951 - RNA, 19 nt, Artificial Sequence
  Description of Artificial Sequence: Synthetic oligonucleotide
uuaugugcacuuacuagga

SEQ ID NO: 699952 - RNA, 19 nt, Artificial Sequence
  Description of Artificial Sequence: Synthetic oligonucleotide
gucaguaaagucuaugaga

SEQ ID NO: 699953 - RNA, 19 nt, Artificial Sequence
  Description of Artificial Sequence: Synthetic oligonucleotide
uguauagaggcaaugcguu

SEQ ID NO: 699954 - RNA, 19 nt, Artificial Sequence
  Description of Artificial Sequence: Synthetic oligonucleotide
ugaugguuaccauugcucu

SEQ ID NO: 699955 - RNA, 19 nt, Artificial Sequence
  Description of Artificial Sequence: Synthetic oligonucleotide
gcuacaguggcuuuaaaug

SEQ ID NO: 699956 - RNA, 19 nt, Artificial Sequence
  Description of Artificial Sequence: Synthetic oligonucleotide
agucuaugagaguuguguc

SEQ ID NO: 699957 - RNA, 19 nt, Artificial Sequence
  Description of Artificial Sequence: Synthetic oligonucleotide
uacguuaaugguccaggag

SEQ ID NO: 699958 - RNA, 19 nt, Artificial Sequence
  Description of Artificial Sequence: Synthetic oligonucleotide
ugggugucaaacuauuaca

SEQ ID NO: 699959 - RNA, 19 nt, Artificial Sequence
  Description of Artificial Sequence: Synthetic oligonucleotide
ugacucaauucccagggga

SEQ ID NO: 699960 - RNA, 19 nt, Artificial Sequence
  Description of Artificial Sequence: Synthetic oligonucleotide
aagacacugaauuuacguu

SEQ ID NO: 699961 - RNA, 19 nt, Artificial Sequence
  Description of Artificial Sequence: Synthetic oligonucleotide
uucuagguaaaagucaccu

SEQ ID NO: 699962 - RNA, 19 nt, Artificial Sequence
  Description of Artificial Sequence: Synthetic oligonucleotide
caacugaugguuaccauug

SEQ ID NO: 699963 - RNA, 19 nt, Artificial Sequence
  Description of Artificial Sequence: Synthetic oligonucleotide
uucaugucaguaaagucua

SEQ ID NO: 699964 - RNA, 19 nt, Artificial Sequence
  Description of Artificial Sequence: Synthetic oligonucleotide
ucuuaagacacugaauuua

SEQ ID NO: 699965 - RNA, 19 nt, Artificial Sequence
  Description of Artificial Sequence: Synthetic oligonucleotide
cucuaagcuuguuaaagug

SEQ ID NO: 699966 - RNA, 19 nt, Artificial Sequence
  Description of Artificial Sequence: Synthetic oligonucleotide
guuaaaggucaggaaaacg

SEQ ID NO: 699967 - RNA, 19 nt, Artificial Sequence
  Description of Artificial Sequence: Synthetic oligonucleotide
auauauuccaagaggaagu

SEQ ID NO: 699968 - RNA, 19 nt, Artificial Sequence
  Description of Artificial Sequence: Synthetic oligonucleotide
uuacauaggaaggucucag

SEQ ID NO: 699969 - RNA, 19 nt, Artificial Sequence
  Description of Artificial Sequence: Synthetic oligonucleotide
ucucuaagcuuguuaaagu

SEQ ID NO: 699970 - RNA, 19 nt, Artificial Sequence
  Description of Artificial Sequence: Synthetic oligonucleotide
guaauaguguucugaggag

SEQ ID NO: 699971 - RNA, 19 nt, Artificial Sequence
  Description of Artificial Sequence: Synthetic oligonucleotide
ugugucaagccugauguug

SEQ ID NO: 699972 - RNA, 19 nt, Artificial Sequence
  Description of Artificial Sequence: Synthetic oligonucleotide
uuuugggcacgugugaaag

SEQ ID NO: 699973 - RNA, 19 nt, Artificial Sequence
  Description of Artificial Sequence: Synthetic oligonucleotide
ucgauuugguugauaaagu

SEQ ID NO: 699974 - RNA, 19 nt, Artificial Sequence
  Description of Artificial Sequence: Synthetic oligonucleotide
uauuagagguccauuucuc

SEQ ID NO: 699975 - RNA, 19 nt, Artificial Sequence
  Description of Artificial Sequence: Synthetic oligonucleotide
uaugagaguugugucaagc

SEQ ID NO: 699976 - RNA, 19 nt, Artificial Sequence
  Description of Artificial Sequence: Synthetic oligonucleotide
uuuguccaaaauauguguu

SEQ ID NO: 699977 - RNA, 19 nt, Artificial Sequence
  Description of Artificial Sequence: Synthetic oligonucleotide
ucggacguuuuauuagagg

SEQ ID NO: 699978 - RNA, 19 nt, Artificial Sequence
  Description of Artificial Sequence: Synthetic oligonucleotide
uuauuccgaagaauguccu

SEQ ID NO: 699979 - RNA, 19 nt, Artificial Sequence
  Description of Artificial Sequence: Synthetic oligonucleotide
uccaguuuugggcacgugu

SEQ ID NO: 699980 - RNA, 19 nt, Artificial Sequence
  Description of Artificial Sequence: Synthetic oligonucleotide
aggcaaugcguuucaaggg

SEQ ID NO: 699981 - RNA, 19 nt, Artificial Sequence
  Description of Artificial Sequence: Synthetic oligonucleotide
auaaauaucacugcucauu

SEQ ID NO: 699982 - RNA, 19 nt, Artificial Sequence
  Description of Artificial Sequence: Synthetic oligonucleotide
uuugucucauugucuaaca

SEQ ID NO: 699983 - RNA, 19 nt, Artificial Sequence
  Description of Artificial Sequence: Synthetic oligonucleotide
uugguugauaaaguugcag

SEQ ID NO: 699984 - RNA, 19 nt, Artificial Sequence
  Description of Artificial Sequence: Synthetic oligonucleotide
uuuccuuagaagagcugug

SEQ ID NO: 699985 - RNA, 19 nt, Artificial Sequence
  Description of Artificial Sequence: Synthetic oligonucleotide
agggcuuuuaauaaccgag

SEQ ID NO: 699986 - RNA, 19 nt, Artificial Sequence
  Description of Artificial Sequence: Synthetic oligonucleotide
accaaugcauccauauccc

SEQ ID NO: 699987 - RNA, 19 nt, Artificial Sequence
  Description of Artificial Sequence: Synthetic oligonucleotide
uuaccguaccuaucaacag

SEQ ID NO: 699988 - RNA, 19 nt, Artificial Sequence
  Description of Artificial Sequence: Synthetic oligonucleotide
uaccuaucaacagaacaag

SEQ ID NO: 699989 - RNA, 19 nt, Artificial Sequence
  Description of Artificial Sequence: Synthetic oligonucleotide
uuuuaauaaccgaggucgu

SEQ ID NO: 699990 - RNA, 19 nt, Artificial Sequence
  Description of Artificial Sequence: Synthetic oligonucleotide
gcugauacuugagagaggg

SEQ ID NO: 699991 - RNA, 19 nt, Artificial Sequence
  Description of Artificial Sequence: Synthetic oligonucleotide
aacuguucccaggugcugg

SEQ ID NO: 699992 - RNA, 19 nt, Artificial Sequence
  Description of Artificial Sequence: Synthetic oligonucleotide
cuuuacauaggaaggucuc

SEQ ID NO: 699993 - RNA, 19 nt, Artificial Sequence
  Description of Artificial Sequence: Synthetic oligonucleotide
ucauuggacauuucaaauu

SEQ ID NO: 699994 - RNA, 19 nt, Artificial Sequence
  Description of Artificial Sequence: Synthetic oligonucleotide
aguugugucaagccugaug

SEQ ID NO: 699995 - RNA, 19 nt, Artificial Sequence
  Description of Artificial Sequence: Synthetic oligonucleotide
cauguuaccguaccuauca

SEQ ID NO: 699996 - RNA, 19 nt, Artificial Sequence
  Description of Artificial Sequence: Synthetic oligonucleotide
cugucuucuaaccggcucg

SEQ ID NO: 699997 - RNA, 19 nt, Artificial Sequence
  Description of Artificial Sequence: Synthetic oligonucleotide
gcacgugugaaagaaaucg

SEQ ID NO: 699998 - RNA, 19 nt, Artificial Sequence
  Description of Artificial Sequence: Synthetic oligonucleotide
cugggugucaaacuauuac

SEQ ID NO: 699999 - RNA, 19 nt, Artificial Sequence
  Description of Artificial Sequence: Synthetic oligonucleotide
ugucugucgacccucugcu

SEQ ID NO: 700000 - RNA, 19 nt, Artificial Sequence
  Description of Artificial Sequence: Synthetic oligonucleotide
auacaugccacccuguaua

SEQ ID NO: 700001 - RNA, 19 nt, Artificial Sequence
  Description of Artificial Sequence: Synthetic oligonucleotide
agacacugaauuuacguua

SEQ ID NO: 700002 - RNA, 19 nt, Artificial Sequence
  Description of Artificial Sequence: Synthetic oligonucleotide
gugaucgugggaaacacag

SEQ ID NO: 700003 - RNA, 19 nt, Artificial Sequence
  Description of Artificial Sequence: Synthetic oligonucleotide
ugucuuaugugcacuuacu

SEQ ID NO: 700004 - RNA, 19 nt, Artificial Sequence
  Description of Artificial Sequence: Synthetic oligonucleotide
ugaucgugggaaacacagg

SEQ ID NO: 700005 - RNA, 19 nt, Artificial Sequence
  Description of Artificial Sequence: Synthetic oligonucleotide
aacacucucccuggauugc

SEQ ID NO: 700006 - RNA, 19 nt, Artificial Sequence
  Description of Artificial Sequence: Synthetic oligonucleotide
uaccguaccuaucaacaga

SEQ ID NO: 700007 - RNA, 19 nt, Artificial Sequence
  Description of Artificial Sequence: Synthetic oligonucleotide
aggaacauuuauacaugcc

SEQ ID NO: 700008 - RNA, 19 nt, Artificial Sequence
  Description of Artificial Sequence: Synthetic oligonucleotide
ugauguauccgcugauaca

SEQ ID NO: 700009 - RNA, 19 nt, Artificial Sequence
  Description of Artificial Sequence: Synthetic oligonucleotide
gugcugauacuugagagag

SEQ ID NO: 700010 - RNA, 19 nt, Artificial Sequence
  Description of Artificial Sequence: Synthetic oligonucleotide
acguaauaguguucugagg

SEQ ID NO: 700011 - RNA, 19 nt, Artificial Sequence
  Description of Artificial Sequence: Synthetic oligonucleotide
uaaagucuaugagaguugu

SEQ ID NO: 700012 - RNA, 19 nt, Artificial Sequence
  Description of Artificial Sequence: Synthetic oligonucleotide
aaacaaagagcaccacgau

SEQ ID NO: 700013 - RNA, 19 nt, Artificial Sequence
  Description of Artificial Sequence: Synthetic oligonucleotide
uguuaccguaccuaucaac

SEQ ID NO: 700014 - RNA, 19 nt, Artificial Sequence
  Description of Artificial Sequence: Synthetic oligonucleotide
aacauucaauaaugacuca

SEQ ID NO: 700015 - RNA, 19 nt, Artificial Sequence
  Description of Artificial Sequence: Synthetic oligonucleotide
uuuacauaggaaggucuca

SEQ ID NO: 700016 - RNA, 19 nt, Artificial Sequence
  Description of Artificial Sequence: Synthetic oligonucleotide
uucggacguuuuauuagag

SEQ ID NO: 700017 - RNA, 19 nt, Artificial Sequence
  Description of Artificial Sequence: Synthetic oligonucleotide
aacucuacauaaugaugaa

SEQ ID NO: 700018 - RNA, 19 nt, Artificial Sequence
  Description of Artificial Sequence: Synthetic oligonucleotide
ggcaaugcguuucaagggg

SEQ ID NO: 700019 - RNA, 19 nt, Artificial Sequence
  Description of Artificial Sequence: Synthetic oligonucleotide
aucacaucugaacuccuga

SEQ ID NO: 700020 - RNA, 19 nt, Artificial Sequence
  Description of Artificial Sequence: Synthetic oligonucleotide
guuaccguaccuaucaaca

SEQ ID NO: 700021 - RNA, 19 nt, Artificial Sequence
  Description of Artificial Sequence: Synthetic oligonucleotide
uuagagguccauuucucau

SEQ ID NO: 700022 - RNA, 19 nt, Artificial Sequence
  Description of Artificial Sequence: Synthetic oligonucleotide
auuacuucuagaacauuca

SEQ ID NO: 700023 - RNA, 19 nt, Artificial Sequence
  Description of Artificial Sequence: Synthetic oligonucleotide
cauaucucuuaagacacug

SEQ ID NO: 700024 - RNA, 19 nt, Artificial Sequence
  Description of Artificial Sequence: Synthetic oligonucleotide
acaccaaugcauccauauc

SEQ ID NO: 700025 - RNA, 19 nt, Artificial Sequence
  Description of Artificial Sequence: Synthetic oligonucleotide
gauggccuuauuccgaaga

SEQ ID NO: 700026 - RNA, 19 nt, Artificial Sequence
  Description of Artificial Sequence: Synthetic oligonucleotide
gaugguuaccauugcucug

SEQ ID NO: 700027 - RNA, 19 nt, Artificial Sequence
  Description of Artificial Sequence: Synthetic oligonucleotide
uauagaggcaaugcguuuc

SEQ ID NO: 700028 - RNA, 19 nt, Artificial Sequence
  Description of Artificial Sequence: Synthetic oligonucleotide
aaucgauuugguugauaaa

SEQ ID NO: 700029 - RNA, 19 nt, Artificial Sequence
  Description of Artificial Sequence: Synthetic oligonucleotide
aaagaacucagagggugca

SEQ ID NO: 700030 - RNA, 19 nt, Artificial Sequence
  Description of Artificial Sequence: Synthetic oligonucleotide
uucucaucacaucacugau

SEQ ID NO: 700031 - RNA, 19 nt, Artificial Sequence
  Description of Artificial Sequence: Synthetic oligonucleotide
ucuucccacguaauagugu

SEQ ID NO: 700032 - RNA, 19 nt, Artificial Sequence
  Description of Artificial Sequence: Synthetic oligonucleotide
uuacguuaaugguccagga

SEQ ID NO: 700033 - RNA, 19 nt, Artificial Sequence
  Description of Artificial Sequence: Synthetic oligonucleotide
gaaauuccuggcucauggc

SEQ ID NO: 700034 - RNA, 19 nt, Artificial Sequence
  Description of Artificial Sequence: Synthetic oligonucleotide
cuagaacaaguccauucac

SEQ ID NO: 700035 - RNA, 19 nt, Artificial Sequence
  Description of Artificial Sequence: Synthetic oligonucleotide
ugccacccuguauagaggc

SEQ ID NO: 700036 - RNA, 19 nt, Artificial Sequence
  Description of Artificial Sequence: Synthetic oligonucleotide
aagauggacccaucaaauu

SEQ ID NO: 700037 - RNA, 19 nt, Artificial Sequence
  Description of Artificial Sequence: Synthetic oligonucleotide
ugcuugaguuuccuuagaa

SEQ ID NO: 700038 - RNA, 19 nt, Artificial Sequence
  Description of Artificial Sequence: Synthetic oligonucleotide
uccuucuaguucauuggac

SEQ ID NO: 700039 - RNA, 19 nt, Artificial Sequence
  Description of Artificial Sequence: Synthetic oligonucleotide
gcugcuuuacauaggaagg

SEQ ID NO: 700040 - RNA, 19 nt, Artificial Sequence
  Description of Artificial Sequence: Synthetic oligonucleotide
guaggcauguuaccguacc

SEQ ID NO: 700041 - RNA, 19 nt, Artificial Sequence
  Description of Artificial Sequence: Synthetic oligonucleotide
acugaaaaggguucaggua

SEQ ID NO: 700042 - RNA, 19 nt, Artificial Sequence
  Description of Artificial Sequence: Synthetic oligonucleotide
agguccauuucucaucaca

SEQ ID NO: 700043 - RNA, 19 nt, Artificial Sequence
  Description of Artificial Sequence: Synthetic oligonucleotide
ggagcacucccucagaaug

SEQ ID NO: 700044 - RNA, 19 nt, Artificial Sequence
  Description of Artificial Sequence: Synthetic oligonucleotide
aauuuacguuaauggucca

SEQ ID NO: 700045 - RNA, 19 nt, Artificial Sequence
  Description of Artificial Sequence: Synthetic oligonucleotide
uguuuuagauauagcuaua

SEQ ID NO: 700046 - RNA, 19 nt, Artificial Sequence
  Description of Artificial Sequence: Synthetic oligonucleotide
aucaguuaaaggucaggaa

SEQ ID NO: 700047 - RNA, 19 nt, Artificial Sequence
  Description of Artificial Sequence: Synthetic oligonucleotide
ucuguucaccucagaaaac

SEQ ID NO: 700048 - RNA, 19 nt, Artificial Sequence
  Description of Artificial Sequence: Synthetic oligonucleotide
ugacccugccacuuguagc

SEQ ID NO: 700049 - RNA, 19 nt, Artificial Sequence
  Description of Artificial Sequence: Synthetic oligonucleotide
auugacaccaaugcaucca

SEQ ID NO: 700050 - RNA, 19 nt, Artificial Sequence
  Description of Artificial Sequence: Synthetic oligonucleotide
accauugcucuguucaccu

SEQ ID NO: 700051 - RNA, 19 nt, Artificial Sequence
  Description of Artificial Sequence: Synthetic oligonucleotide
cucuguucaccucagaaaa

SEQ ID NO: 700052 - RNA, 19 nt, Artificial Sequence
  Description of Artificial Sequence: Synthetic oligonucleotide
augaagcuuagauccccuc

SEQ ID NO: 700053 - RNA, 19 nt, Artificial Sequence
  Description of Artificial Sequence: Synthetic oligonucleotide
guuuaaaggaacauuuaua

SEQ ID NO: 700054 - RNA, 19 nt, Artificial Sequence
  Description of Artificial Sequence: Synthetic oligonucleotide
guaccuaucaacagaacaa

SEQ ID NO: 700055 - RNA, 19 nt, Artificial Sequence
  Description of Artificial Sequence: Synthetic oligonucleotide
cucauugucuaacacuaca

SEQ ID NO: 700056 - RNA, 19 nt, Artificial Sequence
  Description of Artificial Sequence: Synthetic oligonucleotide
ucccacguaauaguguucu

SEQ ID NO: 700057 - RNA, 19 nt, Artificial Sequence
  Description of Artificial Sequence: Synthetic oligonucleotide
caacacucucccuggauug

SEQ ID NO: 700058 - RNA, 19 nt, Artificial Sequence
  Description of Artificial Sequence: Synthetic oligonucleotide
augacucaauucccagggg

SEQ ID NO: 700059 - RNA, 19 nt, Artificial Sequence
  Description of Artificial Sequence: Synthetic oligonucleotide
auguugauaccuugcuugu

SEQ ID NO: 700060 - RNA, 19 nt, Artificial Sequence
  Description of Artificial Sequence: Synthetic oligonucleotide
ccuguauagaggcaaugcg

SEQ ID NO: 700061 - RNA, 19 nt, Artificial Sequence
  Description of Artificial Sequence: Synthetic oligonucleotide
agcacucccucagaaugcc

SEQ ID NO: 700062 - RNA, 19 nt, Artificial Sequence
  Description of Artificial Sequence: Synthetic oligonucleotide
ugugaucgugggaaacaca

SEQ ID NO: 700063 - RNA, 19 nt, Artificial Sequence
  Description of Artificial Sequence: Synthetic oligonucleotide
cugucuuaugugcacuuac

SEQ ID NO: 700064 - RNA, 19 nt, Artificial Sequence
  Description of Artificial Sequence: Synthetic oligonucleotide
gguaaaacaaagagcacca

SEQ ID NO: 700065 - RNA, 19 nt, Artificial Sequence
  Description of Artificial Sequence: Synthetic oligonucleotide
cuaagcuuguuaaagugcu

SEQ ID NO: 700066 - RNA, 19 nt, Artificial Sequence
  Description of Artificial Sequence: Synthetic oligonucleotide
auaaucugucuuaugugca

SEQ ID NO: 700067 - RNA, 19 nt, Artificial Sequence
  Description of Artificial Sequence: Synthetic oligonucleotide
guaaagucuaugagaguug

SEQ ID NO: 700068 - RNA, 19 nt, Artificial Sequence
  Description of Artificial Sequence: Synthetic oligonucleotide
ugagguguucucuucuuuu

SEQ ID NO: 700069 - RNA, 19 nt, Artificial Sequence
  Description of Artificial Sequence: Synthetic oligonucleotide
aguucauuggacauuucaa

SEQ ID NO: 700070 - RNA, 19 nt, Artificial Sequence
  Description of Artificial Sequence: Synthetic oligonucleotide
aaugcccugcagcuguaaa

SEQ ID NO: 700071 - RNA, 19 nt, Artificial Sequence
  Description of Artificial Sequence: Synthetic oligonucleotide
ucaaggggauucauaucuc

SEQ ID NO: 700072 - RNA, 19 nt, Artificial Sequence
  Description of Artificial Sequence: Synthetic oligonucleotide
uguauccgcugauacacuu

SEQ ID NO: 700073 - RNA, 19 nt, Artificial Sequence
  Description of Artificial Sequence: Synthetic oligonucleotide
ucucauugucuaacacuac

SEQ ID NO: 700074 - RNA, 19 nt, Artificial Sequence
  Description of Artificial Sequence: Synthetic oligonucleotide
uguaggcauguuaccguac

SEQ ID NO: 700075 - RNA, 19 nt, Artificial Sequence
  Description of Artificial Sequence: Synthetic oligonucleotide
aaguuuaaaggaacauuua

SEQ ID NO: 700076 - RNA, 19 nt, Artificial Sequence
  Description of Artificial Sequence: Synthetic oligonucleotide
cucguuggcacuucauguc

SEQ ID NO: 700077 - RNA, 19 nt, Artificial Sequence
  Description of Artificial Sequence: Synthetic oligonucleotide
cuuacuaggaagcaaguuu

SEQ ID NO: 700078 - RNA, 19 nt, Artificial Sequence
  Description of Artificial Sequence: Synthetic oligonucleotide
cucggaaugcauugcagca

SEQ ID NO: 700079 - RNA, 19 nt, Artificial Sequence
  Description of Artificial Sequence: Synthetic oligonucleotide
gauguaggcauguuaccgu

SEQ ID NO: 700080 - RNA, 19 nt, Artificial Sequence
  Description of Artificial Sequence: Synthetic oligonucleotide
gguugauaaaguugcagaa

SEQ ID NO: 700081 - RNA, 19 nt, Artificial Sequence
  Description of Artificial Sequence: Synthetic oligonucleotide
uugggcacgugugaaagaa

SEQ ID NO: 700082 - RNA, 19 nt, Artificial Sequence
  Description of Artificial Sequence: Synthetic oligonucleotide
uuaaugguccaggaguguu

SEQ ID NO: 700083 - RNA, 19 nt, Artificial Sequence
  Description of Artificial Sequence: Synthetic oligonucleotide
cuucggacguuuuauuaga

SEQ ID NO: 700084 - RNA, 19 nt, Artificial Sequence
  Description of Artificial Sequence: Synthetic oligonucleotide
gggugucaaacuauuacag

SEQ ID NO: 700085 - RNA, 19 nt, Artificial Sequence
  Description of Artificial Sequence: Synthetic oligonucleotide
uauuccgaagaauguccuc

SEQ ID NO: 700086 - RNA, 19 nt, Artificial Sequence
  Description of Artificial Sequence: Synthetic oligonucleotide
ggccuuauuccgaagaaug

SEQ ID NO: 700087 - RNA, 19 nt, Artificial Sequence
  Description of Artificial Sequence: Synthetic oligonucleotide
gcacuuacuaggaagcaag

SEQ ID NO: 700088 - RNA, 19 nt, Artificial Sequence
  Description of Artificial Sequence: Synthetic oligonucleotide
cuucuaaccggcucgaagu

SEQ ID NO: 700089 - RNA, 19 nt, Artificial Sequence
  Description of Artificial Sequence: Synthetic oligonucleotide
gaagcuuagauccccucgu

SEQ ID NO: 700090 - RNA, 19 nt, Artificial Sequence
  Description of Artificial Sequence: Synthetic oligonucleotide
cguaauaguguucugagga

SEQ ID NO: 700091 - RNA, 19 nt, Artificial Sequence
  Description of Artificial Sequence: Synthetic oligonucleotide
ugcacuuacuaggaagcaa

SEQ ID NO: 700092 - RNA, 19 nt, Artificial Sequence
  Description of Artificial Sequence: Synthetic oligonucleotide
caccuaacucuuucagggc

SEQ ID NO: 700093 - RNA, 19 nt, Artificial Sequence
  Description of Artificial Sequence: Synthetic oligonucleotide
uuugggcacgugugaaaga

SEQ ID NO: 700094 - RNA, 19 nt, Artificial Sequence
  Description of Artificial Sequence: Synthetic oligonucleotide
acagggauaucuaauuuua

SEQ ID NO: 700095 - RNA, 19 nt, Artificial Sequence
  Description of Artificial Sequence: Synthetic oligonucleotide
caagccugauguugauacc

SEQ ID NO: 700096 - RNA, 19 nt, Artificial Sequence
  Description of Artificial Sequence: Synthetic oligonucleotide
guuuccuuagaagagcugu

SEQ ID NO: 700097 - RNA, 19 nt, Artificial Sequence
  Description of Artificial Sequence: Synthetic oligonucleotide
agggugcuauuacuucuag

SEQ ID NO: 700098 - RNA, 19 nt, Artificial Sequence
  Description of Artificial Sequence: Synthetic oligonucleotide
uagauccccucguuggcac

SEQ ID NO: 700099 - RNA, 19 nt, Artificial Sequence
  Description of Artificial Sequence: Synthetic oligonucleotide
cuguauagaggcaaugcgu

SEQ ID NO: 700100 - RNA, 19 nt, Artificial Sequence
  Description of Artificial Sequence: Synthetic oligonucleotide
uugauaccuugcuuguaua

SEQ ID NO: 700101 - RNA, 19 nt, Artificial Sequence
  Description of Artificial Sequence: Synthetic oligonucleotide
accggcucgaaguucugcu

SEQ ID NO: 700102 - RNA, 19 nt, Artificial Sequence
  Description of Artificial Sequence: Synthetic oligonucleotide
agcuucggacguuuuauua

SEQ ID NO: 700103 - RNA, 19 nt, Artificial Sequence
  Description of Artificial Sequence: Synthetic oligonucleotide
aaacuauuacagacaggaa

SEQ ID NO: 700104 - RNA, 19 nt, Artificial Sequence
  Description of Artificial Sequence: Synthetic oligonucleotide
guugauaccuugcuuguau

SEQ ID NO: 700105 - RNA, 19 nt, Artificial Sequence
  Description of Artificial Sequence: Synthetic oligonucleotide
cuaugagaguugugucaag

SEQ ID NO: 700106 - RNA, 19 nt, Artificial Sequence
  Description of Artificial Sequence: Synthetic oligonucleotide
auggccuuauuccgaagaa

SEQ ID NO: 700107 - RNA, 19 nt, Artificial Sequence
  Description of Artificial Sequence: Synthetic oligonucleotide
uucuaaccggcucgaaguu

SEQ ID NO: 700108 - RNA, 19 nt, Artificial Sequence
  Description of Artificial Sequence: Synthetic oligonucleotide
ccagauaaaagucugccaa

SEQ ID NO: 700109 - RNA, 19 nt, Artificial Sequence
  Description of Artificial Sequence: Synthetic oligonucleotide
gucuuaugugcacuuacua

SEQ ID NO: 700110 - RNA, 19 nt, Artificial Sequence
  Description of Artificial Sequence: Synthetic oligonucleotide
ugcuugaagggugcuauua

SEQ ID NO: 700111 - RNA, 19 nt, Artificial Sequence
  Description of Artificial Sequence: Synthetic oligonucleotide
ugcauccauaucccauuaa

SEQ ID NO: 700112 - RNA, 19 nt, Artificial Sequence
  Description of Artificial Sequence: Synthetic oligonucleotide
aagcuucggacguuuuauu

SEQ ID NO: 700113 - RNA, 19 nt, Artificial Sequence
  Description of Artificial Sequence: Synthetic oligonucleotide
uaagcuuguuaaagugcuu

SEQ ID NO: 700114 - RNA, 19 nt, Artificial Sequence
  Description of Artificial Sequence: Synthetic oligonucleotide
uacucaaguuuaggaaaac

SEQ ID NO: 700115 - RNA, 19 nt, Artificial Sequence
  Description of Artificial Sequence: Synthetic oligonucleotide
aaacgacuugggucuuccu

SEQ ID NO: 700116 - RNA, 19 nt, Artificial Sequence
  Description of Artificial Sequence: Synthetic oligonucleotide
ugcccugcagcuguaaaau

SEQ ID NO: 700117 - RNA, 19 nt, Artificial Sequence
  Description of Artificial Sequence: Synthetic oligonucleotide
ccuaucaacagaacaagaa

SEQ ID NO: 700118 - RNA, 19 nt, Artificial Sequence
  Description of Artificial Sequence: Synthetic oligonucleotide
auguaggcauguuaccgua

SEQ ID NO: 700119 - RNA, 19 nt, Artificial Sequence
  Description of Artificial Sequence: Synthetic oligonucleotide
ggaucaguuaaaggucagg

SEQ ID NO: 700120 - RNA, 19 nt, Artificial Sequence
  Description of Artificial Sequence: Synthetic oligonucleotide
ccucggaaugcauugcagc

SEQ ID NO: 700121 - RNA, 19 nt, Artificial Sequence
  Description of Artificial Sequence: Synthetic oligonucleotide
uucuaguucauuggacauu

SEQ ID NO: 700122 - RNA, 19 nt, Artificial Sequence
  Description of Artificial Sequence: Synthetic oligonucleotide
ucaucacaucacugaugug

SEQ ID NO: 700123 - RNA, 19 nt, Artificial Sequence
  Description of Artificial Sequence: Synthetic oligonucleotide
acgugugaaagaaaucgau

SEQ ID NO: 700124 - RNA, 19 nt, Artificial Sequence
  Description of Artificial Sequence: Synthetic oligonucleotide
ggcacuucaugucaguaaa

SEQ ID NO: 700125 - RNA, 19 nt, Artificial Sequence
  Description of Artificial Sequence: Synthetic oligonucleotide
cugugaucgugggaaacac

SEQ ID NO: 700126 - RNA, 19 nt, Artificial Sequence
  Description of Artificial Sequence: Synthetic oligonucleotide
ucuaaccggcucgaaguuc

SEQ ID NO: 700127 - RNA, 19 nt, Artificial Sequence
  Description of Artificial Sequence: Synthetic oligonucleotide
accguaccuaucaacagaa

SEQ ID NO: 700128 - RNA, 19 nt, Artificial Sequence
  Description of Artificial Sequence: Synthetic oligonucleotide
augcccugcagcuguaaaa

SEQ ID NO: 700129 - RNA, 19 nt, Artificial Sequence
  Description of Artificial Sequence: Synthetic oligonucleotide
acuuacuaggaagcaaguu

SEQ ID NO: 700130 - RNA, 19 nt, Artificial Sequence
  Description of Artificial Sequence: Synthetic oligonucleotide
acucuacauaaugaugaaa

SEQ ID NO: 700131 - RNA, 19 nt, Artificial Sequence
  Description of Artificial Sequence: Synthetic oligonucleotide
gauucuagaacaaguccau

SEQ ID NO: 700132 - RNA, 19 nt, Artificial Sequence
  Description of Artificial Sequence: Synthetic oligonucleotide
aguuuugggcacgugugaa

SEQ ID NO: 700133 - RNA, 19 nt, Artificial Sequence
  Description of Artificial Sequence: Synthetic oligonucleotide
ccuuagaagagcugugauc

SEQ ID NO: 700134 - RNA, 19 nt, Artificial Sequence
  Description of Artificial Sequence: Synthetic oligonucleotide
auugcucuguucaccucag

SEQ ID NO: 700135 - RNA, 19 nt, Artificial Sequence
  Description of Artificial Sequence: Synthetic oligonucleotide
aaggggauucauaucucuu

SEQ ID NO: 700136 - RNA, 19 nt, Artificial Sequence
  Description of Artificial Sequence: Synthetic oligonucleotide
uggcuuuaaaugucuucuu

SEQ ID NO: 700137 - RNA, 19 nt, Artificial Sequence
  Description of Artificial Sequence: Synthetic oligonucleotide
cuugaagggugcuauuacu

SEQ ID NO: 700138 - RNA, 19 nt, Artificial Sequence
  Description of Artificial Sequence: Synthetic oligonucleotide
ggagcacucccucggaaug

SEQ ID NO: 700139 - RNA, 19 nt, Artificial Sequence
  Description of Artificial Sequence: Synthetic oligonucleotide
agugaaguucuagguaaaa

SEQ ID NO: 700140 - RNA, 19 nt, Artificial Sequence
  Description of Artificial Sequence: Synthetic oligonucleotide
cugucgacccucugcuuac

SEQ ID NO: 700141 - RNA, 19 nt, Artificial Sequence
  Description of Artificial Sequence: Synthetic oligonucleotide
accuaucaacagaacaaga

SEQ ID NO: 700142 - RNA, 19 nt, Artificial Sequence
  Description of Artificial Sequence: Synthetic oligonucleotide
aucucuuaagacacugaau

SEQ ID NO: 700143 - RNA, 19 nt, Artificial Sequence
  Description of Artificial Sequence: Synthetic oligonucleotide
agcacucacagcugcuuua

SEQ ID NO: 700144 - RNA, 19 nt, Artificial Sequence
  Description of Artificial Sequence: Synthetic oligonucleotide
gaagcuucggacguuuuau

SEQ ID NO: 700145 - RNA, 19 nt, Artificial Sequence
  Description of Artificial Sequence: Synthetic oligonucleotide
agagggcuagauguaggca

SEQ ID NO: 700146 - RNA, 19 nt, Artificial Sequence
  Description of Artificial Sequence: Synthetic oligonucleotide
ucugucuuaugugcacuua

SEQ ID NO: 700147 - RNA, 19 nt, Artificial Sequence
  Description of Artificial Sequence: Synthetic oligonucleotide
ugucaagccugauguugau

SEQ ID NO: 700148 - RNA, 19 nt, Artificial Sequence
  Description of Artificial Sequence: Synthetic oligonucleotide
guuuugggcacgugugaaa

SEQ ID NO: 700149 - RNA, 19 nt, Artificial Sequence
  Description of Artificial Sequence: Synthetic oligonucleotide
guugauaaaguugcagaau

SEQ ID NO: 700150 - RNA, 19 nt, Artificial Sequence
  Description of Artificial Sequence: Synthetic oligonucleotide
gagcacucccucggaaugc

SEQ ID NO: 700151 - RNA, 19 nt, Artificial Sequence
  Description of Artificial Sequence: Synthetic oligonucleotide
aguuuccuuagaagagcug

SEQ ID NO: 700152 - RNA, 19 nt, Artificial Sequence
  Description of Artificial Sequence: Synthetic oligonucleotide
cguuaaugguccaggagug

SEQ ID NO: 700153 - RNA, 19 nt, Artificial Sequence
  Description of Artificial Sequence: Synthetic oligonucleotide
uuggcacuucaugucagua

SEQ ID NO: 700154 - RNA, 19 nt, Artificial Sequence
  Description of Artificial Sequence: Synthetic oligonucleotide
cacugaugugucugucgac

SEQ ID NO: 700155 - RNA, 19 nt, Artificial Sequence
  Description of Artificial Sequence: Synthetic oligonucleotide
ccuuauuccgaagaauguc

SEQ ID NO: 700156 - RNA, 19 nt, Artificial Sequence
  Description of Artificial Sequence: Synthetic oligonucleotide
uggccuuauuccgaagaau

SEQ ID NO: 700157 - RNA, 19 nt, Artificial Sequence
  Description of Artificial Sequence: Synthetic oligonucleotide
acucaauucccaggggaaa

SEQ ID NO: 700158 - RNA, 19 nt, Artificial Sequence
  Description of Artificial Sequence: Synthetic oligonucleotide
uggacccaucaaauucauc

SEQ ID NO: 700159 - RNA, 19 nt, Artificial Sequence
  Description of Artificial Sequence: Synthetic oligonucleotide
cguaccuaucaacagaaca

SEQ ID NO: 700160 - RNA, 19 nt, Artificial Sequence
  Description of Artificial Sequence: Synthetic oligonucleotide
auguuaccguaccuaucaa

SEQ ID NO: 700161 - RNA, 19 nt, Artificial Sequence
  Description of Artificial Sequence: Synthetic oligonucleotide
uccuacucuuucuguuuua

SEQ ID NO: 700162 - RNA, 19 nt, Artificial Sequence
  Description of Artificial Sequence: Synthetic oligonucleotide
augcauccauaucccauua

SEQ ID NO: 700163 - RNA, 19 nt, Artificial Sequence
  Description of Artificial Sequence: Synthetic oligonucleotide
uaaccggcucgaaguucug

SEQ ID NO: 700164 - RNA, 19 nt, Artificial Sequence
  Description of Artificial Sequence: Synthetic oligonucleotide
augccacccuguauagagg

SEQ ID NO: 700165 - RNA, 19 nt, Artificial Sequence
  Description of Artificial Sequence: Synthetic oligonucleotide
aagugcuugaagggugcua

SEQ ID NO: 700166 - RNA, 19 nt, Artificial Sequence
  Description of Artificial Sequence: Synthetic oligonucleotide
aucgugggaaacacaggga

SEQ ID NO: 700167 - RNA, 19 nt, Artificial Sequence
  Description of Artificial Sequence: Synthetic oligonucleotide
ggcuuuuaauaaccgaggu

SEQ ID NO: 700168 - RNA, 19 nt, Artificial Sequence
  Description of Artificial Sequence: Synthetic oligonucleotide
caguuuugggcacguguga

SEQ ID NO: 700169 - RNA, 19 nt, Artificial Sequence
  Description of Artificial Sequence: Synthetic oligonucleotide
aggcauguuaccguaccua

SEQ ID NO: 700170 - RNA, 19 nt, Artificial Sequence
  Description of Artificial Sequence: Synthetic oligonucleotide
cuucccacguaauaguguu

SEQ ID NO: 700171 - RNA, 19 nt, Artificial Sequence
  Description of Artificial Sequence: Synthetic oligonucleotide
caccaguucucugcccagg

SEQ ID NO: 700172 - RNA, 19 nt, Artificial Sequence
  Description of Artificial Sequence: Synthetic oligonucleotide
uugugucaagccugauguu

SEQ ID NO: 700173 - RNA, 19 nt, Artificial Sequence
  Description of Artificial Sequence: Synthetic oligonucleotide
gccugauguugauaccuug

SEQ ID NO: 700174 - RNA, 19 nt, Artificial Sequence
  Description of Artificial Sequence: Synthetic oligonucleotide
ucgcugagguguucucuuc

SEQ ID NO: 700175 - RNA, 19 nt, Artificial Sequence
  Description of Artificial Sequence: Synthetic oligonucleotide
cucuuaagacacugaauuu

SEQ ID NO: 700176 - RNA, 19 nt, Artificial Sequence
  Description of Artificial Sequence: Synthetic oligonucleotide
uccccucguuggcacuuca

SEQ ID NO: 700177 - RNA, 19 nt, Artificial Sequence
  Description of Artificial Sequence: Synthetic oligonucleotide
gagguccauuucucaucac

SEQ ID NO: 700178 - RNA, 19 nt, Artificial Sequence
  Description of Artificial Sequence: Synthetic oligonucleotide
cacucccucagaaugcccu

SEQ ID NO: 700179 - RNA, 19 nt, Artificial Sequence
  Description of Artificial Sequence: Synthetic oligonucleotide
gguccaggaguguuuuaga

SEQ ID NO: 700180 - RNA, 19 nt, Artificial Sequence
  Description of Artificial Sequence: Synthetic oligonucleotide
ucauggcuacaguggcuuu

SEQ ID NO: 700181 - RNA, 19 nt, Artificial Sequence
  Description of Artificial Sequence: Synthetic oligonucleotide
ccgcauucccugcagggag

SEQ ID NO: 700182 - RNA, 19 nt, Artificial Sequence
  Description of Artificial Sequence: Synthetic oligonucleotide
acguuuuauuagaggucca

SEQ ID NO: 700183 - RNA, 19 nt, Artificial Sequence
  Description of Artificial Sequence: Synthetic oligonucleotide
uggcugugaucgugggaaa

SEQ ID NO: 700184 - RNA, 19 nt, Artificial Sequence
  Description of Artificial Sequence: Synthetic oligonucleotide
agaaaucgauuugguugau

SEQ ID NO: 700185 - RNA, 19 nt, Artificial Sequence
  Description of Artificial Sequence: Synthetic oligonucleotide
cccucguuggcacuucaug

SEQ ID NO: 700186 - RNA, 19 nt, Artificial Sequence
  Description of Artificial Sequence: Synthetic oligonucleotide
gcugugaucgugggaaaca

SEQ ID NO: 700187 - RNA, 19 nt, Artificial Sequence
  Description of Artificial Sequence: Synthetic oligonucleotide
acaugccacccuguauaga

SEQ ID NO: 700188 - RNA, 19 nt, Artificial Sequence
  Description of Artificial Sequence: Synthetic oligonucleotide
cacuuacuaggaagcaagu

SEQ ID NO: 700189 - RNA, 19 nt, Artificial Sequence
  Description of Artificial Sequence: Synthetic oligonucleotide
guauagaggcaaugcguuu

SEQ ID NO: 700190 - RNA, 19 nt, Artificial Sequence
  Description of Artificial Sequence: Synthetic oligonucleotide
gcaacugaugguuaccauu

SEQ ID NO: 700191 - RNA, 19 nt, Artificial Sequence
  Description of Artificial Sequence: Synthetic oligonucleotide
gcaccgcauucccugcagg

SEQ ID NO: 700192 - RNA, 19 nt, Artificial Sequence
  Description of Artificial Sequence: Synthetic oligonucleotide
gggugcuauuacuucuaga

SEQ ID NO: 700193 - RNA, 19 nt, Artificial Sequence
  Description of Artificial Sequence: Synthetic oligonucleotide
ggaagcuucggacguuuua

SEQ ID NO: 700194 - RNA, 19 nt, Artificial Sequence
  Description of Artificial Sequence: Synthetic oligonucleotide
ugucgacccucugcuuaca

SEQ ID NO: 700195 - RNA, 19 nt, Artificial Sequence
  Description of Artificial Sequence: Synthetic oligonucleotide
auggacccaucaaauucau

SEQ ID NO: 700196 - RNA, 19 nt, Artificial Sequence
  Description of Artificial Sequence: Synthetic oligonucleotide
gguuaccauugcucuguuc

SEQ ID NO: 700197 - RNA, 19 nt, Artificial Sequence
  Description of Artificial Sequence: Synthetic oligonucleotide
guuaaugguccaggagugu

SEQ ID NO: 700198 - RNA, 19 nt, Artificial Sequence
  Description of Artificial Sequence: Synthetic oligonucleotide
gggaaauuccuggcucaug

SEQ ID NO: 700199 - RNA, 19 nt, Artificial Sequence
  Description of Artificial Sequence: Synthetic oligonucleotide
caguaaagucuaugagagu

SEQ ID NO: 700200 - RNA, 19 nt, Artificial Sequence
  Description of Artificial Sequence: Synthetic oligonucleotide
cauggcuacaguggcuuua

SEQ ID NO: 700201 - RNA, 19 nt, Artificial Sequence
  Description of Artificial Sequence: Synthetic oligonucleotide
auccccucguuggcacuuc

SEQ ID NO: 700202 - RNA, 19 nt, Artificial Sequence
  Description of Artificial Sequence: Synthetic oligonucleotide
ggcacgugugaaagaaauc

SEQ ID NO: 700203 - RNA, 19 nt, Artificial Sequence
  Description of Artificial Sequence: Synthetic oligonucleotide
aaaucccagugaaguucua

SEQ ID NO: 700204 - RNA, 19 nt, Artificial Sequence
  Description of Artificial Sequence: Synthetic oligonucleotide
gcaaugcguuucaagggga

SEQ ID NO: 700205 - RNA, 19 nt, Artificial Sequence
  Description of Artificial Sequence: Synthetic oligonucleotide
caaugcguuucaaggggau

SEQ ID NO: 700206 - RNA, 19 nt, Artificial Sequence
  Description of Artificial Sequence: Synthetic oligonucleotide
ggcugugaucgugggaaac

SEQ ID NO: 700207 - RNA, 19 nt, Artificial Sequence
  Description of Artificial Sequence: Synthetic oligonucleotide
gaaagccuggaggaagcuu

SEQ ID NO: 700208 - RNA, 19 nt, Artificial Sequence
  Description of Artificial Sequence: Synthetic oligonucleotide
gacuugggucuuccuugua

SEQ ID NO: 700209 - RNA, 19 nt, Artificial Sequence
  Description of Artificial Sequence: Synthetic oligonucleotide
ccucguuggcacuucaugu

SEQ ID NO: 700210 - RNA, 19 nt, Artificial Sequence
  Description of Artificial Sequence: Synthetic oligonucleotide
cccagugaaguucuaggua

SEQ ID NO: 700211 - RNA, 19 nt, Artificial Sequence
  Description of Artificial Sequence: Synthetic oligonucleotide
ggggcaccgcauucccugc

SEQ ID NO: 700212 - RNA, 19 nt, Artificial Sequence
  Description of Artificial Sequence: Synthetic oligonucleotide
cucgcugagguguucucuu

SEQ ID NO: 700213 - RNA, 19 nt, Artificial Sequence
  Description of Artificial Sequence: Synthetic oligonucleotide
ccguaccuaucaacagaac
